United States Patent Application Publication US 2010/0064393 A1 - sequence listing, part 4

SEQ ID NO: 3625 - DNA, 2793 bp, Bacillus licheniformis
atgagctggtttaataaaatgttcagcctgtttttaggcgatgatgaagataatgaaaaacaaaaaaagcacatagacgaatttgaggcggattcatcttcagaggacgaagagatgccgcaaataaccgacgcaaaagtcgtatatgaatatccaaaagggaaattccgctttccggttatacctgatcaaaacacgcggccgcgggaaaaggacgacagccgcgaacaaaggacccgccgcccggcgagccgatattcagcttctcagccgaaacccggcaattcatatcattatgaagagaaagcggcggcgaaaaaaccttttaggccgtccgtcatcccatcaccggtttacggctttcatgagcagaaaagagccaagccggaaaatcatacatatcgtgcaaaaaaacaaactgaagcgcgtgtcacgctgtttaacgaagaaattgaaaaagagcagaagtctgcagaacataagcagccggtacgagaagaagcttccgtgcaaactgaaaagaacggccgtccgctgatcaaaagcgagagccgcaatcctgcattgcgcgccgaattcgaagatgtcccgcaggcatccacggagattccaaaagaaacggaaatccgtccagagcgaatgacagaaggcgcgggactcgcagaggaaaaagcgctgcggcatgaatccgaacgaacagaagcacctgtctcagcgcatattctggaagaaacggaagtccgtccagagcgaatgacagaaggcgcgggactcgcagaggaaaaagcgctgcgaaatgaagctgtagaagagaccgcctccgcatcacaaaacataacggaggaagacgcaatccccgctgagcaaacaccggaacaaatcgaaaagcttttggataagattgaggaaaccggagaagagatggtactggcagaggacgcagaagccgccacggaagaacaagggaagacttacggttcgggcaaaacgcatcccgacccggaagcttcagttccggaagagccgcacactcatggccgcgcctctgaaataaccgtccagagcgatgaatcttcccataggacagattcaaacaccccggctgacgctcttgaagaaacaagcggaagccgccagactggctggagacaagagcaggcgtcatgttcaccggaaacggcagcgccaagcgcgggtgaacccgaaagcaggcaagagaaccgggagactacaaggataaacgaggatcggccggaagctccgcggaagcgggaagcaggagccgctccgggatcgaagaaaggctctgttccgtttaatgtcatgatgtttgcctcagataaacaaaaagaaaaagcgcctcaagggtatcagttcccgaatatgtctttgcttgatgtgccgccggcgcaaaagcaggatgatcaggactggatacacgagcagcgggagctgttggacgtcacgcttgagaacttcaatgttaaagcaaatgtcgttcatgtcacccaagggccttctgtgacaagatttgaagttcatcctgaacccggagtgaaagtcaacaaaattacaaatctgtcagatgatattaaactcagcctgtcagcgaaagatattcggatcgaggcaccgatcccgggaaaaaatacgatcggaattgaagtgccgaatctgcacagcaaaatggtttatttacgcgaaatgatcagaagttcggaatttagaacgaatccgtctcctctgacagcagctctcggactcgacatatccggaaagcccgtcgtggctgatctgaaaaaaatgccccacggtttgattgccggtgctacgggatcaggaaaaagcgtatgcatcaacacgatcttagtaagcctgctgtttaaagcgtcgcctagggatgtaaagcttctgcttatcgatcctaagatggtggagcttgctccgtataataatattcctcatctcgtcagtcctgtcatcacagatgcaaaagcggcaaccgccgcattaaaatgggttgtcgaggaaatggaacggcgctatgaattatttgctcattccggtgttcgggaaattgagcgttttaatgaaaaagtccgggaacagaacatgggtgaaaaacttccttatcttgttgtcgtgattgatgaacttgccgatttaatgatggtcgctccgaatgaagtggaagagagcatctgccgaatcgcacaaaaagcaagagcgtgcggcatccatcttctgattgcgacgcagcggccttcagttgatgtcattaccggcttgattaaagccaatatcccaacaagaatagcgttttctgtttcaagcgctgtcgattcaagaacaattatcgatatggcgggagctgaaaagcttcttggaaaaggggatatgctgttcttggagaatggttcaggcaaaccggtccgcctgcaaggcaactttgtgtccgaccgggagattgatcgtgtcgtttcacatgtcagacggcagcaggagccgaactatttatttgaacaggaacaattggtcagacaaaatccggccggatttgaccacgatgaactgtttcttgaagcgtgcgaatttgccgtggaacaaaacagcgccagcacttcaagcctgcagcggcgcttccgcatcggctataacagagctgccagattaatcgatatgatggaaagggaaggcatgatttctgaagcgaaagggagcaagccgagagaagtcctgattacaaaggctgatctggaacagttaatagaaagtagttcacttttcggctaa

SEQ ID NO: 3626 - DNA, 606 bp, Bacillus licheniformis
atgaacgcattttataatccagaaggcgtaggcgatacgctgctcatctcattgaacgatattccacgtgaagagatcgcttttgagcggtacggagacgtcgtgaaaatttttcataaagacacaaaggaaacagcaggctataacatttttaatgcctcctcatatttgagcattgaggaaagcggagctattgcgctttccgaatcctttgtccaggatgtgaatgaaattctggtccgcaacggtttgaaagacgagctgaccgtcgacctttctccgaagtttgtggtcggatatgttgaagaaaaagaaaagcatccgaatgccgataaattaagtgtttgcaaagtgaatgtagggagcgagacgctgcaaatcgtctgcggagctcccaatgttgaagccggccaaaaagtcgtcgttgccaaagtcggcgccgtgatgcctagcggtatgatcattaaagatgcggaacttcgcggagtggcgtcaagcggcatgatttgttctgccaaggagctgaatctcccagacgcgccgaaggaaaaaggcattcttgttcttgacgacggccgtaaagcaggagaagcctttacattttaa

SEQ ID NO: 3627 - DNA, 810 bp, Bacillus licheniformis
atgaaaatgacctcaaggaaactttccgatatattaaaaaaacgtttgcaaaatgacagctggtcctttcatttcgacagggaaaaggacagcttgagaatcgaagataaaaacactggaaaaggcattacactcgagctcccggggatcatcgcgaaatgggagcagaaaaaagatgatgcgattgacgaagtcgtctattatactgaggaagcgctcaacgccatgaaaggccagtcgcaggaaatggaaggacgggaaagcctgatctatcccgtcatccgctcaacttcctttcccgagaagtccagcgcaggcgttcccttggtttttgacggccacacggctgaaacacgaatttactatgcgctcgaccttggcaacacataccgtctgatcgacgaaaaaatgcttgaaaaagagggctggacaaaagaaaggattcgggaaacagcttcctttaaccttcgctcgctccagaccgttgtcaaagaagacgaagtcgcaggcaatcacttctactttttcagagcgaatgacggctatgacgccagcagggtgttgaacgaatcgattctcgcagagtatgagaaaaacgcggaagggaccctcgccgtgtcaattccgcaccaggatgtgctgattattgccgacatccgcaataatgccggatacgatatactcgggcgaatgtcgatgagcttttttgcaaacggcacagtgccgatcactgcgctttctttcctgtatgaggatggaaagcttgaaccgatctttattctggctaaaaaccgccctaaaaagaaatga

SEQ ID NO: 3628 - DNA, 321 bp, Bacillus licheniformis
atgaaaacgatcgagacgaatgaagaattgcaaaaagttgtgaaagacgatttatccttgttgatgttttcggctgactggtgtccggactgccgttttgtagaaccttttttgcccgagcttgaagcgaactatccggaatttacattctattatgttgaccgcgacaaatttatagacacgtgcgcggagtgggatattttcggaatcccaagcttcctcgtatttaaagaaggaaacgaaatcagccgctttgtcagcaaagaccggaaaacgaaagaggaaatcgagcaatttttgaccgattcactgaataagtag

SEQ ID NO: 3629 - DNA, 447 bp, Bacillus licheniformis
atggaatttatcgtttatcttgccggagaaatacatagcaattggcgcgaagaggtgaaggaaaaagcaaaatcgctcaagctgccgatcacatttgtcggaccgatggaaaatcacgagcgctccgacaacatcggtgaagaaattatgggcaagcaggctgattcaatcgcaaaggatgatgcagcctcggatttgaacaattttagaacttccgttttaatgaacaaggcggatgttgtcatcgctcttttcggggaaaaatacaagcaatggaacacggcaatggatgcatcatacgcgatcgccaaaggcaaaccgctgatcatcatccgacccgaatcactccatcatccgttaaaagaactgtcaaacaaagcgaacattactgtggaaactgtaaatcaggcaattaaatcgttgtcatacgtatttgaaagccggtag

SEQ ID NO: 3630 - DNA, 1074 bp, Bacillus licheniformis
atgaatcaggaaacgagaacgctttttcaaacgcttacggagctccccggcgccccgggaaacgaacatcttgtccgtcgcttcatgaaaaaagagcttgaaaaatatgctgatgagatcatccaggacagacttggaagcgtgttcggcgttaaacatggacctgaaggcagtccaaaaattatggtggccggccatatggatgaagtggggtttatggtcacatcaattacagataacggcctgcttcggtttcaaacgctgggcggctggtggagtcaggttttattggcccagcgggtggaaatccacacggacaacggaccgatccccggcgtcatcgcgagcacgcctcctcatcttttgacagatgagcagaggagacgtccgatggatatcaaaaacatgatgattgatatcggggcggatgacagggaagatgccgaacgcatcggtgtcaaaccaggccagcaaatcgtaccgatctgtccgtttaccccgatggcaaatgaaaagaagatccttgcgaaagcatgggataaccgctacggctgcggactcagcattgaattgctgaaagaactgcaaggaacagaacttccgaacaatctttactcaggtgcgaccgtccaggaagagctcggaacaagaggcgcgcaaactgcggccaatatgatacagcctgacttgtttttcgcgcttgatgcaagtccggcaaacgattcgagcggcgacaaaaatcaatttggccagcttggcaaaggagtgctgttgaggattttcgaccggaccatggtgatgcacagcgaaatgagaaattttgtgctggatacggcagagacaaatgacatcccgtatcaatattttgtttctccgggaggaaccgacgccggccgtgttcacatctcaaatgaaggcgttccttcggccgtgattggcatttgttcaagatacatccatacatctgcttccattatccacgttgatgactaccttgctgcaaaagaattgctgatcaagcttgtcaaagcttgcgacagttctgccgtccagtcgattttgcgaaatgagtga

SEQ ID NO: 3631 - DNA, 315 bp, Bacillus licheniformis
atgaaactgcgccactttcttattggagccggcatcggcattgccgcggccgtcgttgtcaaacaatatgtcatgcagccttacatttcttctgaaaaagcgctgcgcatcgtcaagtccgcttttaaacagagaggcccgatcgacggttcatggatatataccgttccggaagcctataccgtaaacggcgaaaccgtcatggtgtacaaaacaggcattacgcgttccgctttcggagagctcgaacagtacgaagtcatggttgatgcaaaaacaggcatgatcgtagatgtaattgatacagcagcatag

SEQ ID NO: 3632 - DNA, 1698 bp, Bacillus licheniformis
gtgagccacaataaattaaatgaacaagtgatcgagacgcggttaagaggatttgaagtccttgcgactcccctgttgaacaaaggggttgccttccctccggaggaaagggatgctctcggcttgacaggattgcttcctcccaaggtgctgacgcttgaagaacaggcaaaacgggcgtataaacagttccaatcacagcctgatgatttgagcaaaaacgtctatttaacggcgcttcatgatcgaaatgaagtgctgttctacaggcttctgaacgaccatatgacagaaatgctgccgattgtctataccccgactgtcggaacggcaatacagcaatacagccatgaatacagaaagccgcgggggctgtttttgtcggttaatgaccctgaaggcatgaaaacggcatttgaaaatctggccgctaaaagaagccggatcgatttgatcgtggccactgatgctgaaggaattctcggaatcggggattggggagtcggcggcatcgccatttcgatcggaaagcttgctgtttatactgcagctgcgggcatcgatcctaacagggtcctgccagtagtcattgatgcggggacgaaccaggaaaggcttctgaacgatccgctttatgtcgggaatcagcattcgaggatcaggggcgagcgttatgaatcgtttattgatcaatacgttcaaatcgcaaccgagacgtttccgggcgttttgctgcactgggaagatttcggaacgcagaacgcgcgtcagattttgaaaaaatacaaagacaaaatttgcacctttaatgatgacattcaaggcacaggagctgttaccctcgcagcggtgcttgcggccgttaaaatatcaaaaatgccgctgaaggatcagaaagtggtcatatttggagcggggacggccggaatcggcaatgctgagcaaattcgcgccgcactcgttcaagagggagtgtcggaagaggaatcataccgccgtttttggtgtgttgatcggaacggtttgctgacagatgatatgaacgacttgcaggacattcaacaaccgtatgcaaggcctgctgacgaggtaaaagacttcagccggaacggcccgggggatgcaattgatctgctcgaggtggttaaaagagtgcagcctaccattttgattggaacctcgacggtatcgggcgcatttacagaggaaattgtaaaagaaatggcaaagcatgtgaaacggccggctatattcccgatgtccaatccgacgccgttatctgaagcaaggcctgaagatttgatcaattggacggaagggcgggcgctcgtcgccacaggaagcccgtttgcgcctgtggaatacagcggcacccgttatgcgatcggccaggcgaataatgcctttgtattccccggccttgggctcggaacgctcgtatcaaaagcaagactgattacggacaacatgttttacgccagcgcggctgcgatcgcgggtatggttgatacgggccggcccggcgccgcgcttcttccggaagttgaggatttgcgcacggtttccgcaaccgtggcaacggctgtcatcaaagcagccatagaagacggagttgcagaaaacgagccggacgatgtgattcaggcggtgcaggatgcgatgtggcatccggtctaccggccgattcgcgccatataa

SEQ ID NO: 3633 - DNA, 846 bp, Bacillus licheniformis
atggaaactttaacaatcggacgaatcaagctgacatggctgaacggaggcgtcacgcacatggacggaggcgccatgttcggcgttgttcccaagccgctttggtcaaaaaagtattacgccaatgagaaaaatcaaatcgaacttagaacagatcctatactagttcagaaagacggcacgaacctgctgatcgattccggtatcgggctcggcaaactgacggataagcaaaaacgaaattacggagtcaccgaagaatcgtcaattgatgactcgttaaaagcactcgggctctcaacggaagatatcaaagccgttttgatgactcatctccattttgaccatgcatgcggattgacgcgctatgagggagaaagccttgtttccgtgtttccaaatgcggcgatttacacgtctgcaatcgaatgggaagagatgagaaacccgaatatccgctccaaaaatacatattggaaagagaactgggaagcggttcagcatcaagtgagaaccttcgacgagaagcttgaagttttgcccggaatcacgatgcatcatacaggcggccacagcgacggccattccgtgatcgttctcgaagatgccggtgaaacggcccttcatatggctgacattatgccgacgcacgcccatcaaaatcctctctgggtgctggcgtacgacgattatccgatgacatcgattgccgcgaagcaagcatggcaggcgaaggccgccgagaaaaacgcctggtacattttttaccacgatgccctttacagagcattaaaatgggatgaaaacggcgatattgcagagtcagtaaaaagagaaagccgctag

SEQ ID NO: 3634 - DNA, 642 bp, Bacillus licheniformis
atgcgaatgcgtcacaagccatgggcggatgactacctggctgaaaactctcatattgtgatcagcgagccgtctcaatacaaagggaaatggcattccgtttttggaaatgacaacccgatccacatcgaagtaggaaccggaaaagggcaatttatttcaggaatggccctgcaaaacccggatgtaaactatatcggaatcgaactatttaaaagcgtcatcgtaaccgctgttgataaagtaaagcagacagaggcgccgaatgtaaagctcttgaacatcaatgccaatatgctttcagatgtttttgcagacggggaagtcgaccgggtctatttgaatttttccgacccgtggccgaaaaagcgccacgaaaagcgccgtctgaccaatcatgcgttcttgaaaaagtatgagcaggtgctcggaggcaagggagcgattcattttaaaaccgataaccgcgggttgtttgagtactccctcaccagtttttccgaatacggactcgttttgacattcgtcagccttgacctgcatcaaagcgattttgaaggaaatgtgatgaccgaatacgaagaaaagttcgccgctaaaggccagccgatctacagagtcgaagctgaatggcgaacataa

SEQ ID NO: 3635 - DNA, 279 bp, Bacillus licheniformis
atgggcttaaatcagcaaaatcagattcatctattaaaagacattctctcagaccatcaagcagactgcaccggaaccgtcgctgaatgcgaacagatggagcggattatcaagtctttaatggcaaacacgaatcttgacgccggcttgaaaggcgttttggaagacatttatttgtacagccagaagggaagatcttccgcttcgatcaacaaccacattcaggagcaccaggattatctcacgcaatgggtggaagatatcgactcattttcatga

SEQ ID NO: 3636 - DNA, 815 bp, Bacillus licheniformis
ttgaaaatcgatatgaactggttgggacaattactaggtagcgaatgggagatttcccccgcaggaggagctacaggagacgcatattatgcagaacataatggacagcagcttttttaaagcgcaacagctctccttttttggctgtcctgtccgcggaaggaattgttcctaagctcgtttggacaaaacgaatggaaaacggggatgtgattacggcacagcactggctcaagggaagagagctgaagccgaaggatatgaacagccaggcggtggctgagatgcttcggaaaattcacagctccaaagagcttttggatatgctgaagagactcggcaaacagccttttcagccaagctctgtaatcactcaattgaagcagtttatccaggcccggcaatatccgataccgcagctggaccaggcccttttgtatctggagcaccatcttgaagatgtacagtccggagaaaaggtcgtctgtcactgcgatgtcaatcataataattggcttcttacagatcagaaccagctttatttaatcgattgggatggagcgatgattgcagaccccgcgatcgatctggggccgcttctttatcattacgttgaagagcgggaatggggaagctggctcgaacgctacggctcttctcttacagacaatctcaggctgagaatggcctggtacgtattggcggaaaaagcaatgacgacactctggcaaaaagcgaaaggcaatcaggaaggctttcaccaggggctggaacagctgcatgaattaatggagcgtctcgccaggtcctcatga

SEQ ID NO: 3637 - DNA, 2133 bp, Bacillus licheniformis
atgccgggtatcagccgcccttttgaagcttatctcgatgaaatgagaacgatcactgttttagttccgaagagccgtgcgtcaagctgcagtcctccttttctgcttgaagatgatcaaggagagaggatagagctttcggtaaaagcgcaggtggagcttgaggaacaattcaagtatgttcttgaaagcagctgcaccgttccattcggaagagttcacaaagtatgctgtgaagaaagcgtctggacagacctgcaaatcggctctgttacgagaagcgcggcgtttgacaaggcttttttttatgacggccgcctcggcgctttttattcaaaaggaagtactttatttaaggtatgggcgccgaccgcgagtgcggcaacgatcaagctggaggaccctgattcgcttcaaacaaatacttttcaaatgatgcgcagaaaaaagggcgtttttgaggtaacggtcgaaggcgatctaaacggctggtcctatttatatgagctttatgtaaatgggaagccgttattgacagtcgatccttatgcaaaagccgttacggcaaacggtgaaaaaggcgttgtattagatccagaggaagtcaaggtggaaaaacaccgcgctccaagacttcacagtccgtgcgatgcggttatatatgaggttcacatccgcgatttctcgattcatgaagacagcggtatgcgccataaaggcaaatatgttgcttttactgaggacggaactgaaacatccggcggcttctcaacgggaatcgcctatttgaaagagctcggcgtcacccacatcgaggttctgccctttcacgattttgccggagtggatgagctgtctcctgatcaatcttataattggggctataaccccctccattttaatgccccggaaggaagttattcgctcgatccgcagaaccccaaatgcagaatcaccgagctgaaaacgatgattcagtcgctgcacaaacacggcttctccgtgattatggatgccgtatataatcatgtgtacaagagggaaacgtccccttttgaaaaaacggttcccgggtattttttcagacataatgaatacggttttccatccgacggaacaggcgtcggaaatgatattgcttctgagcggctgatggtgcgaaaatatattctcgattctgtccgctattggctggaagaatatgatgtcgacggcattcgttttgatttaatgggcattcttgatattgaaaccgtccgccaaatcagtacgcttgccgagaatgtaaagccgggcgtgcttctgttcggagagggctgggatttaaataccccgcttgacagcgggcaaaaagcaacattgcaaaatgccggaaaagttccggcggtcggcttttttaatgatcggttcaggaacgcagtcaaagggagtacattcgagcttagcgaccgcggatatgctttaggggacaccggaaaaaaagcggcgcttcagcacggtattgccggttcacccggattcttgcagccggcacagtcaatcaattatgtggaatgccatgacaatcatacattttgggataaaatggccttatgttttgaagaagatgcggacactaaacggcttaggcaaaggctcgcggtgtcgatcgtcctgctttcgcaaggcgttccatttcttcacgccgggcaggaattttgccgaacaaagaatggggacagcaacagctacaggtccggagatgacatcaataagcttgattgggaaaagcgtgcggagctttgcgaggatgtcgaatatgtgcgccagctgatccggctgcgaagaagccatcccgcttttcgtctgcaaaaagaggaagaagtcaaggagcatctttcttttatggacggtacaggagaggtaacggcctacaagctgaagaacattgcagcaattgatccctggaacgaaatcatagtggtgcattgtccgtttgcaaaaaaggagacgcttaagctgcccgatcagaaacagtacttgctgcactgcgatccttttacgttcttcaatgggaaggttcaagcggaaaaaaggcttcggctgaacggcatcgggacctatgttttatacgaaccaaaagggattttttag

SEQ ID NO: 3638 - DNA, 921 bp, Bacillus licheniformis
atgagcgattggtatatcatcataaatccaaaggcgggaaactcgacggccttcagagcatggaaatcattgcagaaagacctccaaaaggcaaatatatcgtaccgctcgtttatgactcagcatcccgggcatgctgaggtgttggcaaggcaaatatcaacgatgcaggatgacaggctgaagcgtcttctggtgatcggcggggatggaaccgtccatgaagtgctcaatggtttagtcagcttgcgggacattcagctgagcgtcatcccgtcaggcataagcaatgattttaaacgcggctttggcgtgaaaaaatcgaatgtcatcaaagaaatgaagcgaaaaggccaatcgctgacccggacctatgccctcggaagctttcatacgaaagacagtgaaaacgaactttattttgcgaatcatctcagcctcggatttgatgcatgcaccgccaaaaagatgtcagctttgccgaaatggacggctgctctcaggctgaatcatttgattcatccgctgattttctttgtcacggcgtttacgtttaaaccgtttgttctttcgtatgaaaacggggatgacaagcgtacgtttaaaaaaatctggtttgcgtcggtttcaaatcatccttactatggcggaggaatgaagattgcaccgaatgcgaatccgcgggatgagcttttagacgtgatcattattgaagacctgcccgtcttgaaaaaagccggcctcttgtttgcgatgatattcggcaaacacgtcggcaaaaacggtgttacggcatttaagacgaaagacatctattttcatacgaatgagcgggtgctctttcaagcggatggagaggtgatcggctgggcgcccgttttcattaaaacagggactgaatcccttcgattaagagcataa

SEQ ID NO: 3639 - DNA, 942 bp, Bacillus licheniformis
atggcacagattattaaaatacaggactgtatttcaaggtatgaacaagatccttatcattatatcaaccagtttatccgcttgaaaaagcagcgctggcagtcaattaaagagatggctgaaaaaaagaaagaaagctttcatcacgataaaggagccgccggtgatgaaacgtttggaaaaagaaagaatacatttacattaaagagaaaaaaagaagcatccgatattaataaaggaaaagaagccgatgaatggtttaacggactggacggagaaacggatgaaagcttgatcgcaagaattcctgcggcaggggaagaactcgtaccgttttttaaggaatacgtgtacgagtttcagctgaaatgggcaagctcgacaatctctgacatatccaggctttcccgggaaataaaaagcgataaaatcctgcacattttggcacagcagctcccggattcatatttcatcatgtatcggccggtgctgcaggtgaatcaggctgcggtagagctcagcgtcttgattctcactccccttgaaatctactgtatgtcatttcttgaaggtgagagggacagcgcatttatcggttccaaagatcgtttttggaaagaaaaaacggtaaggggcaaggaacggtcattgttaaatccggctgtcgagctcctcaggacaggcaaggttctttccggtttgttaaagggatcggggattgaactgcctgtgcgcaaagtcatcgtcagccgtacatcgtacatcgattatccggaacctccctacggaatcggcatttgcgacaagagacactggaaagagtggctggagaaacagcaaaaaaacttcgccccgattaaaagccagcagctgaaaacggcgaaaattcttttgtcgcacggcgtctccgactcggtgcggagacaggaatggctgagctga

SEQ ID NO: 3640 - DNA, 606 bp, Bacillus licheniformis
atgtcagtcaaaccgcattactttattggaattccaattccggcggagcttagtgatccgctttatcaaacggtcagcagccgtccggaattttcttttcatagatgggtgcatcctttggactaccacatcaccctcgtgttcctcggctctgctgaaaaggagcagctggcgatgcttgctggcagcctcaagctgatctccgatgagacggctccgtttcagcttgcgataaaacgtttcggaaccttcggaaagccgtcggagccgagaattcttcatgtggaaccggaatactcagccgctctctttcatgtgagggaacaggtgaagcatgcagcggatgcggcgggctttgaaattgaaaaacggccttttcatccacatgtgacggtcgccagaaagtggaatggatcggcctcttttaacggacgcctggagccgcttgaagacgcggtgtcttttacggcccggcatttcaccatctttcaaacccatttagacaggcttcccaaatacgagcatcaagccgttttccatttcggcgaacggccgactgcagaaaagcaagattcggagatgaacgcagatggcacagattattaa

SEQ ID NO: 3641 - DNA, 927 bp, Bacillus licheniformis
gtgagagccgttcaaaatattgcagaattaatcggggaaacgccccttgtcaaccgcgttcagcccgaaaacgcggcccaagtttatatcaagcttgaatcttttaatccgagcggaagcgtaaaagaccgcgcggcctaccaaatgatcctggatgccgaagaaaaaggcctgctgaaaccgggttcaaccatcattgaaccgacgagcgggaacaccggcatcggccttgcgatgaacgcggcggcaagaggctacaaagccattcttgtcatgcctgatacgatgacgaaggagcggatcaatcttctgaaagcgtacggagccgaagtcgtcctgacgccgggggatgaaagaatgccgggcagcatcaaaacagcgcaggagctcgctcggcaaatcccaggcagctttattccgatgcagtttgataatgaagccaatccggaggctcaccggagatcaaccgctctggaaattgcccgggcaatagaagaaatcggcaaacctctcgctgcatttgttgcaacagcagggacagggggaacgattaccggaacaggcgaaaagctgaaagctttatttccgggaataaccgttcacgtggcagaacctgcagggtcgcctgttttatccggcggcaaacccggaaaacacaagcttgtcgggacaagcccgggatttatcccaaacattttaaacgaaaacgtctatgacgaaatcttaaagatcaaggatgaagaagcctatgagatgacgcgcagattggcgcgggaagaaggaatccttgtcggcccttcttcaggagccgcttgcttcgctgctgttgaaacggccaagaagctccctcccgacaaagtggtcgtctgcatgacggccgatacaggggaacgctatttatcaagcgatttatttcaatttgattaa

SEQ ID NO: 3642 - DNA, 210 bp, Bacillus licheniformis
ttgaagcaggaaaaggaattgaaacggttttattcattttatttttgttctttttcggttgcggggcgttttatccgcttctttccgtgtcggcaaaccatagcattcgttgccaggcctgctaagtcgatgctcacgaacaaaagagaaacggcggctaacggagcgggcgtcgtcctgcctgaacactgccgtcatcacatcctgtga

SEQ ID NO: 3643 - DNA, 472 bp, Bacillus licheniformis
atgagtcataagcgaggcgttttatttgaaatcccgaacgggtacgggcgctttcttctcgatatactgaagccggttgaaccggccgatttcaattggctgcttgccgatggcgaatgctatctcgtggaacggtgaattgtcagatgaaaatctttttcctcaagatccgcaggtgatgacaggagaagcatttaaaaaaaggctggaagacgcaaggtactatctcatcttcgccgatctgaaggcttttccgaaggatggccatcccgaagatgtcagcacatatgaatcatatatgaaaagcagctgcgagctgattgtgcatacagccgattcgagttttgtcacgatatactgcaaagatcaaaaaaaactggagcttctatatcaaaatgcaaaggactgcggtttcaagcggattgaatatataacggatcacaacgatgccagaacaggaatgcatgtgtag

SEQ ID NO: 3644 - DNA, 1392 bp, Bacillus licheniformis
atgaactgggaacaggaagttttaaaaagacggaatgagatcgttgaggatattcaaggttttttaaaaatcaacagcgtccttgacgaagagacggcgggtccgggacggccgtttggaaaagggattcaagaatgcctgacagcgcttctgaataaaggggaggaaagcgggtttacggtaaaaaaccttgacggttatgcaggccatatcgaatgggggaaaggcgaggagattatcggcgtgctttgccacattgatgtcgttcctcccggcgatggatggacgagcgacccgtttgcagctgaaataaggggcggccgaatctatgcaagaggagcgcttgatgataaagggccgacaatggccgcgtttcatgcattaaaaattgtcaaagactcgggcctccctttatcaaaacggatcagaatgattattggaaccgatgaagaaagcgactggcgctgtgtggagcattactttaaacacgaagaaatgccttcggccggttttgcgcctgatgctgattttccgattatctatgcagaaaaaggcctgattgacgcagctttaaaaattgaaactgatcaggcggaaacaggtgcggacttagtattggaggcattccggtccggccggcgcctgaacatggtgcctgatgatgcggaagccgtcctggcaggggccgtcccgtcagaatttgaagagtcatttgcccggtttgtaaaagaaaaacgcgcagaagggcgtattcttcaagaaggcggcagactgacattaaccgtgcacggcaaatcggctcatgccatggaacctaataacggagtcaatgccggtctcattttggccgagtttttacatacacaatcccttgacagagccgggctccattttgttcaaacggttagcggggcttttgccggagatacgagagggaaaaagatcggcatcggctgccgcgatgacatcagcggagagctgacgctgaatgtcggccggctgcagtatgaacaaggaaaaggcggggaggcccatattaacatccgctatcctgttactgaagagagcggccgggtgaaatccgggctttcacaaataaagggcgcccggctcatcagctttaaagacagcaagccacatcatgtagcaaaagaccatgaactgatcaaaacgctgcagcgggtctatgaagagcagacaggggaaacggcacaattaatttccatcggcggggcgacatatgcacgatcactgaaagccggcgtggcattcggcccgctgtttccaggccgtcctgacgttgcccatcagaaagacgagtatatggaaatcgacgatttgctgaaggctgtatcgatttatgcacaggccatttatgaattggcgaagtag

SEQ ID NO: 3645 - DNA, 1308 bp, Bacillus licheniformis
atgtttaacataaaagaaaaccaaaccacagtcaaaaaagaaatcctcgccggtattacaaccttctttacaatggtttatatcgtcgtggtcaacccgagtatcctttccggcacaggcgtcccgtttgatcaagtgttcactgccacaatcatcgctgcagtcgtcggaacgctttggatggcgcttgccgccaactttccgatcgcgattgcacccgggatgggactgaacgtgtattttgcagtgtcagtcgtcggctcatccaacggcgaaatttcttatcagacggcgttcagcacagtcttcgcggccggcattctctttattatcttatcgctaacacctcttagaaaacaactgatcgaagcgattccggctaatttaaaatacggaattaccgccggaatcggattgtttatcgcttttgtcggtctgagaggagccggcatcattaccgcgaacgaagccaatttggtcggactcggcaatctgcactcgcccggagtgatactggcattaatcggcttggctttctctgtcgttttgatggtgatgaatgtgagcggcgctctatttttcggtatgatcttaaccgggctgatcgccttttttaccggccagcttgagtttaccaaagggattatgtcgatgcctcatctgccggaaaaactgatcgtcacaaaccctttcgccgcttttggcgatgtcatccactacggcctttattcggttgtcttttcgtttctgctcgtgacgatttttgatacgacaggaacgatgatcggtgtcgctgagcaagccggactcatgaaaaacaacaaactgccgaatgcaagaaaagccctccttgccgattctacagcgacgacagtcggtgcaatgttcgggacaagtccgacgaccgcctatatcgaatcatccgccggggtggccgcaggcggaagaacggggcttacgtctttaacagtcgctgtgcttttcggcgcggccctgtttttcagcccgcttgtcagtgcggtctccggaatcgcagcgattacgtcgccggcattgatcattgtaggaagcatgatgatcggcgccgtgacgaacatccgctggaaagaacttgacgaagcatttccggcctttctcgtcatcttgacaatgccgctgacatcatctattgcgacaggcatttccctcgggtttatcgcttatccgattgtgaaagccgcgaaaggcaaatggcgcgagattcatccgcttgtcttcgtgtttgctgttctctttttcatacaccttttctttttggaagggcattaa

SEQ ID NO: 3646 - DNA, 219 bp, Bacillus licheniformis
ttgaaaccttcaacaaaccgaatgctaaccaggatcaaatcagtctacatgttcattcaagaaaagggactcgttacaacccaggaactggttgatgaatttggcactacaccgagaacaatccagcgtgatctgaatgtgttggcatacaacgatctagtacacagccccagcagaggtaaatgggagactacaagaaaaaaagtgaaaatctcctca

SEQ ID NO: 3647 - DNA, 723 bp, Bacillus licheniformis
atgagattggataaactgttgtcaaacagcggctatggttcgagaaaagaagtcaaaaaaatgctgaaaaacggcgcggtgcgcgtcaatgatcaattagtcaaagacgccaaaaagcacgttgacccggaatcagacgacatcacggtatacggggcacccgtcatgtaccgggaatttatttacttaatgatgaacaagccgcaaggagtgctgtcagcaacagaagacagccggcaggaaacggttgtcgatttgctcgacccggagctgctgaggtttgagccgtttcctgtcggaaggcttgacaaggatactgagggactgctgcttctgacgaatgacggacagttggcacaccagcttttatctccgaaaaaacacgtacctaaaacgtatgaagtccatgtcaataagccgattgatcaagcggcacttgatcagcttgaaaaaggggtcgatatcggtgaaggatatgtcacgaaacctgctgaagcatcgcttctggcaagcgaaaacggcgtagaacgcctgcttttgacaataacggaaggaaaatttcatcaggtgaaaagaatgctgaaggcggtcggccatgacgtcatctatttaaagcggctgaaaatgggggatgtcgatctcgatgaagagctattgccaggggaatacagggagctctctgaacacgagcttgccgcattgcaaaacaaaaagacactctga

SEQ ID NO: 3648 - DNA, 1629 bp, Bacillus licheniformis
atgtcaagcaaactgttaagaggcacatttgtattaacgcttggtacctatatttcaaggatcctcggaatgatttatttgattccgttcggagccatggtcggtgccaccggcggtgccctgttccagtacggttataatcaatatacgatttttttaagcattgcgaccatggggtttccggcggccgtgtccaagtttgtttcgaaatataactcgatgggtgattatgaaacaacgagaaggatgctgcgcgccggaatgtcgatgatgctcgtcacaggcatcattgctttctccattctatatttgtccgccccgttttttgcagagatggcccttggcggaacagaaaacaacgggctgacgcttgaacatgtcgtgtatgtcattcgcatggtcagtctcgcgctactggttgtgccgatcttggcgctgatcagaggctttttccaaggtcaccagatgatggggccgacagccgtttcacaggtagttgaacaaattgccagaatcgtctttctattaacggccacttacttggtgatcaaagtattaaacggcgggcttgtcgtcgctgtcggctatgcgacttttgcggctttgatcggagcgttcgccggactgttcactctttacttttcctggcagaaaagaaaaggggcgctcctggcgctgaagccgaaccttgttccttcagccgatattacgtaccggcaaatgtttaaagagctgttcagctatgccgccccttatgtctttgtcgggctggcgataccgctttaccagtacattgatacgaatacgtttaataaagcgatgattgcagccggctatcaaaacatcagccaggatttgatggcgatcgtgacgctgtacgtgccaaagcttgtgatgattccggtatctctcgcgacggcattcgggctgacattgattccggcggtgactgaaaactttaccaacaaagatttccctgctttaaacaaacagattgatcaggcgatgcagatcattctcttcatcgttcttccggcatcagtcggtatggctcttttgtcggggccggtttacacgttcttttacggctcggaaagcctgctccctgaaatgggacgagatattttgttctggtacgcgcctgtggcgctgttattctcgctcttcaccgtcaacgctgcaattttgcagggggtgaacaagcagaaatttgcggttgtcagcttgatgatcgggattgtgatcaaaatcgcgcttaacgttccgctcatcaagctgcttcaaggcagcgggtcgattttggcaacggcgctcggctattcagcttcactcctatacggatttatcatgattaaacgccatgccggctattcgtatcgcaaactgtttaaacggtttttgctgatgctgatcctgacggcggtcatgggcatcattttgctgcttgtccaggcgcttctaagtatttttatttcatacgaaggcgggcagatcaggtctgctgtcgtcattttcatcacaaccgcagtgggcgggtcagtttatctgtacttggcttaccgtgtgaaactgctcgaaaaaatcttcggtcagcgattgaatcgctttttcaaaagaaaggcctcctaa

SEQ ID NO: 3649 - DNA, 1275 bp, Bacillus licheniformis
atgaagtattttgatgtcatcgtcatcggcggaggcccctcaggattgatggccgcaatcgcggccggtgaacagggggcggacgttctcttaatcgacaaaggaaacaaactcggacgcaagctggccatttctggaggcggacggtgcaatgtgacgaaccgcttgccggttgatgagatcatccggcatattcccggaaacggacgctttttgtacagcgctttttctgaatttaacaatgaggacatcatcaagttttttgagcgtctgggcgtcaagctgaaagaggaagatcacggaagaatgtttcctgtctccgacaaggcgcaaagcgtagtggatgcacttttaacaaggctcgaacagcttcatgtaagcgtacgtacaaacgaaaaagtgaaaactgtcctatacaatgaagaaaaagcgtgcgggatcgtgacgggcagcggtgaagaaattgcagcgggatctgtcgttattgctgtcggcgggaaaagcgtcccccatacgggatcgaccggagacggctatgaatgggcggaaaaagccggccatacgattacggaactgtttcctacagaggttccggttacgtctgacgagccatttatcaagcagaaaacattgcagggcctatcactgagaaacgtcgccctcagcgtattgaacaaaaaaggaaagccggtcatcacccaccaaatggatatgatttttacccattttggactgtccggacccgcagtcctcagatgcagccaatttgtcgtcaaagagttgaaaaagcaggaaaaagtcaggctgaaaatcgacttgttccctgatattcatgaggaacagctttttcaacgcatgcataaagaattgaaggacgctccgaagaaatcactcaaaaacgtgctgaagccttggatgcaggaaaggtatctgctgtttcttttcgagcgcaacaagattgatccttctgaaaccttctcttccctttccaaagaccgtttcagagctttcgtcaaagactgtaaagagtttactgtcaacgtgaacggcaccctttcgcttgacaaagcctttgtgaccggcggaggggtttccgtaaaagaaatcgatcctaaaaaaatggcgtccaaaaaaaaggaagggctttatttctgcggggaaatcctcgatattcacggctatacgggtgggtataatatcacatccgcgcttgtcacaggcagacttgcaggcttgaatgcaggcgaattttcgctttgccggagaaaaaaataa

SEQ ID NO: 3650 - DNA, 1533 bp, Bacillus licheniformis
ttgaaaaatatttcaagcgttttttggattgtgattgttatcacagcagcagctgtattatggggaatcgttgctccggataaccttcaggcgttaacgacttcgattcaaggttatgttacaaacacactcggatggtattacttattggtggtttctctgtttgtcgcattcagcatctttttgatcttcagtccgattggaaagatcagattagggaaacctgaagaaaaacctgaattctctcgattatcttggtttgccatgctttttagcgcaggtatgggcattggtctcgtattttatggcgcggctgaaccgatcagccattatgccattagctctccatcaggtgaaacagaaacagcccaggccttcagagattctctgaggtatacatttttccactggggattgcatgcttgggcgatctatgcgatcgttgccctttgcatcgcatactttcaattcagaaaagacgcgcctggcttgatcagcgcgacgctgtttccggtcttcggcgacagagtcaacggaccgcttggaaaagggattgactgcatcgctgtcttcgcaaccgtcgtcggtgtagcgacaagcctcggaatcggcgccacacagatcaacggcggactccattatctattcggagtgccgaacagctttcaagtgcagctggcaattattgcagtcgtcactgttctgttcttaatttccgcatggagcggaatcggaaaaggcattaagtacttgagcaatacgaacatggtgctggccggcatcctgatgatctttatgctgttcgtcggaccgacagtgttgattatgaactcgtttacggacacgatcggaacgtatatctccaatgtggtgcaaatgagcttccgccttgcgcctaatgatccggacagccgtgaatggatcaattcatggacgattttctactgggcttggtggatctcctggtcgccgtttgtcggtattttcatcgcccgcgtatcaagggggcgcacaatcagggaatttttgattgccgtcttgtttgcgcctactgtgctggcgtttctatggttttcaattttcggggtttcagcgatggatcttcagcaaaaagggattttcaacgttgcaaaactgtctacagacacgatgctgtttggaatgtttgaccactacccgctggctatgattacatctatcgttgccttgttgctcattgccgtattctttatcacttctgcagactcggcaacatttgttctcggaatgcaaacgacttacggttcactgaatcctgagaattcggtcaagatatcatggggcatcatccagtcagcaatggctggggcgctcctgtattcaggcggactatcggcgctgcaaaacaccgccatcctggccgcactgccgttctcagtcgtcgtgattctcatgattgtatcgttatataaatctctgtcacaagaacgaaaagagattaaacaagccgagaaattccagaagccaagaagcccgagggtgaaaaaagcataa

SEQ ID NO: 3651 - DNA, 183 bp, Bacillus licheniformis
atgctgaaggtggccgtatttgatgaagaacacgaaaaagatttgcagcatgaaatcaatgaattcttaaaaaagctgtcggaagaccagctggtcgatataaaatatgacgtatcagccgcatgcgatcctcaaggcgaacagctttactgtttttcagcgttaatcttatacaggacataa

SEQ ID NO: 3652 - DNA, 315 bp, Bacillus licheniformis
atgacgataaaagagatttcgcctgatgaactgaaagacaggcttgcaaaaggagaaacgctgaacattatcgacgtcagagaagatgaagaggtggctgaaggaatgatccctgaagccgtccacattaaaatgggggatatccctgaaaaactcgacgtctttcaaaaggatcagccttatatttttgtgtgccgatcaggcaaacgaagcgaaaatgtctgcctctatttgcaggataaaggctttgatgtcaccaacatggtcggcggcatgctcgaatggaccggaaacacgaagccgaaaacaaaataa

SEQ ID NO: 3653 - DNA, 135 bp, Bacillus licheniformis
atgaaaaaaaacatttgttttttcgccgtcatgcttgtttgcctgatggggggaagcttcacagctgattctgcagcacaggacggatcgtttcagccattgggaaagtcggtgtttcctgacagcggacgatag

SEQ ID NO: 3654 - DNA, 1106 bp, Bacillus licheniformis
gtggaagcgaaagcggcatacgaaaaagcggccggactcctgaatcagtggtacaccatgatcaagcgccatgaagcgctccaggctgtatctttgaggtacgagatccaaaacctgctttctaaaatggagaaaagcggagatctggagctttattttcagctgttggactatcgctgcaaattgatgatggagcagtttgcagaatcagccgagcttttccggaaaattaaaaggcagaaggaaacggttaagagcgcggatgacatcattcagtactattttttctttttttcaggcatgtatgagttttatgagaaaaactatcttgaggcgatcagctgttacaagaaagcggaagcgaagctgcataaactgaccgatgaaattgaaaaagcggaattttattataaaatcgcgaccgcctactaccaaatagacgatcatttcagatcgttgaactactccgaaaaagcgctctcacttttcagcaagcataaagaatacatagacaaaacgatcggatgcgaaatgatactcggatcggtgcagtttgaattgttccgcatcaaacaagctgaggagcactacgggcgggcgcttgatcaggccgttgcccttcaaaaccggcgaatcatcgggctgatctatcataatatgggactgaactatgccaaatgcggcatgccgcttttggcggaggagcactttagaaaagccctttcaatcggtgtccatgagcaatcggtttttggcattaacacccttttcgagctgtctcacctcatgtacaaaaacggttctcccgaagaagcgagacgtctctgcaaagagggatttaccagatcggccgaattaggagaggatgaatacgcagcgaagttcaggctgattttcgccctgtatgacgctggccatccgctcgatattgaattttcgcttgaatatatgagtgataaacggctatggtcgcatgttgctgaactgacaaaagatattgccgactattacatgaagtcaggcgaccatgaaaaaagcgcgctttacctggaaaaatcgcagcatgcgaaaaatcaaatatataaaatgaaggaggggattatatg

SEQ ID NO: 3655 - DNA, 108 bp, Bacillus licheniformis
atggcgcttgatcatggtgtaccactgattcaggagtccggccgctttttcgtatgccgctttcgcttccacttcttcattcatcctttctcctttttaaaagcataa

SEQ ID NO: 3656 - DNA, 360 bp, Bacillus licheniformis
atgggtgaagaatttgaaaaacgatatcttcactggattgatgaagccgtgaaggagagcgaaaagaaagacgatttcaagtccctccccggttatggaaaaccgctcagcaaagagatgctcgagggggatgcgctttcgtcaacccttaaaaacgcccgatatctgccggaatggctgaagctgcaaaaggaaattaaacaagagattgaaaaagcgatcaaatcgaatcagcgcgaaacgctgattgatgccatcaaccaaaaaattaaaaaatacaacctcacctgtccgaaccaattccaaaaaggccttgtttcagccaaaaacctcgaaagtcagctcaaatattggagctga

SEQ ID NO: 3657 - DNA, 648 bp, Bacillus licheniformis
atggaacaaaacgtctccatgggaagggtgctgagcttttgtgaatgggtgctgaagtttttttacgccaatctgctgtggtttgtttttactatgctcggccttggcgtcttcgggtttatgccggcgacgactgcattgttttcagtgacgagaaaatggatcatgggcaaaaccgatattccgatattcaaaacgttctggcaggcgtaccgcggcgagttttttcgttccaacgccatcggtctcattctggcggcggccggcatcatcatttatgtagatcttgcttttatttatccggatcatctcctattgcacgttctccggttcgtcattatggtttttggatttttgtttttgatcatgctgttttatatgttcccgctgctcgcccatttcgattggaagaagcgaatgtatttcaagttttcgctgattctgggcatatcgtatttgcagtatacattaacgatgatggcggtcactgcaatgctttatatcgcttttgcgtttctgcccgggatcgttccttttttcagtgccagtctgcttagttatgcggttatgtggctggcatatcaagtgttgaaaaaagcggaagccgcagaacagaaggaaaccgtcataacgacaagacacacttaa

SEQ ID NO: 3658 - DNA, 1278 bp, Bacillus licheniformis
atgaaaaaatatgcgatatgcggtctgagcggccgcgcttttaacatgtttatcgagcctctggtgggaaaatacgggaaagaaaaccgcatcgctgcgctcttggacatcgatccgctgagggaggaagtctgcaaagaaaggtttccggcgcttcgccccgtcccgtttttcgaagagaaagcgtttaccgaaatgcttgacaaaatcaagccggacgccattattgtagcaggccgtgatgatacgcatgtccgctatatattgggcgctttacgggcagatattgacgtgatcactgaaaagccgatggtgacaacggcacgggatgcggcagccgtgttaaaagccgaagccgagagcaaaggaaaagtgaccgttacgtttaactatcgctacaatccgtaccaccgcaagatcaaagagctgatacttgacggaaagcttggcacgattacgtcggttgatttgaactggtacatcgatacgtatcacggcgcaagctattttaaacgctggaacaggatgagagcattctcaggcggtctttccgtccataagtcaacccatcatttcgatcttgtcaattggtggcttgatcaaacgcccagcgaggtttttgcctacggcggtctgtactactacggacccggcggcgaaatgaatcctgaaaaaggggaaaaccgctattgcggaacatgccatgtcaagaagaaatgccgctattatatgaggtggcaggcaggcgacccgcaggacgaccatgtcaagaccaatgaaagccagcatctgctctataccgattacaggcctgacgcgtgtattttcgatgaagaaatcgacatcgaggatacgtatgcagccgttttgaaatacggcaaaggggcgctgctgaattactccgttcatttttcagccccgtatgaaggctaccggcttgcaatcaacgggacaaagggaaggcttgaaacacaggaatatcatgctccggcaagagtcccatttgaagttcccgaacagaccatcgattattatccgctgtttgaatcgaaagaaacgattcgcgtcgtcaggcagcccggcgggcatggcggaggagacccgctgcttttggaggagctgtttggcggaggagaccctttgaggaattacgacattctggccggtgccgaagcaggcgcctattcaattgcagccggcgaggcattgtggcgctccatcaaagaaaaaaagccgataggaatcagtgaacttctgcatacccggcaatatacataa

SEQ ID NO: 3659 - DNA, 495 bp, Bacillus licheniformis
gtgaaaaacttcgctttctccgtccttctaatagcagcagtgcttcttcttacctcatgcggaaaggatggtagccggggaacagacgtattgattttttcggatgcaccggctgaagtaaaggaaaacgtgcagcgcgctgtcgggaaagaacagctcaacatcaccgttttcccggcaaccccggaaaaactccttgttgaaattgcggcgaaagaaggagatctgtttatcgttccagaagacatgtttaaacctttttacgatcctgaaggacttcagccattgaatgctgcttcggaagaaaaagagccgtacagcgctccgggcaaaaacggggaagtacagctgtatgcggctgtcatcgaaaaaggagaaaaacgtttgaacggctatacggttcagttgaatacagatatggcagctttcataccggtttatgcgaagaaaacccctgaagcgacggaactcatcgaagcgcttcaagcaaaatga

SEQ ID NO: 3660 - DNA, 1122 bp, Bacillus licheniformis
atgaatcaatctctcatcacaaaatcgcctctttacattgctgaagaagcggccaaaacaataatgaaagcgtatacaccgaaagagctgccaccggccgggcgctggcactaccatcagggcgtatttctgtgcggcctgattcgcctttgggaagaaacggggaaagaagcatacttcaaatatgtaaaagaatatgccgatgatctcatcgatgactgcggcaatttttatttcaggagggatgagctggacgctatacaagccggacttctcctttatcctttgtacgaggagacgggcgatgaacgctaccgcaaagctgcaaaaaagctgaggggcctttttgaaacgctgaatcaaacagaagaaggcggtttttggcataaagataaatacccttaccaaatgtggcttgacgggttgtacatgggagggcttttcgcactcaagtatgcaagggcgttcaatgagcctgaactttacgataaggtcatcctcgaggaaaaactaatgagaaagcatacgaaagactgcaggacgggattatattatcacgcgtgggatgaaaagaggcagatgccttgggccgaccccgtctcaggctgttctccagaattttggggaaggtcaatcggctggtacgcgcttgcactgagcgacatgatcgaactgctcccgcaggggcatagcacaagacaggagtggacccggacgcttcaagagatggtcaaaagcattgctgattttcaagatgaaagcacagggctatggcaccaggttgtcgataaaggcggacttccggacaattggctcgaaagctcctgctcgtgtttgtatatgtacgcgatggccaaaggggctcgcatgggctatattgattcatcatatattgatagagcggcaaaggctttcaaaggactcgtcgaagaaaaaatcgagatgagcgcaaaagaaggcttgcttttaaaagatatctgcgtcggaacttctgcagggacatacgattattatgtcggacgggaaaaaagcaccaacgatcttcacggtgtcggcgccttggttatggctcttgtagaacttgaaaagaccggccgtttttcctgcggggaagcgaagtga

SEQ ID NO: 3661 - DNA, 966 bp, Bacillus licheniformis
atgaaagcagccgatgtccagaccggaaaaaatccggcccttgttgttggaaaaaaacgaaagacgcgtttttgggaaaagcttctccagcaaaaatatttatatttgatgattttgccgggactgatttattttttgctttttaagtatgtgccgatgtgggggattgtcatagcgtttcaggattaccagccgtttctcggcataacggggagcgaatgggtgggctttaagcattttgaaaggctgtttaccgaaccgacgttttttatgctgttgaagaatacattgattttgttttttctcaaccttgttgtattctttccgataccgattattttggcgcttttattgaatgaagtcagagtcgcattgttcaaaaagtttgtccagacgctgatctatattccgcattttatgtcatgggtcattgtggtatcgctttctttcgtcctgttgactgttgacggaggattgatcaatgagattatcgcctacttcggcggagaaaagatcaattttttgctgaatgaaagctggttcaggccgatgtacattcttcaggtcatctggagggaagccggctggtcgacgatcatctatttggcggcgattacagctgtcgatccgcagctttacgaagcggcgaaaatggacggggccaatcgcctgaggaggatgtggcatgtcacacttcccgcgatcagaagcgtcatcgtcgttttgctgatcttgaaaatcggcgatacgctcgaactcggctttgagcatgtgtatctgcttttgaatgcaacgaaccgcgaagtggccgaaatctttgatacgtatgtatacacggccgggttaaagcagggacagttcagctacagtacagccgtcggtttatttaaagcagctgtcggtctcattcttgtcgtatttgcaaacaggatggcgaagaaatttggagaagaagggatatattaa

SEQ ID NO: 3662 - DNA, 2310 bp, Bacillus licheniformis
atgaagagaaaacaatataagttttactataaactggtgaccttctttctcattctgagcaccattccggtcatcatcgtcggctttttttcctatcagagatcagcggaaacgattgaacaaaacgttacaaacgaaaagctccaaaccgttagccagacacagctaaatattgaacatattttaaaaacggttgaccattccttcaccaattacgtccgttcctatcctttaattcagacgctcagccgcaccattacaccagaacgctttcagctgtataaccaaatcaacaaggaattaaacgaactccagacattcgataccgatctgtcggatatcacgctgatcagccaagaaaaaaagtggtatatcaacaactccggtttataccctttagatcagggaaaacaagccatcacgctctcgctttacaacgctttaaaaagccgttccagctgggtgcttgaaaaaaacaacggccttgtcgccacaaaagaaggggcttcgggaaactgcctgtacaacgtcaatctggtcaaacagcttcccctgaacagcatggaaaacagaggccttgcgatcgcgagcattccttcttgttcgcttgtcaagcgcatgccggatcattcaaaaacaaacagcatgatggtgcttgatgacaacggacggatcatccttcactcagacccgtcaatgatcgggcaatcgatcaaacaagaaaattacttcaaaacgatccgccggcaccaagaaaaaaacggccagtttgatacaacagtcagcgacaccgcctataacattacataccagaaatcagattataataattggatatacgtttcgttaacgaccattccggaactctatcagcagacggcatcaatcggctggttcacgtttacgatctgcctcattttgttagcgctttcatatttattctcctggtttggttcacgccatttttacaggccgatcaaggttttatacgaatccgtctccggctttcctccaggagccgattccgtccaagagaaaccgaaaaacgaatttgaactgattgaacggaacattaaagaaatgaaaaataaaaaccatgatctgaaggtgcgcgtcgaacagcaggtcacccagctgaagcagtattttttaacaaggctattgctcggcaagctgagcgaagaagaaatcaaagaccgctttactgggctcggcttccctgaagattggagccatctgtcggtattcacactgcaaattgatacattgaaagacacatcatacgaaaaaaaggatcttgatgtcctgctgtttgcgatcaacagccttgtcgaacgatctgtgcccaagaataagcgccttccgccggttgtcattgataaaacgcagaccatcatcatgctgaatcgcggacagccgctggaaaggtttcaggaagacttagagcataccgcatcagccattaaggataaaattcatgaagagcttgggttgttcgtcagcatcggcatcagccagccatttacaagtcttgcaatgtcaaagcgcggttatttggaagggcttgaagcactgacataccgtctgaaatccggaaaacacgcggtgattttctatgaacaccttgaccgcaacaaagcgtttttaacccagtttccgaagcagattcaaaatgaactgtttgaagccattaaaacgtgcaaccgtaaacaagcggccgaacagcttcaccttcttcttgagtcgatttgttctgaaaacatgaatccgcatcactgccagattgcgattgcaaggctgttgaacaacttgattgaatttatgcatttgctcggaatcgagatttttgaaccgaacgaaaatacgatgctgtacgacgacgtctttgagctgacgaccatcgaggaaattgaaagctggctgaacgcgcagattatcgttaaaatgatcgatacactcagcatcagagaagaatcgcaatacaaaaacatctcagaaaaaatcgtccatattatccagcaggaattcgacacggacttgacgctcgaatcgatcgcaggaaggcttcattacaaccccaattatttaagcagcatcttcaggaaggaaatgaaaatatcgttcagcgaatacttgtcatcatacaggcatcatatcgcgaaaaactggctgacggaaacgactatgtccgtaaaagaaatttccgaaaaactgaaatacaaaaatccgcagaatttcatccgttcatttaaaaagctggaaggaatcacacccggcaaataccgcgagctgaaaaaccattcggcataa

SEQ ID NO: 3663 - DNA, 1506 bp, Bacillus licheniformis
atggggaaaaaatggctgatcccgatttttgcgttcgtgcttttggccggcggactgcttggctgttcgaacagcggagcagaccaggcttcttcgaaggaggagaaagtcgatttgaactcgcctttggacttgagctggatggtgatcctttaccatcagcagccgccgaaggacacggcgattaaaaaaatcgaggaactcaccaatactaagctcgatttaatgtgggtgcctgatgcggtaaaagaggaccgtttaaactcagcgctcgccgccggaaacctgccgaaagtcgtcaccattcaggacattaaaaattcatctgtcatgaatgcattcagatcggggatgttttgggaagtcggaccttatttaaaggattatccgaatttaagcaagatgaacaagctgatcaataaaaacgcttcaatcgacggaaagctttatggcatctacagggagcgcccgttatcaagacaggggatcgtcatccgtaaagactggcttgacaaccttggactcgatatgccgaagacagttgatgaactttacgaaacagcgaaggcatttacagaaaaagatcctgatcaaaacgggaaaaacgatacgatcggctttgccgacagaaacgatttgatctacggcgcctttaaaacattggggtcctatatgggcatgccgactgattgggaggaaaaagacggcaagttcacgcctgacttcatgacaaaagagtacatggatacgatgaaatatatgaaaaagctgtatgatgaagggctgatcaacaaagactttccggtgacgagcaaaacgcagcagcaagaaatgttttcacaagggaaggccggcatttatgtcggaaatatggttgatgccgtcaatctaagagaccagtctgtcgatgataaaatggaacttgagatcatcaatcggatcaaagggccggacggaaaggaacgcgtctgggcatcaggcgggcataacggaatctttgccttcccgaaaactagcgtcaaaacagaaaaagagctgaagaggattctggcctttttcgaccggatcgccgaagaggatgtttacagtctgatgacatacgggatcgaaggcgttcactataaaaaagaagggaataaacaattcaaacggatcgacgagaaactgaaagactggcaggcggaaattcagccgctcgtttctctcgtcggcattgataagcaatatttgaaaaatacgggcgatccgctccgcacaaaatatgaagagctgacagaggacaataacgaaatcatcgtctcaaacccggccgaaagcctgtactcaccggccgcatctgaaagaggcgatgaactgcaaaagatcattgatgatgccacataccaattcattctcggcaaaatcaatgaaagccagttcgagaaagcggttgaaaaatggcgcacgaacggcggaaatcaagtcatagaagaatatgaggagtcatttaaaaaagcagaaaaatag

SEQ ID NO: 3664 - DNA, 849 bp, Bacillus licheniformis
gtgtttgacatattgaattattcatttttaacagggttcggattggtttgtgtgctgccgttcatccacgttattgcagcctcttttgcgacagtcgaggaggttatttcgaaaaagtttattttaataccgacgactttttcgctggatgcgtacaggtatattttttcaactgacattgtgtacaggagcttaatcgtttctattcttgtcacagccgtagggacggcggtcagcatgtttctttcctctttaatggcatacgggctgtcgagaaaggagctgatgggaaggcgcgtcctgatgttcttggtcgtgttcacgatgctgttcagcggagggatgatcccgacctttctcgtcgtaaaatcgctcggattgctcgatacctattggtctctgattcttccgaccgccatcaatgcgtttaacttgattattttaaagaacttttttcaaaacataccgtcaagcctcgaggaatccgccaaaatcgacggctgcaatgacatcggcatcttcttccgcatcattcttccgttgtctttgccggcgatcgcgacgatttcgctgttttacgccgtcacctattggaatacgtacatgcaggcgattctgtacttgagcgatgcgacaaaatggccgatacaagttttgcttcgccagattgtcatcgtatcaagcggtatgcaaggggatatgacggaaatgggagcagccgcggcgccgccggaacaaacgatcaaaatggcggtcattgtcgttgcaaccatacctgtgctgctcgtgtatccgtttattcaaaaacactttgcaaaaggcgctcttttagggtcaattaaaggataa

SEQ ID NO: 3665 - DNA, 765 bp, Bacillus licheniformis
gtgaaaaaggtgacgatcgtcggagggaacggcacggtcggccgcgtattagcgggcggattggcaggcgaagggtatgaggtgacagtgctggatttaaaagaaccggatgacaaacaggctgtccgttttatccgggtggatgcgacagattacaacgaagtcgtcaaaagcattcctgcacagacgaatgcgctgatcaatcttttggctgtaaagccgtcgggcgatttgcttgaccggcaggagtttgcgaaaatgacggatatcttttttaaagcgacatatacgattttgcgggcggcggcggagctcggcgtgccgaaagtggtatttgccagcagcaaccatgtgacagatgtatatgaaaagggcggcgattctctgttggggaggcagatcaacacaaatgactacccgcagtccaaaagcttgtacggcttgctaaaattggcgtccgaaaatctcggctaccttttctcgcaccaattagacgccaaggtttccgtcatcaatctgcggatcgggacagctgctgaaaatgagctagaaacgctgcacgcaaaaccgagaagcaaaaaaacgcttttatcccaccccgacctcatcggaatctttaaagccgctatcgaatccggcaaaacatatggtacatattatgctgtcagcgacaataaggggcggccgtggtcgatcgattccgccattcgggaactggggtacaggccgcaagtcagcgcctctgacatccttgatgaagactga

SEQ ID NO: 3666 - DNA, 888 bp, Bacillus licheniformis
atgcgcagtcaacttttcaaactgctcggcgatttgccggggaaaaaaagcattgatgcgagcactcttaaaatcgaagaaaagtcatcttttattctcgaaacgcttttgcttgatttaaacggaattgaagcggtgccggcctattttgcaaaaccgaaacagatgaacggcaagcggccggccgtgctttactgtcattcacacggagggcgctacgaaaggggaaaggaggagctggttgaaggagcggagtacttgcaagcgccgccgttcgccgaggaattgacggctttgggattctccgtgcttgcgattgatcattgggctttcggagacaggcggggcaaaacggagagtgagatatttaaagaaatgctttggacagggcgggtgatgtggggaatgatggttttcgacagcatcagagccatcgattatctgaaaatgagggaggacatagacgaaagccgcatcgcttcactcggcatgtcgatgggaggtctgatggcctggtggaccgctgcattggatgagcgggtcagcgtatgcgttgatatatgcgctcaggtggacagcgaagcattaatcaagacgcagaatttggaccgccacaatctctattcttatgttccagggctggtcaaacacttttcaaccgctcaaatcgaaagcttgatcgctccaaggcctcatttaagcctggtcggaaccgcagataaactgacgccggttcaagggattgacattattgaagaaaagctgtccgatgtgtatatagaaaaaggcgcaggtgaacgctatgaagtgtttcgttctcattcagggcacctcgagacagccggaatgaggcataaagcggtcggtttcttaaaaacatggctgtaa

SEQ ID NO: 3667 - DNA, 1251 bp, Bacillus licheniformis
atgagagaaaaaaagcttggtcctttattgttaagcgggctgatgacggggcccattttaggatccggaatcattctgctgcctccgatgattcatcagacagctggagactacgcgatttttgcgtggctgttgatgctgggaatcggttttttatttgcctgggtttttgccagattaagcgtcgagtatccgaatgatgccgggattgcttatgcggctgaaaaagcgttcgggtcgcgtgttaaaaagttggcagtcttttattttatcatggctgcgagcttcggccccgccgccgtattaatgacggccggcgaatatattcattctcttgcggcaggcacggcattccctgctgaactgtacggctttgtttttttcatcttttgtatggttatcctttgctttaatctttcatttgtcggcatggttgcactcattttttccactgccgcggcgcttatcctgtttggaagcagcgcggcttccgtgccttacttccgtgaggggcctctcgtagacggaacatttcagtttaccgattttggccgcggattgctgctcctgttctgggcattggtcggatgggaaatcgtcggcaactacagcatggaagtgaaaaaccgcgggaaaacgattccacgggctgtcgtgatcagcagcctgacggtaacggtcatatatttggcgaccgcggcagctgttcagtggattgatcctggattctccgcaaacggacaattgaagctggcgatgatgctgacgccgttgttcggatcttttgcattgccggtgatcgcagtgctcaccgctgtcctctgtatgtgtgcttattttcaggtgacaggcggagcagccaggctggtggcctcgcaggccggcgggctgtttgcctacagatcaaggggaaatcagccgactgcagcgctggggcttatatttctcatccatacgatcgttttcgtctgcctgatgtttcactttcttaatgttgagacgctggttctgatcgcaaacgcctttttcatctgcaactcgctgtgcggtcttgccgcagcttacaagctgttatcaggccgcatttacaaaaaagtatgcctctttctcatggggggcttcacgctgcttattttgttttcatcatcgtgggtattactgtttatcatgcttgccagcgcattgtttgttgtgaacttccgccaacttaacatttggaaaaaggtaaaacgccctttcaaatcgtattaa

SEQ ID NO: 3668 - DNA, 894 bp, Bacillus licheniformis
atggagatccgacacttgaaaacatttaaaacaatcgtggatatcggcggttttacccgtgctgccgattatttaggatatgcacagtccactgtgacttcgcacgttcaagcaatcgaacaagaattaagaaagccgctgttctaccggctcgggaaaaaaatgatgctgacagaagcgggaaagcaccttctcccttatgccgcagaaatggtcgagctgtatgaaaaagcgaggcacattccggaaaacgaccaggagccgtcgggaaacttgatcatcggcgcctcggaatctttaacggtatacaggctgcccgccattcttcacgaatttacaagcaaatatccgcaggtcacggtcactttaaagtcttccacgtgctggcagctgagagacgaattgaaacagggaaaaatcgatgtcgcttttcttttggacaacgaccggaaagaaaacgaccttcatgttgaaaagctggtcaatgagccgatggtgttcatctttcccaaagaacacccggcaggacaaaaagctcttgatgatttgacttttaacgcaaatgaaacgtttttatataccgagcacggctgcagctaccgtgatttttttgaggaatatttacgtcaaaggggagtcattgccgaccatacgatggagttttggagtgtcgaagcgattaaacaatgcgtaatgtgcggtttgggcgtctcccttcttcctttgatcacaacgcgcactgatatcgaagaaggaaagcttcagggcacgctggtccgcgacgccctgttttccactcaaatggtttatcataaaaacaaatggctttctcctgctatggcggcttttacggatatcgtccgcaggaaggcaagagaatgggaacagacataa

SEQ ID NO: 3669 - DNA, 405 bp, Bacillus licheniformis
atgcatttttccgatttttccgccgtacaggtcagaatcgcccggcctacagaccgttttgacgaaatcgttgcattttacgaaaaggggctggggctgaaaaagcttggcggtttttccggccaccacgggtataatggcgtcatgttcggcctgccgaatgtccaataccaccttgaattcacctcacatatcgaaggaagcccttgtccggcaccgactaaagacaatctgctcgttttttatattcctgatccggaggaaatcaggagcatattaaataggctcgctgacatgggctatgacgaagtgccgcctgaaaatccgtattggaaggaaaaaggggcaacggtggaagatccggacggctggcggatcgtgctgatgaataccgaaggcatatag

SEQ ID NO: 3670 - DNA, 126 bp, Bacillus licheniformis
atggcgaaagccccttcaatccgaaggggctttttctgtcattccgccgaaaggatgataatatttcagacgatcgcttcgtttcaaatgatccatgaccgcttaaaatgggaaaaaaggagatga

SEQ ID NO: 3671 - DNA, 2415 bp, Bacillus licheniformis
ttgagctttgaccatcaaacaatcgagaaaaagtggcaggactattggctgaaaaataaaacgtttgccactcgtgaagataaatccaaacctaaattttatgcattggacatgtttccgtatccgtcgggcgcaggccttcacgtcggacaccctgaaggctatacagcaactgacattttgtcccgcatgaaacggatgcaagggtacaatgtcctccatccgatgggctgggatgcattcgggcttcctgccgagcaatatgcgctagatacgggaaacgatcctgccgtcttcaccgagcagaacattgacaacttccgccgccagatcagagcgctcggcttttcgtatgattgggacagagaagtcaacacaacagatccggactactataaatggacgcagtggattttcttaaagctttacgaaaaaggtctcgcttatgtagatgaggtccctgtaaactggtgtcctgcgcttggaaccgttcttgccaatgaagaagtcatcgacggcaaaagcgaacgcggcggacatcctgtagaacgccgtccaatgaagcagtggatgctgaaaattaccgcttatgccgaccgcctgcttgaagacctggaagaactcgactggccggaaagcattaaagaaatgcagcgcaactggatcggccgttctgaaggggcgcatgttcattttgcggtcgacggcaccaatgaaacgtttacggttttcaccacgcggcctgacacattattcggtgcgacatatgccgtgctggctccggagcatgatttggttcaaaaaatcacaacgcctgaacagaaagacgcagtcaacgcctatattgaagaagttcaatcaaagagcgacttggagcggacagaccttgccaaaacaaagacaggcgtcttcacaggtgcatatgcggttaatccggcaaacggagaaaaaattccggtctggattgcggactatgtcttggctacatacgggaccggggcggtcatggccgttcctgcccatgatgagcgggaccatgaatttgcatcagcattcgggctgccgatcaaagaagtcgtcaaaggcggggatgttgagaaagaagcatatacaggcgacggcgaacatatccattcagattttctgaacggtcttgataaagcggctgcgatcgaaaaaatgatccagtggcttgaggaaaacgggaagggcgagaaaaaagtaacataccgcctccgcgactggctgttcagccgtcagcgctactggggcgagccgatcccgatcatccattgggaagacggcacatcgactccggttcctgaagaagagctgccgctgatcttgccgaaaacgtcggaaatcaaaccgagcggaacgggtgagtcccctcttgcgaatattaaagaatgggtggaagtgacagatcctgaaacaggcaaaaagggaagacgcgaaacgaatacgatgccgcaatgggcgggaagctgctggtacttcctgcgctacattgatccgaagaacccgaacgagctggcttcccctgaaaaattaaaggaatggcttcctgtcgatatgtatatcggaggggcggagcacgccgttcttcacttattgtatgcgcgcttctggcataaattcctttatgacatcggggtcgttccgacgaaagagccgttcaaacagctttataaccaagggatgattcttggcgaaaacaatgaaaaaatgagcaaatccaaaggcaatgtcgtcaatccggacgaaattgtggagacgcatggcgcggacacgctccggctgtacgaaatgttcatgggacctttggatgcatcgatcgcctggtcaacgacagggcttgacggagcccgccgcttccttgaccgcgtatggcgtttgtttatcgatgacaatggcgggttaaacgagaagatcgttgaaggagccggcgaaacgcttgagcgcgtctaccatgaaacggtcatgaaagtaacggaccatttcgaaggtctgcgctttaatacaggcatttcacagctgatggtcttcatcaatgaagcatataaagctgatcagcttccgaaagaatacatggaaggcttcgtgaaattgctttctcctgtcgcgcctcatttggctgaagagctctggaaccgcctcggtcatgaggaaacgatcgcgtatgaagcatggcctgtctatgatgaagcgaagctcgtggatgatgaaattgaaatcgtcgttcagctgaacggaaaggtgaaagcgaagctgaacgttccagccgacgcggacaaagaacagcttgaagagctggcgaaaaacaatgaaaaagtaaaagaacagctagaaggaaaaacgatcagaaaagtgatcgctgtgcctggaaagcttgtaaatattgttgcaaattaa

SEQ ID NO: 3672 - DNA, 329 bp, Bacillus licheniformis
atgaagatgctgcatcaagttttggttgcttgtttgattggagggattatgggggttctcgggcacgttaaaaaaagaggacgactcgagaaaccgagaacaacgaaacgattcatttaccttggattttttgaagatattcttgtcgaatggttgcttctattttgcttgttttatctgcggaacctgattcgggaattcagcttgtcgtgttatcgatcattgccggctacggcggtgaagctgtattgagaagctttgactttgtcagagaacagcaggcaaatgtacagaactccgaacggcaaaacaaatctccacacgattaa

SEQ ID NO: 3673 - DNA, 117 bp, Bacillus licheniformis
atggaagaaacaagctttttttcttctcagacagaacacattttctgtatggtagtatcgaatatcatcgcaaggggtctaggggggctgctcgatggcctgaagtcgcttgactaa

SEQ ID NO: 3674 - DNA, 1182 bp, Bacillus licheniformis
atgccgcgcacattatggcttttggtcatcggaatgtttatcaatgtcacgggggcatcttttttatggccgctgaataccatctatatccatcagcatttgggaaagtcgctgacagcggccggatttgtgctgatgctgaactcaggggcaaatgtgctgggcaacctgttcgggggatatctattcgataaaatcggcggatttaaaacggttgttcttggaattgtgatcacgtttgcgagcctttctggcctcgtcttttttcacgattggttccagtacattcttttcttaacgttggccggttttggatcagggatcgtttttccggcatgctatgcaatggccggatcagtttggccggaaggcggcagaaagccgttcaacgctgtatacgtggcccaaaatgcaggtgtggcagttggctcagcgctcggcggaattgtcgcttctttttcatttacgtatgtttttctcgcgaatgcgatgctgtacgccgtcttcttcatgattgcgtttttcggatttaaacgcatccggtctgaaaaagccatgcagtcatctgttttggatcatgccgattcagtcagcgggaaatcgaaattttctgcgcttttggtcatatgtacgggctacctgctcggctggatcgcttattcgcaatggtcctcgaccatcgcttcacatacccaggagctggggatatctcttgggcagtacagcgtgctttggacagtgaacggggcgctcatcgttttcggtcagccgctgatcggtttttttgtgaaacggtttgccgaatcgctgaaaaaccaaatcgtgatcggatttgtcatttttatgatggcatacggaattttgtttggcgctgaacggtttccggcttttcttgctgcgatggttgtgctgaccattggcgaaatgcttgtatggccggctgtgccgacgattgcaaaccgtctcgcaccgagagggaaagaagggttttatcaagggtttgtcaacagtatggcgaccggcggaagaatgatcggaccgctttttggcggaatgctggttgattattttagtatgcagcttttgctcgcggttctgctcgcattgctgctgattgcaataggaacggcgtttttatacgacaggaaggaaaagcagctctccgctcagtcagatgcatga

SEQ ID NO: 3675 - DNA, 825 bp, Bacillus licheniformis
atgaacaagttattaaaatggacttctgcgctgggactggccttgagcctggcgcttctggccgcgtgcggaaacaatgccgcaagcgacggcaaaacgatcaaaataggcgccactgcaggaccgtattacgatatggtcaaaaaagcgattcaacctgagcttgagaaaaaaggctacaaagtggaggtgatcgaattcaccgattatgtacagccgaatactgcgttaagtgaaggcgagctcgacgcgaatttgtttcagcatgaggtttttatgaaatcatacaatcaagaaaacaataaaaatcttgcggctctcatttctgtgccgactgctccgatggggctctattctgccaaatataacgacttgaacgatgtcaaaagcggagcggaagtggctgttccaaacgatccggccaatgctgccagggcatttttaacccttcaggatcaggggctgattcggctgaaaagcgatgtcgacacattgaaagcctctgtgcaggacattgcggaaaatccgaaaaagctgacatttaaacagcttgaatccgccaatcttccaagagctgtcgatgacctggatatcgcggccgtcccgggaaatttcgctctctccgccaatatgaagctgcaggacgccctagcgcttgagaacatgcccgaccgctaccgcaaccaagtggtagtggatgaaaaaaacaaagacaagccattcgccaaagatctcaaagaagcggtaaaatccaaagctttcgaggagacgatcgatcgggaattcgccggtttcggaaagccgaaatggatgacgcaatcataa

SEQ ID NO: 3676 - DNA, 681 bp, Bacillus licheniformis
atggaatctatcatgctgatcgggtttttatccttccttttttccatctgctatcttgtatttcatttgatcagaaggattttttctccaggcaaaaggttttccaggaaactcttttatccttgttttgccggcggacttctcctcctgatcatctctgcaccttattacgatgaggaaacatatgccgccgatgagaaaaaaacggagaatctgacaaccgagcttcaggaactgaaaactgaacacagcgctttgcaaaaggagcaaaccgcattaaagcagcaggttaaacaagcaaacgaaaaattaaaatcagtcaaagcggaaaatgacacattaaaaaaagcaaacgaaaaactgacaaaagaaaaagattcgcttacgaaaaaaacaaaatcgctgacagaaaaactggccaaggctgaagaaaaaagcggcagtgccgaaacctctgtaaaagaaaagagcgccgccgctcaggccgaagcgtcacacagcacgcccgccgccaagaaaagcagcgctgaaagcaaacaggagtgcaaaatcaaaggaagcgtcaaccatatttatcatacaccgggcagtacatattatgaccgcacgaaaaacgtcgctcgctggttctgcacagaacaggaggcgcgtgatgcggggtacagaccgccaaaacgttaa

SEQ ID NO: 3677 - DNA, 1332 bp, Bacillus licheniformis
ttgaagtttaaggaccagttgaagttcattagaagaaatatgaagaaaaaccgcctgcgtgtattcatgaccattctcgcaacaacggtggcctgcgcgtttttaatcgtgctcgcatcggtcggattcggactgcaaaaatcaatgactgaacagctgatgaaagagcagatcgtgaccgagataaatgttgtcggaaaagaagggcaaagcgatcaaaaggttcaaaagaaagacctgaaagaatttgaaaaccgcaaagatgtgtccgcgattatcgagcgcacaaacgtgttcgcacctgctgaagcaaaattgggcaacaggaccaataatcaaatgtcgaatattacaattaccgacatggccgctgagcaaaaagccaatatcaaactcgatcgcggccgcgtagcgaaaacaccgaatgaaattgtcgtcggctaccatttcgggaagaacctctggacgaaaaaggaagccgcagattatgaaaagcagatggaaaataatgctgaggaagcaaaagagccgaaaggatacgaagaagatattctcggcaaaacgattgaattaaagatctcaaaaatggatgaaaaaacaggagaagaaggggaagcgaaaacatatgatctgaaagttgtcggagtgacaaaaaaaccttcgtatgaatgggcgagcgattcaacagtctatgtcagcaacggcatgcaaaaagacatcaccggctttctgaagtcggaaaaagacagcggcatgatcgaaaaaacgctttcggtttacgcggataactttgaacatgtcggacagctgacaacagatttggaggatgaaggctactacgtcgattcaataacgaaaaagctcgatagcatcaatctttttttcatggcttttaaaatcggtctgatctttgtcggagtcattgccgtcttgatttcagcgatcgggattttcaacacgatgacaatggcggttacagagcggacgcaggaaatcggcattatgaaagcgatcggtgcaagcccgaatgtgatccgaaaaatgttcctgctggaaagcgcctatatcggcatcttaggatctgttttaggtattatcatttcatacggtgtcagctttttagtgaacaagattatacctgtcattttatcatcggtttcagaaggagaagcgagtgcggcagagctcagtatcaccttctcgcatattccggtcagtcttgtcctcatcgcgacattgatcagtgcgggtgtcgccattctttccggcctgaatccggccattaaagcgacaagaacgaacgtgctgacagcattaagaagagagctttaa

SEQ ID NO: 3678 - DNA, 699 bp, Bacillus licheniformis
atgatcagtgtaaagcatattcaccactcgtttaaagtcggcaaaaagggaagggaaaatgaaattaaggtgttaaaggacgtctcgcttaccgttgaaaaaggagaaatcgcctgtattgtcggacggagcggctccggaaagtcgacactgctgaacttgatttccggctacatcgccccgacaaaagggaagatcatgattgacggcacggatgtcacgaagtacagcgagaaagaatgggccgcattcaggcttgaacatttcggcttcatctttcaaagttttcagctgattccgagcttgacgactttcgaaaatatcgaacttcccctgactttaaaaggtgttcatccgtcggagcggaagcagcgcgtcaacgagatgctccaccgcgtcggccttgaaaaccacgccggccactatccgaatgagctttcaggcggacagcagcagcgcgtcagcatcgcccgcgctttgattttgaatccttcaatcattttagccgacgagccgaccggaagcctggattccgaaacagagcaggaaatccttgaattcattcggcagctgaacagggaacgcggcattacatttgtcatcatcacgcacgatgacgaggtggcatcgatcgccaatacgaaatttcatttatctgacggcgtgttagagaaaggggaagagactgttgaagtttaa

SEQ ID NO: 3679 - DNA, 978 bp, Bacillus licheniformis
atggtagaccgcggacttttatataaagaatggaaacagcatttctggatttttttagttgtttttgcagcggtgttgctgagtgaaccgcttgcgattttgaatgattatttccagtaccagggatgccttgcagaacagaaaaaatttcccgatatagagtgcgttttatataaagattatggggtaagcggggccatgagaatgttctgggttggcggagtcgcgcttgcgatcagccagatcgggtttgaacggagcagtggaacgcttgactttacactcggcctcccttacaagcgcggcgtcattttcaatactaaatatttcttcggcatttcaattcttttaacagcccagctattatcttacttgttatcttacgctttgattattttgtataacgttgacgttgtctttttccatgagtattttatcggggcggttatcttctgctttatggtctactcgcttgtcatggcggcgggcgcgatgaccggcaatccgctggcccagatgatcgttgctttttcagcgtcgattctgccgtatttgctgatcggccttccgctggccaacttacgaatcatcctgggtttctttgggcatgaccctgctttcttttatggtgaaacagaactactagattatataacgccgatcatatacctcaacagtttcggcattcaagacggcagcctggcctttacgcttattccgctcgccatggggatcttgttttatataatcggctatttctgctttatcaaacagcagcttgaacggaacggacattttttcctttggagaaaaatggatcgtccgatccagattctcgtgattttattcggcatctggggattcggcacagccgctgcttcgagtctgttcagctatatattcggtatgttgatcggttcggcagtcggatttttaatcagttacttcttgattttcaaaaaaataaaacagctgtaa

SEQ ID NO: 3680 - DNA, 879 bp, Bacillus licheniformis
atgattgagctcaaatctgtttcaaaaacgattgacggaaaacaaatacttaaagacatctcctttaagctggaggaaggagagattttcggacttctcggaagaaacggctcaggaaaaacgacgcttcttcgcctgattcagcaaatcctgctgcctgatgagggagatatctttttcggcagcgtcaaggtgaaggatcatccgctcgtcaagcgcaacatcgtctatatgcccgttcaaaacacctatttcgaaaaatacaattacaaacagctcgtcaatattttgcgtaacatttatccggactttgatgttacatatgcaaatgaattaatgaaccgatacgatattcccgaaacaaaaaagtacagggaattgtctacaggattgaaaaagcaaatgtcgctgatcctgtcatttgcgatccggccggcggtcatcctgcttgatgagccgacagacggcattgatgccgtcacaagacaagacgttcttcagctgatggtcgatgaagtggctgaaaacaacacgacgattctcatcacatctcaccggcttgaggacattgaaagaatgtgcaaccgaatcggttttctcgaagacaatacattgtcgaacatcatggatcttgatgaactgaaaggcgattttattaaaattcaaatggcatttgaagaagatgtcaatttaaaaatcagggaaagggaaatccctgttttggaccacaccggcgtcttttatacggtattggttccgaaagaagacaatgtgagcaaacaatttcttaaaagtttgtctccgaaagtttggaacgagcttccggtcagtcttgaggaagtattcatcgcgaagtatggaggtaagcgaagatggtag

SEQ ID NO: 3681 - DNA, 393 bp, Bacillus licheniformis
atgattcaaatcgatccgagaagctcaaccccaatctatgagcagatcatccagcagatgaaagagctgtgcttaaaagggataatcaagcctggagataaacttccttctgtcagagagcttgcaaccattatcattgcaaacccgaatacggtcagcaaagcctataaagaacttgaacgggaagggattattgaaacgttgaggggaagaggaacgtatatttcagaaaacgcgaaagttacgcttgatgaagggaagattgcgatgattaaagagcagttaaagcagctgatcatcgatgcgcattacgcggggatcgacaccaaaaagctgcaggagtggatggcggaaatcgacgaagaagtgagaggaggcgaagtgaatgattga

SEQ ID NO: 3682 - DNA, 129 bp, Bacillus licheniformis
atgagtgataaacataaaaaagtaacgccaatggttgtcgtggcgtttatcattgcctgttcgttcttgtttgtacttgcgaagctgggctttatgattcaagaaaatttgggatatgtgtttttttaa

SEQ ID NO: 3683 - DNA, 273 bp, Bacillus licheniformis
ttggctacaagacaatccgtcggagagcacatccaaagaagcgaagatgcttatgattatgctttatctcaatttgaaactgcaagcaggcaggaacattacaatgagacagagtacagcgatgcgcagctgatgcttgaaaacgcggtcaatgaattaaacaagctttcgctgtttgccaatgagcagcaaagggaggaaattcaccgcaaaaggctccagctgcaaacccttcaaaacaatatgattctgcagagatcgtatgaaagatga

SEQ ID NO: 3684 - DNA, 969 bp, Bacillus licheniformis
ttgcatcagaacaacccttttccatatacgaacagtgaaaaacgatatcatacatggaattatcatttaagaaatcatttcggtcataaagtgtttaaagtcgcccttgacggaggctttgactgcccgaaccgcgacggtacggtcgcacacggcggatgcacattttgcagcgccgcagggagcggagactttgcgggaaaccgcgccgacgatctgattacccaatttaatgaagtgcgcgacagaatgcatgaaaaatggaaagacggcaaatacatggcgtactttcaagcatttacgaatacgcacgctcccgtcagcgttcttcgcgaaaaatacgagaccgtcctcggccttgacggcgtagtcggcctttcaatcgctacccggccggattgtctacctgacgatgttgtcgaatatcttgccgagcttaatgaacgcacatacctctgggtggagctcggccttcagaccgttcatgaacggacggctgatttgatcaaccgcgcccatgatttcgactgctacgtggaaggcgtgaacaagctgaggaaacacggcatccgggtctgctcccacatcattaacggactgcctctcgaagaccgcggcatgatgatggaaaccgcaaaagccgtcgccgatttggacgtgcaggggattaaaatccatctgctccacctgttaaaagggacaccaatggtgaagcagtatgaaaaaggaaaattaacgttcctttctcaagatgaatatgtccagcttgtttgcgatcagcttgaaattcttccgccggaaatgatcattcaccggattacgggtgacggaccgatcgaattgatggtcggaccgatgtggagcgtcaataaatgggaagtcttaaacgccatcaacggggaattggaaaggcgcggcagccatcaggggaaatggttcaacaaggcgaaagaaggcatggccacatga

SEQ ID NO: 3685 - DNA, 585 bp, Bacillus licheniformis
atgaagctcaagaaaatcctcccgtatgcgaaagaactgctgaaaacagccgcaggcgaaggagacatcgtcattgatgcgacaatgggaaacggacatgatactcactttttagctgaacttgtcggtgaaagcgggcatgtctatgcctttgacattcaagaagcagctcttatgaatactgccgaaagacttggaaacgagtataaagaccgggtgacattgattcaaaaaagccatgatgagctcaccacttcgcttcctgacgacatctcaggcaaggtggcagcagccgtgtttaacctcggatatcttccgggaggcgacaaatcggtgacgacaaaaagcgattcgaccatcgccagcatcaagcagcttctcaaaatcctgaaaaatgaggggctgatcgtgcttgtcgtctaccatggccatcccgaaggaaagcgggaaaaagacgccctgctcgaattttgtgcatcgctcgaccaggatacggcccgtgtcctctgttaccaatatttaaaccagcgaaacgatccgccgtttatcattgcgatcgaaaagaaagaagcggtccaaaagtga

SEQ ID NO: 3686 - DNA, 1251 bp, Bacillus licheniformis
ttgaaaaaatttatcgcttatcaaattttgatcgcactcgccattggagcagttatcggacatttcttccctgatttcggaatggcgctgcgccccgtcggagacggatttatccgtctgattaaaatgatcgtcgttccaatcgttttttctacaattgtcatcggagcggccggaagcggaagcatgaaaaaaatgggcagcctcggcatcaagacgattatttggtttgaagtgattacgacgttcgtgctcggactcgggctgcttttggctaatgtgttaaagcccggcgtcggccttgacctttcccatttggccaaaaaggatatcgacgaactctcgggctacacggaaaaagtggtcgatattaaacaaatgatcctcgatatcattcctaccaacatcgttgacgtcatggccagaaatgatttgctcgccgtgatcttctttgcgatattgttcggcgttgcagctgccgggatcggcaaagcctcggaacctgtcatgaagttttttgaatctgttgccaacatcatgttcaagctgacgcagatggtgatggtcacagcgcctatcggcgtgcttgctcttatggccgcatccgtcgggcaatacggcatcgagctcctgcttcctatgttaaaattagtcggcactgtttttctcggactgtttctcgttctttttgttttatttccgatcgtcggtcttgtttttaaaattaaatacttcgaagtcctgaaaatgatttgggatttgtttctgatcgcgttctccacgacgagcacagaaacagtcttgccgcagctgatggaccgcatggagaaatacggctgcccaaaacgggtcgtttccttcgtggttccttcaggcttatctctgaattgcgacggctccagcctatatttatcggtcgcctgtatctttttggcgcaggctttcaatatagacatgagcatttcccagcaattgctcatgatgctcgtgctagtgatgacaagcaaagggatcgccgccgtgccatctggctcgctcgtcgtccttctggctaccgccaacgcagtcggccttcccgctgaaggagtcgcgattatcgcgggagtggaccgcgtgatggacatggcgcgaacaggcgtgaacgtgccgggtcatgctgtcgcctgcatcgttgtttctaaatgggaaaaaagcttccggtataataagcgctttgtgcttgaaaaacaataccggacggaaagtttataa

SEQ ID NO: 3687 - DNA, 1080 bp, Bacillus licheniformis
ttggcagtaccggagcatccttttggattaatggctaaagtatacagagaggtttttccccttgttcatcaggaattggacaagtggaaacgaaaagctgaaacgattcaaaatcccgaactgaaaacgcaggcgaaagccagcatcagggataaaacctttcactgtgaaggcggcggcattatggcccttctttcaggagacaaaatcgagcagtcgatccggtttattacggcgtatcagacgataagcgactacctcgacaatctatgcgaccggagcacctcgcttgatccggatgatttcaccatgcttcaccagtcgatgaaagacgcgctgacagtcggggctgaattgaaaaactattaccggttcagggaagatcaggatgatcaaggctatttgcacgacttagtgaaaacatgtcaaggcgtgcttgcggaaattgagaactatgatctgatcaaggagcatctgattgagctttgcagctactattgcgacctgcaagttcataaacacgtagtggagcatgagcgtgttccccggctcgaagcgtggtttgagaattataaatcggctctgccgaaaatggaatggtatgagttctcggcctgtgcgggttcaacgctcggcatcttctgcctcgtatcgtattccgtccgtcccgattttactgaatcgatggccggaaagatccgcgacagctattttccgtacatacagggactgcacatcctgctcgattatttaattgaccaggaggaagatttaatcggcggggatttgaatttctgcacttattacccatcacattcagatatgatggaaaggctcgaatatttcatcgaaatggcggatgaacatttgcgcgggattccgcacgaaaactttcaccgtttgatcaacagaggactgttaggcgtttatttgtcggatgacaaagtagcgggccagaaggaaatcggccggcttgcgaaaaagctgattaaagcgagcggcaaaacatctttctttttctatattaacggcagggcataccgcaaaattcaaaaaatgccgtggatgaaaagctcgtaa

SEQ ID NO: 3688 - DNA, 780 bp, Bacillus licheniformis
atgtggtgcatggaagcggaaagacctgttgctacaatcgtcatcattcacggtgcatgtgagcatcacgggcggtataaatggctgtccgaaatgtggcgttcatccggctttaatgtcgtaatgggggatttgcccggccagggaacttcgacaagagaaagaggacatatacgctcttttcaagaatatattgatgaagtggacaaatgggtcgccagggcgaaagcatttgaactgcctgtgtttatgctcgggcacagcatgggcggcctgattgcgatcgaatggtttaagcagcagcaaagcggcattgccggtctcattttatcatccccttgtctcgggctgcaattaaagccgaacaaatttctggacttgatttccaaggggctcaacgttttggcgccgtctatgcggtttgaatccgggatcacgcctgataaagcgacgagaaacaaagaagtcatcgaaatggacatcaacgattcattatatatcacaaaagtttctgtcagatggtatcaagaaatgttaaaagcgttgaaaagcgcgatggagccgacggacgcctttctcaacatcccgctctttgtcatgcaggcgggcaccgactggcttgtcgacaaaaaaatggtcgtcaagtggtttaaccagcttgcttcccacaataagacgtacagggaatgggatggcttgtaccacgaaattttcaatgagcctgaacgggaagacgtttttaaagcggccagagcgtttgcggagcagtatataacataa

SEQ ID NO: 3689 - DNA, 519 bp, Bacillus licheniformis
atgatctacccttataaaaaaacggaacccgttattcatgaaacggcgtttatcgccgacaacgcggtcatcaccggagatgtaacaatcggagagcgatcaagcatctggttctcttctgttatccgcggcgatgtcgccccggtcagaattggaaaaggtgtgaacattcaagacctttcctgtctgcaccaaagccctgaacgccctctcgtgattgaagacggtgtgacggtaggccatcaggttacattgcacagctccgtgattcgaaagcatgcccttatcggaatggggtcgattattcttgacgaagcggagatcggggaaggcgcttttatcggggcgggcagccttgtcccgcctggcaaaaagatcccgtccgggcacctcgcattcggcaggcccgccaaagtcatccgtccgttaaccgacaaagataaacaggaaatggaaagaatacgcaaagaatatattgaaaaaggacaatactacaaatccttgcaaaaaaaagattag

SEQ ID NO: 3690 - DNA, 135 bp, Bacillus licheniformis
ttgctacaactttaccatttttccaccgataatttaagcaaaaaccttttcggccgcacgcgtctgcggcttttttctttttccgaaatctttacaaatacttatcatttgctaaacattcattttttacaataa

SEQ ID NO: 3691 - DNA, 525 bp, Bacillus licheniformis
ttgaataaactgatggttggcatttacaactttgaatgccggattttcctcggtatgaacagattatttcatcaaaaaacactcaaccgttattttcgttcctcaactcatttgggaggggctatgtgcacgatttctgcctgcctgtctctcttgctgttcggctcgggaagtgttcgtacagcggggatggccagcgcccttgcacttttggtcagccaccttcaagtcatgctgatcaaaaagctgtatccgagaaagcggccgtatttaacgctaaaggaaactcaggttttgcaaaatccgctcaaggatcattcttttccatccggacatacgacagctgtattttctgttattacaccgttaatgatattctttccgatactcgcgcttttattaataccggttggcgtcagtgtggggctctccaggatttatctcggtcttcattatccatcggatgttctggcaggcacagccctcgggatttcagtcggaaccttgtcggcgatgatcttctaa

SEQ ID NO: 3692 - DNA, 1137 bp, Bacillus licheniformis
atgaaaattgcgatatttacggacacgttcacaccagatgtgaacggctgcgccagaacgctgaaaaggtatacggattatcttgaaaaaaacgggatgccctataaagtatttgcgccggaaagcacgcatgaaacacaattttcgagccgcatccgccgttttacgagcatgccgttcttcttataccccgagtgcagaatcgctcttcctaatctcatcaaaatgaaatcagaactccgcgaattccatcccgatctcattcacatcgcgactccttttaatatcggcctggcggggctcaagcttgcgaagaaatggaacatccccgtcgtaggctcttaccataccgattttgaccagtacctttcatattatgatcttcaaatgttttccaaactcttatggaaatatatgctctggtttcataaagattttcgaaaagtttttgtgccttcgcgcgaaacatttatgcagcttaaagccaaacaattcaggaacctctccatctggaagcgcggcgtggactgctcgcagttcagtccggcgcatcaaaccgaacacatccgcaagcgatacggcataaaggaaacctatatcctcagctatgtcggaaggcttgcacctgaaaaagacttggagacgctgctcaagatcgcaagtcaccccgctttgaaagatgacgtccactggctgatcgccggagacggcccgttaaaaaaagagcttgagaagcgagctcccctcaacatgacttttgccggctatgtcaaaggagaagagctggcaagcatctatgcgagctcagatttgttcgtctttccttctccgacggaaaccttcggaaattccgcccttgaagcgctcgcctgtgggacgcctgttatcggggcagactccggcggcctgaaagattttatacagaacggaagaaacggttttctttccgaacctagaaatccggaagcattcaccgcaaatatattgcgcgtcctctccaacccatcgttaaaaaaacggatggcatacgaagcgagaagctatgcccttacccagtcgtgggacgtgatctttgacaatctcctctccgaatgtgaaagcgtgcttgcagatttatcagcagaaaaaacggcataa

SEQ ID NO: 3693 - DNA, 1899 bp, Bacillus licheniformis
atgtgtggatttgtaggggtattcaatcatcgcccatcatccgagacagcagcacaggaagaactgattaaacaaatgaatgaaatgattgtacaccgcggtccggacgatgatgggtactatcatgatgagcatgtaggcttcggatttagaaggctcagcatcatcgatgtggaaaatggaggacagcctctgtcttatgaagacgactcctattggattatttttaatggagaaatctataactatatagaactgaaagacgaacttctttctaaaggatacgagttcaaaaccgattcagatacggaagttttgcttgcgacttaccgccactacaaacaggaagccgcttcaaagctgcgcggtatgtttgcttttttaatctgggataaaaaagagcagcttctatacggagcgcgcgatccgttcggcattaagccgctctattttacgaaaacggacggccacgtttattttgcgtcagaaagaaagagcctgatggctgtcgatgctgacttggaattgaatgaaaaagcgcttcagcagtatacatcgttccaattcgttccggagcctgagacgctggacaaaaaggtgcaaaaagtagagtcgggccatcagtttaccgtccgcccgggtgaggatattcaatttaaaacatactggaaagttcaattcaagccggttcagacagaagaagacaagcttgttcaggaagtaagagacgcgatctttgattctgtaaaagttcatatgcgaagcgatgtgcctgtaggttccttcctttccgggggcattgactcgtcctttatcgtgtcagtggcgaagcaattccatcccaacttaaagacgttctctgtcggctttgaacatgaaggcttcagcgaagttgacgttgcgaaagaaaccgctgataaggtcggcgtggaaaacttcagcgcgatcatttcccctgaggaatatatgaacgagcttccaaagatcgtctggcatctggatgatcctctggcagaccctgctgcgattcctttgtattttgtcgcgaaggaagcgaagaagcaagttacggttgttttgtcaggagaaggggcagatgagctgttcggcggttacaatatttaccgagagccgctttcattaaagccgtttgagcggatcccgtccccgctgaaaaagatgcttctgcgcgtagcttcagcgatgccggaaggaatgaaagggaaaagctttttaatgaggggctgtactcctcttgaagatagatatatcggcaatgcaaagatttttgaagaaggcatgaaatcaaaacttcttcgccaatatgacagcaacctgtcttactgtgacgtgacaaagccatattttgaagaaagcaggtcctacagcgaaatcaataaaatgcagtatgtcgatatccacacatggctgcgcggcgatattttgctgaaggccgacaaaatgacgatggccaattcgctggagcttcgcgttccgtttttggacaaagtcgtatttgaagcggcttccaaaattcccgaagagctgaaaacgaaaaacggcacgacaaaatatcttcttagaaaagcggcggaaggcatcgttccagaacacgtgctaaaccgcaaaaaactagggttccctgtgccgatccgccactggctgaaaaacgaaatgcatgactgggccgtgaacatcattaaagagagcgagacagatgcatatatccataaagattacgtgcttcagcttcttgaagaccactgcgccaacaaagcggataacagccgcaaaatctggacggttctcatctttatgatctggcacagcattttcgttgaaaaacgctttgtaccggaagagctgaaccatcagccaaaagaggtcattattgtttaa

SEQ ID NO: 3694 - DNA, 123 bp, Bacillus licheniformis
ttgaaaaatgttcatattaaaatatttgtatctggcaatatcacatcaatattaaatctggatatttttcaagtttcaacatccgcccgcattttgccatcgaaaaacaaagccgcttattaa

SEQ ID NO: 3695 - DNA, 1203 bp, Bacillus licheniformis
atgagcaaaaaccgtcggttatttacatcagagtcagttacggagggacatccggacaaaatttgcgaccagatttcggatagtatattagacgaaattttaaagaaagatccgaatgcccgcgttgcctgtgaaacatctgtgacaaccggattggtgctggtaagcggtgaaatcacgacgtccacatacgtcgatattccgaaaacagtccgcgaaacgattaaagaaattggctacacacgtgcaaaatacggttttgatgccgaaacttgcgcggtcttaacgtctatagatgaacagtctccagacattgcaatgggagtcgaccaggcgcttgaagcgcgtgaaggagcaatgagcgacgctgaaattgaagcgatcggagccggagaccaaggtttaatgttcggttttgcctgcaacgaaacaaaggaacttatgccgctgccgatttcgcttgcccataaattgtctcgccgtttgacagaagtccgcaaagaggaaattctgccgtatctgcgtccggacggaaagacacaggtaaccgttgagtatgatgagaacaacaagccgattcgcatcgatacaatcgtcatttcgactcagcatcatcctgagatttcgcttgaacaaatccagcgcaatctgaaagagcacgtcatcaatccggtagttccaaaagagctgatcgatgaaaacacgaaatacttcattaatcctacgggccgttttgttatcggcggaccgcagggggatgccggtttaacagggcgcaaaatcatcgttgacacctatggcggctatgcccgtcacggaggcggagcgttttccggcaaggatgcgacaaaggttgacagatctgcagcttatgcagcgagatatgtagcgaaaaatatcgtcgccgcaggccttgctgattcctgtgaagtacagcttgcctacgcgatcggtgtcgctcagccggtgtccatttcaatcgatacattcggtacaggcaaagcgagtgaagaaacattgatcgaagtggttcgcaaaaactttgatctaagacctgccggcattattaaaatgctcgatcttcgccgtccgatttacaaaaaaacggcagcttacggacatttcggccgcctcgatctcgatctgccttgggagcgcacagacaaagcagatcagctgaagaaagatgcattaggagaataa

SEQ ID NO: 3696 - DNA, 1584 bp, Bacillus licheniformis
atgaattctgtagatttaacaactgacttacaaacgctattaacgggcgaaaacgttcagatgaacttatccgttccccatttggttgaaaagatccttgagcgcaaagaaggagtcttgacatcttccggagccgtgcgggcaacaaccggtacatacaccggccgctcgccaaaagacaaattcattgtggaagaagcgagcacaaaggacaaaatcgattggggcgcagtaaaccagccgatttcagaagccgcctttgaccggctgtacgcaaaagtgctcggctatttaaaggaacgcgatgaattgtatgtatttgaagggtttgcaggagcagacgaaaaataccggcttccgattactgttgtcaacgagttcgcctggcacaacctgtttgcaagacagttgttcatcagacctgaagaacatgataaaaaacctgaagaacagccgtttacgattctttcagctccgcatttcaaagccgatccgctcgttgacggaaccagatctgaaacgtttatcatcgtgtcgtttgagaagcggacgatcttaatcggaggcaccgaatatgccggagagatgaaaaaatcgattttttctattatgaattttcttctgcctgaacaaaacattctaccgatgcactgttcggcaaacattggcgaggaaggcggaactgctctcttcttcggattgtcaggtacaggcaaaacgacgctttccgccgatccgaagcggaagctgatcggcgacgacgaacacggctggtccagcacaggcgttttcaacattgaaggaggctgctacgccaaatgcattaacttaagcgaagaaaaagaaccgcagatttacaatgcgatccgcttcggttccgttctcgaaaatgtcgtggttgacagcaaaaccggagagccggactattccgactcattctacacggaaaacacgagagcggcttacccgattgacgcgattgacaacatcgtcaagccgagcatcgcagcgcacccgcagaccatcgtatttttgaccgcagatgctttcggcgtgcttcctccgatcagcaagttaacgaaagaacaagccatgtatcatttcctgagcggatatacaagcaagctcgccggcaccgaacgcgggatcaccactcctgaagccacattctcgacctgcttcggttcaccgttcctcccgcttccggcacatgtgtacgctgaaatgctcggaagaaaaatcgatgagcacggggtcggcgtctttctcgtcaatacaggctggaccggcggcggatacggaaccggggaaagaatgagcctcgcatatacgagagcgatggttcaggccgcaatagaaggagaactggataaagccgaaatgaggactgaccgcattttcggacttcattcacctgtccacgttccgggtgtgcctgatcaagtgcttgacccggccaaaacttggacagatgaaaacgaatacgaggaaaaagcgatccacctggcgaaagcattcaaacagaatttcaaaaagttctccaatacggaaaacatcgaaaaagccggaggaccgctcgtttaa

SEQ ID NO: 3697 - DNA, 1185 bp, Bacillus licheniformis
atgaaatttggattactgccaaggatcattacggcaattgttcttggtgttatcgtcggaagctttgctccgctttggttcgtcaaaacggcagctactttcaatgatatttttggaagcttcattaaatttgtcattccttttattattatcgcttttattattcccggcatcggacaaatcggcagcggcgccggaaaaatcctcggcattacggcaggtatcgcctacacgtcaaccatttttgcaggcctcctggcgtaccttgtcggttcaaaccttcttcccgcgatcatttccggccatcagctgcaggagtttaaaaatccggaagaagtactgcaagcaggatttttcaccattgaaatgacgccgtttatgagcgtgatgagcgcactgatttttgctttcatcatggggatcggcatcgcttatctgcccggaaaaacattaaaaaacgcgtttgatgaatttcaaacgatcgttgaaaagctgatatcatatattattattccgttactgcctgttcatattttcggtattttcaccaatatgacgttcggcggtcaggtgcagacgattctatccgtatttgcgaaagttttcgtgatgattatcgtgcttcaccttgtcatactcttgattcagtactccgttgcgggtgctgcaaacggcagaaatccgctgtcgctgttgaaaatcgtagcaccggcatacttcaccgcgctcggcacacaatcgtcagcggcaacgattcccgttacgctgagacaagtcagaaaaacgggggcaagccaaaaagtggctgacttcgccgttccgctcctggccaacattcatttgtcaggaagcacaattacactgacaagctgtgcaatgggcgtgatgattctaaacggtcaaacgccgactttttcggtcatgatgccgttcattttaatgcttggcgtcacaatggtcgcagcgcccggtgcaccaggcggtgccgtcatggccgctgccggattgttgcagtcgatgctcggctttaatgaaactagcgtatcgttgatgatcgctctttaccttgcccaggacagcttgggcacagcaacgaacgtaacaggagacggcgctctcaccatgctgattcacaggctgacttccaaaaaaggaatcggaaaagaggaaaatgtgcctgcataa

SEQ ID NO: 3698 - DNA, 243 bp, Bacillus licheniformis
gtgggaatgccagttgaatttaacacgatgattgtgacaaaaggaaaagaaacgcgggttgaggaaaatgtgtttacactcgagaaagaaggttatcgggtttaccctcttcatgtgccgcttgaagtcagaaagaccaagcggggcgacattaccggcaccgcgcaggcggagcgccttgaatggtcagacggacggactcatttaacatacaggctcgtatcattaaattccacgaattaa

SEQ ID NO: 3699 - DNA, 801 bp, Bacillus licheniformis
atgtggatagaaaaaagaaggtttccatcgccgaacaaagaggtgcgtctgttttccgtcacatacctttcacaaggactcaaggttaaggggcttttggccgaaccggccgctcccggaaattatgacgggtttttgtatttgcgcggcggaattaaaaacgtcgggatggtcagaccgggccgaatcgtccagttcgcttcacagggctttgtcgttcttgctccgttttacaggggcaatcaaggaggagaaggcgatgaggattttgcaggtaatgaccgggaagatgcttttgccgcttttcgtcttcttcagaagcacgaactggtaaaggacggacgcgttcacatttttggcttttcccgcggcggaatcatgggcatcttaacggcaatcgaaatgaaagcagcggccgcttcgtttgtgtcttggggcggtgtcagcgacatggtcatgacctatcgcgaacgaaaagatttgcggcggatgatgaagcgggtcatcggcgggacgcctgaaaaggttcccgaagcgtatgaatggaggacgccttttgacgagctggagaagattgaagcgcccgtgcttttgatccacggagcaaacgatgaaaatgtctccatcgagcatgcgcggcgtcttgagcgtgaacttctgcgaaggaacaagtctgtggatacgtggtatttcagccaatatacccactattttcctccgcgcgaaaacaggcggattgttagagaattatcccaatggatgaaaagccgtccttggacaagttatggtaaactaaagtaa

SEQ ID NO: 3700 - DNA, 993 bp, Bacillus licheniformis
ttgaagcgtttcttttttaccatattatccttcatcatgatgctgtttatcctcgcttcatgcggcggacaaaagaccgaaaagatccgtctggcggaagtgacccgttccgttttctatacgcctttatatatcgccttatctgaaggtttttttaaagaagaaggccttgatgttgaactgaaaacgacctggggcggagataaaacgatgactgcccttctgtcaaacggcgccgatattgcgcttgtcggctcggaaacgtcaatatacgtaaatgcccagggcgcaagcgatccggtgattaattttgcacagcttacccagacggacggaaccttcctcgtctccaggaacgattcggggcatttcagctgggatgatttgaaagacaaaacgttccttggccagcgcaaaggcggaatgccgcagatggcaggcgaatttgtcctcaaacagaaaggcatcgatcctaaaaaggatgtggatctgatccaaacgattgatttcgcgaatatcgcaaacagctttgcatctggtacaggtgattatgttcaattatttgaaccccaggcatccatttttgaaagagaaggcatcggccgcattgtcgcctccttcggaaaagaatcgggccgaatcccatatacaacttttatggccaaacaaagctatttaacgaaaaacaaagaagcggtcgaaaagttcacccgcgcggtttacaaagcgcagcagtgggttgagacgcactctgcaaaagaagcagccgaaagcattcaagattattttaaagataccgagctttcaatcattgcatcttcaatcgaacggtataaacaacaacagtcttttgctcttgatcctgttttggatgaaaaagaatggaaccagcttcaaaccatcatggatgaagccggcgagctgccgaagcgcacccctcatcaaaagctggtcaatacaaagatcgccgaaaaggtcacaaaaaattactag

SEQ ID NO: 3701 - DNA, 789 bp, Bacillus licheniformis
gtgtcttttctgcaagttcaggatgtcacacatacttacttttcattgaaggaaaaaacagcggcgctggaaaacgtcagcattgaagtcgaaaaaggcgaatttgtttcgtttctcggcccaagcggatgcggcaaaacaacgcttttatcgatcatcgccggcatcgtttcccccacggaaggacgcgtcttggttgaagggcgcacacctgatggaaaggatcggcacatcggttatatgctccagcaggattatttatttccctggaaaaccattgaggaaaacgtcttaatcggtttgcacatttccaaaaaactaggcccggaaacgaaggaaaccgctctcggcctgctgaaaaaattcgggctttacgaggttgaaaaaaagtatccaaaagagctctcgggcggcatgaggcaaagggcggcgcttgcccgcactctcgctgtcgaccccgatatccttctgcttgatgaacctttttcagcccttgactatcagacaaaattgaacctcgaagatttagtgttcaacacgttaaagacgtatcaaaaaacagcggtgctcgtgacccatgatatcggtgaagcgatagcgatgagcgaccggattctgctattttcaaagcagccgggcactatccataaaacatttgccgttcctgaaccgatcaggaagctgacaccgtttgaagcgaggcaggaaccggaatttcagcccctctttcagaacatatggaaggagctcaatgaccttgaacaacaaacatccgaaaccaaaagttga

SEQ ID NO: 3702 - DNA, 825 bp, Bacillus licheniformis
atgaccttgaacaacaaacatccgaaaccaaaagttgacttccttcatgaggcttttttaaaggagcagcaggccgaaaaaaggcgggtccgcttttttcaaatcgcgattttcatcgttttcttttcgctgtgggaaaccgcaagccgtctggcatggatcgatccgctgatcttcagctctccttcagccgtctgggcgcttttcctcgaaaaaatgggagacggatcattgccgggacatatcggtgtaaccgtatttgaaaccatcctcggctttctggccggaacattgcttggaacttttctagccgccctcttatggtggttcccgaggctctccaaaatattagatccgtatcttgtcgtcttaaatgcgatgccgaaagtggcgctgggtcccattctcatcgttgcgatcggccccagcttgacgagcattattgcaatgggcgccatcatcagcgttatcattacgactatcgtcgtctatacgtcctttcaagaaattgatgaaaactatttaaaagtgatgaaaacattcggcgctacgaaacgcgagattttcaaagaagtcattttgcccgcttccattccgacgatcatatctacactgaaggtcaatgtcggcttgagctgggtcggtgtcatcgtaggagaatttttagtatcggctcaaggcctcggctatatgatcatctacggctttcaagtctttaatttcaacctcgtcatgctgagcctcctgatcatcgccgtcttcgcaacattgatgtatcaaggtgtcgagctgttggaaagaaagtggatgaaaggcagagtataa

SEQ ID NO: 3703 - DNA, 477 bp, Bacillus licheniformis
atgtacgaatttaaagatttttaccgtaatacggttcagctttcttttgagaaggaacctttttcaaaagaaccaaagcatgtatgggtgatctgccgttacgaggatcaatggctgctgacaaatcataaggacaggggccgtgaattccccggcggcaaagtcgaaccgagcgaaaacgctgaggaagcggctttgcgggaagtgaaggaagaaacgggcgctgtcgtaagaaagctgacctatctcggacaatataaagttcttggcagggagaaagtgatcgtcaaaaatatttattttgccgatatcgaaaagatagaaaaacagcagacgtactatgagacgaatggtcctgttttgctgaagagcctcccgaaggatatcgcaaaaaacaaaaattacagttttattatgaaagattccgtcctgacgatcagtcttgaaaagctgaaaaaggccggcatcatcaaataa

SEQ ID NO: 3704 - DNA, 324 bp, Bacillus licheniformis
ttggaaaaaaagacatactatgtttcggtgcaagatggaatgatttcgcagagctctgacgcttccccgtgggaatttcaaatttcggcgacagatgatgacatcatcattttaagggaatattttgatcagctgtattcagaagactgggtcaactttttcagagctcacgtgcctgcggtcgaatatcacaatgacagtgcaaatgataaaatggacgaactgcgcaaagacatttactcgatgctttaccgtctgggcaatgaagaaaccaagtcatttatcagtgaaaacggccttgccgaactcaattcagcagattaa

SEQ ID NO: 3705 - DNA, 405 bp, Bacillus licheniformis
atgtttaaggacttaagcatcttttcgctctttacaattggtttatcggccatcggatttttgtttggccgaatcgaatatttatttatgatcttaattacgctgatgggcattgaatttgtcagcaaaagcttgaacgaatgtgtggaagatcgatttacaattaagaggctgtttacaaggctggcgaaaaaattggttacgctctttctgatatccgttgcccacctttttgatcaaatgctgcaaacaggcagttcgatccgcgatttttctattatgttttatattttatatgaagcgtttcaaatcgtgagcacggctcattcgttaggaatccccgtgccgcagatgttattggacattttaaataccataaaggaaaaactccggggaaagccgtaa

SEQ ID NO: 3706 - DNA, 438 bp, Bacillus licheniformis
atgtctgaaaaattgaaagcaaccgtcaacaaacaagtcgcgaactggaccgttctatatgtgaagctacataattatcattggtatgtgaaagggaaagatttctttacgctgcatgaaaaattcgaagagctttacacagaagcggcagagcatatcgatgatttggctgaacgcctattggccatacagggctctccggtcggaacgatgaaggaatgcctggaaatgtccgcgattaaagaagcggacggaagcgagtctgctgaacaaatggtgcaaaatatttataatgactttttaacggtggctgaggagctgaaaagcggaatggagcttgcagatgaagtcaacgatgaaacgacgggagacatgctgctcgcgattcatcaatcgatcgaaaaacacaactggatgctgaaagcctacttagggtaa

SEQ ID NO: 3707 - DNA, 144 bp, Bacillus licheniformis
atgatcctcttttggattattgtaggaattctgatcaccggcgccgttctggccatatcgcttgtcacaacatcaaaagcttatgacttcaagcatgaagtcgatcccctcccgtcgcgggaagaagaacagccccatcaatga

SEQ ID NO: 3708 - DNA, 444 bp, Bacillus licheniformis
atgcgttttggaaaatggttcattctcttatgtttagcggtcggtctttccgcctgcagccagggggacaagcaggcggcatcggatgaggagcccaaagtgctgacggcaaaactggcgacgcctgaatcggcggccaaaaatgaaaaggctgtcataaaagcgaccgtcctctacggggaagagccggttgcagatgccgatgaggtggagtttgaatgctggaaggccgggagcaaggaagatagcgagctaatcaaagcgaagaatgagggaaaaggcgtatacagcatggaaaaagcgtttcctgaagacggccattacaaagtccaagtccatgtcacggcgaaaaaacagcatacaatgcctgttgcagacattaaagtagggaaagcgacggatgagaccgatgaagatgaaaaagaagaagcccaccatcattga

SEQ ID NO: 3709 - DNA, 168 bp, Bacillus licheniformis
atgattgaaaaaaaccggctcataagagagccggttttctattttttgttcacaaagaaaataatgccatttatccctgaactttgctacactttatattgtaatacatatcatagaagaagggtgataggatgcgttttggaaaatggttcattctcttatgtttag

SEQ ID NO: 3710 - DNA, 474 bp, Bacillus licheniformis
atgccttcagttgaaagttttgagcttgaccataatgcggtaaaagcgccttatgtcagacactgcggcgtccacaaagtgggaacggacggcgtcgtcaacaagtttgacatccgtttttgccagccgaataaacaggcaatgaaacctgatacgattcatactttggagcaccttcttgcatttacaatccgcacatatgcggaaaaatatgaccactttgatattatcgacatttcgccgatgggctgccaaacgggctattacctggtggtaagcggtgagccgaaagtggaagaaatcgttgatttgcttgaggatacgttcaaagaagccgttgaagtgactgaaattccggcggctaacgaaaaacagtgcggccaggcaaagcttcacgatcttgaaggcgcaaagcgcatgatgcgtttttggctttcgcaaaataaagaagacctgctcaaggtgtttgggtaa

SEQ ID NO: 3711 - DNA, 228 bp, Bacillus licheniformis
atgaaaaccgtattcctgctgctcatccgcttttatcaaaaatggatatcaccggctcttccgccgacctgccgtttttatccgacatgctccaattacggtcttgaagcgatcgaaaagcacggcgcatttaaaggcggatggctcaccatcaagcggattctaaaatgccatccgtttcatcccggcggaatagatcccgttccggaaaaaaagcaaaaggattag

SEQ ID NO: 3712 - DNA, 570 bp, Bacillus licheniformis
atgaaacttttggataatattctacagttcaatcaacagtttgttgaacggcaggactatcaaaaatatcaaacaagcaagtttcccgataaaagaatggtgattctgtcttgcatggacacaaggcttgtcgagctgcttcctcatgccatgaatatgcggaacggagacgtgaagatcgttaagagcgcgggcgcactcgtggctcatcctttcggaagtattatgcggagcattctcgttgcggtatacgaactgaacgctgatgaagtatgcgtgatcggccattatgactgcggcatgagcaagctgagctgcgacagctttttggacaaagtcgtcaagcgcggcattccaaaagaacggattgaaacgcttgagtactccggcgtcgattttgaacaatggctgaaaagctttgattctgtagaggacagcgtcagggacagtgtaagcgttattcggaaccatccgctgatgccggaggaagtacctgttcacggacttgtcattgatccggaaacaggcagactggatctcattgtcaacggatatccggaagagcgctaa

SEQ ID NO: 3713 - DNA, 1182 bp, Bacillus licheniformis
atgaaggaaaacctgattccggtcactgttttaagcggttatctagggtccgggaaaacgacgctgctgcagcatgtcctgcatgaagcgcacggcttgaaaatcgccgtgatcgtcaatgatatgagcgagattaatatcgacggctccctcgtgaaaaaaggtgacctcatccgcacggatgaaaagcttgtcgaaatgcagaacggctgcatttgctgtacgctgagagacgatctgctcatcgaagtcaaaaagctggcggagaacggcggaatcgattatattctcattgaatcttccggtatcagcgagccgattcccgtcgcccaaacctttacgtacaaagatgaggagctgaatattgatttaggcaaatattgcaggcttgatacaatggtcaccgtcgtcgacggcagccgtttttttgaggacttcgcttcgggcgagagcctattggaacggaagcaggcggcagatgaaacggacagccgggaagtggccgaccttttaattgagcaaattgaatttgccgatgtcctcattttgaataaaactgatttactcaatgaagaagagcaggaaaagctgttctggtccctgagaaaactgaatccggactgcagaatcatttctgcggcattcgcaaaagtgccgctttcggccatcatgaatacgaaatcgttcgattttgaaaaagcaagtcaatcagcgggatggatcaaagagctgaatgaagagcacacacctgaaacagaggaattcggaatctcttctttcgtctatcaaaagcaaaggcctttccatcctgaaagactgaagcgctggcttgaaaactggccgccgcaaattatcagagcaaaaggcttcttctggcttgcttctcgaaatgacacagcaggccttctgtcccaggcaggctcttccctgatgatccaaagcgcgggcccctggattgcagcgtctaccgaggaagaacaaaagctcgcgtttgaagaggaccctaatttgaaagcggactgggatgaaacatacggagaccggaaaacggaaatcgtttttatcggcattgacatgaatcaggaagacattatccgctccctggatcagacccttcttacagataaagaaatgaattcagactggtcggccttacttgattcactgcctgagtatatttaa

SEQ ID NO: 3714 - DNA, 1032 bp, Bacillus licheniformis
atgaaaaaaacattcggaatagcatctgcattcattcttgctgccggattaacagcgggttgctcaagcaatggagcttccagtgaacaaaaagaaaataaagacacgctggacatctatacaaccatttatccgcttgaagacttcaccaaaaagatcggcggagaatatgtgaacgttaaaagtgtttacccgccaaacgttgaagcgcacacttacgagccaagctcaaaaacgatggcggaaatttccgactcggatgcctttatatactctggagtcggtgttgaaggattcgcagacaaagctgtaagcacacttaaaaacagcgacgtcaaaatcgtcaaagccggggagggcattgaccttctgtcacgtgaagaagaaggcgaacatgatgagcatgcacatggagaagaacacggtgagcacgatgagcatgcacatgaagaagaacatgaacacggagaagccgaaggccacgatcatcatcacgaccatggagatcatgacccgcacgcatggcttgatcctgtccttgctgaaaaaatggccgaaaacattaaagaccaactcgtaaaattagaacctgaacacgaaaaaacgtttacgaaaaactatgagtcattaaaaaaagacttggagcagcttgacaaagacttcaaacaaacagtcgacaaagctgataaaaaagaaattctcgtctcacatgccgcctacggctactgggaaaaacgctacggcattaagcagataagcgttctcggcctttcgcctactgaggaaccttcacaaaagcagcttgaaaacattgttaaaacagcgaaagaacataatattaaatatatcatttttgaaagcaatgtcagcagcaaaatctccgagatcatcaaaaaagaaatcggagcggaaagtctgacgatgaaaaaccttgaatctgtaacaaaagaagacattgaaagcggcaaagattataccgccatcatgaaagaaaacctggacgtcttgaaaaaagctttatcaagcaaataa

SEQ ID NO: 3715 - DNA, 246 bp, Bacillus licheniformis
atgaaaccaaatattcatccgaaaacttatcaagtgatctttcaggatgtaaacagcgggtaccgttttttaagccgctcaactaaaacttccgatgagacggccgagtgggaagacggcaagacgtatcccgttataaaagttgaggtgagctctgatacccatccgttttataccggaagacagaaattcaatgaaagaggcggaagggtcgaacagttcaagaaaagatttaatatggattaa

SEQ ID NO: 3716 - DNA, 195 bp, Bacillus licheniformis
atgccattcctcctatcaaaacgtaataattacgttttattatatacctttcaaatccctgtgtcaaaaatgaatgttcatttgccatacttaatccctttatccattttaacctcctacaggaagaataatctaaaaaaggcggtaaacaataaaaagcaaaatggtgtaaatgaaaggtggttttccggatga

SEQ ID NO: 3717 - DNA, 1326 bp, Bacillus licheniformis
atgaatgacttgatttttgcaagaagccttttcggaacaacgatgggattccatattatttttgcctcgctcggtgtcggaattcctttgatgattttgctggccgagctgatctatcaaagaacgaaagatccccactacgccattatggccaaaagatggacgaaggcgcaggccgtgttgctcggggtcgccataccgaccggaaccattgccggcacgcagctagccctgctctggccgggattcatggaagtgatcggaaaagtcatgtcccttccatttcaaattgaaatctacgccttttttattgaggctttatttatgtccatttatgtttacgcagccgatcggctgactccacttatgagaattacagccgtcatttttatcgttatcggagcagccgcatcggccatcttgattacaaatgtgcacgcttttcagggaacgccagaaggcttcaaaattgtaaacggtgaaattacggatgttcagccgtggacggcgttcttcaacaaaagctttgtggccacagcaggacatgttgtcgtctccgcttttatgacaggtgcgtttattattgcgacgatagccgcctacaaaatgctccgaaaccgcggcgatgatagagtctacgcccttcataggaaagcgctgctgctcgggctgattgtcggaggagcgttttctctggtcacggctctgagcgggcacgaatccgcacagctacttcaccgctaccagcctgaaaaactggcgggcgcagaagggctgtttgaaacccagtcccatgctcctcttgcgatcggcggatttactgatgaaaagacgcaatcggtgaaatgggcgattgagattccgtgggctttaagctttttggccgacaaccgctttgacaccgtcgtaaaagggctgaatgactttccaagggatgagtggcctcccctgttcattcataccttatttaacggcatggtttttatcggcagccttttgattgtttatgccgctgtgggttttatttggagaaaagtcatgaaaaaagaccgctttccccgctggatgctggccgtgttcataaccggcggcccgctcgcattgctcgcaatcgaacttggctgggtattcgcttgcaccggaaggcagccttgggtcatttaccatatgcagaaaacgtcggaagtagtgacctcctccggctcgatcggcatattgtttcttttgttctttatcgtctatatcattttaggagcagcggtggtgttcgtattgcaatattactttaaacgccatcctgtcgaagaggacttaaaaagcagctga

SEQ ID NO: 3718 - DNA, 1053 bp, Bacillus licheniformis
atgatgcaactggatggaacaacagatgccctgctggctatttcgatcgtctggggatttatatttatatacgccgttatggcgtcgatggattttggagcgggattttggtcgatgatttatatgaacaaaaaacagctgaaagcaaccaatattgcaaaccgctacctttctccgacctgggaagtaaccaatgttttcatcgtcggaatcgtcgtagcccttttcagctttttcccgggcggcacttttgtgctggggactgtgcttttgattcccggcagcatcattttattgcttttggcgattcgaagcggatttttggtcttctcccacgctgcaaaagattatgaaagggcgctgacttacgtttcagggatcagcggctttatcattccggctgttttaatccttgtcttgcctgtgacacacggcaatttcgtataccaggtagacggaagccaccaattggactttgtcaatttgtttttaagccctcatgcctattcttttatgggcttcgccattttcagtacgctgtttctgtcttcactgctgctggctgatttttcaaatgtagccggagaaaaagacgcgtatcaggtctaccgccgaaacgctttaattaccgggccgctcgcactgctcatgtcgttcagcatcatgatgaccatgaggacggaagccagctggctttatacaaaaatgatggacgggcttccatggctgattttatcgtttttgctgtttctcgtcgcatttgcggctctgtttctgccaaacagacataacagcgaccggctgggaaagccgcgcctggctgtcatcgccattacgctgcagtattttacggcgagctatgtgtacgggagggcgcaccttccttacatggtctatcctgatgtcacgattcaatcgggcttcaccgcaccggagacattcagggcgctgttcatctcctacatcgtcggttttattattttattccccggcttttattatttctggaaattgttcatgaaggacaagcggtacatcaaacagcatgaataa

SEQ ID NO: 3719 - DNA, 162 bp, Bacillus licheniformis
atggagcaaaaaatactgtgtgaagtcagcaactgcacctattgggaagagggtaacaagtgcacagccgacgccatctatgtcgtcagccatgctgaaggtgaaaaagcttctaatagtgaagaaacggattgcaaaacctttaaacctgaacatcattaa

SEQ ID NO: 3720 - DNA, 192 bp, Bacillus licheniformis
gtgaataaagagtcgctgttacaggctttttatcaggaaatccacggggcggatgaaaccgcatttcaaaaagccgcccgctccttcatgaacttatgggattatgaatacggctgtctcgacgggctgccggatcaagcggaccgggtgatcggacagatcgtgcacgaagatttgcttttgggcgattaa

SEQ ID NO: 3721 - DNA, 1110 bp, Bacillus licheniformis
atgattcaaatcaaacagctgacattgtaccatctcagcatgcggctgaaaaagccttttaaatcaagcttggaaacctttcaggatcgcaagtttatcatcgttgaagctgctgatcaagaaggtgtgacaggctggggggaagtatccgctttttcatctccgtggtacaccgaagaaacaacggagacatgctaccacatgctcaaagattttttgattccggctgtgctgcgcgaatcattcacacacccttccgaagtgcccgaggcgcttcgcggattcaaaggcaaccgaatggcaaaggccggccttgaagccgccttttgggacatttacgccaggaaaaaagggatctctttaagagaggcgctgggcggagtaaaaacagaagttcctgccggagtcgtcgtcggtcttgccccattggatgatatgcttcaggaaattgaacaatatgtaaaagaaggatatcaaagaataaaaatcaaaattcagcccgggcaggatatagagcttttaaaagaaatacgcaggcattttccgaaggtgccgctgatggcagatgccaactcttcttatgaattaaaagacatcagccggattaaagagcttgacgcatttaaattaatgatgatcgaacagccgctggctgatgatgatatcgttgaccaccgccatctgcaaaaacatatcaaaacatcaatttgtcttgacgaaagcatccgttcggctgctgatgcgcgaaaggcaattgagctcggcagctgcaaaattatcaatataaagccgtcccgagtcggcggtttgacagaagctctgaaaatccacgacatctgcaaagaacatcaaatgcctgtctggtgcggcggcatgtttgaaaccggcatttcaagagcccataatcttgcactgagttctcttccgcagtttttgattcccggggatctttcttcatcctcaaggtattgggaagaggatatcgtaaaaccggaaatccggatcgagggcggctatattcaggttccaaccttaccgggaatgggatttgaagtcgatactcatattttaagaaagaattcatctaaaatagacgtttttaagcagtaa

SEQ ID NO: 3722 - DNA, 1437 bp, Bacillus licheniformis
atgctgatggaccatccgaattggcttaaacagcgagcagaactgacacctgacaggatggctgtgattcagggagatcacaagctgacttttattcaattatttcatgaagcaaaaaaaacggccggccggctgaagagctttggtctgaagaatggggatacagcggctttacttctcacaaaccggatggagatggtcatcgccgtccatgcctgctttcttctcggcgttcgcatcgttttgctgaatacgaagctgtcaatggccgaacgatcatatcaaattgaacattctgaagcaaagctattgcttacagagaagcctttcatagaagagcatagagggggacagccggctcgcgctgttgacattgaagacgttcaaaacgccgcttgcccgccggttacagaaatcgaaagcattcatttggacgatgcggcaacaatcatgtatacgtctggaacgaccggacggccgaaaggggttatgcagacatttgcaaaccattatttcagcgcggtttcatccgccttgaatttggggctccaagaacacgaccgctggctgatcgccttgccgcttttccatatcagcggcttatcggcgctttttaaatcggtcatttacggaatgactgtcgttttgcatcaaaggtttgacgcggaagaagttcttcgttcgatcaaagaccagcaagtaacgattgcatcggtcgttcagacgatgctgtcgaggcttgcggcaaaagtcgacagatgccccggatcattaaggtgcctgttattgggcggagggccagcaccgctttctctccttgaggaatgcaaaagaaagcggctgcccgtcgtacagtcgtacggaatgactgaaacgtgctcacagattgcgaccctcgccccggaatactcgattgaaaagctcggttcagccggcaaaccgctgtttgcatcaagcatcaaaatcgaaaagaacggaacggaatgccaacccggagaacatggtgaaataaccgtaaaagggccgaccgttatgaagggctacttgaaaaatgaggcggcaaataaagactcattcaatgacggctggtttaaaaccggtgatatcgggtattttgacgatgacggatttttatatgtgctggacaggcgttcagacttaatcatatcaggaggagaaaacatctatccggctgaagtcgaggccgttcttctgtcacaccccaatgtcgcggaagcgggggtgaaaggagtcgatgacaaaacttggggaaaggttccccacgcctatctcgtcgccgacagccccgttgatgaagaggagctgagcgaattttgcaaagaacggcttgcttcatataaagtgcctaaagcatttcattttgtcgataggctgccgagaaatgcttcaaataaactgatgagacataaattgtag

SEQ ID NO: 3723 - DNA, 819 bp, Bacillus licheniformis
atgactgtagaatggaaaagcgaacgtcaatacgaagatgtattatatgaaacatataacggcatcgccaaaatcacgatcaatcgccctgaggtacataacgcatttcgtccaaaaacggtttcagaactgatcgatgcgtttgcatatgcgcgggatgatgccaatatcggtgtcattatccttgcaggtgccggggataaagcgttctgttccggaggagaccagaaagtaaggggacacggaggctatgtcggtgaagacgagattccgcgtttgaatgtgcttgatcttcagcggctgatccgcgtcattccgaagcctgttgtagcgatggtgtcaggctatgcgatcggcggcggccatgtgctccacgtcgtatgcgatttgacgattgctgcggacaacgcgattttcggacaaacagggccgaaagtcggcagctttgatgcgggctacggatcaggctatctggcgcgtatcgtcggacataaaaaagcgcgcgaaatctggtacctgtgccgtcagtacaacgctcaggaagcaaaagaaatgggccttgtcaatacggttgtaccgcttgaaaagcttgaagaagaaacgattaaatggtgtgaagaaatgcttgagaaaagcccgacagcactcagattccttaaagcggcctttaacgccgatacggacgggcttgccggcatccagcagtttgccggagatgcgacactgctttattacacaacagatgaagcgaaagaaggccgcgatgcgtttaaagaaaaacgccgtccagacttcggacagttcccgcgttttccttaa

SEQ ID NO: 3724 - DNA, 822 bp, Bacillus licheniformis
gtggccgttttgaaattgacactgaaagacggcgtttcctataaaattgaagacaatggcctgtctgcagaaaaaacggcggtgtttttgcatggctttacaggaagcgcggccacatgggacgggatagacggctattttcaggggatgcgtctgatcaagctgaatctgctcggacacggcggaaccgactcgccatcggacagccggcgctacacaacagagaagcaggcagcggatctcatcgaaatttttgatcgtttaaatgtaaaacaggcttacctcatcggttattcaatgggcggccggcttgccttatccttggcgatgattcaccccgagcgggtgtccggtcttgtgctggagagcagttctccggggcttgattcgcctgaagaaagaaaagcgcgcagggagcaggacagccggctcagcaggcggatacttgaagaaggaatcaagtctttcgtagattattgggaaggcattccgctgtttgcatcccagctttcaatggacccttcaaaaagaaaaaaagtgcgcgaagaacgtctgaacaacaatccgatcggacttcgaggcagcttaatcggaatggggaccggatcacagccgtcttggtggaacaaactgagcgggatcaattatccggtgcttctcatcgcgggaagcctggatcagaaatttgtcgccatcaatgaaagcatggcaaagcggattccagccgcccgcctcgagattgttgaacataccggtcatgcggttcatgtggaagagcccgatttttttggtagaatagtaagtgagtttattttaaagtag

SEQ ID NO: 3725 - DNA, 1744 bp, Bacillus licheniformis
ttgactgaaaatccgattacaaaatatatagggaattttattgatgagctttcccttgcaggcgtgacagaagcggtcatctgcccgggatcaagatcgacgccccttgcgattttggccgcgagtcatccggacatcaatgttcatatccatgtggatgaaagatccgctgctttttttgcaatgggcatggcaaaggcaatgcggaagccagtcgcattgatctgtacatccgggacggctgcagcgaatttctacccggctgtgatcgaggctcattattctagaataccgcttatgatcttaacggctgatcggccgcatgaactgagagaagtaggagcacctcaggcgattgatcagcaattcttattcggaaactttgttaagtttttcacagactcggctttgcctgacagtcatcctgacatgctggcgtacatccggtctttggcagcacgtgcagccggagaagccaaaaaagcgccgcgcgggcccgtgcatatcaactttccgctgagagagccgctcatgccgaaccttgaggatgaaccttttcaaaggctgagaagcggcaggtcatgtgacggttgaaagcggccgcttccgtgctgatcggcatgagcttgtagcgctgagtgctctgattaaagagaccgaaaaaggcgtaatcgtctgcggagagctgcaagatgatgatgcaaaagaacatattgtagctctttcacaggcagcagaataccccattttggctgacccgctctcaaacttgagaaacggcacccattcaaaagaaaccattatcgatgcatacgactcattattgaaagaagaacagctgaaacgcgagctcatgcctgagcttgtcatccgcttcggtgcgatgccggtttccaagccgctttttcagctgctgaagcaaaatccgagcattaggcaaatcgtcgttgatccagatggaggatggcgcgatccgactcagctcagcgcacatatgctgcattgcacggaagaggagattgctgttcttgcggattccgctgtcaattcagaaaataggacaggcaactggcttgagaagtggcggtttgccaacagccgcttccgcgctcttttaagaaatcttgaagctgaggatcttacctttgaaggaaatatctaccggaaccttcagcatttgattccggacaacagctccgtgtttgtcggaaacagcatgccgatccgcgatgcggacacattttttgaaaatcaggaacggaccttccggatttttgccaatagaggggcgaacgggatagacggtgttgtctcaacggcgctgggcatatatgccgcaacgaaagaaccggtaacccttgtcatcggcgatctgtcattttatcacgacttaaacggcctcctcgtcagcaaaacgctcgatattccgctgactgtcgttctcgtcaacaatgatggcggcggcattttctcatttcttccccaatctgctgaagaaaggtacttcgagctcttgttcggaacgccgacgggtctcgaattcgagcatgctgccaagctgtatgggggacgctatatatgccctgaatcatccgcacattttgccgatgcgtatttatcctccgtcaaccgccgcggcttggatatcattgaggtgaaaacgaagcgcgatgatcgtgtggagcagcatcgccggatgcttgattccgcgctgcatgaaataagaaaagagtggccgttttga

SEQ ID NO: 3726 - DNA, 1425 bp, Bacillus licheniformis
atggtgacaacagtgcagcgcactttcctcaaggaagcgcctgaagcattaaacatcgtcaaaaaagtcaaccatgctgttttaataagctattccagaaaaattgagagcatagatgctctttcctttttcataaacgggaaagaacaatttgccggggaacggttcttctggtctgatccggacggcgggctgacgcttgtcgggctgggaaaggaaatatcggtttccacagatctgaaggatgccggacgttatcaggctgtacatgaaaaatgggagcgcttaaaagagaaaacctatcactttcatgaagatcaaagcagaggtcaggcagcggtggggccattgctgtttggcggtttttcatttgatccgctggaagatcgcaagcagcattggaacggctaccaggaaggcgctttttttattcccgccgctatgctgacacaggacggagaggaaacattcataacggtcaatagatggaagactcctgaagaagacgtgcgcaaagtacttgaagaaataaagggcgctgcttcacagctgaccaaggcggacgattcccgttatccggaaaaaggtcatacgcaatataccgccaaggaagagcttgatgttcctgaatggcttgaagcggtccggagggcgacagacgacattaaaaacgggaagtacgataaagtcgtgctcgccagagagatccttttaacgttcgatcagcctgtcgaacttcacagagtattattcaatctgatgtctgaacaaaaaacgagctatatattcgccattgaagaaaacggcaaaagttttgtgggcgcgtctccggaacgtcttgtcaaaaaagacggagagaacgttctgtcgacctgcctcgccggttcaatcaagagaggcgaaagtgagcaggaagaccggatgctcggtcttgagctgttaaacgatgaaaaaaatctaatcgaacatgacattgtcgtcaatatgattcatcaggcgcttttgtcaaattgcagcaatatcaaaaagccggccaagccgggactttacaaaacaaaaaatgtgcagcatttgtatacgccgattgtcggcaaaatgaatgcggagtcctcgatttttgatttaatcgagaagcttcacccaactcctgcgctcggaggagcaccacagcaaaaagcgattgaggttatcagggagttggaaccgatgtcaaggggctggtatgcggcaccggcgggctggatcgacatgtccggcaatggggaattcgcggtggcgatcaggtcgggacttatcgattcaaatgcggccagaattttcgccggctgcggggttgtggctgattccgatcctcttatggaatacgaagaaacacaaattaagatgaagccgatgctgtctgctcttggaggcgatatccgttga

SEQ ID NO: 3727 - DNA, 123 bp, Bacillus licheniformis
atgtgtcaacaaaacgacactttattaacaactgccaccacctattataaacgtaatcggccgattgaaaaagacaaggtcatttattattttcgaattgcaggacggccgctttttttctaa

SEQ ID NO: 3728 - DNA, 933 bp, Bacillus licheniformis
atgcagcatcaatcactttcagggagtgtttctgaaataaagccggaaaaatggcgcgtatggtggatgttaacaagaccccatacactgacagccgcctttgtccctgtaacgctcgggaccgtgatgtcccttgaatcggggaaaattgacatctggctgtttttagctatgctggccgcatcaatattgattcaaatcggaacgaacttattcaatgagtattttgattttgtaagaggacttgataatgaaaactcggtcggcatcggaggcgctatcgtccgctatggaatgaaaccgaagacggttttatacctggcatacggactgtttggagcagccgttttactcggcgtgtacatctgcgcttcttcaagctggtggcttgcgctgatcggattggtttgcatggccgtcggctatctttatacgggcgggccgtttccgatctcctatacgccgtttggtgaaattatgtcaggcgtttttatgggaatggtcatcatcctgatttcatactatattcaaaccggcgggctgacttggaacgtctttctgatctcccttccgattacgattttagtcggaggcatcaatctttccaacaatatccgcgatttggtcggagataaagaaaacggaaggaagacgcttccgattttggccggaagaaaaaacgccgtgcagattttaagctgggtttttgctgtttcctatatattgatcggtatatacatcggctttgagatcgtttctctgtggagctgcctcgttcttttaagcctgcctaaaccgattaaagccatccaggagttcaaggcaaaagaaaagccggcagaactgatggtcgccatgaaatcgactgcgcagacgaacacctttttcggccttctgctcgccatcgccctgcttattcagtacgttttttaa

SEQ ID NO: 3729 - DNA, 756 bp, Bacillus licheniformis
gtgctaacaaaagaacagttgacaaaactcgaaaatgaactgaaagccggaaaagaacagatcatcagccgctttaaagaaaacggacattttggcatcgatgcgacgcacccgttcaactcgacgggcgatctttcggcttatgacaatcatccaggagatgaaggtacagaactgtacgaacgcgaaaaagaccttgccctttttgaacatgaaagagagcatttacacgatatcgaacatgctttagccatgatcgaaaaaggaacatacggccgctgtgaagtatgcggaaaggacatcccgtatgaaaggctgtccgtacttccaaccgcaacgacgtgcagtgaacattcgtcaaccgtctccgtttcaaaagatcggccgattgaggaagaagtgctgaacccgccgtttggacattttgaacaagacgaggacgatgaaaatgtcgcatacgattcagaggacgcttaccaggatgtcgaacgctacggcaattcggaaacgcctcaagatctggccgttccgcctctgtcatacagccagatgtacatggagtatgaagagccgctcggatatgtggaagattacgaaaactatgccgcaacagacattaccggaaaagaagttaccgtctatccgacgaaagaacacgaaaaatatgaagacctgcttgatgaagaaggcatcatgacctctttcggcgatctcccggcttatgaaaaggatccttatactgaagacgacgactaa

SEQ ID NO: 3730 - DNA, 2400 bp, Bacillus licheniformis
atgttctcaagtaaagaaagctttaaacaatgctttttgaaacgtgttgaacggttgtgcggaaaaagctttcgggactcttcaacgcttgaccagtatcagacgctcggcatcatggtcagggaacatatcagcgcaaactggatcgagaccaatgaaaggagccgctccaaccaaaataaacagacctattacttatcgattgagtttctcctgggcagactgctcggccaaaacctcctcaatctcggggttcgtgagattgtcaaagaaggtcttaccgagcttggcatttgtcttgaagacatcgaagaggccgaaatggatgcaggccttggcaacgggggattgggcaggctcgcggcgtgctttttggattcactggcttcgctcgaccttcccgggcatggaatggggattcgctacaagcatgggtttttcgaacaaaaaatcgtcgacggtcatcaagtcgaattgcctgaacaatggctcaaacatggttacgtatgggagatccgcaacgccgatcaggctgtttgtgttcgtttcggcgggcgggtcaagatggcgcaggaaggagggcgcctccgcttttggcaggaagatgcggaagtgatgacagccgtgcctcacgacatcccaatcatcggctatgagaccaagacggtcaacacccttcggctgtggaatgcggagccttgctcgctccatcatgaaccgaatattttgaagtataagcgcgagacagaagctgtatctgaatgcctgtatccggatgacacgcatgacgaaggcaagattctccgtttgaagcagcagtattttttagtatcggcaagcctgcaaagcattgtgaaacgctataagaacactcacccgtcactgcatgattttcaccaaaaagtcgcgatccatatcaatgacacccatcccgctttggcggtgccggaattgatgagaattttgcttgacgaagaaaaaatgacgtgggatgaagcgtggcatgttaccgtacatacgatctcatatacgaatcatacgacgcttgccgaagcgctggaaaaatggaggatcgatttaattaaaccgcttctgccgagaatttatatgatcattgaggagatcaatgagcggttttgcggctggctgtgggaaaaatacccgggtgaatgggaaaggatcgaaaagcttgccgtcatcgcccacggcgaagtgaaaatggcccacttggcgattgtcggcagctacagtgttaacggtgtcgccaacattcattcgaccatattaaaagagcgggaaatgaacgacttttattccgttttcccttttaaattcaataataaaacgaacggcatctcacatagaaggtggctgttaaaggcaaatccgccgcttgcgaacttgataactgaagcgataggagacaggtggctgaaagatccggaaagccttctggatcttcgtccatttgcgaacgattccgcgtttctcgagtcgtttcagcgcattaaaagggaacgaaagcagcttttggcagacatgatgaaaggcagcgtcggcttcgccgtcaaccctgacagcatcttcgatgttcaagtcaagcgtctccacgcttataagcgccagcttttaaatgtgctccatatcatgtatttgtacaacaggctgaaggaagacaaaggctttgccatttatccgcaaacctttattttcggagcgaaggcatcgccgacttatcattatgccaaaaaggtcatcaagctgatccattcagtcgcagataaaatcaatcatgatccggatgtcagacattcgatcaatgtgatctttctggaaaattaccgggtatcaaccgccgagcgtatttttccggcgtcagatgtcagcgagcaaatatctgcggccagcaaagaagcctccggaacagggaacatgaagttcatgattaatggggctttgacgatcggcacgcatgacggcgccaatattgaaatgcttgagagggtggggacagagtgtatctacacgttcggtttaaaggcggatgaagtgctggactacgcggaaaaaggcggctatctgtcaagggaatactctcagcatgatgcaaggatcagacaaacggccgatcagctgatcaatggttttttcgaaggagaagccggcgaatttgagccgatttatgactcgctgatcgcttataatgatgaatactttgttttaaaagattttgcttcttatattgtagcgcaggagcggattcaaaaagactacttgaataagcgtctttgggctgaaaaagccgtcacaaacatcgcgcatgccggatatttttcaagcgaccgcaccatccgggagtatgcggacgacatttgggaaattaagccgtaccagcattga

SEQ ID NO: 3731 - DNA, 1455 bp, Bacillus licheniformis
ttgaaagtcttatttgctgtttctgaatgtgtgccgtttgttaaatcaggcgggctcgccgatgtcgccggggcgctcccgaaagagctcgcccttttaggcatagaaacggtcgtcatgatgccgaaatacagtttgattgcggaagacgtcagaagacggatggttaaaacggctgaatgcgaggttcgcgtcgggtggcgcaggcagttttgcggcattgaacaccttgaacatgacggagtttcctattattttcttgatcatgggtattattttaatcgggattccctttacggccattatgatgatggagagcggtttgcttttttctcgcgggctgttttggaagcactatacgcgctgaattttgaagctgatgtcatccatacccacgattggcacacagggatggtcaattatttattaaaagaagaatatcgaaaaaagccgttctatcagcacatgaaaagcgtatttacaattcataaccttcaatttcagggcattttcccgaaggaagcggttcatgacctgctcggacttgatatttcccatttcacgaccgaaaagctcgagttttatgggaacattaattatatgaaaggcggcattatcgccgctgatcaggtgacaacggtcagtccgacgtaccgcgatgaaatcttgactccatactacggcgagcggcttgaaggggtgctgtcagacaagaaggatgcactgacaggcattttaaacgggattgacgatgtgctgtacgaccctttaaacgatccgcacatcgattatcattacgatgccgtcaaccgggacggaaaacggaaaaataaagccgtgatccagaagacattcggtctgccggtgaatgaagacattccgctcatcagcatggtggcaaggctgacgaagcaaaaaggcttcgatttgatcaagcgggtattgcatgaactgtttgaagaggaagacatgcagctgatcgttttaggaaccggagaagcggaatttgaaaattacttccgctatatggagcatgcttttccggacaggtgcaaggcgtatatcggttttaatgaaccgctcagccgcaagatttatgccgcgagcgatcttttcctgatgccttcaaaattcgagccgtgcggtcttggacagctgattgccctcaggtacggcgcggtgccggttgtcagggaaacaggcgggcttcatgatacggtgaccgcttaccgggaaacaaccagtgaaggcaacggttttacgttcgcccattttaacgcccatgatatgaagcatacgatcaaaagagcactgtcattttatcacaggaaagaagagtggggcaggatcgttcaaaaagcgatgacacatgatgtcagctgggctttgtcagcccgtcagtatcagcggttatacagccgggagataaagggggaagcgcatgttctcaagtaa

SEQ ID NO: 3732 - DNA, 1029 bp, Bacillus licheniformis
atgaataatcaaatgttgggaattattgatgcagctgtaaaccagcactctcttcaggacttaacggccggccgctcgaccggagccgttccgtttgcaggaaggtaccggctgatcgattttgcgttgtcaggcatggttcatgcaggcattcggagtgtcgctgtattctccaagtccccgtaccgctccttgatggaccatttaggatcgggaaaagagtgggatttaaacaggaaaagggagggccttttctttcttccatcttcacttccccatgatgagcatgttgggcttggatcgtttcggcaatttgcggagcatctcgattattttcaaagaagcactcaacaatatgctgttgtggcaaatagctatacggtcggtcacattccttttcaagaagtgctcaaacaacaccttgaatccgggtgtgatctgactgaaatttgtcacgaaggaaagcctttaggaatgtatgtcactaagaagagtctattgtgggagatggttgaagggcattgccctgaaggagcccaatcttttgaagaagtctgccggaaagagcgcggctctctatcagtcaacagctatgagcactcgggatatacagccgtgatcgattcccccgaaagctacctttttcatagtttgaaccttattcagcctgtgttttgggagcaagtctttcatatgggccagcctgtctacacaaaaataaaaaacgatcctcctgtaaaatacgctaaaaacagcagggtaaagcaatcgattatcgctaatgggtgcgtaatcgaaggtgaggttgagaattcggtcttgttcagaggggttcacgtaggaaaaggaacaaccatcaaaaacagcgttgtcatgcaaaaaacaaggatcggagaaaactgccggcttgagcacgtcatctgcgacaaagacgtcaaaatcggccatcatatcgaaatgtccggcaccatgagcctccctttcatattaaaaaaaggagccatacaaggagcgctgatgaactcttga

SEQ ID NO: 3733 - DNA, 1140 bp, Bacillus licheniformis
atgaaagaacaatgtgtggctatgcttttggcaggcggcaagggaagcaggctgaatgccttaaccaaaaacctcgcaaaacccgccgttccatttggcggcaagtacagaatcatcgattttgccctcagcaactgcgccaactcgggaattcatcatgtcggtgtgctgactcaataccagcctcttttattaaactcatatatcggaatcggcgagccatgggatcttgaccgcaatgacggaggggtctccattttatccccttatgctgaagcgtcggaagtgaagtggtacaaagggacggctagcgcgatttatgaaaaccgccattttttaaaggagcttcagcctgaacatgtactcatcctatcaggagatcatatctacaaaatggactacggaaaaatgctcgaataccacgcggagaaacaagctgacgccaccatcgcagtcattgaagtcagctgggcagaagccggccgtttcggcatccttcatacgaatgacaagatggagattacaagcttcgaggaaaagccgaaatatccaaagagcaatttggcatcaatgggtgtctacgtttttaaatggagcgtgcttgaagatgcgttggaacgcgatgaaaaaaattccgcgtcaagccacgatttcggaaaagatgtcattccggctcttctcgaagaaaataataggctgaacgcttatccgtttaaaggatactggaaggatgtcggtacggtcagaagtttatgggaagccaatatggatctgcttggagatcatcctccgcttgacctgttcgaacggaactggcggatttattcagtctccccgaatctcccgccgcagtttgttgccgatctggcggaaatcaaagaatcgctcgtcagcgaaggatgcaccgtgtatgggtcggtcacccgttcggttatatttcagcgcgttgccatcggcagacattccgccatcaaacgttcagtcgtgatgcatgacgtttcaattggagagtatgttgagatcgaaaatgccattgtatcggcaggaattcgaattccggacggtttttgcgcgaagccggaagatggcgaagtcctgctgatcacagaggagtatgtcaaaaaacataaggttgtttaa

SEQ ID NO: 3734 - DNA, 1884 bp, Bacillus licheniformis
atggctggtgtgagtgcctcggatattaaagcgcatctctttcatgaaggtcggctttatgaaagctacaggttcttcggcgctcatcagacggaacaggacggccgccaaggcttccgtttctgtgtttgggccccgcatgcgaaggaggttcgaatcgccggaacgtttaacggctggtccggtgtcctgcaccgaatggaaaagcgtcatcaggaaggcatatgggaactgtttatccccggtattggagaaggggagctgtataaatatgaaatgattacagccgcaaatgaaacgaaattgaaggctgatccttatgcttttttttctgaagtgaggccgaaaacggcatcggtcacttatcaattggccggataccaatggggcgaccggaagtggcaaaagaaaaagcagcaaaaagccgtgtatgaaaaaccgatttccatctacgagcttcatatcggttcgtggaaaaagaaagcggatggacgttttttcacataccgggaactgagcgaaacggtcattccttacgtcaaagaacacggattcacacatatcgagctgatgccgctgacagagcacccgtttgaccgttcatggggctaccagacaacagggtactacagtccgacgagcagatatggcgaaccgtatgacttgatgtatttcatcgaccagtgccatcagcatgagatcggcgtcattatggattgggttcccggccatttttgcaaagatgaccacggcttgtatttgtttgacggtatgcctctgtatgaatataaacacgagcatgacagggaaaattgggaatgggggaccgccaattttgacctcggaaaacgagaagttcacagttttttaatctcgaatgcgttgtattggatcgagatgtatcatatagatggatttcgagtcgatgcggttgcgaacctcctgtattggccaaaccgtcctcagcctgaagcgaacggctttgcgatcgaatttattcaaacgttaaatgaacaggtttttgcaaaagatccccactttttgatgattgcagaggactccacagactggccgcttgtgacgcacccgacctatgaaggcggtctcgggtttaattataagtggaatatgggttggatgaacgatgtattaacctatatggaagcttccccagaacaaagaaaacacctgcatcatcttgtttcattctccttaatgtatgcctactcagaaaattacatcctgccgttctcccacgatgaagtggtgtacggcaaaaagtctctgcttcataagatgcccggcgattattggcagaaattcgcccagtaccgcctgctgatcagttattttatgatgcacccgggaaaaaagcttctttttatgggcggtgagtttgctcaatttgatgaatggaaagacgaagaagagctcgattggtttttggacgattttgacatgcaccgcaaagcccgaatgtttacaaaggaggctctacacctctacaaaaaaagccgtatcctgtatgaaaatgatcatcggcagcaaggattcgagtggattgacgttaacaatgcggaacagtcgattgtatcgtttatccgctatggaaaacagcccggtgaagcgctgattatcgtctgcaatttcacgccttccgtctatcacgaatatcgggtcggcgtcccttttcaaaccgaatatatcgaagtgcttaacagcgatgatgcaaaatacggaggttcacaccaaatcaacccaaaacgccttcaggcaagaaaaggcgttctgcacggcaaaccatacagcatcagcatgacagtccctccgctgggagctgcggttttcagagcagtcaaaaagagaggagcgaaaaagggatga

SEQ ID NO: 3735 - DNA, 126 bp, Bacillus licheniformis
ttgtcaataaaaagaagcgctttcattaaagggatcaagccatattatccgaataaaagagtaatctttaaatatagtggcagaaaggatgaaatcaatggctggtgtgagtgcctcggatattaa

SEQ ID NO: 3736 - DNA, 207 bp, Bacillus licheniformis
atgaatgcgtatattttgagcagtacgacgttcattttcaaaacacgccgcttgctattaagagtcgggatagagagagtcgagaagcgaaatatattgcttatcgttcgaaacggacttaaaattgttttgaaaaatcaattcgaatacaaatttaccatggggaagagacaggaattcatggagcgtctggagaacctattataa

SEQ ID NO: 3737 - DNA, 123 bp, Bacillus licheniformis
ttgattattatttttttaaaaaagctattgtgcaaaacgaaaatagatgttatattagtatccgccctaaaaagaaggctttataaatacaacttcaaaaaaacttttaaaaaaagttgttga

SEQ ID NO: 3738 - DNA, 1102 bp, Bacillus licheniformis
atgagtgaactcacaaaatacagcatggtgaaaaatgaaattaaatcgtggatatatgaaggcaaagtgaagccgggcgaaaaaatccattcggaaaacgaattgatgaaaatatttgatgtgagcaggcatacgatccggcaagcaattggcgaccttgttcatgaagggcttttatacagagagcaaggctcagggacgtattgctctcaccgcctgcagctttctgaaaaaggaagggaaagaaataagatgattggggtcattacgacttacctttcggattacatttttccttctattataagaggaatcgaatcttcattgtcgagtgcaggttacaccttggtcgtcgcgagcacgaataatgacattgaaaaagaaaaacaatgtcttgtaaatatgcttgacaaaaaaattgatgggttgattgtggagccgacgaaaaccggcagctttaatccgaatttaaattactatctgacccttgaacagcaccatataccatatttgatgatcaaccaattatatcaggagttaaacccgcctcatttcattttggatgatgagcacggcggttttatcgccacggagcatttgattaagctaggccatgaaaaagtgttcggtttttttaaacaggacgatatgcagggcgtcaaccggatgaaaggatttatccgggctttcagggaaaacggcttgtcgttttatccggagatggtcgtgacttacacaacagagaacaaaaaaagaaaaaacgattgctgaggcaaggaagcggctttcctcagcagaccgcccgactgccatattctgctataatgatgagatagcacttatagtgttggatgtcgtaagggaattcggtttgaaagtaccggacgacatatcaattgtcggatatgacgactcacacttgagcgaggcgtctgaagtgaagctgacatcagtcacccatccgaaaatgcagatggggattgaggcggcaaaatggatgattgccaaagttgagggacggaacacggataagcttgagcattctaccgtctataaacctgaacttgttgtcagacattcgaccgccaagccgaaaaggtag

SEQ ID NO: 3739 - DNA, 585 bp, Bacillus licheniformis
atgaatcaatctaaacaacttgtacagctgattgaaattgcgattatgacaggaatagcacttatacttgatatggtgtccggaatgtttttaaaaatgcctcaaggcggttcaatcgccgtcatgatgattccgatcttcctgatctcctttagatgggggctcaaggcagggctggcgaccgggtttttagccggattgcttcaatttgtcactggaggattttacgttgttcatcctctgcagcttcttcttgattactttatcgcgcctacggccgcgggaatcggcggcttttttgccggatcgatccgaaatgcttcatttgagaaacaaaaaggaaagatcatttcctatgttatgctggccgtccttcttggaagcggactgaaatttctcgcacatgtcatcagcggcgctgtcttttttggaaactatgcgcctaaaggcactccggtatggatttattcattggtatataatggaacgtatatgcttccgtctttcattgtctgcacaatcgtcctttgtatactgctgctaaccgcaccaagacttctagaaaacagaacaaacatgagataa

SEQ ID NO: 3740 - DNA, 558 bp, Bacillus licheniformis
atggttgcgtgcggcgcttattttacaacaacgaatgtgttcaagctgatgcacggctacgctctattttcatttcagcagatgaaagaagaggaaaagcctgaaaaacctccgattcagacgacgaaaaaagaaaagacggcaattgatcaaacatttgaaaccggggagaaaatcggtgatcttgttattccgaaaatcaatgcaaggcttccgatatatcacggaacagatgaagacgagctgcaaaaaggcgtgggccatttcgcaggatccgttctgcctggagaagatgacaactcggttttatcaggccaccgggatacggttttccgaaaactcggccgagtggggaaaggcgatcagttaattgttgaagcttcctacggaacttttacatacaaagtgaaaaaggtccgaatcgtggatgcggatgaccggacggtgatagttccaaagccgagagcgacattgacggtttccacctgctatccttttgactttatcggttcagcaccggagcggtatatattggtcgcagatttgattaaaacataa

SEQ ID NO: 3741 - DNA, 996 bp, Bacillus licheniformis
atgaaaaaaaggctgatgtcactattggtctgcatcctggttttagtgccggcagcaggagcttttgccgcgccgaaacaggccgagcttaaagattatcttgaagaaataggaatgacagaaaaagaattggaagcctatttgcaggatacatatgatgagagtttaaaaggttttgactcggtggaagagttgaaagactttttagggcaaagactgactaaaaagcttttggcatcctatttgaaagaatacggattgagcgaaaaagaagcggctgacctatttgttgaaaatggctatatggaaagcggccaaaacattctcgacgtgtttatgtttgaatacgaattggacgatgcgctctacaccgtgacatatgaagaagacgattttcagatcggaaacatgtttcaagaattgggtgtggatgatcaggagtgggaaagactcgtgaatcacctccgaaaagtgcgcgataacaatccgaaccttgaaaatgacttgatggctcttggagaacgtcttgaagcggtagccgatttcgagtctgtatcagagctgtcagctcaggatatcgctgaaatgctgtccattttaaacgatcttcagaagacgctcgaagtgaaaacgaaatattatcttgttaaagacggaaagaaaaaagaagtgtctttgacgacgcttgtcagtgctgaagatctgaagggagcaagcctcctagtggaagtatacgatctgcagggcaatttcattttggatgtattgctgacgcctgaaatgatcggatctgatttaattcatgacacagggtcgaaagtgaagcaaacccaaacggctgttaaacacgacgcaaagaaatctcatgtgaaaaagacggttaaaggtgcaaagcttccgaaaacggccgggcattacgcagaatggtcgatctttggcgccgttctgatgtttggcggattgtttatggtcagaaggcttcgaaaagcggcttaa

SEQ ID NO: 3742 - DNA, 189 bp, Bacillus licheniformis
atgaatccttactatatgatgctcttatgttatgtcctatcgatcatccactttttaataggctaccgggaagccctgaaaataagcggggctgacgggctggtcaacggaaccgcaatgatctcctgtattccgcttggcgcggttttcgcttttttcgcgcactttttttggaaaatgacgatttaa

SEQ ID NO: 3743 - DNA, 1113 bp, Bacillus licheniformis
atggccaaagccgtggcttctcaagaagtcgccaatatgctgaacgactggtacatactgatgaaaaaacgagacatttcaggttcaatcgaaatgaaagatgacatagataaagcaattgaaaagatggaagaagatcatgacgttcttctctattatcaaatgctggattttcgcttaaggcttcttcttgaagatatctcccaatcttccacagaaaaattggaagccatcagttttaaggacaaagatccaaaaagtacggacgataagctgaattattatttttatctgttcaaagggatttatgaagactacaagcaaaaccatacagaagcgcttaattttttcagaatagcggaaaaaaggctgagcgtcattcaaaatgaaattgaaaaagccgaatttcattataaaatcggtgttttgtattacaacttaaaagcgacatggctgtcgattcaccacatcaacattgcctcaggcatcttccaagggtatgacgggtatgccaagcgggtcatcaactgcaaaatgctgatcgggctcaattatattgaccaatttaagtttgccgaaagtgaagtattgttaaaggaagcaattgaaaaaaccgaaaaaatcggcgaccaatatcttttgccttatacctactataatatgggctttttgaagagtaaggaagataaacacgaagaagcgctgaagtattataataaagcttttgcaatcaaagactttgaaacgaaagccaagtatgcttaccttctatgtgtatatgaaaacacaaggtctcttttcaaaaccaacgatcccgaccaagcttttaaatggatcgacacaggctttaaaaaagctcaagaagtgaatagcgaaattttcgaattaaaattcaaaactttatatacattacattccgattgtcagaataaactggaagtaatcaaggactttattcaccaattagaagataaaaaagcatgggttgatctggaggaattgctgatggacgtagcgaattactatagggaaaataagttatacgaagaagccatatatttctacattaaaacagacaaggcaagtaaacttgccggaagaggaggagaatag

SEQ ID NO: 3744 - DNA, 129 bp, Bacillus licheniformis
atgaaaaaagtgttgttagctgtatttgtattaggcactgttttcagcttttcgtttgcaaatcacgctcctgaagcggcttcccaaagcaatgagatacttttggcttctcgtggagcaggcgggtga

SEQ ID NO: 3745 - DNA, 648 bp, Bacillus licheniformis
atgggaaagaaagtactgctgacaggatttgacccctttgggggagaaacagtcaatccgtcctgggaagctgtaaaacggctgaacggagaggaagcagaaggcgtctctatcgcagcggagcagattccgaccgtttttcatcattcagcggccgttttgaaaaaagcgatcgaaaagcacaaacccgatgtcgtcatttgcgcagggcaagcaggcggcagggctcatattacgccggaacgcatcgcaatcaacatcgatgatgctcgcattccggataatgaagaccgggaaccgatcgatgaacccatcgcggcagacgggcctgctgcttactggtccgcgcttccgatcaagctcattgtgaaagagttgagaaaaaacggaataccggcctccgtctccaattcagcgggaactttcgtatgcaaccatctcttttaccagttaatgcaccgtatagaccgcacctcggcaaacatccgcggagggttcatccacattccgtttctccccgaacaaacaatcgataaacccgagccgagtctcagccttgaaacgatcgtcgaaggacttagaatagctgcggtcatctccgccctgcacgaaaaagatattcgcgaaacgggcggatcgatcagctga

SEQ ID NO: 3746 - DNA, 657 bp, Bacillus licheniformis
atgcagaaatcttacgccgttttcgggctcggccagttcggcggcagccttgtgaaagccttccacgcaaaaggggcggaagtcttaggcatcgacaaatcagaagaaaaagtaaacgaatattctacttatgcaacctacaccatttgcgccaacgccgttgatgaaaagaccttgaaacaaatcgggatacgcaacattgaccacgcatttgtatcatttggcgatgacattgaagcaagcattctgacctcgcttttgctgattgaaatgggcgtccccaaagtatggacgaaagcacaaaatgactatcaccaaaaagttctccataaaatcggcgtccatcgtatcattcatcctgaaaaagatatggccaagcggatagccagccatatcacgtcggaaaagatgatcgattttgtcgagctgtcgccaaactacagcatcgtcgaaattgtggccactaaaaagctggacaaaagaagcctgggggatatcgacgtacgcgccaacttcggctgcaatatcgtcggcataaaaagggacgggcatttcatcatcgcaccgagcgctgatgacatgatatatgaaaacgatattttgattgtgatcgggcaaaataaagatattgagacctttgaaaaaaagggcgattaa

SEQ ID NO: 3747 - DNA, 1320 bp, Bacillus licheniformis
gtgaagtttaaacagatacaattaagcccgtcccaactgctcgtgctagtgtttttatttttcatcatattaggaacccttttattgaagctgccggcagcaacgcccaagcctataggctggattgatacgctttttacatcgacctcggcgatgactgttaccggtctggccgtcgttgatacaggcacggattatacgatgtttggtcagcttattattctcgttctcatccagctcgggggactcggcatcatgtcttttgcggtgctcatttttatcatgctcgggaaaaaaatcggcctgaaagaacggctgttgattcagcagtcgcttaatcagacttctttaggcgggattattaaactgatcaagagtttgtttatttactccttcgcgattgaaatgctggccatgctgatacttgctgtcaaatggattcctgaatacggtctcgcccgcggcatctactacagcctgttccatgcggtttcctcctttaacaatgcgggattttccatatggccggacagtttaatgcggtatgaaggcgatccgctcgtcaacctggtgatcagttttttgttcatcgtcggcgggataggatttactgtattgtccgatttatggcataagcggagctttaaaaagttgagccttcattcgaaattgatgatatacggtacgtttatcgtcaatttggcagccatgatccttatttttctgcttgagtatcaaaatcaaaaaacgctgggaatgcttccgctagctgaaaaactttggggcgcctattttcaggctgtgaccccgagaacagcaggatttaacacgacagacatcggaagcctgcgcgaaagcacgatcacgcttttgctccttcttatgtttgtcggagcggggagcgcatcgaccggcggaggaatcaagctgacgacgtttcttgtcattcttctgtcggttatcacttttttaaagggcaaaaaacatatttcaatagccaaaaaaacgctgaaagaccaattgatcctccggtcgctcgctatttcaacaatcagcgtgctgttgattttaacggccatctttattttaaatatgacagaacctataccgtttttggcgattttgtttgaagtcgtttcagctttcggcacggtcggcctgtcaatggggattacggccgacctgtcccctatcgggaagatgctgattgttttcattatgtttctcggaaaactcgggccgctcacattggcgttttccctggccagacctgaaaaggaaaacatccgctattcaagcgaagatattttgactggataa

SEQ ID NO: 3748 - DNA, 915 bp, Bacillus licheniformis
ttgagaaccacattgtacccgtatatagcattagtggtcggggtgttggctgtgtcttcctccgccatcttcgtcaggctgtcaacagctgatgctggaatcatcgctttttatcgtctctttttttccgctttgctgatctttccttttttctggggaaaaagaaaagaagtcttgggtttttcgaaaaaagactggctgttttccgcggcagcgggattctttttagcatttcattttattttatggtttcgctcgcttgaatacacgtctgtggcgagctcggttgttcttgttacgctgcagccgatcttttcctttatcggtacatattttttatttaaagaaagagtctcgttcgctgggatcatcagtgcgcttctcgcgatcggcggaagcgtgtacatcagctggggggatttcaaagtaagcggccaggcgctctacggcgatatcctggcgcttttggcatgtgcgcttgtgacggcatatctgctgtttggccagcatgtcagaaaacgccacagcttgaccgtttacacttttattgtatatggaatcagcgccctcactttatgtctatactgcctgttttcgggcgccgcctttttttcttatcctgcgtcagattggggttacttctttctgcttgccgtcattccgactttgctcggccactcgctctttaactgggtgctgaaatggctgagcacaaatatgatttctgtggcgattttatttgaacccgtcggagcggttgcgctggcgtattggattttagacgaatccgtcatgatgacgcaggtgatcggcggagcggtcattttttcaggcatcatcctgttcatggcctcgcaaagcatacggaaaaacaacgtcccggcggtgaaagggaaaacgcccaaggcgctttaa

SEQ ID NO: 3749 - DNA, 483 bp, Bacillus licheniformis
atgagcatttttaatgaagcgagaaaagaactttggagcgagattcaaggcctgtcagacgaaatgctgaataaaaggccggcggaagacgaatggagcattcaagaagtgatcgaccacctgaaaaaaatcgatctgatggcacttcaaatcttgaaggaacaaatcaagcatgcaccggttaaatcaatcgaagataaaccggttcatcagttggaagacagaagctccaaacgaaaggcgcctccatatgcggagccggaaagaaaaacagcggatgctttaaccctcaaagctgagctcgacaatgtcagaacacaattaacttcagtcatcgccgcctttcacaatgaagattttcaaagggtgctgccgcatccgattttcgaagagcttacggtcaggcagtggctcgacttcatcggccatcatgaaagaagacatattaaacagatcaaagaagtcaagcagaaactgttgtaa

SEQ ID NO: 3750 - DNA, 582 bp, Bacillus licheniformis
atgtggaagaagcgcacggctgtggcggagcacgtatacatagcggacacagcgtcatttgtgacagagaaacaggcaaagatcgtaatcgattacgggggcataccgggggatctgcattttggactgacgaaaaaagccggggcaagggagccgatgtataaaagaggaacggagattttcaacaggaggcagatttctatcgtctcggtagaagagtgccttgaaattgccggacggctgaacattccggcggtccttccggaatggctcggggccaatatcgcattaagcggcctgcctgatttaacctcattaagagaaggaagcagaatcgtttttccaagcggcgcctctttgttgagcgagggcgagaatgagccgtgcattcagcccggagaagtcattcaggagcagtttcccgacaaaccgaagcttgcttcgcgctttgtgcgccatgcgatgggaagaaggggaatcgtctgcatcgttgaacgcccgggcctgatccatcaaggcgaccaagcagaagtgtgggcgtattcgcctgctgccatgaaagacgccaggtcgtttgcctag

SEQ ID NO: 3751 - DNA, 1209 bp, Bacillus licheniformis
atgactttaaatatgaaagtagaagcgatgaacaaattccacacgtttgaaatccctaccgtcattaagcacggaatcggagccgttaaacatgtgggggaagaagtgaaaaagcttggcgtttcaaaagcgctgcttgtcacagaccctggcatctacaaagccggtgtaacaaacccggtcgttgtatcccttcaggaagcaggcgtagaagttgccgtctttaataaagtcgagccgaatccgcctgtccgtcttgtcgctgaaggttccaaactgtatgctgaagaaaactgcgacggccttgtcgcggtcggcggcggaagctcaatggatacggcgaaagcgatcggagttgaagccactcatgaaggctcagtccttgactatgaagcggcagaaggaaaaaagccgcttgaaaaccggattcctccgcttacaacgatcccgacgactgccggaaccggctcagaagttacacaatgggcggttatcacagatgaagagcgcgaatttaaattcaatacgggcggcccgctgattgctgctcatttgacaattatcgatcctgaattgcatgtatcaatgcctccgcacgtaacagcgatgaccggcgttgacgctttggctcatgccatcgagtgctatacgatgaaatttgcccagccgattactgacgcggtggcccttcttgcgatcgaatacggcgcacattacatccgcagagcgtttgccgatggagaagatcttgaagcgagatacggcatggcgcaggcggccatgcttgcaggcctttcttacggaagcgaatccgcaggcgctgctcacgcgatgagccagacgctcggagggatcatccctgtcgcgcacggccaatgtgtggcggcgatgatgggccctgtaatggaatacaactggaaaggctaccctgaaaaatttgcccgcattgcaaaagcgttcggaattgacacaagcggcatgtctgcagttgaagcggctaaagctgcggtgaactggatgtatcagcttgtggaagacttagagattcctagtcttgaagagcaaggcgtatcacctgacatgatcgaccgcctttcaaaagaagcgatgaaagatccgcaaacggtcggtaaccctagagacctgaacgaaaaagcgtacaattggatttacaaacgctgcttcaatttaaccccgaaaactgtctga

SEQ ID NO: 3752 - DNA, 1473 bp, Bacillus licheniformis
atgagtcaaacacttttcattgacggaaagtgggtgggcgccaaaaaaggcgagactcgccaaattatcaatccttacaatcaagagcatattgaaaccgtcagtgaaggagacagagaagacgctgttagggcgattgctgcagcgcgccgcgcatttgacgacggcgagtgggcgaatacgccgggtcttgaacgaggcaacatcgtattaaagatcgccgaactgatcagacgcgaccacgaagagctggcagaacttgaatcgcttgataccggcaagacgattgaagaaagcagagccgatatggatgatattgcaaacgtatttcaatattatgcagggcttgcggataaagacggcggagaagtcatttcttcaccgatccccgattctaaaagcaaaattgtcagggagccggtcggtgtctgcgggcagatcacaccgtggaactatccgctcctgcaggcaagctggaaaatcgctccggctttggcggcgggcaacacgatcgttgtcaaaccaagtgaaatcacaccgctgacaaccattaagatcttcaagctgatggaagaagccggtgtgcctgaaggggtggccaaccttgttctcggccccggggcgactgtcggcgatgaacttgccagaaataaagacgtcgacttaatttccttcaccggcggaattgaaaccggaaagaaaatcatgcaggctgcaagtacgaatgtgaaaaaaattgcgcttgagcttggcgggaaaaatccgaatattgtgtttaaagacgcagattttgacgtagcggttgaccaggcgctgaatgcggtatttttccacgcaggacaggtttgctctgcgggcgctcgtcttctcgttgaagagtccattcatgatgagtttgtcgcagagcttgtcaagcgtgcgaaaaaaatcaagcttggcaacggatttcacgaggagacacagagcggtccgcttatttcagctgaacaccgcagcaaagttgaaaaatatgtggaaatcggcttgcaagaaggcgccaagctggaaacaggcggaaaacgtccggaggaccctgaacttgcaaatggcttcttctatctgccgacaatcttctcgagctgtacatcagatatgagaatcgttaaggaagaagtattcggtccggtattaacagttgaaacatttaaaacagaagaagaggttgtctcacttgcgaacgatacgatttacggccttgccggcgccgtttggtcaaaagacatcgaaaaagcggagcgcgtcgcttccaaactgcgcatgggaaccgtctggatcaatgacttccacccttatttcgcacaagcgccttggggaggttacaagcagtcaggcatcggccgcgagcttggccgcatgggccttgaagaatacacagaagtgaagcatgtctaccgcaatacgaaaccggcggctgtcaattggtttaaagcataa

SEQ ID NO: 3753 - DNA, 138 bp, Bacillus licheniformis
atgccccccgaaaaatcggggattgttctaaaatccgcgttaagtttgttaagttatttctgtatgttctttatcttaacgaaagaaattgaaatgtcaaaatcaaaaatttttttcaaacggtctcagcccatgtga

SEQ ID NO: 3754 - DNA, 555 bp, Bacillus licheniformis
atggacaatccccgtgatgtttcagcaaaagaaacgatcgcacaggcaaaagatcttgtcattgattcaatcgcagaaacaatggatctgtacggcattacccggagtgcgggcattttgtacggaacgatgtacctttcggatgaaatgacgctggacgaaatgcgggaagaactgcaaatgagcaagcccagcatgagcacaagcgtaaaaaagctccaagacttaaacgtcgtcaaaaagacattccacagaggaagaagaaaacacagctttgttgctgaaaaggatttcttcaaatttttcacaagctttttccctaaaaaatgggaaagggaagtcaaagtgaatctcatggctattcaagacgctcaaaaagcattggaggacatcatcgaaagcgaagggcttgacgaaagcataaaagaggaagcgagaactctttatgaccagcttgaacattcaaaaccgtattatgactggctgctgagactcgctaaatctgtccaatccggagagatttttgagtttataccgattgataacaagaaataa

SEQ ID NO: 3755 - DNA, 1629 bp, Bacillus licheniformis
atgaattatgctgagaagaaaaaaaactggatcaaattaggtatttttgcgctgtttgcgggaggcatactcgcgtatatcggcatttcgaatgcggacattcattggggcggctttatctccatgatgatattctttgctttcacctattatttaggcgctttttacgcagcaaagaaatcaaattctttttccgatatgatcgtggcaaaaaggagcatgccgtttttcgtcggaatggtgacgatggccgcaacatgggtcggcggcggatatattaacggaacggccgaatcgacttacagcgacggcctcatctgggcccaagcgccttggggctacacattgagcctgattatcggcggtattttcttcgccagaaaaatgcgccgtcatcaatttatgaccattatcgatcctctcgaacagcgcttcggtaagcggatggccggcgttttatatataccggcgctgttaggagaattgttttggagcgccgcgatcttaacggcattgggcacgactttcggaatgattctgaatatcgatttccaaacgtcgattattctttcggcgatgatcgccatcgcttatacggtggccggaggcatgtgggcagttgctttcacagatgtctttcaaatgattgtcattttgctcgggctgtttttagtcgtcccatttgtattgtcgaatgtcggtgctctcgatagcgtatgggcaaattacaggcacgatttcggcagcagcgccaatctgcttccgccgttggacggctggaaaaacccggattggggaaacctgttttggaactggtgggataatgcgctcctcttaattttcggaggtatcgcatggcaggtgtactttcagcgcgttctttcggcaaaatcggaaagcgccgccatgtggcagtcgataattgccggagtgatctgcatcattgccgccattccgtgcgtaatcatcggagctgccggaaacagtaccgattggagcctgttcggagcgagcgctccggataacccggcgatgattttgccgcaaacgcttgcgtatttgacgccaggaatcatcgcaggcctcggcttgggtgcaatcgcagcagccgtcatgtcaagcatggactcatcgattctatcggcatcatcaatggccgcatggaatatttaccgtccgctcatcaagccgaaggccacccaaaaacagctgcaaaaagtcgtcaaacgctcaatcattttgttcggcgcgggagcagcggtcatcgcgctgaatgtcaaaagcgtttatactttatggtatttggcttcggatttagtttattgcattctttttccccagttaacaatggccctcttttataaaagagcaaatctttacgggtcgattgctggatttgcagttgcagtcattctgaggctcggcggtggtgaacccgcattcggcattccgccgcttctgccgtatccgatgattgaagacggcacggtcctctttcctttccggacgctggctgcagtcacagcatttatgacgatcttcgctgtatccgaattgacgcagcgcaaatgccctcctaaacagcttgtactcccccaagaaaaacagaaagacgaccgcgcggcttaa

SEQ ID NO: 3756 - DNA, 918 bp, Bacillus licheniformis
atgaaaaaagatgaatcgagtataacgtcccttatttcggcttttggcagagcttatcacagccagtatgatgaaccaaaaatctttgatgataatctggccaaatcgctcatttcccaacaagaatttgctgatatcaaaaacagcttcattcaaggcatacagttcttcaacaaagctatagcggaaaaatacgagggagacgatgaagaaatattaagatggatcacacaagttcagctctctccgacgccgctcgcccgtgccgcttattgcgaaagagtgctgcatcatgagattcggcttgggacagaacaatacgtgattcttggggcagggctggatactttctgttttcggaacctagagttaaaggacaaaattgatatctttgaaattgaccacccagcgacacagaaattgaaaaaggaaaagctggacaaagccggttttcacatcccggaccaccttcattttattcctttggactttgccaagtcgttttcttatcaagaattggctgataagggttttcattttaacaaaaaaacgttcttcagctttttaggcgtttcttactacttaacaaaggaagaaaccgaaaaactgctcggggaattaatggctgacctcccttcaggcagttcgatcgttttcgattatgctgatgaaaacttgtttaaagagaaaggcttcttcaacagggtggaaaatatggtaaaaatggcagcggcaggaggagaaccgatgaaatcatgctattcgtatcagaaaatacagcacatgctgcagcaatccggactgctcgtttacgagcatttatcaccttcagatattcaagggcgttattttaaaaatcgaaaagatgatctgtcagcctttgaaacgattcattacattcatgccgtaaaaaaataa

SEQ ID NO: 3757 - DNA, 1170 bp, Bacillus licheniformis
atgaaaaagctttgccgtgaagtctgggtagaggtaaatcttgatgcgatcaaaaaaaatttgcgcgcgtttcggcggcatattccgaaaaagagcaaaattatggctgtcgtaaaagcgaatgcttatggtcacggatcggtggaagttgcacgccatgcacttgaacatggtgcgagtgagctcgccgttgcctcggtggaggaagcggtcgttttacgaaaagcggggattaaagcgccgatccttgtgcttggtttcaccccgctgagctgtgtgaaagaagcggcagcttggaatatatcgttatcagcttttcaagttgactggattaaagaagcgaacgagatattggaaaatgaagcagatcctaaccggctggctgttcatatcaatgtggataccggcatggggcgtttaggtgtacgaacaaaggaaaagcttttagcaatcgtggaagcgctgacggcaagtgaaaacctcgaatgggaaggaatttttacgcatttttccacagctgacgaaccggatactgagctaaccatgattcaacacgaaaagtttatcagctttcttcgctttctgaaagaacaaggctttaagctgcctacggtgcatatgaacaatacggccgcggcgatcgcttttccggaattcagcgctgatatgattcgcttaggcatcggaatgtatggattatatccttccgattatatcaggcagcttaatctcgttaagcttgtgcctgcactaagcttgaaggcgcgaatcgcttatgtgaaaaccatgttgactgaaccgcggacggttagttatggtgctacatatgttgcagagcgcggggaagtcattgccacaattccggtcggctattcccgtgaactttccaaccgcggttttattcttcatcgaggaagacgagtgccggtggcgggaagagtaacaatggatatgataatggtcagtctgggagagggtgaaggtaaacaaggagaggaagtcgtgatttacggccggcaaaagggagcagagatatctgttgatgaaattgcggaaatgcttgatacgatcaactatgaagtggtatctaccataagctggcgcgtccctcgtttttatataagagacggcgagatttttaaaaagtcgaccccgctgttatacgtgtag

SEQ ID NO: 3758 - DNA, 1182 bp, Bacillus licheniformis
atgaaaagaacagccgggactccagcttggtacaatcacgtgccgcatccaataagaaacgatggtgcgggcgcgaccgattttggcccccgcgacgtgatgcgggatttagagaatcccgacatgttcgttcctccaaaaacagatgccggagcaatccctaatttaaagttttctttttcagacacacatatgcagttaaatcatggcggctggtcccgtgaaataacagcccgggaactgccggtatcaacgacgattgccggcgtcaatatgcggctgacgccaggcggggttcgcgagttgcattggcataagcaatcggaatgggcttacatgattttgggccatgcgcgcattaccgccgtcgatcaggacggccgaaactttatcgccgatgtcggccccggagatttgtggttctttcccgccggaataccgcactcgattcaagggcttgaggatggctgcgaatttctcctcgtttttgatgacgggaacttctccgagttcgataccttcacgattaccgattggttcgcacacacaccgaaagatgttctggccgcgaatttcggtgtacacgaaagcgccttcgcccgcatccccgacaaacagcggtacatcttccaagcaaaagcgccgggaccgctcgaaaaccaaaaagtgccggacccgtatggaaccgtaccaaaaagcttcgcatacaggctgtttgcacaaaagcctattgtaacacccggcggaacggtgcgaattgttgattcttcaaactttccgatttcgacagcgatcgccgccgcgcttgtcgaagtcaagcccggcggaatgagggaaatgcattggcacccgaacaacgatgaatggcagtactatatctcagggaccgggcgaatgacagtattcgccgcaaacgggactgcccggacctttaattaccgggcgggggatgtcggatatgtcccgtttgccatgggacattacattcaaaatacaggcagcgaaagcctgtggtttttagaaatattcaaaagcagccgcttcgcagacatttcattaaatcagtggatggcgctgactccgagagaactggttgaagagcatttgcatgcaggccctgagctgatgaacgctctgcgaaaagaaaaatggccagtcgtcaaataccgtacggacagctag

SEQ ID NO: 3759 - DNA, 399 bp, Bacillus licheniformis
atgagaaatggcgtttgggcactatacaatgataaagagtacgagattattcagcatgatcaagaaaactacgaattatttaccaaagatcctgaggcaattcaatttggttttattttagatgaaactggacattattgtaaacaagttcgaagagaacatatttcttcagtttatgatgtaagataccaagcaattattaatgatcttgagtttcctgtttttcgtgaggaagacaataggctcttaattggaagtgggctacatggcccggacattatcaaaaaatatggatttgttcaagttgatcgatttgaatatgaaaaatgggtaggaaaaagtgaagttgaaaaaattgaagaagttaaagtacctatgtggggttttcccgccccgtga

SEQ ID NO: 3760 - DNA, 1923 bp, Bacillus licheniformis
atggatgtgaaatacgtaccggaagaatggcagggcatgaaagacggtcttgatgcgctgacgggcggccaatacggcggcggtatgaaatccggccttataaaactcaatgatctcttggaagatatcgaatccaaaatcaaagacaaggacagcgacaggtcgatcagctttacccacaccagcaaaaaaagcaagatcgaggaactgtttaaggattatcaaaagctggccgacttttgcctgaaagccggcagtttggtggcagaccacattgacagccctttttataaaaaaatagacgcgttcgccgaaaaaatgcgcggactgaccatacataattacaccaccgtaaaccggatcggctccaaggaaaccacttacgtcggatacggcatgtccaagcaagcggttgaaaccgacaaagcgaaagtgagcgtaaatgatatcttcaaagactcggaatcgtttgatcacgtactgagcaaagaatttgaagaattccagatcaaccaccccgacattgagttatcgtatgaagaatacacgaaagcgattgcctcttcccgcggatttgaatacgaatcaatcggcgatgtccaaaagaatcaggaattatggcgggatcttctggccggagcaggcattatcgtgctcaccatcttttgcgcaccggcaggtctcacggtggccgtcgcctacggaggagccaatatcgcgagcgcggcaacaggaaaagactggatgacgcagcgggagttaaacacaggcgaaaggtttgaaagaggcgtgttcggcgcccttgacatcatcccaggcgctgccgcggcgaaaggctcatttaaaagcgcagccacaatcggccaaatttcaagcaaaacagaacatatggtacaatctcttaaagacagcaaaaacatctgggcgaaccgcatgaaggtgaatgggctgaaagctcaagaccggctcaacgacgcaggcttcgccattaaaaaacaattcgccaaaagcgccgacgctttgagcgatattgcccgcggtgcggaagcaggagcaggcggcaccctcgtccgaaaagggtccaattactccgcccacgtcaacgacgcccataaggcttcgaaagcgaagatgcaggattcgattcagcgggttgagaaggagattgaagctgggaagagtgttaaaagtgttgttaaagaggtagatgttaataggaattcaccagttaatccgaaattttcgtgggaacaattggataaatcttttgaagataatttaggaactgtattaaaaaagcataaattaacagtcaataattttaatgacttgaggcttaaatctataaataaactttcatctaaagaggtggaagttattaaagatattaggcgaaacgttcctagtctttcagaagatacaattatgcagaaggttctttctcctgattccaaaagttggctattttcttcaccaagtgatggtgggcaaataaagctaggtggatatgtggcaagagctactgatactaaggaattgaacacttttgataagatttatgaaggacttagattagattacgaaaacaaccctttcagtggcggaacatcagcattagcggtacgctataaggcaggtaatccaaacgattataaaattccgtttggagggaagaattcagaggccgtaaataaaatgacccacgatgatttggcaatggattatattgcaactgagcaacaatctccgtttactggaaatggatttacagagagtaaagattacactattcctgaatatcgcaatgatacaagaacacctatgcatgaaggtgcagaactttatgagatcactaatcaaggcgagaaacttattgggatctatagtgttaaacaaaaaaggttcatttcagttaatgaatag

SEQ ID NO: 3761 - DNA, 324 bp, Bacillus licheniformis
atgaatgcagaaggcggagcaggaggcggcggtacaaacatccatctcgagtttgaagaaatgatcaccatttccaataagctgaaaagcatctgcgatatttatacagaaggggttcagaaggaaatcaaaaacctctcagaatccgatttttataaagccggacaagcatcaaaagcgattgaaagctacgcggatattctcggaaagacgatggagctgtttgataattactgtatagcttcccacattgtcagttatgcgatggagaaaatgtatgaaacagataaagagctccaaaaactctacaagattcagaaatag

SEQ ID NO: 3762 - DNA, 708 bp, Bacillus licheniformis
atgcaggtgaaagcagatacgctgtcggcggcagaactgtatgttttagcaggagcagccggagtttcctacatattcggtcttccggaacgcgaacagctggccttggtcgagccggattgtgcaataaaagcaaaggacagcctgattgaaaaaggcattcttttaaaggaaggcaagctgaccaagaccgctttttttctgattaagctgctgcaacattaccaagaaagcggagaatacgtgcgctttaataacgtgatgtgcgcatttctgccggacgacgaggagcgcgttatcgccctgactgaaataagcccgggcaaagggtacacattagattatgtggaaaagcgcgaagtttatttatcgctcatttcaaaggtgtcatttttagtaagggagccgcgtgatcaagaccgcgcctttttgacaaaaccgatgagcgccgctgaaaaagcggaagtcagggcaatgaatcttgatgaaaaagaagttcttgctgtggaaacgttcaagctagcctcacagcaaaaaccggcagaccccggcttccagacgacaacactttactttacaaaaggcgaagacttcatctcggttgatcctttaaatgatcgatatgaatggatcagcctttatatcatgaacaaccggatctatgatgcactgcagatcaatttcagagcagggagggcgatgatatga

SEQ ID NO: 3763 - DNA, 351 bp, Bacillus licheniformis
atggacggatatggatactacaactatcaagcggcgaatccgaaagtaagcggagagactgtgaaaatttcacacaatggaacaataaaagcgcattcccatgcgaaagcgatcgaaaaacatgtcggcgattcgctcaaaaaagcaaaggaattgaaagcgtacgtcgaaagcggcaaatggagcgggaaaacccgcgacgcatttttaagctaccttgagctgattattgaattgaatgccgatatgaaagacgccttgaaagagcataccgctgcattagatgcgctggaaaaacacatcgacggtttttcgcagctcagtgaagtgcaggaaatcaaaaacttataa

SEQ ID NO: 3764 - DNA, 360 bp, Bacillus licheniformis
ttgggcgaaggtttttgggattcagtaggcaactttttgcacatatcctacacggaaaatgaacgaaaacgcgatgagtataaaaatttatacgactatttatctgataaagaaagcgatgtcaagacgaaattagcagaaattgatgcaagtttgaaggcttaccacagcaatctcccggacttgaaaatcccttcacacgaatttgaggatacccgccatgaaaaggatgccaagctgaaggaattggtcaagcattttaaagatatggtcgatgacatccaaagcgccaagacgaaggcgaaaagcaagtgggagtattataaagcaaaagctgaagctgaagagaaaaaggcgtag

SEQ ID NO: 3765 - DNA, 177 bp, Bacillus licheniformis
atggaatgttcttcaaaagaaaatatttctcaggaaatgatcggccggaaaacaaggaaaatcagactggatctttttgcttataaaagatccttatcgactggtaattttatttttgtgccgcggaaaacaattcttttaacctattcattcgtctgggaccatcctgtaagataa

SEQ ID NO: 3766 - DNA, 210 bp, Bacillus licheniformis
atgcgtgaacataaaggatgtatcaagtgcggaagcacagatgcggggcaaaaagaaatcgcgacgaccggcaccggcctgtcaaaattgttcgatgtgcagcataaccgttttctcgtcgtttattgcaaaaactgcgggtattcagagctgtacaataaacaatcttcaaccgccggaaacattctcgacctgttctttggaggatga

SEQ ID NO: 3767 - DNA, 174 bp, Bacillus licheniformis
atgggggaaaaatacggttcattgattgccatatttattttggcattatgtgtgcactccaacattgtcgtagaacatgcgctcttacagacaatcataaaggcagtttcactttttgtgatgatcgcttcggcgcttgcagcatttgtcaaaggcatcagacaaccgtcataa

SEQ ID NO: 3768 - DNA, 1482 bp, Bacillus licheniformis
atgtctgagagcagcaagaaatcagtcgtcatgttgctgatcgattcattaatggatgaaccgctcaaagaagccgtgaaaaacggacaggctcctggactgcaatatttactggaaaacgggcgttatgtgcctgatatgatcagcccttttccgacgatgtctgtcaatgtcgacagcacattgcttacaggggtgtacagcgaccagcacaaagtgcctggccttgtgtggtacaacgcgaaggaaaaacggattatcaattatggcagccacattcgagagcttctgaaattaggcatcaaacaatcctccagagacgtcttttacaatctgaatcaggttcatttaagccaacaggtgaagacgcttcacgaagagcttgacgaaaaaggaatcgaaacgtgctcgatcaatgcgctcttgcacagggggagccgggacggctatttgcagattccctttcttttttcaatgatttccggattaaaccggtcagtcaaaatcaacgcatcccagctgttttcgtacggcggtttttccaaagtgaatccggccaaccgctcgcttttcaaaaaattcggttttaacgaccgattttcaaccaatgaattggtctatctgattcaaacaaacaaagtaccgcctcttgcgctcgtctattttcccgatctcgaccagcacgtgcataaacacgggaggaacgacgcagcgggggtggcgaaagccgaccggcatgttcaaaggattttagacagtttttcgtcatgggaagccgctttaaaggatcacatttggatcgtgatgggggacaacggacaggcctggatcagcggcaataaaaaagaagcattgattgatttgagaagccttttggacgcctttcgcattgtgaaattaaagaaaggtgtgacggccgatgacgacatcgttcttgcagttaacgaaagaatggcgttcatctattcgctcgataaagcgaagcttccgctcaagaggatagcggacattctgcaaaaggacgaacggatcgacatcatctgctggaaaaatgaagcggattcaattgaggccgtttcgggggagcagcacgggaagctcacatttcggccgggaggcaaatgcacggacgaatttggacaaacgtggacgctggaaggggatttacatattctcgatttgacggttgagcagaacagcctgacatacggaaaatttcctgatgcgctggccagactgtacgcttcatttttttctcatgaaggcgattatttgatcgccaatgcaaagcccggatacgaatttatcggcgaagggtcgccgacgcacgtcggaggagccagccacggtgcactgcataagcaggacaccctcgtctccatgatcatcaccggaaccgatacaatgccggcatacaatcgtcttgtcgatataaaagaatggatcctcgatttagtcaaatcacggggagcgggggaatga

SEQ ID NO: 3769 - DNA, 1134 bp, Bacillus licheniformis
atgacaaagattctgattttcccttttttaagcatttccaccggtcatcatcacgttgccgattcgctgcagacagaactgctcctcaaatcccatcactgtgaaaaaatcgacattttttcacatgcttatcggcggctggaaaaggcctcctctgcggcatatttgtcatggattcagtattttccgaaagtctacagctcggtctatcatctcctggcgtgcgggcgccatgaaacggcaaagcgccacctcttgtatgagctgatctttttgaaaggcatgcagcagattattgcagaaaaaaagcctgatatcgtgttctgtacgcatgcattgccctcctatttgctgaaccgcttaaaaggccaatttcccgacatgaaagtggtcaatgtatataccgattttttcgtcaaccgaatctggggaagagagaagattgattatcatttcgcgccgatcaaagacatcaaagaccagctgatcgcagaaggcgttgatgaagagaaaatttttctgaccggaatacctgtgcaccgttcctataaaacggagagaaagcctgagcaggacggggacaaaaaagcgttttgcaacatcctcataaccggcggaagcatgggggtgggcggcatttttaaactcgtgcgggaactgtcgccgaacgggaatgtctcataccaaatactatgcggaaaaaaccgaaagctctaccggtatgttcgtgatttaaacaatccatatattaaagcgctgccttatatcgaaagcaagactgaaatgaaccgcttatacgcggaggcgtcgggcattattacgaagcccggcggcgtcacgatcagcgagtgcattgaaaaacagctccctgttttcatctatcatgcgctgcccggacaggaagagatgaatctcgatattctgaaaaagaaaaaccttgtcatcgaactgaatcagcaaaaacagcagccgattgaacagcagctgctttcctttttccgttcggatgaagacatcaggcgctatcaaatgagcgtcgatcaatatttgcgcgaaaaatcggaccgtgatttcagcgatattttagacgggatcattcataaccggagcggtttagggaatgctcacgtataa

SEQ ID NO: 3770 - DNA, 138 bp, Bacillus licheniformis
atgcttaaaaaagggaaaatcagaatctttgtcatctccatcctccatttcagaagaaaaatgttttccatttatatttttcaaatatccagccaaaatataagtgtattttttcaggaaaggaaagtgacgacttga

SEQ ID NO: 3771 - DNA, 549 bp, Bacillus licheniformis
ttgagaaactgttttttgtcaatttggagtgtaattgacccgttttattattttttttcaagactgacactcattgaccaaacgaaaacgagcatttttcgcgtccgtctaacaaagtacaaagggatcgatgtggtgttaagcgatgggacggttattaagaaaaacgatgttctgatcaaaattcatctgcacaatattaagctgatcaaggagcttcaaaatattgagagcgctgtcagaagaggcattctcatttatcaaaaagcgtatttttcaatgccgatcttgggcgaatatatcaaaaatcatcaccggtcagaccaaattaaaggcatcatcggcatcactacgctgcataaaggagttgagaggctcggttttgaagcggttgagcctgcgaaccagttttacagagtgttcaagaagctgacgcagataccgatcttatatttaacaacaaagcaattttctcttcgcaaaatccccccttcccaatatttgtttatttcgaaagaaaaattgttcaagtcctatctgcagaaataa

SEQ ID NO: 3772 - DNA, 816 bp, Bacillus licheniformis
atgtttattatcgcatgtttattgattatcttaggcctcatgccttttttatataaagcgaaccacaatacaaaagatgtgaaagtcaacacgatttcggtcgagcgcgtgcaggctcccgctttaaagaaaaagctgaacattcttcatctgtccgatcttcatttagaaaacatttcgatttcacctgaacggattcttgaacttgccaataaaaaacgagtggatctcattgctttaacaggagattttcttgataggaagagaaatattccaaagcttgcaaactacttaaaagctttgaaaaaactgaagccggcatacgggatgtacgctgtattcggcaaccatgactacctattgaaagacgaacactttcggaagctgaaacgtgtactggaagataacggatgcatcaccctacagaaccagcatgtctccattgaagtggaaggcgagacactcaacattatcgggattgatgattacagcacgaagcgaagcgatattgccggttcatataaagggcttaaagagggctacaaccttgtattgacgcatgatccgaacgttgtgcttgatatgcaggaatttcactttgactatcttctttcaggacattttcacggcggtcagattcattggccgaagccttatcatctcgtgaagatgggaaagcttgtgcgaatgaatatgataaaaggtcttcactaccatcatgacaaaccgttttatatcagcgagggattgggtcagactggggcgaacatccgaatcggaagccgtccggaaatgacgttccatcacatttcataa

SEQ ID NO: 3773 - DNA, 831 bp, Bacillus licheniformis
atgaacatttgggatattattgtcgctatcatacttggaattgttgaaggattaaccgaatatgcccctgtatcgtcaacagggcatatgattattgttgacgatgtctggctgaaatcgaaagaactgcttacgccggaggcggcgaatacctttaaagtcgtgattcagctcggctccatccttgccgtcgccatcgtatttaaagaccggattctcaatcttttaggcatgaagaaaaacattacggaagagcagaaatcgggaaaccgcctttccatcgcccaaatcgctgtaggccttgttcccgccgctgtgcttggatttttatttgaagactatattgatcaatacttgttttccgtccgcaccgttgcggtcggtctcatcgccggtgcggtgctgatgctcgcagccgactggatcaatcggcgcaaggatacgacagattcggttgataggatgacgtataagcaggcgcttggcatggggctgtttcaatgtctggcgctttggccgggcttctcgcgctcgggttcgacgatttcaggcggggttattctcggcttgagccacagagcggccgctgatttcaccttcatcatggcgattccgatcatgatgggtgcaagcctgctctctttaatcaaaaactgggcatatttgagtgcagacctgttgcctttctttatcgcagggtttatcagcgcttttattgtcgctctttttgtcgtccgttttttcctccggctgatcaacaagatcaagctggttccgtttgccatctatcgaatcgttttagggctgcttctgttcattttgtttctgtaa

SEQ ID NO: 3774 - DNA, 1146 bp, Bacillus licheniformis
atggactctttgcatatgtggggcggcaggtttaaaaagttttttttagacaataaattcgtcctgtttctgcttattctgcttttgatcggactgaacatccttgtatttacaaaagcatcgtttattttcacgcctttcatcgttcttgtggaaaccatcgctctgcctgtcgtgctgacaggtgtcgtttattatttgttaaatccgatcgttgattttctagagcggaaaaacgtgaaaagaatttattcgattcttcttctctacattgtgatcatcggtctgatcacgatttcgatcgtctctgttatcccgctgttaagggaacagatcacaagccttgtcgataacttcccaaggtatgtccacattgtggaagaccaaattaaacagctgatcggaagccagttctttaatcaggtccagcagacgatgaacatcaatctgaccgatttggcaagcaaattatccgatcaggctaccaccattttaaatagtacgtttaccggtgtgggaacgttcataggcgccgtgacagaggtcgtgatttcgattgtgaccgtgccgtttatcctgttttacttgttgaaagacggcaaaaaactgccgctgtttattctaaaactcataccggtccgcctgcgggagcagacggatgtgatgatgtccgagatgaatcaccggctgagttcgtatatcagggggcagatcatcgtcagcttctgtatcggctgcctgttgtttatcggatatatgatcatcggtcttgattatgcttctcttttggcccttgtggcggcgtgtacgagcatcgttccgtatctcggaccgacgattgcgattacgccggcaatcatcatcgctttggtcacttctccgtttatgcttgtgaagctgatcatcgtttggactgtggtgcagctgtttgaaggaaaatttatttcgccgcagattatgggaaaaaacctgcacatccatccggtaacaatcatctttgtgctgctgacggcagccaagctgttcggcgtgatcggcgtcattctcgccatccccggatacgcggtcatcaaagtggttgtcacgcatttatttgaatggtttaaacagcgttcacacctttacgaaaaaaacgaagaagtctga

SEQ ID NO: 3775 - DNA, 987 bp, Bacillus licheniformis
atgatacggttcggggtagtcggaacaaattggattaccgaccggtttcttggggcggcccgtttgatcgaagattttcaattaaccgcggtatattcaaggaccggagagcgcggacgtgaattcgcgcagaaatacggagccgaggcggtttttaccgatatcggagaaatggctgagagcgatgttattgatgcggtatatatcgcaagtcccaactctttacataaagatcaggcagttacattcatgaaatgcggaaaacacgtcctgtgcgaaaaaccgcttgcgtcccatgtcaaagaagcggaagaaatggtaaaaacagcgcaggaacaccgcgtaacatttatggaagcgatgaaaacgacgtttcttccgaattttaaaaacatcagtcgcaacctgcacaaaatcggcaaagtccgccgttttacagccagctactgccaatactcttcccgctatgacgcctatcgaaacggaaccgtcttaaacgcatttaatccggctttatcgaacggttccttgatggatatcggcgtctattgcgttcatcccgcgatcgtcctgttcggcaaacccctcgaagtcaaagcgaacgggctgatccttgagtcaggggcggacggtgaaggaacagtgctgttaaaatacaaggagcacgaagccgtactgatgcactcgaaaatctcaaattccttcatcccggctgaaattcaaggagaagaaggctctatcgtcatcgataaaatccaccgccccgaacaagtcgacatccgctatcgggacggtcgggttgaacatcttacgctgcctgatgacaaaccggccatgttttatgaaacagaggaattcatcaatttaattaaacaagggcggatcgagtcttcgcttaacacgtttgaacgttctatagacacattggcggtcatggatgaagcgcgcaaacagatcggtctcgttttccccgctgatcacatgtag

SEQ ID NO: 3776 - DNA, 525 bp, Bacillus licheniformis
atgcgactggaaggcaagaaagtgatcgcgcttgtcagcgatgaattcgaagatttagaactgtggtatccagttttaaggttgaaggaagaaggagcgatcgtacatttcattggtgaaaaagcggatcatgaatacaagggcaaatacggcgtgcccgctgtctcagattatgagctgaaaagcgtgaacattgaggaatacgacgccgttctggttccgggaggctggtcgcctgacaagctcagaagatatcccgaggtcctggagatgattcggtggttcaacgaaaggaagaagcccatcggacaaatctgccatgccggctgggtgctgatttctgcaggaatattggaaggcaggaaggttacaagcacaccggggattaaagacgatatggaaaatgccggagccatatgggtgaatgaagcagcggtcgtcgacggccatatcgtgtcaagccgccgcccgccggacctgccgatctatgtcaaagcctttgccgatcttttggcgcagtcctaa

SEQ ID NO: 3777 - DNA, 1983 bp, Bacillus licheniformis
atgtcaaacattgtaaattggatgaaacgtccctccattgcaaagaaattaattctttcattcttgcttatcttaactgttccaatcatcgtcctctcctatagtgcgtatcaaactgcaagcagtacgcttgacggggaaattatggacaatgcgcgtgaaaacgttaatcagctgaatgaaatcatcaatcagaatatcagccagaaaacaaacgccatgtcctatttcagcgggttcattaacgaaaactcttttaaagggaaggaaagcgactctttgaaagtgaaattcgaacagttcgccaagctccatcccgacgttgaaggaatctttaccggatcaaaggacgggaagttcatccgctacccggatcaaaagatgccgagcggatataatccggtagagcgggactggtataaaaaagccgctgaacacaagggcgaagtcgttatcacagacccctacaaaacggcgtcaaccggaacggtggttatcaccatcgccaagatgcatgaggacggctccggcgttgtcgccgtcaatatgaaaatcgaagagctcattaaagcgacagaacgcgtaaccatcgggaaaaaaggctttgcctttatcacgagcgctgataaaaagtttgtcgctcacccgaaacatgatgcgggctcagatgtcgaaggcggctgggtggaaaaggtatacgccaatgacaaaggaacattcaaatacacgcttgacggcgaaaaacagatggctttcgcgaccaataagctgaccggctggaaaatcggcggaaccatgtacatcactgaattaaaagaagcgtcacagcctgtgctgaatgccgctctgattacgttgggcgccagcatcatcatcggcgtgcttctcatgattctcattataagatcgatcacagggccgctccgcgaactcgtttcctctgcgaaaagcatcagcggaggcgacctgacgcaaaaaatcactgtccgttcaaaagatgaaatcggacagctcggcacaagcttcaacgatatggctgaatcgctgagctctttaatcagcgttattcagacatcggttgaaaacgtcgcttcttcttcagagcagctgactgcgagcgcggatcagacaagcaaggcgacagaacatattacatctgcgatcgaacaattttcaaacggaaatgaaagccaaaatgaaaaagtggaaatcagtgcgcagcagctggccgacatgaacagccgcttgcatgaaatgtccaaagtctcagcatccattacagaatcatccattcaatcgacggacattgccggtacaggcggggagcttgttcaaaaaacggtcggacagatgaattccattgatcattccgttaaacaagcggaatccgtcgtgaaaggacttgaaagcaaatcaaaagacattacggcgattctgcgggtgatcaacggcatcgcagaccagacgaatttgctcgcattaaacgcagcaattgaagccgcaagagccggtgaagccggaagagggttttctgtagttgccgaagaagtgcgcaaactggctgagcaatcagcgtcctcggcaaaagaaatcgaagcgctcattcaggaaatcgtcaatgaaatcggaaaatcgctggacatgttccaggacgtcaaccgtgaagtacagtcgggactcaccatcacagatgaaacagacacaagctttaaacagatttatgacatgacaaacgaaatcgcgggcaagctgcagacgatgaatgcggcggttgaagagctgtcagaagggtcgcagcaagttgcgggagcggttgaagaaattgcagacgtatcgcgtgaaagctcgggaagcattcaagacatcgccgcttcggctgaagaacagctcgcttcaatggaagaaatcagttcttctgcggctacgcttgaacaaatggctgaagaactgcgcgatttaacgaaaaaatttaagattgactaa

SEQ ID NO: 3778 - DNA, 1986 bp, Bacillus licheniformis
atgaaaaagatattggactggcttaaacgtccgtctatctcaaaaaggctgtttttcagctttatattggttttaactttgccgattttggccttatcctatagtgcgtaccaaacggcgggaagctctcttgaaacggaaatcatgagaagcgcacgcgataatgtcgaacagctgaatgagatcatagaccagaatatcggagagaaagaggaggccgtctcctttttcagcggcttggtaaatgaaaagctttatcaagaaaaagagaacgcatcactcgtagaaagactcgagcagtacgccaagctgaatcaggatgtggaagcgatctacacaggttcaaaagacggcaagttcatccgatatcccgccgagaaaatggcgaaaggctataacccggcggacagggactggtataagcaagccgttgaaaataaaggaaaggtgatcatcacaaacccttataaaacagcgtcaaccggaacgatggtcattacgattgcgaagcagacggaggacggctcaggagttgttgccgtcaacatgaaaatcgatgagctcatcaaagcgacagagcgcgtcaacatcggaaaaagcggctttgcgtttatttcaagcaatgacaaaaaatatgttgcccatccgacaatcgaagccggaaccgaaggcaaaggcgactgggttggacaaatgtacggcagtgagaaaggcgattttcaatatacatttgaaggaaatgaaaagaaaatggcttttacgacgaacaagctgaccggctggaaaatcggcggaacgatgttcacagatgagatatcagaggccgcccagcccgtcttccacatggcgataatcattttggcagcggcgatcgtgctcggcggcattctcatctactttattatccgcggaatcagcaagccgttaagcgagctcgtgtcatccgcaaagagcatcagcggaggcgatttgacgcaaaaaatcgaagtccgttcaaaagacgaattcggtcagctcggtacaagctttaatgaaatggccgaatcgctgagatctttaatcagcgtcatccaatcatcagttgacaatgtagcttcttcatctgaagagcttcatgccagcgcggcgcagacaagcaaagcgactgagcatattacaatggccattgaacaattttccgacggaaatgaaagccagaaagaaaaagtggaagcgagctcgcatcagctgaatgaaatgaacaacgggttatatgacatgtcaaaaacatcagctgcgattaccgatgcgtcgctgaaatcgactgagattgccggcaaaggagaagagcttgttcaaaagacggtcggccaaatgaactcgatcgatcggtctgtcaagcaagcggaagcggtcgtcaaaggacttgaagccaaatccaaagatatcacaagcattttgcgcgtgattaacggaatcgccgatcaaacgaatctgctggcgctcaatgccgcgatcgaagcggcaagggccggggaatcgggccgcggcttctcggtagtggctgaagaagtcaggaagctcgccgcacaatccgccgactcggcgaaggaaattgaacatttaattcaggaaatcgtcaaggagatcgacaactctttgaacatgttcaaatcggtcaatcatgaagtacagtcaggacttcgaatcaccgatgaaacagagacaagcttcaaaacgatttacgatatgaccaatgatatcgctggcaagctgcagaccatgaatgccgctgtcgaacaattgacgcaaggctcccgccaagttgtgggcgcggtcgaagaaatcgctgatgtatcgagagaaagttcggcaagcattcaggacatcgctgcttcagctgaggaacagcttgcttcaatggaagagatcagcgcatcctccacgacactggcggagctggctgaagaactgcgtgatttgacacgcaaatttaagattgaatag

SEQ ID NO: 3779 - DNA, 1983 bp, Bacillus licheniformis
atgaaaaagcttttaaattggatgaaacgtccttctatttctaaaaaattaattttctcttttatattcattttaacaattccgattttggttctttcggttacttcatattttacggccagcagcacgctcgaggatgagattttgagaagtgcgaaagacaatatcgatgaactgaacgacattattcagcaagatatcggcagcaaggagacttccattgcgtatttcagcgaatggattgatcaaaaagcgtacaaagagaaaggccagactgcaattaaacaacggtttgagcagtttgcaaaacagaatcccgacgtcgaactcgtcttcaccggatcggaagatagtgtttacgcacaatatccgaatgctccactgcccgacgggtatgacccggtagaacgcgactggtacaaacaggctgtccaggaaaaagggaaaacgatcgtaactgaaccttataagtccgcatcaacaggccatatggtcgtcacgatagccaagcagaataaagacggttctggggtcgtcgcccttgacttgaacattgacaagctgatcaaatcggcaaacagcatcagcatcggaaaaaccggatatgcattcatcatcggcgaggggaaaacgtatgtcgcccatccgaaaattaaagccggcacagaagcagaagctgatctgacagagcaaatgttcagcaaagagagcggcttgttcacctttaatgaaaaaggcaaagaaaagaaaacggtcttcacgacaaacaaactaaccggttggaaaatcggcggaaagatgaatacagcggagattaaagacgctgcccagcccgtgcttcacatggcagtcatgacattggcaggcgcgattattctcggcggcatccttgtttactttatcgtccgcgcgatcagcaagcctttaaatcaactcgtctcttctgcaaaaagcatcagcgaaggagatctgacacaaaaaatcgatgtccgctccaaagacgaattcggccagctgggcacaagcttcaacgaaatggctgactcgttgcgctcgctgatcagcacgattcaagaatcggtcgacaatgtggcatcttcttcagagcagctgacggcaagcgcggaccagacaagcaaagcgaccgagcacattacattagccatcgagcggttctcaagcggcgctgaaagtcaaagcgaaaaagtcgaagaaagctcacagcggctcagccaaatgaatgagaagctgaatgaaattgcaggcgtgtcagaatcgattacagaatcctcgggtaaatcgacggaaattgccgaaacaggcggagagctcgtccaacaaaccgtcgggcagatgaactcgatcaacaggtctgtcaaacaggctgaacaggttgtcaaagggcttgaagcgaaatcgaaagatatcaccgcgatcctgcgcgtcataaacggaatcgccgatcaaacgaatttattagctctgaacgccgccatcgaggcagcgcgggccggcgaatcaggcagaggcttctcggttgtcgctgaagaagtcagaaagcttgcggctcaatcagcgggatcggcaaaagaaatcgaagcgctgattcaggatatcgttaaggaaatcgaacattcgctcaacatgttcaaatcggtcaaccaggaagtacagtcaggactcgaaattaccgaagaaacggaatctagttttaaacacatttacgacatgacaaacgaaatcgcaggcaagctgcaaacgatgaatgccgccgtagagcatttatcaacaggttctcacgaaatatccgatgcggtcgaagagatcgccgacgtatcgcgtgaaagctctgccggcattcaggacatcgccgcttcagcggaagaacagctggcttccatggaagaaatcagctcatccgctgcaacgctcgaacagatggctgaagagctgcgcgatttaacgaaaaagtttaagatttga

SEQ ID NO: 3780 - DNA, 177 bp, Bacillus licheniformis
atgaatataaaagagaaaattaattttttagaaatagaaggacgtttcatccaatttaaaagctttttcatgtgtgattcccctttctctacttttatcggagacggggtctattttttaaataaaaaaagcggaaaattagaccgttttcctgcccaagcatcaggcatacgctaa

SEQ ID NO: 3781 - DNA, 738 bp, Bacillus licheniformis
atgataagtgtttcgggctactggctccgtcctgaggatatcgaaaaactgaatgtcagtcagacgcagagagacatcgccaaccggatgctggccatgccgtccggatatagatacggttcaatctcagaactgttatttgagctgagattcagagagcataccgtcaaatcggccagagagctgatcaacagcggagcgaagtttgccaccttttcaaagacatacgggaatgaacagttttggagggtgacgcctgagggggctttggagttgaagtacagggcatcggcttcaaaggcgattcgaaatatttttgaaagcggcccttcttatgcttttgagtgcgcgactgcgattgtcatcattttttatatggcgcttctcaaaacgatcggcgaccagacatttgaccggaattatcaaaggatcattttatacgattggcactatgagcggctgccgatctatacggataaaggaaacgactaccttccgggagactgcctgtatttcaagaaccctgaattcgatccctcaagaccgcagtggcgcggagaaaatgctattttacttgaaaataatctctatgcggcacacggcctggggatcttaagcggcgaaacaatcattgaaaaactgaacgggctgagaaagcctcatgcacagacgtccgcctatctgctttcccaagtgacgcgggttgatattccggcattaattcaaatgatcagatag

SEQ ID NO: 3782 - DNA, 1056 bp, Bacillus licheniformis
gtgaatcagttcatggaacgcctctctttgtcaaagcctgtgatccaggcgccgatggcgggcggaccgacaacgccaaggctcgccgcagccgtatctgactgcggcggcttaggcggccttgcctccggctatttgacgccggaagttcttcgacaacagattctggaaacaaaaaagctgacatcagccgggtttcaagtcaacctcttcattccggaaaaacgggaaaccgtcagccgggaagaatatgaagggtggcaggagaagatacctttggcgcattcggcttcacccgtgacagatgagagacaagattggggcgatttttacgagaaaatagaaatcattctaaaggaaggaatcagcgccgtttcatttacgtttggccctccgccggccgatgccgtcaaggaactgaaagaccgaaactgctgtttaataggcaccgcggtttcagttgaagaagccgtgctgcttgaagaactggggatggatgtcatcgttgttcaaggtagtgaagcgggcggccacaggggagccttcttgaaaacgaagggagagcctgctgtcggctcgatgtccttaattccccaagcggcagatcatgtgtcggttccggttatcgcagcgggcggcatttttgacaaaagaggtgttgctgcagcttttgccctcggcgcacagggcgttcaaatcggtaccgcttttttgacgtgcgaagaaagcggaacacaccctgcctacaaacaaaaattgttcgaagcggttgaaaccgacacaagcctgacccgtttgttctcggggaagccggcaagaggcatcgtcaatcagtggatggaagacagacgccaggaagaagctgaagcgctgccttatcctctgcaaaacacgctgacgcaaccgatgagaaaacaggcgaagcttgacgggaatacggataacatgtcattgtgggccggacagagcgtgcgggccaccgtcgagcaaacgacggtgaaggagctgatggatcagcttgtgccggccgatgtgctatctgatcatttgaattaa

SEQ ID NO: 3783 - DNA, 402 bp, Bacillus licheniformis
atgttgaaaaaaatacagattcaaacaaaccggcgcgatgaaatgcttgatatcacaaatgacgtccaaagattcatctcagaaaacgatgtttccagcggcgctgttatcgtctactgtccgcatacgacggcgggcattacgatcaatgaaaatgccgaccccgatgtcaaacgcgatatgctgagaaggttcgatgaagtgtatccgtgggaagatgagcttgaccgccatatggaagggaatacagcggcgcatttgaaagcgagcacggtgggcgcatcgcagcatatattgattgaagggggcaggcttgtcctcgggacttggcaaggcatatatttctgcgagttcgacggcccgaggcaccggacgtgctattttaaaattttatccgattaa

SEQ ID NO: 3784 - DNA, 1683 bp, Bacillus licheniformis
atggcaagggcatggtggaaagaggcagtcgtttatcaagtgtatccgcgcagttttatggattcgaacggggatggcgtcggagatatcaacgggatcagagagaagcttccgtatatcagggagctcggggcagatgccatttggatttgtccggtctttgattctcccaatgcagataacggctacgacatcagggattatcaaagcatcatgccggaatttggcacgatggacgactttgacgaactattaactgaagcgcatcagctcggaatgaaactgatcatcgatcttgtcatcaatcatacgagcgatgaacatccttggtttatcgaatcaagagcagagcggaattccgggaaacgggactggtatatttggcatgacggaaaggacggaagcgaaccgaacaactgggaaagcatattcggcggctcagcctggacttatgacgaaaaaacagagcaatattatctgcacctttttcacgaaaagcagcctgatctgaattgggaaaacagtgatatgcgaagcgctctttatgacatgatcaactggtggcttcaaaaaggaatcgacggattcagggttgacgcgatttcgcacattaagaaaaaagaagggctgccggatctgccgaatccggaagggcgccctttcgtgccttcatttgcttatcatatgaatgtcgaagggattatggcgttattgcaggatgtaaaagagaatacgttcgccgggtatccacatatcatgacagtcggcgaagcaaacggtgtcagcgctgaagaagcggaggactgggttggagaaccaaacggtatattcagcatgatttttcaatttgaacacctcgggctttgggatattgaaggcggagaacccgatatccccgaactcaagcggattttgtcaaactggcaatctgctcttgaaggaaaaggctggaacgcgctttttatcgaaaatcatgatcagccccgggccgtttcagtttggggagatgacgggaaatacagaacagtcagcgcgaaggccttagctgcaatgtattttttgatgaaaggcaccccgtttatttatcaagggcaggaaatcggaatgacaaacgcgattttcttagatatagacgattatgatgacgtctcgattaaaaattattaccggattcaaaaagaaaagggccgctcacacgaagacatcatgaaggcggtatggaaaaagagcagggatcacgcgcgcacgcctatgcaatggactgatcggccaaatgccggctttaccaaaggggaaccgtggctgcgcatgaacgaaaattacaagctgatcaatgtcgttcatcagcagcatgacccccggtcggtctatcatttttataaacggttagtcgcaatcagaaaacggtatgacgtcttcatcgacggatcatataaactgcttctggctgaggatcggcagatttttgcatacttgcgaaagcttgaagaagaaaccgccatcgtgatcgtgaacctcagcgcacgccaggcgttttaccatcatcccgcatatccgttatgttcgaacggactgctgctgtcaaacttggatatcaacgcgcacaagcacctcacatctttcatgatgagaccctatgaggcgcgcgtttatttgatcagacaggaaatcggcgatttgtaa

SEQ ID NO: 3785 - DNA, 591 bp, Bacillus licheniformis
atgaaaaagaaaatgaacacccaagatgcgattgttgaagcagcatttactcttattgcccgacacggcctaaaaggcacgagcctttcaatgattgcatcggaagtcggcatttctaaaccggctatttactattatttcccttctaaagaagagcttatcgattatctatttcacatcgtatttgatgatcacaatttctctgaatatttttcaatcaatgagtacacgaaggagaactttaaaaaacgattaataacagacggcgtacgctattttgaagagtataaacataactctcctgctttaaaagtggtacacgagtttgttttaagtgcagcacaaaaaccaagatatgagaaaaagcttaaatctatcatggaacaattcttagaaggttttgaagcattgctttcctacggtgtcgaactcggtgtcatctcttctaaaaacaccaaagtgaatgcacactcccttgccctgatcattgataatttgggtaactttatgattttaggaattgagatggattataaaaaagtatgggaaacagcagtcagtaatgtaatgaaaggcagtgaaagattttga

SEQ ID NO: 3786 - DNA, 675 bp, Bacillus licheniformis
ttgaatcaggaaacgattattggattgtctaaaatagagaaaaccttatattggatcattccaccggttttaggagctgttcttggatggtttttgcctgttatagccgattgggtattgaccattccaatcgttccttttaaagggcctttggaatttatcacatcactaaacagtttctgggtttcaattatcgctgcatttatcggaatcgttgccggcctatttttttcacaatatattttcactgaaattcttcaagtgttcatttctgatcaaaacgtgaagctgttgtttaaagagaaagaagaagtgattgagaaaaaagacatttctgcaatttatcttgagaagaaggatcttgttgttcttggtcataagggcactgaattgtaccgtgaacaacttgaatcaaagagagcgctagcagaaagtgcttttaaacatcacggctataaatgggcagacgaagatccctttaagaatgagtatcaacgctgggttgcggatcaccccgattttccctcgcatatcaatacgctacttttagccagagaacgagctttactggataataaacatgaagaggcaaaaattctgcgcaaagacctggcaaagcttggagtggttattcaggatgaagataaacggcaatacgtaaggatggtatcgtaa

SEQ ID NO: 3787 - DNA, 786 bp, Bacillus licheniformis
gtgaaaaacaaccatttgctaaaatccattctgctatggggtgccgtatgcatcatagtgctggcagggccgctctcagcatttgccgcttcgtcatcaaacccgtcggataaattgtattttaaaaacaaaaaatactacatattcaacaatgtatggggagccgaccaggtcagcggctggtggcagaccatttatcataatagtgattcagatatgggctgggtgtggaattggccgagcaatacaagcacggtaaaagcttatccgtcgatcgtcagcggctggcattggactgaaggctatactgccggaagcggcttcccgacgcgattgtcagatcaaaaaaacatcaacacgaaagtcagctattcgatcagcgcaaacggcacatacaatgccgcatatgacatttggctccacaatacaaacaaggcgagctgggattcggctccaaccgatgagattatgatctggctcaataacacaaacgccggacctgccggttcctatgtcgaaactgtatcgattggcgggcacagttggaaagtatataaaggctatattgatgctggaggcggcaaagggtggaacgtgttttcatttatcagaacagcaaacacccaaagtgcgaacctgaatattcgggatttcacgaattatcttgccgactccaaacagtggctttccaaaacaaagtatgtcagcagtgtggaattcggtactgaagttttcggaggcacaggacaaattaatatttccaattgggacgtaacggtccgctga

SEQ ID NO: 3788 - DNA, 1290 bp, Bacillus licheniformis
ttgaatatcctgaatctcatactcgtcatacttttaattgcagctacggcttttttcgttgtcgccgaatttgcgatcgtcaaaatccgcggcacaaaaatcgatcagctcgttgaaagcggggataagcgggcgattgcggccaaaagagtggtgacaaatcttgatgaatatttgtctgcctgccagctcggcattaccatcaccgcattagggctcggctggctcggagaatcgacattcgaacagatcattcacccgctttttgagttatttggcctgcctgagtccgttttaagagtggcttcggttgttgccgcatttatcatcattacatttttgcacgttgtggtcggcgagcttgcgccaaaaacaattgcgattcaaaaagcggaagccgtcagcttatggacggcgaagccgctcattttgttttataaaatcatgtttccgtttatcaaactgttgaatggctcggcccggctgttaacgaagctgttcgggttccattctgttaaagagcatgaagtggcgatcagtgaggaagagctgcggcttatgctgtctgaaagctataaaaaaggggaaatcaatcagtctgagtataaatacgtcaacaaaatttttgaatttgacaacaggctggcccgggaaatcatggtgccgagaacggagatggcgacgcttttggccgatcaatccataaaagaagcgattgaaaccgtcattaatgaacgctacacgagatatccggttattaaggacgataaagaccatattatcggaattgtcaacagcaaggacttgtttaaatcgtattttctcgacgagacgattcctttaactgacttaatgaggcctgtcatcagggtgattgagaacataccgatccaggagctcttgattcgcatgcagaaggaacggatccatatggccattcttgttgatgagtacggcggaacggcagggctggttacggtagaagacatattagaggaaatcgtcggagaaatcagggatgagtttgatcaggacgaaatgccgcacattataaaaaaaggcgaacatcattatattatggacggaaaagctttaatcgacgaagtgaatgacctccttcatatcgcgatagaaaacgaagaagtcgatacgatcgccggctggcttttgacgcaaaagatggagctgaaaaacggggacatccttaaaactgaggggtgcgaatttaaaattcttgatgctgaagatcatcatatccgtttcatcgaagtgaaaaaaacggatttttaa

SEQ ID NO: 3789 - DNA, 681 bp, Bacillus licheniformis
atgagcatgattttttacttgttaacatttgctgcattaggtttatcgatttgggcacaatttaaagtaaagagcaactttgaaaaatattcaaaagtagaggcgtcaagcgggagaactggagccgaagtggccagacagattctcgaccgaaacggcctttacgatgtcccggttgaaccggtaagaggaaccttgacagaccattatgacccgacagcacgcgttgtgcgcctgtccgaacccgtatactacggccgttcaatcgcagcggtttccgttgcttcccatgaatgcggacatgccctgcagcaccaggagtcatacggcgcacttgttttgaggcataagatgtttccggtcgtgaacttttcttcgggagtggcgccgtttttgtttatcggcggaatgctgctcggaagcctgaatctgatcggactcggcatcatattgttttctgcggccgtattcttccagcttgtgacattgcctgttgaatttaacgcaagctcccgggcaaaaaggatcatcgtttcagaaggaatgatccgcaatacggaggaaagaggcgtcagcaaggtgctggatgccgcggctctgacatacgtcgcagcagcgcttgtttcgctgtttgagctgctgcgcttcgtcgcaattttcctgtccggtcgtaatgactaa

SEQ ID NO: 3790 - DNA, 225 bp, Bacillus licheniformis
atgtcctgtttaatgaggctctttttcatactgatcggagtccagttgatggcggcgtcgtccattcaattcatttttgatttaaacgccgtgtatcattcctctgatgaggtgttctggagggaatttttcaaggagctgttcactaggccgcctttatacttcatgatttcaggaatggtgctgatctttatcggggtttgtttgccgcgaagaaacaaatag

SEQ ID NO: 3791 - DNA, 324 bp, Bacillus licheniformis
ttgtcggttaacgaaggtttattattacctgaaaaatttttgcaaaagagggatatactgattaaaaaggcgaactcgggtggtgacacggtgaaagtaacggatcaggaaaaagaacagttaagcacggcgatcgataaaatgaatgaagggcttgatgcgttcattcttctctataacgaatcggaaaaggacgagcagctgatcgaatttgaagaagaaacggcagagatgatcagacaagcgattgaacagcacgggaaagttagcaccaatcaaaagttaaatgcgatcatcaaagaaattttatcattttccctgcgg

SEQ ID NO: 3792 - DNA, 984 bp, Bacillus licheniformis
atgaaatcaaaccgtgtattcatcgcatggctgaggtggcctatatatgtccgcatcgcaatcattatccttttattgatcctccttttcggtcagctgatcaccttcgtcgagccgcagcagttttcaaatgtttttgaaggcatatggtgggccctgatcaccgtgtcctcagtcggatacggcgattttgtccctaaaacagcgctcggcaaaatcgtcggcatgctcctgattttaataggggcagcgtttgtcacggcctattttgcaacgatggcgacggccgctttcagcaagcagcagcgctacgccgaaggcaaggtgaactacagaggcaaggggcatatgatcctgatcggctggaacgagaaatccaacaagctgatgaggacgctccaggccgccgattcaaacaaaacgatcgtcctcattgatgaaacgctaaaggaaggtcccctgatggaaaacattcatttcatcagaggacacgcagcggatgatgccacactgcaaaaagcgaatatcgaagaggctgaaatcgtctttataaccgccgatcagcataaaagcgaaatatctgcagacatgcagtcggtcttaacattgctggccgttaaaggcttgaacccgtcggtgtattgcgttgtagaaatcttgacggaaaagcagaaaaaaaatgccgagcgcgccggagccaaccaaatcatcagtacggcggaccttttaaaaacggcgatgctgcagcattttctcattaaagaccagcttcctgatccgctttttacggaagcggatattcatttcaaagtccatcgggttccgcttccgaagacgatggagggcgcgtcttttcaagaagtgatccgccattttatgaaggaagacattttcatcatcggtgtccaccaaaaagacgggcctgtgctgtctccttctttttcgtacaagctacagccgacggaccagctgctgtccctttaa

SEQ ID NO: 3793 - DNA, 405 bp, Bacillus licheniformis
atgataagcttaccttctgaactggaaaaccggtcgttttctctttatcacctcgaacagacgctgaagcctctcggctatgtgatcagcggcggctgggaatatgaccgcggcttttttgactataagattgatgatgaggacggatacctgtttttgcggattccgtttgaggcggaggacggacagcttgattcgcaaaatgcgacggtcaagctcggcacgccgtttttgcttcgccatgtctatcaggaagcgctggatgactacgtcgttcaggggaatttccgcgcatcttttgaccagtttgccgaaccgaaagaaaaagacgccgatattcccggcgtctatgaaaagcttggccaatcgtatgtaaaagaactcgaagaggcgcttctttcttaa

SEQ ID NO: 3794 - DNA, 567 bp, Bacillus licheniformis
atggcatttgtattggaaacattgtttctcatcttaacgggcattgttctgctgagaatttcgggaagaaaatcaatttcgcagatgacaattgccaccaccgtcgtcatgatatccatcggaacgatcatcgttcagccgattatagaagacagcatttttaaaacggtggcagctgcatcgatctttatcatcgtccttctgttgatcgagtacttgaaaatgaaatttgatttttttgaaagcctgattgcggggaaagccgttgtattgatcgaaaacggggagctccaggagcagaatttaaaaaagcaccgcctgaccgtcgaccagctggaaatgaggctccggacacaggggatttcaaagttagcggatgtgaaaaacgtaacgctcgaatcaaacggccagatcggctacgagttatcggatgatgccaagcctttcactatgggagagtataaaaaattcctgcgcatgcaaaacaacctgcagcagccggaggacaacctgtttaaagaaatcaccgaaggccatctgaacgaacctgataagcaattgcgctaa

SEQ ID NO: 3795 - DNA, 477 bp, Bacillus licheniformis
ttgaagaaaggaaaaatagtaacggctgtgatagtgtttctcgttatatatgcactgttttcactcgcaggaattttatttcccgtagaccgggaatggtatgagtcattaaacaagccggattggacgccgtcaggccgtttgatcggaaccgtctggagcgtgctgttcgccttcatttcattagcagcggcgctcgtgtatgctgcatatgacatgagaaaagcagctgcgccattttggatcatgctgatcatcaactatgtgtttaaccaggcattcagctattttcaatttacgcaaaaaaacttacttgctgccgcagtcgactcctttttcgtagccattaccgctctttcgctcacctttatcacacggcgaattcacaaaacggcggccattctctttatcccttatgtgctgtggagttttttcgcggcttatctcgcgtttacgatttacgggatgaatcattag

SEQ ID NO: 3796 - DNA, 525 bp, Bacillus licheniformis
atgaaccactttctgcaaactaaacgcatcggcttttctttatggaagaaagagaatttgaatttggcaaagacattgtggggaaatcgagatgtgaccaattatctaacagcagacggaatcatgaccgaaggcgaaataagaaaccgtttgctgctggaaatcgaacaatataaaacacacggggttcaatacttcccgatatttaaaacaagcaacaatgaattcgtcggatgctgcggccttcgcccctatgacccggaaaatgatgtgtacgagcttggttttcatctcgtccgttcagcttggggtaaaggttatgcatctgaagcggctgaagccatgattgagtacgcatttaacaaaatccgggcaaaaaagctgtttgcgggacatcatcctgaaaatacagcttcacgaaaacgattggagaaattaggattcgtctacatacatgacgaattttatccgtccaccggacttcagcatccgtcatacgaattaaaacagcctccgggacaataa

SEQ ID NO: 3797 - DNA, 1353 bp, Bacillus licheniformis
atgacgcatgtccgttttgactactcaagagcattgccattctttaaagaacaggagcttacatatctgcgtgacttcgttaaagtcgcccaccataccattcacgaaaaaacaggtgcgggcagcgactttttaggctgggtggatcttccgactgactatgataaagaagaattcgcccgcattaaaaaatgcgctgaaaaaattcaaaacgattccgatgttttgctggttgtcggaatcggcggttcatacctcggcgcaagagcagcgatcgaaatgctgaatcattcattttacaatgtgctgccgaaagaaaagcggaaaacgccgcaagtgattttcatcggcaacaacatcagctcttcttacatgagagacgtgatggatcttcttgaagacgctgatttttcaatcaacgtgatttctaaatcaggcacaacgacagaaccggcgattgctttccggatcttccgcaagcttcttgaagaaaagtatggaaaagaagaagcgaaacgccgcatttatgcaacgacagataaagagcggggcgcattaaaaacgcttgctaatgaggaaggttttgaatcattcatcattcctgacgatgtcgggggccgcttctctgtgctcacagcggtcggcttgcttccgatcgcagtcagcggagccgatatcgatgaaatgatgaagggcgcccgcgatgcgagcaaagacttctccacatcagagcttgaagacaatccggcttatcaatatgcggtcgtcagaaacgtcctttataacaaaggcaaaacaattgaaatgctgatcaactacgagccgggccttcagtacttcgcagaatggtggaagcagctctttggtgaaagtgaaggaaaagacgaaaaaggcatttacccttcttcagccaacttctcgactgatcttcactctcttggacaatacgtacaagaaggaagaagagatatgttcgaaacggtgctgaacgttgaaaagccaagacacgagctgacaatcgaagaagcggacaatgatcttgacggcttgaactaccttgccggcaaaacagtcgacttcgttaataaaaaagcgttccaaggcacaatgctcgcgcacacggacggtaacgtgccgaacctgatcgtgaacgtacctgaaatgaacgcttacacgttcggctatctcgtgtacttctttgaaaaagcctgcgcaatgagcggatacttgctcggcgtcaacccgtttgaccagcctggagtggaagcatacaaagtcaatatgttcgctctcctcggcaagcctggcttcgaagagaaaaaagcagagcttgagaagcgtttgaatcaataa

SEQ ID NO: 3798 - DNA, 105 bp, Bacillus licheniformis
gtgaaaagggaagaggctgtcgccgaaaatcgacatgttttaaaaccctttggcccgcactctcatgcaaatgaaagcgctggcgggtatttgaaagaaaacagc

SEQ ID NO: 3799 - DNA, 156 bp, Bacillus licheniformis
ttgacggctcaaggagaaccgccattccttgagccgttgtttattgttatgtttttgacaaaaatgcaagtggaggctgaaaaaacatgcatttttggcgggcatcctccatcctcctttttttcgtcacttgatttaacgaaggagttcatataa

SEQ ID NO: 3800 - DNA, 1164 bp, Bacillus licheniformis
atggataactttatatattggaatcccacaaagctgatattcggccggggagaagttgaaaagctggcagaagaggtgaaacaatacggccgcaatgtcctgctcgtatacggcggaggcagcattaagcgaaacggtttatacgatcaagtcatttcaatccttgaaaaggcgggcgcgaccgtccatgaactgcccggcgtcgaaccgaatccgcgtgttgccactgtgaataaaggagttgcgatctgcaaagagaacgatattgactttcttttggcagtcggcggcggaagcgtcattgattgtacgaaagcaattgctgccggagcgaaatacgacggcgatgcgtgggatattgtgacgaaaaaacatattccggctgatgcgctgccgtttggaacagttttaacgttagcagcaacaggctctgaaatgaactcgggatctgtgatcacaaattgggaaaccaatgaaaaatacggctggggaagcccgctcgtattccctaaattttcaattcttgatccggtcaacacgtttaccgtcccgaaagaccacacgatttacggcattgtcgacatgatgtcccacgtgtttgagcaatattttcaccataccgaaaataccccttatcaggaccggatgtgcgaatccctgcttaaaacggtaattgaaacagctcctaagctcattgaagacctagaaaactatgagctgcgtgaaacgattctgtatacaggcaccattgcgctgaacggcatgctatcaatgggcgcacgcggagactgggcaacgcacaatatcgagcacgctgtttcagccgtatacgatattccgcatgcgggagggcttgcgattctgttcccgaattggatgaagcacacgctttccgagaacgtcggccgctttaaacagcttgccgtccgtgtttttgacgtagatgaaacaggaaaaaccgatcgcgaagtggcgcttgttggaatcgagaaactgtctgaattctggaccagccttggcgcgccaaatcgtcttgccgattatgacattacagatgagaagcttgatctcattgccgacaaagcgatggcaaacggcgaattcggccgctttaaaacgctgaataaagacgatgttctgtctattttgaaggcttctttataa

SEQ ID NO: 3801 - DNA, 237 bp, Bacillus licheniformis
atgaatgcacttcaacgtattgcattggttttaacgatcatcggagcaatcaattggggactgataggattttttcaatttgacttggttgcagccatttttggcggccaagggtctgctttagcacggaccgtttacgcgcttgtcggaatcgcaggtctgatcaacctcggacttttatttaaacctgctgaagagaccgccggcgaagacgccaaacagccggaaatgcgttaa

SEQ ID NO: 3802 - DNA, 390 bp, Bacillus licheniformis
atgacagcaaagtttgaagtaggcagtgtttacactggtaaagtgactggattacaggcgtacggagcgtttgttgcattagatgaagaaacacagggactcgtgcatatttctgaagtaacacacggtttcgttaaagatattaatgaacatttggcggtcggtgatgaggtgcaagtgaaggttctttccgtagatgaggaaaaaggcaaaatcagcctttctatccgcgctacacaggcagctcctgaacgaaaagaaagcaagcctagaagacaaaaggctgttcaagccgaagatacagctgctccacaaggattcaacactttgaaagacaaacttgaagagtggatcgagcagtccaacagaaaagatcttattaagaagtaa

SEQ ID NO: 3803 - DNA, 1173 bp, Bacillus licheniformis
atgaggacaacttatatttcaaaagcagcccagcagatcaaaccgtcaggcatccgcaaattttttgatcttgcgtccacaatggagggcgtgatttcattgggagtcggagagccagattttgtgacggcgtggaatgtaagggaagcgagcatcctttcccttgagcagggctacacgtcttatacggcaaacgcgggtcttctttctctgcggaaagagatcagcgcttatctgaataaacgttttcatctggattatgctcctgatgacgagctgattgttacagtcggagcaagccaggcgcttgatattgcggtcagggcgatccttgatcccggagaagaagtgctgattcctgagccttgttttgtcgcttatgaagcgcttgtctctttggcggggggaaaagcggtccacattcatacgaacgcagagcgcggatttaaagcgagcgctgcagattttgaagccgttctgactgagcgtacgaaggccatcattctttgcaccccgtctaatccgacaggctctgtttattcaaaaaaagaactggaagagatcgcggcttttgccgaaaaacacgacctgattgtaatagcggatgaaatttacgccgagctgacatacgatgaagcgtatacaagctttgcggaaatcgccggaatgaaaaagcggacgatattgatatcgggtttttctaaagggtttgccatgacaggctggcgcctcggatatgtcgcagctcctgcatatttaagggaccctatgctgaaaattcaccagtactcgatgatgtgcgcgccaagcatggctcaatttgcggcggaggaagcccttaaaaacggcctcgaagacgttgaaaagatgaaaaaaagctaccgccgccgaagaaacgtgtttgtggattcactgaacgaaatcgggcttgactgccatcagccggggggcgctttttacgcgtttccatccgttaaaaaaacgggcatgagctcagagcagtttgcagaggagctgctcatcagcgaaaaagtcgccgtcgtcccgggcaatgttttcggtccgagcggcgagggctatattagatgttcctatgcttcctcgcttgaacagcttcaggaagcactcgtcagaatgaagcgctttgtggagaaggtcggtgcagtaaaataa

SEQ ID NO: 3804 - DNA, 501 bp, Bacillus licheniformis
atgaagctaacagaaaaagaaacagaaatattggaaatattagaggaaaacagccgcctcgaacctgaaacgattgctaaaatggcgaacatttcacaggaagaaacaaaagcgattattgaaaagcttgaaaaagaaaaggtcatcatcgattattctgcaatgatcgactggcgaaaagtcgacggccatgaaggcgtgacagcgatgatcgatgtgaaagtaacgccgaagcgcggcgtcggatttgacgaagtggccgagcggatttatcgttttcaggaagttgaatccgtttacttgatgtcaggcgtatatgacctgtctgttgtcatccgcggcagaacgatgtcggatatttcgcatttcgtgtccgaaaaattatcgacgcttgaatcggtcgtgtcgacaaccacccactttattttaaagaaatacaagcatgacggtaaagtttttgactccggtgatgatgacaaaagaatcgtggtgtctccttaa

SEQ ID NO: 3805 - DNA, 822 bp, Bacillus licheniformis
atgctgttaacaaaaccttctatcgagaccattcaaggggtcaatatatattatgaacattacgagaatccaggcaagacatcgctcgttttaatacacggttttctttcttcctcgttttgctacagaaaaatcattcctcttctgaaggatgagtttaatttagtcgccgttgacctgcctcccttcggccaatcagaaaaatccagcacctttgtgtatacctatcaaaacatggccagggtggtcatcgaactgatcgaaaggctgaagattaaagacgccgtgcttgtcggtcattcgatgggcggccagatttcactttatgcgataaaggaaaggcctgaactgttcaaaaaagtcgtcctgctgtgcagctcaggctatttaaagcgttcgccccgctcgcttattttcgggagccatattccttatttttatttgtacatcaagcgctggctgtcaaaacagggcgtcctgaaaaacctcatgaatgttgtctacgacagctccctgatcgatcaggaaatgatcaacggctacctgaaaccgtttctcgatgatcaaattttcagggcgctcgcacgtcttatcagacaccgggaaggcgatttatcaccggatgatttgaagaaaatcgagacgccttccctcttgatctggggcgaagaggaccgcgtcgtcccggtacagatcggaaaaaggcttcatcaggatctgcccaattccattttctactccctgcaagaaaccggacacctcgtccctgaagaaaatccggattatgtatcagacaagattgccaatttcattttgacatga

SEQ ID NO: 3806 - DNA, 255 bp, Bacillus licheniformis
atgaaagaaagtcaggcagcagcacaaatcatacacatcataaaggaatgggatccgtttcaagccggacccgatttttatgaaacggaagcggccgaaatcgttcaggccgtctatacggaagacgatgcagagcggctgggcgaagcgatccagaccgtttttgaagtatcgtttgatcagacgctgcctctgtcggaatgcaaacggctggctgaacggctccttgtgatcaaagacagcagttcgtgctga

SEQ ID NO: 3807 - DNA, 498 bp, Bacillus licheniformis
gtggaatggagcagcatccttgagtgggcttttcagcgtcatctcaacccaatgagctggtatatacgcccgctctttctggtggcgctcgcgtacttttgttataggcggtcttggaaaggtgtcatcattacttttttgctgatgacgagcagcatggtttggtttcccgtccccgagcggatcaatccggagatgcaggccgttttggattacgagctaatgcttttgtccaacccgctttcagccgtggtcacgctcgctttcatgatgggttttctcgtgttgattggcacggcattttggaagcgctccttagggtgggggcttgcggtattgaatgtgacgctgatcggaaaggtcgtgctgtcagtgatgctgacgggggaaaacggctgggcgcccctcggaaataccgtctttggattgattctcgtcaacggcatcgggctgctgctgatcgcctggagggagaagcggggaaaagccggccgttag

SEQ ID NO: 3808 - DNA, 1164 bp, Bacillus licheniformis
atggattttaatacagagcataacagacgcgggacccagtctgtaaagtgggacttaacacaggaattattcggcgtaaatgacgcgcttccaatgtgggtggctgatatggattttcgtgcccctcagcctgttattgacgcccttcagcagcgcctggagcacggggttttcggctatacatctgcaaacgcgggcacggaggaagctgtcaccgattggctcagccgccggcacggatggaatactgaaccggcgtttatcaccttcagcccgggcattgtaacagcgctcgcccaagcggttcaggcgtacacagagcctggcgagcgggtggtcgtacagccgcctgtatatacgccgttctttgatatagttgaaaaaaacgggcgggttgttttacataatccattaatcgaaaaagacggccgctatgaaatggatttttccgaccttgaaaaaaagcttgtggaaccggatgtcaagctgttcattctttgcaatccgcataacccttccggccgttcatggtcgaaagaggaactgacaacgcttggcgaactctgccttaaacacggtgtcacagttgtttccgacgaaatccactcggacctgatgctgaacggactgaaccatacgccgttcgcctctttatctccggaattcgcggatatatccatcacatgcattgcaccgagcaaaacgtttaacttggccgggttgcaggcctcagccatcatcatacccgacaaagcgaagagaaccgcctttgcaaaggtcatgcagcgtcagggactgcattctttaaatacatttgcgattgcagccatcgaggcggcctattcaaaaggcgaaccatggctcgatcagcttatcccatacattgaacgaaatatggaagaagtccgccgctttttggcagaggagctgcccgaggtccgcatgatggagcctgacgcctcttacttggcatggcttgactgccgaaagctcggattgtcggatcaggacatcaaacggcttctccttcataaaggaaagctgattcttgagccgggaccgaagtacggaccgggcggagaaggattcgtcagaatgaatgtcggatgttcgctctctgttgtaaaagacggactccgacgtctgaagaccgctttttcgtaa

SEQ ID NO: 3809 - DNA, 201 bp, Bacillus licheniformis
atggcgccgtttctgattcagtttatgctctattttcctgaagacaaaagagaatatatcccttcttttattacgctggccgttttctttatcatcgcgatcgctgtattccggctgattatcaagcattccaaaaaagaagctgaaaaagcggaaaagctggaaagagaattgaatgaaaccatccataaacgctcttag

SEQ ID NO: 3810 - DNA, 390 bp, Bacillus licheniformis
gtgaacaaccaatttcaagtcggagatcgcgtaaagggcttttataaaacaggcgtctacatcggcgaaattacggatgttaaaccgatgcactacctggtcaaaatcctcgccgtgctgacccatccgaagcagggcgaccttcatcatcccaatcgggcagacgtccctttttttcatgaacgaaaagcgctcgcttacggtgaacagacgaatatcccgcaccgcatggtgaagccgttcgatgaagctgtaccggattatgcggattcgctccgctcagctttgagccgcttaaaaacggatctgcaaaacgattcgtccgaatacgcggcaaaatcgcttgagcttattcatgggcttgaaaaagaatatttcctgcacaaataa

SEQ ID NO: 3811 - DNA, 618 bp, Bacillus licheniformis
ttggaagcgagcaccttactgattattgattttgaatttacaatgcctgagggaaagtatcacccgcaaaattttttcccggaaatcatagaagcagggattgtaaaggcggttcatgatgaggtggttgagacgttttcaagctatattaagccgaagaagttccctaaattaacgaggcgctgcaaaaattttctcagcatcacgcaggaacaggttgaccaaggcatcacgtttaacgcgctgattgaaaagctgcgggagcttgatcctgaccgaaacagcgtcatcattacatggggaaacatggatatgaaagtgctgaagcaaaattgcatgttcaaccatgttccgtttccgtttaaaggagagatgagggacctttccatggagtacaaggaatttttcggcgacaaaacattgacgaatttgtggaaggcagcggaagagtacggcgattcaggaacgggaaaacagcataaagcgcttgacgacgcgatgacaacgtataagttgtttcggctcgtagaacgggataagaagtatttggaaaatccgaagccgacgacgatcggcgaacgggttgacctctcaaaagtctttccgcacgccacataa

SEQ ID NO: 3812 - DNA, 1272 bp, Bacillus licheniformis
atgcagctttcgcatttcatttataatgaaagggaattcaaattttttaagaaggtgattcgcatctctgtttataagaaaaaccttgtgatcatgtggtttgcgaattttttcgtggccgcaagctccacaatggttctgccgtttctttccctctatattgagacgcttggcagctattcggacggatttacggcaaaatggagcggatacgttttcggcgtcacatttttgatggcctttttagtttctcctttttggggaaggttcggcgataaacacggctataaaaaaatcctcttgatcacgggtaccggaatcggcacttccattcttctcatgtcccttgtctcgtccgtatacgagctgttttttttgagaatggcgatggggctcgtaaccgggttcattcccacttcccttgccatgatttcggctcagacgccgaaaaaaacggctggcaaagtgctcggcacgctgcagatgggcacggtctcgggaggattattcggccccttgctcggcggtctgctcgccgatcgcgtcggttttacatatacgtttttcattacgtcatttgcgatttacagcgcggttttcctcgtgtttgccggagtgcgcgaacggcccctgaagcagaagcgcgatgcttccgccgggtacacgagaaagcaggttctgcagacgattctgcatcagcgtccgctgatcacggcgatgatcctcaccgctgtgattcaagtgggaaacttcagtgttcagccgctgctcgctttatacgtcagcgaactgcacggaactcagaatctcgcatttttttcagggctggctttttctgcaaccggccttggaagcctgctcgctgcgagaaaatggggcgctttgggcgaccggttcggccacggaaaaatattgatgattctcgcgctggctgccgcggtttgcgttatcccgcaaggacttacatctcagtatgaaacgcttgtgttcttccgctttctgttcggaatcgcacttggcgggatgattccctgcatcaccgctttaatccgggttgaatcaccggggcctatacaaggagaagtgcttggctataatgtaagtttcagatttttaggcaatgtcatcggcccggtgctcggcggcattctttccagctttttcggtatttcttccgccttttacgcaactgccgtcctctttttcggcggagcatgccttctgatgttccaaaggtcccagcaaaaaaaatcagaggcgaaagcaagctga

SEQ ID NO: 3813 - DNA, 1869 bp, Bacillus licheniformis
ttgcgttcattttttggatggatttttctgttgatgttaatacctatatttgtctttaccttaatggcctccggccgggaagctcagaatatgaagcctctcgatcaggtgctcgatgagaagatcaatataaaggatatcggccttgtacaaaacagctacatgtatgacagggacggcgctctgatttccgaaatcgtttcagatcaccaaaaccgggtattcgtcccctataaagatatccctgaacatgtgaagcagctgtttctgacttcggaggaccgtcatttctttcagcataaaggctttgattttatcgggatggcccgggccgccgcagccaatgtcaaaaaaggcggcattgatcagggggccagcacgattacacagcagctttcgagaaacttgtatttgaaccatgaacgaaccttcgaccgcaagttcactgagctcctgtattcctaccagctggaaaaaaagctttcaaaagaagaaatttttgagaaatacttaaacaccatctattttaatcacggggtctacggaattggatccgcgtcttctttctatttcagcaagcctttgaaatctctcagccttgccgaaacggcgtttatttgcgcgatccctaataaccctacattatatgatcctttgaaacattttgactacacaaaaacccgccaaaagcggctgcttgaagggctgaaaaaagcgggcgtgatcaccgaaaaagaatacagcaaagccgttaagcaaaaaattacgcttaacgtgaaagaaaagaaagacgactatcccgactatacgacctatgtcaacgaggaattcaccaaattggtgtccgctacggaagggtttgacgaacggctgaaaaaggcaaaaacaaaagaagaaaagaaaaaaatcgaaaaagagctgtcaaaccgaatcagctccctcacgacaagcggaatcaaaatttatacggcgctcgataccagcatgcaaaaccgtgtcgtccagcaagtgaagaaccgcctcccttatgaaggcgtacaaggcggagcagtggtgatcaaccaccaaacccatcaaatcgtcgccatgtccggcgggaaaaactataaaaagtacgattataacctggcattccaagcatacaggcagccggggtcatcaattaagccgctccttgactacgggccgtacattgaagaaacgggtgcgacggcaggcagcatgattgacgcaagcaaattttgcagcaaggaatactgtccgaacaacttcaacgaaagaacatacggaaccgtgtcgatcaagacagcctttaaatattcgtataatacaccagccgtacgtatgctgaaccgggtcggcgtgcaaaaaggattcagctatttaaaaccgttcggattcgataaaatcgttcaaaacgactaccgtcttcctgctgcgctgggcggatttacatggggcttctcaccgctggagatggctgatgcctatacgaccttcggcaataacggaagctacacatccagccatgcaatcacaaaggtgacggatttaaaaggaaaaacgctatacaaatggaaagacaagccgcagcaagtattcagcatgcggacaaacagccaaatgcgcgaactcttagcagcggttgtcaaagaaggaaccggaaaaaaagcgaatttcagcggcggatatgtaggaggaaaaaccggaacatccaacgggtacagagacctttggtttgtcggattgacggatacatacacaatgagtgtatgggtcggaaaagaggcaaaaggcactgtcgagtacctgcatcacgcgggacctcaacttttaatctggagaggaacgctgcaatacgcatcttaa

SEQ ID NO: 3814 - DNA, 408 bp, Bacillus licheniformis
gtggcggatatgcccgatcgaatcgttctgtttgacggcgtgtgcaacttttgcgacggagccgtgcaattcattatcaaacatgatcctgaaggcttattttcattcgcttccctgcaatctgacgccggagggaatctgctcaagcaatatcacctcccttccgatcattttgacagctttattttgatcgaaaacggccgggtatatcaaaagtcaacggccgccttgcacgtggtgaaaagcctcccgggcctttggcgggccgcttccgccctcttgatcattccccggccgcttcgggacgccgtctacagtgtcattgcgaaaaaccgctacaaatggttcgggcaaaaaagcgagtgcaccgttcccggtcctgagatcagaaaacgatttttatcataa

SEQ ID NO: 3815 - DNA, 558 bp, Bacillus licheniformis
atgaaaaatacgtatgtaacaggcttttttccttttatcgcaattcttcttttcagttcatctcttgcgatttcttccgttatctatgccatgcagatgctgtcttctctcggcatctacaaagggatgctcgaatttttctctgagagcggcatccggatggctttgtttgctgtgtttacgctgatttttttcatggtattttccgctttgaagctgattgccaatacagtgacagagcttgcccttttatttttcgccaaagatcctgaaggagcgaatctgagaaaaatcaggatcggttctgccgtgtatctaggagcaagccttttatcttttatttttgtccaatatgccgcgggaattgcagcgctttttttactcgcaactctcgtatattttatttttatcgtttatacgatccacagcacgctttcattcatgtcattaatcggttttattatgtttgagctgctgttttggtttacgtttatgatcgggacggtgtatattatcatcaagctttataacagcgtcatggcgagcctgcccgtttga

SEQ ID NO: 3816 - DNA, 1602 bp, Bacillus licheniformis
ttgaaaaaaacattaaaactgcagacacggttaacgatatttgtctgcgtcgtcgttttaatttctttattgatcgcgttttttatggtcggctctgagaccgcaaggaacattcgggagcaggagcagcagattgccctgcagacggcggagatggtcgccgaggctccgattacggcacaatcgctggaaagcggcgaatacgaagagctccggaaatacaccgcccgcgttcaaaaaatcacccagactgaattcgtcgttgtcatggatatgaacagcatccgcaaaacccaccccgatccgaataaaatcggaaagaaatttgccggcggggacgaaaaagaagtgctgaagggccgacgccacattagtacggcaaaaggcacgctcggtgaatcactgagggctttcgttcccatctataataaaacgggcacccaggtcggagcggtagcggtcgggatcacccttaacgagattgagcagatcacccagcaaaatctccgccctctatatacggtcatcgtcctcagcatcgtcgccggaatcatcggagctgtcatcgtggcgaggaaagtgaaaacgattatgttcggcatggaaccatatgaaattgcaacgcttttgaacgaacgaagcgcaatgcttgagtcgacaaaagaagggattctcgccgttgatcgaacaggaaaaatcaagctcgccaatgcggaagcgaagcgcctgtttcaaaaaatggggatcgaagagaatccgatcgaccgggatgtactcgacatcttgccaaacagccgactgaaacaagtgatcgaaacacagaagcccgttcaggaccgcgatgtcagaatcaatggccttgaacttgtctttaatgaagttccgattcacttaaaaaagggaaacatcgtcggagcgattgcgacattccgcgacaaaaccgaagtgaagcacttagctgagcagctgtccggtgttaaaatgtacgcaaacgcgctcagggcgcagtcgcacgagtttatgaacaagctccacgtcattctcggtcttgttcaattaaagaactacgacgagcttggaaactatataaaagacattgcgatctatcagcagtctgaagcgagcggaattatcaaccatatcaaaaactcggtactcgccggctttttgctcggcaaacagagctatattcgggaacagggggcctcgttggaggttcattgcagcacgaggattccggatacagccaacacagcggtgattcacgatttgatcaccgttatcgggaaccttctcaacaatgcccttgatgccgtttccgccactgagaagaaaaatatttcgatttcattccgccatcatgacggacagcttgatattgaagtcacggatacgggagtcggcatatccaaggaggaacagcagaaaatgtttgaccaaggcttttcaacaaagggccccaatcgggggttcggtctttatttcgtcgaacaaagccttgaaaatttaaatggacatatcgtcgtgacgagcgaaaagaatgaaggaacgacattcagtctccgcattccgtatgaaccaaaggaggatgaccatgattga

SEQ ID NO: 3817 - DNA, 708 bp, Bacillus licheniformis
atgattgatgtattaattgttgaagacgacccgatggtaagagagctgaataaacgttacctcagccaagtagagggatttcagctgaagggcattgccgcttcttttcaagaggctctcaccttcctccgggaagagcatatcgatctgatcctgctcgacatttatatgcctggcaggaacggcgtcgaactgctcactgagatcagacgccaaaatcaagctgtcgacgtgatcgtcatctcagcggccagtgaaatggatgttgttcaaaaaacgctgcggttcggggccgtcgattacttaatcaagccgttcgaatttgagcggtttcaaagcgcgctcactgattacaaacggaagcagcagctctatgctagcaaccggaatatcagccaaaaagagctggattttgaactttttcaaaaaaaacgcgcgcccgaaaaggtacatttgccaaaagggctgaccaaaagcacgctgaagctcatttggtcaagcatcagatcgtttgacagcttgacgttcacaacggaagatttggccaatcacacggaaatctctcaagtttcaatccgcaaatacttaaagtttctggaggaaatcgaagttctcaacgtagaaatggcctacgggacgatcggcaggccggttttccaatataaattaaatacaaatgacttgaatgtgattaaccaatatctataa

SEQ ID NO: 3818 - DNA, 174 bp, Bacillus licheniformis
ttgagcgaagctgaagaacagggctccgatcggctgccatttaccgaacacaagcgcggcgagcgcgataaatccttgtccggcaatgatggcgagtcaaatgtggccgttacaaaaaaacgcccgctgtctttagagagcagcgggcggggacatgttatagatattggttaa

SEQ ID NO: 3819 - DNA, 259 bp, Bacillus licheniformis
gccatcattgccggacaaggatttatcgcgctcgccgcgcttgtgttcggtaaatggcagccgatcggagccctgttcttcagcttcgctcaaagcttaagcatcatcgggttcacgcttcccttcttcaaaagaaataccaaacgtctatatgctgattgcgccttacgtattgacgattctagcgctggccggatttagcggcagagccgaagcgccaaaggctaacggtatcccttatattaaaggaaaacgataa

SEQ ID NO: 3820 - DNA, 537 bp, Bacillus licheniformis
ttgaataaatcagtcataccttctttaattacggttggaaactttgtttcgggcatctcttcaatactgcttgcattcagagggtatttattcttagccattatatttgttctgatcggcgctatcttggacagccttgacggcatggccgcgcgcagattaaatgccgtcagcccgtttggaaaagaattagattctttgtctgatattatcactttcggagtcgccccggccatcatcacctattcaatcgttttttatgatgctccgatcttaggccttccttcgacattgttattccctgtttgcggagcgcttcggctggcgcgatttaatattcaatcagagaaccaggattattttacaggccttccgatcaccgcagccggaacgattctggtatgcttaaaccttttctcagaaatcctgggcaaaaagccgttcattttgatcatgctgttcctgtcctttctcatggtcagcaaaatcaaagtcatcagcctgaaggggaaaaaactattgaagaaagtgagctag

SEQ ID NO: 3821 - DNA, 483 bp, Bacillus licheniformis
atggagttggcaaaagaattgatttcccaatacgggtatttcgcgatattcgggatgcttgtcctcggaattgtaggcctgccgatacccgatgaagtcatgatgacatttgtcgggtatctgtcttctattcatatattaaactatgagatgtgccttttgatcagtttttcaggtgcgatatcagggatgctcatcagttattttctagggaagaaaatcggtaaaccgctgctcgataagttcgggaaatggatcggtctgacgccgaaaagactggacaccgtgcaccgctggtttgaaaaatacggcccgtggacgattcttttcggctattttgtccccggaatccgccatgtgacatgctatctgtccggcatgaacgagatggacatgaaaaggttcctgatttatgccggatcaggagcttttatttggtgtcttgtttttattacgatcggatacacaatcggcgtgatttaa

SEQ ID NO: 3822 - DNA, 792 bp, Bacillus licheniformis
ttgaaaaagcggctttaccggtttttgattgagttgacgaataaaaagggcgtgtcccggatgctgaaaaagtttgctcagtcaaagctaagcaaacctctcatcccctcctatatcaaaacctttcatattaatacagaagagatgctggaagatgtccgctcttttaacagcctgcacgagctgttcatcagaaaattaaagagcggtgcacgcccccttcccgctgatccaaacagcctggtcagccctgtggacggcgtcatcgaagaaatgggcaccatcacgcgcgacaagcaatttaccgtcaaacaaaaactctattctgtagaagaaatgatcggacgatccgagatcgtgaaccgctatgtcggcggaacctatatcattatctatttaagtccgagagactaccacagaattcacagcccggcttacggcacacttgaaacgcagtattcgctgggaagcacgtcttaccctgtgaataaaatcggtttgacatacgggaaatcgccgctgacaaaaaactaccggatgatttccgaatttaagcaccaatatgggtccgcactgcttgtgaaggtgggggcgatgtatattaactcgatcgtgatgctccaggagtcaaaagaatggcgccaaggcgacgaaatcgcatatttctctttcggctcaaccgttattctgctgtttgaaaaggatacctttattcctgatgaacgccttcacccctctcttcaagtcaaaatgggagaggtgttaggatctcttgccaaaagaacatcataa

SEQ ID NO: 3823 - DNA, 1344 bp, Bacillus licheniformis
atggaagcagcaaaagatttgaaaccgattacaaatcacggtcataaagaaaataaaaatattttccataagctgatcaactggaaaatcggcgtgattccgtttccgctatatattgcgcttgcgctgattgtttttctggcagcttattttaacgaattgccgaatgacatgcttggcggtttcgcggtcattatgattctcggcatttttctcggggatgtcggacagcgcattccgattttaaaagatatcggcggacctgccattctctcgctgtttgttccgtcgtttttagtctttttcaaagtgcttaaccccgcatctatggaagcggttacgactttgatgaaaacgtcgaattttctgtatttctacatcgcatgtttagtcgcgggaagtattttagggatgcatcgcacggttctgattcaaggttttatgagaatattcgttccgttgttggccgggacggtcgcagcggttgccgccggtattctcgtcggtctgttatttggctacagcccttatgaagctttcttctttattattgtaccgattattgccggaggcatcggcgaaggcatcctgccgctgtcactcgcctactcgcaaattttgggacagtccaccgatgtatttgtttcacagctcattccggccgctattatcggaaacgtcgttgccatcatctcagccggactgatgaaaaagcttggggaaaagcgtcctgaactgaacggtaacggcagactcgttaaatcgaaaaaagacgatgaaattttcaaccaaaaagaagaggagccgaaaatcgacttgaaattaatgggtgccggcgttttaatcgcatgttccttcttcattttcggcggtttggtctccaagttcatcgcgattccgggagcgatcctgatgatcatcgcagcggctgccgtaaaatatgcaaagcttctgcctgcaagcatggaaaaaggcgctcaccagctttacaagttcatgtcatcaagcttcacttggccgctgatggtcgggctcggcattctttatatccctcttgatgatgtggcgtctgttatttccctgcgcttcatcgccgtctgcgcttcagtcgtcattgccatggtgacatcaggctactttgtcggaaaattaatgaacatgtaccctgttgaatcagcgatcgtcacaggctgtcacagcggtctcggcggcacgggggacgtggccattctttcggcttcaggccggatgggtctgatgccgtttgcgcaaatctcaacgcgtctcggcggggcatccaccgtcattatggcgaccgttttactgaggttcttcacctcgtaa

SEQ ID NO: 3824 - DNA, 234 bp, Bacillus licheniformis
atgaaaaggaaagcttttgtcagcctaagtttattttgttcgctttttgcgggagcgtttatgatcaacagggaaatgacgcgtgaacagactccggggatcggaacacccgaaggccctcaataccgcggtgattacacgccgctacagacgggagcggaagatcagtccttaacgggaacagaaagagctccctttaaaccgagagaatatatcagagttgagaaacgctga

SEQ ID NO: 3825 - DNA, 129 bp, Bacillus licheniformis
atggaaagtttttttgaacaagatgaatttgaggtgatgaaagatgaaaaggaaagcttttgtcagcctaagtttattttgttcgctttttgcgggagcgtttatgatcaacagggaaatgacgcgtga

SEQ ID NO: 3826 - DNA, 2403 bp, Bacillus licheniformis
atgacgtctttacatattgctattttatcgccttttgcactcgccttcttgattccgctattggcgaaaaacgtcagaaagattcatacaggctggtttgtcctgtttcttcctgttctattatttatttattttttccgcatgatcaaaatgacggcggatggcggaacattaaaggctgtactggaatggattccgtcctttgggattaactttaccgcgtacgttgacggactcggattgctattcgcccttctgattacagggatcgggtctttggttgtcctttacagcatctattatctgtctaaagaaagagagcagctcggaccattttacgtttatctgctcatgttcatgggggcaatgctcggcgttgttctcgttgataacgtcattgtactttatttgttttgggaattgaccagcatatcgtcttttctgctcatcggctattggtacaagcgggaaaaatcaagatacggcgcgacaaaatcgatgcttatcaccatattcggcggtctttccatgcttggaggcttcattcttctttacacgatcacaggttcattctcgattagagaaatgatcaaccaggttgatttaatttcggggcacggctttttcatcccggctctcgtgctggtgttaatcggagccttcactaaatctgcgcagttccctttttacatctggcttccggacgcaatggaagcaccaacgcctgtaagtgcttacctgcactccgccacgatggtaaaagcgggaatttatatcgttgcaagattcacccctgtgttcgctttttcaggggaatggttttggatcgtgtctctcacggggattgtcacgcttttctggggttcgttcaacgccgtcaagcagactgatctgaaatcgatacttgcattttctacggtcagccagctcggaatgatcatgtcgatgcttggcgtcggagcggccgcactgcattttcagcattttgaatactacatggttgcagtaatcgccgctatctttcacttgattaaccatgcgactttcaaaggcagcttattcatggcagtcggaatcatcgaccatgaaacgggtacgagagatatccgcaagctcggcggccttatgacgatcatgccgattacgtttacgattacgctcatcggcgcgttttcaatggccggactgcctccgttcaacggctttttgagcaaggaaatgttcttcaccagcatgctcaggattacgaactttaacttgtataacgctgacacatggggttttctctttcctgtgctggcttggatcggaagcgtgtttacattcatttactgcatggttctcttatttaaaaccttcgggggaaaatatcagcctgaaaagcttgaaaaacaagcgcatgaggctccaatcggcatgctgatttcgccgattgtcctcgtatctctcgtggtgatttttttctttttcccgaacattctgtcatacagcatcattgaacctgctgcagcgtcgattatgccgacccttttggacggagacgaaaaattcaaggttcatatttacatgtggcacggcttttcgactgagctctatatgacgatcggcgtcgttgctctcggagttctcgcctatttgaccttgtcaaaatggcggaaggtctacggcctcttcccggaaacactgacgctgaacaagttgtacgacagctcgctgtcagggcttgaaaaaggctccaacaagattacaagaacgtatatgacagggtttctccgtgactatcttgtttatgtttttgtcttctttatcgtgatcatcggcggatcgctcgctgttaccgggggcttttcatacgatgtgaaaggcaatgcttcaatcggcgtctatgagctcgttctgtcagccgtaatgattgccgcaacctttaccaccgtttttgcaaggtcaagactgacggcgattatcggactcggcgtcatcggctacacgctcgcgctgttctttgtcattttcagggcgccggatctcgcgctgacgcagctgatcatcgaaaccatttcagtcgcattgttcctgctgtgcttctatcatttgccgaagctcagatttaagccgaaatcggctaggttcagggtcacaaatgcgcttgtatcggtcggcgtcggaactgttgtgacgctgctcgcactttcagcaaacagccagcgctcgcttgaaagcattgcatcgtattttattgaaaacagctataaactcgcaggcggccacaatatcgtcaacgtaatattggtcgacttcaggggatttgatacattgtttgaaattaccgtacttgtcattgccgctttaggaatatacggcatgatcaggctcagattggagaaaggaggggaagagcattga

SEQ ID NO: 3827 - DNA, 432 bp, Bacillus licheniformis
ttgaaaaaggttcagacgaatgatgtgatcctgcaaaccgttacaaagattgcatcctttatcattctgctcttttctttccatctgttttttgccggccataataacccgggcggcggttttatcggcggattgatgacggcgtcttcgcttgtccttctgctgctcgcctatgatttaaaaacggtgcagaacatcttgcccgtcaactttatctatgtggcggccgtcggcttattcatttccgtttccaccggaatcggctcatttttgttcggcgctcagtttctttcccacgcgtttgattactttaaccttccgctcttggggaaaacggagcttgccaccgcggtattgtttgatatcggggtttatctcgtagtggtcggcgtgaccatgaccattattcagacgattggggagagagaataa

SEQ ID NO: 3828 - DNA, 342 bp, Bacillus licheniformis
atggagattttaatgtcttttattgtaggaattctgttcatggcggcgacttatctgctgctttccaaaagccttttgagggtgattatcggaactgccgttctcagccatggcgtccatctgcttttgctgacgatgggagggttaaaaaaaggagcgccccccattttgaatgaagagtcgacaacctatgtcgatcctctccctcaggcgttgattttaacggcgatcgtcattgctttcggggttacctcgtttctcctggtcatggctttccgcgcctatcaagagctgaaaatggatgatatggatcaaatgaggggaaatgatcaacatgaataa

SEQ ID NO: 3829 - DNA, 1479 bp, Bacillus licheniformis
atgaataatcttgtaattctgccaatactgattcctttaatggccgcaattctgcttatctttatgaacaggtcgatcgtgctgatgcgtgcattcagcgccatatcttccattgcggcgatcgctgcggccgccgttcttgtgcagacagtctatacggacggaatccagaccttgtatctcggcgggtggaagcctccgttcggaatcagccttgtcgctgatcaatttgccagccttcttgcgttaacgacagccattatcggatttctgacggttctttattcgtttcgctccatcggcgaaaaacgcgagcgtttcttttattatcccgccgtccagttcctgcttgccggagttagcggcgctttcttgaccggggacttgtttaacctgttcgtattttttgaggtgcttctgatggcttcgtatgtgctgatcgtcatcggcggcacgaagattcagctgcgggaatctctgaagtacatcgtctttaacattatttcttccgccctctttgtcatcggagtcgcttatttatatgcagttacgggcacattaaacatggcggatctgagcgttcggatcagcgaatcggggcaaaccgggctgatcacggtcatcgctgttttatttttgatcgtcttcggtttaaaaggcggcatcttcccgctgtatttctggatgcctggttcctattatgcgccgccagccgctgtttccgcactgtttggcgcacttctgaccaaagtcggcctgtacgcgatcacaagggtgtttacattaattttcacccaagacgccgcttttactcatcaattaatggtctggcttgcggcgcttacgatcatcttcggggtcatcggctcgatcgcctactgggatgttcaaaaaatcatcatctacaatattgtcactgcggtcggcgtcatcttgttcggcatcgccgccaatacgccggcttcaatcgaaggatctgtctactatttgattcatgacatgatcattaaaggagcgctttttatgcttggcggagcgctttttgccctgacagggacaaacaacctgaaaaaaatgagcggcctgatcaaaaaccatcccgtgctcggctggatgtttatgatttcagccgtttcattggcaggtgtgcctcctttcagcggattcatcggcaagctgaaaattgcagaaggcggctttttaagcggcgaattcgtgattacgctgctgatgcttttatccagcctgctcgtcttgtattccgtcatgaaaatatttatcaacggcttctggggggatgaacaggaagatgctccggccaaaaggcagctaaaaggctacatgtatccggcagcggtactgctctttctgtcgcttgccatcggactcggaaccgagcttatcgctccgtattttcaccaggcggctgatacgctcgtcaaccccgaaaaatatattgaagccgttttgaaggagtag

SEQ ID NO: 3830 - DNA, 477 bp, Bacillus licheniformis
atggcattacaaatattgttgaactttattcttgcgttgtgctggatgtttctgaacaatgactacaccgctgccgggtttgtcatcggttatgtgatcggattattctcgctctttctgatgaggcgttttttccgccgccgcttttacttgattaacatttgggcgatcgtcagactgctgtttatttttattaaagagctcgtgctggcaaacgtcagcgtattaaagacgatcttgtcaccgcggttaaaaaataagcccggcattttcgccttcaagacagatcttaaagcggactgggaaatcacgacgttggcaaacctgattacgctgacaccgggcacattggtcgtcgatatctccgatgaccgttcgattctttatattcatgcggtcgatatcgatgatgccgagaaagccatcagtgatatccgcatttcgtttgaagaggccattaaggaggtaagccgctga

SEQ ID NO: 3831 - DNA, 285 bp, Bacillus licheniformis
atgtttgaatttattttgcaattgtcactcggcattttggcggtctccacttttctgtatgtgctgagggtcattaaagggccgagcatcccggacagagtggtggcgcttgatgcgatcggcatcaacttaatcggaattacggctctcgtgtccatcctgttaaatacgacagcatatttggaagtcatcctcttgatcggtattctggccttcatcggcaccgtcgcattttctaaattccttgagaaaggagagattatcgaaaatgatcgaagccgctaa

SEQ ID NO: 3832 - DNA, 375 bp, Bacillus licheniformis
atgatcgaagccgctaaattgcttatcgccgttttgatccttcttggcgcactgatatcgttagccgcttcctttggaacgcttaggctgcctgacttatactcaagaatccacgccgcttcaaaaggagcgacactggggatcatcagcgtgctgctcggcgtattcttttacttctggtttctgcacggcttcattacggcaaaagtgctgctcggtatcgtctttgtatttctgacgtctcctgtaggcgcgcacctgatcgcaagagccgcgtataatacaggcgttaaaatggaaaagaaaaccgtacaggacgattatgaaggctacagaaattttctgattaaaaagaaggaagattcctatttataa

SEQ ID NO: 3833 - DNA, 390 bp, Bacillus licheniformis
atggaaacgaaacatacacttcttgaagcgttgggaatcgagttgaaggagtgcagcaaagaacggtgtgttgccgtcatgcctgtcgatgaaagaacgcgtcagcctttcggctatctgcacggaggcgcgtccgttgcgctcgctgaaacggtggcaagcatcggggcatatcagcatatcgatccaaaagagcaggcatgcttcgggcttgagatcaacgccaaccatattaaatcggtaaaagacggaacggttaaagcggtcgctacgcctctgcatgtgggcaaatcaacaatggtgtttcaaattgaaatacgcgatgagcaggacagcctgatttgcacgtccaggtgcacgatggcggtcatcagccgtccttcatcgtaa

SEQ ID NO: 3834 - DNA, 639 bp, Bacillus licheniformis
atgagaagattacttgtgatcgatgatcatccggctgtcatggaggggacgaaggcaattcttgaaacgaaccaggactttgttgtcgattgcctcagccctgaagccagcgaacaatttctcaagaaacatgatttttctgcgtatgacctgatcttaatggatttaaatttgggtgaaatcaacggcatggacctatctaagaaaatccttgagacatgttcatcatgcaaaattatcgtttacacaggctatgaagtcgaagattattttgaagaggcgattcgttccggcatgcacggcgccatcagcaaaacggaatcgaaggaaaagattatagagtacatatatcaggttctggataataaaattgtcgtcgattatgattatttcaagcagttgattacacagcaaaaatcgaagtcaaacagccagcagacccagcacgacctcttgactgaaagggaatgcctgattttaaaagaagtcgaaaaaggctacacaaatcaggaaattgctgatgcgcttcatttaagcaagcggtcgatcgaatacagcttgacttccgtattcagcaagctgaatgtaggatcaaggacagaggctgttttaatcgcgaaatctgaaggtgtactctga

SEQ ID NO: 3835 - DNA, 2326 bp, Bacillus licheniformis
atgaaattttccttgaaaattatttcagttatacttgtctgtcttagttttatctatagctgttacgtagtttatatatgttataacaatttatttgtaggtgcatatttaaaatacaattcagacaatcaacttgtggtcgattatatacaagaagattcactggcggattacacaggcttaaaagctggggatattattcttcttaaaagctggggatattattcttgaagtgaacaataaaaagccgtctaaagaccagccgaagaatagtatactagctaatgttagttccctttctattgagaggaacggacaaatcatcactactgatacaagagacaccatcattagctatgatatcttatttactgttttaatcccgatagtgttttatttgttatgcttgctttgtgttattttaattttaaaatctaaaaagaaacaaacatcttcatttttactaattctatttttgcttactgtatcgattgcttatgtaagtgcaggaggagtttcaagaggtaatgtgtttagtaggtatgtaaatttattaacctttatatcaattccaatcagttacttgcattttatatatcaatattttaaagagataggcagaaaactatgtagtaataaggtgtttttcttttatttactgccggttttaaatctagttcttgagatttttagtggtacttttgaaaaacttaatggacctattccttatattaatttgtattcatttttcatgggattagtattagtgatatctgtgtttgtttacggtatggttaaacataaaaatacagagcaaacatattttttaaaaatgctgatgcttggcaacttttttgcggtttttccttttattgcattttatgttatcccggtcttagtcattgatgattttatctattctgcagcagtagttgctccgtttctattaattattccttttacattagtttatctatttatatcaaacaaaatgtatgacgtggaatttttgataggaaggttaaaatattatggactgcttgcaatcattccaaccatcatcatggtttctactgtaaagctgatgaaatttcaagaaggagactattatgatgcaagattagcaatttatgtctatcttataattctaggggttttctatcttaaagaaattcttgactatcgcttccgtctgaaacgtttttcagagaagtataactaccaagacagtatatttaagttcacacaaacgattcgaacacactcatctttaaatcaggttttgttggaattgaaacaaacaattcttgatgttttgattgtcagccaagcccatgttctgaaagtcaaaagcgacggaacaatatctttgctcgaagaagatgccaaagaatatccgtggatcccctacgaacaagaagtaaccaaggtgatcaccgacatcggcaaaatcgtcgaagtcgaccgcgggtttttgattaagatcggtgaacggggcgggacgtcttatgtcatgctgtgtttgtcggttttaaatacgcctaggctgacgcgcgatgagatttcatggcttgagacgctggcgttttatacgagcgtttccctggaaaacgtgctgaaaatcggcgagctgatggagcatctggaaaatgtgaaaaaagaagggccgaatccggcgtggctgaataaattgatgtttgcgattgaagagaagcagagatctgatttagcccgcgatctccacgactctgtcctgcaggatatgatttccttgaagcatcaaagcgagatgtttctggctgattttgaaaaagataaagtctgtacgaatcaaatccggcaaaggctcatcaatatgaatgagcaaatgtccgccgtcatccagacgacaagggaaacgtgccaggagctgaggccgcagctgttgtacgatctcggacttgtcaaagccctttcgaaactggcggcgcagcatcaggagtcctcatcgatcgataagatccgcctcaatacggaaaggttctcaaaggtgctcgacttggacacgcagttgaatttgtacagaattgtgcaggagcttttaagcaatgcggttaaacattcgagagctaatgaggttttgattatgcttgtctgcataaaagaaaaagttgttcttcattatgaagatgacggcattggggttgacccggacaagctttatcaaaacagcgcaagcatggggctgtcgggcattcgcgagcgcgtccgcgcactgaacggcagtctggatatacagacagcagaagggaaaggctttagggtcgccattgaaatgggattgtaa

SEQ ID NO: 3836 - DNA, 174 bp, Bacillus licheniformis
gtgcaggagatcgtgagctttttagttcaacatccagaaattttagaacaggttattaatgggaattcctgtctattaggggtggatatagatcaattagaaagtattattgatggatttaaattactagaatcatcaattggaaggcctgttcctttttggagaagtatttaa

SEQ ID NO: 3837 - DNA, 882 bp, Bacillus licheniformis
atgaatcattttatagaccttgagattcccaatgcggacttaaatcggacgctgcacgcttttctagatgcaaaggaccagttgcatttcagcgagcttgctttttatcattaccaaagtttcggcggcacggacaccgatgcggcagaaacccttggagcaggcattgaactcttgattcttgcgtttgatatattcgatgatttagaggatgaagacagccccgatgaaccttggatgaaaatcaaccgttcagtcgcaatgaatgcggcgactgcgctttatacaataagcattaaagtgatcggttcggtgtcgaaagaaccggtgtttttcgaaaagctaatggaatatacacttcaatcgatgcagggacagcatgacgatctcagcaaccgccctgccactgaagatgagtgccttgacatgatcaagcgtaaatccggggcgctgacagccttgccatgcgtgctgggagctatgcttgctacgggcaaatttgacccgacggttgaaaagtacgcctaccagctgggcattgcttcacaaatcgaaaatgattataaagcacttttttatgattcaaaaagcgatatcgccaagaaaaagcgcacgcttgcgtacttatatttgtcaagaaaatttaaccagccgtcgattgacttgttaaaaacatttgaaactgaggataaaattgccgataaagaaataaaatgctataaagagaaattgaaggcagcaggcgtcactcagtatatgtatgttatgaatcagctcgctattcagaaatttaagaagggaatcggggagctggagttgggggagctgaaaaaacagcagttgacttcgtttgtattgaagatgtttgggaaggaggattag

SEQ ID NO: 3838 - DNA, 141 bp, Bacillus licheniformis
gtggaaaagcaacaaattgaagaattaaaacaactgctttggcggctagagaatgaaatcagagaaacaaaggactccttgcgcaagattaacaaaagcattgatcaatacgataagtacacatatctaaaaacctcgtaa

SEQ ID NO: 3839 - DNA, 129 bp, Bacillus licheniformis
ttgaacttcgggatagacctgccggcagctgacgtgttgatatggatgcatccaaaagcaatgaggaggaagcaatatgaacacctcttttcaatttttacgggtcaaattgcggtttttgcggtgtaa

SEQ ID NO: 3840 - DNA, 339 bp, Bacillus licheniformis
ttgcttcctcctcattgcttttggatgcatccatatcaacacgtcagctgccggcaggtctatcccgaagttcaagtcagcgccttattgcgctcggcaaaagaagcggagagcttgatggctgacggacagagaattttaagcaggctttcagcctcgcgtactttggcccagcaaatcatgacggctgcccaaagcaaccaaaaaaataacgtgctggccgcgctcaggcaaaccggcgtccgcagccagcttgatgcctcattcgatcccgacggcattcgcatcatgctcatcagcccccgcagcagactattcctgctattgcgttggtcttag

SEQ ID NO: 3841 - DNA, 1223 bp, Bacillus licheniformis
atgagggtattcgttgccagacagccaatattcaacagaaaagaacaagttgtcgcatacgagcttttatacagggaaagcgagaaaaactttttttccggtattgacggtgatcaagcgacaacagaattaatgattaacagctttttaaacattggaatcgataaattgacagaaggcaaaaggtattacgtgaattttaccgagggtcttttggcatcagggctgccgacgtattttgacccggatcagctcgttgtggaaatccttgaagatgtgccgattacccttgagcttatcgaaaggtgcaggcatttgaaaagcctcggctacacgattgcactcgatgatttttgtttaaagcatcgcgtgaagagggacttgctccatcagcttttggcatccattgatattttgaagatcgattttttcaaaacgacgcagcaggaaagacagagcatccttcgatcatgccgtaaccaccgcctgacgttcctcgctgaaaaagtggagacgcgaaaagaatatgagcaggctgtaaaagacggatttcatctgtttcaaggctatttcttcagcgagcctgtcgtgattgacggtcaggacattacatatcatttccacgcttattatgagctgctgcatgaattaagcgaagatcagcctgatattgaaaacgtcacaaatattatagagcgcgatttgtcgctttcttaccagctgctgaagctgttgaattctccagccaaccggccgatccaaaagattaaaagcatccgccaggctatcgtgcttctcggatttaaagaaatcaaaaggtggatcttcatcctctcatttaaggatttaacgaaaaagcaaaactccagcaagaacgaagtcgtcaagatttcgctgatccgcgcgaagctttgcgaattgctggcaaaaaaacgaaccgccctcagccggcttcttatatgctgacaggcatgttttcatttatcgatacactgctgcacaaagaactaacggaagtcatcagcgaactgccgctgacagacgaagtgggccaggcgctgctcggaaaagaaaatgattaccgaaaaatcttgcggcttgcaaaatcgatcgaacgaaacgaatgggaagacaacacaccggagacagaaggcttaactaaagatgaagcgtaccagtgctatcttgaagctgttgattggtgtcaaaagctcttataaaaa

SEQ ID NO: 3842 - DNA, 1470 bp, Bacillus licheniformis
ttggaacaccgttttacagacgacagtctagcactacacacagacctatatcaaattaatatggcggaaacgtattggcgcgacggcattgatcaaaagaaagccgtatttgaactgtttttcagaaagctcccttttgacagcggttttgccgtttttgccggtcttgaaaaagcgattgaatttttgcgggatttcagatttactgaaagcgatttagtttatttaaaagaagagctgggctttaaagatgactttctcggctttttaaaagatatgagattcaccggttcgctttattctatgcaggaaggcgaaatcgtgtttggcaacgaaccgatcatgaggatcgaagcgcctttggctgaagcgcagctgattgagacggctctgctcaacattgtgaattaccaaacattgattgccacaaaagcggcgagaatcaaaagtgtgatcggagaagagacggcgcttgaatttggaacaaggcgcgcgcatgaaatggacgcggcgatgtggggagcaagagccgcgattatcggcggattcgacgcgacaagcaatgtccgcgccggcaagcggtttgacattccggtatcaggcacgcacgcccatgcgcttgtacaggcctatcgcgatgagtacacggcatttaaaaaatatgcggaaacccataaaaaatgtgtctttttggtcgatacatatgatacggtgcgttccggcattccaaatgcgatcaaagtagcaaaggaattcggcgatcaaattgaattttcgggaatccgcctggacagcggagacctcgcctatttgtcgaagaaagcgagagccatgctggatgaagccggatttacagatacaaaagttgttgcatcaagcgatcttgatgagtacacgattatgaaccttaaagcccagggtgcaaaaatcgacgtctggggcgtgggcacaaagctgattaccgcttacgaccagccggctctcggcgcggtttacaaacttgtttcgatcgaagaagacggaaagatggcagacacgattaaaatttcttcgaatccggaaaaagtgacgactccaggcttgaaaaaggtgtacagaatcatcaatcagctgaaccatcattcagaaggcgattatatcgctttggactatgaaaaggtcaatgaacaggagcggctgaagatgtttcaccccgttcatacgtttatcagcaagtttgtgacgaattttgatgcgaaagatcttcaccagccgatctttgaaaaaggcgagcttgtctatgagaatccgagcattcaggatattaagcggtatgttcaagaaaatctcagtttgctttgggaagagtataagcggatcagcaagcccgaagaatatcctgtcgatttaagcgaagcttgctggaacaacaagatgcagcaaattcacgaagcgaaaatcaaggcgaaaaaaggtctggatcaaggttga

SEQ ID NO: 3843 - DNA, 552 bp, Bacillus licheniformis
atgaaaaaagctcttatatgtatagattatacgaatgactttgtcgcagctgacggtaagctgacgtgcggggaacccggccgcaaaatcgaagacgccgtggcgcgtctcgcggatacgtttattcaaaacggcgattatgtcgtatttgcagtcgattcacacgaggccggcgatacgcttcatccggaaacccgtttgtttcctccgcataatataaaaggtacatcaggacaggatttatacgggaagcttgaaaagctttatcgaaaacacgaacacgatcagaatgtctattacatggaaaaaacaaggtactctgcttttgccgggacaaacctcgagctgaagcttcgtgaaagggatattcaagaactgcaccttgttggcgtatgcacagatatatgcgtgctccataccgcagtagatgcttataataaagggtttaatcttgtcattcatcaaaacgcagtggctagctttaacccggacggacacgactgggctctttctcattttgcaaacaccctgggagcctcagtgtcagattga

SEQ ID NO: 3844 - DNA, 402 bp, Bacillus licheniformis
gtgagcgaccaatcattggatcaatatttacagcagggaatgtacggaccacgcgaaacgaagccggatgaacgcagactgtttttaggctcgctgagggaaagggtcatcatcgcattgactaaaggacaagtgctgcgtccgaaggcataccgggaagtcatcgatgcgcttggctcaaaagcggatgcaacattattgcttaacggcgaaatcggctactctcatttatctccttacatcaaggagtccaataagcaaggcgtccctttttcgatcgtgtccgatcagcaatcggacactccccttggacttgttctcgcggcgcgtgaggccgtagagaaagaatcgatttatgttcaggacgatatctttgagcagtcggttttaaacaagagatga

SEQ ID NO: 3845 - DNA, 249 bp, Bacillus licheniformis
atgaaaatcaggaaggcaaacatcttaaacgaagatcagatgatcacagacgtttacctccatgaaaataaaaaggaatttcatacgcttgtggctgtgccgcaactggagtggagcacgctgatttcctatgaggaagaaaaagcagaactcgccgaaaagcttgaccggtcattgtcgaaagtggctgagtcggatgcggccgaggagctgtccaaaaagatcgtacaatgggtgaccgaaatgtag

SEQ ID NO: 3846 - DNA, 222 bp, Bacillus licheniformis
atgccggcaattgtcggaccgatttttatcaggcgagtcgttgatgacagcgcagccttttttggagatgtgtttgcgatttccccgaagtgcacggattcctccggaggaggagcgggcacatttcaaacaggggactacggattgattcataacgatatcaataaaacgaccttcacagatgcggatgtgatggacggttcccagtcattgaacctgtga

SEQ ID NO: 3847 - DNA, 1110 bp, Bacillus licheniformis
ttgttaaaatcaaaaacccatttttggacgctgcaaattttattggttcttcttatcatttatgtgtcgacaaaagtgtcttttcttttcgaaccgatcatcgtatttgcatcgactctatttactccgattttaattgcgggactcttgtattttatattcaatccgatcgtgcggcttcttgagaaaaagctgccgagaacgctgtccattctgctgatctatttggtgtttgtggcattcatcgggtttgtattgtcagcagtcggtcctgtatttacaaagcaggttaccgatctgttcaacaacatcccctcctatgtgaaacagatccagattttcattaagcaaatgtcgaattcgcagtggttcacttggataatgaatcaggacttcgtatcggttgccaaaatcgaaagctcaatcggcgaatatttgacgagcctgcctgaaaatattacagggagcctgacttctgtattcggcgttgtgaccaacattgcgctcacggctgttaccgtgccgttcatcctgttttatatgctgaaggacggccaccgtttcccgaatttggctgtcaagatcctgcctgacaagtataaaaatgaagggctgaagatttttaaggatttgtacgagacgctggcggcttacattcaaggacagctcattgtttgtctgttcgtcggaacggcgtgcttcatcggtttttggatcgccggtgtgaaatacgcgctgattctcgggttgatcattgccgtgacgaatattattccatatgtcggaccgtttcttggagcggcgccggccgtcattatcgcatttctcgactcgccgacgaaagcattgatcgcgctgatcatcgtcgttgccgttcagcagacagacgggaatctgctgtcgccgctgattatcggccgccgcttgaatacgcatccgctgacgatcatccttttattaatcggcgccggaagcttcggaggcattctcggcatgatcctggccgttccggcttatgccctgctcaaggcttttacattgaatatcgtccgccttgtccgtttaaggcagaggtataaaaaagaaacggcggaaaatcctgaagtctga

SEQ ID NO: 3848 - DNA, 435 bp, Bacillus licheniformis
atgaagatcagcagtagatttacgatagccgtacatatgttatccttgatgcacgtccgaagcgaccatttgacatcagagcaaatcgcagacagcgtcaataccaatccggtcatcatccgccaaatcagcagattgctgaaaaaagcgggcttgattgaagtaaagcgcggcacaggcggagcgcacttattacgggatgccggcgccatttctttgtatgatgtctataaagctgtcgaagttgtcggtgaaggcgaactgtttcacactcacgaaaaccccaatcctgattgctgggttggcgcgaatatccaccaggttcttgagcttgttttattaaaagcgcaaacagccatggagaatatactcaaagaaatgtctataaaggaattgactgatctgatcatccaaaaaaagaatgcttctcagtga

SEQ ID NO: 3849 - DNA, 897 bp, Bacillus licheniformis
atgacgaatcatataaaagaaatcaactgggagcaaaacaccaactcttacattcagctcataccgaatattgagtacacaaaagtggaagacacttctttgacattacatttgctggtgtaccgcaatccaatggatgcgttatttaacaggaaaggcaatcaggaaacatacccgctgatcatttatttgcaagggtgcggatggggctggacaaaacaggatacatccgcctttatcccccaactggttccatttgtcgagcaaggatatgtcgtggcaagcgttcaatacagaggcagcggagaggcggtgtttccggctcagcttcatgatgtgaaaacagcagtccgctttttaaaagcaaatgccgcccgctataacatcgatcctgatagagtcggagtctggggggattcttcaggcggccatttggctcttttgcttggattgaccgaaggaattgaagaatttgaaggcccggacgaataccgtcatgtatcgagcaaagtcgatgcggttgcggactggttcggtccggtcgaccttctgtccatgagcaagtatccgtccatcttcgatcatgattcacccaattcaccggaatccaagctgatcggcggagctgttcaagaaaacagagtacaggcgaaacaagcgagtccgataagatatgttcacagggaagcgcctcccattctgattatgcacggggatcaggacgatgtcgtcccttatcaacaaagcgtccaattgtttgaagccttaataaaagaaggccatgatgcccttatgtataaaataaacggggccggacataacggttttacccaggctcataccctggacatcgtcaaatcgttcttccgcaaacatttaaagcctggaaaagcctga

SEQ ID NO: 3850 - DNA, 1464 bp, Bacillus licheniformis
atgaaaaaactggtgctgctcatgcttgttttgctgctcgtgtatccgcatgtatcgaaagctggcggatttaaaggaggaggaggcgatcctggctactggttcgtgggagaccctgttgaacatcccgatcccgcaaaaccgccgattgtatttgtccatggattaaacggctcttcaagtgcgtggtttgacgaaaatgacatggctgaacaggcctggaaaaacggatataatgcggcttttatcgatctccaccccgataaagacatgcaggataacggagcgatgctggccgccaaactgcgcgaaatctaccagcatttcggccgcaaggtgattctcgtttcctacagcaaagggggaattgacagtcagtcggcgctgattcatcacaacgcataccattatgtcgagcgggtgattacgctcggaaccccccatcacggctcacagctggcagaccttgcctacagcaactgggcaggatggctcgccgatattttaggccagaaaaatgacgccgtttattcactccagacagggtttatgaaatcgttccgcgaccagaccgacaatcatcccaatcgttcgaaaaccaaatatttcaccctggcaggcaataaaatcggcgggctcggcagcgttttattttttgggggcgtctatttaaacatgtttggcgaaaatgacggagccgtcaccgaaaaaaatgcgagactcccttacgccacaaacctgaatacaggaaagtgggatcacttctcgattattaaaggaaacctcacatttcctgtatttatgcctttattgactgttcaggaatatgcaaatgaaacagcggccatcaatgaaaaattatcgtaccctttcatcagagggggagaaaatcatggattgagagaagaggagttcgccgttgaaaaaggcgtcaaggaaatcaccgttcactggctgagcaatcattcctcgggaaatatcaaattgacagatccacgcggcaagccgttcaaagatttttcaatcgcaaagacggcagatgtttttgaagggggattcgtccattccgctgccatcaaaaatcctgcagcaggcacatggaagatcgcatcatccgtcaaacaaaaagaggcgtttttgttcattgtgacgttcgattctcctttgaaccagcaaattaaaaacgcagtcaccagagaatcgtcaaaccttgcgaatgtaaaggcgtccgtccgttcgatccgctatgaaaacggaaaacaaaccgagaaaaagtcgctgaaacctgcttccatcaatgcgctgcaaaacagcctgtcattcaaaaaagcgggcttgtattcggtgacgatcgacctttcaggaaaaacggcagacaactcgccgtttaacaggacgatcatccgctctatttatgtaaatgacaaaggggagaaatttgaaaacagccctttgtccgattaa

SEQ ID NO: 3851 - DNA, 531 bp, Bacillus licheniformis
atgagaaacgtaactttaatggatgtattcacccatccaatcgcacaaaaatatttaactcgttccggtgtagctcatgctgtagcctgcgcctatcacgcataccgcctggcggtgcgagctggagtagatcccgatatcgcgacaaaagcggcattgctgcacgatatcggccattatgaatggtacaccgacggagaatgggattatgaaaaatacaagcaaaacgacattcacgcaataaagggagccgagcgcgcccacaagcttctcatccgcctcggcgaagatcggaaagcggccaaagagattgctttggcgattctgcttcatacggattcctatttgccagaaggggaccttgataaaaacaagctgcagcaaatcgtcaaaaaagcggatgagctggacgaagagccgggcggaaaccaccattaccgcaaaatcgaccataagctggcgcttgagaaaatcaggaagcttgaccgcatggttgatgaatccttatctcccatgaaaagaacggtttaa

SEQ ID NO: 3852 - DNA, 732 bp, Bacillus licheniformis
atgcatttatccattgttaccggagcgtcaaaagggcttggcgccgcgatggccgaagggcttttgcaaaaaggccatattgttcatgctgtttcaaggaccaagtctgatatcagtcatgacaggctgatccagcatgaggccgatctggcgcagctcgccgaaacagaaaagtggtttcggcaattctcagattctgtccaagcccatgattttgcttcgatcaccttgatcaataatgcgggaatggtgacgccgatcaagcgcgccggcgaagctgaaccggaagaactgaggctgcattatgacttgaatttgttagcgccggtgatgctcagccagctgtttaccaaatggctcaagccatataaaggcaaaaaatcgattgtcaatatatcatcaggcgcggccaaaaacccttataaaggatggagcgcctactgcagctcaaaagcggggctcgatatgttcacgaaaacattcggctttgaacaggaagatgagtctgatccggtgaagatgatttctttctcccccgggatcatggataccggcatgcaagaggttatccgttcatcatcgaaaaaagattttcatgaaattgaacgattcaaaacctatcaaacagaaggaaagctgagaagcacctcttatgtggccggcattctgctcgacctgcttgagaccgactttgaaaacggcagagtgtatgatattaaagagtttttgtaa

SEQ ID NO: 3853 - DNA, 489 bp, Bacillus licheniformis
atgatgcgtaatgcgaaatggggaaagaaggggatcatggcagtcatgctctccttctttcttttcactccgatcgcgaaggcggaggaaaccgataaagtcgatgtaaagccaaacgagtacgaaaagcaggatattaaaatcgagacggactaccttcaggaagaagaggcggaatacaaagaggaaatatcaattccagaagaactgaaggaattctcatttacagattcgaaaaaagaagatgctatcgaaaagctgaaaagcctgtccggaagcttcacgaatgaaagcaattccgtggcttcaaagctaaagcagcttgacctgtcattctcggcaaatccgtccttatcgggaagggaagatgactctgcggaaaaccggcaatccatcttcctgcccattctatacggtctgctgatccttctttgcatcgccggtctgttctttttgattccgaaagtcagcgggcagcagaaaaaataa

SEQ ID NO: 3854 - DNA, 3063 bp, Bacillus licheniformis
atgacggaacaacaaaaaagcacgctgaaaattatcagcgccatcgtcacgatcatcttgctgcccgtcctgttttttcatttcatcggtgagaacccgacgaaaaaggtatcgaacgcgacaagggaaatcgccgttgtcaatgaggataccggcgttttgaaagatgacggaaccgttgatcaagatgcgctgctgggaaacgaaatctcggcttccctggttgaccgtccggattataaatggacggtcgtcaaccggagcgcagcagaaagcggacttgcggagaagcaatacgatgcgattgtctacattccgtcggacttttcgcaaaacattttaagctacaaccatgagcgtccgcaaaaagcggagctggaattcaaaattcaggaccagctcgacgccgtcaacaaggaaaaagtccagcgcgagcttcaggacgcgcaaaaaacggtgagcaagaaaatgtcttccctgtactggcgctttgtcaaacagggagtcaaaaaggtcagaaaagagtttgacagcatcgtaaacaaagagtcggagttccaaaacgcgatgtacaatttttacaagccgagctccaacaatttagctggcgaagtagaaagacaaaaagagatgatcgacagactgaaagaatcgatcaatgaaacagaaggcacatcaaaagaacgcaacgcaagcgtcgaagaatccaaaaaacaattggacagcttcgtcgacaacgtcaatcagtacaaacaatatcaagagaagcagtcggaactgctccaggctgcacaagcggacagtgaaaagcaaattcaagacggcctgacatctatcaaagataaacaagcgagcgcccaaagccgcttcagcgaacaaatgaacggcatggcgatgtcgctcagcggtttgcataaccagtttagccttgctggaagttcgcttgagaatctggcgaaatatcgttatgtagaagtgccagaacagcagcttggtcagataagcacgatccagagcgagctgatttccaattataaagctgatgctagacaactaaacataaagaacattgaatctcagtcgcatatcctagagtatcgacaaaaattgttcgaatttgatgacacaccgatagctgaagaccctggaaatgatggagaagatgattccgacgaagatgataataagaatatcgaaataaatttggatgatgaaacaactgagcttgagaaaatatcaaaagaattagaggaattgtctaataacattgaggttccaaataaagaagagcctgaatccccttcacctggtgagaatgatggaacgacagaagataatacttcgacagatccagtagatacaggacaaacaggtgaaaatgacaacacagtaaattctgaggaaaatgaacagcaggcggacaacggaaacaatgttgatgatacaaataaggaggatccacctccagctgaagaaaatcccgatgaacaagacggcagtaatcttgaagaattgaaaaaagaattaagcaccatatctgctaacatagaaggtgtgaaatctaacattgatcaaaaaacaaaagagcataatgaagagcttaagaaaaaaattgataatttagatgaaaaagtagaaaaactgaataaaaaagttgatgaattaaatgaacgagttgaagatttaaaacaaaaactgattgaagaaagagataaggattttcaaaaaatatatggtaaaataattaagctcgaagaagatttaaaggtgtattatgagaatgatatcagccctgaagtgaaacgggcttttgacaatcaatcttttgtcaatagaaacattaatcaactaatggattactataatctactatcggtttatcatgttgctgttactggaaagtacaaagcagggacagagcttgaagatggattgcttcaaaatagcaaaaataaagttgatacagttctcagagtcaatgaaaacgaaaccacaaaatggaaaaacctcaagaacaacatgctggcgacaaacgaagatatagaagcatatactaccggcatgacagattttgttgacagttacggcgcattcattgatgaaaagcaaacagaaacgctaaatgagctcagcaacatctcagacagagcaaatgccgtatctgaacagctgcgcaatccggaaggcgccggaacagcagtcatggagggagatgcgacagatggaacgatggtcatcagcatgcaggatacgcttggaaatgacattttgcagctgtccaacatgctcggttccttgtcggaaacgcaatcaggcgtcatcgagtacacgagcaatattcaggaaagtgtaaacgatgttcagaaaaaagcggataccctgaattcaaattggggccaaaatgtcgcgacgacaaagcttatccgcggagacgtatacggcattctcggaaatgcgttcggaggaaacgacggatatgtatacgatcatctggcaagtccggtgaaaatcagcggggatgttccagagtcaaaagcgcaaaacgtaccgccggtcgtcattctcgtgattgtgatgctttccagcttgctgatcggatatttcagccaccattatcaaaatgctccgctcttagtcaggggcgcgctgttcggcattttgaatatcattgtcggcctgatgatcagcctgttcggtttgaacatttactcactcgcagacgatcaggccgtcatgtggtcggtctttacgatcttgctgcttgtcgcaagttcagccattatccggacggcgtttatgctgggatcgatcgcaggcggaatcgcgacagccgccatggtgctgttctatgtagcgccgctgcttgacctggcgatgccgaacttcagctttaacaatccggtatcaaccgtatatatgtcgattcagtacggaactggaagccagtttgcactcggaatcggagcattaattttaatcacgatcatcgcaattgctgttccttttattgtcgattttgcaaaatcaagaacagaagaaagcgagactgaccatgatgcgtaa

SEQ ID NO: 3855 - DNA, 4485 bp, Bacillus licheniformis
atgagtctgttatggattttttatcataaaaactatcaaaaaataaaactggatgatcagaacagccgcacgctcaccatcgggccggatttgaaacattctgtcacgattaagcatttttcatttgaaaaaggcccggtgacactggaaaagcagaaggactcagacgttttgaacgtgcagctgggaggggagacggtctcttctttaaagcttggcggaaaggcgtccgtccaaagcggcgctgaacagctgacgctctttttagccgaagaagccgacagcgttcctgcctactatttgggagagagacaggaaatcgtcatttcttccctcgatcaagaagcggatgtttatttcaatgaaacggattcattctttggagaaaaaggtacgttctctttcatccgcctcgacgggcaatggaatgtcctgccgaatgacgcgaaaatttatttgaacggagaagaagtgtccgcccctgtctccgtgcaaaatggagacgaaatcgcatttggactgaatattcttcgcatcgttgaagacgacctcttggaaatcgagggattcgggaagtttgatacgtctttggagaacattcttaagccgagctccgagacaaaaaataaatatccgcaataccgcaggccgccgagaatgatttacgacctgccggatgaaaaagtatccttcagcttcccggcacaggaaagcgacggagacaacagaggcctatggctgatgattctgcctccgctcgtcatgctgatcgtcatggggatcgtggcgctcattcagccgcgggggatctttatcatcgtttcccttgcgatgtttatgatgacgctgattacgtcaaccgtgcagtacttccgcgacaaaaatcagcgtaaaaaaagagaagaaaaaagagagcgggtctataccctttaccttgaaaacaaaaagaaagagctgcatgaacttgcagaaagacaaaagttcgtacttgatttccattttcctacatttgagagaatgaaatatttaacaaaggagatcagcggacgaatttgggaaaaatcgattgaaagcgccgattttctgcaaatccgccttggaacgggaaatgttgcatcttcgtaccaaatcaatttgaacggcggagatttggccaaccgcgatacagaccatctccttgaacaaacgcaaaaaatggaagaggtctacagagagctgaaaaatgcgccgatcacggtgaatcttgccgaaggcccgatgggcgtcgtcggaaaattgtccgtcgtcaaaaatgaaattcatcagcttgtcggccagctcgcatttttccacagctatcatgacttgcgctttgtctttatttttgacgaagccgagtatcaagaatgggaatggatgaagtggctcccgcattttcagatgcctcatatttatgcgaaagggtttatttacaacgaacagacgagagatcagctcctttcaagcatatatgagattttgagagaacgggatttagatgaaaacaaaaagaagactttgtttaagccgcactttgtgtttatcatcacaaatcagcagctcatcgcagaacacgtcattttagaatatttggaaggcaagcagaaacacctcggagtgtcgacaatcgtggcggcagagacaaaagaaagcctgtccgaaaacattcatacccttgttcgttatattactgaacaggaaggcgacattctgatcaagcaaaagaaagccgtccagatcccgtttcagctggatcaccacaacagggaagacaacgaacagttttcccggacgctgagaacgcttgaccaccagacgggcatgacgaattcgattcctgataccgtatcgtttctcgaactgttccaagtgaaggaagtcgatgacatcggcatcgaacaaaaatggatgacaagcgaatcggccaaatctttggccgtgccgatcggctataaaggaaaagacgacattgtttatttaaaccttcacgaaaaggcgcacggcccccacgggctgcttgccggaacgaccggttcgggtaaaagtgaatttttgcagacttatattttgtctttggcagttcactttcacccgcatgaagtcgcatttttgctaatcgactacaaagggggcggaatggcgcagccgttccggaacattccgcatttgctcggaacgattactaacattgaaggcagcaagaacttcagcaaccgggcgcttgcgtccattaagagcgagctgaagaaaaggcagcggctctttgatcagtacaaagtgaaccatatcaacgactatacaaagctttacaaacagaaaaaagcgaaaacggcgatgccgcaccttttcttaatttcagacgaatttgccgagctgaaaagcgaagaaccggaatttatccgcgagcttgtcagtgcggcaaggatcgggcgaagcctcggggtgcacttaatcttggcgacgcaaaaaccgggcggcatcatcgatgaccagatttggagcaactccagattcaaggtcgccttgaaggtgcaggatgcgaatgacagtaaagagatcctcaaaaacggggatgcggctaccatcacggtaacgggccgcggctatttgcaagtcggcaacaacgaggtgtatgaactgttccagtctgcatggagcggagccccttacatggaggacggctacggcacagaggatgaagtggcgatcgtcacagataccggattaattcctttatcagatgttgatgctgatcgcgctgcgaaaaaagaggctgtgacggaaatttcggcagtcgtcgaacaaattgaacggattcaagcggagatgggaatcgagaagctcccgagcccttggctgccgccgcttgaagaacgcataccgaaaacgcgctatccgtcggaggaagccgatgcctttaactttgcctatatcgatgaacctgaaaagcaaagccaggagccgatcagctaccgcatgatggaagacggcaatatcggcatcgtcggctcgtcaggctacggaaaatccctgacagccacgacgttcatgatgagctttgccgaacagtatacgccggaagaattgcattactacattttcgactttggcaacggaacgctgcttccgcttgcaaggcttccgcacaccgcggattatttcctgatggaccaaacgagaaaaatcgagaaatttatggtccggatcaaggcggaaatcgagcacaggaaaaatctcttccgtgcaaaagaaatcagccatatcaagatgtacaatgcgctgaatgaggaaaagctgccgtttattttcataacggtcgacaactttgacatcattaaagacgaaatgcatgaactcgaaagcgaatttatccagttttcacgagacggccagtcgcttggaatttatttaatcctgaccgcgacaagggtcaatgcaatcagacagtcgctcttgaacaacctgaaaacgagggttgtccactatctgatggatcagtctgaagcatattcgattatcggaaggccggaattcagccttgaaccgatccctggacgcgttattatcaataaagaaaaccaatacttcgcacaaatgtttatgcctgtggaagcggacaacgatatcgagctgtttgaagggatcaaagccgacattcaggcgatcgcagaacgctcggaaggcatgagaaagccggcgcctgtgccgatgctgccgctcgagctttccgtcacacagtttgtgagagattatccgcttcagcctgaaagaggccttattccaatgggactcgatgaagaaactgtcgaacccgtatactttaatctcgagaaaaataagcactgcctcattatgggtcagacgcagcgcggaaaaacaaacgtcatcaagatcatgctcgagcacctgcttgaccatgacacgaaaaaaatcgccgtgtttgattcgatagacagagggctttctcaatatgcgacagaggatcaaatcagctatctagaaacaaaagacgacattctgctctggctcgctgagacggaagaaatttgccggacaagggaagcgatgtatttggaagccgttaaacaaggagaaatcgccaaccttgatttctcaccgatggtctttattgtcgacggaatttcacggttccagcagacgatcgacgcatcgattcaggacaaaatggcgatgttcatgaaatcttacgcccatttaggtttccactttatacctgccggaaatcacagcgagttcacaaaaggctatgattcgctgacaagcgaagtcaagcaggtcagacacgcgatgctattgatgaaaaaatccgagcagaacttgattcagctcccatatgaacgccaggagccggaaattctgccgggctttggctatatcgttgaaaacggcaaagagaggaaaattcaaattcctttatgtgctgtagaaaggaagaaagcgaaatga

SEQ ID NO: 3856 - DNA, 1317 bp, Bacillus licheniformis
atggcagagaaaaagaaaacgtatctcgaagaccaattagaggccgtcatgacgaaagaagacggtacatatatctttcgttttcaaagagagaagatcaatcttgtgaacggcttggaagcaaacgtcattaaagaagtcgatccttcctttaataaagaagccgtcatgaccgatgatgaagtccaaattatgattcagcctccttccgaatataaagaatttcgttatataaaagggaaaaataaaaaaagcaagtggctattcgcgtaccagctcgtgaaagccgttgaagaacattcaattaaaaggctgcacctgatcgctgcgcctgaaaacattgtttttgacaaagggttgacgcctaaatttttacattatggagtgaaagaaagcattccgccatatgaacacgacgaagaaagacttttcaatgaagtgaaagccgccgcggcgcttgctgtcgacgggcaattttcttttgaagagtatttaaaatacagcgaaaccatcaaattttcagatcaggtaaaagacatcatcacaagcgggacatacggcgatttgaaagccgtcattcaaaagaggatcgatgaactggatgccgaagaaaaaatgcttgtccatcttccgaagaagaaatggaagattcaaaggtacatagggttaggactaattttatgcttaataccggctgttttattttccttctattcattattcttcgcgcagccgaaacagcaggcgtttatcgaaagcaaccgctacttcttaaataaacagtacagcaaagtcatcagtacgcttgataaatatgatgccgatgagatgcctgattctgttcagtatcagctggcttattcgtatatcatcgttgacaatgtactgaaggaagccgatttacaggaagatgccatgaagagcctgacgcttcaagtcgatccgaataatttcctttactggattcagatcggacgcggcgccaataaagaagcgcttgagacggcccgtaagctggaaaacaatgcacagatcatgttggcacttatgaaatacacagatgacattaaagccgatgataaattgtccagtgatgagcggcagaaacagctggatccgctcgaaaaagaacttgaagaattgaagcggacagcggatgaacagaaagccaaaactgaagaaaaccagcaggcaaacaccgagcaaaaccaggcggacgtagaggccgcaaaggctgaaacggagaaggccgagaaggaacaggcgaaaaaagaaaataaagaaaaggaagacaaaaagaaaaaagatgacaaataa

SEQ ID NO: 3857 - DNA, 240 bp, Bacillus licheniformis
gtgtatgttgacattaccatcgatttaaaacattacgacggcagcgtctttgacctcagactgtcggattaccattctgttaaaaaggtagtcgacattgcgtggcaagccaaaagcataccggtgcctccccgggaaggctactgggtaagggtgacaaataaagatgccgttttttcaggcgaatatacattatcgcaatgcggaattacgacaggtgaccgtctggaaatattatga

SEQ ID NO: 3858 - DNA, 297 bp, Bacillus licheniformis
atgtcaggaatcattcgtgttacgccggctgaactgcggcaaatggctgacagatatcaaaaagaaagcggagatgtgactgagcaggtcaatcagcgtcttgatcaaatgatcaaccagcttcaagatatgtgggaaggtgaatcaagccgtgcgttctcagagcaataccaagagctaagaccttcttttattaaaatggctgaacttctaagcgacgtttctaaacagcttcatcagactgctaacactcttgaaagcactgaccaagacatcgctagccaaatccgcggctaa

SEQ ID NO: 3859 - DNA, 1410 bp, Bacillus licheniformis
ttggcgattctagagaaaatcaacggctttttatggggagtcccgggcatcgttatgcttgcgggaaccggtttatttctgacgttcatcctgcgggggcttcaatttaaaagattgatatatgcattcaaacttgcattcgggaaagaaaaagaatcagccggagcagacggtgatgtcagcaatttcaaggcgctgatgacaacgcttgccggaacgatcggaaatggaaatattgccggtgtagccacggcgattacggttggaggtccgggggctttgttttggatgtggctcgtcggtcttttagggatggctacaaaatacagcgaagcattgctcgccacgaaataccgcgtcaaaaatgagcggggcgaatattcgggcgggccgatgtactatgtcgaaaaagggctcgggaagaagtggaagccgcttgccgttttatttgcattgtcaggtgtgcttgcctcttttggaatcggggattccgtccagtccaacacgatttcggaagtcgttacacagagcttcgggattcccggctggatcatcggccttgtgctcgcggtattgacggctgcgatcatcttcggcggttttcagcgtgtcagcacggttgcgagcatttttgtgccggtcatggcgatactttatatcggcggatcactgatcattattttccttcattatgatcaaatcattccggcgttccagctgattttttatcacgccttcaacccggtgtcagccgcggggggctttactggcatggtcgtctctgaggcgatcagaaacggaatgtcgaaaggaatcttttcaaatgaagctggtcttggtaccgctgctttaatcgcaggaaacgcgaaatccgatcaccccgtcaaggccgctttggttgcgatgacgggaactttcatcgttacattgatcgtttgtacgatgacggggcttgtcctcattatcacgggattctgggatccttcaggcggtctgctttctggtgttgcccacgatgcatcgcttgatgccggcgcgctgacaaacgccgcgtttgcttcttcgctgggagccgcgggcaaatacatcgtcacgttttcggtgattttctttggctactcaaccattgtcggttggtatgtatatggagaaaaatgtctggaatatttagttggtttaaaatgggtgccgctttatcgtgtcgtttatgtcattgctgcatattacggtgcagtcgcaagcctgaatactgtatgggcttttgccgacgcggcaaacgcattaatgatgatcccgaacttgatcgcccttgtgctcttatggaaagtcattcgggcggaaactgacgatttctttttgcaccactataataaggaaaaacaaaagtcagccggcttgaaagcgggctga

SEQ ID NO: 3860 - DNA, 1239 bp, Bacillus licheniformis
atgaacaatcgaaacaatccttttaaatatcaatatgaccgtttagaagatgtggcagatcatatcagcgaggtgctggactgtccgattacgatagaagacatcaaccaccgcctccttgcttacagcacccacagcgactacacggacccggcgagaacgtcaacaatcatcggaaggcgcgttccggaaaaagtcatcaacaagctttggaaggatggaacgattcccgccttgatgaaaaccgacgaaccgatcagggtcgaacaaatcgatgaagtcggcctgtcgagccgcgtggcgatttcaatctggaaaaacagcgaggttatcggttttatctgggcgctggaaagccaaaaaacgctgtcggaagacgagcttcaccttttgaagctggccgcggattccgtaaagaacaagctgctgccttatcaggtccgaaaaagaaaaaatgaacagcgcagccaggaatttttctggaagctattgaccgggcacatttcggaagatcaggaaatctccgacggctttcaccagcttggcatcggagttccttcaacttattcggtcatcatcatccggctgaaagacgaaatcgaagaaaaaaccgaaaagcagctccattacttgctggaaacgacgcagcagctgcaaatccttctggctacaatcgactataatgagctgatcgtcctcgcttcgtcaaaaacggggcaaaaagggcagccgttcaatgatttaaagcaatttgccgcgaatatacaaaagcaacttgaagagcgctataaactgaataactgcacgatcgcgatcggcggaatgtacagcttgatcacccttgtacaccagtcttatcaggaagcgctctcggcgctgaaggtcaaggagcgttttcccgatgagacaaggcacctcgtcagcttttcagagctcggcatctaccagtatctcgacgtgctcaacgaaaaacggaaacatgcaagctatccaaactattctttaatgcagcttgaagcatatgataaagagcaccactccaatcttgtcgagacgcttgaacaattcatcgaatgcgacagcaacgtcaacaccgccgcaaaaaagctgaacattcacgtcaacacgctgaattacaggctgaaacgcatcagcaaaatcgccgaaatcgatttaaaaaacatcaatgaaaaatttacgatttatcttgaaatcaagcttcgcaacatgcatttgtga

SEQ ID NO: 3861 - DNA, 1140 bp, Bacillus licheniformis
atgattatcggcgtaccgaaagaaatcaaaaacaatgaaaaccgtgttgctttgactcccggtgcggcttctcaattgatcgcggcaggacaccgcgtcatcgtggaaaaagacgcggggactggaagcgggtttgaaaatgaggattacgtctcagtgggagccgagatctcagaacaagcggaagccgtctgggaagcggctgaaatggtgatgaaagtcaaagagccgctccctgaagaatatccgtattttagagaaggtctcatcttgttcacctacctgcatctagccgcagagccttccttggctgaagcattaaagcagaaaggcgtgacagccatcgcctatgaaaccgtcagcaatggccgttcccttcctttgctgacgccgatgtctgaggtagccgggcggatggccgcccaaatcggcgcgcagttcctcgaaaagccgaaaggcggaaaaggcatattattggccggtgtacccggagtcgcgcgcgggaaagtgacgatcatcggcggaggcgttgtcggcacaaatgcggcaaaaatcgcggcgggcctcggagccgacgtgacgatgatcgatttaagcgcggatcgcctgcgccagcttgatgatcaattcggcaatcaaattaaaacattgatgtccaatccggtcaacatcgccgatgccgtagcggaagccgacctcctcatctgcgcggttctgatcccgggtgccaaagcgccgactttagtgacggaagagatggtcaaacagatgaaaccgggctctgtgattgttgacgtcgcaatcgatcaaggcggcatcgtcgagacggtggatcacatcacaacccacgacaatccgacctatgtcaaacacggagtcgtccattacgctgttgccaacatgcctggcgccgttccgcggacatctacagttgcgctgacgaatgtaacagttccgtatgcgcttgaaatcgcgaacaaaggcgcggaaaaagcgattcttgaaaaccctgcgctaaaagccggcgtcaacacagcaaacggccatattacttatgaagccgtagccagggacttaaactatggctacgttcccgcagagcttgcgatcgaaaattcgtcgtcagccgccggcgcatag

SEQ ID NO: 3862 - DNA, 246 bp, Bacillus licheniformis
atgtttttcgtacagctgttcatatttttaatgctgagcgcctgtttttggcttttcattgcatcattcaagaaaaaggcttttgctgttttattattgctgacggctgcggcagttctggcactgtttgccgcagtcggcgatgcctctgaccgggcgctgtggagaatcgtcctgtttggggcggttcctgtttctgcaattgcggcaaaattgattcaggatcgccggaaaacggaatcataa

SEQ ID NO: 3863 - DNA, 594 bp, Bacillus licheniformis
gtgttttttgggaaaacaaaaccgcacaagtccgacagggtgcctccaaaccaaaatgtcacaacatcttttcctgttcttcatgcaggacatgttccggaatacgaagacctgtcaaaatggaatttgcaaatttacggacttgtcgaacagccgctcctgctgacgttggatgatcttcatgagatgccgcaaagcgaagtgtccaatgacattcattgtgtaacaggctggtccaagctcgataatgtttgggaagggatcaagacaaaggagatcgctgaaagagtaaagccgcttccggaagccagatttgtcatcttgcatgcagaggaaggctggacgacgaatgttccgctcgaagactttttgaaggattcgtctcttttggctcattcccataacggcgccccgctcacgccggagcacggctttccgctcagagcggtgatgccgcatttgtatttttggaaaagcgccaaatggctgaggggcattcagtttacaaaggaaaaccatccgggcttttgggagaaaaacggctaccatcttaggggaaatccgtggaaagaagaaagatacagctttgattag

SEQ ID NO: 3864 - DNA, 597 bp, Bacillus licheniformis
atgaataataaaaaacttcgcgccggcgatatggcgcttgtcggaatgtttgccgctctgatggggatcggcgctaatatcacttcgtttgccccgtttctgcaaatcggcggtattccgcttacgatgcagcctttcttctgtttgcttgccggacttttgctcggccgtaaattaggtgcgctgtccatgattgtctatgcgttagtcggctttattggcgctccggtattcgcttctttttcaggcggtatttccgttctttttaaaggaagcgcaggctttattctatcctatattcctgccgcatatgccgcgggctggatcacggacaaactatccgaaccgaaaacaggccactttttcgcagcctcattgatcggtacgctgatcatttatctgatcggcgtcaactatacgtatctcgctttttccacttggctcaatacaccgatgtcatattcagccgtttggaaaatgatggcctggttcttcgtgaaagacttggcattctccgttctgctcgccgcgctcgcctcaaaggttttccgggcggttcaaaaaggcgcaggcttcagaagaaatccgactttttaa

SEQ ID NO: 3865 - DNA, 1329 bp, Bacillus licheniformis
atgaatgcagttgtgattgctgttattgtgatgcttatattaagcctgctgcgggtcaatgtcgttctagccctgattgtgggcgctcttgccggcggtctgacgggcggtctcggtctcggccagacggtcagcgtatttacggaaggactcggaggcaacgcaaccgtcgcagtcagctacgcgctccttggcgcttttgcagtcgctttgacgaaaacgggtcttccggatgccatggttgaagctgctgtcaagctgatcggcaaagaaggcgatacaaggcgcaaaaccctttcaaaagcgctgatcgtcttcgtgattttaattatttcttgtatgtctcaaaatgtcgttccggttcatatcgcatttattcctgttttaattccgccgttattgaaaattttgaatgagctgcaagtggaccgccgcctgattgcgtgtgcgatgacattcggattgacagctccgtatattttgcttcccgtcggcttcggccagattttccaggggattttgaaagacaatatgaaagatgcaggcctttctgtcacattggctgatattccaatcgccatgatcattccgattgtcgggatgattgccggtttggccgttgctgcttttgtgtaccgcaaacctcgcacatatgaaatgaaggaaatcgccggtcaaaagtcggcgtcctatacgaagaaaagcctttcgattgccgttttggccatcgctgtatcattaagcgtacagctctatttgtctcagagcttagacgtcgacggaatgatcttgggcgcgctcagcggtttggcggtcttgtttttaagcggagcgatgaagcgcggcgaagcggacgaattgatcactaacggcatgaacatgatggcgtttatcggatttgtgatgctggccgcggccggttttgccaatgtgcttgaaaaaacgggcgatgtcaaagcgcttgttgaagcgtcaacaggtttcatcagcaataatcaggtgctcggcgcattgctgatgctggttgtcggcttattgatcacaatggggatcggttcctcatttgcgacgattccgattatcgcaacgatatttgttccgctttgcatgcagcttggcttcagcccgatggcgacaatcgccattatcgggacggccgcagctctcggagacgccggttcacctgcgagcgacagcacgcttggaccgacatccggcttaaatgcagacggacagcaccaccacatttgggacacctgtgttccgacattcatcttctataatattccgctgattttgttcggctggatcgcggcgattgttctttaa

SEQ ID NO: 3866 - DNA, 1491 bp, Bacillus licheniformis
atgttttatgcctttaaagatttcgaaaaaaaagaaacgcttttaatcggactgtttaaaaaaatccggctgtacggtaaggctgaagaaatcgaccgccttttgaacggccagctttctcagctgctgaaagacggggatgtatcttccaaaaaagcgaaagtgtctaaaatatttaccccttcgcttcagggagtcaaacgcatttatatcgtcggattgggccgtgaagcggaatttaccttcgaggatgcgaagcagtgctttgccgaagctgttcagctgattcacaaagatcgaaagcaggagttaaccgtcatgctcgacagcttcgtatccgaagaagtcccagctgctgacgccgcacatgcattggctgaatcgtgcatgctgtcatgctatgaagtgcaggattacaagcacagatcaaatgtgcctgatcaatgtctgcaaagcgtctatgttttgacagaccatgacctgaaggagattcaggcgagtctgcatgtcggacaggtgtacggaaatgcgacgaattcggcgagaaccctcgtgaacatgccggggaacatgctgacagcggcggatctcgcgtcatatgccgctgaattggcggcgaaatacgaatttgaatgtgaaattcttgaaaaggctgaaatggaagagctcgggatgggcggtctcctcgcggtcaaccaaggatcagaagagccgccgaaaatgatcgtcttgaaatatcaaggaaaagaaacatgggatgacgtcatcggtttagtcggcaaagggattacgtttgataccggaggctattcgattaagacaaagagcgggattgtcggcatgaagtccgatatgggcggagccgccagcgttttgggagcgatggaagcgatcggcgaattgaggccggaacaaaacgtgcttgccgtgattccgtcgactgataacatgatttcgggaagcgcaatgaagccggacgacgtcatcgtttccttgagcggcaagacgattgagatcttgaatacggacgccgaaggaaggctggcgctcgctgacggactgacatatgcgaagcaccacggagcttccgtgctgatcgatgtcgcgacactgaccggaggcgtcgtcgtagctctgggaacggaaacgacgggagcgatgacaaatcatgatccgctttatcagcaggtgagacaggcggctgaagaagcgggagaagcgatttggcagcttccgattactgaaaaagacaaaaaaagagtaaaaaacagccaaatggccgatcttaacaattcaccgggcagggaaggccatgcgattatggccggaacgttcctcggcgaattcgccgagcagacgccatgggttcaccttgacatcgccggaacggcaacgacagctcaaaactcatgctttggaccgaaaggcggaacgggcgtgatggtgagaacgcttgtcacgtttgtcgagcggttttcgggaaatttgtag

SEQ ID NO: 3867 - DNA, 477 bp, Bacillus licheniformis
atggaaatcctcacaaactttcctttgctggcgagctttgccgcgatctttttcgctcagtttatcaaggttcccatttactttgtcgtctcaaaaaaatgggattggcggcttgtcacaagcacgggcggaatgccgagttcacactcagcggccgtcacggcgctctcgaccggtgtagctcttgatcacgggatggattcttctttgttcgccgtttccgcaatatttgccgttattacgatgtttgatgcaaccggagtgagaagacatgccggagaacaagcaacagtgatcaaccggcttgtccgcgattttaaccgctttgtcaacgaagcgaaggatttccctaaaagccatcaggaagaaaaacagaaaaagctgaaggaactgctcggccatcagccgattgaagtgtttttcggcggcctgaccggcattgcactgacgctgcttctcgattatttattgatgtaa

SEQ ID NO: 3868 - DNA, 675 bp, Bacillus licheniformis
ttgagaaaagtgatgactatgttccggcgtttcttgatgacagttttgtttgtccttgcttttatgacgaccttctttgccgtttcaggcgtggaggcacaggatatatccagctgggcaaaagaacgcgatctgtccttgaaacagctgatgctcacctttaaatcacttccggaagaaaaagcggaaaagacgtctctgtctgccgcagaacaaattaaaaacaaaccgaaatcgcttgaagacgcgtttgactggagcaagtatccgaagcaaaaagtcaccgcgaccggatatacagcaggggctgaatcaacgggaaaacagcctcatcatcccgattacgggattacatattcgggagtcaaagtaaaaagagatttatattcaaccgttgcagccgacccgtcggtctttccgatcggcaccatattgttcatcccggactacggctatggggttgttgcggataccggatcagccattaagggaaaccggctcgatttgtactatgagacggttgaggatgtttataaagaatggggcaaaaaaacacttgatgtttatgtcattaaaaaaggaaacggcaccattaccgaagaggatctcctgaagctgaatgaaaataaatcgatgcaagtattcagacaaaaatataaaatggcgaaagaataa

SEQ ID NO: 3869 - DNA, 321 bp, Bacillus licheniformis
ttgattagtttaccagttgtcatcatttcagttgtcttatttttcgtcctgtttttcggcatcggttttctgctgaatatgctgctcagaatgtcatggatcatggctgtcatttatccaattgtatgccttttcattgtgaataaagaaaagctgattcgctatgtagaggcgccgggagaggcattttccggcctttttgacagagtggcttctttggctgctgccgatatcatcattttagccagcggaatggccggagccctgttgtcgggcgttacgatcaaagcgctgcgaaaaaggggatatcaaatgttttaa

SEQ ID NO: 3870 - DNA, 171 bp, Bacillus licheniformis
atgatatattatcagaaaattaagaaaaaaggtgtgtatccgatgaagacaacgtcaacccatcgacttgaatctacctgtacattctgttcaggaaaaggctattttcagcttctgctcggcggttcggaaacgtgcagcaactgcaagggaacaggaaaagaccgttga

SEQ ID NO: 3871 - DNA, 1212 bp, Bacillus licheniformis
ttgaataagccaaaagtagtagtattaggtgcaggttatggtggattaatgaccgttacgagacttgttaaaaaaatcggcatcaatgaagcggatattacgcttgtcaacaagcacaattaccattatgagacgacctggatgcacgaggcgagcgcaggtacgcttcatcatgacagatgccgctatcagattaaagacgtcatcaatacatcccgtgtcaatttcgttcaggatacggtaaagaaaatcgataaagaaggaaagaaagtcgtccttgaaacaggagagcttagttacgactatcttgtcgtggcgctcggctccgtccctgaaactttcggaatttcgggattgaaagagcatgctttctctatttcaaacatcaattcgtcccgccagcttcgcgagcacattgaatatcagttcgcgacgtataacacagaagccgagaagcgcccggaacgcctgacgatcgttgtcgggggagctggttttacaggcattgaatttttaggtgaaatggccaaccgcattcctgagctgtgccgcgaatacgatatcgaccgccagcaggttcgtttaatttgcgtggaagccgcgccgtctgttctcccgggctttgaaccggagcttgtcgattatgcggtcaactacctcgaaggaaaaggcgttgaattcaaaatcggcacggccgtgaaagaatgcacgcctgacggaatcatcgtcggaaaagacgatcagaccgaagaaatcaaagcaggcactgtcgtatgggccgcaggcgtccgcggcaacccgatcattgaggaatccggctttgaaaacatgcgcggccgtgtgaaggttaaacctgacctgcgcgttgaaggccatgatgatatatttgttatcggagactgctctttaatcataaatgaagaaaccgaaaggccttatccgccgactgcgcagatttccatgcagcaaggcgaaacgtgcgcaaacaatctggccgcactgattcacggcaaagaaacggaaacgttctcatttgataacaaaggctctgtcgcttctctcggcgaacacgatgcaatcggcgtcgcattcggcagaaagatgacgggaacgacggcgtccatgatgaaaaaaatcatcgacaaccgctcgcttttcatgatcggcgggccgggacttgttctgaaaaaaggcaagtttaaatttttctga

SEQ ID NO: 3872 - DNA, 132 bp, Bacillus licheniformis
atgaaaattgttcttaattatatcatatcacataaaataaatacgagcgcgtctgtttttttaggcgcggaaaataataccgtcagagcatatttaaccttgaaaaagcaattgcaagcggctatgatgtag

SEQ ID NO: 3873 - DNA, 999 bp, Bacillus licheniformis
atgcgtgaagacacaaaagtatatgacatcacaattatcgggggcggccctgtcggcttgtttaccgcattttacggcggaatgcggcaagcgagcgtcaaaattattgaaagcctgccgcagctcggcggtcagctgtccgctttgtatcccgaaaaatacatatacgatgtagccgggttccctaaaatccgcgctcaggagctggtcgacaatttaaaagagcaaatggcgaaattcgatcagaccgtttgtttggaacaagccgtcgaaagcgttgaaaaacaagcagacggtattttcaaactcgtcaccaacaaagaaatccactattctaaaacggtgattattacagccggaaacggagcattccagccgagaaagctcgagcttgaatctgcggcacaattcgagaatgcaaaccttcattactttatagatgatctgaatcaatttgcgggcaagcgcgttgcggtattgggcggcggcgactccgccgtcgactgggcgctcatgctggaaccgatcgcaaaagaggtgtcaattattcatcgccgcgataaattccgcgcacacgagcacagcgtcgaaaacttgcgcaattctaaagtcaatgtattgacaccgtttgttccgaccgagctgatcggcagcgagcgaatcgaacagatcgtcattgaggaagtgaaaggcgagagaaaagaaatcatcgatgtcgacgatgtgatcgtcaacttcggttttgtttcatctctcggaccaatcaaaaactgggggcttgaaatcgagaaaaattcgatcgtcgtcaagtccacaatggaaacgaacatcgagggattctatgcagccggcgatatctgcacatatgaagggaaagtcaagctgattgcgagcggatttggtgaagcgccgaccgctgtcaacaatgcaaaagcttatatggatcctaaagcgcgtgtgcagccgctgcactctacaagcatgtttgaaaacaaataa

SEQ ID NO: 3874 - DNA, 201 bp, Bacillus licheniformis
atggaaaaaatcaactgcagaagctgcggcgggcttacgccgtacgattcaaaagtctgcgaggcatgcggatgcgaaaaaccgcttccaaaatcacagaaaattacggaccggattgtcttgactgcggcgggagtcgtcggcatcttaacaattgtgctgatattgggaacgatcttctcatatttgaatatcatataa

SEQ ID NO: 3875 - DNA, 225 bp, Bacillus licheniformis
atgtcttactacaacaatcgcaatcaagagcctctgccaaaggaagatatcagtacgtgggaatgtacggctgaggactgcaacggatggatgagaaaaaatttcacgagcagcgaccgccctttatgccctctgtgcaacaaggaaatgataagcggaagccgctatatcacctctatcaccaacaacacgagcaatctgaatcgcatctttaaccagaaataa

SEQ ID NO: 3876 - DNA, 480 bp, Bacillus licheniformis
atgaaactcgtatcaacgcacgccttgtcaaaagcggacgttaccgcgttttttcatacacattggggaagtccggaaatggtcaattcacacggaacattccgctgcgatgaattggaaggattcgctgtaacagatgaaaaaagcgacattaaaggcttgattacgtacttcatcgctggaaacgaatgtgaagtcgtctctttggacagtgttgtcgaaaacaaagggatcggctcactccttttacaagaagtggagcgtgtttcaaagcgaaaacagtgtaaatcgattaaactgatcacgacgaacgataatatgcgggcgcttatgttttatcaaaagaggggctatactttggccgagttgtatgtaaacgcagttgacaaagcaagaaaagtaaagccggaaattccctttgtcgctgataacggcattccgattcgggatgagattctattggtgaaagatttagcatag

SEQ ID NO: 3877 - DNA, 366 bp, Bacillus licheniformis
atgagcgaaaaaacggtcacggttacggaagcggctgctcttcatatcaaggatatgatgaaagagcatgaagaggagaacgcatttttgagaatcggagtaaaaggcggcggatgcagcggcctgtcatacggcatgggttttgaacatgaaaaaaacgaagacgacaatgaattcgtccagcatggaatcacagtgcttgtagaccaagaaagtctggatatcatgaacggtacggtcattgattttaaacaatcgatgatgggcggaggcttcaccatcgataatccaaacgccatcgcttcatgcggctgcggatcatcattcagaaccgcagcgaatgcggggaagcctgaagagtgctga

SEQ ID NO: 3878 - DNA, 858 bp, Bacillus licheniformis
atgaattcttttcgttttactaaaatgcacggcttaggaaacagctatatatacgtcaatcagtttgaagaacatctccctgaggagctgttgtcggatttggccgtcaaagtgtcttccgtttacaccggaatcggttcagacggaatgattctcatctgtccttcagatcgagcgccggttaaaatgcggattttcaacagcgacggatctgaaggcaaaaactgcggaaacggtttgcgctgcgttgcaaaatacgcgtatgaacataaactggtagaggaaacgtcctttttaattgaaaccctttcaggcttggtaaaggctcaggttgaggtggatgaaggaaaagttgtatcggctacggtcgatatgggcgaaccgcgacttctcaaatcagatatgccgatgcggggtgaacagggttcagagacgatcaatgaaaagatgatattcggcggccgtgaaatgaagggtaccgctgtatccatgggcaatccccacatcgtcttttatttagacgatattgaaaaagccccgctgacgacgatgggaccgctcattgaaaaagatgaaaggtttccggaaggggttaatgtagaatttgttgaagttgaaaacgaaaatgaactccatttccgcgtatgggaaaggggatcaggaattacccaggcttgcggaacaggcgcctgcgcagccgcagtgagttcggtgctcaacggctattccaaacgggacacggacattaccgtccatctcgccggcggcgatttgatcattaattggaaaaacgacggacgcgtcatgatgacgggacccgctgaaacggtatgtgaaggcgagttttttatatcataa

SEQ ID NO: 3879 - DNA, 81 bp, Bacillus licheniformis
ttgtatccatccctttcagcttttatactagaagaaagaaaaaaatgtggaggcggctatgaattcttttcgttttactaa

SEQ ID NO: 3880 - DNA, 1218 bp, Bacillus licheniformis
atgaacattttatggggacttcttggtattctggcgattttcgcgattgctttcctgctttccgagcataagagcaaaattaacataagaacgattttaatcggtttggcgatccagctcctgttcggattcatcgttctcaaatgggaaacggggagggaagcgtttctttggtttacaaaagccgttcagcatctcgtcaattatgcgaatgaaggcatcagctttctcttcgggcctctcttacaagtaggcgacagtgctgcctttgctttaagcgttcttcctgttatcatcttcttttcatctctgattacagttctttaccatttaagaatcatgcaagtgatcatccgcttcatcggcggcggattggcaaaactgctcggaacaagcaaaacggaatctctttctgcagctgccaatatctttgtcgggcaaactgaggcgccgcttgtaattaagccgtttatcgcaaacttaacaaagtcagagctgtttgccgttatgacaggcggactcgcttcagtggccggttctgttttgttcggttacgcccttctcggggttcctctcgaatatttgcttgcagcgagctttatggccgcacctgcgggcttgattatggcaaaaatgctcattcccgaaacggaaaaaccgaaaattgaagaaaaagatattcaaatggctgaagacgaagacgcagcaaatgtcatcgatgccgcggcaaaaggggcatcaacgggtctctctcttgcgttgaatgtcggcgcgatgctgcttgcttttgttgctttgattgccgttttaaacggaattcttggaggagtcggcggatggttcggctttaaagacctttcactcgaatatattctcggctatgtatttgccccgctcgcctttgtcatcggcgtgccatgggatgaagcggtccaggccggaagctttatcggtcaaaagctcgttctgaacgaatttgtcgcttattccaattttgctccgatgtttgatcagctttccgtcaaaacagcttcgattatcagctttgcgctgtgcggtttcgcaaacttgtcttctgtggcgattttgcttggaggacttggaggaatggcgccgaaccgccgttccgatatcgcccgtctcggcttgaaagccgttgcggccggaacattggccaaccttttaagcgcggcgatcgccggaatgtttatcggataa

SEQ ID NO: 3881 - DNA, 126 bp, Bacillus licheniformis
atgaactcatttaaaaacggggtcatcttggtgatctcgttttttcatgcaaagcctttaaatgaaagggtttacataaaaagagaaaaaattcgtgaaaatttttgtggacaggccaatcattaa

SEQ ID NO: 3882 - DNA, 237 bp, Bacillus licheniformis
gtgtttccaatcgttgagttttgcgtcagcaatcttgcccaaggttctcaggaggcaaaggaaatattggagaaagatccgaatttggatgtcgttgaatacggctgcctgagttactgcggacaatgcatgcagacgatgtatgctcttgtaaacggagaaatggtgacagcgaataatccggctgaattggtcgaaaatatatacaagttcattgatgaaaatgaactcatttaa

SEQ ID NO: 3883 - DNA, 1068 bp, Bacillus licheniformis
atgagaaatttagtcttgctcggcggcggatacgggaatatgcgcatcattcatcgtttgctgcctaatcagctgccagatgatgtgatgatcactttaatcgacagaaacccttaccattgtttaaaaacggagtactacgcactggctgcggggacgatttccgatcatcatatcagagtgtccttcccggatcacccgaagttaaagattgaatacgggacgatttcgtctgttgatttggaaggaaaaaaggttttgtttcatgacagggagccggtatcctatgatgacgccgtcatcggactcggctgtgaagataaatatcacaacgttcccggggcgcctgaacatacctacagcattcagacaatcgatcaatcacgcagcacgtaccaggcgctcaacaacttaaatgcggaagccaccgttgcgatcgtcggggcaggactgagcggcgttgagcttgcgagcgagctgagggaaagccgaaaagatttgaacatcatcctttttgaccggggagaattaattttgtcgagcttcccgaagcgtttgagtaaatatgtgcaaagctggtttgaagagcacggcgtcaagattatcaactgcgccaatattacaaaggtggaagaaggcatcgtctacaatcatgacgacccgatccaagccgacgccatcgtctggacagcggggatacagccgaatcaaatcgttcgggatctcgatgtggaaaaagatccgcaagggcgcgtcgtcctgacgccgcaccataacctgccgggagacgaacacgtttatgttgtcggcgactgtgcaagcctgcctcacgcgccgagcgcacagctggccgaagcccaggcggaacaaatcgtccaagtgcttgaactgcgctggaaaggcgaacctcttcctgaaacaatgccgaaattcaagctgaaaggcgtcctcgggtcgctcggcaaaaaagccggtttcggtttagttgctgaacggccgttgatcggcagagtgcctcgcctgctgaaatccggcttgctttggatgtataagcatcataatgggtag

SEQ ID NO: 3884 - DNA, 372 bp, Bacillus licheniformis
atggaagtctttgaagaatatttagcgggaattgatcatccggaacatcgtgcccggatggaagaagtattgggttgggtagcggagacatttccaaatttaacgccgaaaatcgcttggaatcagccgatgtttactgatcacggcacatttattatcggctttagcgtcgcgaaaaatcatttggctgtcgcccctgaaagcgctgggatcgatcgtttttctgaggaaattgtgcaggccggctatgatcatacgaagcagcttgtccgtttccgctgggatcgtccggtggatttttcattgcttgagaaaatgatcgagtttaatattgcggataaggcggactgctcgactttttggcggaaataa

SEQ ID NO: 3885 - DNA, 192 bp, Bacillus licheniformis
gtgaaaaagatgattgccgttgcgttgactgccgtctttgcaagccttgtcgttttaagtttttcgtctcagccgaagggagatgccgagtttgccggccgagccatttttcttgacgataagccggctcagctgatggcgggcagagcgatctttctcgacagctttgacggaaattcgccagccgcctga

SEQ ID NO: 3886 - DNA, 1107 bp, Bacillus licheniformis
ttgaagacaaaaattgcgtatgaggaagttgcgggaatgcttaatcaatggtatgtcatgatcaagcgtcacgaagtatcacaagcggtctcgattaaatgcgacattgagcaccagctgccgaatatggaagaaaatcaagatctgcttctttattttaatcttttagactatcggcacaagctgctgacagaagagtttgccgcttccaacaaactgttcgaggatattcaggagcaaaaagccgatatgcaaagcacagatgacatgattgaatattattatttctttttcgctggcatgtacgaatttcataagaaggattatacaaatgcaatcaattattataaattagccgaggaaaagctcaggacaatccccgatcaaatcgaaatcgccgaattccattacaaactggctatcgcctactatcaaatcaaacaaaatttcctttccttaaaccatgcgaaaacagctctaaaaacctttaaagcacatgatgattacattcaaaaagcgatcagcaacgatatgctgatcggggcaaataaactcgatttatttcgttttgatgaagccgaacagcattacaagcaagcccttaaagacgcggcactgatcaaacatcatgtcctcctcggcatggctcaccacaacttagggttgagctatgtcaatcgcaacctcctcacattggctgaacatcatttcaaagaagcgctgcttatcaaagagcatgaagaatcggtttacggcatccattccatgtttgaactgacacatgtgctgtacaaatcaaatgttgtcaaagaagcacgcaaattgtatgaaaaaggatttttccgtgcggaaaaagcaggagaaagggaatatttgtcgaaatttaaacttattcatgctctgtatgatgaacaggatccacttacggttgaacatgctttagaatatcttaaaacgatcaatctctggacggatgtagcggaattaacatttgatatcgcactttactataaagaaaatggagatgcagacaaagctgccgaatattttgaagaatctcatcatgcaagagaccaaattcttaaaagaacggaggagttaaagtga

SEQ ID NO: 3887 - DNA, 501 bp, Bacillus licheniformis
atgaatcaagatgtaaaagagtttgtaggaagccatatgatctatacgtatgaaaacggatgggaatatgaaatctacattaaaaatgaccataccatcgattaccgcattcacagcggaatggttgggggacgctgggttcgcgatcaaaaagccgatatcgtcaagctgactgaaggcgtctataaagtatcctggacagaaccgacagggactgacgtttccttgaacttcatgccgaatgaaaagcggatgcacggcatcatcttcttccctaaatgggttcatgaacgccctgatattacagtctgctatcaaaatgaccatatcgacttaatggaggaatcgcgcgaaaaatatgagacgtatccaaaatatgtcgtaccggaattcgccgatatcacatttattgaaaatgccggaatcgataatgaagatctgatttcaaaagccccttatcccggaatgacggatgacatcagggcaggaaagcgggtataa

SEQ ID NO: 3888 - DNA, 267 bp, Bacillus licheniformis
atgtcaagcattgaaggacaaatcatgtcaggcgattttgatgacgaaatgaatgttttttcattaaagaaaatcaagcagtttcaaacgcagaccagtctgaaagaaaaccagctcaaggctttacagcactatttaaggcagcatgagcacgatgaggacggacagatcatcaccctctacgaccaaatgcttgtacctttgtcgcaagatgatataaaagcgctgctggatgacttaacaaaagtccagtcattatatcattaa

SEQ ID NO: 3889 - DNA, 327 bp, Bacillus licheniformis
atgaaaaaacaagccgagctttttgtttacggtgccgacgttctttgtccaagctgtgtgaaccttccgtcatcaaaagaaacgtatgagtggctagaagccgccctgaaaagaaaatatcccgaccagcctttctcaatcacgtacattgatatccatcagccgccggaaaacgaccctgaaaaacaggaaatctccgaaaaaatcctgaacgacgaatatttttatccgctcgtcatggtcggtgatcaagtggtcggcgaaggaaatccgaagctgaaagacgtgtataaagaaatggaaaagcaaggatataagcctgcatga

SEQ ID NO: 3890 - DNA, 240 bp, Bacillus licheniformis
atgacgacagaggtcgaaatgaaagaacaagtacaggaagtgctggacaaacttcgtccgtttttactccgtgacggcggtgactgtgaactcgtcgatgttgaagacggcatcgtcaagcttcgcctgctcggcgcatgcggaagctgcccaagttccaccatcacccttaaagctggaattgagcgcgcccttttagaagaagttccgggcgtcattgaagtagagcaagtattttaa

SEQ ID NO: 3891 - DNA, 1962 bp, Bacillus licheniformis
atgaagcagctgataaccgaaaaagacctcatcaagcttgtatccattaccgatccccagtattcgcccgatggtgcaaaaatcgcctacgtccaaacaaaagtaaacgaaaaacaggactcatatgattcgcatatcatgatctacgaccgcgaaaaacaagcttcggtgcaatggacgtttgggaaaggcagaaaccagcatccccgctggtcgccggacggcaaataccttgcatttacgtccaatcgcgaggaaaccgcacaaatttacgtgataagcgccgccgggggagaagcgagaaaagtgaccgatattccctatgatgtatcacagcctgaatggtcgccggacggcaagtcattgctttgttcagtgaagctgacaaaagaggaaagcgtcgacgatgagaagaaaaccgagattgaagaccacgaaccgctggaagtcgattctttgtcatataaagcagacggccaagggtttaaaaggggaaagtatacgcagcttgtcctcgttcaagtggaaaccggggaaatgaaacagctgaccgatcttgaacgcgaccatttcagccatgcattttcaccgtgcggagatcagattgcattttgcgccaatcaaacggatatgcgtgtgaacgatgtctacttgatgaacctttcgacaggtgatttgaagcgcctcacaggtcaaaacggcattttttcttcactatcgttttctcctgacggcaaacaccttgcatttatcggaaacgagaaagaatatcaaaacgccacgctcgataaagcatggctgtatgatattgaaacaggaaaactaacgtgtctgacggaaatgcttgacgtccatctcagcgatgcggtggcaggagacagccttgtcggaggcgttcttccgaaaccggcctggaccaaagacggaaacggcttttatgtcatcggatctgaccagggttctacaggcatttactacatatcaatcgaaggtcttgcttatccggtccggttggaaaaagagcatgtgaacggattcagcctgcatccggacgaaagtggctttgcggcatccatagccctgcccgtccggccgagcgaactttaccatctccaattgggtgaagaaaaagcggagcgactaacagatgccaaccaagcgtttacggaagaacatatcatatcggaaccggaggagcttcaatttcaggcagcggacggtctgacaattcacggatggctgataaagcccgcccaatatgaaaaaggaaacacgtatccgctcattctggaagtgcacggcggacctcacgccatgtatgcgaatgcttattttcatgaatttcaagtgctggccgcaaagggaagcgccgtcgtatatgttaacccgcggggaagccacggctacggacaggattttgtcaaccgggtgaggggcgactacggcggtggagattttaaggatgtaatggcggctgttgaccacgtgcttgaacattatgatttcgtcgatcaagaaaggctcggcatcaccggaggaagctacgggggctttatgacaaactgggctgtcggccacacgaagcgcttcaaggccgcagtgacacagaggtccatttccaactggatcagtttttacggggtaagcgacatcggctattttttcacagactggcagctcggtgcagacctttttgaagatccaggcaaactgtgggagcattcgccgctcaaatacgcggacaaggtggagacccctcttctcattctgcatggcgaacgggacgacaggtgcccgattgaacaggcggaacagctgttcacggcgctgaaaaaaatggggaaagaagtaaaactcgtcagatttccgaacgcgtcacacgatttatcaagaagcgggcatccgaagcagcggatcaggcggcttgagtatattgcaggctggtttgaagcttatttataa

SEQ ID NO: 3892 - DNA, 921 bp, Bacillus licheniformis
atgactgaggctgacatgctgttttccgttacggttcccggaagcacggccaatcttggcccgggctttgattcagtcggcatggcgctgtcccgctatttaagactgtctgtttttcctcatgatgagtggcgttttgaagctgaaacagaagtcgtagcgggaatacctgaaggaacggacaatttaatttaccaggtggccaaacggaccgccgcacacttcggaaaagaacttccgccaagccttgtcaaagtgtggagcgatattccgcttgcgcgcggtctcggcagcagcgcagccgcaattgccgctgcggttgagctggcgaacgaacttgccgatttgaagctttcagaccgcgagaaacttcattttgcgagccttgaagaaggccatcctgacaatgccggagcatcgcttttcggcgggcttgtcatcggacttcatgaggaagatgaaacagagatggtttctatgaaagacatcgatttggatgtcgtcgtcgtcattcctttttatgaagtgctgacaaaagatgcgcgggatgttcttcccgaaagcctctcttatccgaaagccgtggaagcaagcgcggtcagcaatatgctcgtcgccggactgatggcgaaagattggaagcttgtcggccgcatgatgcaaaaagacctctttcaccagccataccgaagggcgctcgtccctgagctttcgaaagtggagcatgaagcaggccaaaacggcgcgttcgggacggctttaagcggagccggcccgacgatcctttcctttattgaaaaaggaaaaggagaggcgctgagaaaccagcttgcgtccaagtttccgcactgtgaggtcgactgcctttatgtcccggatacaggcattatcgttgaaagaaaatcagtaaacagtgtttaa

SEQ ID NO: 3893 - DNA, 1068 bp, Bacillus licheniformis
ttggagctaatgtggaaaggactcatccatcaatataaagaatatttgccagtaacggacaaaacaccggaattgacgctgaacgagggaaataccccgcttatttatctgcaaaacctttcgaaaaagctcggaatcgagctttatgtcaagacggagggtgtcaaccctacaggctcctttaaagaccgcgggatggtcatggcggtcgccaaggcgaaagaagaaggcaatgacacgatcatgtgcgcttcgaccggcaatacgtcggctgctgcggcggcttatgcggcccgcgccaacatgaagtgcatcgtcattattccagacggcaaaatcgccttcggaaaattggcccaagccgtcatgtacggcgcagaaatcattgcgatcgacggaaacttcgacgatgccctgaaaatggtgcgcagcatttgcgagaaagagccgattgcgctggtcaactctgtgaatccataccggattgaaggacagaaaaccgcttcctttgaaatttgtgaacagctgggcgaagcgcctgatatcctagcgattcctgtcggaaatgccggtaatataacggcttactggaaaggctttaaagagtatcatgagaaaaacggcacaggcctgccggtcatgaagggttttcaggcggaaggcgcggccccgattgtcaaaaacaaagtaattgaaaagccggaaaccgttgcgacagcgatcagaatcggaaatccggctagctgggataaagcggtcaacgctgcaaaagaatcgaacggtaaaatcgatgcagtgtcagacgaggagattctccacgcttatcagctcctggcaagagaagaaggcgtatttgcagaaccgggatcatgcgcatccattgcgggcgtgctgaaacagctgcaaacgaaagagattcagccgggtgcgaaagtggttgccgtcttaaccggaaacggcctgaaagatccgaacacagccgttgatgtgtcgcagatcaaacctgtcacactgccgacagacgaagaagctattctcgaacacttaaaaggagccgctcgtgtatga

SEQ ID NO: 3894 - DNA, 1302 bp, Bacillus licheniformis
ttgaaggcgatacgagtggggctgctaggattaggaacagtcgggagcggtgtggtgaagattattcaggatcaccaggataagctgacacaccaagtcggatgccctgttacgattcaaaaagttcttgtaaaagataaagataagaagagggatgtcgagctttccaaagacgttctgacgactgaagcctatgatgtcattcaagatccagaagtagatgtcattatcgaggtcatcggggggatcgaggagacgagacgctatttgcttgacgcgcttcaggcgaagaaacacgtcgtgacagcgaataaagatttgatcgccctctatggatcggaactgacggctgccgcgaaagaaaacggctgcgacctttattttgaagcgagcgtcgccggcggaattccgattttgcgaagccttgaagacgggctggcttcagaccggattacgaagatgatgggcatcgtcaatggaacgaccaactttattttaacgaagatgaacaaagaaaacgcgccttatgacgaggtgctgaaagaagcgcaggagctcggcttcgcagaagcagacccgacagctgatgttgaaggtcttgatgccgcgagaaagatggcgattttggccaggctcggtttctcaatgaatgtcgaccttgacgatgtcaaagtgaaaggcatttcccaagtgtctgatgaagacatcaatttcagcaaacggctcggctatacgatgaagctgatcggcatcgctcagcgcgacggacaaaaagtcgaagtgagcgtccagccgacattgctgccggagcatcatccgctgtcttccgtccataatgaattcaatgcggtttacgtatacggcgaagccgtaggggaaacgatgttttacggacctggcgccggaagcatgccgactgcaaccgccgtcgtgtcagatttggtctccgtcatgaaaaacatgcgtcttggcgtgaacggcagcagctttgtcgatccgcagtttgaaaagaagataaaggcgccgtctgaaatctttgcccagcagtttttaagaattcatgtcaaagaccaggttggttcgttttcgaaaatcacatcgattttttcagaaagaggcgtcagctttgaaaagatccttcagcttccgattaaaggccatgacgacctggctgagattgtcattgtgacacatcatacgtcagaagaggattttacggatatcctgcaaaagctgaacgatcttgaggttgttcatcaggtgaaaagcacttatcgagtagaagggaacggttggagctaa

SEQ ID NO: 3895 - DNA, 963 bp, Bacillus licheniformis
atggacaaaccgtttgtatatgtgacgagaaaattacctgaagaacagctttctgcgttaaaagaagaagcccatattgaaatgtgggaaaaggaagaagaaccgtgtccgcgcgccattctgaaagaaaaagcaaaaaaggcgcacggactgttgacgatgctttccgacacgattgatgaggagcttttaaaaggcgcgccgcatttaaaagtcgtggccaacttggcggtaggctatgacaacatcgatgtggaggctgcgcaaaagcatcgcgtcatctgctgcaacacgcctggcgtgctgacagagtcaacggcagatttgacgtttgctctgctgatggcatccgcccgcagaatcgtcgaagcgagcgactggattagacaagggaagtggacgggctggggtccgctgcttttggccggtgcggatgtccatcataaaacgatcggcatcgtcgggatggggagcatcggacaagccgtcgcccggcgtgcgaaaggcttcggcatgaaaattttatatcataaccgcacccgcaatccagatgcagaagcagaactgggcgcatcctatctgcccttcgatgaactgcttgaacaggcggattttgttgtctgcctgacacctctgactcatgaaacgaagcatctgtttaaccgcagcgcttttaaaaagatgaagcgctccgctatttttatcaatgtctcaagaggacaggttgtcaatgaagacgatttatatgaagcgctggtcgaaaaagatattgccggcgcaggactcgacgtctttgcggaagaacctgtgcaaaaggatcacccgctcgtcagcctgccgcaagtcaccgcgctgcctcacatcggcagcgccgccgtcgaaacgagagaagccatgatgaggctttgtgcggaaaatattgcgcttgtcctgagaggaaagcaggcaaagaccgagatttga

SEQ ID NO: 3896 - DNA, 1023 bp, Bacillus licheniformis
ttgcaggaagtgatgtccgtgaaggagctgatcaaagaaaaattcggaatctacattcgcgatcttacatcgtacttgtcttatcaggcttttcataccccgaattcgatgtttttgatcgtccctgtttcccacttgagtcaggatgagctggcggaattgtttagtatgagtcagtatttgcaagaacagcgcgacccatacgtttcatcttttatattgacaaaggacggggagatgacgtttgaggagaatggcgtctcatatgtgcttcttcaagctgctccccgcatgacaaacaggtccgtttcatttggtgcggagctcgccgaatttcatcacaagggaaggggatacccttacgaggtaaaagaaacctcgcggatcgggcagtggaaagaactttgggggaaacggctcgaccagctggaacaattctggattcaaaaaacgcaggcaaggcagctgcagccctttgaaaaacaatttatcgaatcgtttccttattatctcggtttaaccgaaaatgcgattcaatatttggcagataccgaattggatgatcagccgcaggccgctgactcgggaacgatttgccagcagcggctcacctgcgaggctttaaggcgcgagccgcttattaaaatcccgatggaatgggtgtttgatcatgcggccagggatcttgcggaatatgccagaagcttgtttcacgaaaggaaaaacttcaatgaaatcatgttgtttcttcagcaatacgaacaagccgcgccgctatcctcattttctaagcggctgatgtacagcaggctgctgtttccgctccactattttgagacggttgaagggtactatatttctcctgaatcagagcaccattattttgaaagcagactcgactatttattgtctcaggcgccggcatatgagcaattcctgaacggctttcaagaaatggcgggcatgagatccgcaggattgataagcatgccgcctgtcaattggctgaaaaggacaccatag

SEQ ID NO: 3897 - DNA, 501 bp, Bacillus licheniformis
atgccggaaaacaacagcatgcatcagatcgaaacagcagcaaaagaatggcttgagaaacggggcgtcaagatttcggaaattgccgatcttgtctacgtattgcagaagaaatatcatccaaacttaacaaaagaagaatgtgaagagaatgtcaaccgggtcatgaaaaaacgtgaagttcaaaacgccgtgatcacagggattcaattggatatgctgggcgagcaaagaaagctcatggaaccgctccaaaccttaatcgagacagatgaaagcctgtacggcgtcgatgaaatcttatccttctccattgtgaacttgtatggatcgattggttatacaaattatggatatattgataaaatcaaaccgggagtgctcgcacgtttaaacgataaatcaacaggcgaatgccacacgttcttggatgatatcgtcggagcgattgcggcagccgcatccagcagactggcgcatcgagcaaaagatgcggaataa

SEQ ID NO: 3898 - DNA, 771 bp, Bacillus licheniformis
atgaaaacatacaaaggatacttaattgatcttgatggaacaatgtacaaagggacggaaaaaatcgaagaagcatgcgaattcgtgaggaagctgaaagaccggaacatcccgtatctgttcgtcacgaacaactcgtcgcgcacgccgaagcaagtggcggacaagcttgtttcatttgatattccggccgaagagagccaggtattcacaaccagcatggcaaccgccaatttcatcgccgaacaaaaacccgatgcttccgtatatgtgatcggcgaagaagggatccgtcaggccattgaggaaaaagggctggcattcggcggggaagacgccgactttgtcgtcgtcggcatcgaccgcggcattacatacgaaaagctagccgtcggttgtcttgccatccgcaacggcgctacattcatctcgactaacggcgatatcgccattcctacagaaagaggactcttgccaggcaatggttctctcacgtcagtattaactgtttctacgcagacagagcctatttttatcggcaagccggagccgatcatcatggagcaggcgatgaaggtgctcggcacagacatcagtgaaacgctgatggtcggtgacaattatgatacggatattatggcgggaatgaattccgggatggacacgcttctcgttcatacgggcgtgaccaaaaaagaacaccttgaagcctatcaggaaaagccgacatatgtcattgattcactgacagaatggctggatcgcgtctaa

SEQ ID NO: 3899 - DNA, 444 bp, Bacillus licheniformis
atgatgtattttgtcgatcgacacaaaatcgaaaacacgctcaacttcctggaagaggagctgcggctttatcaaatgcaggaagaatggacttccgacgtcgaaaaaaaagcgcttgaacgaatcggccacacgctgatcgaatgtatattggatatagggaacgatatgattgacggctttattatgagagatccgggaagctatgacgacattatggatatactgaccgatgaaaaggttgtcagccaagcggaaggcgacagtttgaaacatttgatcgcctatcggaagacattggtccaagactacctgaacgtcaaccatgaagaattggaagagctgctcagcaggcatgcggaaacgctcgagaaatttccggcgcggatccgcgattatttaaaccatgaactcggtccggtatccgcattcaaaccgcactaa

SEQ ID NO: 3900 - DNA, 276 bp, Bacillus licheniformis
atgattgtcgttcagaacgctgcatttgaagtcgtcaaagatgtgaaaaacggttttaacgaagaagcgtttaaagccagatactccgacattttaaataaatacgactacatcgtcggggattggggatacagccagctgaggctgaaaggcttttttgacgatcaaaatcaaaaggccacatttgatacgaagatcagcacgcttgatgaatatatttacgagtactgcaatttcggatgtgcctactttgttttaaaacgtctgcgaaaataa

SEQ ID NO: 3901 - DNA, 624 bp, Bacillus licheniformis
atgaataaaaaaattcttttagcagggctggtggcgctgcctttagcaggctgccagacggccttaaacgataccgaacacaatatatatgacgaagacggaaataccgttcacgttgcagacaagaaccctcaatatcaggaaaagttcagaaatgacaaccgaaaaggcagattcggatatgcgcgccatcaggcaacaccagtcgcaaacaaggaagaaatgcaggcgccccaaatcgaccgggaagaaatggcgcatattatatctagtttaacggttcagcttcccaatattcaagatgcgtcggcgcttgtgacagacgaagaggcgctagtcgtgtacaaaacggactccgggcagcgcaaacagacggctgatcaagtcaaaaagacggcggcatccgtcgttccgagatattaccatatctatatttccgatgatccggacatgatgcaatccgtcgctaatttcagccggcttggagccaattcaagaaacgtcgatcagctgatggccgatacaattaaggaaatgcaaaaatcgccgcaaggcaaaaccacgacaggtacagatgaaaacggaaacgaccttgacggaaaaggaaaggcgaccgaatcttga

SEQ ID NO: 3902 - DNA, 897 bp, Bacillus licheniformis
ttggcaaagaaagacgagcacctaagaaagcccgaatggcttaaaatcaagctgaacacgaatgaaaactatacgggcttaaaaaaattaatgcgggaaaacaacctccatacggtctgcgaagaggcaaaatgcccgaacatccacgaatgctgggccgtcagacgtaccgcgacctttatgattctcggatctgtctgtacgagagcctgccgcttctgtgcggtgaagacggggctgccgacagagcttgacttgaatgagccggaaagagtcgcagattctgtgagcatcatgaacctgaaacacgcggtcattacagccgttgcccgtgacgatttaaaagacggaggagcgggggtattcgccgaaaccgtacgcgccgtccggagaaaaagcccatttacaacaatcgaagttctgccgtccgatatgggcggagactataataatttgaaaacgctgatggatacgcgtccggacattttaaaccataatattgaaacggtccgccgcctgacgccgagagtccgtgcgagagctacatatgaaagatcattggaatttttgcgccgcgccaaagagatgcagccggacatcccgacgaaatccagcatcatgatcggtcttggcgaaacaaaagaagaaatcatcgaaacaatggacgaccttcttgcgaacaacgtcgacatcatggcaatcggccagtatctgcagccgtccaaaaaacacattaaagtacagaaatattaccatcctgacgagtttgccgaactgaaagaaatcgccatggaaaagggcttcagccactgtgaagcaggaccgctcgtccgttcttcataccatgccgacgaacaggtgaatgaagcgtctaaaaaacgccaggcgcaggcataa

SEQ ID NO: 3903 - DNA, 981 bp, Bacillus licheniformis
gtgaaagctgtattatccgttctcatcctccttttgctcatcttgcagccgtgcgctcttgcaaaggagaaaaaagagcccgatctgcaaaagagaatggccctttatcataagacagaagccgcaacccatattccttggtatgttttcgcggcagtcgaccaatacgaaatcaatatccgcaaaaaccgcaaagacttgccgaagcaaaaagggcacaccgggatatatattccgcaaagcgtgtggagcggacctgaaaaccccaatcctaaagatacatcgccgctcagcatcaaggtttttgacggaattggaatggacggaaacggagacggactcgcagaaccggatcaggatgaagacgtcctttatacgtttggacaatacttgttgacatacggaagggacattgaaaatatccgcatcggtctgtgggagttttacgaaagggatcagacggtcggcatcatatcaggctttatcaggctttttcaaaaatacggccacattgatttgggcaagcacgcctttccccttcccgtaagatcagattacagctatagaagcacatggggagatgcccgcggattcgggggcagacgcattcacgaagggacggatttgttcgcccattacggcctccccatccggtcgacatgctacggcattgtggaaatgaaaggctggaaccgtttcggcggatggcggatcggaatcagagacatcaacaatacgtaccattatttcgctcatttgaacggtttcacaaaaggcttgaaagtgggagaaatcgtcgagcccggccaggtgatcggctcagttggagcgacgggatacgggccgccgggaacatcgggaaaattcccgccccatcttcactacggcatgtataaagacaatggaagaacagagtggtcttttgacccttatcctcatttaaaggcatgggaacggaaggaacttcgaaagaaaaaataa

SEQ ID NO: 3904 - DNA, 114 bp, Bacillus licheniformis
atgaacggcgcatctatagcaatgatggtgatcggcatcgtcattatttggggaggattggccgcaagcattatcaatgcggttgtgaaaagcaagaaaagccaggccggctaa

SEQ ID NO: 3905 - DNA, 1530 bp, Bacillus licheniformis
atggataatcgtccgcaatggggaacaagagcgggttttattttagcagccgtcggttctgcgatcggtttggggaatatttggagattcccggcagtagcttatgaaaacgggggaggcgcgttctttctgccatatttgttcgcgctcttgacagcaggaattcctcttctcatcatggaatttacaatcggtcataaatacagaggctcagccccgctgtcctatgccaggatggggaaagggaaggaatggatcggctggtggcaggtcgccatctcatttgtcatctcgacgtattatgccgttatcgtggcatgggccatttcttacactgtcttttcattcaatttaggttggggtaaaaatacagaaaatttcctaatgaatgaatatttaaacaggattgatatcgggggaggagccatcggccaattcggcggcttcgtgccgggcgtcctgattccgctcgcgattgtatggattgtttcattggggattttatttgccggagtcaaaaaaggaatcgaaatcgcgaaccgcattttcattccgctgcttgtggtcttatttttaatcattgtcatttattcgataacacttgatggggctgcacaaggactgaatgcctttttcacgcctgattggagccagattacaaacggaaaagtgtgggtggctgcctacggccaaattttcttcagtctgtcgattgcgtttgccatcatgattacgtattccagctatttgccgaaaaaatccgatattacaaacaatgcgtttatcaccggctttgggaactcgtcatttgaactgctggccggaatcggggtattcagtgcgctgggctttatggctgcgcagcaaggcgttccagtcaaagaagtcgtctcttcgggaatcggtttggcgttcgtcgtcttcccgcaaatcatcaatgagtttccggcgtttaatgcgtttttcggatttttattctttggctcgctcgttttggcaggtctgacatctctcatttctatctctgaaacatatgttgccgcgattcaggataaattcaacgttccgcggcggaaagccgtcctgttcggcggaggggctgctgcattgtgttcgctcgtatttgcgacgaaaggcggactgttcttcctcgatgcggccgattactttatcaacaatttcggagtggcgcttgccggattgatcgaagtcgttgcgattgcatggtttgcgaaagagctgaaagctctgcaggctcacgccaattcggtttccgacattcagctcggcgcttggtggagaatctgcctgagcgtcgtcaccccgattgttctggggtatatgatgtttgataatatcaagacgaatatcacaacagcctatggcgacctgccggttgaattcctcctgaaatggggatggtgcgtcgcttttggagcgatcgcagccggatttatcctttcgctttcaaaatggaagaatgggctggcatatacgccatttcaacatgacaaggaggtttcctcatga

SEQ ID NO: 3906 - DNA, 774 bp, Bacillus licheniformis
ttgcgaagacttcgcggccctctgtcaaaaagaggacctttgcctttgcgatatgtcatgctgctttcgtttatattttttattttttcaacggccgtcagcctgttgattatcaactcatccatcaaaccgacccttctgaacatcgctgaaatggaaacgaaccggattgcgacccacgtcatccaggaagccgtcgaggattatatgagccaagatgaaaatgtgaaaaatctagtagaaatgaagacgaatgaaaatggaaaagtaacaacaattgatttcaactctcatggtcttcgtggtatgcattcgaaaattacgaaacaacttcacgaaaagctgaaggaaacagaaacagaagaatttaattcttctgcgaaaactcccgaaggtaagaatgatggtgtaatctataatattcctctgggtcaggcaacgggaaactcgcttcttggaaacctggggccgaaaatacctgtacggtttaatgttgtgggggatgtctttacagattttaagcaaagtgtcgagccatatggtattaataatgcattaataaatgtcggtgtgcttgtcgaagtcaaggtccgtgtcgtcataccgtttgcgacaaaaacggcggttgtcaaaaatacgattccggcaacgattcaagctgtgcacggagaagtacccgacttctacagcggcaacggcagccaaacggcgccatcgattcagatcccttcaaaggatgaaaaaacagagcaaaaaaaggaacaaaaagagtaa

SEQ ID NO: 3907 - DNA, 306 bp, Bacillus licheniformis
atggtaaatttaactccgatcatgatagaagatcagccgtttacggctgtaacggtcaaactgccgaaaacgaactttatggcggtaaccaatgaccatggatatattatgtgcggagcgcttgatgtcgccctgctgaatgataaattaaaagaacggaaaatcgtcgccgccagagccgtcggcgtgcggacgatcgatcagcttctcgaagccccgctcgaatctgtaaccgatgcggccggagagctcggcattcatcccggaatgagcggaaaagaagcccttttaaaaatggtgaaataa

SEQ ID NO: 3908 - DNA, 1356 bp, Bacillus licheniformis
atgacggaaaagctccatatctaccatacgaacgatttgcacagccattttgaaaactggccgaaaatcgtcgattacattcagacacaaagacagaaacatgaagagcagggggaagaagtgcttttgttcgacctcggcgatcatgtcgacagattccatccgatatctgaggctaccttcggaaaagcgaatgtggagctgttgaaccgtctgcagtatgatgctgcaacgatcgggaacaatgaaggaattacactgccgcatcaggagttggatacactttatgacaacgctcagtttcctgtcgttgtctccaatttgtttgacggagaagggaagaggcccggctgggcagcgccgtatttgctcaaaaaggtgaagagcggcgcaactcttgccattctcggtgtgacagtcccgtactatccgatctatcgccagcttggctggacggttacagacgcatttgaaagcatcggagagatgctaagtgaaatcaaagaaaaagccgatactgtcatccttctttcacaccttggcattttggacgatcagcgcgtcgcggaggcttttcccgaaatcgacctgatcctcggctcccacacccatcacctgcttgaagaagggatgatgaaagacggcgttatgctggcctgcgcggaaaagtacgggaactatgtcggtcatgttgaactgacatataacggagcgcttgagaacatcacagcaaccgtgatgaagacggcagattggaatgaagaatcagaggagacgattcgttttctgaaggaaaaagagagagaagccggacatctccttgaagaggaaattgcgacattggacaacacccttgaaaccgcctggttccgcagaagcgcccttccgcaaatgctggcagatgccttaaaggaatggtgtgaggcggaaatcgggatggtcaactcaggcattgtgctggagtctctttcacaaggtccggtgacgaaagccgatgttcaccgcatctgtccgcatccgattaatccggtcaaactgaagctgacgggacgagagctgaaagaggtcatcctccatgcatcatcagaacaaaccgagaagctgcgcattaaagggctcggttttcgcggcgaagtgatggggaagatgctgtatgccggccttgacccggaaaagctctccgtcaacggagcggacattgaagatgatgcgttctacacgctcgccacgattgatatgtttacactcggaacgctgtttcctgttatccgcgatgcggaagatattgactactttatgcctgaattcctgcgcgatctgctcgcctggaagctgaaaaaagcaaaccggtcctaa

SEQ ID NO: 3909 - DNA, 822 bp, Bacillus licheniformis
atggaatatcttatcttgatcatactcgggtttatcgcgggaaccatcggcagtcttgtcgggctcggcggagggatcgtcatcgttccctcgctcctttttctggcggggctgccgacgctgtttgaccatgtgacaccgcagatggcggtcggcacatcgctggtcgtcatcatattcacagggctttcttcaacgattgcgtatatgaagtataaaaccgttgactataaaagcggccttatttttttcatcggctcggggccgggcagcatcgtcggtgcccatgtatcgacatattttagctcagactcgttttctctatggttcgggatttttatgatcctcatttccctttccttaatgataaagaaaagggtgaaacctgccgagaaaaagcatacgggcgttatcagaacgttcacaggtgatgaaggacaggaatatacgtattcataccatcctttagccggaatcgcgatcgccttttttgtgggctttctcggcgggcttttcggcatcggaggcggctcgctgatggtgccggcgatgattcttctgtttttatttccgacaagggtcgccgttgcgacatcgatgtttatcattttcctttcatctgtcgcgggctctgccggccatgtcatctcgggacatgtcaactggctttatgcgcttgcattgatcccgggcgcctggtttggcggacagctcggcgcctacattaacaaaaagatgcagacaaagacgatcgtattgatcatgcggttcgtattgattctcatcggaatcagattaatctatcaaggcgtgtttagttaa

SEQ ID NO: 3910 - DNA, 852 bp, Bacillus licheniformis
ttgatttatattggattaacaggatggggggatcatgacagcctgtatccgcccaagacaagcagtcaaaacaagctgatccactattcatcgcattttccgatcgtcgagcttgatgcgagcttttacgcgatacagcccgagcggaacaatgaaaagtgggtaaaggagacgccggaaacctttcagtttatcgttaaggcatatcagggaatgacagggcatcagcgcggggaaatcccctttgaaacgaaagacgacatgtttgctgcttttaagctctcattaacgccatacataaaagcgggtaagctggcgatggtcctctttcagtttccgccatggtttgattgcaagaaagaaaacgtcaattacttaagatgggtaaaagagaaaatgggagatatcccgtgtgcgcttgaattcaggcatcggtcatggtttatgccccagttttacgacaaaacgctcgcttttatggaggagcagcaatggattcacagcatttgcgatgaaccccaggcgggcgaaggcagcatcccgactgttcttcacgcgactgacagccggaaaacgctcgtccgttttcacggccgcaacaaggaaggctggttaaggccatcttccggtcaaaattggcgtgaggtcagatatttgtatttatataatgaacaagaattaaaagactggaaaagaaaccttgagctgcttgaacagcagtcgaaaaacgtttacgtgctgtttaataacaattcgggcggtgatgcggctcaaaacgggaagcaaatgatggagctgctcaacattgaatacaaagggcttacgccaaggcagctcgatttattcagctag

SEQ ID NO: 3911 - DNA, 159 bp, Bacillus licheniformis
atgtccggcttctttttcatgttcaagtatcccgccgctgaaaaaggaaatgctacaagcagacctggatcaagattttcgaaaaaaacctgtgataaactaaaagaagaggtgaactgcattgatttatattggattaacaggatggggggatcatga

SEQ ID NO: 3912 - DNA, 534 bp, Bacillus licheniformis
gtgattggtttattgattttagcttgtgaaatcggcttttggatttttattctgcttggacttatttttcgctatatggcaggctggaaaaaggctggtttgatcatgtttgcatgcacaccggttttggatttactgcttttggctgcaacgtcgcttgatctgcacaatggggcgcaagcggatgttttgcacggcatcgccgccgtttatatcggcgtcagcatcgcgttcgggagccgcatgatcaaatgggcggatgaaaggtttgcctatcgctttgccggaggtccgaagccggacaaaggcccgcagtacggcagggaacacgccaaaaaagagcgtgaaggctggtttcgccatttcatcgcatggctgatcggagcggctctgctggccgggatgcacctgttcatcggcgacccggaaagaacggaaccattaatccgcatcgcttctttatggtcgatcatccttgtcatcgattttttgtacagtttcagctttaccctttttccgaggaaagcccgttaa

SEQ ID NO: 3913 - DNA, 585 bp, Bacillus licheniformis
atgccaaaaatagttgatcacgaaaaacaaaaagaaaaaattgccgaagcggtgtggaatgtgattcacagagatggacttgaacaatgcaccgtcagaaatgtcgctaaggaagccggactttcggccgggtcgatgcgccattattttccccatcagtctgagcttttcatttattcaatgaggcttgtggcaaaccgggtcaaaacgcgtatcgaaaacatgacatttaacggtacaccggctgaaaacgtcaaacagcttctttttcagcttatgcctcttgatgaagagcgaaaactggaaatggaggcatggtatgcatttacagccaaatcgctcagcgatccggagctcaaaccgttgagaaaggagatgaatgaaggcatttattcagcctgcaaatcggctgttgaaatgctggtaaaaaccgaaaaaaagaccgggatcgatgttcttaaggaaaccgagcatctatacgcccttgtcgacgggctggcgcttcatttgatcatggcccctgaaaggctgacggctgaaaggatcgatactgtattggcgggttatttaagatcgttggaatag

SEQ ID NO: 3914 - DNA, 222 bp, Bacillus licheniformis
atgaagaaaaaacggttcggaatcttgttcttagttcttttcttgttactgtttaatacagcttcacaagcggctgatccaaatcaaaaaacaactgaagaagtacttctgaacgcctttgataagtttggtttagttagttctgtgattggaaaaacagaccagttatatcaatcggcccagatgatactcgcagtgaagaaaaactccgagaatacttag

SEQ ID NO: 3915 - DNA, 114 bp, Bacillus licheniformis
ttgagtttctatttttatgtatttcagctttccgggacaccgtttattcatattttaggagccggtcctgaaagcgttaacgagagaggtgatctttattttctggggaagtag

SEQ ID NO: 3916 - DNA, 63 bp, Bacillus licheniformis
gtgcagaaaaacagcctgcgatcaggctgttttttttgtgatgaccagcaaaataatttgtga

SEQ ID NO: 3917 - DNA, 1227 bp, Bacillus licheniformis
atgacaattggcgaaatgaatattccgaaacggacaattatgactcccggtcctgtcgaggttcatccgagagtgctgagggcgctttcctcacctttactgggacagttcgatcctgcatttacagacatgatgaacgacgtcatggcgctgcttcggcagattttccgaacgacaaataaatgggcattcccgatagacgggacatcgcgggccgggcttgaagccgtccttgccagtctcatcaaaccgggggacagggtgctcattcccattttcggacggttcggctatctgcttgccgagatttgcgaacggtaccaggctgatgtttatacaatggaatgcccgtggggagacgtttttgaaccgaaagaggtcatctccgaaatcaaacggacgaaaccggagattgttgcggttgtgcacggcgagacatcgacgggatgcattcagccgctcgaagaaatcggccgggcctgccgggagcttgatgtgctttgtgtagtcgatgcggtggctacaatcggcggcacggatgtcaatacggatgaatggtgtcttgacgcggtcgtcggcggtacgcaaaagtgtttatccgttccttcaggtatggcgccgatcacatttaacagccgggttgaaaagcgcatcaatgaaaggaaaaaggtagaacggggcattgccacaagagaagatatcgtgcttgaaacgggacgcttgccgatttccagcaattattttgacctcggcatgctgatggattattggagcccgaggcgcctcaatcatcatacagaagcgacttcgatgctgtacggcttgcgcgaaggagcgcgggtcgttcttgaggaagggctccgcgagcgattctcaagacaccggctccatgaaacagcactaatcaagggcatcaaagcgatgggactcgaattgtttacggaaggccggaaaaagctgccgaccgtcacttgtgtgaaagttcctgatcgggttgacgcagatcttgtcaggaagatgatgcttgacgacttcggcgtcgaaatcgccagctctttcgggccgctggccggaaagatatggagaatcggaacgatgggatacagctgccggaaagaaaatgttctttttacattggctgctctcgaagctgttctcattcgcacaggtgcttcagtatcgccgggaaatgcgcttcaggcggcactggatttctatcatgagtag

SEQ ID NO: 3918 - DNA, 1254 bp, Bacillus licheniformis
atgaccattggtattcataagaccggagaaagtacagcccgcaatatcgaagacatgatcaattggctggcatcattcggtgaaagcggagaaggaggggtgacaaggcttctctattcaaagccgtggctcagcgcccagcagtcgttgaaggaaaagatggaggactggggaatagagccgtacttcgatgatgccggaaatctgtttgggagaatagaaggtacagagaaccgtacgaaagcgatcttgaccggttcacacattgatacggtcatcaacggagggaaattcgacggagcgtacgggattttagcgagccttttgtctgccaaacaccttctggacacgtacggcaggccgaaaacgtcaatcgaagtcgtgtctctgtgcgaggaagagggaagccgtttccctttgactttttggggatcggggaatttaacgggcttgtttgactgtcaaaagacgccggctgtgcacgatcgggacggagtatcgattgagcaggcgatgaaagattgcggtttcggaaaacggcggtacaggcgcccgttcaggcgtgatgtgaagtgctttatcgagcttcatattgaacaggggagcattcttgaggagagcggccgtcaaatcggcattgtcacggacatcgtcggacaaagacggtttacggttatggtcaagggagaaagcaaccatgccgggacgacgccgatgaacgccagaaaagatgcggtggccgtctcggcattgtgcatttcctatttgacgaacaaggctaaagctgcttatccgcttttaacggcaacggtcgggaggtttgaagcaaagccgaatgtgccgaatgtcatatcaggagaagctgttttttctcttgatctccgccatcatcatgatgcggtgttggaccagtattgcgacgatatttttgcttatttcacagagctggccggcgaatggaacgttcagatcacagttgaacagacgacggatgcgaagcctgtgaggatggaccgggatttgattcaactctcaaaacagtcggccgaggatcttgacgtatcctatcaggagatggtcagcggggcggggcacgatgcccaggttttcggcccgcattgcccgacgtcactgctgttcgttccgagccggaagggcatcagccattcgccggaagaatggacaaaaccggctgatcttgcagccggcgttgagctcttgactcatgtattatacaggctggcatatgaatga

SEQ ID NO: 3919 - DNA, 1599 bp, Bacillus licheniformis
atgaatatctatgacatgatgaaactccctgtatttaaaggcgcaacgcttgccgccggaaaggcgggcgtaacccggaacattgaacacatcaatatgatggatgcgccagatattgccgattatctgcatcatggcgaactcctcgtcacgaccgcataccatttaaaagaccggccttttttattgaaggaattgattgaaaggatgatcaggcggggctgcgccggactcggtatcaaaacccgctttttgcaggaaatacccgacgaggtgatcaagcttgccgacgagcggtcatttccgatcatcgagctaaatgaagatgtccgcctcggtgatattgtcaatcatacactgagccatattttagacaaacggacggcagaactcgaacaggccatcgccgctcaaaaaaagttcacaagccatattatgagcggaaaaagcattcaatcgctcttgcataacgtctctgctgttttaaagcttcccgttcttctattcaatcagcacctcaagccgattgcctcctcaaaagcagatgccgccgggacgctgtcggattatgaaggaatatttcaaaaaggaaacagaacggggctcacctgtttttcaacgattcccgacaaacaaacctattcggtatttccgatctatactcatgaaaaaaaatgcggcttcctcgttgtctgcgggatgatttccccttcagacaaaggcttgctgttaaccctcgaacaagccgccaatgtcatcgcctttgagctgctgaaggaaaatgcgctcaaacaatatttgcgaagagcgcggaacgagtttttcagcaattttttggacggcgccttttcctctgctgaagaaattaaaaaccgagcaaaagaatttcagctcaagtgggatcaaaaatatgtgtgcatcgccggcaaattggaccgccgcgaaaaatcgctcagcttcacggaaaatcagcttgaatcagattccgtgttcgaacgcctggaagaagagctggttgacttcccgtttcctccgcaccttttcacaaaaggaaacatatgcttcctgctggccgaggcgacggacagctgggctgaaatgaatgcagccgtgggcggatttttaaaggcgtttcagcgccatgcatctgagcattttcagcggacgatttcttttggaatcagcaacctcagccatcagctgagagacgttccgcacatttgcaaagaagccgtcgatgcgctccactccggccatttgtcaggcagcaccgagttcatccagacgtaccatatgaaagacgtgtcagagcttttgcgcatgattccggctgatgatttgaagacattttacacgcatgcgctgcatcagcttgccagcctgccgaaggatgacccagggctcctgcaaacattgtccgtctatctggaaacgcactgtcagatttctgaaacggccaagcgcctgtacatccacagaaacaccgtcatctacaggcttgaaaaatgcgaggaactgctcgggaaaagcctgaaagatgcggacacgaccttgcgcttgagactcgcgctcagaattcaaatgctgcttgggttgtga

SEQ ID NO: 3920 - DNA, 1197 bp, Bacillus licheniformis
atgaaaaagatggccagattgtatattctcatgcttaacgtgtttatcgtgatgcttggtataggcttgattattccactcatgcctacgtttatagaagaattcggcgcgtcaggcagcacgctcggattgctgatcgcggcttcggggattacccagctgctgttttcgcccgttgccggggaaatgactgataaatacggaaggcggaaaatgatcattttaggaatcggtgcgtttgcggtttcccagctgcttttcgccttggcgagccagatgtggctgctgtttgtttcccgccttctcggcggagcgggagctgcgtttttggtgccggccatgtttgcctacatcgctgacatcacatcggaaaaggatcgaagcaaagggatggggctgatcagcgccgcgatgtctctcggctttgtcatcggtccgggagcaggcggatatttggcggcgttcgggctcaccttcccgttttacgtgtcagccggattagccggcttggcgacggttttatcgcttcttgtcctcccggaaacgctcagtcaagaaaagatgcttgaaaagcgccgctccgttcaaaagcgcgaaccgctcgctaagcaaatggcgcgcgcgctgcggtcgccgtatgcatttctgtttatcctcgtgttcatcttgaacttcgggatcatgaatttcgaggcggtattcagcctttatgtcgatcataagcacggctttacaccgggagacattgcctttgtcataacagcggcaagtctgatcggcgtgttcgtccaggcggtggctctcgggatgctgacgaaccgcttcggcgaaaaaaagctgatgaacatgacgctgatcggttctgccggagcgcttgccgtctgctcgattgccggttcgtactggctggttttcggggcaacaattgttttcttcatgctgacgtccattcttcgaccggcgattaatacgctgatttcaaaaatggccggagatgaacagggatttgccgcaggcatgaacaatgcgtttatgagccttgccaacattgtcggaccgacagtggccggtctgttattcgatgtgaacgtagaaattccatatatttttggtgtggtcgttctcgtgctcagctttttggcggcagtcagctgggggcggaagcagcaggcgcgcacaattcctgaaaaagtataa

SEQ ID NO: 3921 - DNA, 1391 bp, Bacillus licheniformis
atgggaatgccggcttacaaaacagaagaggtgaaaaagaacgaaaaacgcaaaaaggaatttccgcatatttatgtcattctggctgtcatgattggtcttatggcgcttgcgacatatgtcattccggcaggcgaatatgaacgggtggaaagtccggacggcagggaaatgattgatccagcgtcctacaaacgggtcgaacagacgccggttgatattcttggcttgcttacggcggttccgaaagggatgacagaagcggctccgattattgtgtttacgtttgtgattggcggagcttttgccgttctgaggaaagcatctgtcattgagctcggcgtccgtctgttggccgatcagttcaggaacaagcctgttttcgttacgcctgtcttaatattcgttttctccggcatttcctgttttatcgggacgcctgagctttcgatcgtttatgtccctgtcattcttcctttgctgctgtccctcggatatgaccggatgacagcagcagcaatcgcattgtgcgggacgatcgccggctttacgagcgctttgacaaacccatttaccgtgggaacctcacaaatgatttccggtctcccgctttattccgggatggggtacagggcggtcatctttgttgtcgttacggcgattgccgctgtttatgtgctcaaatatgcggaaaagatcagagcgcatcctgaaaggaagcagtcgaacccgtgccggcttttaaagcaggcggacgggtgaaatgggccgggatcgcgtcgcttgggttgtttgccggcttgattgggtgtgtaatttatttcaggtgggatatgctgacaatggcgggctatttcctggcgctcggcatcattcctgcttacatcgccggcatgaattcgagagacattgccgagtcctttaatgagggttttaaagaagtgctcgtcggtgcgatgatttgcggcattgcaagagctgcagcagtcgttatggccgacgggcagatcatggatacgattgtttacggcttgtctcatgctgtctcacagcttccttcgtatttaacggttacggcgatgctctttacacagatgctgtttaacttttttgttccaagcggaagcggacaggctttaataatgatgccgattatggcgcctttggctgatatcgtcggaattacgcggcagacggcgattctggccttccaattcggagacggtttttcaaacatcgtctttccgacatcgggatattttatggcgacgcttgcgatcagccggattgcctggaacaaatggctgcgattcatccttccgctgttttgcctctggatgggagcggccgtgcttttcctgatgtttgctaacgctgtcggctggtcgtaa

SEQ ID NO: 3922 - DNA, 114 bp, Bacillus licheniformis
ttgatagaaaatgtgacgattttctggattgctcgtgttgatttatgtattttaactgaaaacacgctgaaatttagaggatttttcaatgctatcagcgctgcgatcatttaa

SEQ ID NO: 3923 - DNA, 741 bp, Bacillus licheniformis
ttgacattgcagcagtggattaaagaagtggccagaggaaaaaggggcgcccgggatttaacttatgaagaggccagacaggctgctgaagcgattgttacgggaaatgcaagccccgctcagacagccgcgttgttaatagcggagaggatcaaaacggagtcccctgaagaattgttcgcgtttaccgaagcattgcggaacagctcggaatcattgagcctttccagagctgtaaaagaggcggtcatcgattttgcaggaccttatacaggaagacattcttttttagcaaccattcccgtctccctccttctcgcaggaaacggcgttcctgcgtttctccacggcagcgatgcattgccgcccaaatatggaacgagcgtaaaagatgtcctggacaaactcggaatcccctctgagactgccccagcgcaaacggcacgctcactcgaaaaggctttaatcggattcgccgccgccgaaacattttgcaaaccgtttgttcgcatgaggaaaatccgcgaggaaatcggcgtccgcaccgtgttgaatacagcagaaaaactggtcaacttctctgatgccgacaagcttatgatgggcgcatttcaccggacggccatacagaaaatgcatcccgtatttcagcgcttgacgtacaaagaagtgttcattgtccaggggcggagggctcggaagatgtgccggtccacagaggcagctttgtgtttacaataa

SEQ ID NO: 3924 - DNA, 348 bp, Bacillus licheniformis
gtgccggtccacagaggcagctttgtgtttacaataaaaaacggcgagatcgattcttttatattaaaacctgaagaatacggactttacgcagaggaagcaaagctcaacaaaccgctgtctgctgaagagcaggcggaaaaaataacagccgttctcgccggagatgaatcggcggatacggaatacgaaagaaaacaagtcatcatgaatgccgcattgcgctattatttgttcggatactgcgcggccattgaagaaggtgtccaagcggcggaaaaacagctgaaagaaaaagccggtctggaagctcttgaaaggtggaaagcttcatttacaagaccgtaa

SEQ ID NO: 3925 - DNA, 813 bp, Bacillus licheniformis
atgaaccgaaagtgtgtcattccgtttattttgatgttgtcggcgatgtgcgcgcccgcccaaaacgcagaggccttccagctgttttccttacccgtacaatcctcggctccggcagattactacgaacaggcgcagggcaaaacaggtgaagctttaaaacgagcgcttcacgacacaatcgacgatcatcgagagctgtcttacagcgaggtatgggaagcgctgaaagcaacggatgaagatccggccaatcgaaacaacgtgatactgttatattccagagagtcgcgctctaaacaggcgaacggggggcaaacgggcgattggaaccgcgagcacgtatgggcaaaatcgcacggtgatttcgggacaagcaaaggacccgggacagatttgcatcacctcaggcccagcgatgtgcaagttaacgccgcccgcggaaaccttgattttgacgaaggcggcagcccctatcccggagctcccggaaactactatgacggcgattcctgggaacctgacaaaagcatcaaaggcgatgtcgccagaatgattttctatatggcggtccgctatgaaggggacgacggtcatccggatcttgaaatgaacaatacaacgaacaacgggtctaaaccgtaccacggaaaaatgtcggttttattgaaatggcatcatgaagaccctgtcgatgccctcgaaagaaagcggaacgatatcatctatcagcaataccagcataaccgcaatccgttcattgatcaccctgaatgggcggaggatatttggggctcgggcgttttgaattga

SEQ ID NO: 3926 - DNA, 162 bp, Bacillus licheniformis
ttggggctcgggcgttttgaattgaacaaaaaaagcgcctgctcagcgctcttttttcaaacctctgtttttttgttcagcaccgattttttatccataaaacgaaagaaatctgctgtgcagcagccgcgaggcacggcttcattggccgattatctacac

SEQ ID NO: 3927 - DNA, 840 bp, Bacillus licheniformis
atgatccagtttgactttgagtattacaggccccaatctgcgcaggaagcggtaaagctctttcaaagcctggagcgggaggggaaaaagccggcgtattgttccggcggaacagaacagttgacgctcgtacggatgaatgtgatccatacaaatgccgtcatcgatattaaagatatacctgagtgcaggactttgcaatttgaacggcatcaccttgctttaggctcggcgctaacactgacggagatcacggaaaacggcggctttccgctgttgagcaaagcggcgagagaggtggccgaccatacggcgcgcaataagattacgcttggcggcaatatttgcgggcagatcttttaccgcgaagcggtgctgccttttttattaaccgacagcaaagtggtgacagttggagacaaggggaaaaagcgctatctgattcacgacgtatttgatcagcagctgaagctgagcaagggagaaatcctcatttcgcttttgattgaagaacgctatcttcatcagccttttgcaagcataaaagtgaggcagcgatgggatacgggatatcctttggcaacgatttcggctctcgaaatagacggacgcgtccgctgtgcattcagcggtgtctgctcttatccgtttcgctccgctgaagtggaatctgcgttgaatgacgaggcactccctgttgatcaaagggtggaagaggcgatcaaccgcctgcccggtcctgtattggacgatgcgcaaggttccgcagagtaccgcacgtttgtcatcaaacatactctgtttgacattctcggcatgctgaaaaaggaaaccttatga

SEQ ID NO: 3928 - DNA, 1122 bp, Bacillus licheniformis
atgaaatcttttattgtagtcggagcgggcatcctcggcgcttcagccgcttatcatcttgcaaaaaagggcgcggatgtgacattgattgaccgcggagagcggggaagggctacagatgccgcggctggaatcgtctgcccctggctttcgcagcgcaggaaccaggcatggtacaagcttgcaaaaggcggtgcggcgtactatgccgatttaatcaagcagcttgaagctgacggagaattggatacggggtataaacggacaggcgctatcagcttgcatacagacgagcgaaagctggagaaaatggaagaacgggcgcatctaaggcgcaaggatgcgcccgaaatcggcgagatcacccggttatcccatgaggaaacgaagcgtttatttccgcctttggcagaggggtacagctcggttcatatcagcggagccgcgcgcgtgaacggaaaattgctgcgccgctcacttgtgaatgccgcaaaaaaatacggagcttctgttgtttcaggaaacgcttcattgctctatgaaggaaaccgggtaacagggatctccacagggggcaagaaaatatacgctgatcaggtgcttgtcacagcgggagcttgggcggacgagctcttgaagccgctcggcgttcgtttttcagtcagctaccaaaaagcgcagatcgtccacctttgtcttcctgatgccgataccggcagctggcctgttgtgatgcctccgaatgaccaatacatactggcatttgaagacggccggatcgttgccggcgctactcacgaaaatgaagcggaactggacgatcttcgggtaacggccggcggccttcacgaaattttctcaaaggcgcttgccgttgcgccggggttggaattgagcgagctgcttgaggcgcgcgtaggcttcaggccgtttacaccaggctttctccccgtgatcggctcattgccgaacatttgcgggctcctcgttgccaacggtctcggcgcttcagggcttacgtcaggtccgtaccttggcgctgaattggcaaggctcgctttgggagaagagcctgagcttgatatcgctttatatgatccggccggcgcgcttgaaagttga

SEQ ID NO: 3929 - DNA, 861 bp, Bacillus licheniformis
atgactgtcgtgggtttttgcgtattattatgttctgcatttatccatgcatcgtggaactatctttctaaaaaagccgatggaggcgttccgtttatctggctgttcacagcgattgcagccgtcatctacacgccgttggccataggtgtcgtcatatatgaaaagcctgagatcggcatctggcagcttgtcatcatcatggcgagcatccttgctcacttgggcttttttcttgttcttcaaaaaggatacaaaaagggcgatctctcccttgtctatccgatcgcgagggggacaggcccgctgctcacctgcatgctggcggtcgccttttttggcgagacgttgacgctgcccgctattatagggattctattgattgtgatcagcattcttttttttacagggggagtgaagcggttaaaagaatcaggctcgttcacaccggttctttacgggctggcggtcggcggcattattgccgcatatactctccttgataaagcagcggtcagccggtttctcattccgccattgctgctggattattgcaatacgctcggccgcctggtcatattgactccttatgccgcgaaaagctggagtgaagtccggtttgagtggaagcatcaccggatggaagctgtcggggtcggggtttttaattctttggcttatattttggcgctgagtgtcatggtatttgccccggtcagctatgtggcgcctgttcgggaaatcagcattttaatcggaaccgtgatgggggcggttcttttgtccgaaggtttcggacgactgaggatcatcgcggctgccttaatggtgcttggcgtgatatcggtagccgctggttag

SEQ ID NO: 3930 - DNA, 384 bp, Bacillus licheniformis
gtgaaaatgttgaaaaaggctgtgttgatagccgctgttttcttgctggccgcatttgccgggagtacagaagcctttgctatgccttccaaaggcgcggtgaaattcaggacggatgccaatacatatacgaaatcagccacttcgatcgttgtcactggaaaaagccctgttacgggaacgatgattgccgtcaggctgatcaataaaaaagggactgtcctgatctatcgagatgttcatttaacgcgcggaaagcctcattttcgggtgagctttccgacgaaaaagctgaaaccgggcaagtatgacgtctgggtggatgccgtcaaaggaaagaagtggcacggggaattgaagcgctacattgtcatcaagcattga

SEQ ID NO: 3931 - DNA, 174 bp, Bacillus licheniformis
atggcaagctatttaaaatccagaatcgtatcttatctgtttattcttttggaagtggggaccggattcgcaatttgcgaggtgtcaatggaaaatccgaattactcctcagcttgcgcggtctttatcataggttttacgattggggaatgcttcatgattagaaaatggtaa

SEQ ID NO: 3932 - DNA, 1122 bp, Bacillus licheniformis
gtgagcgtgataccatatgatttggttgcgacgaaaatgaatttttggtatacagccttaaaaaacaattggacaggcaaggctgaggatactaagaaagaagttgaacgagaattagaacaaatggaacaaaatcaggatgtgattgtctattacaacttactgctcttccggcataatcttcaacttgattatatgtattctaaacccggtgtaaatttaaatagtcgttttgatgagttcaaaaagattcgcgatcagaataatctggaaggaatgttggattattattatcattttttcgctggaatgtatcatttcagacaaaaagaattaatccttgcgctgaatttttatagggatgccgagaaaaaactcgattcttttgattgtgatgaactggaaaaggctgaattttatttcaaggcatctgaagtgtattaccatatgaaacaaaccatcttttcgatgaattatgcaagtcgtgcgtataacttattcaaaaagtatgatacttacggtgagcgtcgagtacaaagtcagtttattattgcaggtaactggctagatcatatgtatcccgaaaaagctctacataatttaaataaagagcttaaagagtcagagacacaaggaattcttcatcttatgggttcaacacatttaaatatcggaatatgctacaataaattggaagatgtcgataaagcaacctacaattttcaaagagctctgaacctttataaagaggagaagcatagttttttgccaaaaacattattcaacctcgcacatgtcagggcaaagcaagggaagttgtcaataactgatgacctatactatgaaggcaaagagttggctgaaaagaacaagaatttagatatgcttgcaaagtttgatttaataaaagggctttatctttcatttgatctggatatggttcgcgaatcgttcaagtttttcgaaagtaaaggcaagtatgcagacatggaggaatacggtcttatagcggctgaactattagagaaaaaagaaaaaattcgagatgcagtggaattctaccggataacagttaatgcgagaagacaaattcaaaggagtgcttttctacatgtaaactaa

SEQ ID NO: 3933 - DNA, 1398 bp, Bacillus licheniformis
atggctaagaaaatgccggatatcggcgaatataaatacggttttgccgacaaagacgtttccattttccgttcagagcggggattgacaaaagaaatcgttgaagaaatttcacgcatgaaagaagagccacagtggatgctcgactttcgcttgaaatctcttgaacacttctacaatatgccaatgccgcaatggggcggagatttaaactcattaaattttgatgaaatcacatactatgtaaagccttctgagcgttcagaaagatcatgggacgaagtgcctgaggaaatcaaacagacatttgacaagctcggaatcccagaagctgagcaaaaatatttggccggtgtatccgcgcaatatgagtcagaagtcgtttaccataacatgaaagaagaccttgagtctcaagggatcgtcttcaaagacacagacagcgccctcaaagaaaatgaagacattttccgcgagcattgggcaaaagtcatcccgccgactgacaacaagtttgcggccttgaactcagcggtatggtcaggcggatcattcatctacgtgccaaaaggcgtaaaagtggatactccgctgcaagcatacttccgcatcaactcagaaaacatgggacagttcgaacggacgctgatcatcgtagacgaaggcgctcacgtccactatgtagagggatgtacagcacctgtttatacgacgaactcccttcacagcgcggttgttgagatcatcgttaaaaaaggcggctactgccgttatacaacgattcaaaactgggcgaacaacgtcttcaaccttgtgacaaagcgtgcggtttgtgaagaaaacgcgacgatggaatggatcgacggaaacatcggctccaagctgacaatgaaatatcctgccgttatcctgaaaggcgaaggcgcgcgcggcatgacgctttctatcgccctggcaggaaaaggacagcatcaggatgccggtgcgaaaatgattcaccttgcaccgaatacgtcatccacaatcgtttcaaaatcaatctcaaaacaaggcggaaaagtcacataccgcggaatcgtacacttcggacgcaaagccgaaggcgcccgctcaaacatcgagtgcgatacgctgatcatggacaacaaatcaacttctgatacaatcccatacaatgaaattttgaacgacaacatttcattggagcacgaagcgaaagtatcaaaagtatctgaagagcagctcttctacttgatgagccgcggtatttctgaagaagaagcaacagaaatgatcgtcatgggcttcatcgagccgttcacgaaagaactgccgatggaatacgcagtcgaaatgaaccgtcttatcaagttcgagatggaagggtctattggttaa

SEQ ID NO: 3934 - DNA, 447 bp, Bacillus licheniformis
atgtcttttaatgtgaacttggatacactgtatcgccaggtgattatggatcactataaaaacccgagaaataaaggggttttgaatgacagcatcgtcgttgacatgaacaacccgacatgcggtgaccggatcaggctgacgatgaagataacggacggtaaagtagaagatgcaaaatttgaaggcgaaggatgctcaatctcaatggcttctgcgtctatgatgacacaggcgatcaaagggaaagacgtggagaccgcccttcaaatgtcacggatcttttcagatatgatgcagggcaaagactacgacgattcgattgatttaggagatattgaagctctgcaaggcgtttcaaaatttccggcccgaattaaatgcgcaacattgtcatggaaagccctcgaaaaaggcgtttccaaagaaaacagcgataacgaataa

SEQ ID NO: 3935 - DNA, 1221 bp, Bacillus licheniformis
atgaatgctaaagatattcgcgaacagtttccgattctcagccaacaggtcaacggacacgatctcgtttatttggacagcgcggccacctcgcaaaagccgcgcgtcgtcattgagacgcttgatgagtattacaactcttacaattccaatgtccatcgcggcgtccatacattaggaacaaaagcaacggatggatatgaaggagcacgtgagaaggtcaggaagtttataaacgcgaaatcgatgcaggaaattattttcacaaggggtacgacaacggccctgaacacggttgcgctcagctatgcccgcgcaaaccttaagcccggtgatgaaatcgtcattacaccgatggagcaccatgcgaatattattccgtggcagcaggctgtcaaagcaaccggcgccacgctgaagtacattccgcttcaggaagacggcaccatttccttggacgatgtcagggaaacggtgacggaaaatacaaaaatcgtctctgcagcgcatgtttcaaacgttctcggtacgatcaacccgattaaggaaatggccaaaatcgcccacgaacacggcgcggtcatggtcgtagacggtgcgcaaagcacgccgcacatgaaaattgacgtccaggatttggactgcgatttctatacgttttcagcccacaaaatgtgtggtccgaccggaatcggggtattgtatggaaaaaaagcattgcttgaaaacatggaacctgcagaattcggcggagaaatgatcgattttgtcggtctttacgaatcgacttggaaggagctgccttggaaattcgaagccggcacaccgatcattgccggcgcgatcggattgggagcggcgattgacttccttgaagacatcggacttgatgaaatattagcgcatgaacaccgtttggcggcatacgcgctggagcgctttaaagagcttgaaggcgctgttgtctatggtccggccgaacgtgcaggactcgtgacgttcaaccttgaagacgttcatccgcacgatgtggcaaccgtgctggatgcagaaggggtcgccgtcagagccggccatcactgcgcgcagcctttaatgaaatggctgaacgtctccgccactgcaagagcgagcttttatctgtataatacggaagaagacatcgacaaactgattgaagctcttcagaagacaaaggagtatttcacaaatgtcttttaa

SEQ ID NO: 3936 - DNA, 1314 bp, Bacillus licheniformis
atgacattggaaacaaaactatctgtagatcgggaatatgtcaaaagcttctctgagaagcaccaggaaccggcatggctgcaagatctacgcttagaagcgcttgaaaaagcagaagatctgccgctgccgaaacctgataaaacaaaaattacaaattggaattttacacggtttgataagcatactgtagaaaataaaccgcttgattctttggatgatctttcagatgaggtcaaatcgctgatcgatcttggaaatgaagacaaaacgctttatgtccagagagaccagacgccggcttacctttctctttcaaaagagctgcaggataaaggcgtcatctttacagatattcatactgcgttccgcgaacacggcgagcttgtcaaaaagtactttatgaaagacggcgtaaaagccgatgagcataaattaactgcattgcatgcagccctcctgaacggcggagccttcctttacgtaccgaaaaacgtcgagctggaagctccggtgcaggctgtttatgtccatgaaagcaacgatacaacgcttttcaaccatgtacttgtcgttgcagatgacaacagtgccgtcacatatgtagaaaactacatcagcacggtgaatcctaaggaagcggtctttaacatcgtgtcagaagtgatcacaggcgcgaatgcccgcgtgcaatacggagccgtcgacaacctttccgcaggggtaacggcttatgtcagccgccgcggaactgcactcggacgcgacagcaaaattgaatgggcgctcggtttgatgaatgacggagacaccatttctgaaaacacgacgaatctgcatggagacggcacattcggcgatacgaaaacggttgtcgtcggcagaggagaacagactcaaaactttacaacgcaaatcattcaccacggaaagcattcagaaggctatattttaaaacacggcgttatgaaagattccgcgtcttcgatcttcaacggtatcggaaagatcgagcacggcgcgtcaaaatcaaatgcagagcaggaatcacgcgttcttatgctgagtgaaaaagcgcgcggcgacgcaaacccgatcctattaatcgatgaagacgatgtaacggcaggacacgctgcatctgtcggccgcgtcgatccggttcagctctactatttgatgagccgcggaattcctaaagaagaagcagagcgcctcgtcatttacggcttcctcgcaccggttgtcaatgaacttccgattgaaggcgtgaagaagcagctggtctctgtgattgaaaggaaagtaaaataa

SEQ ID NO: 3937 - DNA, 786 bp, Bacillus licheniformis
atggctgcttcgacattaacaatcaaagatcttcacgttgagattgaagggaaagagattttaaaaggtgtaaaccttgaaataaaaggcggggaattccacgctgtaatgggaccgaacggaacgggtaaatcaactttatccgcggcgatcatgggacaccctaaatacgaagtgacgaaaggaagcatcacgctggacggcaaggacgttctggaaatggaagtggacgagcgcgctcaagccggtctgtttttggctatgcagtatccgagtgaaatcagcggtgttacaaatgccgattttctccgttcagcgatcaacgcgcgcagagaagaaggcgacgagatttctttaatgaaattcatccgcaaaatggacgaaaacatggaatttcttgaaatggaccctgatatggcgcagcgctacctgaacgaaggtttttcaggcggtgagaaaaagcgcaacgagatccttcagctgatgatgatcgaaccgaaaatcgcgattcttgacgaaatcgattcaggtttggatatcgacgcccttaaagtcgtttcaaaaggaatcaacaaaatgcgcggcgagaactttggctgcctgatcatcacgcactatcagcgcctcttgaactacattacgcctgaccatgtgcacgtcatgatgcagggccgcgtcgtgaaatccggcggacctgaacttgcacagcgccttgaggctgaaggatatgactggattaagcatgagcttggaatcgaagacgaaactgtcggtcaagaagcgtaa

SEQ ID NO: 3938 - DNA, 123 bp, Bacillus licheniformis
atgttctcaagtttaacaaaaaacgatttgttcttaaagagattgggacaagaaaacttcccggggcagaaaagcggaatttattaccaaactgtcgaaaacaatcggtacatccgtcattaa

SEQ ID NO: 3939 - DNA, 936 bp, Bacillus licheniformis
atggctcattctcacggacatacaggacacagccaccatggcagccgatcagcaaatcaaaaagcgctgttcatcagcttcggtttaatttttacttttatgatgattgaagtgataggcggaatattgacgaacagcctcgctttgctgtcagatgcgggacatatgctcagcgacgctgcggcgcttggcttcagcctcttggcgtttaaaattggggaaaaggccgcaagcgcgagcaaaacattcggctacaggcgctttgagattttggctgcgtttatcaatggcatcaccctgcttttgatttcactttatattttttgggaagcatacaatcgctttttcagcccgccggaagtcgcgggaaggggtatgcttgcgattgcgacggttggtctgttcgtcaacattgctgcggcctgggtaataatgaaaggcgacacaagcgggaatttaaatatgcggagcgcttttttgcacatcatcggcgatatgctgggctctttcggggcgatcatcgcgggcctccttatgcttttcttcaattggaacatcgccgatccaatcgccagcgccgtcgtcgctgctttggttctcgtcagcggctggcgggtgacgaaagactcggtgcatatattaatggaaggaaaaccgaaagacattgatgcggaggcgcttaaaaacggcctgctttccatcccgtcggtcagggaggttcacgacctccacatttggtcgatctcatccgatatgccgtcattaagctgccatatcgtagcggatgaaaacagtgacagggatagaattttaaaacaagtatcaaaatatctaaggaaagaatgcaacgtggagcatgtgacggttcaaatagaaggggagcgctgttcccctcatgaatcgtgcagcctgggagcaaaccatccccgctcttaa

SEQ ID NO: 3940 - DNA, 147 bp, Bacillus licheniformis
atggaaaaagcgatgcacaagtcgcatggaatggggtacgaggagtacagcagaagccatgtgaatcggcttgaagttgagaaaagacgagaaaagcagtatcaaaaaagcaagcagatcgtatcagacttgcccataatcggataa

SEQ ID NO: 3941 - DNA, 369 bp, Bacillus licheniformis
gtgaatcagcatgaatcagaaggcattatcgaatccgcactgcacgaatataaggcggggatcggcatcttttccgagaaaatgcccggaattgccgccaaatacaacgaatttaccgaagagtgctttaaaaaaggcgtgctcagcgaaaaggataagcagctgatcgcactgggcatcagtgtcaatacgcaggatgaatattgcattatttatcacatcaagggctgcctggattgcggagcatcggaggaagaaattcttgaggcagtcggtgtaactgcggcatttggcggaggcgcagccatgagccaagccgtcacgctcgttttgcaggcgatggaagaattccagcagatgaagcattga

SEQ ID NO: 3942 - DNA, 831 bp, Bacillus licheniformis
atgaaaaaaggtttattaacagctttattcatcatttttgcaggcgttttggccgcttgcggatcttccagcagcgaaggagataaagacagcaaagtcattacagtcggagcgacgccgacgcctcacgccgaaatccttgaagaagcaaaaccgcttttgaaagaaaaaggctatgagcttaaaatcaaaaatttcacggactacaaactgatcaacaaagcgctcgctacaaaagatcttgatgcgaactacttccagcacgtcccttaccttgaacaggaaatgaaagaaaacaaagattacgatctagtcaacgtcggtgcggtacaccttgagccattcggcatttactctaaaaagtataaatctttaaaagaccttcctgacggtgcaaaaattattatgagcaacaatgccgctgaacagggccgcatgcttgcaatgcttgaaaatgcgggactgatcaagctgaaatcaggcattgaaaaagtagatgcgacagtaaaagatattacagaaaacaagaaaaacctgaaaatcaaaaatgatgtggcgcctgaaatgacggcaaaagcatacgaagctaatgaagcagacgcagtgttcatcaatgtgaactatgcgatccaaaacaagctgaatccgaaaactgattcaatcgaacttgagtctccaaaagacaatccttacgctaacatcatcgccgtccgcaaaggcgacgaagattctgacaaagtaaaagctctgatggaagtattgcgctctgacgacatcaaaaagttcatcgacaaaaaatataaaggctctgtcatttctgtatctgagtaa

SEQ ID NO: 3943 - DNA, 669 bp, Bacillus licheniformis
atgtttgaaaaactgtttccaaacgtagatatggagcagctgtgggaagcaacgtatgaaacgatatatatgacaggaatttccctattgtttgcttttatcatcggagtgattctcggcatgctgctctatttgacttcaaaaggcaacatttggcagaaccgagtcgttaacggtgtaatctcggcaatcgtcaatgtgttcaggtctattccttttatcatattgattattttgctgctcggtttcacaaagtttttaatgaatacgattctggggccgaatgccgctcttccggctttgattatcgcatccgctccgttctatgcccgcctggttgaaattgctttgcgcgaggtcgacaaaggcgtgattgaagcagcgaaatcgatgggggcaaaaacatcgacgatcatatttaaagtgctcctgcccgaatcgatgccggcgctgatctcaggcattacggttacagccattgcactgatcggttcgacagcgatggccggagcaatcggttcaggcggactcgggaaccttgcctatgtaaacggctttcagatgaacaatcccgatattatactgatcgccactattttcatcttagctattgtgttcatcatccaatttatcggggattttataacaaataaattagacaaacgttag

SEQ ID NO: 3944 - DNA, 1026 bp, Bacillus licheniformis
ttgataaatcttcaaaatgtttcaaagatttatcggtcaaagcatggagatgtcaatgctgtccaagatgtcacccttacgataaaaaaaggtgaaatcttcggaattattggatatagcggagccggaaaaagctccttgatccgtctcttgaacggacttgaacagccgacttcaggcacggttgaagtagccggcagaaaaatcagcgagatcaaagggaagaagctgaggaaagcaaggcaggaaatcagcatgattttccagcatttcaacctgttatggtcgagaacggtgcgcgacaatattgcgtttccgctggagatcgccggtgtcagcaaagcaaaacgtctggaaagagtcgctgaactgattaagcttgtcggtcttgaaggcaaggaaaacgcctacccttcacagctgagcggaggccaaaagcagcgcgtcggcatcgcacgggcgctcgcaaacaatccgaaagttctgttatgcgatgaagcgacatcagcgcttgatccgcagacgactgattcgattctgggtcttctgtccgatatcaatgaaaggctcggactgaccattgtcctgatcactcatgaaatgcatgtcatcaggaaaatctgccacagagtggccgtcatggaaaacggaaaggtcgtagaagaaggcgatgtactgaacgtcttcatcaagccgaaggaagaaatgacaaagcgctttgttcagcaggtaacagaaccggtggaaacaaaggaaacgctgaagcatttcctcgaagaaacgacatccgggcggacgatcaagctcactttcgtcggcgaagcggccgaatcgccgctgatcacgcagatcattcggaagttcgatgttgaagtcaacatccttcaaggcaaaatctcgcagactcaggacggtgcatacggttcattgttcatacatgtcgacggacgtgaaaacgaggtcaatgacgtggtcgatttcatcaagagccgccaggtagaagcagaggtgatcacgaatgtttga

SEQ ID NO: 3945 - DNA, 348 bp, Bacillus licheniformis
ttggagaaaatgggattgatagaaagagagggcaaggctctttttttaaaacctctattatctacaacggctttgctgattacgtttcaaggagagaaagaagcttttacgttagcaatcaacgaaaaaggggaaatggaaaaatattctcctgtagaaaaagctcatttgaccttttttggagagcaaagcgagattattgaccttcttcatggcgacatttcattgcagcatctcgtacagcgcggcactgttaaagtaaaaggctcttttagagctttattgaagcttgaagcgattttatggctgacggacggcttctttaaaaacagcgatctttattcatag

SEQ ID NO: 3946 - DNA, 309 bp, Bacillus licheniformis
atgcaagaacttcaagaaaaagagctaaaacggctagagcatgaaacttgtcttctatatgtatacacgccgttctgcggaacgtgtcagctggccggaagaatgctggaggtcgttgatgaaatgatgaaggacattcctttttataaaaacaatctcaattactccccgtcatttgccaaacagcaggaaattgaaagcgtcccgtgttttatcctttacaaaaaagggcgagtcgtcaaaaaagaatacgcttttcactccgtttcctacttatatgatacgattaaacaaaatcttgtggattaa

SEQ ID NO: 3947 - DNA, 345 bp, Bacillus licheniformis
atgccggaaaatgaaaaagtcatgatcgtcgaagggaaatcagataagcaaaaagtgaagcatgtcatcgaagagcccgtggacatcatatgcacaaacggaacgatcagccaggcaaaactcgatgaattcgctgagacgctgttcgataaagacgtttatatcctggtggatgccgatgaatcaggcgaaaagctccgccggcagctgaagagggagcttccccaagcttcgcatctatacattgatagagtatacaaagaagtcgcttccgccccgagtcagcatgttgcagaagtattatttcgttcaaacatccgggtacatacaaaatatctattataa

SEQ ID NO: 3948 - DNA, 237 bp, Bacillus licheniformis
ttgacgctgaaaaaagaacgtattgatattacagaacatgtggaaagccgattaaaaaacggcggaacgcagctgtatcatgaaaatgagctgatcggccgaatgaccggcaaggatcaatacgagttgaaatctggatattcattccaagatgaaaagttttacaaaatggcggataccgtaagcggaccggatgctaaatatgtagactgtgatgaccaccaaggctggtgttaa

SEQ ID NO: 3949 - DNA, 384 bp, Bacillus licheniformis
atgagcacaccgaaagagttgcgttattcagaagaacacgaatgggtgaaaaccgaaggagataaagtcagaatcggcattacagactttgcacaatctgagcttggagacatcgtatttgtcgagcttcctgaagtgggagacgaaatcaaagcggacgagccttttggcagcgttgaatccgtaaagaccgtttctgagctgtatgccccgatcaacggaaaagtggtcgaagtgaacgaagatctggaagacagccctgaattcgtcaacgagtctccgtatgaaaaggcttggatgattgtcgtcgagccgtcagacgcttctgaaatcgaaaacctgatgacagccgggcaatatgaggacatgataaaagaagactaa

SEQ ID NO: 3950 - DNA, 357 bp, Bacillus licheniformis
atggctttggatttttactggtatccgaaatgcgggacatgccgcaaagcgaaaaaatggctcgaagaccacggaaaagaaatcaatgggatacatatcgcagaacagccgccgagcaaggaaaaactgaaagagctctacgagaaaagcgggcttgaattgaagaagtttttcaacacgagcggccaaaaataccgcgaactcggcctgaaagacaagctgcaaagcatgtctgaagatgagcagctggaactgcttgcatcagacggtatgctgatcaaacgcccaattacgacagacggcagtaaagtaacggtcggttttaaagaagatcagtttaagacatactggttataa

SEQ ID NO: 3951 - DNA, 1785 bp, Bacillus licheniformis
atggaacaaacaaaagatcatatgaaaaaaggcggcgcctttctgatcgaagaggtaacggctgatcagatgttcacaccggaagatttcacagatgaacataaaatgatcgccaaaacgactgaggattatattctcggagatgtgctaccgtacatcgacgaaattgaagagcacaatttcgatcattctgtcaggcttctgaaaaaagccggcgaactcgggcttctcggagctgacgttcctgaggagtatggcggactcggacttgataaaatcagctcggcgttaatcaccgaaaaattttcaagagcggggagcttttcgttatcgtacggggcgcacgtagggatcggcacgcttccgatcgtatttttcggaaccgaggagcaaaagaaaaagtatctgccgtcccttgcaacgggggaaaagtttgcagcctatgctttaacagagccgggctccgggtctgatgcattaggggcaaaaacaacggccgttttgaatgaggcgggaacccactatatattaaacggcgaaaagcaatggattacaaactcagcctttgctgatattttcatcgtctatgcgaaaatagacggcgaacatttctcggccttcattgtggaaaaagactactcaggcgtctccacagggcctgaagagaaaaaaatgggcatcaaaggctcttcgacccgcacgctcatcttagaccaggttcaagttccaaaagaaaacctattaggtgaaccgggaaaagggcatgtcatcgccttcaatattttaaatatcggacgctataagctcgctgtcgggacaatcggcgcttcgaaacgggtcatcgagctgtccgcttcatacgccaatcagcgccagcagtttaagacaccgatttcaaagttcagcttaattggggaaaaaatcgccaacatgtcagtcaaactttatgcgatggaaagctctgtttatcgtacggtcgggctgtttgaagacaaaatgggcaccttgagcgaagaagagcaaaaagacgggcgccaggttgcgaaatcgatcgcagaatatgcaatcgaatgctcccttaacaaagtattcggatctgaaacgcttgattatatcgttgatgaaggcgttcaaatccacggcggttacggattcatgcaggaatacgaagtggagcgggcttaccgcgattcacggattaaccggatttttgaaggcacaaacgaaatcaaccggctcatcgtcccgggcacctacatgaaaaaagcgatgaaaggcgagcttcctctgtttgagaaagcaaaggctcttcaggaagaactgatgatgctcatgcctgaagaaccaggtgacggcgttctcgaacaggaaaagtatctgctgagaaacgccaaaaagaccgcgctcatgatcgcgggactcgccgcgcaaaaatacggaaaagcgctcgaccaggagcaggaaatcctcgtcaacatcgccgacattgtcagccagatctacgcaatggaagcagctattttacgtactgaaaaagccatccgggcaaccggcgaagacaaaaacgcacagaaaattctttatacgcaaatttttgcgcaggaagcctttcaggaaattgaaagccatgccaaagaatcgctcattgcgatggaatcaggcgattcgctgcgcatgatgctgtccgcgctgcgcaaattgacgcgctttacgcctgtcaacgtgattgagaaaaagcgccaggcagccaagggagtctttgaagctgagaaatatatcgtttaa

SEQ ID NO: 3952 - DNA, 1176 bp, Bacillus licheniformis
atgaaagaggcagttattgtatcgggggcgagaaccccgatcggaaaagcaaaaaaaggctcattgaggactgtccgtcccgatgatttaggcgcatatgcggtgagagagacgctgaaaagagcgggcggttatgaagggaatatcgatgatttgatcatcggctgcgctacgccggaagccgaacaaggcttgaatatggcgcgcaatatcggcgcgcttgccggtctgccgcacacagttccggccgttacgatcaacagatattgttcatcaggacttcaatcaatcgcttacggggccgaaaaaatcatgcttggagctgctgacacgatcattgcaggcggcgccgaatcgatgagcatcgtgccgatgatgggtcatatcgtcagaccgaacgcggctctggcggaaacggctcctgaatattatatgggaatgggccatacggctgaacaggttgccgtcaaatacggcgtttccagggaggaccaagatgcatttgccgtcaacagccatcaaaaagcagccaaggcgatcgcggaaggaaagttcgaagatgaaatcgtcccggtggacgtcaccgtcagagaagtggatgaacatcataacctgaaggagcggacgtttactttctctgccgatgaaggtgtacgcccggggacaaccaaagacgttctgtcaacgttgaaaccggcgttttcggcaaacggctcggttacggcagggaattcctcgcagacgagcgacggggctgccgcagtgatgatcatggacagagaaaaagcggacgcactcgggttaaagcccctcgcaaaatttcgttcgttcgcagtcggcggcgttccgccggaagtgatgggcatcggccctgtggaagcagtcccaagggcgctgaagatggcgggacttgagctgtcggatatcggtttattcgaattaaatgaggcgtttgcatcgcaagcgatccaggtcatcaggtcgcttggcattgatgaagaaaaagtcaatgtcaacggcggagcgattgcgctcggacatccgctcggctgcacgggtacaaagctgacgctgacattgatccacgaaatgcgccggagaagcgagcaattcggcattgtgacgatgtgtatcggcggaggcatgggagcagcaggggtattcgaattagtttaa

SEQ ID NO: 3953 - DNA, 2391 bp, Bacillus licheniformis
atggtcaagcatattcgaaaagccgccgttatcggttccggtgttatgggttccggcatcgcggctcacttagccaatatcgggattcctgtattactgctcgatatggtgccgcatgaattaacagatgaggaaaggaaaaaaggccgcacccttgaagacccggatgtgcgcaatcggctggcacggacagccgtacaaaagctgctaaagcaaaaaccggctccgctgacttcaaagaagaatatcagccgtatcagcacagggaacatggaagacgattttgaaaagattaaagatgccgactggattattgaagttgttgtcgaaaacctggagatcaaaaagcaagtgttttcaaaggtcgatcaatacagaaaacaaggaagcatcgtcagcagcaacacatcaggcatctccgtcaggcagatggctgagggaaggtccgctgattttaaaaagcactttttaggaacgcacttcttcaatccggcccgctatttaaagctccttgaggtgattccgattgacgaaacggagcccgaagtgctgtcctttatgaagaaattcggcgaagacgttcttggcaaaggggttgttgaagcgaaagacacgccaaactttatcgccaaccgcatcggaacctacggcttgcttgtgacggttcaggaaatgctgaaaggcggctacacgataggcgaagtcgattcgattacaggtccgctgatcggacgcccgaaaagcgcgaccttcagaacgctcgatgtcgtcggccttgatacattttcacacgttgccaaaaatgtctataaccaagtcacgggcgaagaaaaaaacgttttccggctccctgaatttattgaacaaatgctcgaaaaaggctggatcgggagcaaagcgaaacaaggtttttacaaaaaagaaggaaaagacatccttgagctcgatccgatgacgatgacctacagcgcgcgtcaaacattaaaaacatcgggactggaagcggccaagcaaatgaaaggcgcaggagcgagattgaaagcgcttgtttattccgatgacagggcgggaagcctcctttggaagattacagctccgacgcttgtatattcggcggagctgacaggggaaatcgccggcagcataacggcggttgatcaggcgatgaaatggggattcggctggtcggaagggccgtttgaaatgtgggacagcatcggtgtgaaaagctcggtgcaaaagcttgaagcagagggctggaaggtcgcggactgggtgaaggaaatgctcgcaaaaggacatgaaaccttctaccttaaggaaaacggaaagacgttctactactgttttgaaagcggcgaatacagggcgcttcaagaaaacaagaaaacgatccatttgtcgtcactcaaagaaacaaaaggcgtcatcaagaaaaacagcggggcaagtttgatcgatttaggcgatgatgtcgcactgctcgaatttcactcgaaaagcaacgcaatcggcctggacatcattcaaatgctgaaatttgctctcgaggaagtagacgccaactataaagggcttgtgatcggcaaccagggcaaaaatttctgcgtcggagccaatctcgcgatgatgctgatggaagctcaagacgacaactatatggaaattgacatgatcatccgtcagttccaagagacgatgatgaaagtgaaatacagttccaagccggtcgtcgctgctccgttcggcatgacgcttggcggggggactgagctatgcctgcctgctgcccgtgttcaagcctcaagcgaatcatacatgggcctcgttgaaacaggcgtcggtctgattccgggcggcggaggcaataaagagctttatttaaattacttgaaagggctgcctgaaggcgttaaaccggatatccaggaggccgccatcaagacgtttgagacaattgcccttgcaaaaacgtcgacttcggctcaagaagcgaaagaactgaacatcttaaccgcagaggatcaaatcagcatcaatcaggatcacttgttatacgatgccaaaaaactcgtcctgacactttccgaaagcggctaccgtccgccggtgaaagagaaagttccggtgacgggcgaaaccggctatgcggcgctcctgctcggtgctgaatcgttaaaactttccggcgccatctctgaacacgacatgaagattgcgaaaaaactggcgtttgtcatcgcgggcggccgagttccattcggcgccgaagtaacggaagaatacttgctcaatttggaaagagaagcgtttctgagccttgtgagcgaaccgaaatcgcaggcgagaatgcagcatatgcttgtgaaaggcaaacctttgcgtaattag

SEQ ID NO: 3954 - DNA, 162 bp, Bacillus licheniformis
ttggtacgtgaaagaaaaaatccatcttctgccgcagtcagcgccgcaagcataaaaggcaatgcaggtccggattataaaaagacggatgcgggcggtaaacggacaagccaaaaccagcaatataaaaagcataatatggatgttcctgaagatcactaa

SEQ ID NO: 3955 - DNA, 249 bp, Bacillus licheniformis
atgcagcagcaaggaatgacaacaccgccgccggtcatttcaacgaaggaccatctgtatttgcaggatatgctgaactggaacctgctcgcgatgaaaaaagcgcattttatggcggatcaatgccaggatcagtctcttaaaacagaactcgacagggtcggccaaatgcaccatcaccattacaatatgatattggagcagcttcgtcaaaatcaaacgcaaaacccgtcagcatacatgcaatag

SEQ ID NO: 3956 - DNA, 342 bp, Bacillus licheniformis
atgaatcagcaaaaccaacagaaaatcggcaatcaggaaacccctgttccaaagacgagcgcgatgaacgacagggattttgtcaacgaactgctgacaaccgaaaaatatatgacgtcagcatactcgacggcgcttaatgaactaagccatgaatcgctttaccaggccgtacagccgctgtttaacgaggcgcaaaacgctcagcgcagattgtaccaggtaatgtttcaaaacggatggtacaaggtggaggcagaagatgcccaaaaaatccagcagtcctatcagcagttccattctacactgcaagaccagtcgccttatcagcaaaatcaataa

SEQ ID NO: 3957 - DNA, 252 bp, Bacillus licheniformis
gtggaaaaactcagggagcagctggacggactggtcgagaaatatacggaactgcttttgggcgaaacggacgaagaactgaaagaacaggtgaagatgtggatcatctacagccatatcgccaaaagcatgccgcccctcgccaagcattggaacggagcttatccggatgcgaagcaggggataaaagaagtaatccgccagattaaagaacgtaatgaagcgcaccgggcggctaatcagaaaaaataa

SEQ ID NO: 3958 - DNA, 708 bp, Bacillus licheniformis
ttgcttcgtttccgccttggaacgaagcagaccggctccttattctctgttaaaggaaacatgctccttgatgaggattttttaggccgttatgcagaagctataaaagacaggctgaacgctccgaatcaaaaagttgcggcttcaatgctcgttaagcgcggcggcatgcttgctgcgctgcatttctatctgtttacggtttgcggaaaacggctcccagccgacccggcttccgtatcgtgggagatagaagcggatgatcaaggatggacgccgtcgttttattttcacaaaggtgctgagcttatcgaaggggaccgcaccgaagaactgaaaaaattgaccgaagatatcttcaggcgccatttgggcggcatgatcgaggcctgtcgacagacattctcgatttcaaagcacattctttgggaaaatattgcggtttatctgtattggatgtacgacatgcttcaggaagatccgaagctcaaggcacgggcggcgcgagatttccgttttcttctttacgaagcagagccaggcctttttgatgaaggtgaggacgaaaaccctctcaaaaggttttatcccggacagcatgcggaggatcggacacgcacgacttgctgtctgtattatgcaacagacgaaaacggcgtcaaatgcagaacatgcccgagaaataaacataaagaaagggtgtcgtga

SEQ ID NO: 3959 - DNA, 819 bp, Bacillus licheniformis
atgagtgccatttcaacagaaacgttaagcttaggttatggagaaacaatcattattgatgagttaaacttaacgatcccaaaaggtgaaatcaccgtatttatcggcagcaacggctgcggtaagtcgactctccttcggtctctcgcacgtttgatgaagccaaagggcggttcggtgctcctcgaaggcagctccatcgccaagcttccgacgaaagaagtggcaaaggagctggccattcttcctcaaggcccttcggctccggaaggcttgaccgttctccagctcgttaagcaggggcggtatccttaccaaaactggctgaagcaatggtcagcagaagatgaagaggccgtgcaaagggctttgaaagcgacaagaatggaagaactggctgagcgtacagtcgattccttgtcaggaggccagcggcagcgcgcttggatcgcgatgacgctcgcccaggaaacggatatcattttactggatgaaccgacgacatacttggatatgacgcatcaaatcgaaattctggacctattgtttgaattaaatgaacacgaaaatcgcacgatcgtgatggtgctgcacgatttgaacctcgcctgccgctacgcccatcacctcgtcgcgattaaagataaaaagatatatgccgaaggccggcctgaatccattatcaactgcaagcttgtacaggacgtttttgaaatggactgcgaagtgacgaaagatccgcttttcggcacgccgcactgcattccgtacggaaaaggaagatgcatcgtccagcaggtggttcagtcccatgcttaa

SEQ ID NO: 3960 - DNA, 1056 bp, Bacillus licheniformis
atgaaaaattaccgcacgctgagaatcggaaaaggcggcatttcactgttgatcggcaaaaaagcgctgttttcgttcatgatcctattggtgttgacggcttgtgcagtcatcctcagcgccggcatcggcgaacgttttatttctccgggcgccgtcgcgaaaacgtttttgggcatgggggatccgggcgatgacctgatcatcatgtccttcaggatgccgcggattttggtcgctctgtttgccggaatctgtctggcggcagccggatcgatcctccagggtctgatccgcaatccgctcgcttcgccggatattatcggtgtgaccggcggggcttcagtcgccgttgtcttgtttttaatgctgttttccaataaaaataatgcgcttacggtcagcatcagctggctcccggtcgccgcttttatcggcgcggctctcgccggaatgctcgtttattttctttcatataaaaacggctcttcaactttcaggctcgttttgatcggaatcggattttcgatgcttgcccagtcgctgacgacattgtttatgataaaaggaccgatatacagaatgtctcaggcgaacgtctggattaccggatcagtatatggggcgaactggcaggatgtgaacgttttattgccggctgcgcttgtccttttgctgatatcggcagccgccgccagaaacgtcaatatccagacgctcggcgaagaactggcgacaggagcgggcagctcggttcagcgaaaccgctttttgctcctgcttctgagcactgcttttgccggaatcgccgttgcttttgccggaactgtcggttttgtcggtttgatggccccgcatatcgcaagaaggcttgtcggatcgtcattcggcgccctcttgccggttgccgcgctgatcggaggattgctcgtgctgattgccgacatcatcggccgcacgcttttttctcccgttgaagtgcctgccggtgtgtttaccgccgcgatcggcgccccttactttatctacttgctgtataaaagcagaaaccaataa

SEQ ID NO: 3961 - DNA, 1002 bp, Bacillus licheniformis
atgctcttaagaacgaataaatatagaacaatcgcactactgtcgtttattttggtgctggctgccgccgtttgcgccagtatcgtatacggttatacgaatacgtcatggtcgatggcctacaaggcttttacggacttcagcggctctaatgaacatctggtcatcaaaaacgtgcgtttgccgcgcgcgctgatcgctgcaactgtcggcgcttccctcggggtagccggcgctttaatgcaggcgatgacaaaaaatccgcttgcttctccgggaattttcggtgtgaatgcgggcgccggcttctttgttgttggagcgctgtttttctttcatgtcagttcgcttcaggcgattgcatggatctcatttttcggcgcagcctttgccgcgcttgtcgtctattttgtcggctctctcggaagggaaggtctgacgccggtcaagctgacgcttgcaggggcggcgatgtcagcgctgttctcatcactgacgcaaggaatgctttccgttaatgaagcagctcttgagcaggcgctgttttggcttgcgggctctgtccaggggcgcgacctcagcctcttggtctccgttcttccatatatcgtgcccgcattcatcatcagctttttgctaggatccaaaatcaatgtcttaacaatgggggaggaagtggcaaaaagcctcggccaaaaaacgtggctgattaaagcgctgatggcggtttcgattgtcctgctagccgggggatctgtcgccgtggccgggccgatcggctttatcggcattgtcatcccgcattttgctaaatttatcgtcgggcacgaccatcgctgggttcttccgtactgcgccgtgcttggagccatcctgctcgttaccgcagacattggcgcaaggtacctgatcatgcctgaagaagtacctgtcggcgtcatgacagccatcattgggacacccatttttgtctatatcgcgagaagggggttccaaaaatga

SEQ ID NO: 3962 - DNA, 978 bp, Bacillus licheniformis
atgaagagatggtctattgttggatttatcgctttgttagcgatttcaattcttgcagcctgcggcggaggcaaagatgactctgcaaagggcggagagaataaagatacgatcaccgttaaacatgcaatgggtacggaagaccgagtgcctgcagacccgaaaagagtcgtcgtcctgacaaatgaaggaaccgaagcgcttttggaactcggaatcaaacctgtgggtgcagtcaaatcctggacaggcgatccttggtataagcatattcaagccgatatgaaaggcgttaagcaaatcggactcgaaggcgaaccgaatatcgaagcgattgccgagctgaagcctgatttaatcatcgggaataaaatgagacatgaaaaaatctacgacaagcttgaaaaaattgctccgactgtcttctctgaaacgctgcgcggagaatggaaagacaacttctctctctacgcgaaagcggtgaataaagagaaaaagggcaaagaaattttagaagatttcgataaaaaagtcagcgaattaagcgacaagctcggcgaccagaaaaagaaacgggtgtcggtaatcagatttatggccggccaatcaaggatttactataaagattctttcccgggaattatcctggatcagctcggattcaagtatccggaaaaacaggaaaaactgtttgagaaacaagacgacaaatttgtttttatgacggaaaataaagaatcgatccctgatatggacggagatgtcctggtctatttcacatataaacctgccgaaagcaaaaaagaagctgaaacatggcaaaacgattggacaagcgatccgctgtggaaaaaattgaacgctgtaaaaaccggaaacgcccatgaagtcgacgatgcgatctggacgacggccggcggcgtaaaagcagcgtatctgttccttgatgacatcgaaaaatactttttaaaatcttaa

SEQ ID NO: 3963 - DNA, 447 bp, Bacillus licheniformis
atgaatcaatttcggatggccgttatcgctctcgtcctgatcctgatgaccggctgcggctccatagcggaagaacatgcggaaggcaaggaggccgttcccgataacgcccctgtttcagatgtgaaaagcgtgccttacgatacatttgcattggaagtgaactatggccatggaaagcacaatacgtttgaagccgtatacgacaaacaggagcgggaagaagcatcgattaaagactatctgaacggagcggaccgcgaaggggaggaagctttaaacgaaatgaaaatggttttaagcgagctttcgatcgccaaatccgattcagagcaggacgtgatcagcaatgtgctcgaggccttcaatcttgacgaacaatatgaccggtttcagctgcgggtgaaatggcctgatggcacgtccagaatctataacggaaaataa

SEQ ID NO: 3964 - DNA, 1785 bp, Bacillus licheniformis
atgacatttcatcaacttaaggatacgtgggatctcgaggttttctttaaaggcgggagcggctccgccgaattccgccaatatttaaatgagattaaaacactgctttcaacttttaaacgttcggccgaggctcttaccgtctcaaaaagcggccttgatgaattgaaagaaacgctggcgctttttgaaacaattgatgttaaaatccgcgaagcagacgcttttgtcggatgtctccaagcccaggacaccgcggatttaaaggcgaatgcccttaattttgaggtcacccggctcgctgccgatgcgcagaaggcgctggtcgtgcttgacagcaaatttgccgttgtcccaaatgtagaatgggaagcgatccttcaagatgaaagcatttccgatatcgcttatattttgaatgagagaagagagcgggtaacggaaaagcttagttccgaacaggaaacattgattcaaggcttgtctgttgacggatatcatgcctggggcgatatgtacgacagcatcgtcgaccaaattcaaattccgtatgaagaagatggcgagacgaaaattctgtctgtcggacaggcgcagaacctgacatctaaacctgacagaaagatccgccgctccgtatcggaaaatttggaccacggctgggaacagcacgctgatttgctcagcagcacgctgaatcacctcgccggtttcagactgaacgtctatgaggcgagaggctgggacaatgtattgaaagaaccgctggacatcaaccgcatgaagcaggaaacccttgatgtcatgtggcaggtcattattgatcataaaaagccgtttgcagactatctttcccggaaggcgtctttgctcggactggataaactgagctggtatgacgtcgaagcgccgatcggttcagcagcaaaggaatattcgtatcaagaggcagccgcttttattaccgggcagtttaaaacgtttggaaaaaagctctcctcctttgctgaaaaggcgctcagagacagatgggttgaagctgaagacaggggaggaaaacgtccgggcggcttttgcgccaattttcctgacagcggggaatcaagaatatttatgacatttgcaggaagccagtcaaacgtttccaccttggcgcatgagcttggccatgcctttcatcaggaatccatgctggacgtcaggccgctgaacagggcgtatgcgatgaatgtggcggaaacggcgtccacctttgcagaaatgatcgtggccgatgcggcgttaaaacaagccggttcagacgaagaaaaaatcgtccttctggaagataaggttcagcggagcgtcgccttttttatgaacattcacgcaaggttcctatttgaaacccgcttctacgatgaacgaaaaaacggcgtcgtatccgccggaaggctgaacgaactgatggaagaagctcagaaagaagcgttttgcggtgcgcttggcgagtatcatccgtatttttgggcatcaaagcttcatttttatattacgtctgttccgttttacaattttccttatacgttcggctacttgttttcgcttggcatttacgcgcaagcgctgaaagagggtgcggcatttgaagaaaaatatattgctctcttaaaagatacagcctccatgtctgttgagaaactggccatgaagcatctcggcgccgatctgacgaagcgggatttctgggaagcggccattcagccggctgtccgagatgcagaagcatttttagcgatgacataa

SEQ ID NO: 3965 - DNA, 1155 bp, Bacillus licheniformis
atgaatgttaaacgatccctcctgttcattattgtactatgtctgacgctgttttttcatagctcggctcaagcaggagaaaaaaacaaaccggaaatcaaaagcgtttccgctatattgatcgatgggaaatcgggccaggtcctctatgaaaaaaacagccgcaaaaaaatgtatccagccagcataaccaaaattgccacggcgatttatgcaatagaaaacggaaatttggaagatcgtgtgaaagtcagcaaaaatgccgctcaaacggaaggatcaagcgtatatctggaagagggggagtcggttccattaaaacggctgctccaagggctgctgatgaattcgggaaatgacgccggtacggcgatcgccgaacatctcagcggaagcgtgaaacagtttgcggatgatttgaacgcgtttattgccgaacatgccggagtgcatgacactcattttatgaatcctcacgggctgtttgacaaaaatcattatacgacgtctgccgacatggcgagaattactgagtacgcaatgaaaaacaaaacgttccgagcgcttttttcggaaaagcaaacggattggcacggacagacatgggacacgacgcttaaaaaccatcatcgaatgctgacgggtgagattccttacaaaggtataaccggcggcaaaacaggatttgtggatgaatcaaagcatacccttgtcacgacggcaacgcggggcagccttgatttaattgcggtcgtcatgaaggcagatagcaagaaaatgatgtacagcgatacaaaagctcttctggatgagggatttcacaatttcgagacacaagaactcaaaaagggagaagcgtttacggaccagaacgggacgagccatgaactgaaggaccctttatacgttacgaaaaagaaaggcgaagttctgagtgaaaatgtagacacggacggaatccttaacattaaaggggaggatggcaggctgcttcaagccctgcaaatcgcagaaccattcagcgcggaaatgacaaacggtacagatgctattcagggtcaaccgcaaagtaaaggcggattgtttttatttgtgttcggcctaatcggtttattgacggccagctatgcggtcaagcggatgaggcagctgtaa

SEQ ID NO: 3966 - DNA, 843 bp, Bacillus licheniformis
ttgaacaataaaatcgcaattgtaacgggcgcgacgagcggatttggtttattgaccgctttaaaactcgcaagcactcatttcgtaatcgcaacggcgcgccatccagaaaaagcggaagctctgcggaaccgtatagcggagctgtcgatcgagtcatcgattgccgtcgctgaacttgatgtcacaaacgaacaatcgatttcctcattttccgaagagctgaagcagtacggacagatagacgttctcatcaataatgcaggaacggcatacggcggattcgctgaagagctttctcttggcgactacagaaaacagtatgacaccaatgttttcggcctggtggcagtcacaaaagcggtccttccttatatgaagaaacacagcggcgccaaaatcatcaatctgagcagcatcagcgggcggatcgctttccccgctttctcggcatatgcttcatcaaagcatgcagttgaaggcttttcagaaagcctccgcctcgaactccgtccattcggcatcaatgtggccgtcgtccagccgggatcgtaccagacggcgatttgggagacatcgtttgccgcccaagtcactgtacctgatgccgaatcacagtacaaaacatatttcgagcggatctccgcctacattgcagcgagccgcaaacattacggaaacccggatgatgtggctgaattgatctgccgactcgctgcaaaaaagcggctgaacaggctgcgctatccgatcggcaggggcgtccgtctctcgatccttctccaccaaatcctgccatggcggatttgggaacgtgcggtcataaaaaaattgcttaaatga

SEQ ID NO: 3967 - DNA, 465 bp, Bacillus licheniformis
atgatctctcaacaattaaaacagcaaaatcctgtacttgaaaactcaatgaatacgaatttgtcaaactggttcatcctttacacgaagcttcaccgttttcactggtacgtaaaagggccgcagttctttaccctacatgaaaaatttgaagagctatacaaccatgccgcagaaacagcagatgtgatcgcggaacgcttgctggccatcggcggacagccgctcgccacaatgaaagaatacattgaccacggcacaattgaggaaaacggagccgaaaaaacggccgaagaaatggtttccgcactggtaagcgattaccgtcaaatccgcgatgaaattcagcataccatcgaacttgcggaagataaatcagatcattctaccgctgacctttatatcgccctgacagaggaaattgataagcagatttggatgctttcttcatttttggacaagtaa

SEQ ID NO: 3968 - DNA, 1371 bp, Bacillus licheniformis
atggattttagacgcgatgacgaacaaaaacatgcaaatgaagagcagtttcacgaagaagcgcagacgccgcaaacggcaggttctgaggagcagcagtcagaacagccggcaaaggagcccgagctgattttaaagaaggatacagacgatcagtcagatcttacgaataaagaaaccgctgcagccctggaagatgccagggaaacgagagcggcaaaagaaaagcggcgcaaggcttcgtggctgagcccgattttgggcgggatcatcggaggcggcttggtgcttggaatctccccgtatctgccgggcgatcatccgagcgaaactgccggaaccggacagacagagccaaagcagtcgcagaatttcaccacaaaacctgtcacgaacgcagataacgtacctgatatggtggaagatttggagcctgcgatcgtcggagtttcaaatattcaaacgagcttcggcttctctgaagacgacgtggaggagagcggcacgggatcaggcgtcatctttaagaaagacggcggcaaggcctacattatcacaaacaaccatgtcgttgaaggcgcctcgaaggtgaccatctccttatacaacggaaagaccgcggatgccaagattatcggcagcgacgctttgactgatctggctgttttagagatcagcagcaaaggcgttgataaggttgcaagtttcggagactccgcaaaactgcgcgccggcgaaaaagtaattgcgatcgggaaccctctcggccttcaattttcaagaacggttacagaaggcatcatcagcggtgtcaaccggacgattgaagtctcaacatctgaagggaattgggatatgaacgtccttcagacagatgcggcgatcaaccctggaaacagcggcgggcctctgattaacagcagcgggcaggtcatcggcatcaacagcctgaagatcagccaaagcggtgttgaatcgcttggcttcgcgattccgagcaacgatgttcagccgatcgttgacgagcttttggaaaaagggaaagtggaacggcctttcctcggcgtgcaaatgatcgatatgcagcaggtgcctgaacagtaccagcaaaatacgctcggccttttcggagaccagcttaataaaggcgtgtacatcgataaagtatcgccgaaatcgcctgcggcagacgcgggtatgaaagccggcgacgtcatcaccaaaatgaacggcaaaaacgtcgaaaccacctcagacctcagaaaaattctttatacagaagcaaaagcaggagatactgtcacatttgaggtgctgagaaacggaaagcaaacaacaatgaaagcaaaacttgcgaaaagcaaatcataa

SEQ ID NO: 3969 - DNA, 147 bp, Bacillus licheniformis
ttgtcttcaactatcgcaaatggcattaaagctttaacatccacaaaaaaagagacccggccatcgttcactctgttttcattccctttcttccctgatgaatatgttacgaaaacattgtgggataaaaatgaaaagaatatgtga

SEQ ID NO: 3970 - DNA, 675 bp, Bacillus licheniformis
ttgtcatactccatttatctagttgaagatgaagagaatttaaatgaattgctgacaaaatacttagagagtgaaggctggcacgtcacttcttttctaaacggtgaaagcgccaggcaaaaaataggccagtcacctcatttatggattctcgatatcatgttaccagatatcgacgggtatacgctaataaaagaaataaaaaatcaagatccggaagtccccgtcatttttatttctgcgcgcgatgccgacattgacagagtgctggggctcgaactgggcagcagcgactatatatctaagccgtttctccccagggagctgatcatccgcgtgcaaaagctgctcaagctgatttataaagaagaaccgcctgagaagaaaaaaggaacgccggtttcctgctatgaagtctatgaagacttgagagaagtctatgaaaatggcagcatgatcaatttgacgtcaaaggaatttgatcttctgcttctatttataaacaaccagggccgcgccttttcaagggaggatattctcaccagcgtctggggagacgattacttcggaaccgaccgcgtcgtcgacgatcttgtcagaaggctgcgcaagaaaatgcccgaactgaaagtggaaaccatctacgggtttggctacaggatgttgaaatcatga

SEQ ID NO: 3971 - DNA, 1347 bp, Bacillus licheniformis
atgaagaacaggtcgctcgcctttcaaatttggagtgtcatttgcggcatcctgttaacggtctcgattttgctgacgtttctattctcgacgacactgcagaactttttcactgatgaaatttatacaaacattgaaaatgagcagcatgttctgacggaatacggattttccgattcaccggaaagaggcttcggcggaagcagcggctcgcgaagcacaaaccgccacgttcagcacgtcctgctgcctgagaaaggaaccgtctatcagagcccgcagattctccccgattcatttatcgagaaggtgcagaagctcgggaaaaggcaggacgagtcatcgaaaaggtattcggagaatgtcaacggagagcacgttttctttgtgctcaaaaaaatccagacccaggaccagacgtttctgttgttatcctatgcgcttgattcatacagggacgatttgtctcatacgctgtttaagcagctgctgtttattttgatcgtcgtcattttgctgagctggattccttctatttggctggcgaaatatttatcaagaccgctcgtcacgcttgaaaagcacgtcaaacaaatctctaaacaggattgggatgatcccgtgattgtcgacagggaagacgaaatcggcaagctggggcacaccattgaagacatgcggcaaaagctcatccagaaagatgagacagaacgcacgctcctgcaaaacatctcccacgacctgaaaacgccggtcatggtcatccgcgggtatacccagtcgatcaaagacggcatctaccctaaaggagatttggaaaacacgattgaagtcattgaaggcgaagctgaaaaacttgaaaagaaaatcaaggatcttctttatctgacaaagcttgattatttgctgagacaagaaagacagtacggaacttttgatatacaagaggtcattaaagaagttgttgaacgcttgagatggtccaaaaaagaattgaactggaagattgatcttgaagaggaaacaatgttgacgggcgatcaagaacaatggagcaagctgttggaaaacgttcttgaaaaccagatccgctatgcggagacattcattgacatcagcgtcaggtcgacgaaagaacatacattgatcaccattaaaaatgacggaccgcacattgaagaagagatgctttccagcctgtatgagccttttaataaagggaagaaaggcgaattcggcattggactcagcatcgttaaacgaatcttaacgctccaccatgctgacatgaccattcggaatgatcaaaccggtgtgtgctactcaatatccgttccgagaaattag

SEQ ID NO: 3972 - DNA, 165 bp, Bacillus licheniformis
atgaaagaaatcgatgacatgatcaggcgcctgcgcagcaggggaattaaggtggacaaagttaaatatccaaagcacgtcctgtgcgaaaagaaatggatgaaaaagccaaaaaacacagtgaagccgagctaccgggatttcaacggctattcgtttatatga

SEQ ID NO: 3973 - DNA, 885 bp, Bacillus licheniformis
atgaaacaaaaagagaaagtcattattgaaacagccatcaaacttttcgctaaaaaaggatacagttctacttcagttcaagagattgcaaaagagtgccaaatgtcaaaaggcgctttctacatttattttaaatcaaaagaagcgctcctcctttcagtccttcactactactatgaaagaatctttacccgaatccagaaaatcaaaacggagcatgacaatccgcgcgatgtgtaccggatgcagctcgtcgtttttttcgaaaacattttggagcataaagagtttatcacgatgcagtttaatgagcggtcgatgccgatcaatgaagaaattgaggcgtttgcgaaaaaaatgcggagaaccacgctcaggctgcacatcgaaaacatccagaacatttacggcaaagacattgaaccgtacagcgccgaactgtgctttatgatcaacggaatgagcgatgtctaccttgagctgatgattttgctgcaccattcgttcgacctgcagtctctcgccgaccacatgctgaaccgcctcgacgatttggcgaaggggatgatcaagcgcaatgaccagccgctgatcccattcgaaaaagcagacgagtggttcggcccattttacacatttgatccgctgaaggacgccctgctcaatgaaatgcgcgtcaaagcgaacaagcagtacaacggcgctcctcctgcagaccttgccgaaagcctggatattctggagaaagagctgagaaaagaaaaacgcaaaaacgccattatcaaaggcatgatagccaacttgaaggaatatcccgcgattcgaaaagaaacggacaaactcgccgaattgctcaaaaaagacatgcaccatccgcacggatga

SEQ ID NO: 3974 - DNA, 1389 bp, Bacillus licheniformis
gtggactacagaattgaaaaagatacgatgggtgaagtcaaggttcccgcggataagttttggggagcccaaacccaaagaagcaaggagaactttaaaatcggttccgagaaaatgccgcaggaaattgtgtatgcgtttgcaatcttgaaaagaagcgctgcgattgccaatgaaaagcttggaaatcttgaggcggaaaaaaaggaagcgattgtttccgtatgcgatgatattttagaaggaaagtatgacagccattttccgctggtcgtctggcagaccggcagcggaacacagagcaacatgaatatgaatgaagttgtggcaaacaggggaacggcttatttgcaggaaaaaggatcaagcctgaaaatccacccgaatgatgatgtcaaccgcagccaaagctctaacgacacattcccgacagctatgcacgtggcagctgtcctcgcgattcacgataaactgattccggcgattgaccgcttgagaagcacgctgcatgaaaaagctgaagctttcaaagacattgtcaaaatcggccgcactcatttgcaggatgcgacaccgctgacattgggacaggaaatcagcggctgggtatacatgctggaccgctctaaagagatgattcttgaagctgctgaaaaaatccgcgatcttgccatcggcggaactgccgtcggaacaggcattaatgcccaccctgaattcggcagcaccgttgccgaagagatcagcgctctgaccgggcagacattcaaaagctcgcctaataagtttcatgcgctgacaagccatgatgaactgacacacgtgcatggggcgcttaaagcgcttgcggcagatctcatgaaaatcgccaatgatgtcagatggcttgcgagcggacctcgctgcggaatcggcgagctgcttatcccggaaaatgagccgggaagctcgatcatgcctggaaaagtaaaccctacgcaaagcgaagcgctgacaatggtcgcatcccagatcatggggaatgacgcaacgatcggctttgccgcgagccaggggaactttgaactgaacgtctttaaacctgtgattatttacaacttcctccaatccgttcagcttcttgccgacggcatgaattcattccatgacaagtgtgctgtaggaatcgaacctaatcgggaaacaattgagaagaacctgaccaactctctcatgctggttacggctctaaacccgcatatcggatacgaaaatgctgcgaaaatcgcgaagctggctcataaagaggggctgacgctgaaagaagcggctctcaagctgaaccttttgacagaggagcagttcgacgaagttgttaaacctgaagaaatggtgaaaccgaaagcataa

SEQ ID NO: 3975 - DNA, 168 bp, Bacillus licheniformis
ttggcgcaaatcaggcttacggggaaaccggaggagattgaacgcattattcaatctttttctaagcattatgaggtttcatatgtatcgaaagaatacggtaaaacaaatccgaaatataaatatgcaaaagatacccgggtttatattgagctaaaattaaaataa

SEQ ID NO: 3976 - DNA, 1443 bp, Bacillus licheniformis
atgactcaatcggaattcaaggaacacatccatgaaaatctcgcaatgctccttccccatctcgagcataacgatgatctgattcaaaataaaaaaatgctgaaaaacggaatcattttttactttttgtactttaaagatttgaatgatgacaagaaaatccagaaggctgcgaaattgcttgtctccgatgacagctcctattcattggaggatgtccggctccgcttaaacaagctgaatgcggaacccgttacagcaaaaaaggacgcgattaacgcaatcttcaaaggaaaatgtctgctgttgatcaacggtttgaatactgtatttgcactgccgacagctgagaaaaagaaaagaagccttggagaagtgaatacagaaaacgtcgtcagaggcccgaaagtcggttttatcgaggatgtcgatacaaatgtggctctagtcaggcagcgtgtcccggataaagaactgaccgtggaaaaaatcccgctcggcaagagcaagtttaaagacgcgaccattctctatatccagggcaaagcggacgattcgatcatcaaagatcttaaaaagcgcctgaaaaaagttcagctggatgatattcaagataccggcgttcttgaagaattaatcgaagataataagtactcgccgtttccgcagatccagaataccgaaagacctgacaaggtttcttcagcgctgtttaatggacggatcgcaatttttgttgattactcgccatttgccctgatcgtgccggcttctttcggaatggtgatgcagtccccggacgatttttacgaaagatggatcgccacgaccttgatcagatttcttcggttcagttcgattttcatcaccctgttcctatcggcgttttatatttcgcttgtatcttttcatcaaggcatgctgccgacagctctcgctgttacgattgcgagcacgcgcgaaaatgtgccgtttccgccgctccttgaagcgctgattatggaagtgacgatcgagctcttacgggaagcgggactgcggcttcccaatccgctaggccagacgatcggcctcgtgggaggcgtcgtcatcggccaggcggcggtcgaagcaaatatcgtcagctctgtgatggtgatcatcgtcagcattatcgcccttgcttcatttactgtgccgcagtacggcatgggcctgtcgtttcgcgtgcttcgttttatttccatggtggctgcagccgtgttcgggctttacgggatcatattgtgcatgctcgccatcttcacccatttggctaggcaaagaagcttcggcatcccgtattttaacccgaaccattttttcagcttaaaacatacggatgaagccattattcgtctgccaacaaaagctcgggaggtgaaccgtaaaaatggatccaaaaaatcagcacgatcggattag

SEQ ID NO: 3977 - DNA, 1101 bp, Bacillus licheniformis
atggatccaaaaaatcagcacgatcggattagcacgtatgaagccgcttcgatcataaccagcacaatgctcggcgcaggcctgctgacgctgcccagggcgctgacgcaaaaaacgctgtcgccggacggatggatcgtattaatctttgaggggcttgtcttttttctcattatctacatcaatgcaaaaatcgttaaaaaacacaacgtcctgtctttttttgattacacaagagaaggctgcggctttataatcgggaatattctcaacctgttaatcgttttatacttcatgggcgtggccagctttgaagccagggcgatggctgaaatggcaaagtttttccttcttcagttcacgccgatgagcgtgacgattttcgcttttatcgtctgtgcaatttatttggttgtcgggggtatcagcgatatgtcaaagatattcccgttcttcctgtccgttaccattgtcattcttctgatcgtctgcggactgagcctgaatatgtttcagctgaaccatttgcggccggttctcggccttggtttggagccggtcagcagagctttgacggtcgtttccatttcatttttaggggtggagctgatgatgtttctgccgaaatacgtcaaaaacaaagaaaagctttttaaggcatcggcgattggatttgggataccgctcttcttatatatcctcacctttgcggtcgttgtcggggcgctgaccgcgactgaggtcatgacgttgacatggccgacgatctcgttgtttcagtcttttgagataagagggattttcatcgaaaggttcgaatcgtttttgctcgtcatttggacgatccagtttttcacaacgtttgtcgtctatacgtactttgccgcttcaggacttgaaaacgtattcggatggcctgtgaaaaaaaacgtcctcttcatcggcgttgtcatctatctagcatcccttgtcccgcgggacgccaaccaggtcaacgccttcagcgactaccttggatatatctttatcgttgtcttctgtgcacttccgcttatgatctttttgctcgtgtccatcaaaaggaggtttacttcttcatga

SEQ ID NO: 3978 - DNA, 1122 bp, Bacillus licheniformis
atgaaaaaaaagggaatgttagcagccctttctctgcttctccttttaacaggctgctgggacagcaggcagatcgaaaagcttagcatcgccatcggccttgccctcgataaaggcgaggacgataaaaacgtgaaattgacgtatcagtttcttgttcctaaaaagatcggacaagacggcagcgctcaggatccgtctaaagtggtgtccacctccggaaacacggtccatcaaaccatccgttccaccgctttgaaaaatttcccggtattctcgcagcatctgcaagtcctgattttctcagaggagcttgtatccgatatttctctggaagcattgatcaatcaatttattagggacaacagcatcagaaggagcagcgaggtctatatgacgcccggagctgccgacagcatactgaaggttgatggtgcaagtgaccctgcgtccgacgtgatccacagcatctctgaaaacagagcttcgacgatcaagctgctcaagcccgtcacattgaacgatatttcgattaaaatgcagtctgatttatcttatatcatgccgaaggttgtgatcgaaaaaggacagcttcagcttgaaggcggcgccgtgatcaaaaacaacaaataccatgcaaacctttcgccgtctcagatcgaagcgctgaatttattaactggcaatgtcatcggcggagtgatcgactcaaggcatgatggacatttgttctcgtatgaagtgttttcgatgacccaccgcgtgcgggcgatgaggcagaacggaaagtacaaattcgtcgtaaatgccaatattaaaggaaggctgtcagaggactggtatcttggagaggattcttttaatgaccaatatattaaaaacatagagaaatcggttcaaaaagacatcaaaaagcaggttgagcagctgatccatgtcctgcagcacgatatcaaaacggacgtcaccgatttttccgacaatgcgcggatcaattttccgaaggagtgggaaaaagacagattcaattgggacaaacacttcagcgaagcctatatcgactatcatattaaagcgacgattcaggactttggaacaaaaggtgcgacaaaaagcagatag

SEQ ID NO: 3979 - DNA, 366 bp, Bacillus licheniformis
atgacaggcatttttttgattgcagcggcagtcattctgtccggattcattatcagtgatgtcgcctatgatccgtttatggaggattcgcagtcgatgcttttcttcacgatcggcacatacctcaccactccgtttttttgcttcattggcggattcattttgctaggcatcggcaagttgatcgacttgcaggagaaacacaatgccatagtggccgagcggctcgacatcatttgccaaaacggtacagcgggcgaacatgcacgcgaagaaaacgaggccgcccaacttaccgcccgcacggttgaaacagattcattcactcttcctgcagccgaggatcgaaaatattggaacggctga

SEQ ID NO: 3980 - DNA, 636 bp, Bacillus licheniformis
gtgattcgagtattgttaattgatgatcatgaaatggtgagaatggggctggccgctttcctggaatcccagcctgatattgaagtgattggggaggcatcagacggaaagcgcggcgttgaattggcgcttgaaaccaaacccgacgtgattttgatggatcttgtgatggaagggatggacggaattgaggccacgaaacaaatatgccggcagcttgccgatccgaaaatcatcgttctgacgagcttcgttgatgatgacaaggtctatccggtcatcgaagccggagcgctcagctatttgctgaaaacgtcgaaagcgagtgaaatcgccgatgcgatcagggctgcgagcgtcggagaaccaaagcttgaagccaaagtcgcaggaaaagtgttgtccaagctgagacattcagccggcgaacagccccttcatcaatcgctgacagcaagagaattggaaatcctcaaacttgtagcagagggcaagacaaacaaaggtattgccgaagaattatatatcaccattaaaacagttaaaacgcatgtgacgaacatcctttccaagcttgaagtcgacgaccggacacaagccgcaatctacgcccaccgaaacaaacttgtcgactga

SEQ ID NO: 3981 - DNA, 1065 bp, Bacillus licheniformis
atgagaacgaacagacttgcaaacattcaatggcgcgccgtccgcttatcccttggtgtcagctttacgatttttcttgctgtattgggctttatgctgttttattaccagctggatccgagggtgctcatcgtttccaggtggttcgggattccgtttatcgcgcttctcgcattgatcagcacagctgtcgggttcggctcaggctatatgttcggcaatcagctgaaaaaacggcttgaaaagctgatcgagtctattctaaagtacgaaaacggcaactttgcctaccggattccatcgcttggagacgatgagatcgggctggccgccgaccagctcaatgagatggccgaacggatcgaaagacaggttgcctctttgcaaaagctgtccaatgagagagcggaatggcaggatcaaatgaaaaaatcggtgatctccgaagagcggcagcgtctcgcgcgcgaattgcatgatgcggtgagccagcagctgtttgcgatttccatgatgacttcagctgttttggagggaatcgatgctgcggctgatgaaaagctcgctcaaaggctgaaaatggtcgaaaaaatggcggccgatgcccagaatgaaatgagggcgctccttttgcatttgcgacctgttacgcttgaagggaaaggtctacaagaagggcttgcagaccttttgaaagaatttaaagcgaaacagtcgatcgacatcgattgggagattgaggatgcgggcaaacttccgaaaggtgtggaagaccacctgttcaggatcgttcaagaagcgctctcaaacgtgttccggcattcaaaagcgacaaaagtcaccgtcagactgctgctcaggaacaaacagctccagttgaaagtcattgacaatggcgaaggatttaagatggatgccgtcaaaacatcttcgtacgggctgaactcgatcaaggaaagagccagcgaagtcggcggagtggcagaaatcatttcatttacgggaaaaggaacacaggttgatgtaaaggttccgatttttgaacaacaaaaaggagaggcttaa

SEQ ID NO: 3982 - DNA, 732 bp, Bacillus licheniformis
atgcgtcttacaaaaaaccagctgatcggactgatcatcgtactcttcggaatcagcatatttttgcaaaacagcgggcttggagacgcgttattctggccgctcgcttttctttttgccgggtattttctccacaaatattcccgccgctggctcgggtctgtcatgtatatttttgcaggctttctgctgctgaaagacatcttcagcattacattcagcctgttcggctttttctttgccgctttcttaatttatgcggggtaccggctggtgacaaatcagccggtatttgaccgccataagccgaaagacaggggaaaggaaaaggcggatttcaagccgcttcaggagaagaacagccctggccagcgcagcttctttttcggtgatgtaaaattgatgaaaacaccttttgacttaaatgacttgaatatctccgggtttatcggtgacgtgaaaatcgatttgtcaaaggcgattatttcagagggcgaaaacaccatcgtcattacggggttgatcggagatgtcgatatttacattccgtccgatcttgaggtgtccatcagctcttctgcattcgttggagacattgacgtcatcggcggccgaaaaagcggcatcggcaatcaaatctattccgagacagagaattacgagcagtcggcacgacgggtcaaaatttcgatttcgctgtttatcggcgatgtggatgtgcggttcatatga

SEQ ID NO: 3983 - DNA, 864 bp, Bacillus licheniformis
atgaaaaaaacggttggaaaactgctgatcatcgccggcattctcatccttgcaggcatgatgtttaatgggcgtgaaggcttttctttcttcggcttcgatgaagagtcagcccgcacatatcatgcacaggcggaagacatcgataaaattgacattgatgcaaagagtataacagtcaacattcaagctgaaaaccgcgatgatataaaagccgagatttcaggaaaaaacgtccggcttgattcgtccgaacaggggggtactcttcagctttccgctcattcgaaaggcttttggccgtttttctggaagaaaaatgagctgattgtcaagatcccttctgaatataaagatgatctgtcgatttcttctggaagcggaaatgtcaaactgtccggcggcggtctgcatttgcgaaatgtagccttaaagtcgggaagcggcagcctcaaggccgatgaccttcaggcggaagacctttctgtaaaagggacgtcaggatcggtcaggctggaaaacgttcaaacggcagctgctgatatccgctccacatccggtaatacaaaacttgaaaatgtcaccggcaaactcagcatcaaacagacttcgggcaatttgcgcgcttcctttacagagatcaacgattctctgagcatcaaacagacatccggaaacaccaagctcagcctgcccgatgatgccgacatcagtcttgaagccgagtcgacaagcggaaacatcagtcattcctattcatttgaccaagtcgccaatgagaagcggacgctgactggaaaaaaaggaaatggaaaaaataaaatcgacatctcaattacgagcgggaatgtctcaattgagtaa

SEQ ID NO: 3984 - DNA, 684 bp, Bacillus licheniformis
atggctttaaaaagaatcagagacatgtttgtcgcatcagtaaatgaaggattggataaactggagaacccacgggtgatgctgaatcaatacgtacgcgacatggaaagcgatatcgccaaggcgaagcataccatcgtcaagcagcagacaattgaacatagttttaaaggaaaagtggaagaagccgaaaagcttgctgtcaagcgaagaaaccaggctcagctcgcttttgatgcgggtgaagaagaacttgctaaaaaggcgctctcagaaatgaagtattttgaagaaaaagctgctgaatacaaggacgctcaccagcacgcgaaaaagcagcttgctgaattaaaggaacagctggagacacttgaggttaaactgcgcgatatcaaagaccgaaagcatgcgctgatcgccagggcaaacgcggtgaaagcgaaagaacatatgaatgcatcatttaataaaatcgacagcgaaagcgcctaccgggaatttatgagaatggaaaaccggattgaagagatggaaacaagggtgaacagctatgctgaattatcagcttcatcaagcagcccattcggccgccttgaatatgcaaaagaagtggaagaagagctggaaaaaatgagggctaaaaagacaggcttggaaaagcagacacctgcgggaaatgcataa

SEQ ID NO: 3985 - DNA, 387 bp, Bacillus licheniformis
atgaatataaatgggaagtccatcatcggcttttttctaatcctttttggcgtctccctgttcttcggcggaggccatttcggcggattggttacaggtgctattggagcattgcttctattctattccgtgaaaaaatggaaggaaggacgccagtttgccgcggtactggccgcgatcttcggcatcatgtttttgggagggtcattgccgtttctgatcggcatcgcggttgctgcagcgatggtttatttcggatggaaaatgatgaagcaagatgacaaacaggatgacatcctttattcagagaaaacggagccttccgcagcttcatatgacacaggctttgatgcagagtgggaagactttttgaaaaagaataaataa

SEQ ID NO: 3986 - DNA, 954 bp, Bacillus licheniformis
gtggttaatcgggaggcagctgctatacggctgacggtttcgaaggatggagacggcgaatttcaaaccgttcaagaggcgatcgatgctttgcctgagtacagtcgggaacagaaagtgatattcattaaaaaaggagtttacaaagaagtcgttcatattccggctacaaagccgtttgtgaagctgatcggcgaaaatcgttacgagactgtgattacgtatgacaactatgccggaaaagaaaaggaaggaggagggaaatacggcacgaccggaagttcaagcgtgtttatttatgcggatcatgttgaagccgaaaatttgacgtttgaaaactcgttcgaccgcacgaaagtcgacacgaccgatacgcaagcggtggcggtttatgcgaaaggaaacaggatgacgttcaaatatgtcaggtttataggcagacaagatacactgtttgtcaatgacggtacacaatatttttatcaatgctatatagaaggcgatgtcgatttcattttcggaggagcaagagctgtgtttgaagagtgccagatccatagcgctgaccgcgggtccgctacaaacaacggttatgtgacagctgcgagcacgcatatcgcaaagccgttcggtttattgataacaaactgcagagtgacaagcgatgccgcagatggaacggtatacctcgggcgcccatggcatccgggaggagaccccgacgccatcgccagtgtgctatatcaccgctgcgatttaggcgcacacatcaagcctgaaggatggacggatatgtcgggcttttctgcggccgatgccagattgtacgaatacgggaatacgggtccgggtgcgatttcgcatgaggcccgaaggcagcttgccgatcatgaggctgagaaatggacaattgaaaacgtattggacggctggaatcctaaagttgaatcatag

SEQ ID NO: 3987 - DNA, 579 bp, Bacillus licheniformis
atgaaactctatacaaaaacaggcgatcggggaaaaacgagtttaattggcggaagggccgataaagatcatcttagagtggaagcgtacggcacactggatgaagcaaacagtttcatcgggctggctcagtcttatttaaaagcagaagaggcgctctttcatgatattttgtcagagttgaccgccatccagcatgagctgttcgactgcggcagtgatttggcgcatgtcaatgttcaggaagaaggcaagctcaaggctgaatcaatcaccatgcttgaagaacgaattgatgcctatgtcgaggaagcgccgcagctgaccaagtttattcttccgggcggaacagaagcggcatcatttttgcatgcggcgagaacggtcatcagaagagctgaacgaaagattgtcgctttggccaaagaagaagacattccgccgcttgcgctgccatacgtcaaccggctgtccgattatttatttgcggcggcgcgcattgtcaatcaccgtctcggggaagtggatgtcgaatatgaacgaagcgctgatgtattccggacaaagaaaaaatcatga

SEQ ID NO: 3988 - DNA, 747 bp, Bacillus licheniformis
atggaatttaatcagcaaacggccattatcacaggtgcaagccgcggcatcggcagagccattgcggagttgcttgcggataaaggggcaaatgtcgttatcaatgggacaaacgaagaattgctcaagtccctgtgtacacaattgaatactgagagaaagtgcgcttcttatgttgccggtgatgcaagtttgccagaaacagcctcgcttctcatcgctgaggcaaaacagcggtttgggcggatcgatattttggtcaacaatgccggcgttaatttgcgcaaaacgaccgttgatacgtcgcttgaagaatggaaaagagtgatagatttgaatttaaccggcacctttctcatgtgtcaggctgtcatctcggaaatgatcacgcagggcggcggaaaaatcgtgaacatgagctctacgacgagcaaaacaccgcatcacaatgcctctcctgcttacggtgcatcgaaagcaggcatcaactatttaacgatgcatttggcaaaggagcttgctgaacaccgcattcatgtcaacggcgtctgcccgggaccgattgaaacggatatgagcaagcagtggagcgaggagtaccgcgcagcagtcgtcgaacggattccgctgaaaatgctcggctcaccagagcatgtcgcaaacgttgtcgcctttcttgcctctgacaaatctgactttatgacaggcgaaaccattaatattaacggcggcacctatatgaactaa

SEQ ID NO: 3989 - DNA, 437 bp, Bacillus licheniformis
acaattcaattggcgcatgacacgctcattcgcgaaggcattccgcagcctaaaatcgccgtgtgcatgaaccctcacgccggtgagatggacatggagaagaggaagagaaaattgtccttgccgttgaacgcgcacaaagtgaaggtatacaggcattcggtccgctgcccgctgacacgcttttcttcagagcagtgagaggcgactttgatatagtggtggctatgtatcatgaccaaggacacggcccgattaaggtgcttggccttgaagccggtgtgaacattgcagtcggcctgccgattatccgtacgagtgttgaccacggaacagcctttgatattgcgggaaccggcaaagccgatcctgcgagtatagaagaagcggtgagacaggcgatcatgctgtccggtacgcgtgagcggcatgcataa

SEQ ID NO: 3990 - DNA, 996 bp, Bacillus licheniformis
atgaaaacgctttatcattttcgaacggccgcccgaattgaggctggtccacattcactcaatttgctcggcgattacttagatcaaattggattgaatcagattcgttcggtgtttattttaactcagccgtcgatcgtctctctcggctatgcagaccaaattaaagaagggcttgcaaagaaaggcatctcaagtgaagtcaacacggatatacagcctgagccgacggagcaaaatatcgaacaggtttttcagcttttttctgaaggaggccatgacgcgattttgggaattggcggaggcagtgtgcttgatgcggctaaaatcctctctgttctgaaaacaaatgaaaaaccgatttctgctttgattggcacgaatctcgttgaaaagcccggcgttccgcttgtgctgattccgacaacatccggaacagggtcagaagtgacgccgaatgcgattgtaacgttccctgagaaagaattaaagattggtatagtcagtccctatctgctgccgtcgcttgtgattttagatccagttttgacgaccggacttccaaaggcaatcacagctgcaaccggaatggatgcatttacacacgcactcgaatcctatatttccaacaaagcaaatccattcagcgacatgtttgcgcttgaatctatgagactgatttcctccagcattcagcaggcctaccatcatggagataacctggaggcgagagaaaaaatgctcattggcgccatgtatggcggaatggccttgacaagcgcaggaacagcggcggttcatgcgatggcttaccctctagggggaaaatacaagatttcgcacggtgtggccaattcaatgctgcttccgcatgtaacggccttcaacgcggatcatgtaactgaccgcctttcggacgtggccggcgtaattggaatcgagccaaaaggttcgaagtccagccaagcagagcgggttatacgaaaaattgaatag

SEQ ID NO: 3991 - DNA, 903 bp, Bacillus licheniformis
ttgaaagtagagggaattatccctgccatactgacaccgcttacaaaagaacaggcctttcatccgggcgcagccgaaaagctggtgaatcgtctaattgattcaggcgtccatggcatttttgctttagggacaaatggcgaatttcatttattctcgcaagaggaaaagcttcaaattgccgaaacagttgtaaaagcggttaataaacgagtgcctgttttcatcggagcaggtgaaaacagtactgaggcgaccatttctttatccaatcaaatggcggatcttggagcggatgttctttcgattattacgccatactttgttgcaccttcgcaggaggaattgtatcagcatttccgcacgatttccgaaaatgtcgcgcttcctgtcctgctctacaacattccgtcgagaacaggcgtatcattggagcccgaaacagttgaaaggctggcggcattgccgaacatcatcggcattaaggacagcagcggaagcttcgccaatattaaggcgtatcttgagcgtacaaaagaacagtccttttccgttctggcaggaactgattcgctgatcttagacacattgaaggcgggagggacaggagctgtggctgccacagccaatgtgtttccgcacaccgttgtttcaatctatgaatcttttaaacaaggaaacattgaagagagcgagcactatcaacagcagctgcagccgctccgtgatacgttttcactcggttcactgccggcgccgctaaaaaaagcagcggagcttgccggcatcgacgtcggaccgcctaaacgtccgattgcagaactgtcgggagagccgctgctaaaagtgaaaaagatgctggaaggctacggaattgaagcaaaactggcaaaggagcagtaa

SEQ ID NO: 3992 - DNA, 1284 bp, Bacillus licheniformis
atgattgatgtcatccgggtgtccggcggatatggaaaaacggatgtcttacaggatatcagttttgctgtaaagccgggtgaatttttaggaattcttggtccgaacggcagcggaaaaaccactttgctgaaaatgttgtcgggaacaattgccccccgaagcggcgaggtgctgcttgaatgccgttcagtcggggagtacaaaacgaaggagctcgctcgcaaaatggcggtccttcctcaaaaaacggagcaggccttttcctttacggtggaggaaacggtacagtttggccgctacgcgtatcaagcaggcctttttcggcagctgacggcggaagaccatgatatcgtgaagagggtgatgaagcagacagacacgcttcgcttcgcccaaaaatccatccatgagctgagcggcggagagcagcagcgggtgtatttagcgcaggcacttgcccaggaacccgaatatttgctgcttgatgaaccgacgagttttctcgatttgtcatttcaaaagagtctgcttgatttaatgaaacaagaaacggctgcatccaaactcgcagtggtcggggtgtttcatgatgtgaatattgcgagtttatactgtgaccgtctgctgctattaaaagatggaaaagcagaagttcttgaccgcccggaagcagctctttctgctgggcgcatcggacgagtgtatgatacggacatcactggactggaccatcctcagcgttcaaatccgcagtttacaattatggcgaaaaacatcccgcggaaaaccgagcccctctttttaaaagagcgaattgaacaatatttgccgcacggcatcgcatttttggcagaccgcccgctgcggcttctgtcctcagaaaggggctttgcttggagacgaaaacttattttcgacagcggaaataactctggatggccgcatggctcgtcagcttttgaacaggaaacgctgtttatccaacatgatgctgaattggctgactgccatattgtgtcggaaagcggtgatctttgcatcgtcggtatgaaagacacgatggagcgtttgatcatgtgggtgttagttgacggctgtttgcaggatggtcaatttgtgaaggcgataagcgctgcggcatttgccgcagcccagcatcatgttccgtgtagtgatgtccttgtagcggccactcaatccggccggtcagcggatcaaaccgcttttttgacacaaattcaaaataaaacagccgcttgtgtgaaagctttaaaagattaa

SEQ ID NO: 3993 - DNA, 1068 bp, Bacillus licheniformis
ttgctgaacatatttaccctgacgtttttaagaaataaccgttttgcggcatatgccttcagcctgctgtttttgtcggcatccgttcttatgggaatctctatcggatctttggagattcccattccttctattatgaaggtttttttggaagaatggtttggcattcaagggttaaatcccgatccgacagaggcgaacatcatcatgaaaatcaggctcccgagggtggttttggccgctcttgtcggcgcgggtctggctgccgcgggagccggttttcagggactcttgaaaaacccgctcgcggatccatatacgcttggcatttcgtctggcgcggccgtcggtgccgtggtcacgctgttttttgggattcagctgccggtgatcggaagttttacactgccgtttttaagcgttgctgcggctgttatcgtgatttttttggttttgttttttgcgcggctcgtacacccttcgttgaccctgtccgctttgattttaacagggatcatcttcagttcgtttttgggtgcgcttatttctctcatgatcgctttgaccggcgatgatttaaaaccgatcgtccactggctgctcgggagcgtatcgatgagggggctgggggctatgtcgcgttgtttctgcccttttttgtctgcgggcgctgccgcgcttttgatcagcgggagggaactgaatgtgatgacttatggcgaggaaaaagcgaggctgctcggcgtgaatgtgaagcggagtaaatatatcgttctgttggcgggagctattttaaccggcagtgcggttgctgtgtctggaaccattggttttgtcggcctcgtcattccgcattttatccggcttctgtcgattacggatcaccgtcatcttctgccgctctcgatgctgaacggcgcttcgttcctcgtgctgtcagatcttttgtcgagaaccattatcgagccgtccgagctgccgatcggcattattaccgcattgataggggcacctgttttcggctttatattaattcggcgctaccggggagggcgagttcatgattga

SEQ ID NO: 3994 - DNA, 951 bp, Bacillus licheniformis
atgaagaagtttgggcttttattgctgtcgctgctgttggctgccggcgtccttagcggctgcggccaagcgcaaaaaccggcagacgagcaaaaacaggagaaggcggctgaagcgtttccggtcaccataaaagatgcctcaggacaagaggtcaaaattgaaaaagaaccgaagaaaatcgtctctctgatgccgagcaataccgaaattacatacgccctcggcctggggaaaaaagtcgtcggcgtgacggattttgatacatatccaaaagaagtgaaaaacgttgaaaaaatcgggggcatggaatttaatacggaaaaaatcatttcgttaaaccccgacttggtcctggcccacgcttccagcatgcagagtgccgaagaagggctgaagcagctgaaagatgcaggaattacggtggtgactgtaaatgatgcggcctcttttgaagagacgtaccggtcgatcgaaatgatcggaaaggctgcaggcgcagaggatcaagcagcgagcctggtcaagagcatgaaatctgacctggctggcataaaagaaaaagcggcagccatatctaaagcagatcaaaagaaagtatttgtcgaagtgtctccggctccggacatttatacgaccggaaaaggcacctttatgaatgaaatgcttgaagcgatccatgcggaaaatgctgcttccgcgcagaaaggctgggccaagataacggaagaagcgatcgtcaagctgaatcccgatgcgatcgtgacgacaaacggcgaatccgctgtcagcgaaattaaaaaacggagcggctggagcggtgtcaaagccgtcaaaaataatgaagtatacgacgtggaccctgacctcgtgacccgtccggggccgcgattgatcaaaggggtcgaagagcttgctgaacatatttaccctgacgtttttaagaaataa

SEQ ID NO: 3995 - DNA, 681 bp, Bacillus licheniformis
atgccgataccgaaaaactatacgcctcaggtcagactttcagcaaaggaaaaagcgtttcaccaattgcagcgctggattgtagacggaacccttgaacccggcgaaaaagtcacggatgtcgatctggccgaagcgctcggcgtcagccgcacaccggtcagagaagcgcttcagctccttgaatcccaagggtttgtggaaatgaagccgggaaaagaaacaaagatcacgctcattcatcccgatgatgcgctggccgtctatcctccgctcgcacatctccaggctttggcggcagaactggctgcgccgcttttgacggaagaagagatcgccgagctcaaaaaactcgctgctcaatacgaaaccgcgtttaaagaggaaaggaaccacgatgcagctgaactggacgaacagttccaccatttgattacagaagcggctaaaaacccgtatgttcttcagttttctgccgttctgcagcttcatgtcagacggatgaagtatgtgtttttcaatcggcctgctgctccgaaaatgcagtccgccgccgagcattggaaaatcatcgccgcttttgaaaaaaacgatccgaaattggcggctgaagtgatgaaaaggaattggctccgtccgatggaagatattcataaagttttaaaaggcagggaacaataa

SEQ ID NO: 3996 - DNA, 792 bp, Bacillus licheniformis
atggatttaaagctgaaaaacaaactcgtgctcgtaacgggttctactgctggtattggaaaagcaacggcggaagcctttttggcggaaggcgccgaggtcatcgtaaacggacggacagaagaaaaggtccagtcggtcgttgatgagctttcccggcacggaaatgttcacggaattgccgctgatttatccgatcctgaagaaagcagggcactggtcgaaaaaaccgctgaaatcggggagcttgatgtcctcgtcaataatatgggcttctttgaagtgaaggattttacagacgtgacagacgaagagtggctcaaatattttgaagtaaatgttttaagcgccgttaggctttgccgcgcgtttttgccggccatgctgaagcggaataagggaagggttctcaatttggcaagcgaggccggcattaaaccgcttccgcagatgatcccttattccatgacaaaaaccgctttgatcagtttgtcaagaggtttggccgaaatgacaaaagggacaaatgtgaccgtcaactctgttcttccgggacctacctggacggaaggcgtcgccaattatatggaaggtgccgccgctcaggagaaaaccgatttagacacctttgtcaaagattatttcaaagtgaatgagccgacttctttgattcagcgctatgcaaaaccggaagaagtggcgagtacgatcgtctacctcgcttccgaaaaagctgcggctatcaacggttcagctcaaagagtggagggcggaatcatccgctcgatttaa

SEQ ID NO: 3997 - DNA, 696 bp, Bacillus licheniformis
atggaatatgccgatatcctttcgatcaatgtagggaagccagaggaaattcagtttcaaaataaagctgtgtctaccggaatatacaagaagccggcaagcggccccatcttcctgtcatctactaatttcacgggggacggacagggggatctcattcatcacggcggcgcggaaaaagcagtgtgcgtctatccgtatgaacattatctcttttgggaaaaggaactgcaaagaaagctggaatacggagcatttggcgaaaatttaacgatcaagggtctgctggaggatgacgttcatatcggcgacatctttcagctgggtgcagctgttgtacaggtgagccagccgaggcagccctgctataaactaaccgtaaggtacggtatgccggacatgatactgaaggtacaagataccggatttacgggtttttactttcgcgtgctgaaagaagggttcgtctgtaaggagcatggtctgaaacgaatctcacgccaccctaaaggcattacgatttcatacgcaaatcgcatcaagcatcatgaaaagaacgatattgagggcatcaaaaaacttctcgaggtggaggaactgtcggcaaattggcgtgcatcatgtttaaaacggctgaacggctttgagccggatgaccgcgaaaggctgacgggaggtctgaagcagggttcttaa

SEQ ID NO: 3998 - DNA, 892 bp, Bacillus licheniformis
ttggagctaaagcaattggaatactttatggcattgtgccgggagcttcattttacccgcgccgccgaaaaactgaatatcgctcagccctcgctgagccagcaaatccgtttgcttgaacacgaaatcggaatgcctttgtttaaccgttcaggcaaacgcaccgtgatgacggaagcgggaaatattctgctccagcactgttacaatatctttcatgaactgtcacaggcgcgagacgcgatcagcgagcttcaaggtttaaaacggggaacgcttaaaatcggggcgcttttgaccgtggttaattatttgcttccccggaccgtggtcgaatttcaccgcagctaccccaatattgaattgtctgttttagggctgagaaccggggatatttagaccggctgctgcaaaatgagctcgacttgggcattgtagcccagcgggtggaacatcgtgacttagaagccgtcccattccttacccagcatctcgccctcgcggcgcctgttgacaatccggttgcaaagcggcagtttgtcacgcttgacgtgttaagggagattccatccattttgctgcctgagacgtattttttgcggcagctgatcaacgaaaagtgccgcacgcttggattcgagccccggccggtcatggaaatgacaacgatggaatcgatcatgaacatggtcggtaaaggcatcggcgccaccattttgccgaaaggctatcttaatgctattggaaataaatccattcagacgattccgatacaaaagccggatttgacgacggagatcagcatcgtttaccgtaaaaacaagcatatgtgcgctgcaagccgggtgtttatgaaactgctgatttcctcggtcaaaagcgaaaccgctga

SEQ ID NO: 3999 - DNA, 1311 bp, Bacillus licheniformis
gtgagtctgcagaaaataaaagaagagattgtaaagaagctgaaggttccggtatttccgaatcgctcatttgatgtcacatcgtttggggctgacgaaaacggaaaaaacgattcgaccgaagcgatacagaaggcgattgatcaagcccaccaagccggcggcggaagagtaacggttcctgaaggcgtgtttctttccggtgcgctcagattgaaaagcaatgtggatcttcatattgcaaagggagcggtgatcaaattcagtcagaaccctgaagattatctccctgttgtgctgacgaggtttgaaggagtcgagctctataattattcaccgctcatctacgcttacgaagccgataatattgcgataaccggaaagggcacgcttgacggtcaaggagatgacgagcattggtggccgtggaaaagaggaacgaacggccagccttcacaggaaaaagatcggaacgctttgtttgaaatggctgagcgcggtatcccggtcactgagcggcagtttggaaaagggcattatttgcggccgaatttcattcagccgtatcgctgcaaacatatattgattcaaggcgtcactgtgctgaattcgccgatgtggcaagttcatcccgtgctttgcgagaatgtgacagtggacggcatcaaagtcatcggacacggccccaataccgacggagtcaacccggaatcgtgtaaaaacgtggtgatcaagggctgccattttgataatggagacgactgcatcgccgtcaaatcgggaagaaatgcggacggccgaaggatcaacattccgtcggaaaacatcgtcattgaacataacgaaatgaaagacgggcatggaggggtcacgatcggaagcgaaatttccggcggcgtgaagaacgtcatcgcagagggcaatcttatggacagcccgaacttggacagagccctccgcattaaaacgaattcggtgcgtggcggcgttcttgaaaacatctactttcacaaaaatacggtcaaaagcttgaagcgcgaagtgatcgccatcgatatggaatatgaagaaggagatgccggagatttcaaacctgtcgtccgcacggttgatgttaagcagctgaaaagcatgggcggacaatacgggatcagggtgctggcatacgaccactctccggtcaccgggctgaaagtggctgattccgagatcgacggcgtcgatgttccgatggaactgaaacatgtgaaagaccccgttttttcgaatctgtatattaacggaaaacgctatgactcacacaaagcctaa

SEQ ID NO: 4000 - DNA, 1491 bp, Bacillus licheniformis
atgaaagactgcttgatgatcaatcctcaagataatgtcggcattgcgttaagagaattgcagaccggtgaaacggtcactgtcggagaacgaaccatcgtgatcaaggaaccgattttgaaaggccataagtttgctttaaaagacatcgctgaaaatgaaaacgtcatcaaatacggctttccgatcgggcacgccactgaaatgattcagacgggagagtgggtgcacacgaaaaatgtgaaaacgaatttgggcggtgtcgaagaatacagctacaagccgaagtttacggaaaaccgctatcaaaaagaaccgcttacatttaaaggctttaaacgaaaagacggaaaaaccgggatcagaaacgagctatggatcgtcccgactgtcggctgtgtaaatggcattgcagagctgatcatcaaagaatttaaggctgaggtcggctccatcgccccttttgaaagcgttcacgtattaaagcatcagtacggctgttcacagcttggcgacgatcatatcaacacgagaacgattttggcgaatgccgtcaaccacccgaatgcaggcggtgtccttgtgctggggctcggctgtgaaaacaacagcattcacgaattccgcgaagcgctcggcgattacgatcacagccgggtcaagtttctgctttcccaagaggtatcagacgaagtcacggaaggcgtcaaactgttaaaggaaatttataagcatgcaaaaggtgaccaccgcgaagatgttccgctttctgaactgaaaatcggtttgaagtgcggcggatctgatggattttccggcattaccgcgaacccgctgctcggccggctctccgattttctgatcgcccaagggggaacggcggtgttgacagaagtgcctgaaatgtttggggcagaaacgctattgatggagcgggctgaaaatgaggaagtgtttcataaaattgtccgcttaatcaacgattttaaacagtactttatcgatcacaggcagcccgtctatgaaaacccgtctccgggaaacaaagcgggcggcattacgacattggaagataaatcgctcggctgtacgcaaaaagccggcacttcaaaggtggcggatgtccttgaatacggggacgttttgaaaaagaaagggctgaacctgctgagtgctccgggaaatgaccttgttgcttcatccgcactggccgctgcagggtgtcaaatcgttttatttacgacaggacggggaactccttttggcacctttgtgccgacgatgaaaatttcgacaaatacggcgatttatgaggcaaagcgccattggatcgattttaatgcgggaaaggtgctcgaagaccgatcagaagatgacgttttgaaggagctgacagcgtatttgatcgaagtcgcaagcggaaggcagctgaacaatgagataaacgatttcagggagcttgcgatatttaaaacaggcgtcacattataa

SEQ ID NO: 4001 - DNA, 1470 bp, Bacillus licheniformis
atggagaggctgtccaaacggataaggtctaagccgagccgccccgaacggattttgcaaatcggggaaggtaactttatgagggggtttattgactggcagattcatagattgaatgaagaaaccgattttaacggcagtgccgtcgtcgtgcctccgcgccgcggttcagtaacggcctttcaagaacaggatgggctttacacgctttatcttgaaggtttccgggaaggacgggaggttcgcgattctgctgtcattacatcaatcagcagagtcgtcagcagctatgagcattatgatgaatttatggagctggccgatctgccggatttgcggtttgtattttcaaatacgacagaggccggcatcatttatatcgaggaagaccgtctgtccgaccgtccgcagaaaagctatccagggaagctgactgcacttttatacagacgatacatgacttttcagggaagcagggaaaaaggtctggtgatcctcccgtgtgagctgcttgaggataacgggaaaatactgaaagacattgtgctgcgctatacaaacgcgtgggcgcttgaacaagggttcatcgattggcttgaagaggcaaacgtgttctgcaatacgcttgtggacaggatcgtaccgggattcccgaaagaaaatgcacaccggcttgaagaggcggccggctatcacgattccttgatggtgaaggcggagccgtatcatttgttcgtgattgaagggccgaaatggcttcgagacgagcttccgcttcatgaggccggtctgaatgtcgagtttgtccaggatgtgacgccgtacaggataagaaaagtgagaattttaaacggcgcccataccgcgatgacgccggtcgcttatttggcaggccttgagacggttcgcgaagcggctgaagacgagcttatcggctcatttgtgaaagagctgatccagcgggaggtgctcgagacgatcgatatgcccgatagcgagcttgacaactacgtggaagagattctcgaccgctttaaaaacccgtttatccgtcacaagctgatcgatatttccttaaattcctttgcaaaattcaaagtcagaaatttgcccgtcttaatggaatatgcggaacgaacaggcaaacttccggctcgaaccgtatttgctttaagcgccttaatttatttttaccgagaccaacgggatggggatgatggggccattccgctgtctgacgacgatgaggtgctggctttcctcaaacggctctggacggaagagacagacgtttcgaacatcgcattccatgttcttgggtttgaaaaagtgtgggggcaaaatctgaacgacatgcccggattgacggacaagacggctgaatatttaagggacatgaaacaaacgggaatgaggaaggcgctggaaaaaatgatgaaaagccaaatggctgagctgggggacatgtga

SEQ ID NO: 4002 - DNA, 999 bp, Bacillus licheniformis
atgtcagtaacgattaaagatatcgccaggctggcgaatgtatcgcacaccacagtatccagagcgctgaacaacagtccgctgataaaagagaacacgaaaaagaaaatactcgacatcgcagccgaaatgaattataaaccgaattttaatgcgaaaagccttgtcacgcaaaagtcttttacgatcggcctgtttttaacaagcctgacagacgggacgtcttcaagtttctttgcagacatcctgcgcggcgtcaacaaggtgatcgatgaaaactataatatggttgtcaggggaatcgacgattatcatgatttgtcatccattcaccgcaaccgctatgacggcatgattttaatcagccaaagcgaacaggatcaggcttttattgagcatgtcctcaaacagaatattccggtcgtcgtgctgaacagaaaaatcgaagggcactccgttgtcaatatactggcgaatgaacacgagggcgctttcctcgctgcttcatacttgatcaaaaacggccacaaacagatcgccatggtgcaggggaaagaaggctttaaatcgtctcaagaaaggaaaggaggctttcttcgcgcgcttcgcgactcaaaccttgatatgcccggcgaatacctcgttcaaggcgattatacgatgcaaagcggctttcgcgcggctgaaacgctgctaaagctgaagaatcctccgacagccctgttttgcgccaatgatgatatggcgatcggcgcgatgaacgccctctatgcaaacgggaaacgctgtcctgacgatatgtcgattatcggctttgacgatagcggattttcggcgtatacgacaccgtcattgacgacggtaaaaaaaccgactgaaaaaatcagcatgcttggtgcggaaagcctgctgtcattgatcgaaaacccgcaggcagaaggcgggcagacgctcatcagcacggagctgatcattcgcaattcagttaagcatctatag

SEQ ID NO: 4003 - DNA, 1389 bp, Bacillus licheniformis
atggaaatatcgacgaacaaacaaaccgaaacagtcgccgtcactcaagagaaattaagtttaaaagaaaaggtttcttacggttttggagattttgggaacggatttatgtttgaccttggacagctctatcttctgaagttttttacggatgttgccggcattccggcggcggcagccggaggcatttttcttgtgagcaaacttttcgccgcttttgtcgatccgattgtgggaacatcgatcgactacaggaagaatatcggcccgaaaggcaaattcaggccgtatctgctatacggaagctttgtgcttgcgattttgacgatattgaccttcatctcgccgaatctgtcaccgacgggcaaactcatctacgcttatgcctcatacatgctttggggtctcggctattcctttgtcaacatcccttacggctcgctcggggctgccatgacgcaaaactcggtggaacggacttcgcttgcttcctttcgccaagccggctcgctgggcgccctgtttgtgacgagcattgttgtcatcccgatgattgtcaggtttgacaaccctgcggttgcctatccggtcgtcatggggctgatgtcttttctgggtgtgttgtttttctacatttgctacaggaactgtcaggaacggatcgtcgtaaaagatgagaagtacaaacaggaaaaagtgacattcaaagcgatttcaaagacgttttttacgaacaagccgctccttacgctaatattcatgacaatttttacgatttcagcctataaccttaaatccgcgatgctgatttatttcgcgcagtataacctcggcaacgccgaactgatggcctacatgaatttcatcatcatcggctcatcctttatcggcgtcatcatgctgccgaagctcgtgaagcttttcgggaaaaagcataccgccattttggggctcgcggtttctgtctgtgccgatctgatcaattttttcgcaccgggcaatgtctttgtttttacgattctcgcaagcatcgccttcatcggcatcagcattccgaacggaatcacctgggcattcgtatcagatgcgatcgattacggcgagtggagaacaggggaacggaaagaaggaacggtatactcgctgtttaatttttcgagaaagctggctcagtcgctctccggcttcctgtcagggatcggtctcagcatcatcggctatgtgccgaatgcggcccaaaaagcggggacgctgctcggcattaaagcgattctccttttgtatccggcagcagcgctgacggcggccattctcgttctcggctacctgtaccgtttgacggatcagaagcacgccgaaatggtcgcggaaatcaaagcgagaacatag

SEQ ID NO: 4004 - DNA, 1422 bp, Bacillus licheniformis
gtgaagccgtttttgaatgacgattttcttttaacgaatgaaacgtcgaaagtgttgtaccatcagtatgcaaaaggaatgccgatcatcgactaccactgccacttgagcccaaaggagatttacgaaaacaaaacgtttaaaaacctgaccgaagtatggctctacggtgatcactacaagtggagagcaatgagggccaatggaatatccgaagagtttattacaggagatgcgtcagacgaggagaaattcagcgcctgggcaagaacggttccgatgacgattggaaacccgctctatcattggacccatttggagctgaggaggtttttcggcatcgatgaccggcttgatgaaaagagcgcgccgcatatttgggagcgggttaacgaacagctggccggaggagggttcggcgccagagacttgattgaaaaatcaaacgttgaaacggttgtcacgacagatgaccccacagacagtcttgaatatcatgtaaagctgaaagatgaagactttaatgtaagcgttttacctggatttaggccagacaaggcgatggaaatcaatcaagagggttttgccgcctgggtgagaaagcttgaaacagctagcggtatgaagatagcgaattatgacgattttttgaaagcgcttaaaaacagaattgactttttccatgaagcaggcggacggatatcggatcatgccatcaatcaaatgatgtacacggaaacagatgagagcgaagtgcgcccgatttttgcaaaggtgatgaacggggaaagcgcctcgcctgaggaagagtgcaaattcaaatccttgaccttgcactttttgggaacatgctatgcggagaagggctgggcgatgcagctccacattaacgccctccgcaacaacagcagcaaaatgtaccggaagctcgggcctgatacgggatatgatgcgattaatgatcaggatatcgcaaagcctttgtgcagctttctcgattctcttgatcgaaaagatgcgctgccaaaaacgatcttgtattctttaaacccgcgggacaatgtcgtgatttcaagcctttgcggaagcttccaggacggccggataccggggaaaatccagcacggtaccgcctggtggttcaacgatacgaaagacggcatgctcgaacaaatgaaatcgcttgccaacatcggtctattgagccgttttatcggtatgctgactgattcgcgcagctttctttcctacacaagacacgaatatttcaggcgcctgctctgcgatgttatcggcacatgggttgagaacggcgaagcgccggatgatatcgaactgctgggccggatcgtaaaagggatctgctacgaaaatgcaaaacactatttccagtttgaagtgaaagatcgtttgaaagcttag

SEQ ID NO: 4005 - DNA, 1758 bp, Bacillus licheniformis
atgaagctcagaggaaagctcgttctccactttgtcagtcagattttcctgattctcggtcttgttctcgcgaccttgctgttatccttcatttttttcgctctccgattaagcgagagcgaagcggatacaggcttggcaaaagccacttcagacacgtttgaaagctgggtcagcgtggatgacaataacaattggcagatcgaagatatcttgaaatcggctatcgacaaacagggaggctggcttcaaatattagacggcaaggagaaaaccgtttattcctaccgtcttcctgcggaaattcagaggcagtaccacagggaagacctggtatccgtttttgataaaaaaagaattaaaaaatatcaagtcaacttctggtctgccaatttcaatggtgaagactacgtgattttattcggatgggagtcgaaaagcgatacgatcctgtcctatttggaaaaagaagagaaggatatggcagacctttcttcctataaaaaaagcacgcttgatttcattaagaaaaacaaagggtccgtctatttgttcagcgaaaaagggaaaatgctggactcgatctaccaggacatagattacagccagggaatcaatgagctggagcttttaaaatacggatcaaagccatggaactacgagcacgagttttcatacaggcgattaagcgcgacagaatggctgatcgccgctacgccgaacccgatttttaatccggatcatgagttcaacaggacgatgatcgggctcgctttaaaaatcgttctcatcgtgatcggcgttctgatcttattgatgtcttctatgaccatttggtattctttcagattcggcatgccgatcatccatacgattaaatggatcgtcaacctttcaaaagggcgatttgaagaaccgagaaaccggaaaggccgcccgcgaagccggaacaaaaaagggaagcgaaaacagccgtaccggctgttcacagaagtgtttgaatcgatggagcagctgacggaaacgctgaaaaaagacgagcaaaaccgcaagaaaatccaaacgacccgggaggaatggatcgcagggctctcccatgacttaaaaacgccgctcagcacgatttacggctacagcatgatgctggagtctccaaactatgagtggtcaaaagaggaaatccgcgaaatcggccaggcgatgaaagaaaagtcggactacatgtcacagctaatcgaagacttgaacttgacgtacaggctgaaaaacgacgctttgccgattaaacgccagacagtgaggctcgtgccgtttttaaagagcttcgttgaggagtttaagcgccattcattttcagaagggtacaacgtgtcttttgaatacaagcaagtagataccgagtttgcgatagacaggggctggttccgaagagtcttggaaaacctcctcgccaacgccgtcaagcataacaaaaaaggcactgacatcaaggtgatccttgaagaatccaagcaatatattattcttaaaattcaagacaacggaagaggcatggactctgaaaccgtctcaaatttattcaaccgctactacaggggaacgcatacaaaagatgcgacagaaggaagcggtctcggccttgctatttctttggaacttgtccacctgcacgacggctgcatcgcagttgacagccggacaggccgagggacggaaattacgatggaatttaagaaaaaccctaaagccgccaaataa

SEQ ID NO: 4006 - DNA, 729 bp, Bacillus licheniformis
ttggaaaatgcgacaattttgattgtggacgacgaagacgccattgttcaaatggtcaagcgcgtcctcacgaaggaaggattttcagaagttctgaccgcaagcagcgcagaagaagcgctcgacatcgtgaaaaaggacaccgtgcacttaatacttctcgatgtcatgatgccgggacagacaggatttgatgtatctcctgaaatcaggcggcacaccaacgctccgatcttcttcttgacggcgaaaacatccgatctcgataaactgtcgggttttgcctacggggctgatgattatattacaaaaccttttaatcctctggaattaatcgccaggattaaagcccatttaaaaagaacgtatatacataaagaagttgcagctgcttcagtatcttcagcctacgaatatgaacgctttatatttcatcccgactttgcggagctgatcgtggacggcgaaacggtcagctgctcggcgcagctgctccagctcctgcaatatttttgcgatcatccgaacagggtgctttccaaggatcaaatttatgaaaaagtgtggggcgttccatcttatggagacagcaacaccgtcatggtacatatcagaaagctgagggagaaaatcgaaaaagacccgagcagccccgaatatattgtcacgattcgcggccttggatataagttcgttcccaatcctgcacgaaaagagagcgaaggatga

SEQ ID NO: 4007 - DNA, 813 bp, Bacillus licheniformis
gtgtctctttcaacaaacaacctggggatcggctacggcgaacagatgattgtcgaaaacttaaacctccacataccaaaaggaaaagtgacgaccatgatcggtccgaacgggtgcggcaaatcaaccatattaaaaacgatggcgcgcatacagcgttcgcgaacgggcgccgtttatttaaacggcaaagcgatccaccaaatgtcgacgaaggatgtagccaaacagatggcgattcttccgcagacgcctgaggcgccaggcggtttgaccgtatatgagctcgtttcttacggccgttttcctcatcaaaagggaatgggcaggctttcggccgatgaccgccgcatggttgaatggtctctccaagtgacaggaatgctgcctttttatgaccggccgatcgaagccctttctggaggacagcgccagcgcgtctggattgcgatggcccttgcccaagaaacggagctcttgctccttgacgaaccgacaacctatttggacttggcgcaccagcttgaaattctgcaactgctggaaaagctcaatcaagaagaaggccgaacgattttgatggtcattcacgacctcaaccatgccgcccgcttcgctcatcatatggtggcgctgaaccggggtgcgattgtcaaagagggcgcccctcatgaagtcatgacatcagaagtattaaaaaaggtgtttcagattgatgctgaaattatattagacccgcgcacaggaaaaccggtgtgcctgacttacgatctattgaaaaaagaagaggatcagaggctggcaaccggatga

SEQ ID NO: 4008 - DNA, 1014 bp, Bacillus licheniformis
atgctcaagaaaaacaacagacgggcgggtgcggtgatgctcgtcatggccgtgctgacggccgccgtgtttttattaagcatgaacatgggagaaatccgcatcgacccgcttgctacattgagaacactgttcggctttggaacgccgcaggatgaacttgtattatttgaattccgtctgccgtgcatgatcctcgccatgctgatcggtgcaggggttgctgtctccggagccgtctggcaggggatatcccggaatgacctggccgatccggggatattgggcatcaatacgggagcgggttttgccgttgtgctgttcatcttctattttcagggagacgttggcaacctgcaaaaaggattcgttttttccctgccgatattcgcatttttgggagcctgctttgcagtcgtttccatctatttgctggcgtggaaaaaaggcttgaatcccattcgcctcgttttggtcggcatcggagtgaatgcggcgttttcggcggccatcttaatgctgcagcttaaaatggacccaaatgactttatgcaggcggctgtttggctgtcagggaatatatggagttcgaactggagctttgtctcggccgtgctgccctggattgtcgtgctgattccttttatcctctataaagcgcgctatttaaacgtgctgaatctcggtgatcagctcgcaacagggctcggaacggcagttgaaaaagagcggcgcacactgcttctgtcggcagccgcgctgagcggcgcgtgtgtagcggctggaggaaacattacgtttctcggtctcgtggctccgcatattgccagaagacttgtcgggccgaagcatcagcttttaatcccggcttccgcgttgaccggagcattgctctttttgctggcggacttaattggaagaatgatactggcgccttcggaaattcccgtagggcttgtcattgccgctttaggcgcaccgtattttatctatttgcttatgaaaacaaattaa

SEQ ID NO: 4009 - DNA, 1065 bp, Bacillus licheniformis
gtgagctcttacaaaaacatacatcatatcaacggcgcggatggcactgatgaagaacagagaccgatcagccgtccgctcggagctgtatttgtcctggccggcggaatcatgctgctgctttttggcgccgcattatcgattgcgctcggtgcggctgatataaagcttggaacggtttgggacgccatttttcattttgacgcgaaaaatacggcccatcaaattattcaggaactcagactgccaaggacggtaagtgcggctcttgtgggcgcctgcctggcggtttccggagccgtgatgcaggggatgacgcgaaatcctcttgcgtcgccggaaattatgagcgtcacgcacgggtcagctttcgcaattgctgttgcgtttgctttttttccaggaacctcatcgatcgggctgatgatctggtcatttgccggtgccgctcttggagcggggcttgtttttggaatcggaatgttttcaaaaggcggtcttacgcctgtaaagctggctttggccggtacggctgtcggcacgttcctgagcgctctttctacgagcatcgcgatccactttgatgtggcgcgcgacgtcagtttttggtatgccggaggtgtcgccggcacgaaatggctcagcattcagttgttgattccggcggcagcgctcggtttggcggtcgtttttgtcatcgcccgttccatcacggttctaagcctgggtgaggagctggcgaaagggctcggtcaatatacgaagacggtaaaagcgatcggcatcgtgtccgttgttctgctgacgggtgccgctgtatccgttgccggtgcgatcggttttatcggattgatcattccgcatattacccgctttctggtcggggttgattaccgctggatcattccatgctcagctgtgcttggcgctgttcttctgatctatgcggatattgcggcaaggctggtcaacccgccgtttgaaacacctgtcggagcagtaactgcgcttgtcggcgtaccattctttctctatctggcccgcagggaaaggagtggactgtaa

SEQ ID NO: 4010 - DNA, 1404 bp, Bacillus licheniformis
atggaacagacaaaaaaatggggcttctggcttcttacggcttttgttgtcggcaatatggtcggctcagggatttttatgctccccagcacactcgcccagacggctagcccgctcggcgtaacggcggcatggctggtgacgggtgcgggggtgctgatgatcgcccttgtattcggccatttatccattcgccgcccggatctcaaagcaggtccgcaaagctatgcaagagctttattctcagaccctaaaaaagggaatgcggcaggttttacaatggtatgggggtattgggtggctagctggatcagcaacgtggccatcattacaagccttgcaggctatttgacgactttcttgccgatcttaaccgacggacgcgagctggttgaattcggcggacaccccgttacacttggccagctcttgacattcatcgtgtgtacgattttgttatgggggacgcattttatcctagtctccagcataaatggagcgggcaagctgaactttttggcgactttttccaaagtgcttgggtttgtcctgtttattgttgcaggtttgttcgtttttcaaacggcattattcgaatcattttattttccaatcgaatcagaaggcaaaagcatagggctgggcggacaggttcacaatgcggcgatttcaacgctgtgggcgtttgtcggcatcgagtctgcggtaatcttatcagggcgcgcatcatcccagcgtgatgtcaaacgcgcgaccattaccggcctgttaattgcgctcggcatttatatgatcatcactttaattacgatgggcgtcatcccgcacgatcagctccaggcatcagataaaccgttcgttgatgtgctgcacgtgattatcggcagcttcggcagcgtgattatggcggtcttggcaatcgtttctttgttcggatcgatgctcggctggattttaatcggcgcagaggttccgtatcaggcggcaaaagccggtgattttcctgctttctttgcgaaaacgaataaaaagggaagtccggtcaattcattgatcgtcacaaacgtgatgtcgcagatctttattttctcaacgatttcgggaacgatcagcgaagcctttacgtttttaacaacgtcggcgacgctcgcttaccttgtcccttatctcatagcagctcttttcagcttgaagctcatcctcaaaggggagacatacggcgagctgaaaggttcaagaacaggagacggcatcattgccttggccgctcttgcgtactctttatgggtcatcgtttcaggcacgtctgacttgaccacctttatcttgggaatcgggctgtttttcgtcggtcttgcgatctacccgttcgtctacaaaaagttcaaaaataatcaagtgtga

SEQ ID NO: 4011 - DNA, 141 bp, Bacillus licheniformis
ttgggtattttcttcaataaagatagaggaaataaggaaaaggaccaaaacgccgttcggggggcgcttgaagacgcaggacaagcgctgaaaggagaccctctgcaagaggcggtcaacaaaaagaaaaataaccgataa

SEQ ID NO: 4012 - DNA, 471 bp, Bacillus licheniformis
atgacaggaaaaacacacatcatgggaggggtcgcttcttgtacggctgctgcttatttttacggatatgatccggtgttcatgacagcctcgggcgttatcggagcattgattccggatatatgccatacaaaaagcaagataggcagaaggcttccgattttatcagcagtggtcagttctgtcttcgggcacaggacgtttacacacagcctgctctttttgctcatcacggcattcgcggcacatttatattttgcagatcagagcatacttgtcggattgatggccggaatggcaagccatctgctcctcgatgccgggactgtaaacggcatcaaacttttctttccgtccgccattaaggttcgtctgcccctttacattaaaaccggcgggaaggcggaacaagtcgttcttgctgtgctcaccgttgtttcgtgctattttattgcgaacttgatcgcctga

SEQ ID NO: 4013 - DNA, 1860 bp, Bacillus licheniformis
atgaaaaaacaattttttaaaaagcagtggtttttatgcctatccatatttttcatatggatgaagacgtacttcatctacaagctgggctttaatttacaaatcgacaacgcacttcaggaactgatcctgtttatcaacccgcttagctttctcatccctgtactcggcatcagcctcttttttcgcgaaaaatcgcagcgcatctatttaatcggggctaatgtcgtcctgacgggcatcttgattgcaaacagcattttttatggtttctacatcgatttcatcaccattcccgtcctgttccaggcaaaaaacctcggggggcttggaagcagttttcaggagctgttcaatccggttttcatcgcgcttttcctggacctggctctcatggtctggctggcaaaaacgcgcgaaagaaccggcaaaaagctttccgctaaagccgttaagatctactatgcggcagccgccggaacggtgctgtttaatctcgccctgtcggagctggatcagccgaagtttttaagctactcttacgacagggaagtgcttgtaaaaaatatcggcttgtatcagtttcatctgttggacggcatttcacagacctttaatttgacacaaaaagcggtcgctgatgaaaacagcctggcaacgatcgaaaactacacaaatgccgactacagcaaaccgaaccaagatatgttcggaattgccaaaggacgaaacgtcatctttgtaacgcttgaatccacccagacatttgtcatcaatgaaaaggtgaacggccaggaaatcacgccgttcatgaacaagttcattcaaaaaagctattatttcgaccatttttatcagcagaccgaacaggggaaaacgtccgattcggaattcattgtcgctaattcgctctatccgtctctgagcggttcggtgttttttacgaagagcgagaatgcgtacaattcgatgtataaaacactggcgaaccacaattacagaacatcggttttccacgccaaccataaaaaattctggaacagggacgtcatgtacaaagccctcggcatcgacagcttttatgacgtctcccattttcatgtgacacctgaaaattcaacgggctgggggctgaaggataaggagtttttaacgcaatcggccgacttgatgaaagacttgccgcagcccttttacagcaacctgatcacattgacgaatcattttccatttcaaattgatgacgaggataagctgatcgatgagtacgattcagagagtgacattttaaaccggtatgtcacgactgtacgctatgaagacgaagcattgaagcatttcatcgcaaaactgaagaaaaacggcctttacgacaattctgtgatcgtgttcatgggagatcactacggcatatcagaagcgcacaacgatgcgctggctcaatttttgggcaaagacgaaatcaccccttacgataccgttcagctgcagcgggtgccgctgattatccacattccgggggtaacggatcaagacccgaaaacgatatccgaaacaggcggccaaattgatgtcaaaccgacattgctccatttgctcggaattgatgcaaaagggatgattcaattcggcaatgacctgttttcgaaagaaagaatgcctttcgctgtgttgagaaacggcagctttattacagatgattatatctacacgaaaaatacgtgctacagcaaaaaaaccggggacatgatcaacgatggagaggacaaatgcggccctctcatcgagaaggcgaatgaagaactttccctttccgataagattattaacggtgatttgctgagattttacaaaaaataa

SEQ ID NO: 4014 - DNA, 1452 bp, Bacillus licheniformis
atgagtgaaacacagcacaagacaaatcaattgccgattgttgccgtcttgattatggggacatttatcgccattttgaatcagacgcttttgacgacggctctgcctccgattatgagggacttaaacattacgccggggcttgcccaatggctgacgaccgtttttatgctcgtgaatgggatcatgattccagttacggcttttttaattgaaaaattcacaacgagaaagctgttcatggcggcaatgtctttatttacggccggcacgctgatctgcgccttgtcattcagctttccggcgctgattgcggggcgcgtcgtgcaggcggctggcgccggcattatgatgccattgatgcagacggtgcttttattgattttcccaaaggaaaaacgcggatcagcaatgggaatggtcgggcttgtgattgcctttgctcccgctgtcggaccgaccctgtcaggctggatcgtcgatcgctatccttgggaagtattgttttacctgctgcttccgttcgccgtgatcgacatgattgccgcgcactttattttaaaaaatgtcaccgaacagacatcgcctaagatggatgttacttcaatcatactgtcttcgcttggcttcggcggcattttgtacggcttcagcagcgccggtgttgccggctggacgggtgcggacgtgctggccggcttcgcggtcggcagcgttgcgctgttttggttcatttggaggcagctccatttggaagagccgattttggagttcagggtatttaaatatccgatgtttaccttggcgacgattatcgggatggttgtctttatgtcgatgatcggagctgcgacgatcgtgccgatgtatatgcaggatatgcgccatttcacggcgatggagtcgggaatgatgctgtttccgggagctgttgtgatggggctgatgtctccgattaccggaagaatttttgacaaaatcggcgcgcggattttgagcatcaccggtttgacggcgatcttcgtgaccacattgctcttgacccatctgacaaagacgacgccttttgcatatttgtctatcgtctatgcgattcggatggtcggcatggggatggtgctcatgcctgttacgacagccggcttgaaccagctcccgcgccatttgattcctcacggaacggccatgaacaatacaatgagacagatgtcaggatcgatcgggacggctgttctcatcaccatcatgacacagcgtgcgcttcttgaccctgccggtccgtcttcggatacagcgatgattcacggcgtcaatctggcatttatgaccgctgctgcattgtcgggaatcggattggttctctcattctttattaagcagcaccgccgcggacggctcgacggcagcaaaagaaaacaagcgaaaggccgcttggccattcatgagaaatga

SEQ ID NO: 4015 - DNA, 840 bp, Bacillus licheniformis
atggtaagcagtttaaaggacactgtgacattacataacggtgtgaaaatgccatggtttggacttggagttttcaaagtggaagaaggcagccaagtcgttgaatctgtaaaagcagccattaaaaacggataccggagcattgacacagccgctatctatcaaaatgaagaaggcgtcggcaaagggattaaggaatcaggcgttccccgcgaagagcttttcatcacgtcaaaggtttggaacagtgaccagggatatgaaaaaacattggcggcttttgatgaaagccttcgaaaactcggccttgactaccttgatttatatttgattcattggccaggaaaagacaaatataaagatacgtggcgcgcacttgaaaagctgtacaaagacggcagagtgaaagcgatcggagtcagcaatttcaatgtccaccatttggaaagcttattggaagatgcggaaattaaaccgatggtcaatcaggttgaattccatccgcgcctcactcagactgagcttagggactactgcaagaagcaaggcattcaggtggaagcatggtctccgctcatgcagggaaaactcctcgatgatcaggtgctgactgacatcgctaaaaaatacaacaaatccgttgctcaagtcatcctgcgctgggatttgcaaaatgaagtcgtcaccattccgaagtccatcaaagaacaccgcattattgaaaatgccgacatttttgattttgaattatcggcggaagatgtcgaaaaaatcaacgctcttaataaagatgagcgcgtcggtccggatccggacacaatggttaacggattcgaataa

SEQ ID NO: 4016 - DNA, 861 bp, Bacillus licheniformis
atgaaacattacggtgcaatagaagcaggaggcacaaagtttgtttgtgcagtcggaacagaaaagggagaaatcatagacaggctgacgatcccgacggagacgcctgaagagaccattggaaagctgaccgatttcttcagcaagtatcagctcacatcaatgggagtgggctcttttggacctatatccgttgcaaaaaataaagaggattacggatacataaccaataccccgaaattagcctggaaggggtacccgtttattcccgaattggaaaaaaggcttggcattccggtttcgtttacgactgatgtaaacgctgccgcgcttggagagctgacgaaaggagaggcgcaaggcctggagagctgcttgtatatcacagtcggcacaggaatcggagcaggagcgattgtcggcggccggctcgtacagagcacgctccatcctgaaatgggtcacctactcattagacggcatccgcaggatacgtttgaaggaatctgtccgtatcacaaggactgccttgaagggatggcatcgggcccggcgcttgaaaagcgatgggggaaaaagggcaaggatttggctgaaaacgaggaagtttgggagcttgaacccgaatatttagcacaggccctcatgcaatatatcttgattctgtgccctgaaaaaatcatcatgggcggcggtgtcatgaagcagcagcagctgttcccgctgattcgcaaaaagctggccgaatatttgaacggatatgtcgacctgcctgatcttgaagaatacatcgtgccgccgggccttggcgacgatcagggaatcaccggagcgcttgctttggctcattccatcggttga

SEQ ID NO: 4017 - DNA, 147 bp, Bacillus licheniformis
atgaaagaaagcaatcgcactgaacaatggttcaccagagcatgggagcttttgatgctgacggaagaaagcttcccgaaaatgtggcagttttttaaacaactgccgcgttcgctttttcgcttaaataggcttctgaccgcttga

SEQ ID NO: 4018 - DNA, 117 bp, Bacillus licheniformis
ttgatcgtaaccgtgaaaaagaggattttttcaagccccgctcgaagctttaataaggagggatatcatgaagcatccattcgacaatttccgttctttattcccgaaattgtctga

SEQ ID NO: 4019 - DNA, 1125 bp, Bacillus licheniformis
atgaagcatccattcgacaatttccgttctttattcccgaaattgtctgatcatgttcatcttgccgcatgttccggaagcgcattggctctgcctgttgccaaagcggtcgatgagtatcagaacggccttttaacagccggtgcagactggaaagcacatctcgacaagatggatgagaccaaggaaaaattcgcccggctgatcggtgctgaaaaagaagagatagccgttttgccgtcagtatctgacgcagtggccgctgtggccgccgcaatgccgcagccaccccgtcgaaggcagatcgccttcacggatatcgattttcctgctgtcggccaaatttggcttgcgcaagaccgcttcaaagatcacctcatcatcattcaaagcgaagatgggatgattgacttggaacaatacgaaaaagacgttaccgatcagacgctcttgacgtgtgtgccccatgccggctatcggaacgggtttaagcaagacataaagcagattgccgagattgttcatcagaaagggtcgcttttattcgtcgacgcctatcagactgccggccacattccgattcatgtcaaagacatggatatcgacatccttgcggcggggacgcgcaaatacatgctcggcattcccggaacagcttttttatatatgaaacgcgaactttgcgaacaatttgagccaaaaacggccggctggttcggaaggagcgcgccatttgccttagattcaggctttgcggaaggtgcgaaacgcttcgagtcggggacaccgtcatttatcagcatatatgcggcagacgcggcattgaagctgctgcttgaagcggagcccgacaggatcgagccctatctgcggcagcttgcggcattctctttgcaatacggtgcggaaaaaggcctgaagatcacaggacccaacaccgtacataacagaacaagcctgatctcggtgtatgccgaagaagccgcccgtgttgaatccctcttgcgtgaaaagcatatcatcgtctcaaagcgaaacaacgtcataagaatagccccgcatttttacaatacaaaggaggaaatcggatttgtgatggatgagatcgcggcaatcgtaggctaa

SEQ ID NO: 4020 - DNA, 411 bp, Bacillus licheniformis
atggagctttatatcgaaggtgaattagaagagcataggaagctgccgcaccgaaaagttttgtttgccattttggctgttttgctagcgaccgggattaccatcggatatatcgtgtatacgcatttttattcgatgaatcatctgccgaaaggaaattggtttcagtcttccggttcgccgaatcaagcatacaacctgaatttgtatagagtgaacaaaggcgggggaacgaactccccttccgtcagaggggaattgacaacggttgccaccggtgaacgaaagaatatctattggggatacgaagaagaacatgccaaaatcgaatggcaggacaaataccatgtgtccatcaacaacaatgtgctggacgtcagaactgatatatatgatggaagaagagagtga

SEQ ID NO: 4021 - DNA, 2331 bp, Bacillus licheniformis
gtgcaggaaaacggtcaggaatggctggaagaggaaaaacgaatccggcttgttttaaaggaattggatcaaaagcttcattctctaaagggaaaaaccggcggattgaaggaggatatcatcgatttacggaaacatttttggagcgatgtcaccgtaaacatagccgatgaaaatgaagcggttgaaacattttttagcattaaacagcaggctgaggttttggctgagagggaaaggagccataagcagttttacagccagctgaaaaacctgttaaaagtgaaagaatcgccttatttcggccgcgtagattttttggaggacggcgaagaaaacgctgagtccgtctacatcggactcgcctctttaatgtatgaaaaagaagagcggtttttgatctatgattggagagcgccgatttccagtctgttctataactatggacccggcgcggctcaatacgaagttccggacgagacggtcaggggaacgattgagctgaaaaggcaatttctcttcaaaaacggacagctgaaagcgatgtttaatacggatatggcgattggggatgaagtccttcaggaagtgctggggcagcaggccgatatccagatgaaaagcatcgtcgcgacgattcaaaaagaacagaatcagatcattcggaacgaaaagagccgctttttaattgttcggggagcggctggcagcggaaaaacgtcggcggcattgcagcgggccgcatatttgctgtaccgcggccgcgggcagatcgagtcgagccagatgctgctattctctccaaacctgctttttaacagctatgtcgccaatgttctgcctgagctcggagaggaaaacatccagcagacgacgttccaggaatttgtagcgcgccgccttggaaagcaggtaccatgcgagactccgttcgatcagcttgaatattgtttaaccgcttcagacggtgaggagcagcgcatccggatgaaatcgattgaattgaaatccagtctggctttcaaaggcatcatcgatgattacgtcaaatatttggcaaaagggaacctggtgtttaaacatatcacctttcgcggaaaaaggatcatcacaagcggtcagatgcggaaatttttcgcggcccttgatcattcagacacgctgtccaaccggattgaacaaacgggaaaatggctgttgcagctcctgaataaatatgaacgccaggaaagaaaaaaagactgggtcatcgaagaaagcgagctgctggataaagaggaatacttaaaggcttataaacgtcttcaggaggaacagcgctttacggagaatacgtttgacgattatgaaagggagcgaaacctccttgcctccatcgttgccgaaagggagttcaagccgctcaagcaagtggtaaaagcgttcggctttattgattttaaaggaacataccttcagcttttttccggacgctataccccgaaaacgcgctctgatgactggcagagcatttgcacattcactcagaaaagctttcgttttgagaagctgctttatgaagatgccgtcccttttttatatatgaaaaacaagctgaaaggcggggggaaaaacacggcaatccgccatttattcattgatgaagcccaggattacacgccttttcaacttgcttttttggagagcttgtttcccgcgtgcagcatcacgatgctgggagacttaaaccaggcgattcttgcccatgcctatcacgataagacgcttctgtcgggaggcgtgtttgaaggcgaaaaaacggagatcatcaccttgaagcgcagctacaggtcgacgaaagaaattgttgaattgacaaagcgcatcatcgaagggggcgaagagatcgaagcttttaataggaacggcaaaaaaccgactttgacaatatcagccgatcctcatgcacaccataaagagatggcttcccttatgaccgcccttcaaaaagaaggacttgagacgattgcagtcatctgtaaaacagtccgggaatgcagggatgcgttccagcatcttcagcagcatgcagagcttaaactgatcgataaagaaacgagaacgtttcaaaaaggcgtggtcgtcattcccgtctatttggcgaaagggatcgaatttgatgccgtcatcatttatgacgcttctgaaaagcaatacaaaaaggaaagagagcggactttattttatacggcgtgcacgagggcgatgcatgagctgcacctcttttccattggaaaagaaacgcattttttaaacggcgtcccaaatgatatgtacacgagaagagagtga

SEQ ID NO: 4022 - DNA, 609 bp, Bacillus licheniformis
atggcttgggaagtgttgagcatcatcggaaccgtcgcttttgcgatcagcggagcgatcgttgcaatggaagaagagtatgatattttaggagtttatatattggggattgtgacagcgttcggcggaggggcgatcagaaacctgctcatcggagttccagtgtccgccttgtgggagcaggggagtctgtttctaatcgctcttgtctcgatcacgatcgtttttttgtttccgaagctcctgttaaagcactggagcatctggggcagcttttcagacgcgatcggtcttgccgcatttgcgatacaaggagccctttatgccgttcacatgaaccatccggtcagcgcagtgatcgttgcggcggtcttaacaggaagcggcggcggaatgatccgggaccttctggccggaagaaagccgcttgtgctgaaaacggagatttacgccgtttgggccgctttgggcggattcattatcggcatgggctgggcggagaagccgctcacgttgtatatcctgtttgctttgctggtcgcgtgccgtgtatgttcgtacatgttcaactggaagctgccgaaccgttcgctgcggtcccacagctga

SEQ ID NO: 4023 - DNA, 351 bp, Bacillus licheniformis
atgggacaggaggtcatcatcgaaaaagcgaaagccgagtgggcgcacgaatttgaagctgaaaaacaacagctcgcagatgtcctcggaaaaaaagttctcgctatcgaacaaatcggcagtacctctgttcccggccttgcagcaaaaccggtactcgatttgatggccggcgtgagcagtctcagcgaagcttcagttggatcgaaccgcttcaggagctcggctatgagcacgtatttcacgaagccttcccagccaggcgtttttttcgaaagggaaagcggagggcgggcacacgccatctgcacgtatacatttttcaaagcgaagaatggaaaaatcagctga

SEQ ID NO: 4024 - DNA, 486 bp, Bacillus licheniformis
atggagtgtaagattcgcaaaatgaaaaagaaagacatccctcaagtacagcagattgccaaaacaagctggaatcatacgtatgaagggatcattcctttcgatattcaagagaagttcttgcagaaagcgtacaatgacgaaagaatgcagcagcgtttggaacactcgttaatgctcgtttcggaagcggacggaaaaatcgtcggctttgccaactactcctttgtcagagaaggaggggtagcctatctcgcagccgtttatttagctccggaataccagggaaaaggcatcggaaccgcattattggaagaggggataaaccatttaaagggagtgaaaaagatctttgtagaggttgaaaaagaaaaccgcaccggaaaaaacttttacaaggcgaagggttttgaggatgtcgccgaatatgatgaagatttcgaagggcatatcctcaaaacagtcagaatggccttgcacgtataa

SEQ ID NO: 4025 - DNA, 414 bp, Bacillus licheniformis
atgaaaaataaactgctttttctgtacggcgcctggatcgtctcattaacggcgacgctaggcagcttgtacttcagcgaaatccgtaaatttattccttgcgaactgtgctggtatcagcggattatgatgtatccgctcgtgctgattctcggaattgcgacatttcagggcgatgcccgtgtgaaaaaatacgtgctgccgatggcggtgatcggcgcaggcatttccctgatgcactacatggaacaaaaaattcccggattcaacggcattaaaccgtgtgtcacaggagtgccttgctcagggcagtatatcaattggttcggtttcatcacgattccgtttctcgcccttattgcatttattttgattatcatttttatgtgctttctcaaggggaaagacgagtaa

SEQ ID NO: 4026 - DNA, 696 bp, Bacillus licheniformis
gtgaagaagaaacagcagtcaccgatgaaatttgcagtgattatgacagtcgtggtcgtttttctgatcggcgcacttgtcgtaatcaacaatcaaacccaaaatgcttcgcaaacctttgatgacaagccttcaactgaaggacagccgcttctaggcaacaaagatgcggctgtaacgatcacggaattcggagattacaaatgtcccagctgcaaacagtggactgagaccgtctttccggatttgaaaaaggattacatcgataaagatcaagttaatttttcatatattaacttcgtcaatgaacagcacggcagaggctctgaattgagcgccctcgcttccgagcaggtatggaaggaagatccggattcattctggaagttccatgaggcgttgtacaaggcgcagcctgacaatgacacgatggaaaacgagtgggcgacgccggcaaaattggcggacatcacggaagccaatacgaaaatcaaacgcgataagcttgtcagcagcttaaatgacaaaacgttcgctgagcaattaaaaacggacaattcgctcatcaacaaatacggtgtagactcgacgccgacgatctttgtcaacggcgtaaaaatcgacaaaccgtttgattatgacaaaatcaaagaaacgatcgagaaagagctgaaaggccagtctgatgaaaaataa

SEQ ID NO: 4027 - DNA, 2112 bp, Bacillus licheniformis
atggaaaaggtgaaacaggagtacacgctaaacggccttgactgcagcaattgcgcacaaaaaattgagcatgagatagccggtatgaaggggattgaagcgtgttcggtcaattttgcaacaagcacgctgactgtccaagtcgaccaaaacagcggcgaagacatttctttaataataaagaaaaaagtaaccgagatcgaaccgcacgtcaacgcgacgctgaaggaagggacaaaacaggccccaccagaaagcgacggacggtttaaaaaaacggttgcaaggcttgctgcaggaaccgttctcggtgcggcgggctttctgcttcccggcggcaccgcagccgagtggcttctttttttcctagcttacctcatcatcggcggcgatgtcgtattaagggccgtcaaaaacatctttcgcggccgggtttttgatgagcactttttaatgacgatcgccactctgggggcatttattattcagcagtatcccgagggtgtggcggttatgctgttctatcaaataggcgagctgttccagggagccgcggtcacccgctcccggaagtcgatcagcgatttgatggacatccgtcccgactatgccaatcttcaaaccgaaggcggaacggtcaaagtgtctcccgatgaggtcaaagccggcgatatcatcatcgtcaagccgggagagaaagtgccgcttgacggcaaagtgcgggcaggcaaatcgcttgtcgatacgtccgcattaaccggagaatccgttccgagagaagccgctcccggaacagaggtgctgagcggatttgtcaacaaaaacggcgtgcttgaagtggaagtggacaaagaatacagtgaatcaaccgtttcaaagattcttgacctcgttcagaatgccagcagcagaaaagcgaaaacagagaattttatcaccaaattcgccaagtattacacgcctttcgttgtgataatcgcgcttcttctcgcttttgtcccgccgctgattatttcaggcgccctgctgtcagattgggtgtaccgcgcccttgtctttttggtcatttcttgtccgtgcgcgctcgtcgtttccattccgctcggctttttcggcggcatcggagcggcgtcaaaagcaggtatactcgtgaaaggcggcaattatttagaagcgctgaatgatgtcaaatacgccgtttttgacaaaacaggcactttaacaaaaggggaatttgccgttgtcaagctgtcgcctgcaagccatgtcaaagaagatgaactgcttgaatatgcggcgcttgccgaacatttctccggccatccgatcgccgagtcgatccgtgaagcatacgggaaggaagtacaagcggaccgcatcaaagattacagcgagacggccggcttcggcgtcagagcggttgtagacggagccgtcattttagccgggaatgccaagcttatgaagaaagccggcatacagtatcaaaaggaaagtgaaatcggaactgttgtttatgtagccgccggcgatacgtttatcggctcgattgtcatcgctgacgaaatcaaagaggatgccaagcgtgcgatctccgctttgaaaaaagcgggtattaaaaaaacggtgatgctgacgggcgacgcgaaagacaccggtgaggcggtcggcgaacagctgtccattgatgaagtgcatgcggagctacttccgcagcacaaggtggaccgtattgaaacattagataagcaaaaacttccaaaagaaaagctgctttttgcaggagacggcatcaacgatacgccggtcttggcgagagcggatatcggggttgccatgggaggcctcggttctgatgcggcagtcgaagcggctgatattgtgatcatgacggatcagccttcaaaaattgcggaagccatcagcattgccaagcggacgaggacgattgtctggcagaatattatttttgcactcggcgttaaaggagtttttctcatcctgggtgcttttggcatcgcgacgatgtgggaagccgtcttttcagacgtcggtgttacccttctggctgttttaaatgcgatgagggtattaaaagtgaaagaaatgtaa

SEQ ID NO: 4028 - DNA, 1215 bp, Bacillus licheniformis
ttgaaaaaatcgtgtctgatgatcgtctgcctcgcctttcttcttgctttttccgcaggctgcaaaagcagcaccggcacaaagcatacggaagaaataaaagtctgggattactttaccggcaagcagcaggatctttatcatgagcttgtcgaacagtacaatcggtcccaggaccggtacaaggtcgtaacggagtacattccttttaatgaagtgaaaaagcagctgtctgtcggtacagccggcaatgccatgcctgacgccgtattccttgacaatgtcgacaatgcttcattcgccgctatgggcgtgctcgaagatttgacggagaaaatcgaacaatgggggcaggctgaccagttttatgaggggcctctatcatcagccggatatgaagagaagtactacggcatccctttcgcaagcaatgcgcttgccttgttttacaacaaagacctcttgaagaatgcagggatctccaaaccgcctgaaacgtggagcgatctgaaaaaagcggcggaaaaaacgagcaaaggccaaacgaaaggatttgccctgtcagccgtaaaatcagaggaaagcgcttttcaattttatccgtttcttttgtcttccggagcagatctaaaacagctgaattcaaaagaagcagcctcttctcttcagtttttaacagatctgatcaagaaaggcgcaatgagcaaggaagtgttaaacgccacccaggatgatctggccagacagtttgcagcaggtcagctcgccatgatgatcaacggctcctggaatattgaacggctggaagaagccgaagacttaaattacgggattacctatatcccgaaagatcaaacattcgcttctgccctcggcggcgaaaatattgccgtcgttaaaggaaaaaacaccgccggcgcctgggattttatcagttggctgatcgatccggagcggctcgaaacgctgacagcagaaacaggcgtgtttccgccgcgcaaagatttgctcgaatcatcgagccattggaaaacagatgataatttaaaagccttctttccaatcatagagatcgcatcagcccgcggcccttcgaaagactggccgaagatttcggaagctttgcagactgccctgcaggaagcattgagcgaaagcaaaacgccgaaagaagcgctggatgaggccgcgcaaaaaatcagcgccttaaactag

SEQ ID NO: 4029 - DNA, 894 bp, Bacillus licheniformis
atgatcagagccattgtccgtaaatgggaagggtacttttatttgtttccggcagttctttttatgcttgctcttatcggttatcctctcatctacaacatgattctcagctttcaaaacgtatcgcttgcaaatatagcctcacacgatatcagctttatcggaatcgaaaattatcagcggattgcccaggataaagtattttgggcatctttaaaaaacacgctgctttacacggccggaagcgttgtatttcagtttgcaatcggctttttgctcgctttgtttttcagcatgaagttcaggcttgccccgtttctcaggggattgatgatggtgagctggctcatcccgctgacggttacggcgcttttattcaagtttatgatggcttcaaacgaaggagtgttcaatcagctgctcctatcatggggaatgatcgacaccccgatcccctggctgtcagacccgaatatggccatctggtccgttatcatcgccaacatctgggtcggcattccttttaatatgctgctcatatccgctggactcagctcccttccggaagacgtctatgaaagcgcaagccttgacggcgccaatgcttttcagaaattcatccatctgacactgcctttattgcggccggtgatcactgtcgtcatgatgctcggcttcatttatacgttcaaagtgttcgatcttgtgtttgtgatgactggaggcggtcccgtggacgcaactgaagtcctgtcaaccgtcagctaccgctactcctttgacgaatttcaattcagcatgggcgcggcaagcgccaatgtcctgtttcttattcttcttttggtcagtctcgtctatttgcggctgatcaaaaaagatgaggtgatgtcgtga

SEQ ID NO: 4030 - DNA, 822 bp, Bacillus licheniformis
gtgaaaacgaaccaaaaggaatggctctttaacattattggcgtcctcgttacggccggctttttattccccgtttactggatgattgctacggctttcaaaagcgatgccgaattgtttaaaacaccgcctttattgtggcccgagacattccgcacggccggctttgaagctgtgttcacttctggcgtcgccggatactttttgaacagcctcctgatttccggggcggctgccgtcatcgttctcatattggccgttccttccgcctacggcttggcgcgctttcggatcaagggcaaaaaaatgttcattttactgtttctcatcacgcaaatgctgcctgccaccgttgttttgactccgctgtttatcgcctttaatcaactgaacatattaaatacgtatatcggaccgattttgacgggggcaacgctcggcgttcctttttctgttttaatgctcagaaccttttttcttgggattcccaaggaccttgaggatgcggccaaaatcgacggctgcagccgttttaccgcgttcatccgcatcattttgcctatcagcgtacccgggattgccgtcagcggagcggtttctttctttttcacatggggagatttgatttacagcatgacattcaaccgaaatcaggagctgtggccgctgacggccggcatttacaatgtgatcagccaatacggaatccagtggaatgatctgatggcatttgccgttttatcggttctgcctgtcatcatcatttttatgctgcttcaaaagcagcttgttaaaggacttatcaatggatctatcaagtaa

SEQ ID NO: 4031 - DNA, 2310 bp, Bacillus licheniformis
atgaaattttcagacggctactggctgacgcgcgaaggatatcacatcaacacgccgaaagaagcctacgaccgaatgattgatcagcaatcattgaccgtgtacgggcctgtcaaagcggttcaaaagcgcggggacacgctcgacacccgcatgctcaccgtcagattttcgagtccccttgaagacatgatccgtgtgcaagtgttccattttcaaggggaaacgcctcggaaacccgactttcaactgcatacggcagatgttgaaccggtcatcaccgaacacgatgatgcgttgaccttccaaagcggcagcctgtgcgtcgaagtgagcaaaaacggttggggctaccaattttcacgtgatggacagagcctgaccgcaagcgaatcgaacagcctcgcctatatcacaagcgatgacgggcgcacctttatgagggaacagctcaacatcggcgtcggcgaattgctctacggccttggcgagcgttttacggcattcgtgaaaaacggccaaaccgtcgacatctggaatcaggacggcggaacaagcacagagcaggcatataaaaatgtgccgttctatttgtcaaacaaagggtacggtgtttttgtcaatcatcccgagctcgtctcgtatgaaatcggttctgaagtcgtatccaaagcgcagttttcggtcgaaggagaatcgctcgactattttgtcatcagcggcgccgaaccaaaggatgttttgaaacgctatgccgcgttaacgggaaaaccggcgcttcccccggcctggtctttcggcctctggttgtcaacatcgttcacaaccgactattccgaggagaccgtgacccgcttcatcgacgggatgaccgaacgcggcatcccgctcagcgtgtttcattttgactgcttctggatgaaagaatttgaatggtgcaatttcgaatgggatgaacgatattttaagcagcctgaagccatgctcagccgcctgaaagaaaagggcctgaaaatatgcgtctggatcaacccttacatcgcgcaaaaatcaaagctttttcaggaaggaaaggaaaacggctacttcttgaaaaacagccggggggatgtatggcagtgggaccggtggcaggccggaatggccatcgtcgacttcacaaatgaaaaagcgcgtgactggtattgttcaaagcttgaaagcctgctcgacatgggggtcgactgctttaagaccgatttcggagaacggattccgagtgacgctgtttactttgacggatcagatcccgaaagaatgcacaattattattcttatttatacaacaagaccgtatttgacttgttgaggcaaaagcgcggcgaacgggaagcggtcgtgtttgcaaggtctgcgacggccggcggccagcaatttcccgtacactggggcggggattgttttgccagctatgattcaatggctgaaagcctgcgcggcggcctgtcgctttctctttcaggcttcggcttctggagccatgatatcggcggatttgaaagcacggcaacagacgatttgtataagcgctggaccgcattcggcctcttgtcgacgcacagccgcctgcacgggagcgagtcataccgcgttccgtggctgtttgacgaagaagcggccgatgtcatgcggtattttgtcaaactgaagcacaggctgatgccttatttgtacgccgctgcacatgaagcgcacactgaaggcattccgatgatgcgggcgatgctcctcgaatttcccggagacaacacctgccactggcttgacagacagtacatgctcggcggaaggctgctcgtcgctcccgtttttcaggaagacggcgctgtccgttattatttgccaaaaggcacgtggacacaccttttgacgggaaaagcgacggaaggcggagaatggaaagaagaacggtacggctatatggggcttcccctgttcgtcagggaaaacacactgctgccgctggggcaggaatccgggcgacctgattatgattatctcgacgatgtgacgttctgcctctatcatttaaaagacggctgtacagccgaacagacgatttacaatgaaaagggcgaagcaatgacactcagagcttcacggcatcaaaatacgattgccgtgaaaacaacgggcgtccaaaagaactggaagctgctcctccgcggtctttctgtcacctctgttattaacggagctgcggaagcgcttcaggagggaacagcggttcagccaaaagaaaaagaacgggatgtcttcatttatttctaa

SEQ ID NO: 4032 - DNA, 2939 bp, Bacillus licheniformis
atgctgaaaacggtccgcatcatcatattgggcgcaatgtgcacgatcctttccgccgccggtttcgatccgccgcagcccgcagccgctaaaagccaggctgatgaatatgagtatccctttcaagatcccagtctccctgtacaaaaaagagtcagcgacttgctttcacggctgacccttgaggaaaaagtgtcactgatgcatcaatatcagcccgccgttccccggctgggcattcccgcttttaaaacgggcacagaagcgcttcacggcgtcgcctggctcggggaagcaaccgttttcccgcaggctttcgggctcgcgcacacatgggaccgctatttaatcaaacaaatcggctcggcagtcggtgatgaagtccgcggcttccaccaccttgatcccgcggcaaacggagtcaacgtctgggcgccggtcgtcgatctgctgcgtgatccaaggtggggaagaaatgaagaaggctattccgaagacccctttttaaccggggaaatagcaaccgcctatgcctccgggttaaggggcgatcatcccttctatttgaaaacagttccaaccttaaagcattttcttgcctataacaacgaaacagaccggggattcatctcctcaagcatcgatcccaggaacatgcacgagtattatttgaagcccttcgaaacagcaatttccaaaaaagccgcgtatggactgatgccggcctacaattctgtcaacgataaaccggccattttgagcccgctgctcgacagtacagtcaaacgtagatgggccggagacgatttcttcatcgtcagcgatgcctttgatccttccggaatcgtcaatgaccacaagtattatgacagccacgaaaaagcccatgcccacgccgtaaaagccggcattgacaactttacggatcagggggaaaatcccgagctgacgagaaacgccttaaccggtgccttaaagcaaggccttatttctgaaaaagacctcgatcaagccttggccaatacgttcagcatccgttttcgcacgggcgaatttgatccggacgaactcaatccgtacagccgcctgacagatgacgtcatcaacagtccaaagcatcagctgctggcgaaaaaagcggctgaaaaagccattgttttactgaaaaacgaccgggatctgcttcctttcaatgcccggaagaatgaaagcattgcagtcatcggcccgttcggaaatgcgctttacgaagattggtacagcggaacgatgccgtatcggaaaaccccgcttgacgaaatcgcggacaaaatcggcaaagaccgcgtctcttttgctgaaggtctggaacaaagcggcttcaaatccgcgctgaccggaaagtttgtaactgcaggccgggacggcaaacaaccgctcacagcagcggctgataagcttgagaaaagcgcggcattcgatgcggcggattggggagaaagcatcttcaccctccgcgcccaagcgaacggcctctatgtctcgcttcaggatgacggccggctgatcgctgatcagaaacagccgaacggctggaccgttaaagaaacatttcagttcgaacagcagtctgacgggacatttgccatcaaaaatacggcaaacggcaaatatctcaccgccggtaaagacggcacattaacagccgccgccgaaaagccggcaacagcagcggaaaagttttcaaagacgatcatcaagagcggtacggatgaagcggttcagctggcaaaatccgcggacaaagccatcgtgtttgtcggcaacaatccttacatcaacggccgggaaaccgaagaccggaaagatattacactccctccggcccaggaaaatctgctgaaagctgtttctaaagccaatcccaatacggtgcttgtcgtaacgagcagctatccgttcgctctcaactgggcaaaagcgcacattcctgcgatcatatattccgctcacggaggccaggaggcgggaagcgcattggcggacattctctatggagatgtaaatccgggcggacggctgacgcaaacttggcacacctcagtcaaagaactgccggatatgatgaattacgatatcatcaaagggaaaagaacctataaatatttcgtaggctgtttccgttcggccacgggttatcctatacagcgtttcgctacagcgatttaagcctttcctctgacagcatcaaaaaagacggatctgtcacgattcgcgtcaacgtcaccaatacaggcggaagaaaaggagatgaagtcgttcagctctatacctctcccctgtttaaaacacgggttaaacagccgaacctggacctgaaagattttcagcgggttgaactggcaccgaaagaaacgaaaaccgtgacattcaagctgaaacagacagaccttgccttttgggatgtgacgagagaaacttttgccgttgaaagaggcccttacagaatatccgtcggcagctcggcggcggacatccgcaagacaaagcggattttcgtccaaggcgaaacaattcgggaacggaacttgcgccgaaagacaaacgctgaagactacgacgactacaaaggcgtgctcatcaccgaagaatccaaatacggcggcgatgcggtaaaaagcagtacaacaaacgcgtggatcgcctaccatgatgtccgcttcaaaggcgaaaaaaggatagaagcaaaggttgcaagcagcggcgccggcgaaatcggcatcttcctcgaccatcctcaaaaaggaaagcaaatcggttcgttaaaagtgcctgacacatccggattgcaaaactggaaaacggtaaaagcttccgtccgaaaatcgacaggcacccaccgcgtcttttttgtcttcaaagggaaagttgcaatcgattcgtttcaatttgaaagataa

SEQ ID NO: 4033 - DNA, 135 bp, Bacillus licheniformis
ttgcaatcgattcgtttcaatttgaaagataaaccggcaaacaagaaattttttaaagccatgcagcttgatctgcatggcttttaccgtttttcagcaattttagctctttacaatttaggaatgatatattag

SEQ ID NO: 4034 - DNA, 744 bp, Bacillus licheniformis
atgaaacccgcaattaccgtaaaagatttatatgtttcttatcacggcgcagaagcgctccgcaatattaatttctcactcgatcaaggaatgatggcgggcattatcggaccgaacggcgcaggaaaatcaacgctgttaaaatccatgctccaattgattccaaaagataaaggcgacgtccgtctgctgggaaaaccgctcaaagatgtacgcaagcaaatcgcctatgttccgcagcgaaatgatatggattggacgttcccgatcaatgtcctcgacaccgtcatcctcggcacgtatcctgaactcggccttttcagacgtccgaaaaaacgcgataaagactgggcgtatcactgtcttgagaaagtcgggatggctgcatatgccaagcgtcagatcggcgaactgtcaggcggacagcagcagcgcgtttttctcgccagggcgctcgcccaaaaagcagagctgttctgtcttgacgaaccgttcgtcggtattgatgtgacaagtgaagaaatgatcgtcagcatcttaaaagaacttcgtgatgaaggaaagaccgttcttgtcgtccatcacgatttgagcaaagcggacagctacttcaatgaattaattttgctgaacaaagagctgattcaaaaaggccctgtctccgacatcctcaatcccgacgtgatgatgaaagcctacgaatctcagcttccgttcctgcaatcgaaaagaggtgcgatctga

SEQ ID NO: 4035 - DNA, 861 bp, Bacillus licheniformis
atggagtttatccatggtttgatggaatattcgtttctgcaaaaatcgctgttcacctcgattatggtgggcatcatttgcggcgtcatcggctgctttatcattctcaggggaatggcgctgatgggagatgcgatttcacacgcggttcttcccggcgtcgccatctcttatatgctcggcgtcaattttttcttcggcgccgtctttacgggcatcctgacggctctcggaatcggctatgtcagccaaaacagccggattaaaaacgattcggccatcggcatcgtatttacggcttttttcgccgtcggaatcatattgatcacgcttgtcaaaagctcaagcgatctgtaccatatcttattcggaaatgtgctggccgttcgttcatcagacatgtggatcacgctcgtcatcggagtcattattcttaccgctgtctttttattttacaaagagctgctcatcacctctttcgacccgacgatggcggctgtctacggcttgccgaaccggctgatccactactttttaatgacgcttttaacaatggtcacggtcgcatcgcttcagaccgtcggcatcatcctcgtcgtcgcgatgctgatcacgcctgccgcaaccgcttatctattgacggaccggctgtgggtgatgatctatttgtccgctttcctcggcgctttgtcagcggtcatcggccttggattaagctatacgtacaacctctcctcaggagcggcaatcgtgctcgtggctacgattttgttcggactttcctttacgttttcaccgaaacaaggcgtgctttggagagctgtgaaatcaagaagaaaacgggcagcgcttcaacaataa

SEQ ID NO: 4036 - DNA, 930 bp, Bacillus licheniformis
atgaaatggaagcaaacattagcaattgcggcggcattgattctgattctcgccgccggatgctcctcgaaaagcagcagcgaagaaaacggaaagctgaaggtcgtcaccacctactccattctttatgacatcgtcaaacaagtcggaggggatcacatcgatttatacagcattgtacctgtcggaacagacccgcatgaatacgatccgcttcctaaagacgtgcaaaaaacgacggacgccgatgtcgtcttttacaacggattgaatttggagacagggaacggctggtttaacaagctgctggaaacagctgaaaaagacggtgatgacgcccctgtctacaagctgagcaaaggggtcaagccaaagcatctcaccgctaagggaaaagaaacggaagaagatccccatgcatggctcgacattgaaaacgggattcaatatgcaaagaacgcaagagacgcgctgatcaaaaacgatcccgaccataaagaagactacgagaaaaacgcggaagcctatatcggcaagctgcaaaagcttcatgatgaagcggtgaaccgctttaaagatataccgaaagagcgccgcgtccttgtgacaagcgaaggggcttttaaatatttcgcttcggcctacggcgtcgacgcgcagtatatttgggaaatcaacaccgaaaatgaaggaactcccggtcagatgaaaaaaatcgtcgacacagtgaagaaaaaggacgtcccggccttattcgtggagacaagcgttgacccgcggagcatggaaagcctttcagccgaaacgggcgtgccgattaaagcaaaagtcttcaccgattcgatcggaaagcccggtgaagcgggagattcctattataagatgatgaaagaaaaccttgaccggatccatcaaggcctcgccgaataa

SEQ ID NO: 4037 - DNA, 186 bp, Bacillus licheniformis
gtggttgcaggcttcaagacattctcggcaggctttgatgcattcctcatatccagatttcacgaaacacactcctttttcctcgttttcccttcgttgtaccctgctttaaaatcggaaaaacataagaaaaaaactgctgtacatcctgtacagcagttcattggttattcggcgaggccttga

SEQ ID NO: 4038 - DNA, 327 bp, Bacillus licheniformis
gtgaaatctggatatgaggaatgcatcaaagcctgccgagaatgtcttgaagcctgcaaccactgctttgacaaatgtctgatggaagaagaggctgggatgatggccgaatgcatccgtcttgaccgggaatgcgcggagatgtgcggttacgcaattcaagccatgacgcgcaacagcccgtatgccgaagatatttgccagctttgcgcaaaggtttgcgaagcttgcggcaatgaatgcagccagcacaagcatgaccactgccaattttgcgctgaaagctgctttgcatgcgcggaagcgtgcagaaaaatggcttcttaa

SEQ ID NO: 4039 - DNA, 780 bp, Bacillus licheniformis
atgaaagacagcgtgtttcaaatgacttctgacacatatcaatctctcagcgattcagaacggcatttgctcgagtacatttatcagcacttagacgtcatcgccactttatcgattgtaaaattaagcgaggatgcaaatgtttcaacagccacgattgtcaggttaatgaaaaaactcggatatgacggctacacttcttttaagtatgcattaaaagaaaaacaccacctcggacacgctccgctgatggatgatatcgacagccaaattaaacaggccgtgctaaagaatgaaagagaagttctggatacgattaagatgcttgatatcgggttgatcgaagatgccattcaaaaaatcagcaatgccgaaaaagtttacatcttcgcaagaggattgtctgaaatgattggaaccgagatgacgatcaagcttcagctgctcggcaaaaactgcgagatgcacagcgacccgaatattatcagaggaaagtcaaaaacactggccaaaaaagacctcggcctttttgtttccttgaacggcgagacagaagagcttgttgaagccgctcaaaatttcaaattgcaagccatttccaccattacattaacgacaaggatcgattcgcgtcttgcgaaattatcagagatcgtactggtcgggtttaaaggggaacaatcattttttcccgattatgaagtccgctctcgcctccctctgcaagtcctctcccgcatcatgctggactcatatgtcatccgcaccgctcatagctga

SEQ ID NO: 4040 - DNA, 915 bp, Bacillus licheniformis
atgatctatacatgcacgatgaacaccgcagtcgacttattcgttgaaaccgacgagctgcttcccgatgttgtcaaccgtactaaagatgaagattatcagccaaacggaaaaggcgtcaatatttcatttatgctcaagcgccttggtcttgacaataccgcgcttggctttacaggcggattcaccgggcgttttattgaaaatgaactgctgaatgaaaaaatcgtcacagactttgtcgaagtggaaggcatctcacggatcaatatttttatcaattcaacccgggaattcaagattgtaaacaaaggaccgctcatatctgaagcccgaaaacaggagctgatcaacaaaatccgtcaaatcccgccgggccgcttcttatttatttcaggcagtcttccgagaggagtccctgatgacatgtacctttcgctttccgagattgccgccgaaaacaaactgaaattgatcttggatatcagttctcccgtcctattagattgtctttcataccatccttacctgattaagccgaatgaacaggagcttgccgcatttttcagccggaagaaagcgctgtccgaagaagaaatcatccattgcggaaaggaacttctcgaccgcggcgctgaaagggttctcatctcccgcggcaaagacggagccctttatttggaccgccaaagaacattaaaagcgaccgccgctaaaggcaaagttgtcaatacagcatgtgccggcgatgccatgcttgccgtattcgtcggaaaacaggagctcggctgttccgttcctgaagcactcaggcacgcctctgccgccggttccttgacggcattctcgaaaggactcggtgatgtgtccaaactcgatcaaacagcttcacaaattcaaatcactcatttataa

SEQ ID NO: 4041 - DNA, 1401 bp, Bacillus licheniformis
atgaaaaagttcaaaatcatcgcggcaaccggctgtccaacagggattgcccatacatttatggctgaagaggccttaaaacaggctgccgccaaactgggtgtggaaatcaaagtcgaaacacacgggcaaatcggcgttcaaaacgaactatcgccagaggacattaaacaagccgacggggtcattgtcgcggcagacaaagatgtaggcgcagagcgttttgcaggcaaacgtgtccttgacgtcccggttgcgcggggcatccgggatgcggaatctttaattcggacgctgatgaacggcgaagcgccgatttaccgcggacaaactgcggcaaaaacagaggatgaaccaaaaacaggcgaatccgcttccatcggccgtaaaatatataaacatttgatgaacggggtttcccacatgctcccatttgtcgtcggcggaggggttttgattgcactttcctttttattcggcatccattcagcggatcctgaacatccaagctacaacgcttttgccgaattgctgaataaaacgggcgcattcggattccagctgatggttccgattttatccgcctatatcgccgattcaatggcaaaacgccccggcctgattgtcggttttatcggcggcatgatcgccagcacgggcggagcgggttttctgggcggcatcgtatccggttttttggcgggactgatcatttacggcctctcgcatgcacttaaaaaaatgcctcagtcacttgaaggactaaaagcaatttttctttatccggttatcggcatttttctgatcggtgcggtcatgtttttcctcgtcgaaccgatgacggccattaatgaggggatgaagggctttttagccgactttcaaggggcgaacccaatcattctcggcttgatcatcggctgtatgagcgcatttgacatgggcggcccggtcaataaagccgcttatgtcaccggtactgctcttctcgctgaagggaaccaatatttcatggcaggcgtctccgccgcgtgcatcacaccgccgctcgttattgcgtttgccacattgcttttccgcaaatatttcagccagcaggaccgaaatgcaggacttgtcaattttattctcggcgccactcatattactgaaggcgctatcccgttcgccgcaaagaaaccaatccctgtcattccgattttgatgatcggctcttcggtttcggcaatattaacatattcattcgcagttcaagtacctgccccgcacggcggattccttgtacttcccgttgtaacaggagcctttcaatgggtgctgtcgattatcatcggatcgcttatcggcgccttcttatacggcttttaccaaaaacggacatatgaaaaagagaaaggctga

SEQ ID NO: 4042 - DNA, 458 bp, Bacillus licheniformis
atgaaaacagcagctttaatcaaaaaagagcacatctatctacaagaaacgctatcttcccaagcggaagcttttgaccggctggctcagatcgcatatgaatcaggagcagccaaaacaaaacaagcggtcattgacggattggcgcaaagagaggctgaaagcacgaccggctttatcgacggcttcgccattccccatgcaaaactgaaggacatcacagaagcaactgtcatcatcattcaaaacaaggcaggaatcgaatggaacgcgcttgatcagacgcctgtcacgttcatcattgcattattgatacccatgccgaggcaggcagcacacatctcaatctattatcatcggtgtctcgcatgcttgttcacgaagatgcgaggcagcagctgcttgaagcctcgagtcctgacgacattctgagcaccttctcaagctatttatcttaa

SEQ ID NO: 4043 - DNA, 852 bp, Bacillus licheniformis
atgctgacaaatacgaaaaaaatgctgctggacgcacaggcaaacggctatgcggtgccggcctttaacattcataaccttgaaaccgtgcaggccgtgacagaagcggctgaaaccttaaggtcccccgtgattcttgcggctactccaggaaccttcagctatgcagggcgcgactatattcaagccattgcagaaacggccgcggcgcgctgctcgatcccggtcgccctccatctagatcatcatgaagaaattgatgatattcgcgagtctttatcattggggacgaaatctgtcatgattgatgcttcgcaccatccatttgccaagaataccgcaattacggcgagtgtcgttcaatatgcccggcaaaaagatgccactgtagaagccgagcttggaaggctcggcggacaggaagacgatttgatcgtggatgaagccgacgcttattataccgatccggatgcagcaaaagagttcgtcgagaaaaccggaatcgattcgctggcggtggcaatcggtacagcccacggtctttactcaaaagagcccaatatcgattttgagaggctggccgcgattcaaaaacgggtttcagtcccgctcgtcctgcacggcgcctcaggaatttcagagcaagatgttagaaagtgcatcaagctaggctgtgcaaaagtaaatatcgcgactgaattaaaaattcctttttcagataaactgcgccgatatttgcatgaacacgccgatgcaagcgatccaagaaaatatatggcccccgccaaagaagccatgaaaaaaatcgtccaagaaaagattttgatgtgcatgagcaatgacagatactaa

SEQ ID NO: 4044 - DNA, 150 bp, Bacillus licheniformis
ttgaaggataagacagtgctcgtttggacggtttcagcggttgtttatgtaggaattgtcatgcttgtatacagcatattggccggtcgggaaccgatacccgatgaaaatccccatgacggtcatgctttagaagagcatgtcaaatga

SEQ ID NO: 4045 - DNA, 2436 bp, Bacillus licheniformis
atggacggacaaaaagaagccaccctccaaatctctggcatgacctgcgccgcctgtgcggcgcggatcgagaaagggttgaaaaggcttgacggcgttcaggacgcaaatgtgaacttggcgctggaaaaatcaaaaatcgtttatgatccggggcaaatcgaagtcggacagctggctgagaaagtcgaatcgctcggctatcaagttcctgcggaaaaagccgaatttgcggtttccggcatgacgtgtgcggcttgcgccaaccgggttgaaaagcgcctcaacaagctgtctggcgtcaaaagcgccgccgtcaactttgccattgagactgcgacagtcgactatcatgctggcgcggtttcgccggaggagatgatcgaagccgttgaaaagctcggctacaagctcgagctgaaaaaagaccgaactgcggacggtcgggcggaacaaagagaaaaagatattcagcgtcaaaccggcaaatttattttttcagccattttgtcttttccgctgctctgggcaatggtcagccatttcaaattcacgtcatttatatggctgccggggatgttcatggatccctgggttcagttcgcgttggccacaccggttcagtttatcgtcgggaagcagttttacactggggcttataaagcgctgcggaacaaaagtgccaacatggatgtgctggtcgctctcggcacgtctgccgcctatttctacagcttgtatttaagcattgaaagcctcggtacaaaccggcatccggacggcctttactatgaaacaagcgccatcctcttaactttgatcattttaggaaagctgtttgaagcgaaagcgaaagggcgttcatccgaagcgatcaaaaagctgatggggctgcaggcaaagacagcgaccgtcgtcaggaacggcgaagagatgaccgtgccgattgaaaacgttttggcaggcgacatcatgtatgtgaagcccggtgaaaaagtaccggcagacggggagattgtcgaaggtcgttcagcgctggatgaatcgatgatcaccggtgaaagcatccctgttgacaaaacggttggagatccggttatcggcgctacaatcaataaaaatggatttttaaaagtcagagcagaaaaagtaggcaaagatactgcgctggcgcagattataaaagttgtggaagaggcgcaaggttcaaaggcgccgattcaacggctcgcagaccggatttccggggtttttgtgccgattgtcgtggcgatcgcggccatcacatttttcatctggtatttggcggtcagccccggcgaattcggcacggcgctggagaagctgattgcggtgcttgtgatcgcatgtccgtgtgcgctcggcttggcaacgccgacatcgatcatggccggatctggccgcgcggctgaattcggaatcttattcaaaggcggcgaacatttggagacggctcaccgcttggagacgatcatgcttgacaagacggggacggtcacaaatgggaagcctcagctgacagatgtgcgccctgaaccatggatcgatgaaacatcgtttctcaagcttatcggtgctgcagaaaaaagctctgaacacccgcttgctgaagccattgtcgaaggcatcaaagagaaagggatagaacccgcctcagcagacagctttgaagcgatacccggctatggtatcgaagccgcagtcaatgaaaagcggattttgatcggtacaagacgtctgatggaaaaccgtgatattgacattcaagatgcgaacggcgaaatggaagagctcgaaacacaaggaaagacggcgatgcttgccgccgtcgacggtcggtttgccgggctgatcgccgtcgccgatacgattaaagacacgtcgaaggcagcggtgaaaaggctgcatgatatggggctggaagtcgtcatgatcaccggggacaatcggcggacggcagaagcgattgctgctgaagccggcattcaccacgtcatcgccgaagttctgccggaaggaaaagcggatgaggtgaagaaaatccaggcaaaaggcaaaaaagtcgcgatggtcggcgacggcatcaacgatgcgccggcattggcggcggccgatacaggtatggcgatcggaacagggactgacgtcgccatggaagccgccgacgtcaccttgatccgcggcgatttaaacagcatcgccgatgcgatcctcatgagcagattgaccatcaaaaacattaaacaaaatcttttctgggcgtttgcctacaacagcatcggcattccgttcgcggctgtcgggcttttggctccgtggatcgcaggtgccgcgatggcgttcagttcggtctcagtcgttctgaatgcactcaggctgcaaaaggtgaagcttgattggaggaatccgtcttga

SEQ ID NO: 4046 - DNA, 210 bp, Bacillus licheniformis
atggaacaaaaaacactgaaagtcgaaggcatgtcttgcaaccactgtgttcaggcagtagaaggaaacgtcggaaagcttggcggagtggagtctgtcaaagtgaatttaaacgagggcaaagtcgaagtatcgtttgattcaggcaaagtctcgctgaaggagatcatcgatacgatcgaagaccaggggtatgatgttgcaggctga

SEQ ID NO: 4047 - DNA, 303 bp, Bacillus licheniformis
atggcagatcatcatgaacacgcgttaaatcccaaaagctctaaaggaaaagaacaaatcacaaaccgcttaaagcggattgaaggacaggtcagaggcattcaaaagatgattgaaaatgaccgctactgcgtcgatattctcgttcaaatctcagctgtgcaagccgcgatgcaaaaggttgctttcagcctgcttgaggatcatacccaccattgcgtcgcaaacgcgattaaaagcggtgagggagaagaagccatcgaggaactgcttgatgtgtttaaacggttttcaaaatcatga

SEQ ID NO: 4048 - DNA, 120 bp, Bacillus licheniformis
ttgtctctttttttagacatgttccgcttcgcattttataatggtaccaatggggatcttggacaaaatataaaggaaagagaggtgttccgatggcagatcatcatgaacacgcgttaa

SEQ ID NO: 4049 - DNA, 552 bp, Bacillus licheniformis
atggcgaaaaagattttaatcgtaacgggcgatgcagttgaagcgctggaagtgtattacccttattaccgctgtcttgaagagggctatgaaacgacgattgccgcaccgaaaaagaaaaagattcatacggttgttcatgacttcctggattgggatacatacaccgaaaagccgggctatttaattgacgcgcatgcttcatttgatgagattgacccgtccgaatacgacggcatcatcattcctggcggacgcgcaccggaatttatccggatgtacgattccctgctgaaaatcgttgctcatttctttgaggaaaataaaccggtcggcgcgatttgtcatgcgagcctgattttcacaagcctgagagaacatctgaaaggccgggagctgacggcttacatcgcctgcaaaccggaagtcgaagccgcgggcgcgacttatgtcgaggagaagcttcatgtggacgccaacctggtctcaggtcatgactggtccaatctgccggagtttatgagagaattttttaaagcgttaaacaaataa

SEQ ID NO: 4050 - DNA, 762 bp, Bacillus licheniformis
atgcttgtagctgaaagacaccaaaaaatcgtcgagcttgtcaatctgcgctcgagcgtacgcgtcacagaactgagcgagcttttttccgtcacggaagaaacgatcaggcgcgatttggaaaagcttgagaaggaaaataagctgaaaagaagccatggcggtgcagtcagcgtgcagactgaagaaagagaggtgcattttcgcgagcgcgaaattacaaacgtaaacgaaaaaaagatgattgcatttgaagccgtcaagcatgtgaaaagcggggaacggattattcttgatgcaagcacgacggcatggtacatggcaaaagcgcttgaaaacatcccgctgaccgtcattacgaattcagtcagagtcgcgattgaactcagcaaaaaagaaaaggtgacggtcatttcaaccggcgggatgctgctgccgcaatcgatgtcatatgtcggccctttggctgagcgctcccttgacatgtatcacgtcaacaaaacatttctgtcttgcaaaggcgtcgaccctgcgagcggcttgagcgattcaaacgaaatgcaggcgctgttgaaaaaacgaatgatcgaaattgcggacgaaacgattttgatggcggacagcagcaaattcggaacccgtgctttctcgcaaatcgaccgccttcatgaccgatacagggtcatcacagattcaggaattgacaaagcaaatcttgcccgcttgaaagacataacagagaacatcacgatcgtcggctga

SEQ ID NO: 4051 - DNA, 1482 bp, Bacillus licheniformis
gtgacgattctcgcctttgatcttggtgcgtcgagcggcagagcttatgcaggtcatgtggacggcggtctgatcaaagcggaggaaattcaccgttttccaaatcagcccgttcaggcgggaaaacacctttattgggacattctcaggctttatcatgaaattaaacagggcattttaaaggcgaaaaacggctgtggacgaatcagctgcatcggaatcgattcatgggcggttgacgtcggttttctcgatcggaacggagagctgatggggaacccttatcattaccgcgacccttacacggacggaataatgacggaggtgttgaatgaaatcggaaaagaagagctgttttccagaaccggtattcagcttttgccgttcaacaccatctttcagctccgggcgctgaaaaaagcgaattctccgctgttggattacgcggacacactattaatgattcctgatttgctgcgctattttttaacgggcgagaaaaaaagcgaatttacaaatgcgacgacaacccagctgttcaacccgaaaacgtctgactgggattgggagctcatcagccttctggggatcccggccaagatttttccaaaagatatagcaaagcccggaagcgaagcggggaggctgtcgcaatcagtgtgcggcgaattgtctgtgcccgccgtaccggtgattgccgtcggcgaacatgacacggcttctgcagttgtcggcatccccgctgaaacggatgactttgcatatttgatttgcggcacctggtcgctgatcggaaccgaacttgacgctccgctgatgacaaaacaggcgctcgattggaattttacaaatgagggcggtgccggcggcacattccgttttttaaaaaacattatgggattgtggctgttccagcgctgtcaggcggattgggaaaaagatgggatcagctattcgagcgccgagcttgtcaaacttgccggacagtcagaagcattcaggtcggcggttgacccggatgacccggtgtttctcaatcccgtccatatgcctgaggcgatcagagagtactgccgtgcagcagggcagcacgtgccggaaacgcccggacagatcatccgctgcgtgctggaaagccttgcgtttaaataccggttcacctttgaacggattgaaaccttgacaggaaaagaatatgacggacttcacatggcgggcggagggattcgaaatgaactgctctgccaatacacggcgaatgtactgtccagaaatgtatgggctggaccgtcagaggcaagcgccatcggcaacattgccgtacaggccgtcgcgctcgacatgttttgggatattcagagcgcccggaaagcgatcaaggcttcctttcctcaaaaaacgtatgtaccggaagatacagaagcgtgggagcgggcataccgccgctatacaagtcagattctcggcgccgcttcccgctga

SEQ ID NO: 4052 - DNA, 1224 bp, Bacillus licheniformis
atgatgaatgaccgggcctacgctttatttgaagaacagcagaaagacaggggaatcagcctttctgaagcaaaggaaaaattgaaagcgcttaaaatcgagacgccttcatggggatacggggactcgggcacgcgcttcaaagtgtttcagcaagagggtgtgccaagagatccgtttgaaaaaatggaagatgcatcagtcgttcacaaattaaccggaatttgtccttccgtcgccatccatattccttgggatcgagttgatgattacggaaagctgaaagcgcacgccgagcagcttggccttgctatcggcgccgtgaatccgaacttgttccaggacgatgactacaaattcggcagcgtcacaaacgtgaaagcggccattcgccaaaaagcgactgagcaattgctcgaatgcgtcgatattgcaaaacaaacaggctccaaggaaatcagcctctggcttgccgacggaaccaactatcccggtcagggcgacatcagaaaacggaaaaactggatgtatgagtgtctggctgaagtttacgaagttcttgacgatgatatgcggctcttgattgaatacaaattttttgagccggctttttatcataccgatctggcggattggggcatggcttacaatttggcgcaaaagctcggcccgaaggctgaggtgctcgtcgacaccggccaccatgcccaggggacgaacatcgagcacattgtcgcttatttgcttgacgaaaaacgtctcggaggctttcatttcaacagccgcaaatacgctgatgacgatttgatcgcgggcgctcacaacccgtacgaactgtttctcattttttctcaaattttggacgcctgccgtgattctgacccgaacgtccggaagacggccgaacatatttcgtatatgcttgatcaatgccataatcttgaaccgaaaatacccgctgtgctgcgctcggtcatgaatgtgcagactcaatttgcaaaagcgcttttgatcaacttcgatgaagtgaagaaagcgcaggaagatcatgacgtgcttgccgcagaggctgcgatccgcgaggcatttgaaatcgacgtcaagccgctcctctgcgccgtgcgggaggaaatgaacgttccgcctgatccgctcaaggcttatgcggaaagcggatatgcggaaaaaatcctggcacgcgggaaaggcggtgcaagctggtga

SEQ ID NO: 4053 - DNA, 390 bp, Bacillus licheniformis
atgaagggcgagacccattggatcataccggacggttttattcctccggaaagttccggaagcttgacgagccatgaagccatttgtgttttaaattgccatgaagaaaacgcaaaccttgcgatcaccgtatacttcgaagaccgtccgccgctcgaaggcatttccgagacggttcatggcaagagaacgaagcatatccgcacaagttctttgcaccgatcaggagaacgcattcctgaaaatgttccttatgcgatcgagatcgcaagcgatgtacctgtgatcgtccagtacagccggctggacacgacccagccggaacttgcgttaatgtcaaccatggcatatccgttaaaaacaagggggatgggcgtacatgatgaatga

SEQ ID NO: 4054 - DNA, 2070 bp, Bacillus licheniformis
atggtgaaatatttatggtcagagtctgaggctgcatcgctgcgtccgggtcttgccgagctcgtctaccgttccaatctgatcggcgctgaccgttcggtctgcaactggggcgggggaaacacatcgatgaaaacgacagaaaaggatttcagaggcagggacatcgaggtgatgtgggtgaaaggcagcggctcggacttggcgacgatgtcagcgggccaatttaccggactgaggctggatgatattcgtccgctgatggaacggagcagcatgaccgatgaagaaatgacggcatatttgtccctttgcatgatggacggaaagcatccgcggccgtcgatcgaaacgcttcttcatgcttttttgccgtttccgcatgtcgatcacacccaccccgatgcaatcatcagcatctgctgctgcgataatggaaaagagatcgcagaggagatatacggcagccgatttgtatgggtgccttatgtcagaccgggctttgctttatcgaagatgatagcagaaggtgtgaaaaacaacccgaatgcagagcttgttttaatggagaagcacgggctcgtcacttggggggaaacgtcgaaagaaagctatgatcagacgattgccgtgattcgcgaagcggaagcatatattaaaagccgttcggaagatcatcagccgtttggcggacagatggtcgagccgcttgcaccggaggagcggaaacggattttagccgatatcttgccggtcatccgcggcgctgtcagcggggaaaaacgcatgctcgtcacctggtgcgatgctgacgatgtgctcgaattcgcgaacagcaggcgcgcaccgtcgctttcacaggtcggcgccgcttgtccggatcacctcgttcatacaaagcgggtgcctgcctatattccgtggaatcccgctgaacaggacacagaagcgctggtcgaccggatcaaaaccgagattgctggatttaaagagtcgtatgccgcctattttcaacgaaaccggcacgaaggagacgagatgtttgaaccggcgcctcgcgtgatgctgatcccgggaatcggcatggtgacagcagggaaaagcctggcgatggcgaaggtcagccgagatttataccgccgggcgattgccgtcatgaagggaacggaagtccttggaaactttgtatctctcaatgaggaagaatcctacaatgttgaatattggccgcttgagctttataaattaacgcttgctccgccggaagccgaattttcgcgcaagatcgcatttgtgacggggggagcgggcggaatcggcagcgaggcctgccgccgccttgctctagaaggcgcgcatgttgtggtcgctgacattaatattgaaggcgcagaaaaaacagcggccgagattaatgatcaatacggtgcagaacgagcttacgccgtccgcatggatgtgacgaaagaagaggaggttcagacggccttcgaggaaatcgccctcaaatacggcgggattgacatccttgtcaacaatgcgggccttgcgacatcaagcccgcttgatgaaacgacgctcgaagaatggaacctgaatatgaatgtactcggaacaggatatttcctcgtggccagagaagcttttaagcaaatgaaaaaacaaggttcaggcggcagcatggtgtttgtcggttcgaaaaattccgtttatgcaggcaaaaacgcatcagcatacagctctgcaaaagcgcttgaggttcatttggcgagatgcatcgcggctgaaggcggaccgtacggaatccgtgcgaattcagttcttccggatgcggtgcttcaagggtcggccatctgggactccaaatggcgcgaagaaagagccgccgcctacgggattgaacccgaccggcttgaagagcattaccgcaaacgtacggctctttccgtcaacatttatcccgccgacattgccgaggcgatcgcttatttcgcttcagaaaaaacggcaaaaacgacgggatgcatgctgacggttgacgggggagtgccggccgcattttcaaggtaa

SEQ ID NO: 4055 - DNA, 78 bp, Bacillus licheniformis
ttgaaacaaacatattcaaaaataaacaaacaaaaacggagtgatacgcatggtgaaatatttatggtcagagtctga

SEQ ID NO: 4056 - DNA, 132 bp, Bacillus licheniformis
atgagtttatatattaaaagatcaaaagacgaatttcaaccgttttttgcgcatcaatatgttcccccaaacggtatgtcagcggcacaaaaagcgccggcaacaagatgccagcgctttcttaaaacctga

SEQ ID NO: 4057 - DNA, 1119 bp, Bacillus licheniformis
atgaaaaaaacactgcacgctccagtcaaactgatcatcgcaatttttatgatttgtacattttccatcggctttacagagtacgtcgttatgggtatattgacttccatttcaaaggatctctctgttccgatttcgtctaccggcctattggtaacggcatatgcgggaagcgtctgtctgacggggccgatcgtcaccatattttcggtaaaaatgccgcgcaaaccggtattgatcggcttgatgagtgtgtttgtactgtcgaatgcgctcagtttcctggcgccgaacttcaccgttttgttggtctcaagaatcctatccgcatccattcatggtgcattttttgcaacgacaatggtgttcgtcagcgaaatggcaccgcccgaaaaacgggccgccgctgccgcttcaatgaacggcggcttgaccatcgccctgatgctcggcgtcccgtttggttcttatttaggcgatcttttcaactggcggatcgtttttctgatgatcgcatgcctcggattgatcggcctcgccggcatttggctgacggtgccgcacagaaaaccgaaagttgtccctaaattgatccatgaatgggatgtgtttaaaaataaacaagtccttttttcttttgctatcacgatctttggctattcgggcgtattcatcgcctacacatttattgaaccgatgctgcggcattctgccggtttcgacagtctcggcattacagccgcccttttcgcctacgggtttggcggggtcgtcggcattttctacgccggaaaggtgccgtttcacctgttaacccgctccatgatcggggtgatgatcgcgctcatggcgatccttgcggcctttccttttgtcagcggacatcctgccggcgccatcatcgtgacgtttttattcggagccggcgcgttcgcgttcggaacggtgccccttttgcaaacaaaggtcgtggctgcgtctgaacacggaacaacgatcgccacctccgtcagcatcgctgcatttaacttggccaacgcgctcggggcttggatcggcggactcattcttaatgcatcagagtctacacataccttgccacaggcggtgcgcttatga

SEQ ID NO: 4058 - DNA, 1227 bp, Bacillus licheniformis
atgagaccaatgaaatcaaatgcttctttcattatgtattttgtgtgtatcagcgcttttttcgcatcgttgaatcaaaatatttattcacctatcattcctttaatcagagactcgtttcacgtttctgtttcgatggtaaacctgtccgtctcgctgttcatcttcattacagctgcgatgcagatcattgtcggctcgattgttgattttaaaggagcgagatttgtaatgatggcgagcatgatcgtaacggtcatcgccacaatcggctgcgcagcctcccgggactttggcctgtttctttttttcagggtgctgcaggctttggggactgctgcgcttccattaattgcggcaaccacaatcggatctctgtttaagggaacgaagcggggcagtgcgatgggaacttatcaaatgctgctttcccttgcaccggcagcggcgcctattctcggcggttttatcggggagcgctataattatccgggtattttttggtttttgacagtattgtctgttcttttgcttttcggcaatttgttttgctttccgcgcagccattcggagaaaaagaccaatctcagcgcgggcagcctgctgtcgcattataaggacatattcaaaaacagggcgggcaatgccgttttaatattaagctaccttattttctttatttatttttcaatgatcgtgtatttgccgattttgctgaccgatcactatcaccttgatctgcagatcgtcggcttgctgtatttgccgatagcggtcagcacgattgccggcagcgtgctgtttaagtggatacaaaagagattatcgctcagacgcctgtttttgatcggcaatctgaccgccgcagggagcgtcgtctgttttgccttttcccatttgttttcgcttttcgccatgtcggcggctctggttcttttcggcgttacgatggggctgattccgccgctcttctctacgatgatggcgaatgaatttgaggagaaccgcggcagtgcgatgggcatgtttaattttatcaggtatacgggaatggcctgcggtcctgttatatcaggcatgttattggggatgtcatcttctgttttcgttttcggctgtttcggtatcgtttatgccgcagccgcccttttgatgaccgcggtcatgcggaaagcagctcacacaaagacgctgcaagaaccaaacaaaaaagctgccaggtcttaa

SEQ ID NO: 4059 - DNA, 159 bp, Bacillus licheniformis
ttgagtacaaacccttgccctgctttaacaattgaacaaatgccacacctcttcatcatgacccgcatcatcgctgtattcttctcgattcatcacgaagtgagaccagcctattcccagctcgataagccgcacgtatccatcattgattgcaaatga

SEQ ID NO: 4060 - DNA, 750 bp, Bacillus licheniformis
atgacagagcttataatggagagcaaacaccagctattcaaaaccgaaactcttacccaaaactgcaatgaaatattaaaacgcagacgccatgttctcgttggcatcagcccgtttaacagccgattttccgaagattatattcatcggcttatcgcctgggccgtccgtgagtttcagagtgtatccgtgcttttggcgggaaaggaagctgccaaccttctcgaagcgctcggcaccccacatgggaaggccgaacggaaagtcaggaaagaagtctcgcggaaccggagattcgctgaaaaggcgttggaagcgcatggcggaaatcccgaggacatccatacattttccgatttcgcgaaccagaccgcataccggaatttgcggatggaagtcgaagctgcctttttcgaccagatgcattttcgcaatgcctgcctggagatgtcgcatgcggctatcctcggacgggcccggggcactcggatggatgtcgtggaagtcagcgcagacatgctggagctggctgttgaatacgtcatcgctgaacttccgtttttcatcgccgcccctgatattttaggcgtcgaagagacgcttcttgcttatcaccggccatggaagctcggcgaacagatctcccgtaatgaatttgccgtcaaaatgcggccgaatcaaggatatctcatggtttccgaagcggacgaaagggtggaatctaaaagcatgcaggaggaacgagtatga

SEQ ID NO: 4061 - DNA, 1221 bp, Bacillus licheniformis
atgaatcaatcgctaaaaacattcagcgtgttgtcagaacaatatcacgaaaatccgtatcagtatttctcataccttcgggaatctgatcccgtccattatgaagaatcgctggacagctattttatcagccgctaccaggatgtgcgccgcgtgctccagaatcaggacgtctttacaacgaaatcgcttgccaaacgggccgagcccgtcatgcgcggacctgtgctcgcccaaatgaaaggcaaagagcacacggcaaaaaggagaatcgttctgcgccgctttatcggggaatcccttgatcacctcacaccgctcatcaaagaaaatgcacaaaggcttttggccccgcacgtggagaaagggcggatcgaccttgtcaatgatttcggcaaaacattcgccgtttgcgtgacgatggacattttaggtttggacaagaacgaccaccaaacggtgagaaactggcacagcggcgtcgccgatttcattaccagtttgaatcaggcgcctgaggaccgggagcattccctcaaatgcagtgaacagctcgctgagtatttgaatccgattatcgaggaaaggcgcaaaaatcccggacatgatttaatatccatcctttgcacttccgaatacgagggagtggcgatgtctgaccgggacatacgcgcgctgattctcaatatattgcttgccgccacagaaccggcggacaagacgctcgcattaatgatttatcatttgcttcatcatcccgatcagatgaatgatgtgctggaagaccgcacgcttctccctcaggcaatcgcagagacgctgcgctacaagccgccggtgcagctcatcccgcgccagctttcacaagacgcggagattggcggagtcgagctaaaagaagggacgactgtattttgcatgataggcgcggcaaatcgcgatcctgaagcgttcgaggatcccgacaagttcaacattcaccgcagcgacctggaagtcaaaagcgcattcagcggcgcagccaggcatctcgcattcggttcaggcgtccacaactgtgtaggagcggggtttgcgaagaccgaaatcgagcttgtcgcaaatatcgtccttgatcagctgaaaaatatccggctggaggaagacttcatttaccgcgagacagggctttacacacgcggacccgtctcgctcaacatccggtttgatgccaaacattaa

SEQ ID NO: 4062 - DNA, 456 bp, Bacillus licheniformis
atgaataaaagtgaagcccaacagtttttaagcaacatgtatcaggacatcgtgtcggaaatgaatactgaaaaaattgccgattatttcagcgaggattatgttcaagtcacggacggcagtcacattgaccttgtgcagtttaaagatcacatacggacgctgaaaaacgttgcacgcaccataacggtgtcgccctttcatgaatttttgtttgacgagcgcctcgaaagcgcagcagtcagatatacggtcaaggttgtcaaaaagaatggagaccgggggagaattgatatcatcacgatttttaaaatgaacggttttaaaatcgttcaatgtcacgagctttcacacgcgagcgaaggtacgaagggtattgaagagctggcgaagatcagtgaggcagcaattgaaaaagcctcctcccgggaggagaaggctttttcacaagattaa

SEQ ID NO: 4063 - DNA, 474 bp, Bacillus licheniformis
gtggaaaacaagacgtatgagcaggcatttcaagccgttcaggattttattctcaaaagagaaaagcgggctcagcatgaacagcaggcgttcgcagaggaagcctttcaagaagaagaaagcatgcgtaagcattggaccctgacccagcttcacattatctcgcttatcagcgaaagcgaagcagacgtcaacaacgctttcctggcagcaaaactccaaatttcaaaagcggcagtgacaaaagcggtcaatgtgctcacaaagcacggaatgatcgaatcgcacaaaaaaccgaacaacaacaaagaattgtattacacattaaccgatgaggggaaaaaactggccgacattcatgacaggatgcatgaaattgcaaaacagcgctacatcgagctgtttgatcggttttccgaatccgagctgcaaaccgtcatccgctttttaaacgaatggtcaaaacacatttaa

SEQ ID NO: 4064 - DNA, 1179 bp, Bacillus licheniformis
atggagcatgattggagcgcttttataaaccgggatctgatggtcgatccgccatcggctgaaggaagcttgaaaaaactttcgtttgcggtaaaggatgtgtttgctgtagagggccatgctaatgcggcgggaaaccctgattggctgaggacgcacgaacctgccgaaaaaaacgcggaagccgttgacttgctgctgcgggaaggtgcaaggcttaagggtgctgcgcacacagatgagctgatgtacagcctcgacggagaaaatgtccattatggtacacccgtcaatccttgtgccatggacaaaattccgggagggtcttcaagcggatcggctgtggcggcagcctctgggatgaccgatttcgctctcgggacagacaccgggggatctgtcagaatcccttcttcatactgcggaattttcgggtttcggccgacgcacggcgaggtgtcggttgatggtgtcataccgctggcaaagagttttgacaccgtcggatggatgtcaaaagatattggagtccttcatgcggcgggccgcgtcctgcttagcgggcaggaggaggcaggggcatgtttcaaccgggtttattttgaaaaagaggcgtggagcctgcttgaagaaagcgaccggacacaagtatacgcttatgcattaggcctgattgacggcgaattcgactggtgcgttgccgctgacggcggcctcgcggaatgggcggagacgttcagggtgctgcagggactggagatttgggaggagcacggagcttggatcgagcgcacaaatccggtgttcggccctggaatcgcagaaaggtttgaatgggcgtcaagccttgtgataagcgatcatgtgcaagcgtttatgaaaagagaggcggtgagaaaaagactgtcggaatggctcggagaagacggcttgctcgttattccgactgcccccggcccgccgccgctccgtggtctgccggaaaacgaattaaatgagagaagggcgcgcacgatgaaactgacgtgtattgccgggctcggcgggcttccgcagatcaccgtcccgttgccggcaaaaaacggcgagcctttggggctttcatttatcgccggctgcaaacaggatctgaagcttctggcttggactgaaaagcacgtgctatctcctcaagtatga

SEQ ID NO: 4065 - DNA, 1050 bp, Bacillus licheniformis
atggtggacaaggttcgcacagggatattaggatacggtttgtcaggttcggtgtttcatgcgcctttattatcagcgttagaagattatgagattcgaaaggttatgacttcaaggaaagaacaagtcaaacaggacctccccgaagcagaagcggtcagtacgatcgaagacatcacaaaagatccggacattgatctcgtcatcgtgaccacgccgagcggccttcattacgaaatggcgaaagagtgcatccgcgccggaaagcatgtcgttcttgaaaagccgatgacagcaacagcggaagaagcggaagagctcattaatgccgcgaaagaaaaaggcgtgcttctcagcgtgtatcacaaccgaagatgggataacgactttttgacgatcaaacagctcatcaaagaggggcgccttggagaggtcaacacattccacgcctcctacgaccggttccggccgaatgtcagacagcgctggagagaacagaaaggaccggggtcaggtgcactgtacgatttaggttcacacttgatcgatcaggcgcttcatttattcggcatgccgaacggcgtcaccgctcaagtgaccgctcagagagccaatgcggaaacagacgattacttccatgtcatccttcactatgatcagcgccaagtgattctccactcgggctcgattgttccggccaacggcccccgctaccaaatccacggctcaaaaggaagctttattaaatacggaatcgacggccaggaggatgcactcagagcgggtcataaacctgcaggcgatgagtggggagccgatcaacccgaatattacggggaactggccacagtcgaaggcgacgagatcaggaaggaaaccgtggaaacgctcccgggttcatacttaacttattacaagcagcttgcttcaagtattctagaaggcggcagcttgcctgtcacggcggaagaaggacgcgacgtcatccgaatcatcgaagctgcgcaaaaaagcagcgaaacgaatcaaacggtgttcttaaacaaataa

SEQ ID NO: 4066 - DNA, 636 bp, Bacillus licheniformis
atgacaaaaaccctttacattaccgctcacccgcatgacgaaagggcatcctacagcatggcggcgggaaaagcgtttatcgaatcttacaaagaagctcatccggatgatgaagtcatacaccttgatctttatcgggaaaacattccgcagattgatgcggatgttttcagcggctggggaaaattgcagtcggggtcgggctttgaacagctttctgaacacgaaaaagctaaagtcggccgtttgaatgagctgagcgagcaatttatcgcgggagacaaatacgtgtttgtcacgccgctttggaatttctcttttccgccggtgatgaaagcgtacttcgatgcggtcgctgtagcgggaaagacgtttaaatataccgaacagggaccgatcgggctgttaaccgataaaaaagcgctgcacatccaggcgagaggcggctactattcagaagggcaggctgcggaacttgagatggggcaccgctatatcagcatcatgatgcagtttttcggggttccggaatttgaaggtttatttatagaagggcataatgctgagcctgataaagctgaagaaataaaacaaaatgcgattgtccgagccaaagaattgggcaggactttttga

SEQ ID NO: 4067 - DNA, 969 bp, Bacillus licheniformis
atgaagaatcaataccgagtattgttgtattataaatatgttcatatcgataaccctgagcaatttgccgaagatcacctcaagttctgcaaagatttggggctgaaggggcgcatccttgtggcgggtgaaggaataaacggaaccgtgtcaggaaccgtagagcagacagaccgctatatgagtgaaatgaaaagcgatccccgctttgaagacatggtatttaaaatcgatgaatcagaagggcacgctttcaaaaaaatgcatgtccgccatcgcgatgagctggtgacgctccgcctggaagatgatatcgatccgaacgaattaacaggaaaatacctggagccaaaagaattttatgaggcgatgcagcaggaagatacgattgtcgtcgacgcacggaacgactatgagtacgatttggggcatttccgcggagcgatcagaccggacattaaagcgttccgcgaattacctgagtggatccgcgataacaaagaaaagctcgaaggcaagaaaatattgacttactgcacgggcggaatccgctgcgaaaaattttcaggatggctgaaaaaagaaggatttgaagacgtgtcccagcttcacggcggtattgtaacgtacggaaaagaccctgaagttcaaggtgaattgtgggacgggaaatgctatgttttcgatgaaagaatcagcgttccggtcaatcagaaagagcacgtcattgtcggaagagattatttcaacggcgagccttgcgagcgctatgtcaactgcgcaaacccggaatgcaacaagcagatcatctgctctgaagaaaatgagcaccgctatttgcggggctgcacgcacgagtgccgggttcatccgcgcaacctgtatgtcaaagagcacggcctttcagaagaagaggtgcaagagagactcgaaaagctgaaagaagaggaacatgcagcgcagtcataa

SEQ ID NO: 4068 - DNA, 156 bp, Bacillus licheniformis
atggaatatccgtccatttatataatcaaaccttcattcatattaaaacaaaccatcaccatgatttcaatgaagcagcttgatcattccattaatcaaatgttagaaattttaacacttccggcggctttacgcaagcaaaacagctcagattaa

SEQ ID NO: 4069 - DNA, 210 bp, Bacillus licheniformis
gtgagtctgcacgatgaaaaagagattgagaaattgctggaaaatttcacaccgatgatcaaaagcaaattaaacaacacatcctatcaagagagggaggatcttgaacaggagctgaagatgaagatttgcgaaaaagcggagatgcttttatgtcaagaagtgcctggtttttgggagtttataacagaattgctggaagtcctttaa

SEQ ID NO: 4070 - DNA, 582 bp, Bacillus licheniformis
atgattgatcaaacgttactgcgtgcgaaaatcaaggagatcacaaggcatccgcttgtgaagcattttttgagcaacccaaggtatgagcggcttttcaaccacgtgttggaacatccggattctgaagaggcagagtgtctcgatcgtgaatttaagcgattttacaaaaaaatccgcatgatcaaatacatcaactcgatgatccggattttctccgtcgactttgataaaagagtccggaaaaaccgagagcgttttccattgatgatcgacgaaagtccgaatctgcccgagccgccccgaggggatctgttagacgatgtcttggaacaggaagaggaattaagcgaacacctgcaagacccgatgctttatgaagcgtttttgcaattgacggacaagcagaaaaaagtgcttgcacaaatttatattcatggggtatccatgcaggaaattgctgactctttgggagaatcaaggcaaaatatttcaaaaattcataaaagggcactcgaaaagataagagagctgctgaattctaaagcagaggggaatgataacagtgagtctgcacgatga

SEQ ID NO: 4071 - DNA, 150 bp, Bacillus licheniformis
atggacagcgcattcattgaggaagcagcgaaacaaatcggcaatgtcggctttccagctgtattggcaatttacttgctcactcgttttgaaaagaaaatcgatgaactgatcgagctgatcaaagaaaaaaatgaaaccgatgattga

SEQ ID NO: 4072 - DNA, 1155 bp, Bacillus licheniformis
atggaaaaaaacaaacaaattccacagccgatcagaggagaaaaaggagcggaaacgaaaattccgcacaacgttgagcgcgaccgccaaaacccggacatgctcgtaccgcctgaaaccgaccacggaacggtgccaaacatgaaattttcattttccgatgtccacaaccgtcttgaaaaaggcggatatgcacgggaagtcacagttcgcgagctgccgatttcagacaagcttgcttctgtcaacatgaggctgaaacctggggccatcagggagctgcactggcataaggaagccgaatgggcgtatatgctgtacggaaaagcacggattacgtctgttgaccaagacggcagaaactttattgaagatgtgaaagaaggagatctctggtacttcccgtcaggtctgccgcattcaattcaagcacttgaagacggatgcgaattcctgcttgtcttcgatgacggctccttctctgaaaacagcaccttccaggtgacagattggctggcccatacgcctgatgaggtgattgccgcaaacttcggcatttcaaaagacgtcgtcgcctctcttccagttgaagaaaagtatattttccaagaagcgatccctggctgtcttgagaaagacaaagttgaaagcccgaacggaacggtacctctatctttcagctacaatttgcttgaacaggaaccgattgtatccagcggagggaaagtatggattgccgattccacgaacttcaaagcatcgaaaacgatcgcttctgcgttagtggaagtcgaacctggaggcatccgggagctgcactggcatccgaatacagacgaatggcagtattacatttccggacaagcgaaaatgacggttttcgctgccgacgggcatgccagaacatttaattaccaggccggagatgtcggctatgtgccgttcgcaatgggacactacgtccaaaatacaggagatgagccgcttcggttcctcgaaattttcaaagacgaccactatgctgacgtttcgttaaaccaatggctcgcgcttgttccggaagagcttgtccgccagcaccttgacgtcggcagcgaatttacaaaaatgctctctaaagaaaagcatcctgtcgtcaaatttgataagaaataa

SEQ ID NO: 4073 - DNA, 399 bp, Bacillus licheniformis
atgaaacatttcattatttgctgcatatcggttatattcgtttttttcgcccactttctcggcatttcgatactgtttcatctgtcgggcgcgttttaccaaacagtcggatcattgctgctgtttacgctttgttataccggactgacctttgtcctggaaccggctgaaaaggtgctcatcctcagtatgaaactgctgggcatcaatcggcggatcacggtttttgccgctgaaatgatcacgatcggatgtttatgggccgccatttataccgcggacgaattgctggacgacgttctgctgacaacctcggcggaaatcatgattgccgtttcgttttttacaattgataaaatcctttatccgcggcagaggtccggttcgctcttatattga

SEQ ID NO: 4074 - DNA, 486 bp, Bacillus licheniformis
atgaataaggttcttttcagacccggcatgtcgatcaaagaaattggcgaacagttgcaaggctatatcgccgcaaattggaaacaaacgcttgacgatcatcgcgaagctcttttaaaggtgtttcccgaattggaagacgcgacttacggggtctacctggaccacctgctgcctcctgtatttgaaagtctcgaacagtccggctttacaacgattcaaaatgcgggaaaaggcgatttttttatcggaaagggcttgaactttagacagtccatggaaaaatggggagctgacaactgccgctcacgtgtgttttgggttgtcatctccgatcagcaaaaacagccggccgggacgctgctctttgacttttatcactctcacgccggatttgatgtccccctctccccgcggatttacacgttggaagaaacggagagagaccgaattgttgctcacataaaacagataaaggagaactag

SEQ ID NO: 4075 - DNA, 278 bp, Bacillus licheniformis
atgtataagaccaatatcttacataagggagaaactcatgagaactttcgaagtgttgacactcctgtcttttgtcatgctgtttcagcaaaaaatgccgggaaagcttgcggcggcagccggatttgtgagtattggcgtgttggcggacttgcagctttattcaaaacttttgaagcagctcggcatgacgggcgacatcgacggcgaacgaagcgcggatatcgtgaaccggtacgttttggatttttcaacaagcatttaaaagaaaccggtgg

SEQ ID NO: 4076 - DNA, 162 bp, Bacillus licheniformis
atgctcatcatggaatcgctaataggatacgtttgcttttttacagttaatttcatttatgatacatacatcaaaaaagccaaggctccgtttgggcacttggctgtgatttcgcttgttcaaaccgcgattgcattaggtattttttttatattttcatga

SEQ ID NO: 4077 - DNA, 561 bp, Bacillus licheniformis
ttgaggtgcagcaagcgtatgatccagcacagtgtctttcttgagggagaatatacattacaggatatgagatctttctttttttattggcttaaaaaatacggattcatttatttcattctaatttttctattgtttgtctgggtgttttccgtcaatggaaagctgccgattaccgtttatcatagtgaaacactcgaattgctgttgaatggccttctcattattgtactttctataattttaacatcacttttgattgggtttttttgtatccggatgcaaattgtctatcgaaaaaatgagcggttaaagcgcaaaagaacttacactatcaatccacaagggattcagattcaatttaagaattccgatacgttgtttgaatggtatgaagtgacagcagtaacagaatataaacgtctcatcctcatgaaaacgtcaagcagccagttgattttgataccgaaacgttttttcacatttgaaaatgaacttgattctttcagagagcttgtgactacatatgggcaggctaaaaaattaaaattgcaatcttaa

SEQ ID NO: 4078 - DNA, 150 bp, Bacillus licheniformis
ttgcattgtgtaacgcctgaacatccagagtcttcatggcattctcctttaaaaaaatttcttatcatcactgctcacttttatgaaatgaaaatgaatatacaaaaaggagaaatccatcttcttaagattgcaattttaattttttag

SEQ ID NO: 4079 - DNA, 969 bp, Bacillus licheniformis
atgaagactctggatgttcaggcgttacacaatgcaattgatcaaacgctcgaacaattaaaacatcaatcagacgaattcgccaaggtcaaaaaagccgttgagggcatcacatcacttgatgatgctttaaaaggaaaaggcggcgacgcgatccgcgccttttacgaggaatgccacaccccttttctacagttctatgatactttcatagaggaatacagttccacgttaaagaaaataaaaagcgcactgaattccctggaaccaaatcataacggatttatttcccagtcctttctcgaacaccaactggagaatggcttaaatgccgctgatcgaacaacgaaacatttagtttctaagaccaacgccacaatcgcaaaagtcagccatatcgtcgacttaccggatttgaacgacagcggttttcatgaacagtatcacaaagcattaaaggaaatcagcacgacacttgaaaagctgcatgcatttgaccgcgagcaaaccaacgccctgaagacggctgaaaacgaccttgagacgatgcagagatacatagcgcggctcgaaaagatgtataccggccccaaaattgaaatcaccagttatcaaaaaggcgcgattttaaagccggatgagatggataccctgagtggaaatcaagaaacagccatgggtgtcatgctgaaaaaagtcggagacaaaaaagatgctgacgtaaacactctcgccgacccagatcggttaaaaaaattggcgacacaaaaggtttccaccaaagagtacacccaagaggaattgaatgaactgaaaaaagactatagagtatttaacgatacgctttaccgggcatacatagatggtgatacaatcgtcaagatagaacccgcatacacccttcctgatcatgttgaaaaaagcgaatgggaaacgctttggaatttacaggtgtgtatgatggagtaa

SEQ ID NO: 4080 - DNA, 639 bp, Bacillus licheniformis
ttggaatttacaggtgtgtatgatggagtaagagcagcgtttggatacgaccttgcgacaggtgaaatcgttaaaggtagtggtgaccgtttgatggccgcattgaatgtcaccccttttggaaaggcatttaagtacggaaagcgcggctttaagctatttaaaggtgaggaagcgggaaagaaagttgcgaaggtagataaaggatcgaaagcagctaaggatgttggaaaagttgagccaaccccttctaaatcagcaaaggaaactcccaaaaaaacttctgagggaaaagacaaagttaaagattttgatctgagttttgcgactagcaagctcaagaatggaaaaatttccgccaatgatttagaatccatgataccaaagggtacaccaaacaattttaaagcaagtgaaactataaaaaaaggatacaaatacaactttgaaattgacggaaaaaaagtagaagtcaagtggcattcaccggatttaaacgcaaaagagaaatttccggacagtaattccggaaatatgtggactgcccaaataaagatacagaaaaaacttctaggacaagatggtaaactccataaaaaacctagtaacataacacacattccagttgtaggagagtga

SEQ ID NO: 4081 - DNA, 414 bp, Bacillus licheniformis
atggatttttctaagtttgatgaattacccgattctttatctgaagatacattagagaagtatttcaatcagattgttgatatttatgaaagtgcaaaagatagtatcagttatattgaattatcagaagcaatttaccaactttcagaaagacaatggcatacttataaaattctggacgacaaaattaaacacaaaatagatattttaataaaaaatatcttggatgcaaattcttatgatctaatagacaatgctacatcaataatagcttatttgggacttccagaaagctttaaagcattacaggaaatgattaaagaaaaccctagtgaagaagttagagagcttatagaggaaactattgaggaattagaaggaaacgttgaaaatccatattcaggattagaataa

SEQ ID NO: 4082 - DNA, 267 bp, Bacillus licheniformis
atgccgttttatgcggaaaagccaccgaaaaagtgggctaacttaggatataattcaattgctcttgaagtggatattttcgatatccattctttagaaatgaagacattatcagatacatatagaggaaacattgaaataaataaggttgaccaaggtttaatcgaaatcaatatcacaggagaggttactgcaaaaataaaagcagatacaggactcattcaatcaattaatggttatattaatggagctttagaaaaggaataa

SEQ ID NO: 4083 - DNA, 159 bp, Bacillus licheniformis
atgaaaaagccggagggaagaaagtacccactaccgaccggaatttacaaaaacccactgatgaaaggaacggccgtccggcagattcaggaggcgttggctgccctttatttctatccagacaaaggggcaaagaataacggcatagatggctattag

SEQ ID NO: 4084 - DNA, 800 bp, Bacillus licheniformis
ttgaataaacttaaaaaagattatagagtatttaacgatacgctttaccgagcatacatagttggtgatacaatcgtcaagatagaacctgcatacacccttcctgatcatgttgaaaaaagcgaatgggaaacgctttggaatttacaggtgtgtatgatggagtaagagcagcgtttggatacgaccttgcgacaggtgaaatcgttaaaggtagtggtgaccgtttgatggccgcattgaatgtcaccccttttggaaaggcacttaagtacggaaagcgcggcttcaagttatttaaaggtgaagaagctggaaagaaagttgcgaaggtagataaaggatcgaaaactgctgaagatgttgggaaagttgaaagcaaaacttctaaatcagcaagtaaagataaattttctgctatgacagccgaagaacaaattaaaatagccaaagaatactctaaaagagctccaattaaaattcctgataccgcaaaaatcaaagcccagtcgaaaactgattatgaacaaataacttataaatggaatgatggaacatacaaatatgaagtcagatggcacacaagtactcctggagcgcctaaaaaccaaggaaatacgtgggttgtacaaaaaactgttccgggaaacggtggtcaacaaccacaaagattctttaaaatcggagaaaacgagtggattgaaggacataaatggtttgaagcgattagggaaagaaaagctgggacagctactaaagaccaattaaaaattttagaaaaaggccattggaaggattga

SEQ ID NO: 4085 - DNA, 360 bp, Bacillus licheniformis
ttgctaaacacaaaattttatgatggatttgagggtgaacctgaacttgttttatctgatggagaaaacaagttcgtaatgtggaatggatactttgaaactttattaaaagctttattagataacaacctagagaaagagggaattattaaagagtacttttatcaagaaggctggtatgatgaatcaccttgggtaattgaagacgtacaattaacaataaaccaaattaaaagttttgatgtaaacaaagtagatacttcagacggttttaaaaaagaattagtggaattagttaaagaaattatacaatttctcgaaaacgccaaaaataaaactgttgttattgaatacgattaa

SEQ ID NO: 4086 - DNA, 99 bp, Bacillus licheniformis
ttgccgcttgaagaaggctttttctattccgctgcaagagcttgcaatatgggaacgtccttgaattattatgccagtaaccaaacgtttttctcatga

SEQ ID NO: 4087 - DNA, 474 bp, Bacillus licheniformis
atgccaaagggagaagggaaggttgtttcccaaaataaaaaagcaaatcacgattatttcatagaagaaacatacgaaacaggcatcgtgcttcaaggaacggaaatcaagtccattcgcgccggtcgggtgaatttaaaggacgcgtttgccaaaattgaacgcggagaagtgttcctccacaatatgcacatcagcccgtatgagcaggggaaccgctacaaccatgatccgttgcgaacgagaaagcttttgatgcaccgcaagcagatcaacaaattgatcggtttgacgaaagagcagggatattcgctcgtaccgctcaagatttatttgaagaacggcttcgcaaaagtgctgctcggtctcggaaaagggaagaagaagttcgacaaacgcgaagacttgaagcgcaaagacgccaaacgcgaaatcgaaagagcgttccgcgacaggcaaaaaggcttgatctaa

SEQ ID NO: 4088 - DNA, 2304 bp, Bacillus licheniformis
gtggaaaaagaagaatttatggataagcttctctcctttatgaaagaagaagcatataaacctcttacagttcaggaactggaagagatgctggaaatcaccgattcggacgaatacaaagagctcgtcaaagctcttgtaacccttgaagaaaaagggcttgtcgtcagaacgagaagcaaccgctacggtttgcccgaaaaaatgaatctgatcaaagggaaggtgtcggcgcacgcgaaaggcttcgcgtttgtccttcccgaagactcctcgcttgacgatgtcttcattccgccgtctgagctgaacacagcaatgaacggagataccgtgctcgtccgcctgagcacagaatccggcggtacaaaaaaagaaggggccatcatccgcatcattgagcgcaacattcagaagattgtcggcacatacacagagacgaaaaacttcggctttgtcattcccgacgataaaaaaatcacgaatgacatctttattccgaagcacgccaaaaacggcgccgtcgagggtcataaagtcgtcgtccgcctgacaagctatcctgaaggccggatgagtgcagaaggggaagtcatcgagattctcggtcataaaaacgatcccggcatcgacattctttcgattattcataagcacggcctcccgggagactttccggctgaggcgatggaacaggccggcaatacgcctgatacaatcgatgagaaagatcttgaaggcagacgggatctgcgcgatcaaacgatcgtcacgatcgacggcgcagatgccaaagacttggacgatgccgttaccgtcacaaaactcaaaaacggccattataaactcggcgtccacattgccgacgtcagccattatgtaacggaaggatctccgattgaccaggaagcgtatgaacgcggcacgagcgtctaccttgtcgaccgggtgattccgatgatcccgcacaggctgtcaaatggaatctgctccttgaatccgaaggtcgacaggctgacaatgtcatgcgaaatgctcattaatcctcaagggcaagtcgtcgagcacgaaatttttcaaagcgtcattaaaacgaccgagcggatgacttattctgatgtgaacaaaattttagtcgatgatgatgaagagctgaaacagaagtatgaggcccttgtcccgatgtttaaagacatggaagacttggctgcgattctgcgcggcaagcggatggaacgcggagccgtcgactttgactttaaggaagcgaaggttctcgtcgacgaagaaggaaaagcgaaggacgtcgtcttgagagaacggtcgactgctgaaaagctgattgaagaatttatgcttgtcgccaatgaaacggtcgctgagcactttcattggatgaatgttccgtttatttaccggattcacgaagatccagatcaggaaaagctgcagagatttttggagttcgttacgacattcggctatgtcgtcaaaggaacggcgggaagtatccatccgaaagcgctgcaaagcgtgcttgaagaagtcagggatcgtcctgaagaagccgtaatttcaacggttatgctcaggtcgatgaaacaggcgaaatacgatccgcaaagcctggggcacttcggcttgtcgactgaattctacacgcatttcacgtctccgattcgccgctatcctgacttaatcgtccacagactgatcaggacctatttgattcagggcaagacagacgaagcgacaagggaaaaatgggccgagaaactgcctgagatcgccgagcatacgtcaaatatggaacgcaatgccgtagatgcggagcgggaaacggacgatctgaaaaaaaccgaatttatgctggataagatcggtgaagaatttgacggcgtcatcagctccgtcacgaacttcggcatgttcgtcgagctgccgaacacgatcgaagggcttgtccacgtcagctttatgacggatgatttctaccgttatgatgaacagcactacgcgatgatcggcgagcgcacgggcaacgtgtaccggatcggcgatgagattacggtccgcgtcgttgacgtcaataaagacgagcggaacatcgattttgaaatcgtcggcatgaaaggctcccgccgccggcagaagccggagccaaagcagaaaaaggcttcaaaaaaagaggctccatcggctgacaaaggggaatggttcaccaagccgaaaaagaaaaaagtaaagaaaaaacgcggttttcaaaacgcgccgaaacaaaaacgcaagaaaaagaaaaaatag

SEQ ID NO: 4089 - DNA, 747 bp, Bacillus licheniformis
atgaaaattgtcaaaccacaacctttcacatttaaaggcggaaaaaaagccgtcctgctgctgcacggatttacgggcaacacggcggacgttagaatgctcggaagatatttgaatgaaaaaggctacacatgccatgcgccccaatataaaggccacggcgtgcctccggaagaacttctctccacaggaccggaagactggtggaaagacgtcatggacggatatgaatatctgaaatcggaaggatatgaacaaatcgccgcttgcggactgtctctcggaggggttttttcattgaaattgggttacactgtacccataaagggaattgttccaatgtgcgcgccgatgtacatcaaaagcgaagagacgatgtacgagggtgtgcttgattatgcccgcaattataagaaatttgaaggcaagacagcggagcagattgacgctgagatggaagaattcaaaaaaacgccgatgaacacgttgaaagcactgcaggatttgattgccgatgtcagagagcatgtggacatgatctattcgcctacatttgtcgtgcaggcgcgccacgatcatatgattaatacggacagcgcaaacatcatctacaatgaagttgaaacggatgataagcagctgaaatggtatgaagaatcaggtcatgccatcacattggataaagaacgcgaaacactgcacaaggatgtgtatcaatttttagaaacgttggattggcagacataa

SEQ ID NO: 4090 - DNA, 174 bp, Bacillus licheniformis
ttgtggtttgacaattttcatgattcactgtctccttttcatatgtattcttccacgtttagtcttgaaacaaactttatcaatcggccggccccttcagacaaagaccggcaaataggaaaaaggcctgacttgaacatcagacctcatgcttcattgtcttatacaaagtaa

SEQ ID NO: 4091 - DNA, 231 bp, Bacillus licheniformis
atggccgcatttttaacggtcttattagtgattgtaagtatcgtattaatcgttgtcgttttactgcaatccggcaaaagcgccggattatcaggcgcgatttccggcggagccgagcagcttttcggaaagcagaaagcaagaggacttgatttgattcttcaccggatgacggtcgttttaaccgtgcttttctttttcttaacgattgcgcttgcttactttgtataa

SEQ ID NO: 4092 - DNA, 285 bp, Bacillus licheniformis
gtgaaaaataccgggattgtccggagaatcgatgagctcggcagagtcgttctcccggtcgaaatgcgcagggtgctgaatatcaatgaaaaggacccgctcgaaatatataccgacggcgaaaacatcattttgacaaaatacgccgcaaacatggcatgtttgatgaccggcgacatcaccacgaaaaataaaacgtatgcgggcggcaaaatcgtactcagcccgcgcggagcggaaatgctcctggaagatatgatggcggcactgtcagaaaagaaataa

SEQ ID NO: 4093 - DNA, 231 bp, Bacillus licheniformis
atggtaaaaaagattcatatcaaaagagattttgttctccagtacatgattgaacacaatctctccttaaatcagcttgccattgaaatcggcgtatccccggcgacactcagcagagttttaaatggcgaaaggaggcccggacaacttgtgatcggaaagatgattcagtatttcaacaaaaaatttgaagatctcttttattataaagatgttgacaaaagtcaataa

SEQ ID NO: 4094 - DNA, 402 bp, Bacillus licheniformis
atgacgaactttggacaccatttacgacaattaagggaacggaaaaaactgaccgtcaatcaactggcgatgtattccggcgtcagttcggcaggcatttcgcgaatcgaaaacggaaagcgcggcgtgccgaagccggcgacgatcagaaaactggcggacgctttgaaagtcccgtatgaggaactgatggcatctgcaggctatatcagcgcgtctacagtccaggaagcaagaagcagctatgattccatttacgacatcgtgtcacagtacgatttagaggacctttctctgtttgacagcgaaaagtggaaggtgctttcaaaaaaagacatcgaaaacctggacaaatatttcgactttctcgtgcaggaagcaagcagccgaaacaaaaactga

SEQ ID NO: 4095 - DNA, 399 bp, Bacillus licheniformis
atgacaaggttcggcgagcggctcaaagagctgagggaacaaagaagcctgtcggttaatcagcttgccatgtatgccggtgtgagcgccgcagccatttccagaatcgaaaacggccaccgcggcgttcccaagcccgcgacgatcagaaaattggccgaggctctgaaaatgccgtacgagcagctcatggatattgccggttatatgagagctgacgagattcgcgaacagccgcgcggctatgtcacgatgcaggagatcgcggccaagcacggcgtcgaagacctgtggctgtttaaacccgagaaatgggactgtttgtcccgcgaagacctgctcaacctcgaacagtattttcattttttggttaatgaagcgaagaagcgccaatcataa

SEQ ID NO: 4096 - DNA, 678 bp, Bacillus licheniformis
atggaagtgctgcagcagctttggacgtattacgcgcaaaacggcggctatgtgctgggggaattttaccgccactttttaatgtcggcatacggcgtattgttcgccgccgtcgtcggcatcccggccggcattttcatcgccagataccgtaaaatcagcaaatgggtcttttccatcactaatgtcattcaaacggttccggcgctggcgatgctcgccgtcttgatgcttgtcatggggctcggcgcaaacacggtgattctttcattgtttttgtattcgctgttgccgatcattcgaaacacatatacgggaatcgccagcatcgagcatgcctatcttgaatcagggaaggcgatgggcatgacgaaatttcaagtgctccggatggtggagcttcccctcgccttgtcggtcattatggcggggctcagaaccgcgctcgtcatcgcgatcggcattacggccatcggcacgtttgtcggcgcaggcggcctcggggatatcattgtcaggggatcaaacgcgaccaacggaacagcgatcattctagcaggcgcgatcccgacggcgctgatggcgatcatcgccgatctgttcatgggatggctcgagcgtgcgctgagccccgttaagcatcataaaggcaagacgccgaatccggataccgcttaa

SEQ ID NO: 4097 - DNA, 918 bp, Bacillus licheniformis
atgcaaacaaaaaaactgagacggctcggcgccgtcatgctggtcctctcgcttttgatcagcggctgtgcgctgccgggccttggcggggcttccgataaaacgatcaaaatcggagcgcaaaacctgaccgaatccgaaattcttgccaatatgatctcgcttttgatcgagcatgatacggatctcaatacggtgctggtcaaaaacctcggctcaaactatgtgcagcaccaggccatgctcggcggagacatcgacatttcagcgacgcgctattcgggaactgacctgacaagcacgcttggaagggaagcggagaaagacccgaaaaaagcgctccgcatcgtacagcaggactttcaaaagaaattcaactacaaatggttcgattcttacggatttgacaatacgtacgcttttacagtcacgaaagaactcgctgaaaaagggaactatgaaaccatatccgatctgaaaaaagacgcggatcaactgaagcttggcgttgacaatgcatggctgaaacgaaaaggcgacggatatccgggatttaaacaggaatacgggttttcatttggctcgacctttccaatgcagatcggactcgtttatgacgccgtcaaaaacggcaaaatggatatcgttcttgcctattcaacagacggcaggatcaaagcctatgatttaaagctgttaaaagacgataaacgctttttcccgccgtatgactgttcgccggtcgtgccggaaaaagtgctgaaggagcatccggagcttgaagagaccatcaataaactgattggaaaaatcgacaccgaaacgatgcaggagctcaattacgaagtcgatggaaagctgaaagagccttctgtcgtcgcggccgagtttttaaagaagcacaattattttgagtaa

SEQ ID NO: 4098 - DNA, 654 bp, Bacillus licheniformis
atgaatcagcttgtccaatttcttcagcacaacggcggggaaatgctttataaaacatgggagcacttatatatatccattttcgcggttctgctcggcatcattttcgcggttccgctcggtgtcgttttaacgagaatgaaaaaaggagccggcgtcgtgatcggcgttgtcaacatcattcagacgctgccgagtttggcgatcctggcgttttttatcccgcttctcggagtgggaaagattccggcgattgtcgcgctgtttttctattcagtcctaccgattctgagaaacacttacacgggcgtaaaaggcgtcaatcaaaatttgcttgagtcaggaaagggaatcggtatgactgcatgggaacaaatccgcctggtcgagctgccgctatcggtgccggtgatcatggcaggcatccggacgtccaccgtttacttaatcggctgggcgacgctttcggcttttatcggcggcggcggtctcggcgactatatttttatcgggctcaacctgtaccagcctgagtacattatcgccggagcggtgccggttacgatactggccatcgtgatcgactatattctttcgaaaaccgaagacaaagtcacgcctcaaggattaaaagggatgaaggaagtatcataa

SEQ ID NO: 4099 - DNA, 1140 bp, Bacillus licheniformis
ttgctgaagctagagaatgtatcaaaggtttataaaggcggaaaaaaagcggtcaaaaacattaaccttgatatagcaaaaggtgaatttatcgtctttatcggaccgagcggctgcgggaaaacaacgacgatgaaaatgatcaaccgcttgattgaaccgacttcaggaagcatttacatcgacggagaaaacataatggatcaggacccggtggagctgcgccggaaaatcggctatgtcattcagcaaatcggactctttccccatatgacgattcagcagaatatcacgctcgttccgaggcttttgaaatggccggaagaaaagcgaaagaagcgggcggaggaactgctgcagctcgttgatatggggccggaatatttgaaccgctaccctcatgaactaagcggcggacagcagcagagaatcggcgtgctgcgggcgcttgcggcagagccgcccctcattttaatggatgaaccgttcggagcgctggacccgattacccgtgattcgcttcaggaagagttcaaaaagcttcagaaatcgctggacaaaacgattgtctttgtaacccacgatatggatgaagcgattaagcttgccgacagaatcgtcatccttcgcgccggcgagatcgtgcaagtcggatcgcctgacgacattttgcggaaaccggcggatgaattcgttgaggaatttatcggaaaagagaggcttcttcagtcccgtcctgacatcgagcatgtcgaacaagtaatgaacccgaatccggtcacgattacgagcgaaaaaaacctgactgaagcaattcaagtgatgagggaacgccgcgtcgattcactgctcgtcgtggacgaacacaatgtcttaaaaggatatatcgatgttgaaatcatcgatcagaaccggaaaaaatccgtcacagtcggggaggttgtcaatgagaatgtttactccgttcaaaaaggaacgctcatcagggataccgtccggaaaattttgaaaaggggattcaaatatgttcccgttcttgatgaagagggccgccttgtcgggattgtcacaagggcaaaccttgtcgatatcgtgtacgactcgatttggggagatgaagaaacccttgttcaacgttaa

SEQ ID NO: 4100 - DNA, 540 bp, Bacillus licheniformis
ttggaggaaaacgctttaaaagtgattgaacaagcggaagaacatttcatagaaaaaatcgccgaaaatatgaatacatacggtctatcatcaactgtcggccgcgtgctcgggatcatctatatgaacagaaagccgatgaccttaaatgaactgtcagaagaaacgggcatgagcaaaacgagaatgagccaggtcgtccgcgaaatgatcgatttaaatatagctgaaaaagtttttgaaaaaggcgtccgcaaagatctgtacgatgtcgaacaagactattatcaaacgtttatttcattgtttacggccaactggagcaaagtcgccaaaaagaacaggatgattgggaaaaaaatcagaaaagagctgttggaggcgctcgaggaagaaggccttacgcctgaaaccgaagctaaaatcaacgagctgctggctgaaacaaaacaatggatcgattactgcgagtggcttgacaatctgatcgcgtttttggaaagcgaagagatcttcaagcatgtgccaaaaccttcataa

SEQ ID NO: 4101 - DNA, 633 bp, Bacillus licheniformis
gtgtttgcttttatcatccacgtttttgtatcattgttcgccgtcacaaatccgatcggcaatgttccgatctttttagcgctcacagaaggctacgaagcgaaagaacgcaccgcattggcgagaaaggccgcggttttatcgtttctgatcctgatcgcgtttctcatattcggagagtttatcttcaggctttttgacatcaacatccatgcgctgcgaattgccggcggcatatttatattcggaattgcctacaacctgctgaatgcaaagcagtcccatgttcagtcgctgcatcatgctgagcatcgcgagagcaaggaaaaggaggatatatcggtgacgccgctcagcattccgatcatttcggggccaggaacgattgcgacggtgatgagcctttcggccggcagccgcagtctggtgcattttggcggaatgatcatcggcatcgccgccgtcctcctgctgacgtttgcggcctttcattattctacgctgatcagcaacaaattgggccagacggagatgaacgtgatcacccggctgatgggcctgattttggctgtcgtggcggtcggcatgatcggaacgggattgaaagggatgtttccggtgttggcgggataa

SEQ ID NO: 4102 - DNA, 780 bp, Bacillus licheniformis
atgacatgttcaaagtgcggccatcaaacagatggcggaaaattttgcgagcagtgcgggtcaagtttggccggcggcagtgatggcggaaaaggagcagctgaaacgccgcaggcagctagatatgcggaggcggcgaaacaagcgtcttccatgtatttttcctattgtttaaaggtgctgaaacgaccgtttatcgaaatgaaaaacgccggagaacagcacgtcctcaacagcatcaccacaatggtgatatttgcgctttcggtgccgctgatgttttatttcggcctcaaaggcttctttgacgccatgggggactattccggagtattcggccgctcctacgcaatgccgacattttttgatatcgtcgtaaagcccgctgttacctttgctatttatattttcttattatttgtttttacatacgcaggcgtgcgcattcggggtgtgcaagcggcatttaaggaagtgctcgggcggttcggagcggtgcttattcctttcgtcgcccttctgctcgccgctttgcttttatcattcatgcaaacgggtttgtttatatatgttcttttctttgccctttgcggcatcgcctttttaattccgccggctgtcatctcgagctatcacgaaaaagcggaaggcgctgttgatacgatttacgcgacgctgatcgtctatttgctgacatttatgtcggtgcggatcatgggagatttgtttcttgaatatatcggaaggatcggaggctctatattagggcggctgttttag

SEQ ID NO: 4103 - DNA, 1768 bp, Bacillus licheniformis
atggatttttgcaaggaatgtggaagggaacgaacaaaaaatgcgctgtattgcaagcattgcggcgcgcgggcggacgaggaacgagcttccgacccggcggcaaggtatcagcgtgcgatgacacgaaaaagaatcatcatcatggcggcaatcgcggcctgcttgattttattgtttgccggctataaaaccggtgaagcactcacatcaaaggaaaaactgatttccgattttgaagccgccctcgatcagaaagatgccaagaaagcagcaaaactgcttcaatcatcagacgtggatctggctgtcacggagaaaaacgtcaagccgctcttggattacttgaaagaacacccggatgaagatcacatccttaaaaagcggtgccggccatccattgatgacgatcgaaaaaaagggcaggcgtttttggatctatgaccgctatgtcttgaacacggagcctgtctacttaacggttaagacaaactataaagataccggcctgtttgttaacggcaaaaaggtcatcacaacagaaaaagaaaacttcgagaaaaaaatcggcccgtttgtccccggtacttacgaggtgaaggcaaagctgaaaagcggaatcgccgatcttgaaaaaaaggtaaaggtcaccgccctccaaggtgatgtgaaggttaatgcggaccttaacgggcacatggcaaagcttgtctttgaagaaggctatgaaaacttgaaaggaacgctctggatcaatgatcaggagatgaagatcaatccattcaaaggaactgaattcggacctgtgctgactgacggttcaatgtctgctcaggttgaggcgcaatttccgtgggggaagctgaaaagcgaaaaaacgtcgattgaaggtgaagaaatcgaagtcaatcttgcatcagacaaagggtttatggatgacatgatgaccgctgtcgtcaaccatacaaaggaagcagcaaaggcctttgcaagcggcaatgtcagcggcatgacaatggccgccccgtcttatcaaaaccgcctgaaagaggtcacggacgggctgaaaagcagcagcacctactataaaggcacctacttatctactgtatttgatcttgattcgttccggctatacaaagaagacgggcaatggaaaacagagctcaaagggattgaaaagcacaaatcggcctattatgacgactacattgcgcctaaactggaagaaaacgatagcggatatacgtacacattggtctattccgaaggcaagaaaaagtggctcatcgaaaaaagcgatcctgaagccgttatcgatatcgagcatcaaaaagaaatcaaaaatgacaatccgaaggaatacacatcggcatgggcctcagcgaaaggggccatgaacaatgcatcagcaggcgaagagctcaccgaccaaaaggttgctttcgccattgaagcgtatttatacaggctacaagacgccatcaacacaaacgatttcggcctcgtccgcgacagcttgaaagaaggaagtccgctgtacaacgatcaaaagaaactggtcgctaaactgtacaacagcgggacagaggaggaagtcgtccaattcagcgtaaacagctggaagcaaaacgggcgggaggcaacgattaagacaacggagaaaattaatattatcaaaggcggaaaagaacagttaaaaacgtatcattggacatatcacgccgccatcgaggacggcagattgctcttaacgtcaatagaataa

SEQ ID NO: 4104 - DNA, 948 bp, Bacillus licheniformis
atgaaacgttttaaatggtttgcactgttcgctgcgcttatccttttattagccgcctgcggaaatcaagataaagatcaatctgcggagaagaacggcagcaaagattcctatactgtaaagcacgcaatgggaacagcgacaattgacggcactccgaaaaaagtcgtcgtactcacgaatgaagcgacagaagcagtgctcgcacttggcgtaaaacctgtcggcgccgttcaatcctggctgggagatccatggtatgaccatattaaagataaaatgaaaggcgtagagaacgtcggaacggaggctgcgacgaatattgaaaaaatcgcgagcctgaagcctgacttaatcatcggcaacaaaatccgccaagaagaagtatacgacaagctgaaagcaatcgcgccgaccgtatttgccgagacattgtcaggggaatggaaaaacaactttaagcttactgccgaagcgctcaataaaaaagctgaaggcgaaaaagtcatcgctgactttgacaagcgcgttgaagacattcatgaaaaactaggcgataaagtgaaacaaaaagtctctctcgtccgctttacagatgctgatacccgcatctatcacaaaggatcatttgccggaacgattttggatcagctcggttttgcaaggcctaaaggccaggaagccaacgatctcggacaaatggaagtgacaaaggaacaaattcctgatatggacggggacgtgcttttttattacacgtatgagacaggcgatgacaaagcaagcgccattgagaaagactatgtcaatgatccgctctttaaaaacttaaacgtctccaaaaaaggaaacgtccataaagtgagcgatgccatctggaatacagcagggggcgtccttgcagcaaacctgatgcttgatgatattgaaaaatactttttaaaatga

SEQ ID NO: 4105 - DNA, 393 bp, Bacillus licheniformis
ttgactaagtttttattgagtggtttctaccttttcggacttgtcatgctgagcaattggtcgatttcttttggtgaaatatttggagccggcaattcagccgtttttcaattatcggaagcggtgctttttacgtttatcatcgggtgctatacaggtcttcctttgatttatgccaaattcactagatctgaaacgttgttttttacaaatcaaaaggtcttcctcatcaccttaggattaggcgtgctgctttcctgttcggcttacagccttcagcaagccctctctcccatcgcgattgcgctgttgtcgatcattggttttttgatcgttggcatcagcggttttcttcccgcctggtttctgaagcctgcgaaaaatctgcgataa

SEQ ID NO: 4106 - DNA, 120 bp, Bacillus licheniformis
ttgttctctgacaacatggcaatcagcatgccaaaagcaatcattaaagagattgtttcatatgctgtcatttttatcaccccctttcagaaggggatgagcaagacttcccttgagtga

SEQ ID NO: 4107 - DNA, 633 bp, Bacillus licheniformis
atgcagtcgaaaacagtatatctttatgcattccatacaatgtcagattgggaatatggatatttaatggccgaactgaactcgggaagatatttcaaaaaagatgcggcacctttaaaagtcatgacaataggagtgaataaagaaatggtgacgacgatgggtggactgcgcataaaaccggatatctcccttgatgagtggacgcccgagagtgcggatctaatcattttacccggagggaatacttggggagaaaagattcatcagccgatcttgaaaaaggccggcgaagctttagagcttggcgcgatggttgccgcaatatgcggtgcaactgcgggactggcgaatagcggatatctggattcaagaaagcatacaagcaatgacttggcctatatgaaaatggtctgtcctcattataaaggagaaccgttttatgagatgggacccgcggtatcagatgggaatctggttactgcatcaggagcggctcctctcgaattcgcaagggaagtgctgaaaaaattagacgtgtttgcaccggatacattggattcatggtatcaactcaataagaccggtcaacgtgaatacttcttcaagctaatgaattcaatcaataaatga

SEQ ID NO: 4108 - DNA, 1293 bp, Bacillus licheniformis
atgccatacattgttgatgtttatgcacgtgaagtattagactcccgcggtaacccgacggttgaagttgaagtatacactgaatcaggagcttttggacgcgcgctggttccaagcggagcttccactggcgaatacgaagctgttgagcttcgcgacggcgacaaagaccgctaccttggaaaaggcgttttaacagccgttaacaacgtgaacgaaatcatcgcacccgagcttatcggctttgatgtgactgagcaagtatcaatcgacaaattgctgatcgaacttgacggaactgaaaataaaggcaagctcggcgccaacgccatccttggtgtatcaatggccgttgcccgcgcagctgcggatttcttgcagattcctctataccaataccttggaggattcaactctaaaacgcttcctgtaccgatgatgaacatcgtaaacggcggagagcatgcggacaacaacgttgacattcaagaattcatgatcatgcctgtcggtgcggaaaacttccgcgaagcacttcgcatgggagcacaaattttccacagcctgaaatcagtcttgaaagaaaaaggcttgaacacagctgtaggtgatgaaggcggattcgctccaaaccttggatctaacgaagaagcgcttcaaacaatcgttgaagcgatcgaaaaagcaggattcaaacctggcgaagaagtgaaattggcaatggatgctgcatcttctgagttctacaacaaagaagacggcaaataccatcttgcaggcgaaggcgttgtaaaaacgtcagctgaaatggttgactggtacgaggagctgacttctaagtacccaatcatctcaatcgaagacggccttgacgaaaacgactgggaaggccacaaacttctgactgagcgtcttggctcaaaagttcagcttgtcggtgacgaccttttcgtaacaaacacgaaaaagcttgctgaaggaatcaaaaacggcgtcggcaactctatcctgatcaaagtaaaccaaatcggtacattgactgaaactttcgatgcgatcgaaatggcgaaacgcgcaggctacactgccgttatctctcaccgctccggtgaaactgaagacagcacaatcgctgacatcgctgtggcaacaaacgcaggacaaatcaaaacaggtgctccgtctcgtacggaccgtgttgcgaaatacaaccagcttcttcgcatcgaagatcaattggctgaaactgcgcaataccacggtattcaatctttctacaacttgaataagtaa

SEQ ID NO: 4109 - DNA, 1536 bp, Bacillus licheniformis
atgagtaacaagttagccgcgctcatcattttagatgggtttggactaagggacgaaaccgtcggaaacgccgtagcccaagcgaaaaaaccgaactttgaccgctattggaacaagtatccgcaccagacgctgacagcttcaggagaagcggtaggtcttccagacggccagatgggcaactcggaagtcggccatctgaatatcggcgcaggccggatcgtttaccaaagtctgacgcgcgtgaacgttgcgattcgcgagggagaattcgaacagaacgaaacattccttgcagcgatgaagcacgtgaaagaaaaaggcacaaacctccacttgttcggactgctgtctgacggcggagtgcacagccacattcaccatttatatgcactcttgaaacttgccaaaaaagaaggcgttgaaaacgtctatattcacggcttccttgacggccgcgatgtaggcccgcaaacagctgagaagtacatcaaagagcttcaggatcaaatcgaagaaatcggcgtcggcgagatcgcaacattgtcaggccgctactattcaatggaccgagacaagcgctgggaccgcgtcgaaaaagcgtaccgcgccatggcatacggagagggaccgaaatatcaaaatccgctcgatgtcgtgaaagattcttatgaaaacggaatttacgatgaattcgtgattccttccgtcattacgaaagaaaacggcgaacctgttgcgacaatcaaggacaacgatgcggtcattttctacaacttcagacccgaccgtgcgatccagatttccaacacgttcaccaatgacgacttccgcgacttcgaccgcggagacaagcatccgaaaaaccttcatttcgtttgcttgacacatttcagtgaaacggttgacggatacgtggcattcaaaccggtcaatctcgacaacacagtcggcgaagttttatcccaaaacgggctgaagcagcttcgcatcgctgaaactgaaaaatatccgcacgtcacattctttatgagcggcggacgcgaagaaaagttcccgggcgaagagcgaatcttaatcgactcgcctaaagtcgcaacatatgacttgaaacctgaaatgagcgcatatgaagtaaaagatgcgcttgtcaaagaaattgaggctgaaaagcataacgcgatcatcctcaactttgccaaccctgacatggttggacattcaggaaaagtcgagccgacggtcaaagcaatcgaagcggttgacgagtgcctcggcgaagtcgttgatgcgattcttgcaaaaggcggctacgcgattattacggccgaccacggtaacgcagacgtgctgattaccgaagaaggcaagccgcacaccgcacatacgacaaacccggttcctgtcatcgtcacaaaagaaggcgtgacattaagagaaggcggaatcctcggggatctggcgccaactcttttagacttgctgggtgttgaaaaaccgaaagaaatgacaggatcgtcattaattcaaaaataa

SEQ ID NO: 4110 - DNA, 762 bp, Bacillus licheniformis
atgagaaaaccaattatagccggtaactggaagatgaataaagtgctttcagaagctgtcagcttcgttgaagaagtgaaatcttccattcccgcagcagataaagcagaagctgttgtctgtgcgcctgcactgttccttgaaaagctcacatcagctgtaaaaggcacagatctgaaagtcggcgcgcaaaacatgcattttgaagaaagcggagctttcacgggtgaaatcagccctgcggctttgaaagaccttggagttgaatactgcgtcatcggccactccgagcgccgcgaaatgtttgctgaaacggatgaaacggtcaacaaaaaagcgcatgctgcatttaaatacggcatcgttccgatcatctgcgtaggtgaaacgcttgaagagcgcgaagcaaacaaaacaaacgagcttgttgcagaccaagtgaaaaaagcacttgcaggtttaacaactgaacaggtagctgcttccgtgatcgcttatgagccgatctgggcgattggaaccggcaagtcttcaactgcacaagatgcaaacgaagtatgcgcgcacatccgcaaaaccgtggcatcagagttcggacaaactgcagcagacagcgtccgcattcagtacggcggaagcgtaaaacctgcgaacattaaagaatatatggccgaatccgatatcgacggcgctcttgttggcggagcaagccttgagccgcagtctttcgtgcaattattggaggcaggtcaatatgagtaa

SEQ ID NO: 4111 - DNA, 1185 bp, Bacillus licheniformis
atgaacaaaaaatcagtaaaagacattgatgtaaaaggccgcgttgttttctgccgtgttgactttaacgttccgatgaaggacggaaaagtgacggatgatacgagaatccgcgccgcacttccgacgattcaatacttaacagagcagggagcgaaagttcttcttgcaagccacttgggccgtccgaaaggccaggtgtcagaagagcttcgcttaacgccggtagccgcacgcctcggcgaactgatcggcaaagaagtgaaaaaagcggatgaagcttacggcgacgccgtcaaagcgcaaatttccgaaatgaaagacggagatattctcgtattggaaaatgtccgcttctatccgggagaagaaaagaatgatcctgagctttctaaagcgtttgccgacctggctgacgtttatgtcaatgatgcattcggagcggctcaccgcgcccatgcttcaacagcaggcatcgctgaacaccttccggctgttgcaggcttcctcatggaaaaagagcttgaagtgctgggcaaagcgctgtcaaaccctgaacgtccgtttacagcgatcatcggcggcgcaaaagtaaaagacaaaatcggcgtgattgaaagtcttcttgagaaagtagacaacctgatcatcggcggcggtcttgcttacacgttcgtcaaagcgctcggccatgaagtgggaaaatccctgctggaagaagataaaattgaattggctaaatctttcatggaccgcgccaaagaaaaaggcgtgaacttctacatgcctacagacgtgcttgtggctgacgatttctcaaacgacgccaacacgaaaatcgtgccggtaagcgaaatccctagcgactgggaagcgcttgacatcggcgaggaaacaagaaaaacatatgccgacgtcatcaaaaacagcaagcttgtcgtttggaacggaccgatgggcgtattcgaaatcgacgcgttcgctaaaggaacaagagctgtcgctgaagcattagcagaggcaaatgatacatactctgtcatcggcggcggagactctgcagctgctgtagaaaagttcggcttggctgacaaaatgagccacatttcaacaggcggcggagcttcccttgagtttatggaaggaaaagaacttcctggcgtcaaagcattgaacgacaagtaa

SEQ ID NO: 4112 - DNA, 132 bp, Bacillus licheniformis
ttggttcttgatgagagaagcgctataatgaaagcggacaagggaaggggacacacactccctttccctttttccatatcggcgcctttaagccgcccggggatttccgttttcaggcttgtaaaacattaa

SEQ ID NO: 4113 - DNA, 1008 bp, Bacillus licheniformis
atggcagtaaaagtcggtattaatggttttggtcgtattggacgcaatgtattccgcgcagcattaaataatcctgaagttgaggttgtggcagttaacgatttgacagacgctaacatgcttgctcacctattacaatatgattcagtacatggaaaattggacgcagaggtttctgttgacggaagcaaccttgttgttaacggtcaaacaatccaagttacagcagagcgcgatccttctaaactaagctggggagagcaaggtgttgaaatcgttgttgaatcaactggtttcttcacaaaacgcgcagatgcggcgaaacatttggaagccggcgcgaaaaaagttatcatctcagctcctgcgagtgaagaagatattacaatcgttatgggtgttaacgaagataaatacgatgcggctaaccaccatgttatctctaacgcatcttgcacaacaaactgccttgcgccgtttgcaaaagttctgaacgacaaattcggcatcaaacgcggtatgatgacaactgttcactcttacacaaacgatcagcaaatcctggatcttccgcacaaagactaccgtcgtgcgcgtgcggcagctgaaagcatcattcctacaacaactggtgctgcgaaagccgtttcccttgtacttcctgaactgaaaggaaaactgaacggcggagcaatgcgtgttccaacaccaaacgtatcacttgttgacctggttgctgaacttgacaaagaagtaacagcagaagaagtaaacgcagcgcttaaagaagcagcagaaggcgaacttcaagacgttcttggctacagcgaagagccgcttgtatctaaagactacaacggcaatacaaactcttctacaatcgatgctctttctacaatggttatggaaggcagcatggttaaagttatttcttggtatgacaacgaaagcggatattctcaccgtgttgttgaccttgccgcttacatcgcaaaacaaggtctttaa

SEQ ID NO: 4114 - DNA, 1041 bp, Bacillus licheniformis
atgaatcaactaatacaggctcagaaaaaattattgccggatcttctcgatgtcatgcagaaaaggtacaaaattttgcagtacataaggctgactgaaccgatcggcagaagaagccttgctgccagcctcggcatcagcgagcggattttaagggcggaggttcagtttttaaaagaacaaaatctactagagattaaaacaaccggcatgatattgacacctgaaggatccgacctgctgaaagttctcgaagatacgatgaaggacgttttaggtttaactcatttggaaaatacattaaaagagaggttgaacctcgacgaagtcatcattgtatcgggagacagcgaccagtccccatgggtcaaaaaagagatggggagagcggccgtcgcatgcatgaaaaataggtttacgggggaaaatatcgtcgccgtaaccggaggtacgacacttgaggccgtggcagaaatgatgacgcctgactcgaaaaaccgcaagctgctttttgttccggcaagaggcggactgggcgaaaacgtcaggaatcaggccaatacgatttgcgcccatatggccgagaaagcttccggtacatacaaactgttatttgtgccggggcagctgagcaaagaagcatattcttctatcattgaggaaccttctattaaagaagtgcttcagacgattcaatcatccagtatggtgattcatggaatcggggatgctaaaacaatggcagaacgaagaaatacgccaaaggaagatttgaagaaaatagaagaaaatgaggcagttgcagaagcgttcggctactatttcgaccgccacggggaagtcattcacaaagtgcacagcgtaggcatccagcttgaggatctcgattcgatcccgaacatcattgcggtggcgggaggctcgtcaaaagctgacgccatagaggcatacttcaaaaagccgcgcaatacggttttgatcactgatgaaggagccgcaaaacagttattaagggaagcttcttccctcaatataaattaa

SEQ ID NO: 4115 - DNA, 1008 bp, Bacillus licheniformis
atgtcagaacagcatttcaaaaatacgaagtattccgtattaaatctgtctcctatcgtacaaggcggaaatgcggaacaatcttttaaacaatctatggatttggcgcagcatgccgaaaaatgggggtaccacaggttctggctggctgagcaccataatatcgaaggtgttgcaagctcggccacctctgttttgatcggctatatcgccggaggtactaagaaaatgcgcatcggctcgggagggattatgctgccgaaccattccccgctcgtcatcgccgaacagttcggaacgcttgaatccctttatcccggcagaatcgatttaggacttggacgcgctccgggcactgatcaattaacagcgcgcgcattaagaagaaacataagcagcggggaggattttcccgagcagcttgaagaactgcggcaatattttaagccgtcgggcaatgtaagaaatcatgtgcgcgccataccgggagaagggcttgatgtgccgatttggcttctcggttcaagcggattcagcgcccggcttgccggggagctcggtttgccgtttgcatttgcggctcatttttcgcccgccaatacgctgcctgccttggaactgtatcggagttcgtttaagcccggcgtcttgaaggagccttatgcgatggtcggggttaccgttatcgcagccgatacggatgcgaaagcgcagcgcctggcaacgtcgcactatcagaagtttttggatcttgtccgcggcgctccgacacagcttaagccgcctgtagatgatatggaacagatttggacgccgcgcgaaaaagcgatggtgaacgagcagctcagctcaacgatcatcggcgggccggacagtgtgaaagaaaagcttgaagagttcatccggacgactcaggcgaacgagatcatgatcaattcagaaacatttaaccatgctgacagacttcgctcgttcgaaatcattgcagatgtatggaaaaacggataa

SEQ ID NO: 4116 - DNA, 1368 bp, Bacillus licheniformis
atggagaaagacatgcagaagctcgagcgcacgatgacatcgcggcatattatgatgatggcattgggcggagcgattggggcaggattatttaaaggaagcagcaaagcgatcgatttggcggggccttcggtcatgatcccctacttgatcggcggcgtgattttgctgtttattatgcaggggctggccgagatggctgtccgaaacagcgaagccagaacattcagggatctggttcaatcgatattagggccgtatgccgcttattttttggactggatatactggaaaatgtgggttctcaatattgcggctgaggctgttgtcgccgcgatatttttgcagtactggctgccggggctgccgatttgggtgctggcgctgttcgtttcactcgtcattacgagcgtgaatttgctttctgtcaaaagctttgccgagacggaatactggcttgctctcattaaaatcacagtgattgtcgtctttattatatccggatttatcttgttatttttctcttttggacaacattcggctgtcggctttactcatttgacagaccatggcggcttcttcccgaatggcgccggagggctgattacagccatgcttgtcgtgatctattcctacggcggaacggaaattatcggggtgaccctggcggaaaccaaaaatcctgagaaggttgtgcctaaagccgtgcggggaacgttaacgcgcattattgctttttatcttctgccgtttttcgtgatcgtcagcttgattccatggaatcaagtgaacggggtgtcggagagtccctttgtcatggtctttaagatgatcggcgttcccggagcggatcatttgatgaatgcggtcattttactggcggtcatttcttctatgaactcagggctttacggcgcctcccgtattttgtatacacaggcgtcagacggaagaatgccgaaaatcttttcgaggctttctgcgagaaaggtgccggtttattcgattctattatgcacttcgtttttatacttgggcgtattgttttcactatttgccggcagccaaacgtttgaatatttgatggggtctctcggctataccgtccttgtgatctggatgctgattgccgccgcccatttaaaatcgaggaaacggaatcaaacagctggaaacggctactatgtcaaatggttcccttatacgacttgggtggcaatcatttcgctgacagccatactgatcggtgtcatcctgaccacgtcgattgtcattacattggtgacggcggggatctatttgctcattagcgctgcttatttctttaaaggaagaaaccagacagccggccaaacggccgcttcttaa

SEQ ID NO: 4117 - DNA, 123 bp, Bacillus licheniformis
atgccgatcttttactgctcccgttcattgtgttttcttctgcctgaaatatattcatataatatacgtgccgatcttcactttgtcaacatcaaatccgatgccaaaaaaataaaaaattaa

SEQ ID NO: 4118 - DNA, 474 bp, Bacillus licheniformis
atgaaaaaactcttgtttatggtgatcttgtccgtattgacgctcgtctttggttcatcgtccgtaagctttgcgaaggacattcctgaagacaggtatacaacacctacagatgctgaatttagccagattaaagagattttaaacgaggctgatgtcgaaaccggcaatttgcagaaggattacggtgtgatcgtcaatgatcctgctgaaaaggtcggcgtcatatcggacattcctgccgaaaaagatgactggagccatgtcagcttccattcttactatgtcgacctcaacagcggcacactcattgctgatgttcaatttgaattcacgcaaaacgatgacggtacatcagaaaccgagtacaaaaacgtaacaaacggaggcaggtacttcgtcaaaatggatcaagacggaaatgtcattaatgaagcaacaaccggcgacatgtcgattttgtggaaatactag

SEQ ID NO: 4119 - DNA, 927 bp, Bacillus licheniformis
atgaatgtggtgatcgaggcaaaagggctgatgaaaagctacggcgccaaaaccgtcgtcaaccatgtcgaccttcaagttgaaaaaggagagatttacggattcctcggccgcaacggtgcggggaaatctacgtttatgaatatgatcacaggcattatccagccgacagccggcagttttctgctgttaaatgaagcttcgattgaaagcgtcaagcaccgcatcggcgttttacccgattatttgaccctctatgattcaatgacagcggtcgggcatttgaagtattttgcaaagctgaacggacggaccgtatcgactgagcgttgcgaagaagtcttagagagggtagggttcactgagcatactgaaaaaaaagcgggcgcgtattcattcggtatgaaaaaaaagctcggcatcgcccaagcgatcatccatgatcccgagctcatctttttggatgaaccgacatcaggtgttgatgccgaatcggcactccacattcaaaagctgattatggatttgcaaaaagaaggtaagacggtatttatgacgtcacacaacctgcatgaaatcgagaaaatctgtacacgaatcgcgatcatgaaaaacggccgcattttaatggaaggcacgctcgatgagttaagaaggcatttcatgtcgaacataagcgttcacatccgccattcgaatattcccgagcagcatttcggcctgatcgaccgatttcttgagtcagctggtgaaaacgttcaatttaagcaccatgagatttcgatcatcgtcaattcagaagaaaaaattcctgccatcgtcagagtattaacgaactgcaaggtgggaatctacagaatccacgtcgatgaaccgtcgcttgaagacatctttatcgacagctcgaaggaacgcgttgtgtcttga

SEQ ID NO: 4120 - DNA, 690 bp, Bacillus licheniformis
atgcgggcagtgtgtctgaacgaatttatcagtctttttaaaagcatcaagtcgattattgtcattattattatgttttgggtgagctataagactgcgggattgattgaacgggcgcctgcggatgtcgtgcgggaattggatttaggaagcgatgcaggcgcgatcggaacggccgttatcgtgtttgctctcggtttcctgtttatcgcggggctttcccatgacatgatcaaccgcgaagtccatacccggacggtcagatttctcgtgacgaaaacgtcgcggatcaagatcattctgggaaagtttcttggcgtctggctgttttggtttttctgcatgctcgtttcttatgccttggtgatgatcgcctcaaaagagtttttatggctgagttatgcagacagcatggcttttcttacagctgcgatctctttgaaccttttattttcgatcgtgatttcaaggcccgccgtgtcaatgtttttcggaatcgtgtttgctctcgtttttccagcggtcagtttatgggctgtttattcagagaacggcatgatcacctggtttaaatatataacgccgtactattactccgtactgggcggttcttttattttcatcaactttgtctacgccgccattgttctttgcggtgcgatcgttttgtttaaaaggagagatttataa

SEQ ID NO: 4121 - DNA, 723 bp, Bacillus licheniformis
atgacaaacggaacaatccacaacaaagacggctttttaaaccggattgctgaaaggctcggccgcaacaggcgttctgcaggcgtcaccgttcccgattatatccaccagccgcagcacagggtatatcaaggctatacacaggatgagcttgtcggcgtcttaaaggaccactgccggaaaattcacacggagctgattgaaacagatgtcatcggcttgcatgatgccttgtatgaacaagcagcgcgatttggaggcgggcctgtcatgatcccgaaagatgaccgttttaaagagtacggactgtcaggcctgttaacggacaagtggccgaatgaagggacgaaagtgtgggaatgggatgcagcggccggagatgagaacatccagcgagccgaacaggctaacatcggcgtgacattcagcgagatcacgcttgctgaatccggaacggtcgtcctcttcagctcaaaagacaaaggacgttccgtcagcttgctgccgacgacatatatcgcgatcgtcccgaaaagcaccatcgtcccgcggatgacacaagcaagcgcaatcatcaaacaaaagattgcagacggcgacgtcatcccgtcctgcatcaactatgtcactggaccgagcaattcagccgatatcgaaatggaccttgtagtcggcgtccacggccccgtaaaggcggcatatatagtcgtggaggaccggtaa

SEQ ID NO: 4122 - DNA, 1434 bp, Bacillus licheniformis
atggcaatgaagatcggaacgcagaaatttaaagagcgcgtgtcagacgggctcgacaacgagtttatgaggggggccgtttcaagcgcgcaggagcgcttaagagcgcgccgtcttgaggcggcaaaagagctcgggaactgggaagaatggcggtctctggccgaagaaatcaggcagcacgtgctggaaaatctggattactatctagaacagcttgccgaaaatgtcgccaaaaaaggcgggcacgttttctttgcgcagacggctgaagaagcgacaggctacatccgcgatgtcgtgaaaaagaaaaacggcaaaaaaatcgtcaaatcaaaatcaatggtgaccgaagaaatcaacatgaacgaggcacttgaaagcgacggctgcgaagtggtcgaaaccgatttgggcgaatacatcctccaaatcgatgatcatgatccgccgtcacatatcgtcgcacctgctttgcataaaaacaaagagcaaatccgcgacgtcttcaaagagcggatcggctaccgcaacaccgaaaagccggaagagcttgtcatgcacgcgcgcgccgtgcttagaaagaaatttctcgaagctgatatcggcattacgggctgcaattttgcaattgccgatacgggatctgtcagccttgtcacaaacgagggaaacggacgtctcgtcacgactattccgaagacgcagattaccgtgatggggatggaacggatcgtcccatcattcgacgagtttgaagttctcgtcggcatgctcacaagaagcgcggtcggacagcggctgacgagctatatcacggcgctgacagggccgaggctgcccggtgaagcggacggcccggaggagtttcacctcgtcatcgttgacaacgggcgttccaacattctcggaacggagtttcagtccgtccttcaatgcatccgctgtgcggcctgcatcaatgtctgccccgtttaccgtcatgtcggcgggcattcttacggttcgatctattcaggtccgatcggggctgtattgtcgccgctgctcggcggatatgacgattataaagaactgccgtacgcatcttcgttatgtgcggcttgctctgaagcatgtccggtgaaaatcccgcttcatgagctgcttctaaagcacaggcagcgcatcgttgaaaaagaagggcgcgcgccgatatccgaaaagctggcgatgaaagcgttcggcttgggaacttctgcgccatccctttacaaaatgggctccaaatgggcgccggcagccatgaagccgtttaaagaagacggcaagattacgaagggaccgggtccgttaaaacagtggacccagatacgcgacttccccgcgccgaacaagtcaaggttccgcgactggtttgaggacagacggaaagagaagggggaagacaaatga

SEQ ID NO: 4123 - DNA, 717 bp, Bacillus licheniformis
atgaaagtatcactgtttatcacgtgtttggttgacatgtttcagtcaaatgtcggaaaagcgactgttgaactgctggagcggctcggatgtgaagtggattttcccgaagggcagatctgctgcggccagcctgcgtacaacagcggctatgtcaaagattccaaaaaagcgatgagacggatgattgagacgtttgaatcagctgaatacgtcgtcagcccttcaggatcgtgcgcttttatgttcaaagagtacccgcaccttttccgggatgaaccggcctgggcggaaaaagcgcagcggctggctgacaaaacgtatgagctgaccgattttatcgtcaacgtattgaagattgaggacgtcggggcgacactcgagaaaaaggcgacttatcatacgtcatgccatatgacaaggcttttgggagtcacggacgcgccgatgaagctgcttcggcatgtgaagggactggagttcacgccgctgccgcgcaaacacgactgctgcggattcgggggcactttctcggtgaagatgtcgcaaatatccgaacagatggtcgatgagaaagtggcgtgtgtcgaagaaacagccgccgacgtgttaatcggggcggactgcggctgcttgatgaatatcggcgggcggatcgggagaaagaacaagccgattgaagtcatgcatatcgcagaagtgctgaacagcagataa

SEQ ID NO: 4124 - DNA, 741 bp, Bacillus licheniformis
ttgaaatacaaacaaatcaagacgaaaaaaatatatgaagaagtcgcggaagcgcttcttgaatcgattaaaagcggagagcttgagcccggcgacaagcttgactccgtccaagcgctcgccgacagctttcaggtcagccgttcggccgtcagggaagcgctgtccgcgttaaaagcgatggggatggtcgaaatgaagcagggggaagggacgtatgtgaaaaggtttgagcctgagcaaatttccatccccctttcggctgcacttttgatgaaaaagaaagatgtcgctgaactgctcgaagtccgtaaaatacttgaaatcggggcagtttccagtgcggctcaaaaacgcacggaggatgatctcggacgcatgcaggaagcacttgaggatatgaagctggcggacgggaacggcgaacttggcgaaaaagccgacctcgcgtttcaccttgcgcttgccggcgcttcgcagaacgatctgctgaaaggcttgatgaatcatgtgtcatctctcttaattgagacgatgagggagacgcgcaaaatttggctgttctcgaagaatacaactgttaagcgcctttatgaggaacacgaagccatctatcaggctgtgaaggaaaaagacggccaaaaagcggagcaagcgatgcacaatcatctgacaaatgtggaaaatgtgctggcctcatattttgaagaaacgaaacaagccgacgagccggctatttaa

SEQ ID NO: 4125 - DNA, 1692 bp, Bacillus licheniformis
atgggatggacgcaagattatactccgctggggaacagtttgctgctctcttcgcttgcagcgcttataccgattttgtattttttctgggctctggcaatcaaaagaatgaaagggcatacagcaggcttgacgactttgctgatcgcactcgtgctggccgttttcgtatacggcatgcccgctcagcaggctgtgatgtcggcttcgcaaggcgcggtttacgggctgctgccgatcggctggattatcgtgacttcagtttttttgtacaagcttacggtgaaaaccggccaatttgaaatcatcaggagttcggtattgtcgatcacagatgaccgccgtttgcaagcacttttgatagcgttttcattcggggcatttttggaaggtgcggcaggcttcggcgcccctgtcgcgatatcggctgcattgcttgtcggcctcggctttaatccgttgtatgcggcgggcatatgcctgatcgccaacacggcgcctgtcgctttcggagcgatcggcatcccgattatcgcggttgaagggccgactgggattcctgcgatggacatttcaaaaatggtcggacgccagctgccgtttttatctgtatttattccgttttatttgatcatcatcatgagcggtttcaaaagggctttggaagtgctgccggccattctcgtgtcgggcgtctcttttgccgttacacagtatgtaagctcaaacttcctggggcctgagctcccggatattttgtcagctatcgtatcgcttatcgctctcgctgtattcttaaaattttggaaaccgaaaacgacattcagattctcacaagaaaaggaaatggccgctgcagcggaggcgcagcagcttgaacatcaaaaggcctcatactcggcggggcagattttcaaggcatggacaccgtttttgctgctcacggcaatggtctccatctggggaattccatctgtcaaacaggccttgacgggccattatgaaggttcaaatccattgctgctgttcataaatgatatcggcggcaggctgacgtttgcacccggcgtgccttttttgcacaatcaaattctcgatggttccggaaaaccgcttgaggctctttacaaacttgatctcgctggatcggcaggtacggcgatcctgattgccgccgtactgacaaagtttgtcacaggcatgccttggaaagaatggggcgccgtatttacagattcgctgaaggaactcggcaagccgatattaacgatcgcttccgtcgtcggttttgcctatgtcaccaattcttcgggcatgagcacaacactgggcatgtcccttgcgatgaccggttcaatgttcgcattcttttctcccgttctcggctggctcggtgtgtttataaccggttcagatacgtcggccaatttgctgttcggaagcctgcaaaaaatgacggcacagtcagtcggaatggagccggtgctgtctgtggcggccaactcttcaggcggcgtcacaggaaaaatgatctctccgcagtcgattgcggtcgcctgcgcagccgtcggactggcaggaaaggaatccgacttgcttcgctttacactgaaacacagtctgtttcttcttttcctcgtttgcatgatcactttcctgcagcatcatctgttttcgtggatgatcccgtaa

SEQ ID NO: 4126 - DNA, 1311 bp, Bacillus licheniformis
atgaacttgcatgtacagcagcagcaaacggcaaaacttcacttgacgcaagggcttgcccaagccattcatatgcttcagtattcgtcggccgagctgaacagccggattgatgaactctcattggaaaaccccctgatcgaacgaaaagactccgatattccccgatcattttaccataaaacgaatcgtcatttgcaaaatgaaggaataagccgctctgagacggcccattcccgtgaagatgttaaaagcgctttgaaacggcaggcgctcgatctccagctgtcaagccgcgaaaagcgggttttcagctatttggtcgaatcacttgatccaaacggatatgtgacagaagacatcgcctttatcgcttccgagctggctgtcaccagagaagaagctgaagaagtcttgggcaagctgcagactcttgatccggcaggcatcggggcgcggtcgctacaggaatgcatcctgatccaattaaagcgtctgcccaaggagacggcaaaagcggaaaaagtcatttcctcatactttgacctgtttgccaaaaagggatggaaagagctgtcagagagagcggggctttcgctttcagagcttcaggacattcaagaccttgtcgcagaactgtcgccgcgtcccggattgatatatggcacagatgatggcgaagtctatgtcgagcctgatttaatcatttcagcagaggatggaaaattggtgcttgagctcagcagccgttcttttcccgacatccagcttaacgcgttttacgagccgtttttagagcgtcagtcaaaagacgaggcgaccgcttatatctctgataagttcaagcagtggaaatggctcgacaatgccctcaggcaaagacgggaaacgatgcggagggtgatggcggaaatcatggtgcggcaaaaagattattttttaaaagggaaagacgaactgaagccgctcacattaaaagagatcgctgatgccctcggcgttcacgaatcaacggtaagccgcgcagtcaaagggaaaatcgtgcagacgccttttgagctttgcgagcttaaacggtttttttcggcgaaggtaaaggacgccgctgacgggcatgcgtcaagtcacacagtcaaagcgcatctgcgccggctgatcgatgaagaagataaaatgaaaccgctttcagatcagaaactggccgaccttttaaacgaaaagcacggcgttgtcatatcgaggcggaccgtcgccaaataccgtgatcagctcaatatactgccttcgtctgtaagaaagagatatcaataa

SEQ ID NO: 4127 - DNA, 216 bp, Bacillus licheniformis
ttgacagagcttttctccgtgccctatttcatagaaaattttaaaacccatattgaaatgcatccaaatgaggataaaatccacgcgatgaacagctactaccgttcagtcgtttcaacgcttgtgcaagaccagctgacaaaaaacgccgtcgttttaaaacggattcagcatttggatgaagcctacaacaaagtaaagcgtgaagaagcatag

SEQ ID NO: 4128 - DNA, 978 bp, Bacillus licheniformis
atggcgattacatattccatggacagcttaaagcataagctggcagaaattttggatgtcattccaaggcattcatcagtcgtttacttggactacccgctatacggaaacgtcggggatctattgatcatgaaaggaacggaagctttttttgaagcatacggcatcaaggtgcgcgaaagatggaatgcggagaatttcattccgggccgccgcattccaaaggacgccatcattgtttgtcaggggggcggcaatttcggcgacttgtaccctcacttccagcagttcagagaacgggtggtcgaacattacccggacaaccggatcgtcattctgccgcagtcgatttattatgagcatgaagaaaatataataaaaacgcgcggcattttggcggctcacccggatctgcacttattcacgcgggaaaaggcatcattcgattttgccgtcaagcgtttcgaagaggtgaaaaacatcaaaatgatgcccgatatggctcaccagctctggccgatcgcggcacctgccgaaaagccgtccgagtccgttctgcggttgatcaggaccgacaaagaagccaacagcagcctgcagaaagcaggggagccggacacgtacgattggaacgtcatcttatcagaaggcgacaaacgcggaatcaaacgcctgcagacgatcaatgtcctcaacaaaaaagcgggcaatccgctgccgatcgcttcttattggaaacgcttttcggacagcctcgtcgacaaatcaatccgtttcttcagccgctatgaatcagtcgttacttcaaggctgcacggccacatcttatcgtgcctgctcggaaaagaaaacgtagtgattgacaactcctacggaaaaaacgcgaattactacaatacatggatgaaagacatcccgaatacgaaactgattcaaaaccatcagacagaagcagaaaaaccgcctgttcacgtatga

SEQ ID NO: 4129 - DNA, 1146 bp, Bacillus licheniformis
atgagtcagaataagcgaatttatttatcaccgccgcacatgagcggagacgaggagcgctatgtagccgaagcgtttcggacaaactggatcgcgcccctcggtccccttgtcgacacatttgaagaaaagcttgccgcctatgcggggacgtccggagccgcggcagtcagctcaggaacagctgcgatccacctggccttgaaattgctcggcgtcggcaaaggcgatacggtcttctgctcttcttttacgtttgtagcgagcgccaatccgatcatatatgagcaggctgaaccggttttcattgattctgaacgggatacatggaacatgtcgcccgaggcgcttgaacgggcgcttgacgaagcggagcgggccaggaatctcccgaaagccgtcatcgtcgtcaacttgtacggccaaagcgcgaaaatggacgagattatggccatttgcgatcgatttgccgtgcctgtcattgaagatgcagccgaatcgctcggttctgtttataaaggcagaaaaagcgggaccttcggacgcttcggcatttattcgttcaacggtaacaaaatcatcaccacatcgggcggaggaatgctggtcagcgatgatgaagacgcgttgaagaaggcgcgctttttagccactcaggcgcgcgagccagccattcattatcagcacgaaaaagcgggctacaattaccggatgagcaatgttctggccggaatcggcatcgcacagctcgccgttctggatgaccgggtacatgccagacgggcggttttcgagcgctataaggaggcgctttccggtatcgaaggtatagaattcatgcctgaggccggcatgtcaaaccgctggctcacgacattaacgttagacacagcaaagattcaaacaacaccggcggacatcatcgaacagctcgcaaatgaaaacattgaggcccgcccgttatggaagcctttgcacagacagcccctttttaaaggcgcggccttttatccgcacgatgaccagggctctgtctgctgcgacttatttcagcgcgggctctgcctgccgtcaggatcaagtatgacgcgaaaagagcaggaccgggtaattcaaatcgttgccgaccggattaaatataaatga

SEQ ID NO: 4130 - DNA, 627 bp, Bacillus licheniformis
atgcaaaacgtggtgatcatcggagccggcggccatgggaaagtcgttcgggaacttgtaaaagagcggccggatacggagcttgccggtattcttgatgaccggtatgcggagcttcatgttgagaacggtctgcatcgagggccttcagctgccgcagaagaacttgcgcggcttcatccggacgcgaagttcgtcctggctgtcggccaaaacagcatcagacagcagctgtatgaacgcattggtcttccgcttgaccggtatgcggttttgattcatccatctgctgttgtcagcggttcggcccggattcaaaacggcgccgttgttatggcatcgagcgtcatccaagcggatgcagacgtcggcatccacgcgattgtcaacacaggtgcgatcgtcgaacacgacaatcggatcggcgattacgttcatctttcgcccggaacggtgttaaccggcggcgtgacagttatggaaggcgctcatctcggcgcgggaacggcggtcattcccggaaagacagtcggacgctggagcgtgacgggagcgggggcagccgtgattcacgacattcctgataattgcaccgcagtcggagtccctgcaagaatgatcaaataa

SEQ ID NO: 4131 - DNA, 603 bp, Bacillus licheniformis
gtgctagcgaaacggtttttcgatcttgcattgtcagttattttgctggtcgcgctcagtccggccatgattctgacggcttgtctcatcagatggaaaatcggctcgcatgttttatttcgccaaacccgtccggggctgaatggcgagccttttacattatataaattcagaacgatgactgatgaaagagatgcagcaggcaatctgctaagcgatgaaaagcggctgacaaagacggggcggctgatcagaaaaacgagccttgacgaattgccgcagctgatcaacgttatcaaaggagacctcagcctcgtcgggccgcgcccgcttttgatggagtatatccccctttatacgaagcggcagtggagacgccacgaagtcaagccgggcatcacgggctgggcgcagatcaacgggagaaataaagtgacatgggaggaaaaatttgaactcgatgtctggtatgtggatcatcgttcttttttgcttgatctcaaaatccttttgttgactgtcgtaaaggttttgaagtcggaaggcgtcagccaggaccggcatgtgacagcagaaaaatttacagggagaaggaatgcctga

SEQ ID NO: 4132 - DNA, 1548 bp, Bacillus licheniformis
ttgaataagacatttgttttgaatctcggcgccaatatggcgtcttttttattatcggtgctgttttcgatgtggctgacgccttacgtcatcaagaccctcggtgttgaggcgtttggatttgtccatcttacacagaatatgatcaattacttttcgataattacggtcgccctgagcgcggtcgttgtccggtttttttctgtttccgcccacaggggagcgcttgatgaagcgagaggctatatgaatacctatatcgtttcatcactggtgctttcagtcatcttgttttttccgctcggcggcacggtgttttttatcgatcagatcattcgcgttcccgccggtcttttgggggatgtgcaggtcgcgcttttgatcggcagcctgctgtttttattgacctttgtgatgtcggggtttgccgccggtccgtttttcgccaataaaatctatattacgagcacgatccaagccatccaaatgctgattcgcgttctgagcgtattgttgattttcgcgtggtttgcaccgaagatctggcacattcagctcgccgctctcatcgcaaccgcttcggcgtgcatcctgtcgatctttttctttaagagattgattccatggtttacgttccgggtgagggatatgtcgtttgcaaagtgcaaaaaactgcttcaggcgggaggatggagctccgtcagccaagtcggcatcctgctgtttctgcaaatcgatttaatggtggcgaatgtgatgctgggggtttccgaatccggcatgtacgcggcgatcattcagtttccgctgttgttgcggacgctttcgggaacgctagcggccgtattttcacctacgattacactctattattcaaaaggcgacaaagaagggctcgtccgttatgccaatcaggccgtcaggtttaacggcatcctgctcgctttgccggcggcgcttctgggggggcttgccggcccgtttctgtcgctttggctcggcccttcattcgaacatttgaaatggctcttactgatacatgcaggctatttggttgtttcattaagcccggcgccgctgttttacatctttaccgcctataacaagctgagaacaccggcgctgaccacggttgccttcggcgttgtcaatttgctgcttgccatcgtgctgagcggcccggcgggactcggcctttacggaattgcgctggccggtgcggcagctttaacgctgaaaaacgtcgtcttcactccgatttatgcatcaaagattacgggtgaaagaaaaagggtcttttataaaggcatatacgggccggttgccggcgcttcatttactttggctgtctgttacgctcttcaatacttattttcgatcgtcagcctgctgtctttgtttgtcacggcactggctgcgacgttggcttacggcctgtttgcctatttcgtcatgttgacgaaagcggaacggcgcattgtcacaacgaagctgcaagcataccggtgttctctatccttcccatttcaaaagggattttttaaataa

SEQ ID NO: 4133 - DNA, 1020 bp, Bacillus licheniformis
atgaagccatttatcagtatcattgttccgatgtacaatgtcgaagattatatagaagaatgcgtcgattcgctgcgcaggcagacgctgaaaaatattgaaatcatccttgttgatgacggctctcccgacagatccggggagatagccagaacgtactgcagcctggatgccagagtgaaagtgattcataaaaaaaacggcgggctgagctcggcgagaaatgccggtcttcaagccgcgacaggagattatgtcgggtttgtcgacggtgatgattttgtattgcctgccatgtttgaaaacatgtacgccgctgccaaaaaagacgacctcgatatcgtcatgtgcgggtatcataaacattccgatacggaagacgcctacttcccgccgccgctgccgaccgatcgcctcttgttgagctgggatattaaacgcgagctcaaaaaggcgcacgaaacccgcttcatctggtatgtgtggcggaatttgtacaggcgcgacctgctgaagaaaaaccagctgtacttttttgaagacattcgttttgcagaggattcgccgtttaatttgtacgccttttatgcagcgaaacgagtgagagcgatcgatgaagactactacatgtacaggtgcaacccggacagcctgacagaggcgccgtttaaaccgtacatggatgaaagcctgaaaaggcagtaccgggcgaaaaggagattctatgagacgtttcagcttttggatgaatgtgcggacgatttggaaacgtacacatgcaaacatcaaattccgatgcttttagccaatgcctgtgcggaaccgaagccttcaaagcaggtgaggcggcacattaaagacattttgtcttaccggatggtgcagtcgtgcgtcaaagccacgtctctccgcaaccgcaacctgttaatcggccagcggctcgttttattgctatgcaagctgaatattccgattctgctcgaattgttttttaaacgaaatctgcccagtaagggatga

SEQ ID NO: 4134 - DNA, 1080 bp, Bacillus licheniformis
atgacctttcaggaactgaagatcaatcttgcagaatggcttttgctcaaggtgaaatatccttctgaatatgtgatgggaacgccgggtttaaggcgctttgaacaatataaaggcaagaaaaaaatcattctgactttaattccgtcccatgataatttgggagatcatgcgattgccctggcaagccgcacattcatagaaaacgagtttcccgattttgagttaattgaaatcggcattaacgatatttacaagcatgcaaaagcgctcatgcgcatccgccaccccgaggatatggtattcatcatcggcggaggaaacatgggggatttgtaccgcaatgaggaatggacgaggcgcttcattatcaaaacattcaagcattataaaatcgtccagctcccggcaactgcgcacttttccgagacgctccgcggcaaaaaagagctgaaaagggcgaaaaaaatctacaactcccatcgccggctgttcatgatggcgcgcgatgatacaacctatcaatttatgaaacagcacttctcaaaccaaacgattgtaaagcagcctgatatggtgctttatttaaagaaagaacagcagtctgaaagagaaggtgtgttggtttgtttaagggaggataaagaaagctttctcaggccggaagagcgtaaaaagctgctgaaggctgtcggcgacgagtatggcggtgcaaaaacttttacaacgacgatcggcaggagggtcagccgcgtgtcccgcgagaaggagctgaaccggctttgggatcagctgagaggcgcggaggtcgtcgtgacagacaggctgcacggcatgattttttgtgcgataacaggaacgccgtgcgtcgtgatccgctcttttgatcataaggtgcttgaaggctttcgctggctgaaagacgttccttcgatgaagcttgtggaaaatcccgatgcggcagaggttctcggcgcaatcgaagagctggtcaagaccggtgactcgcatcgtgagaccccggcaagggatcattatttcgcagatttaagacggaaaattatgggtgatgtccaatga

SEQ ID NO: 4135 - DNA, 1032 bp, Bacillus licheniformis
ttggaaaatccagcagttagtctactggtcgctgtttataatacagaagcttttttgccgaattgtttgcagtcgctgatcagccagaccttgaaaaatattgaaatcattatcgtcaatgacggttcaacagacggaagccagaagatcattgatcattacgcccgaaaggacgggcgcattaaaacgattcagcaggacaatcagggcctcggcgctgtccgcaataaaggcatcgaagcggcgtcaggcgagtacttggcattcatcgactccgacgactggattgagccggactattgccagtctatgtatgaaaaagcgaaggatgaggatgccgatcttgtcatctgtgattatgccgttgaaattcaggataccgaaaaaacggtctgcccggacatcgggaagaactatgaaggaaagccgaaagaggcatttatgaaggatttgttaaagggtaaagtaagcggcttttcctggaacaagctctacaggcggagtctgattgagcggcataagctcgttttcccgctccgcgacgagctggaaaacatcgaagatcaatatttcagcttcagatgccttctatatgcgaataccgcggcgttcgtgactaagccgctttatcattacagggtccacctgtcgtccatcgtccaaaagtatcaggcagggctgtttgaagacggtctcgctctttatgaagcaaacctggactgcctgacaaagcacggagagctcccggctttaaaggaggcgctgcacgtctttatcgtcaaccacggctgcatcagtattttaaatgaatgcaagagccgaaacaaaaacccttcaatagaaaaatataaaaatatccgcagcatatgcgcctgtccggaattcagggggaaaatctccgcagtggacatgtcggcattcgattccaagaagaagcttttgcttatgctgattcgcttgcggttgatgccggcagtgtatggatttgcggccatttaccagaaaatgatcgagcacagaatgaagaaatag

SEQ ID NO: 4136 - DNA, 1104 bp, Bacillus licheniformis
atggctgtctacatgttgaatatggggattgttttcgtctggtcatggtttgcgaaaatgtacggcagggaagatcacaggctgccgacgggctaccgtccgaatgcgatcctcaccgtcgttccgctcgcgtctttgattatcgttgccggcttaagatacaaggtcggaacggattaccacacatatatgctgctttacgaattagccggaaaatacaacagcatttgggagatattcggtttcggaacaggcaagtcgtcgacggacccgggatttaccgcactcttatggattttaaatcagatttcagccgatccggcgctcatgtttgccgtcgttgccgcgattacctatatctatatcgtcaagacgctttatgtgtatggaaggccgtttgaattgagcatgtttctgtttatcggcatgtttcactattatgcttcgtttaacggcattcgccaatacatggcggcggccattctgttttgggcggtgcggtatctgatcgatgggaagctggtgcgctatatgatcgttgtactgatctgttcgctttttcattcttcggctttgatcatgattccggtttatttcatcgtcagaagaaaagcgtggtcgcctgtcctctggtgcctgatgctcgtctttttggcggggacttttctgtatcaaaaatttctgtccgtattccttgtcgtgcttgaaaacagtcaatacggacattatgaagaatggctgatgaagaatacaaacggcatgaacgttattaaaatcatcgttcttcttctcccgctcgcacttgccttttgcttcagggagcagctcagaaagcgctggcccgaagtcgattatatcgtaaacctttgtctgatcggtttcctgttcggaattttggcgacaaaggatgtcatttttgcgaggttcaacatttatttcgggctctatcagctgattctcgttccttattttgtacggatttttgaaccgaaatcaaacgcgcttctttatgttttgattttgatctgttacttcttatacagctttatgctcatgccgttcgactcgtcggtattgccgtacagaacgatttttgaacgttga

SEQ ID NO: 4137 - DNA, 1161 bp, Bacillus licheniformis
atgaatgacggaagcgtgagaccaaaacgggtgcttcacatcgtaagcggaatgaaccgcggcggcgcggagacgatgattatgaatatataccgccacacagacaggcggcatattcaatttgattttatttcccaccgggaagaaacgtgcgattacgacccggagatcatcacgcgcggcggccgggtgttttatgtaccgagcatcggtcggtcgggtcctgtcgcctacatcaaaaacatcagaaggattttggttgagaaagggccttatgccgccgtacacgctcatacggattttcagacgggctttgccgcattggcggccaggctcgccggcgttccggtcagggtctgccattcccacaacacggcctggaagcctaacccccggttttgggatacatggcagcttcttgcattccgctgcttgattttctccagtgctacggctctgtgcgcttgcggcaaagatgccgggcgttttttattcggcgcaaagaagatgggtgaaaacgcggtccatcttttgcaaaacgggattgaacttgaccggttcaaagaagcgaacggcgtttcaaaaacgaatgcgaaaaagagcttcggtatcaaagaagacgcactggtgatcgggcatgtcggccgtttttttgaacagaaaaaccacgcgtttctgctcgggcttgccgcttattgcaagaaatcgggcataccttttcaagcggtgttcgcaggtgacggtccgctgcgcagacagatggaagaaaaagccgctgctctcggtgtaaaagacgacattctgtttctcggcgtcgtcgaagatatcccggctctcatgcaggcatttgatgtatttgtcatgccgtctttgtttgaagggctacccctcgtactggtcgaagcgcaagcgtcagggctcccctgcattgtatcagacaacattacggaagaaaccgatttgggactcggcctgctgcaacgtctcagcttaaatgccggttttgaacggtgggctgaggatatcagccgtgctgctcagccgaaaaagcctgcatggccggaaatagagagaagccttgctgagagaggctatgatgcaaaagcaaatttggcgagactgatggacatctattcaatctccgcagcagaaggacagtga

SEQ ID NO: 4138 - DNA, 843 bp, Bacillus licheniformis
atgatagggggtcaaaagccgaaagtttctgtcattatgggagtctacaattgtgagaacacgatcgcagagagcatcgagtcaattttaaatcaaacctataaaaattgggaactgattatatgcgacgatgcttcgacagacgggacatatgctgttgccaggcggtatgccgatcattacgcagataagattaagctgatcaaaaacgagaagaatcagcggctggctgcctcgttaaaccactgtctccaatacgccggcgggaaatatatcgcgcgccaggacggagatgacatctctttgccgaggcggtttgaaaagcaggtcgcgtttttggaatcgcaatctcattatcatgtcgtcggaagcggcatgatggccttcgacgaaaacgggattagaggcgtcagaatgcttccttcctctccagaaccgagaatcatggcgaaagggacgccgttttgccatgcgacgatcatgatgagagccgacgtctacgaggcgctggacggctatcgggtcggccggagaacaagaaggatggaagatgtcgatttgtggcttcgtttttttgaggcgggcttcacgggctacaaccttcaggaagccttatacaaagtaagggaagacgaatcggcgtttaaaaggagaaagctcagctactcgattgataatgcgtttatcgtctttgccgcctgcagacggctgaagctgccgctatcggactatatttatacaatgaaacccatcatcagggggcttatgcctccttttatcatgaacagatatcataaaagaagattgatgaatgaaggcggaggggtcgtaaaacatgaatga

SEQ ID NO: 4139 - DNA, 1149 bp, Bacillus licheniformis
atgacaagaacggttttgttttgcgctactgtggattaccatttcaaggccttccacctcccgtatttaaaatggtttaaagagcaggggtggaatgttcatatcgccgcaaaaggagatatgacactgccctatacagataaaaaatttgatatcgatatcaggcgttctcctttgaatgcaagcaatatcgctgcctatcgggagctggcgcgaatcattgacgaacaccggtacagcatcattcattgccacacgccgatgggaggcgtgctggcaaggcttgcggcccggaaacagagaaaagaggggacgaaagtgatctataccgctcacggtttccacttttgccaaggtgctcctttaaaaaattggctgctgtattatccgattgaaaaagggctgtccgctttgaccgattgcctgattacgatcaatgaagaagatttcgtccttgcaaaaggcttgcgaaaagcgctgcgcacggaaaaaatccacgggatcggcgtcgatacggagcggtttcatcctgtcagtgaaacagagaaaatgctgctcaggaaaacatacggtttcaaagaagacgactttatcctcatatatcccgcggagctgaacgcgaataaaaaccaggccttgctcatcgaaacggcggctgctttaaaagacagagccccgaacttaaaggtcgtgtttgcaggaaaagggcagatggagcaaaaataccgaaatcacgctgaacaaaaaggcgtttcttcgctcgtcatgtttgccggttttcaaaaaaacatccacgaatggattcagcttgcagacgtgtctgtcgcctcaagcatcagggaagggctcggcatgaacctccttgaaggaatggcgtcaggaaagcccgccgttgcagcggacaaccgcggacaccgggaagtcattcaagagggcgtgaacggatttttggttccgcagggagacgccggaacgttcagcgaccggatattgcagctgtaccgtctgccttctttgcgaaaaaagatgggagacgcggggagacgaacagccgccgctttttcccagcagcgcaccgtcaaagaaatggcgggcatttactcttcctttatggataacgaaacagttgaaaggaggctgaaaggatga

SEQ ID NO: 4140 - DNA, 1818 bp, Bacillus licheniformis
ttgacatatcggagaaggctttccattattaccgcactcgattcgtacttggttttgctgtccatctttatcggatatcagctaattttgccatcatatgatttatacccttcggaaatgctgctgatgacttcactgatactgcttggcgctcagcatttattcgcccattgcttccacctttataaaaaagtatgggagtatgcaagcatcggtgaattgtatgtgctgcttaaatcgattacattgtcccatcttgtgacggcggccctcgagctgtttttctttcaaaacgttccggttcgtcttttatgtttaagctggctgttccagctcattttgatcggcggatcgcggatgatgtggcgcatcatcagggaacaggtgaacaaagaaagcaaaggatctctaagggcgcttatcatcggagcgggctatgccggcagtttgattgcaaaacagcttgtgcagaagccggaattgaacattaagcccgtcgcctttatcgacgatgacaaaacgaaataccggcttgaaatcatgggtctgcccgtcttaggcgggaaagagcagattatgcaggcggtccggcaatggaatatcgaccggatcatcatcgccattccatctttgagcgtcactcagatgcaggaaatgtacaaggcgtgtgcgcaaacaggtgtcaaaacgcaaatcatgccgaaaatagacgaaattttgcttggcagacatcctgtcggccagcttcgcgatgtcaaagcagaagatttgcttggaagggagcctgtccagctcgatacgagcgaaatctccaatacggtcaaggaccgcgtcgtacttgtgactggggccggaggttcaatcggctcggaaatctgccggcaaatcagcaaatttaaaccgaaatcgatcattttagtcgggcacggagaaaacagcatccattcgatcctgcttgaactgaaggagaaattcggaaagcatgtcgcctattatcccgaaatcgcggacatacaggacagagaaaaaatgtttttgctgatggaacgctacaaaccgaatgtcatttatcatgcagctgcccacaagcatgtaccgctgatggaaaaatgcccgaaagaagctgtcaaaaacaatatcctcggcacgaaaaacgtcgctgaggccgccgacgaaaccgaagtggagacatttgtcctgatatcgtcagacaaagcggtcaaccctgccaatatcatgggggcaacgaagcggttcgcggaaatgctgatcatgaatctcggcaaaacgagcaaaaccaaatttgtcgccgtccgcttcggaaatgttctcggcagcaggggaagcgtcattccgattttcaaaaaacaaatcgctaaaggcggcccggtcactgtcacacaccaggacatgacgaggtacttcatgacgattccggaagcttcaaggctcgttattcaagcgggggcgcttgccaaaggaagacagatattcgtgctcgatatgggcgaaccggtcaaaatcgtcgacctcgccaaaaatcttatccagctttccggctatacgacagaacagatcaaaatcgaatttacaggcatccggccgggagaaaaaatgtacgaagagctgctgaatcaaaatgaagtgctggcagagcaggtttttccgaagattcatatcggcaaggcggtcgacgtcgaatggacggtgctgaagtcatttatggatgaatttatgtatttgtcagaccgcgagctgagagaacgcttgttcaaagcgatcggccagcacgagaaaaagctggtgacagcgcactag

SEQ ID NO: 4141 - DNA, 693 bp, Bacillus licheniformis
ttgggtattagaaaaaaacgctctcgcaaatatcaatcggcgcttgtcgcattgcatcagccgaacacgccgatcgtcgaacagtatcggacgatcaggacgaacattgagttttcatcatttgagaagccgttcaagtcattgctcattacatcgggcctgccgggagaaggcaaatcattctcggcttcaaacttggcgatcgtattttcgcaacaggaaaaaaaggtccttttgatcgacgcagatttaagaaagccgacgatccataaaatttttgagctcgataaccattcaggcgtcacaaatgtattaatgaaaaaatcgacgctggaaaatgtcgtccagcaaagccaggcggaaaatctccatgtgctgacaagcggtccgattcctccgaatccgtccgagcttttgtcgtcgcaggcgatggaggacctgcttgcggaagcgtacgaccaatacgatttagtcatccttgattcgccgccgcttttgccggtcgcagacgcgcaaatattggcgaatcaggtggatggaagcattcttgtcatcctcagcggaaaaacaaagcttgataacgcgatcaagtctcgggacgcgctgaattcttccaaaagcgaactgctcggcgccgtgctgaacgggcggaaagtgaagaaagcgcgccaatataattacgcaaccatgtaa

SEQ ID NO: 4142 - DNA, 753 bp, Bacillus licheniformis
atgaaagaaaatattgattttagagaactgattgcaatcttgcgaaaaagaacggttcttattctcgttttgacaataggtgtaacattgacgaccggaatcattcagttctatgtgctgacacctgtctatcaggcatcgacgcagatcttggtgcatcaagtaggggagaaaaaggggagcgccacatacagcgatattcaaatcaatcttcaatacacacggacattccaagcgcttttgaaaaacccggtgattttggagcaagtcaagagagagcttgatttaccttactctgcgggccggttgggtgaaaaaattgcaacgagcagtgaaagcgaatctgagattataaatatttcggtccaagatgaaaatcagaaacgggcggccgatatagcgaacactttaactgcggtgctcaaaaaagagattaagcaaattatgaacaccgatcgggtaaccgtcctgtcaaaagccgaaatagtcgattcgccgacacctgtcagaccgaattacaaaatgaatattttgctggcattcggcgccgcattaatgaccggaatcgctttggcgttctttttggactttatcgatgatacggttgcaagaccgtctcaagtcgaaaaggaagcgggattcatttatttgggaagtattgagcaaatgaagcataaaaaaagtctgtttcgcggggaccccgatatgaatatccgcgtaaaagcaggaaggagtgagccgcttgggtattag

SEQ ID NO: 4143 - DNA, 459 bp, Bacillus licheniformis
atgatcggaagagtcatccgaatgtacagaaagagaaaaggctactccattaaccagcttgctgatatagcaggcgtatcaaaatcatatttaagcaaaattgaacgcggcgttcacagaaatccgtcagtcgaattcctgaaaaaaatctcccgggcgctgaaagtcgaattaaaggaattgtttgataccgaagtgatcctttatcgccggactgagcaggaagatgagtggagaacccatcttgtacaggccgtgcaggccgggatgaaccaggaagaactgtttcaattcacacatcgcctcaagcagaaaaagaaagaacgggcgctttatcgaaacagagagctgacccgggcgaatatcgacgaatggagagcccttatgctggaggccaaagaaatgggactgaccgtcaaagaagtagaagcgtttttgatgaggacaaaaaatcattaa

SEQ ID NO: 4144 - DNA, 147 bp, Bacillus licheniformis
atggatcatcatgatcgggcgatatctattaatgcgattattccgaattttcggcaagttgaaatggaaatgtggatttatatccggatgaatggttcaagtcaaaagcacccgttttcttctaaaaaaaatatgaatgcaggataa

SEQ ID NO: 4145 - DNA, 192 bp, Bacillus licheniformis
atgatttcatctccttcttccattttattcatcttaacgaacagccagcgcggattcaacaaaaacgctccgtccccattcaaggaatcgggccgtgacaaaggtcttgatataagccgcaagacacagactttgcatgcattggaggatgatgcgaaaggtcaaaatccgagtttcttcatttatatataa

SEQ ID NO: 4146 - DNA, 525 bp, Bacillus licheniformis
atgaaagtattagtgctcgcatttcatccgaatatggagcagtcagttgtgaacagagcatttgcagacacattgaaaggcgcaccgggcattacatttcgcgacctttatcaggaatatcctgacgaggccattgatgtggaaaaagaacaaaaactttgtgaagaacacgatcggatcgtcttccagtttccgctttattggtacagctcgccgcctctcttaaaaaaatggctggaccacgttcttctctacggctgggcatacggaacaaacggcacagcgcttcgcggcaaagaattcatggtcgctgtatcggcgggcgctcccgaagaagcctatcaggccggcgggtcaaatcattatgcgatcagcgaactgttacgcccttttcaggcgacaagcaacttcatcggtactacataccttccgccttacgtcttctatcaagcgggcacggccggaaaaagcgagcttgctgaaggtgcgacacaatacagggagcatgtgctgaagtcattttaa

SEQ ID NO: 4147 - DNA, 1284 bp, Bacillus licheniformis
atgttgaatcacccgattcaaaaaaagtcaaatgtacgctgggttgtcgcgtttatgatgtgggctgcgattgccatcaattatattgaccggacagttctttcggctgccgctccctatattaccgaggagttcaacttgacacccggccaaatgggaatcatcatgtccggtttcttctggtcgtacgctttgctgcagctgccttcaggctgggcggccgacaagtacggccagaaaaaaacgctcggttttgcggttgtttggtggtctgttgctacggcgctgacgggtcttgcgacaggcttcaaatccctgctcgggctgcgggtcgcactgggagtcggagaggctgctgcatatccgagcaatgcggggattgccgccaaatggtttccgaaaaaagaaagggcgacagtagccggaatttttgacagcgggtcaaagtttggcggagctgttgcaatgcctttgatcgcctggatgatagcggtctttgactggaaactgacgtttcttttgatcggacttgtcggtgtcgcgtggggaattgtctggatgattttctttaaggagaatcccgcagatcataagcgcgtcaatgaggcggaactggcccatattcgggaagggcaggctcacatggaagaaacgggcggcggccagccgctgaagtggtatcagctattcaaatatcgcaacatatgggcgatgtgcattggatttttcatgatcaattataattcttacttctttatcacatggctgccgacataccttgttaaagaaaggggcatggatttaatcgagatggggattatggcgtctctcccgcttttgactgcaatggtcgtcgaagtcggagccggatggatgtccgaccggatatatgcaaagggaaaactgtcgctgacagccgtccggaaactgtttttaattatcgggcttgtcatggcttcgtgcatcggttttgccgcttttgcagattccgctatcctggctgtcatccttctttgtgtagcgaaatcgggaacgactgtcgccgcgtcccaagtctgggcgcttccgggggatgtggctccgaaaaatatgacgtcgatggttgccggtattcaaaatacagtctctaatatgggcggagtggtcggacccatcattaccggcttcatcgttggcgcaacgggttctttcgtgccggcgctccttttttcggctgctttgatcatcattgccattttaaattatctattcctattgggaaaagtgaaacagattcaagtataa

SEQ ID NO: 4148 - DNA, 951 bp, Bacillus licheniformis
atgaaagtcgtatgtacatcaccgtcatttgcgaaatactcagacgatcccgtcttgtttttggaaaaaaagggcatgtcgctggaacgccttcctgcagatataaccgaggagcagtttattgaagcagcagaaggagcggatgccgcgatcgtggcgtttaaccagattacgccgtatgtcctggatcgtctcccttctttaaaaattgtctgcaaacatggcgtcggtgtcgacaatatcgatctgcacgctgcgaaagagcgcaacgtctgggtgacgaatgcccccaacgccaacaagcatgcagtcgccgattttgtattcggtctcatgctgtcggctgcaagacagattcctgcagccgacagggagacaaagctgggaaaatggccgaggatttttggatctgacgtttacggcaaaacactcggcatcgtcggacttggcatgatcggaaaagaagtcgccaaacgggcgcaaggcttcaatatgactgttttagcctatgatgtgtttcctgatcgtgcattcgcagccgatcatcacatccattttacagagcttgatcagctcttgaaagaatgcgactttatcactcttcatatgccgctcacagccgaaacggaaaacatgatcggtgaaaaagaattagccgctatgaaagaaacggcttatctgatcaatgcttcaaggggaggcatcgtgtccgagtgtgcgttatatgatgccttggcgagcgggggcatcgctggagctgcgcttgacgtgtatcaaaccgaaccgctgaagcagcaccctctctttgagctggaccgttttatcgccgtgccgcatatcgcggggtatacccgagatgccgtacagaaccttggcatgatatgcgtcaaaaacatcgctagtgtactgatcgacaaacaaaaaccggagtttgtcgtcaacgggttgtga

SEQ ID NO: 4149 - DNA, 999 bp, Bacillus licheniformis
atgaagaaaccggttatcggcattacaatgggcgacgcggcaggcgtcggtccggaaattatcgtaaaagccctcacgtcccgcgaagtgtatgatatgtgcaggccgctcgtcatcggcgatatgaaaatgctgacaaaagccgccttccaaatcggatcagaggttgttattaacaaggtcgggcatccgaacgagggcggttttgtacatggaaagatcgattgtctcgatattgaactgctgcctgaaaacctgcctgtcggaaaggtatcggctgaagctggaaacgccgctttccatttcgtgaaaaaagcggttgagctcgctaaaaaaggctgtattcaagcgatttgcacagcgccgttaaataaggaggcgctgcataaaggcggacaccgatacccggggcatacggaaattctcgctcatttaacgaatacaacagactacagcatgatgctggcttcgccaaagctgaaggtgattcacctgacaacgcatcaagggctgatcgaggcgattcagtcgattacgccggagcggacctataaagtcatccgtctcgcacatgatacattgacaagagccggattcgaacagccgaaaattgctgtttgcggaatcaacccccatgcaggggaaaacggcctgtttggaagcggcgaggaagaacggcaattgcttccggggattgagcaggcggcagctgagggaatcgatgccggcggcccataccccgcagacacgctgttttacaaagctgtcagaggagatgttgaccttgtcgtagcctgctaccacgaccaggggcatataccggtcaaagtcctcgggttggaagagggcgtcaacattacagtcggattaaacggcgggatcatacgcacctctgtcgaccacggaaccgcatttgacattgcggggcagaacaaagccgatgaaagaagcatgctcgctgctttgcggtcagccgctgagctggcgcccaaatcgtag

SEQ ID NO: 4150 - DNA, 1272 bp, Bacillus licheniformis
ttgaaaattgcaatcatcgcggatgatttgacgggagcgaacgactgcggcggtcagcttgttcattacgggatggatgtttccgtcaaactcgacgccgaattcaccagacgggaaacggaaggcgtcgttattttcaatacggacagcagatcgctgccagccgcagaggcgaaggcgactgtgaaaaacatcagtgaacacatctcccggcaatcgtttgatatcgtctacaaaaaaatcgacagcacgatgagaggaaatatcggagccgagcttcaagcgatgtacgaagtgtttcagccggactttgtgctgatcgctcccggctaccctcaaaacggacgccaggttatcggcggcatccattatgtgaacggcgtaaagcttgaagaaaccgaagcggcaaacgatccgaaaacgcctgtagccgagtcgaatattcaaagattaatagaaaagcagactcgaaataagagcgggcatttatcatatgaagacatccgccgcggacacgggcatgtccgcaacaagctggaacgctttcgggcggaggggatttcatatgtgacggccgattcggttcacgaatccgatctgcaggggctggcgcttattctggagagtttgccgtattctatcattttggccggttcggcaggcttgatgagctgtctgcccaaagcgttcaatctgaaagaaagggagctcggtcaaaccgttccgtcttccgaccagccgatcatgtttgtcgtcggaagcatgagtcggacggggagggaacagcttcacgaactattcgccggacgtgcggctgaaaaaattgaaatgagatcagagcgcgtgctgtgcggcggagctgagaaaagaaacgagttcgaacggctgaaggaaagggcggcggacgtccggcgccgttcgaaacacatcgtcctctgcacctcagacaatgcggcagagacacagaagattggtgaaagccgcggactcaccccagttcaaacgagcaatgcggtgtccggtgcacttggcgaatttgcgggcgagctgattcaagcttttcatgtgaaacggctgttcttaaccggaggtgacacggcatatcaagtgctgcatcagcttcggattcatgagatacgattgctggacgaagtagagcccggcattccgctgggagcagccggtgaagaattgtacattgtgacaaaggccggaaattttggctcgcgttcggtgatggcaagtgcggcaatcaagctacaaggaggataa

SEQ ID NO: 4151 - DNA, 1167 bp, Bacillus licheniformis
atgccagcgaattatcaatttcggacagccggtcatatcgttgcaggtgaacattccatccgccggctgaaagatcatgtgcgaacgattgtaccgaaggcggacagggcgctgattattacccagccgtcgatcgtcaagctcggcgcgatcggagaggtacaggctcagcttacagagatcggcattcagtcagatgtttgcacagccatattgccggaaccgaccgtacaaaatattgaagacgtatttagaggcatccgtgagaaacgatacgacattctcatcggaatcggcggaggcagcgttttggacggaacgaaaatattgtccgtgctgcaaacgaattcaaaaaaggtcgaggagctgctcgggacagatttggtcgaaaagccgggaatcccgaccgtgctgattccgagtacttcggggacgggcgcagaggtgacgccgaacgcgatcgttacccttccagaagaggaattgaaagtcggcatcgtcagtccgcttcttttgccgaaacttgtcattcttgacccggtcatcacccttggattgccaaaaccgattacggcggctaccggaatggatgcattcactcattcgcttgaatcgttcatttcgacgaaagcaaacccgatcagcgatatgttcgctttagaatccatcagattgatttcggcaagtattgtggaagcatatgaaaacggttcatcgatacaagcgagagaaaacatgctgctcggttcgacgtatggcggaatggcgctgacggctgccggtactgctgccgttcacgccctcgcctatccgcttggggggaaataccgaatttcccacggtgtcgccaattcgatgctccttccgcatgtgatggagtttaatatggatgccattacagaacggctgtctcttgcggcagaaacaatgggaatcgttgcatctgatttgaccgccgaacaagcggctgaggccgttgtgcagaaaataagagagtggacggagcggctgaatattcctcaggatttaaaagcgttcggcgtaaccgcaagcgacgtggacgatttagccgactcagcttcaaaagtgacgcgcctgcttcataacaatccgaaaccgctcagtctggaaaatataaaagacatctatcgaaaactaatcaactaa

SEQ ID NO: 4152 - DNA, 888 bp, Bacillus licheniformis
atgggattcgtaccaaaggggatttatcctgctatgctgacaccgctcacaaaagatcaaagcattgatgaatcggcattgaaacagctgacaaaccatttgatcgatgctcatgtacacgggctttttgcgttgggtaccaacggggaatttcatatgttcaacatcgaagacaagctgaaagttgcagaaatcatcattcaagaaacggccgaacgcgttcccgtcatggtagggagcggaggaaacagcacagaagaagcgatctggctttctaaggaaatagagaggcttggagcagatgcgctgtcggtcatcacgccattctttattccaccgacacaggaagaagcggcggtgcattataaaacaatcgcggcatccgtttcacttccgatccttttgtacaatatcccttcaaaaacaggtttccatttagaaccagaaacagtggcagagcttgcaaaagtggacaatatcgttggaattaaggacagcagcggaaactttgaaaacatacaacagtatatcgagcagacgaaaaatgacgacttttccgtttttgcaggcaccgattcgctcatattgaaaacgcttcaagcgggaggagcgggagcagtcgcagcaacagcaaatatgcttccggatatcgtaacgtctatttaccaccattgggcagagggtgagactgaaaaggcggaggctgcccagatggagcttcagccgcttcgcgatacgtttcgtttaggtacgatcccggcggcactgaaaaaagcggttgagctttattcgatccctgtaggcccgccgaaagcgcccgtcaaagaactgaccggtccggcgcttttggaggtcgaaaaaatggttgcttcctatcaatcaaaatag

SEQ ID NO: 4153 - DNA, 1719 bp, Bacillus licheniformis
atgaaagtgatggcaattgctccatatgaaggactgaaagagctgatggttcaagtggcaggcggcgagaattttgaattcgaggcggcttccggagatttagagaagggcgtggagctggcgaaacaagcggaagcaaacgggactgatttgattatcagcagaggtggaaccgctgagctgatccagcgagaagtttccattccggttgtggatatcgaagtgtcgggatacgatatgctgcgtgtgcttacgcttgccaagggctatcccggcaaggcggcaattgtcggatttccgatgattgccgacggcgcatcggcggtgtgcgaaattttggatattcggatcgacgcctgcaccgtatcagacgaacgcgatgttgaaccggtgcttcttcagctcaaagaacagggctatcagatcattatcggcgatgtgatcacaattgagaaagcagagcagctcggtttaaacggactgcttttgacatccggaaaagaaagcattgccaaagcttttgcatacgctaaaaaactgtattcctttttagagagcatcaagcagaagtacgctgtgccgtatcacattttacaaaaggccgagaccggttatgcagtatacaacaagacattgcggccggtttttcaaaacggcgtatttgccgaacatatcggcttgctggataatctggaagagctgatcggggaatcggaaaagaagggagtcatccattttagactccgaaagcatgggcggacatggaatatcacggggcgcaggtttttcgcatcagacgaggcattgaccgtatttaccgcggaaaatgcaaaagatgttcgcgtttcttctttgcccggggcaacgattctttctcctttgcggatgagttatatggaaacatcaaggaacgaaacgatgcagaaggtgctgaaaaaagcagagttgttctcggcaaggcgggaacccgtatggatcaatggagcgcccggctcagggaaagagagcttggccgggctgatccatatgaagggggaggacaagcatgagccgtttcgaaaaatcgatgccggtttgctgtctgaagcagaatgggaacaggcttgtgaaagcgaagaattcttttcagggagaggaacgctatacatcaaacaagtcgatcgcatgccgccgtcctcgcaacggcttttactcaggcggatcagcgaaccgtatgatgggccgaggctgatcgtttcttcttcccgcaggcgcgccgaggaattttcaagcgatttatatgatgcgctttgtcatttggaactggacgttccccctctttccgaaagaaaagaggatattttgcatctggcttatctgtttattgcggaaagcaatgaggcattcggcaaacaaatcgtcggctttcgaaacgaagctggtgttctgcttgaagaagcgaaatggccgggcaacctcagccaattgagaaaaacggtccaaaactgtgtccttgaagcgcagggcgtatatatcgagaagactgacgccgaacgggtcctgagccgcttgaacgaggaagaaagagaagacatcgatttatccggaacgcttgaagagatcgaaaaaaggatcattcaaaagatctatgccgaagaagggaacaatcaaacaagaacagcggaaaggctcggcatcaacagaacgacgctttggagaaaattgaaatcgtcagattga

SEQ ID NO: 4154 - DNA, 453 bp, Bacillus licheniformis
atgaattcagctgtcgatcataaagaatgctcttctttaattcaggatgtattgaaaattttctctggtaaatggtcatttttagttctcgccgaactcattcagggcaagcggcgattcaacgagctcagaaggaacttgggaaacgtcaacacgaaaggattaactgacacattaagacatcttgaagaaagcggcatgatttcccggaaggtgttcccaacggttcctgttactgtagaatataaattaacagaaaaaggtaaagagttccacagcatttttaaagagatggccgcatgggggggggaaatggcttccgtaatggagcctttttattttgccttcgttttgcggttccaaatatttctgccttttggtatagtgataatgtgtttaaatttgcaacaaaaggtgatcgaatatgaaagtgatggcaattgctccatatga

SEQ ID NO: 4155 - DNA, 1095 bp, Bacillus licheniformis
atgaaaaaacaatacgagtctttattcaccccgtttacttttaaaaacggaatccaattgaaaaataggatcatcatgccgccaatggggcattcatcctcattgccgggaggattcatttctgacgacgaactggtctattatgccgcgcgggcgacagaagtcgggatggtcatcacatctgcgacaaccgtacagcccggaaccggatttccaggcatccccggagctgagaacgatgatcaaatccctggactaacccggcttgcagccactttaaagaaacacggagcaaaagcaatcctccagctcttccatcctggagccaaaggtatagagcggacggtcagcgccagcgccgtcgctccgaatcaaccgaatgcaccggtgccgagggcgctgtctgagcaagaaattcaagaccttatccattctttcggccaggcggcgcgaagagcgatagaagccgggtttgacggagtcgaaattcacggcgcaaacgggtttctcatccatcagttcttctctccttattacaaccggcgcaatgacagctggggcggcactttagagaaacggatgagatttccgcttcagattatagaagaaatcagacgcgtagcggatagctgccataagccgtcctttatcatcggctacaagttttcgcccgaagagccggaaacacctggaatcacaatggatgaaacgttgtctttcgtcaatgtactgcgggagcaaggattggattacctgcacgtatcactggttgatttccggtccttgccgcgcaggggtgcagacagatcccgcgcaaggatggaactgatcaaagaagccgtccaagaccgtctcccactgatcggagccgggcaagtacacacaccggaagacgcccttcaagcgctggaaacaggagccgatctcatcggaatcgggcggggtctcctgatggatccggagtggctacaaaaagttcgagccggaaaagaggacgatattcaaacaaccctgtcaagacatgatcagcggaagctcgcaattccagatgccttttgggaaagtataccgatgtatattgatttcagcgattga

SEQ ID NO: 4156 - DNA, 1449 bp, Bacillus licheniformis
atgaacatcaaaaacattgctaaaaaagcgtcagccttaaccgttgctgcggcactgctggccggaggtgcgccgcaaacctttgcaaaagaaacgcaggattacaagaaaagctacggattttctcatatcacaagacatgacatgctgaaaattcccgagcagcaaaagagcgaacaatttaaagttcctcaattcgatccgaaaacaatcaaaaacatcccttctgcaaaagggtataacaaaaatggagagctgatcgatttagacgtatgggacagctggccgctgcaaaatgccgacgggacggttgctacataccacggctacaatcttgttttcgcgctggcgggcgatccgaaagacgtcgatgacacatccatctatttgttctatcaaaagaaaggcgaaacttctatcgacagctggaaaaacgccggcagagtgtttaaagacagcgacaaatttgttccagacgatccgtacctcaaacatcaaacacaggaatggtcaggttctgccacgctgacaaaagacggaaaagtccgactgttttacacagctttttccggcacgcaatacggcaagcagacgctgacaacagctcaggtcaatttctctcagccggattcggacacgctcaaaattgacggtgtagaagatcataaatcggtctttgacggcgccgacggcacggtataccaaaacgttcagcaattcattgacgaaggaaactacagctccggcgacaaccatacgatgagagacccgcattatgtggaagaccgcggccataaatatctcgtatttgaagccaatacgggaacaaaaaccggctatcaaggagaagactccctattcaacagagcctactacgggggcagcaagaagttctttaaagaagaaagcagcaagctgctgcaaggtgcgaacaaaaagaacgcttcgctggctaacggcgctctcggaatcatcgaattaaataacgattatacactgaaaaaagtcatgaagcctttgatcgcctccaatacggtgacagatgaaatcgaacgggccaacctcttcaaaatgaatggaaaatggtatctgttcacagattcaagaggatcaaaaatgacaattgacggcatcggttcaaaagacatttatatgctcggctatgtatcaggttcattaaccggaccattcaagcctttaaacaaatccggacttgttttgcatatggaccaggattacaatgacatcacgtttacttattcgcactttgccgtaccgcagaaaaaaggcgacgaagtcgtcattacaagctacatcacaaacagagggatttcgaacgagcatcacgccacgtttgcaccaagctttttgctgaagatcaaaggatcaaaaacatccgttgtcaaaaacagcatccttgaacagggacaactaacggtaaacaaataa

SEQ ID NO: 4157 - DNA, 1548 bp, Bacillus licheniformis
ttgaagaaggcagtatataagcggatcagcattttaactgtttgtcttggaatcttcatcatgatatttctttcagtccgggaaacagaaaaaaagggagaatctccggatacaccggaatatcgtgcagctttccatttgacaacccctgacaaatggaaaaacgaccctcaaaaacccgtctatttcaatggagaatatcattactactacctctataaccgagactatccggacggcaatggaacagagtggcgccacgcagtatcagatgatctcgtccactggcaggataaaggggttgccattccgaaatatacgaataaaaatggcgatccctggtccggttctgtcgttgtcgactcaaaaaacacagccggcttcggcaaagggacgatcgtggcggttatgactcagccgtcggccaatgacgggaaggaagagcaatttttatggtacagccaaaatggaggaaaaacatttaaaccttacggtgaagagccggtcttgcctaatccgggcaccgtcgatttcagagatccgaaagtgatctgggatgaacaggatgataaatgggtgatggcgctggctgaaggaacgaaagtcggcttttacgaatcgcaaaaccttaaggaatggcgttatacaggtagttttcaaacagaaaatatcggcatcatcgaatgtccggatctgtataagatgcgggcggatgacggaacatataaatgggttcttggagcaagcgccaacgggaaagggaccggcaagccgaatacttatgcatactggacaggcagcttcaacggcaacgaatttacggcagacgaagcagaaccccagtggcttgattacggatttgactggtatgcgggcgtgacatttgaggacggcgaaacgaacgatccgtacgagaaacgctatgctttggcgtggatgaataactgggattatgcaaaccggacgccaacatggaaagacggttttaacggaaccgattcgatcgtccggcaaattcggcttaaacataaaggcggagatcgatacagcctcgcctctcatccaatcgatcaattggatgaattaaccgaatctgccgatgaattggatcgcatcgaagtgaacggatcaaaaacgctgcagattaaggggaatacctatcagcttgaggcagatatctcttgggacgaccttaaaaatgcgggtttcaggctcagagaatccgcggaccgaaaacgccatatcgatgttggaatttcggctgaaggcggatattcttatgtgaacagaggatttacgggacagcctgacagcacccgcacctatttggaaagcaaagcaccgtttgatccggaaaaaaaacgggtccatttcacaattatcgtagatcaaaacactgtcgaagcatttattgatgacggcgaaacgacgcattcaaaccttgcatttcccgacatgaatgatacaggcatcacactctttagcgaaaatggaacggccgtctttgaaaatcttaagatcaaacatttgcgttcaatccgcgattaa

SEQ ID NO: 4158 - DNA, 249 bp, Bacillus licheniformis
atgaaagaaaaatttccgaaaatattgtttgttctcggctggatcgtaattgtggccggcatattgacgaacatcgaaagtacgctgtatcttaacgcgaatcaatacgtaccggaaggcagatctcctgatccaatacgaatgatgcagatcgtttctgacatcgttgatccgttatataaaggcggcatactgctcgcactgtcgtatctattaacctacgtcaaaggcttcggaaaaactgaatag

SEQ ID NO: 4159 - DNA, 2456 bp, Bacillus licheniformis
ttgggttttagtgtaaaggaacaagtcggatcattgccggccgtccttaacctggcgtctgcgtctaacgaaagcctcggacgttcagccgatatcgtttcgaacatcatgacgggcttcggaatcaaagcggaagagtccggacatgcggtcgacgtgcttgttaaagcgatgacgacagcgaatacagatctcggccaattgggcgatgccatgaaatacgtggccccggtcgcaaacggactaggttattcgatagaagatacggccgcagctgtcgcgaaaatgtcagacgccggtattcagggatcgatggcaggtacggcgctgagggcgacgctattgcatttgtcaaatccggtaggtcagacggcaaaagcggtcaaaaagtacaatctcgaattggaagacgccaacggaaacttaaaatcgcttccggaattgatcggatacatttcgaagaatctcgaaggaatgtcagacgcacagaaaacggcaacagcggctcagctcgtcagaacggaagcggcgtccggatttgtaacgttgcttggtgttggtgaaaaagggcttcgcgattattcagacgctttaaggaacgctgggggtacggctgatcgtgtagccaagacgcaaatggataacctgaaaggctccttcgaaaagtttaaaagtgcgctcgatgggctcggcatcaagatcggtaacgagtttttgcctactttccgaaaaattgtagacgagggaacgaaaatactcgatttccttaacaaactgaatccggggatcattacgactggtctggaaatggtcgggacagcggcggcgattgcgctcgtagcgtcgacggttgtcaaacttggagttgcgctgaaaagcttaacgttggggccggttgggctgacgattacggctctttctcttctcggcggcttactcatcggcgttaaaaatagttatgacgcaatgaacaccgttagtttggaggctgcggagacgaagcagaaagagatcgagtctcttgataaggtcgcatctgaattcgataaacttcaatcaaaaacgaagctgactgcggatgagtttgctcattatctcgatttaaatgatcggctgaaaaccgagacagatccagaggttatcaaacgtcttaaagacgagcaggcgaacctaaaggagcggtccgggcttacaaatgcggagtttgaccgttttctgaaactgaatgacgacatcgttaagaaagcgcctgaaacaaacgcggctattagcgagcagggcaatgctttcgcgaaaaacaccgaggccgtcaaaaagttgagtgcggctaaggcggaagaattgcggactgaattagaaaaacaaaaagctacagctcagagcaaagaagctgaataccttcaaaaacagcagaatcttaaaacagatattaaaaaattagatggagagcgagcagaactagaagggaagattgctgatcaaacgcaaaaagtaaaggacgtaactgacgaacttaactcagcaaaagcagaaggtaacgaaaaagcgcagtaccaagccgaaattaatttagccgccgaagaagcgacgctcaataaattgcgggaacaactcgtcgcaaacctcgacaatctacagacaaagcgagaaagcttaggtgaagtacaaaaagagctcggcaaactgaaggatattaaccagaaattgattgatattgagctgcaacaagtcggtttgaacgcgaaaaaaggcgaaggcgttgacgttctgaggaaggaactttcgcgtctgcaagacgtgcaattcaaactcgaaaataacacgtctgaggcagataaaaagacgaagaaatatcgcgattcagtaaaggctgtcgataaagaaatttcgcaacttaaatctgctttgaatcaagtcgagaaaatcactaaagaagccgaaaatatgaacgaaaagctggcgcgaaggatcagtaaaaagatccacgtcacctacagcatggacggaacggaaatcgaagagagcgcggagacattcaagaagacgcacggtaaaggcggaaaggaaactccgtatcatatcggcggcatcgtcggacgcggtcagatcaacaagctccacaccggaggccttgcgtctaagttcgaaaatgctccgatgagccacgaagtcgacatccgggcactgcggaacgaaatggtcctgacggaagcacagcaggcgaatttaatgcggatgattgacgctggacacacggcggcagttggaggagaactcggaatatcgagcgaggtcatcggaatattacgttcgattgaccagggcgtaaggcagaaccgcaatgtggccgttcaaattgacggagaaacaattgcttccgcaacctatccgcacattgatagtaaatttacccaagatatcgcgatacagtcacattttcttggacaaaagagtta

SEQ ID NO: 4160 - DNA, 603 bp, Bacillus licheniformis
atgaatttagtagagtgcaagtgtaatggttgtggcaaatcttttactaggaaaaaatctgagatcaagtcgaagacagtctactgtagcagggattgttatctttcaaatattaataaacgtgcaaggaagcgggtgccgaagaaacggtactcgtgtttttgttgtgggaaagatttttataattgggagagtcagatgattgggaaaacccattactactgctctcgtccctgcgctaataaacaccaagctcttttgagaacagggagtggtcatccaagatggaacccttctctatcagaagaagatcgacttgtgaacaggaaataccctgagtatttaaaatggagagcggatgtatatgagagagattcgtatacctgcaaatgttgcggcgatagcaagggcggtaaccttgttgctcatcacgttctaaattactcagagcatcctgatctccagacagatttaaataatggtataacgctttgtaatgtctgccacaaagctttccatgacaagtatgggtatacgaaaaacaacggtactcaacttgccgaatttatagacctcgctaagtcaactccgagccaagtgtcg

SEQ ID NO: 4161 - DNA, 369 bp, Bacillus licheniformis
atgagtgccgcaacagtcggagaaatacgtgcccgtttgattctcgacatgtccgattggtcgcgcagatcacagcaggctcggaacgatatgacgcaaatggggcgatcgtccgaaaatctttcgaaacagatgggactcgtacaaaaggcgtcgctggccgttggtggtgcggtagtcgccggcatcggagcgtccgttaagactgctgcagatttcgaagcggccatgtcgaacgtcaaggcgatcagcggcgcgaccggtcaggaattcgaagatttaaagaacatcgcgtctaagatgggcgctgaaacgaaatttacagcggtagaggcggcggagggccttcaatacctcgcgatggcttaa

SEQ ID NO: 4162 - DNA, 225 bp, Bacillus licheniformis
atggtaaaggtaaaaacaccgttcagaacggaagaggaagctaacaaagttgccaaagcgcttggggttattgactggatgaaagacgcagtgatagccggaaatttctcattcaccacagaacaagaggctgagatattggcagccacagaaactctaaatcaatatagccctcaagaaattctgcttttcatttattggacacaggtaggtactgaagaatga

SEQ ID NO: 4163 - DNA, 726 bp, Bacillus licheniformis
atgactaaattcgaagagatgcgagagagctacgaacaaatggaaactactcgaaaaagagcccgggatatcgtattagaagccaaaacgagctatcgtgaagagatatcccagataactaatgacaggatgttgtcaaatgaaggtaagcagatagagaaagaaaaactaaaccagagataccgggatatatttctgggcgagatgatgaagataaaagataaagctacggaggcggctgataaaacgattgatcttgcgacaaaaattctcctagaagacccagtgcagccggaagaaacagaggttgcaacgttcaatcaaaagctggcagacctgaaaacatcccttcttcttgcgccgaatccagagcgaggaatagagagcttgaaaatgttcgtggaggagactacagacccttatctggcaaaacagctacagtctgaattctatgaaatggccgcctctattgtaaaagacggatctgccgccgagaaagttaaattgcacgaaatttacgaacacatcaaagtgaaatctatgactgaggagcagaaacgtgctgaaacacttaaagggcttgctacagccgggaaaaacagcgacctgttactggatggtggcgtacaccataacgcgattaaggaattgcttgggccagagacggccatgtacgccaacaagccgcatcagtattttgacagaatgataaacgaacgaaactga

SEQ ID NO: 4164 - DNA, 390 bp, Bacillus licheniformis
atgttctgcgttgtaaccgaaaccgaatactacggaccatacggaccggccggtgtttcctatcttcgcgaaagcaaagacggggagcagcggtcttttttgttcccaggcgaggatgcgagcataaaactcgattgtgctggcggcagatacgaaatacgcaacatagacggcgaattgttgtttcttgcaacggtcaaaaacgtgtactcttctgaaattggatacgtccgggagcttttcaaccgtgcaatggattgcgctgtcgaatatggtgcaaaaaatgcaatgattgaatgcggaaaagacgtcatggacgcagatgaatttgaaaaagaattatcggccaatgagaaggccgcaagaactgaaaaacagggggaatattga

SEQ ID NO: 4165 - DNA, 195 bp, Bacillus licheniformis
ttgtatgacgtatttatctatgtgaaaccgagagaggcgatcacagttagagcagaaacgggagaaatcatccgccgatcatccggccgcattcgtgacctaaacgtctcgcgggcggtgctagaatgccgagcttacgaagaagaagcgaaggtcgtctatgaaaaggaggaaccggcatgttctgcgttgtaa

SEQ ID NO: 4166 - DNA, 219 bp, Bacillus licheniformis
atgacaaataatgatctgtggaagttcggcaaagggtggctatgcggttatacagaagacaaggaattgattcggcgcgtgaagcgatataaaaaggattggatcatcgctgctgactattttaaaaacgaccgtctcgtgggcgtccagtttaaaattccgattgaacagcgccgcgcagccgagagaatgttcgatgttcgcgtatcaagtttttaa

SEQ ID NO: 4167 - DNA, 927 bp, Bacillus licheniformis
atgggaagtctgctagatgaacaaagagcgtggaaagggctaacacctaggtcaaaaaaacgcttttttgacttgaaagagaacggaaagctcgaagatgggagaatttacgacagagaagggaacgacgtctcggattattttgaggtggcccctaaaacatcaggacgctcgaatgagggctatagaattacaaggaatgcgggagggcatgacgctgagaatggcggctttacgtgggctttttacaaaacgtgcaaatcgttcctagacgattatacaactgtcaaagaaccggaccttgcgcgcctgatgttcatcgctacatttgtcgggtttgagaatcagcaactttctcatgacaacggacgtaagatcgataagtcaggcctccgaaagattctcggcttgagtgctaataattttcgggatttttataagaggatgacggcggccgagattcttaaagaaaacgaagaaggcgttatcgagttgactccttttctattccatcgcggaaaagtccgaggaaaacctgcggaaacttcccgaataaagttataccgaaagacaatccgagagctatacgagaattatagcggccgggcggcaaaaaagttatctattgtctatatggttcttccgtttttgaatctgaaaacaaatatcatatgttttaatccagatgagacggacacggaacgacttaacaaaatgcacttagataaactagccgccttacttgattataaagattccaataaactaagacagaccttagagagtattaacctgaacggtaagccggttttttggttgccgcccgatcctaacgacaaaagaaaaaagatagtggttgtaaatcctaacgttgtttttggtggtccagcaaaagagttagactccgtaaaggtactgttcaaataa

SEQ ID NO: 4168 - DNA, 996 bp, Bacillus licheniformis
atgtcggagttcataaataaaatcagagtatttcaaagttcagatgataagagaattatccaagatattttagaaaaattcgatacaaacttcatggaagatccgagccgtcatagagttaaggacggtacaccgtctggaggaatacgaatcaatttaaaagatccggaatcctatatagcttactcaataaaagcaatatacaccttaatattgcggcatattaagtctgaaaaaccgattaccaagaacgaaacagattcttttaatcgatttttatcgatactaaaatatgatgtctgcatagatttcgaagcgaatgtagagtcgggcggcgattcatatgtaagctattttgaaataacggagagtctttttctacaactagaacctcttcttgatgaaattcttttacgcttagaggaattttgtagtttatcagataggttgtatttcgaagaattatacaacaagcataaacaagtgacagccgatatcgagcctcaaaaagagcaattaaaaaaagaaattcttgagattgcagagaaagctattgagtatgcattggtaagggttgatacttctcgaagtgaacgcgaaatagttaagtatattaacagagctattcgtagtaaattgattgatgccgaaataaaaaggaatggtatgcggcgcatacgtaggaaaatcaacggagatcttgagagttttagtttaaaaccatattttccagatgatgagtatctcatagagacaatattaggtttagattttagtgattgcagagatcaactaacaaaaggtgaaaatgagtttattgatcagattttggaggtagtcaaagaagataaagaagtggggaatgtcgccccatatacgtgtaacatctatggagagatcaggataataaaaaaatatatagcagaaaaactggatgtaagccatgaagttgttagaaaaagattatcgagaataagaaaaaaggtcacaaaatga

SEQ ID NO: 4169 - DNA, 486 bp, Bacillus licheniformis
atgatacagtatacagtttctaaagcggcagttaaaaaagcaacggcgcgcctcggcttatcaaaaacgcaggcacaaaacgtattaccgaagtatgctcaaggcgcttcgttcgtctggtcactcgattcaacaagcggcagccagtccgtttatgataatcctcgtgaacaggtgcgcctggttatcgcggaaaatgggacgattttagatgttttcccggccgactatgcgcttcagtctccgcacgctttgtctgatgatgctctgcaatcgttgaaagaagcgacacgtaacgccttaattgcgaaaagagacgcagttcatcgcaaatggtgcgaggtagaagtcgacttccattcgaatagctacgagattgctaggcggcggctggctttaataggggcgaccggtgacgaatacaaagacgcctggcccagctttgcgccgaaaacaaacggctgcacaacgaaaggtctgcgttga

SEQ ID NO: 4170 - DNA, 336 bp, Bacillus licheniformis
gtgatagatatatttcaaccgcaagcagtaaagctgcattatcacggggaaacgttcgatacaaaacaggaaatacacgaaatctctgacgcctggttaattgcggccgatgttattggaatgtattcggatgacgggctggtgttttacgatactggccgattagaaaaaaggagcgatggataccatctttacgaaaacaactaccctcggttttttatggtagacacgtcaaaggtcgacgcagacctccgcaaaattgatgtttctgagctcgcaaatatatcgtttgcagattttgttcgaattggtttttcactaggggagggtgcacga

SEQ ID NO: 4171 - DNA, 192 bp, Bacillus licheniformis
atgtttaatagaaaaacaattgtgggatggtggaacatctatcccgcaggctcagatgaatttataaattttaacccggaagaattcgccgcactcttgccgcaagtgtcccggagagcattcgcaggctgcgccgaaatcggcgtcacggcggcgcgagaactattcggtgaggaggttcggtcggcgtga

SEQ ID NO: 4172 - DNA, 339 bp, Bacillus licheniformis
atgagcgaattaacgtggattgacgcaggggagcaaccgaagaaaatgaccgtggatttcgtttttatttattcggataccggcgaagaaagccgcgaacaggttgaggtcttaaacgtaggtcgcgactatgtactttatatagacgaggagtggcttaatctttatcgactatatcacggtcctcacggtttagaaatcggtcagcgtgcggaattgatttacgatttaccgtacgtctctgactcggagatggatctcgaaactattgcgaatatgaatacgatcgagctgttggctcatcttggcggacaattaaaggaggtagttggagaatga

SEQ ID NO: 4173 - DNA, 339 bp, Bacillus licheniformis
ttgaataaccaaatttccaaccatcattgggaagtcctaaccgtggatttcgtcctgtacgatccgaaaacgggggccgtcgattatcgagagcctaccgaagtgttgcatcttggagccgatatcgcgctcgaagtgaacgaagcctatctcacgctttataggatgcgcggcaaagatggcgaatgggaaatcggcgaaaagtgcgaagtcctgtacgatcttccactcgaatttcctgtcggatttaatttcggcctaacaaccgaagagatcgcgaaaatgtctgtactcgatttcatgctatttttggcgcaaaaaaaggaggagacgctatga

SEQ ID NO: 4174 - DNA, 234 bp, Bacillus licheniformis
atgggttttagatttaatttgaacaatatactggacgagttaggaataactaagaacaaattagctgttgaggcaaaagtacggccggcaactattggggatctttgcgaggggaaaaccaaaagattagaacttgaaacaattgagaagatcttaaatgtattaaatgacatctcaccaactaagacatacacaatagatgacattattctttacaagtcggatatacaggat

SEQ ID NO: 4175 - DNA, 126 bp, Bacillus licheniformis
gtgttcaaggttaattctacatatgaggtgcatgcatcgattatcggaaaaggtacatacacagctcgcggccttgaaaaatggtcgactattgcggaagctattgagggcattaataaaaagtaa

SEQ ID NO: 4176 - DNA, 279 bp, Bacillus licheniformis
atgaagtatcagcatgatcaaaaagaaaaagagattgcttttgttaaagaagctcaagaacatatggagaagtttttgtatgaaaattacagaggtgttaaagatgttagtttttctgacgactactacataagtccgatggggggtatcagggtagaaggatatttaaacggagataaggaaagcaaattccaaggaatatatgatcctcctaataaggagatacagtcctataccatctatgatgatgagatcgaaaaaactaaaattgaaaaatag

SEQ ID NO: 4177 - DNA, 1101 bp, Bacillus licheniformis
atgaccaacgacataaaagtgccaaatgtatcagataaaacttatttcattcttaatagagaggcctacgaccgcgaacggttggacgatctaatgaattctggaaaaccaatacaaaccgaaaagaattcgtattggtacgtagaaaaaattaaaagggataacgatacaggactcgatgcggttgttgtatcgcagggcaaaaaaacaaaagacggcaagtgggtcaaatcagataatcccgaaaacgttgtcgtagccttcgcgggaacagatcctaagagccaattcttccaggatgttattgacgctgacggcgggaacgttgtaatgggaattgacccgaaaaagaaggaacactacatagtcgaaaaagatgcgaaagatacttctaaaacactcggaaaatataacggaactccttcacaagacgcaaggcttagcaccggcgattataaattggttacgaaaacatcgcaaatcgatcaagccgatcaacttgtgcgggaagttaaacaaaagtataaaggtacctcgacagttatttcaacaaccggacactcgcttggcggcgctgaggctgaatatagtgcggtcaacaataatgtctatgccgtcgcatttaacagcccctcaattgttaagctgcattctgaggagcaacaaaagaaaattaataacggcgagtatgaccgatccataaaatcgattatcaatccggatgacatggtcggggccggctggtggaacgaatatgaccggcacaacggaacaacaatttatacgaaggaccctgaattatcaaatgcggtgcgcgaggcgagaatgcagggcgatgtattccaacaaatcgggcaaaacgctgggtatttctttcagaccgcaatcttaggaatgcctgatacgcattgggtcgggagtaataatttcaccttcgacaaaaacggaaacgttcaaaatatagagggcgatgaactcgtttatgacaaaaatttaaaagcgatgctcccaccggaagttgcatccggaagtggcgcaattaaagtaacacccgaagttgccaagcagctcgcgcaaaaagtaaatgcttgcggacgatga

SEQ ID NO: 4178 - DNA, 665 bp, Bacillus licheniformis
atgaaacgggaagccgaaaacgcttatcaggaacacgacgccgagatcaacgacctgaagcacgatacctaccgtcaagtcggccacggtttatacgacaagctgacactcgaggatgtaaacaatacgctgaaaaacctggcgcagtcgtttgacaaaaaaggcaatccgctcttttacgatgttcatgccgaaaaagcgtacatcgcctcattaaaaaatacgatttcagatttagaagacatcagcgggtaccttgcgcagatcgcaaaagattttaaatcgaaagacaaaatgctggcaaattggcttaagctttaggagatgacataatggaaaatttcaataaactggcttcactcaacaacttaaactgagatcaagaagatacgctcttcatacggcgcaatcagcttcaaatgctgaaaacgggcatgagagtaacagccgcaactaagcttgaaggcattaaaacgacgctaagaccgaagtttaaaatagacgatatacaaaaagaaatgaacagcgtttattcatcgcttctctacagctttgaaggaaaagcgcaagaggcgctcgctcagcgaattagccaaagcgcccagcagcttattaacacggagcaggacggagagagctttgtgaacggatttaagacgagatag

SEQ ID NO: 4179 - DNA, 546 bp, Bacillus licheniformis
atggcaaacgaagtttttccgatgaagtcaaaacgcgattataacaagttcataaaggcgctcaagccggggcgcgatcagtggctggcgcaattaggtaccgcattcggcctgcgtattagcgacttgcggattcttaaaatcggacagcttcgcggccagaagtcgattaccctatgggagaagaaacgcaagaaaaagcgtgtgattacgttcagctcctccgttctcaaaatcgtttcccaaatcgaaggtgacgacgatgattacgtatttgccagccgtaaaggcggcgagccgatcagccgtgtccaggcttaccgcattctaagcgacgcagccaaacgagccggaatttacgataagatcggcggcatcggtacacatacgctgcgcaagacgtttgggtaccggctttatcagtccggcgtgccgctttcgcgaatcatggtgattcttaaccattcgagcgagcgcgatacggcaaagtacatcgggattactgcggaagagatagaggcggcatatgagtcgatcgaggtatag

SEQ ID NO: 4180 - DNA, 117 bp, Bacillus licheniformis
atgaaacccgattcgagtcgctttgattccgttgatccggtcggagggacattgcggattgatggcgttgacattccgtttaaggaaatcgtttgggttgcggtggaggacgtgtga

SEQ ID NO: 4181 - DNA, 726 bp, Bacillus licheniformis
atgtacacgaaagaatccgctaaaatggcgtcttttcgttctgtggacgagcttaacggcgccatccgcacgcatatataccgcaataaatccgccctaacgcctgccgctatcgaggttctgaaggtgttgtcgcgtcatgcctgcaaaacgccaggcgtcgcatatttgaagctgcaatcgatcgcggacttgatcggccgacaccgtaccacagttatccgggcaattaagcggctaatagcctgcggcatcatccgcaaggaaacgaaattacggccggtatccggtggcaacggcgctaatatttacgtgattttgccggctgataatggcgatgctactccgcaaatgcaaccccgctcgacagcggacaagcctacggaatcatcggctgaaacaccgaaaagtgcaagcgaatctgttatttctaaaagcgtaaataaattactacgtaatacgtatagtgcgttcaaatctgcggtcgaatcgtttgtaagcgatcggaagctgacgaataggctgtacggcatttaccttgcgcatacgtcgtttttaaaaggcgcttatgattccgatacgctcgaagaaatcggcctacatgcggtgcgtcagacgttcgttgcgacaaagcgcaagcacattcggaatcttgccggctattataacggtgtgctggaccgaatgttagaccgactatatgaaacccgattcgagtcgctttga

SEQ ID NO: 4182 - DNA, 990 bp, Bacillus licheniformis
gtggccgttttgaaacgaaggaaaggtgttaggaatcggcgcgagactgacggaatagtgaagagctttcgatcgacaaagaccgtacatgaagcgttaggtattgcctactcgctatacgaaacagagaactatcgggagcgaacgattaatgattaccggaattatttttccgagtttatggaaatgaccggcatcatgccgacggatagcataacggatgtgaccgaagatcatctgcgttcttacatctcaacgatgttaaagaaacgcaatctatcgccagtaaccgtaaatatccgtttaggcggaattaaatcgatcttcagtcgcttaactgaacgtgggctaataaacgagagtccggcgcaaagagtgacgaagctgcgcgtcgatgaaacatcggtaaaaatgctcacggacagccaggtgcggcgttttttcaaaatgatcgataaaactacgttctcaggcttccgtgattttgtggcgtttttgctttcgctaaaatgcggactccgatcgaacgagcttgaagggcttgagccggaagatctcgatttcgacaaccttgttattatgttgcctggcgccattaataagaaccgaaaaaatagaacggtgccgatgacggaacaagtcgcggaagaattgaagcagttacttacggaaatgacggagtattttgggacttttacgcatgtattcgttaatcagtacggagaaaagctcgctaaagattctttgagaaaaagggctgacaaatacggggaaatggcggatctaaagaaagaatgccggccaagcattcacagcctgcgacacactttcgcgatcaactacctaagaaatggcggcgatattcgttccttacaaaaaattatggggcataaggatctcgcctctacagaaatttatctcgactatgttgacgaaatcgtgatcgagcagtatagaaaagcgaacaaaaacgatgagttgaaggtttaa

SEQ ID NO: 4183 - DNA, 318 bp, Bacillus licheniformis
atgggttatgtgaacttggacaagagtaacctgacagatcagcagaggcttgtcgtggcttcagagctgcaaaataagaagaaatcgaagctgattgtatttcttttatggtggtttctcggaggcgttgccgctcacagattttatctggacgagagaaaaggctacgctgtagccatgttgcttctcggctggattacattattcatttggccttttattgacggcattatctgccttgtcaaaacaacggacgaagtaaatgaagaaatcgaacaaaagattatagcttccgtattatctaaacctgcatcatga

SEQ ID NO: 4184 - DNA, 597 bp, Bacillus licheniformis
atgaatttaatacctacagtcattgaacagacgaaccgcggggaaagagcgtatgacatttactcacgcttgttgaaagaccgtatcattatgctgggatcagcaatcgatgacaatgttgcgaactccatcgtatctcagcttctattccttgaagccgaagatccagaaaaagatatcagcatctatatcaacagccctggcggctccatcacagccggtatggcgatttatgacaccatgcagtttattaaaccgcaagtctccacgatttgtacgggaatggcggcatccatgggtgcgttccttcttgcagccggcgagaaagggaagcgctacgctcttccaaacagtgaagtcatgatccaccagccgcttggcggagcgcagggtcaggcgactgaaattgaaattgccgcgaaacgcattctttcattgcgcgacaagctgaacaaaatccttgcagagcgcactgggcagccgcttgaagtaatcgagcgcgatacagaccgcgacaacttcaaaacggctgaagaagcaaaagaatacggcctgattgataaagtgcttacacgcaatatcgacgcacagaagtaa

SEQ ID NO: 4185 - DNA, 576 bp, Bacillus licheniformis
gtgaaaacggtatgcgtatattcaggatcaaatatgggggcggacccggagtacaagaagaaagctgcagagcttggcgtttatattgccgagaaggggcttcgccttgtttacggaggatcgagaatgggattgatgggcgtgattgcggataccgtattggaaaacggcggggaagtcgtcggcgttatgccgaaaggcctttttacaggggaaatcgttcatcagcagttgacggagctgatcgaagtgagcggcatgcatgagcgcaaagcgaaaatgagtgaattagctgacggctttatcgcgatgcccggaggcttcggcacgtttgaagagctgtttgaagtgctctgctgggcgcagatcggcatccatcaaaagccgatcggactttacaatgtgaacggctattttgaaccccttcttaaaatgctcgaatacagcgttcaagaaggcttttcgaacaaatcgcaccttgagctgattcatgcttcggcaagccctgcggagttgatcgggaacatgaatgattatcgctaccctgtcctcgagaaaaagtggaaggatttatag

SEQ ID NO: 4186 - DNA, 336 bp, Bacillus licheniformis
atgacaatcacagacgcggagcaatggacaaaggcattttacagggaaagaggatggagcgaatacggacctttcatcaggatgggatttttaatggaagaggctggcgaactggcgagagcggttagagcatacgaaatcggaagggaccgtcctgacgaagcaaaacggccggctgctgaactgaaaaaagaactgatcgaagaaatgggcgatgtgatggggaatttgatcatgcttgccggcatatacggtgtttcattggaagacatgatggatgcccatcgctgcaaactgacggaacgatttgcaggagagcatcatgaagatcaatga

SEQ ID NO: 4187 - DNA, 978 bp, Bacillus licheniformis
atgaagatcaatgaccgcctttacggggaggcagatttggagcctgtgctgacagacctcattcgttcaaaagccgttcagcgtctgaaagggattcatcaggacggggcctcttttctcgtcaatcccgcatggaacatcagccgctgtgagcacagcatcggagttatgcttttgatccgcaggcttggcggaagcctggaagagcaaattgcaggtttgctccacgatgtttcccatacggcattttcccatgtggctgatgatgtatttaacatggaaaacgaagattaccatgaacagatgtttcggcaatgggtcaagcaatctgatatctccgggattctgcatacatacggattccatgatgaagacatcttatatgacgagcaaaaatggacgctgctggagcagccggctccttcattatgtgcggatcgcatcgattacacgcttcgcgactctttagcctatggatttggcgatccggtagagattggacgatttttagaaactggattgaccgttgctgaaggcgaaatctgctgcacttcggcagagcatgccgaatggttcgcccgcctttactatcaagaagtgattgacttctttatgaatcccctcaatatatatgcgctctgtaccctcagccaaatgctgaaagaggcgcttgacatgcgtgttattgcggggcgcgattttttcaaaaccgacacggaactgcttgcgatgctaaagcaaaaagcgcgcttccgggaaacgctggtaaagctcagcacagcgagcaagcgcgttaaacaaggcgacgaaggcgattttacttttcatcaaacattaaaggtgagatggatcgatccaaaagtcgctgttaacggaagaaaaatccccgcctccacactttcaaagaacgtccttctgaagaaagaaacggcaatagccgccatgaaaaaaggcgcatatgtaaaagcagcccaataa

SEQ ID NO: 4188 - DNA, 1620 bp, Bacillus licheniformis
atgttacgattttcaggcagatttgaaggatacagccttaagcggtttcaaaaagatattgtagcaggaatggtcgttggagtcgtcgcgattccgcttggcatggcttttgctatagcctcgggggtgaaaccggaacacggtctttacacagtgattgtcgccggtattttgatttcgcttctcggcgggtcgaaataccagattggcggaccgacaggggcctttgtcccgatcctgttcgctattgtgctccaatacggatttgagaatctgctgattgccggttttatggccggagtgattctggtcatattagggctgctaaaactcggcaagatcatcaaatttattccgcggccggtgatcatcggatttacggccggaatcgcggtgattattttcaccggagaaatcgccaagtttttaggcttgagaaatgtcgagaagcatgagagtttttatatgaatatgagagaggttgtcatcaacctgaatacgctcagcttttacagcattttgacggctgtcgtatcgctcttctttgtgctgtttacgccaaaggttctgccgaaagtgccgggagcgctcgcaggcttgcttgtatcaacggtcatggccacgatgctgtttcccgaacaggtggtgacgatcggatcagcttacggcgaaattccgcgcagcttgccgagctttcaatttcctgagttgtcattggaaaaaatcatttacctgatgcctcccgctcttgcgattgcaatgctcggaggaatcgaatcgctgctttccgcgatggtggcagacaatatgaaggggacaaggcatgacagcaataaagaacttgtcggccaaggaattgcgaacatcgccgcaccgctgttcggcggtattccggcgacaggtgcgattgcccgtacggcgaccaatattaaaacgggcgctgcttctccgatttcaggtatcgtacacggtgtgttcgttttattggttctgcttttgtttgcgccatacgcttcccttatcccgcttgcaagcatgtcgccgattttgatggtggttgcttggaatatgagtgagcggaaagagtttataaatattttgaaaattagaaattcggactctgccgtgcttgtcgtcacatttcttttaaccgtttggcaggatcttgtgtttggggtggcggccgggatcctgctggcgatcatcacctttatcgccagaatgagcaagtcgttccgcattaaaaaagatgtgtctgaatcgatcgtccagtcggcagctgcagcggaagaaaagcattttcaacgctctgtcagcatctattcggttgaaggcccgctgtttttcggctcatcgaattcattggaggattcaattttggacaaaggccacccgccaaaactcctcatcctgctgatgaataaagtagactacatggactcttccgcagaaggcagcctgatgacgatcgtcaaccgtgtccaccagcaaaacgggaaagtgatgatcgtgggtcttcagcagcagccgcgtgagcttcttcataaaacagggctgtttcataagatcggcaaaaagcattttgtcgacaggcctgaacaaatatttgacgtgacataa

SEQ ID NO: 4189 - DNA, 591 bp, Bacillus licheniformis
atggcgattttaacttccattttgaagcacaatcagtcttttgtagaggaaaaggggtacgagttttacgaaacgacgaaatttcctgagaaaaaacttgtgattttgacatgcatggacacgcgtttattagaactgctccatcatgcaatgggtttaaaaaatggagacgcaaaaatcattaagaatgcgggagccgttgtttctcacccttttggaagcgtcatgcgcagcattcttgtggctgtctatgagctgcaggctgaagaagtctgcgtgatcggccaccatgagtgcggaatggcaagcctgaacgcttcatctatccttcaaaaggccaaacagcggggtgtcgatgatggctgtctcgaactcctgcagcattcgggcatcgatttggacacatggatgacgggctttgacagcgttgaagacagcgtcagccacagtgtgaacatgatccggaaacatccgctcttgtcttcagacgttccggtgcacggattggtgattgatccaaagaccggccgtttggatgttgtggaagatggttattcacgtgaagacgtttcgctttcggaagtgcgatga

SEQ ID NO: 4190 - DNA, 972 bp, Bacillus licheniformis
atgaaaccgtttgtatatgtcacaaaaccggtcccaaaagaaatcgaagagatgctcgctgaacattgcgaatatgaaatttggacttcgcgcgagcgtattcccagaacgaccctgctcgagaaaatcaaggaagcggacggccttttgacctcaggaacaaaaattgaccgtgaattattatccaatgcactgaagttaaaaatcgtcagcaacaattccgtcggctatgacaactttgatattgaagcaatgaaagaaaaatcggtcatcggcacccatacgccatatattcttgacgacacagtcgcagaccttgctttcggtctgatcctttcctcagctcggcgaatcgccgagctcgaccgctacgtccgcgagggaaaatggaccaaatcagaggacgatgaaagcttgttcggatctgatgtccatcaccggacgctcggcatcatcggaatgggacgaatcggcgaacaagtcgccaaacgggcggccttgggttttgatatggaagtgctctattacagccgcagccgcaaacccgatacagagaaaaaaaccggcgcggtttatacgggctttcatgagctgttggagcgctcggatttcattgttctggtcacaccgctcacggatgagacataccgcctcatcggcgaagcagaattcaaaaaaatgaaaccgtcgtccattttcatcaacatctcccgcggtaaaacagttgacgaacaagcgttgattcaagcgctgaaagaaggatggattaaaggagccggacttgatgtatttgaaaaagagccgattgaaaaagacaatccgctcctaagcctttccaatgtaacccttgttccccacattggatcatccacccatgtcacacacgtcaacatgctgaaaagcgccgttcaaaacctgattgacggtcttcagggcaaacggccaaaagatatagtcaaagaactgagataa

SEQ ID NO: 4191 - DNA, 600 bp, Bacillus licheniformis
atggaacaaaacagcaaaattattcagccaagcattttatattacggaacaccagtcattttactcagcacaatgaacgaagacggttccacgaatctcagcccgctgtcatcttcttgggcgctcggggattcgatcgtactcggtattggaaccgaaggtaaagcattggaaaatttagagaggcatgctggatgcgttatcaatgtgccggattcatctttatggagaaatgtagaacggctggcttcctataccggcaaacgattcgttccggaagaaaaaaagcggctcggctttacttaccttaaggagaaatttgaagccggcggatttacggccgcggattccttggcagtgaaacctgaaagagtcgccgattgcccgcttcaaattgaagcggaagctgtcaacattcgcattccggaacattccccgtattttgccgtcattgaaacaaaagtgcttcatgtgcacgcacatgaagcgattttaaaaggggaacaccacatcgatcctcaaaaatgggaacctttgatttatcttttcagacactattttggcttaggaggagagcttggcaaaacgttccgcgcctga

SEQ ID NO: 4192 - DNA, 696 bp, Bacillus licheniformis
atgaacgtgaatccaaatatcgccgaggtcgccaagcttgtcaccgatccgtcgcgggcggcgattttaaccgcattgcttgatgaccggtattatacggctaccgagctggccggatatgcgggaatcaagcagcagacagcaagctttcacctttccaagctgcttgacgccgagatgctgacatgcaggaagcaaggacgccaccgctattacaggctcaaaaacggaaagattgcacaatcgctggagaccctgcttaacatagcgccccctgcggaaattcgctctttccggcagtcagctgaagatcgggcggtcagaaaagcgcgcacatgctatgatcacctggctggatcgctcggcgtcacacttgtggatcggctcgtggagatgggcgtattgaaagaagaagagacggcttttacagtgactgaagaaggggaagcatttttgaaagagcttggcatcgatgtcagggaagtcaaaaagaaacggcgctctttttgccataaatgcctggattggagtgaaagacggcatcacattgccggcgccttaggctccgcattgctcgatgccttcatccgcatgggctggatcgagcggcgcccgcatacacgggccgttgcagtcacgcccgccggcgcaaaggaactttaccgcctatttcatatttccattgaaaagaactga

SEQ ID NO: 4193 - DNA, 456 bp, Bacillus licheniformis
gtgaaaaaaatattatcaactcttgcgcttgggtttgttctcgcgctgggctttctggcggggaacctttttacaagctcagctgaagggccgcaggcagaaaaaggcggcaccgttcagtcaaatgaagtcatcaatacatttgaaggtgttgccgactatattgtgaaatacggcaggctgcctgacaacttcatcacaaaagccgaggcgtcaaaattaggctgggatccgcaaaaaggcaatctggcagaagtatcgcctggaaaaagcatcggcggcgatatctttcaaaacagggaaaagctgcttccagatgcatccggacgcgtatggagagaagccgacatcaactatacatcgggattccgggggtcagaccggatcgtctattctaacgacagactggtttataaaacgactgaccactataaaacgtttacgagaatgagatga

SEQ ID NO: 4194 - DNA, 276 bp, Bacillus licheniformis
atgaaacaagtcactttaaaaggagaaaagatcagaagtgtatcagatcttcacaaagaattaaaagaacagctggagcttcctgactactatggcgaaaatcttgatgcgctgtgggattgtctgaccggctgggtcggcatgcctttgctgatagagtggaagaatgtcgagaaaagccggatttacttgggcgatcaagccgaggcatatttgcagctttttcgcgaagccgaagaaacactggacggctttcagctgaaaacagaaggatga

SEQ ID NO: 4195 - DNA, 759 bp, Bacillus licheniformis
atgacgacgatgctcgattcgctgtttaagaggattggatacaagccaggtcagcaggtgacatttgccgacttgcccgagtttttatcgctgctggctttgcagtttccatttgaaaatggcgcggttttaagaaacgaacggatttcgatgacgaaaacagagctgacggaagccttgctgaacaataaaaggggcggtttatgctatgatttgaacgcttttctttactatgtgctgacagagctcggcttttccgttcacatggtccgcggaacggtatttaatgcaaaagagcaggcgtgggcgctgacgggaacgcatgtcgccgtaattctgcgggaaggtgatgaaacctatctgctggacactggattcggcatcaacctgccgcttgcacccgttccgttctcaggtgaacctgtcccctcaaaaacaggagcttaccgtgtcagggaaacaaagacggataaaggagattaccttcttgaaatggataagggagatgggtggcagatcggctatgcattttcgctgacgccaatcgatgaagctgtgcttacatgcgtgcgggatgcaattttcgatgagaaggcgtcgccttttaataaaaacccgctcgcttccaagctgataaaggacggaaagttaattttgacgaaggatcacttcacaaagcagacagggggcggtttgacgaaagaggatgtgaatgcaggagatttccaaaccattttcgttcattcattttttgactga

SEQ ID NO: 4196 - DNA, 270 bp, Bacillus licheniformis
atggttcaacaaaaagtggaagttcttttaaaaacagggcttcaagcgcgcccagcggcattgtttgttcaagaagccaaccgttttcaatcagatatttttctggaaaagggagataaaaaagtgaatgccaaaagcatcatggggctgatgagccttgctgtcagctccggatcggaagtcacgctgatcgctgacggatccgatgaacaagatgcccttgatgcactgactgcatatgttcaagagaaagaagctaaacctttatga

SEQ ID NO: 4197 - DNA, 951 bp, Bacillus licheniformis
atgtcatttgcatcggaaacgaaaaaagaacttacaaaccttgaagtaaaggattgctgcgcgaaagcagagctctctgccctcattcggatgaacggttcattgtctttctcaaaccgaaaagtggttctcgacgtccagaccgagaacgcggccatcgccagaagaatttacacattgctgaagaaacaatacgatgtttccgttgaactgctcgttcgaaagaaaatgagactgaaaaaaaacaatgtctacatcgtacgcctgatcgaaaatgccaagccgattctcgaggacttgaaaatactcggagacaactttgtcattgccagaaacatctccgaagacttagtcaaaaaacgatgctgcaaacggtcttatatgagaggggcatttttagccgggggttctgtcaacaatcccgagacatcttcttaccacctcgagattttttcgctgtacaaagagcataatgattcattgtgcaggctcatgaatcagttccatttaaacagcaaaacgcttgagcggaaaaagggatacatcacgtatctgaaggaagccgaaaaaatcaccgagtttttgaatgtgatcggcgcgcataattcgctgctccgctttgaagacgtccggatcgtgcgcgatatgagaaactcggtcaaccggctcgtcaattgcgagaccgccaatttaaacaaaacgatcggcgcttctctgcggcaggtggaaaacatcaagctgatcgacgaaagaatcgggcttgatgcgctgccggaaaagctgagggaaatcgctcagctccgcattgattatcaggaagtaacattaaaggaactcggggaaatggtgtcgagcggaaaaatcagcaaatcgggcatcaaccaccgacttaggaaactggatgaaatagctgagcagctgcgttcaggacaatctgtctctttaaaatag

SEQ ID NO: 4198 - DNA, 954 bp, Bacillus licheniformis
atggcagatcagaaaaaaatcgcaatctttggcggaggaactggcctttcggtactgctcagaggattgaagcagcagccggtagacatcacggcgattgtgacagtcgcagatgacggcggaagctcggggaggctgcgcgacgagctgaaaattcccccgccgggggacgtcagaaatgtcctcgctgcactgtctgacgtcgaaccgcttgttgaagacctgttccagcaccgcttctctaaaggcggcgatttaatcggccattcattgggaaatttgattttggcggcgatgacgaatataaccggtgatttctttcacgccgtcactgaaatgagcaaagtcttaaatgtgagaggaagggttctgcccgcggccaataccagcgttgtccttcatgcggaaatggatgacggacagatcatatcaggggaatcgacgattccgtcttacgggaagcggattaaacgggtgtttttaacccctgaaaaaatcgaacccgttccggaaacgattgacgtgatccgcggcgccgacctgattattctcggccccggaagcctgtatacgagcatcttgccgaaccttctcgttccgaagataagggaagagatattaaacgccccggcaaaaaaagtttatatttgcaatgtaatgacccagccgggagaaacgctgtactacagtgcggcagaccatgtaaaagcgcttaaccagcatatgggcggtccgtttatcgatacgatcctcgtcaacaatgaggaaatcccggacgacattcgggaacgctatgcgaaggagcaggcacagcccgtccagtttaatattgatgatctgtctgcgatggggcttgaggtcatcaaagatcagattgtgacatacgagaatggcgtgatccgtcatgatacacataaagtcgcttcgctacttgttgatttgttaaaagaatag

SEQ ID NO: 4199 - DNA, 888 bp, Bacillus licheniformis
atgaacgcgaatggaggccatgatatacagcttgtgatcataaccggaatgtcaggggcaggaaaaacagtggcgattcaaagctttgaagatctcggttttttctgtgtcgataatctgccgccatctttgctgccgaaatttttggagctgatgaaggaatcaagttcaaaaatgagcaaagtcgcccttgttatggatttgcgcggccgcgagttttttgacagcctgattgaagcgcttgatgaaattggggaaacatcctggattaccccgcgaattttatttttagatgccaaggattcggttctcgtttcaagatataaagagacaagaagatcccatccccttgcgacaacgggcctgccgcttgagggcatccaaacggagcgggagcttctcgaagagctgaaaggccgttctcaaatcatctatgatacatccgatatgaagccgaaagacctgcgcgaaaaaatcgtccagcattttgcggcagatcacggacatacctttactgtgaatgtgatgtcattcgggtttaaatacggattgccgatcgacgctgatctagtgttcgacgtaaggttccttcccaatccgtactatatcgacagcatgaggccgctgacggggaaagaccaggaagtatcttcatatgtgatgaaatggaacgaaacgcaaaagtttcttgaaaaattgaccgagctgctgagctttatgcttccgtcatacaagcgagaaggaaaaagccagcttgtcatcgcgattggctgcaccggcggacagcatcgttctgtgacgctggctgaataccttgccgattattttaaaaaggactactatactcatgttactcaccgggacatcgagaagaaaagcagaaaatag

SEQ ID NO: 4200 - DNA, 465 bp, Bacillus licheniformis
ttgcaaagagtgacgaattgtgtgctgacttcaggtgataaagtcctgttgctgcaaaagcccagacgaggctggtgggtggcccccggcggcaaaatggaaagcggggaaaccgtcagggacgccgttatcagggaataccgcgaagagacgggcctgtatgtgctgaacccgcagctgaaaggaatattcacctttatcataaaggaaaatgatcaggttgtatctgaatggatgatgttcacattcgtcgccgatcattatacaggcaagcatgtagaagaatcagaagaaggcatcatcaggtggcatcaggcgggggacgtcggtagcttgccgatggcgccgggcgacgtccatattcttgattttatgctgaaaggcaaaggactgcttcacggcacctttacttatacgcctgactttgaattgctgtcctatcgcctcgacccgcaaggcgaataa

SEQ ID NO: 4201 - DNA, 189 bp, Bacillus licheniformis
ttgaaatttgaacaacttgtgaaatttgtaaaaaattctctttgcaggaaaataagacaaaaaaaggacacggataagatcatccgtgccaataaaattcattataaaagggggtcaattactataccaatcataacgaataattgtttcactggtgttacaggccggttaaatcatgatgacgattaa

SEQ ID NO: 4202 - DNA, 951 bp, Bacillus licheniformis
gtgtcagaagaaaaaatgtatgacgtcattattataggagcaggtcctgcgggaatgacggcagccgtttatacgtcaagggcgaacctgtcgactttgatggttgaaagaggcgttccgggcggacagatggccaatacggaggatgttgaaaactatccgggatttgaaagcattctgggacccgagctttcaaataaaatgtttgaacatgcgaaaaagttcggcgctgagtatgcgtacggcgatattaaagaagtcgtcgatgaaggagactataagatcgtcaaagcgggatcaaaagaatttaaagcgcgcgcggtcatcatcacagcaggcgccgaatataagaagctcggcgtacctggcgaaaaagagcttggcggccgcggcgtttcttattgtgcggtttgtgacggcgccttctttaaaaacaaagagctggtcgttgtcggaggaggagactccgctgttgaagaaggcgtgtacttaacccgtttcgcttcgaaagtaacaatcgtccatcgccgcgataagctgagagcgcaaagcattcttcaggcgcgcgcgtttgacaacgaaaaagtcgactttctctggaataagacggtcaaggaaattcatgaacatgacggaaaagtcggcaaagtgacactggtcgatacggtcacaggcgaagaagaagagttccggactgacggcgtctttatctacatcggtatgctcccgctttcagagcctttcaaaaacctcggcattacaaatgaagagggctacatcgtgacaaatgaacagatggaaacaaaagtcgaaggcatttttgctgcgggagacattcgcgagaaaacccttcgccaaatcgtaacggcaacaggggacggaagcattgccgcacagagcgttcagcactatatcgaagagctgaaagagaaagaaaaggctgtaaaataa

SEQ ID NO: 4203 - DNA, 1461 bp, Bacillus licheniformis
gtgggaaagtacacttctgaacatcataaagattcgagaattgtccagctgttccaagatgggcaatatttttatcataaagggctcaaagcatacagagagcgaaatttatcccgcgcgagcaagctcatacagagagcgatttttcttgaacctgaaaacacgggaatgctgtcccaacttgcggttatttatacggaaatgggcttttatcagcaatcaaacgaacttttggactttatcctgaagaacatcaacgaaaaaatgactgaatgctactattttaaagcgaacaactatgcgcacctcggtctttttcaagaggcctataaagcggcggagacttatttaaaggaagatccggacggcgagttcagcgaggaaaatgcggagctgcttgatttattggatatgggagaggaagatcagggctattcgcagttcgatcaggacgacctgattctgaaacaggatcgggccaaatcactgctggaaaatggacagcttcaggaatcgatcgcgatgcttgaagaaattatttccgattaccctgagttttggtcggcttataacaatcttgcactcgcatacttttatgccggggacgttcagaaagccaaaacgacggtttttacggtcttggaaaaaagtcatggaaacctgcatgcgctttgcaatcttcttattttttatcactatgaacgacgggacgataaggtcgaggcgctttccgaacagctttcaaatatttatccgatgctttttgagcaaaggtataagctcggtgccacgctagcccttgtcggccgatacgatctcgggtttaaatggctgaaatcactctaccgcatgggatttgaaggggatgagaccttttattactggctcgcctgctcggcttattacacgggccgcgttcaatttgcccggtctgtatggaaaaagatgcaggaagagtatccggatgacgcccgcatggagccgtggaaagaacggaaggaaaagagacctgtccagcgaccgctcgaggagcgccttgccgcatattatatcagcggaagaaaaggggaaaaagcccagctgaaagcggtgcttgattcacagatggcaaaaacgccgtttgaagatcagtttgtcagacttgtgctttacggggaaagcggtgcagccgttgattcaaaagacgcgctacttgcttacaggactgcaaaagcgattgaacaagcggatcagtcggcgatggagcaggaggccatgtgcttttggattttccatgtcattcagcagatcagggcttacgggcttcagctgaaaaatgccggcgggcttgcggcagcgatctattacatttggaagacggagcatcaggagcgtttgacaaaagccgaaaccgctaaaattttccaaatatcgcccagaacgctttcaaagtatgaacgtacattaaaagagcatctatag

SEQ ID NO: 4204 - DNA, 479 bp, Bacillus licheniformis
gtgaaaaaaggcggatcaatagaattgacgcattactcagaagaacattcagctgcgcttctcgaatttgagcttcctgaagaacagcatcgatttaccgctcttccgaaagaggctttaaaacggacggacggccagtttccaatcgtaattttaagcgaaggcgagcctgtcggattttttatcctccatgcgaccgagagggtaaaagactattcggacaacctggacgccatgctgttaacggcgctatccggcgacagaaagcaccagggaaaggttttgcaaaagaaggaatgctcaaacttccagagtttatctccaaggagttcacccattgtcatgaagtcgtgctggttgtgaatgtgaaaaacaccgcggcccagcacctgtatgttaaagccgggtttgccggcacaggggaaagaaaaacagggccgatcggagagcaaatcgtgatgaaattgaacatcaaatag

SEQ ID NO: 4205 - DNA, 633 bp, Bacillus licheniformis
atgatcaaggcagacgagttgacatttaatgaagccggcttgatcccggcgattgtccaggatgcagcgagcaaagaagtgctgacacttgcttatatgaataaagaatcgtttgaaaaaacgctggaaacgaaggagacatggtttttcagcagatcgcgcggagagctctggcataagggagcgacgtcgggtaacattcagcgtgtgaaagacatcaggcttgactgtgatcaagatgcgctcatcgtgcttgttgaaccggcggggccggcctgtcataaaggaagctacagctgtttctcgcccggcgaacatatcagacagactgatggcggccgctttgacatcatcaatgaacttgaaaccgtcattgccaaacggcaggctgaaatgcctgaaggcgcatatacaacatatttgttccgtgaaggcgttgataagattttgaagaaagttggcgaagaagcggcggaagtcatcatcgctgcaaaaaaccgtgatcctgaagaactgaaatgggaggcggctgaccttctttaccatctgctcgttttgctgagggagcagtcccttccgcttgatgatgtgcttggcgtcttgaaagagcgccatgaaggatctgaatcataa

SEQ ID NO: 4206 - DNA, 759 bp, Bacillus licheniformis
gtgatcacaaaacgaatcatcccgtgtttggacgtaaaagatggacgcgttgtcaaaggtgtacaatttgttgaattgaaagatgccggcgacccggttgaactggctgaagtatatgatcatgaaggcgcagatgagcttgtttttctcgatatctcggcttcccacgaggggagaaaaacgatggttgatgtcgttgaaagagtggcggccaagctggcgatcccgtttaccgtcggcggcggcatcaatcgtttggatgatatgaaaacgatactgcgggccggagccgacaaagtttccgtcaatacggctgccgttctccggccggaactgataacggaaggcgccgactttttcggctctcaatgcattgtcgtcgcgattgatgcaaaatacgatccagaagctgatctgtactatgtttatacacacggcggtcggaaaaaaacgaaccttgaggccgtttcctgggcgaaggaagccgttcggcggggagcaggtgaaatcctgctgacaagcatggattcagacggagaaaagaacggatttgactgcaggctgacaaagcttgtgtcagaagccgtttcagtcccggtcattgcatccggaggcgcagggcgtgcggaccacatgtatgatgcgtttgcagaaggccgggcggacgcggctcttgccgcatctatctttcattacaaagaaacatctgtaaaagaagtaaaagcttatttaaaagagcgcggggtgaatgtaagatga

SEQ ID NO: 4207 - DNA, 738 bp, Bacillus licheniformis
atgagcgagtttactgtatatcctgccattgacataagaaacggcaagtgcgtcaggctcatccagggagattacgaaaaagaaacgatttacggtcattcccctctggagatggcctcacggtttgctgaagagggggcaagctggattcatcttgtcgatttggacggcgcaagagaaggcaaaaaagtgaacggcggccacgtcataagcattgctgataagcttgacgttaaagtgcaagtcggcggcggcatcaggaccgaaaaagacgtgtatgactacttgtcgcaaggcgttgagagggtgatcctaggcagctctgccgtatcaaataccgagtttgtcaaaaaaatgctgaaggcctacggagggcacatcgcaatcggtcttgacgcaagagacggatttgtttcgactgaagggtggcttgagacctcttccgttagagcggaagagcttggccgcgagcttgcaaatgaaggtgcagaagtttttatcttcactgacattgcgactgacggtatgctgtcaggacctaatatcaacagtacagtggagcttgccagggcaaccggcaaacaagtcattgcctccggcggcgtcagttctctcgccgatcttgaggcgctcgcttcccgcgcttcggaaggcgtctctggcgctattgtcggaaaagctctttataccaaccaatttaccgtggctgaagcgcttgaaagggtggcggcaaagtga

SEQ ID NO: 4208 - DNA, 639 bp, Bacillus licheniformis
atgatcggtgtcatagattacggaatgggaaacctgtacagcgtttctaaagcgcttgaacggattgatgccccttattttgtgtccgagcatccggatgaactgaagagagcggacagctatatccttccgggagtcggcgcttttcgggatgcaatggagattttaaccgagaacggcctgaaaacatttattcaagctgccgcaaacgaaggaaaacctcttctcggcatatgcctcggcatgcagcttttgtttgaagaaagcgaagaacacggggcgtcagaagggctcggcctgttgaaaggaaaagtcgttaaactgaaagactgtgatcaagcgggaaatcgcttaaaagtgcctcacatgggctggaatcttctcaaagtccaccgcgactcgccgcttttgccaaaagcgaaagaaggattcgcgtatttcgttcattcgtattatgtcagcggaatcgaagaggaagctttgcttgcaagcgccgaatacggtgtgtgtgtacccgctgtcgtcggtcttggcaatgtatacggggcccagttccatccggaaaagagcagtacggtcggcatgttgatcttagagcggttcaagcagtttacacaagaacagaaggtgaaaaaatga

SEQ ID NO: 4209 - DNA, 585 bp, Bacillus licheniformis
atgagaaaagccgaacgggcaagaaaaaccaatgaaactgatattaaattatcctttcatattgacggagaaggaaaagcggatattcaaacggatgtcccgtttatgacacatatgcttgatttatttacaaaacacgggcagtttgacctttcaattgaagcgaaaggcgatgttgaaatagacgaccaccatacgacggaagatatcggaatttgtctcggacaggcgcttttggaagcgctcggagataaacaaggaatcaaacgctacggttcgagcatggtgccgatggatgaagcgctcgcccaggttgcgattgatctgagcaacaggccgcacctcgagttcagagctgaattcccaagcaggaaaatcggaacatttgatacagagcttgtccatgaatttttgtggaagtttgcactggaagcgcgaatgaatctgcatgtcatcgttcattacggtacgaacacacaccatatgatcgaggccatttttaaagcgctgggacgtgcgcttgatgaagcggcattgatcgatccgcgggtcaagggaattccatcaacgaaaggaatgctgtaa

SEQ ID NO: 4210 - DNA, 1281 bp, Bacillus licheniformis
atgaagatcaaatccatcagcggaaatacgtcggtttcactaaaacgctctattgacgccggaacggaggaacaaagaaaagcagtccgcggcattatcgaagaagtgaaaaagaacggaaatgcagctgtttccgcattcacaagacaatttgacggagcggatgtggccggctttcgcgtttccgaagaggaaatcaaggaagcatacagcgcgctcgaagaacgtgatctcgagattattcaggcggcgattttcaacattaaagaatatcatgagcgtcagctcgcaacatcttggttttaccaccgcaaggacggaacgatgctcggccaaaaaattacgccgcttgattcagcgggggtgtatgtgcccggcggaacggctgcttacccatcatccgttctgatgaatgtcattccggcgcttgttgcaggcgtcgaccgcattgtccttgcctcacctccgggaaaagacggtaaattgtcggcgggagtgctggctgctgctgcggagcttggcgtcacagagatttacaaaatgggcggtgcccaagcgattgccgcattggcttacggaacggaaacgattacccccgtcgataaaattacgggacccggaaatatttacgtcgccttggctaaacgggaagtattcggccaggttgatatcgatatgatcgcgggtccaagtgaaatcgccatactcgctgacagtacggcaaactaccgggaaatcgccgcagatctactttcacaggctgaacacgatgcgatggcatcgagcattcttgtcaccgattcagagacgcttgccgaatccgttttaaaagaggtttacagacagctcgaacatcttccgagaaaagagattgcacggcagtcgattgacaactatggcctgatctatgttacagagacgatgaatgaagcagtttccgtcatcaatgagctcgctcctgaacatttggaaattttaacagttcaacccgatgcgctgctgggacagatcaaacatgcgggcgccattttcctgggccgctacagttcagagccggtgggcgattattttgcaggccctaatcatgtcctgccgactaacggtacagccagattttcaagcccgctaaatgtgacagacttccaaaagcgctccagcatcatttcctacagcagggaagctttccgcgcgaatgctgagaaaattgcggcctttgccagattggaagggcttgaagcccatgcaagagcaattgaatccagaaaccgggaggaagactga

SEQ ID NO: 4211 - DNA, 642 bp, Bacillus licheniformis
atgggtaaggaattgacgattgcgatgccgaaagggcggatatttgaggaagcggccgatatgcttcgaaaagcaggctatcagctcccggaagaattcgacgattcgagaaagctgatcattcaagtgcctgaagaaaaccttcgctttatcctcgctaagccgatggatgtcacaacatatgtcgagcacggggtggccgatgtcggaatcgcaggcaaagatgtcttgctagaagaagaacgagatgtctatgaggttcttgatttaaacatcagcaaatgccgtcttgccgtagccggcctgcccgagacggcggcagacaccgttgcgccccgggttgcgaccaagtacccgaatgtcgcatcaagctacttcagagaacagggagaacaagtggaaatcatcaagctcaacgggtcgattgaactcgctccgctgatcgggcttgccggccgaatcgttgatatcgtatcaacagggcagactttgcgtgaaaacgggctagttgaaactgaaaaaatttgcgacatcacatcccgcttaatcgtaaatcctgtcagctatcgaatgaaagacgcagtcatcgatgaaatggcttcaagactttctcttattgtggaaggagaaaaagcaaaatga

SEQ ID NO: 4212 - DNA, 1176 bp, Bacillus licheniformis
atgtttatgtttgaaaaaccgcatggcatgcgggatacgctgcctatgctttacgaaacaaagaaaaaggtgcgctcttcattaacagaggtgatggctttgtgggggtatcagttcatggagacgcctgcccttgaattttatgatacggtcggtgtgcagtcggccatattggatcagcagttgtttaaactccttgatcaggaggggcagacgctcgtgttaaggcctgatatgacggctccaatcgccagggtggcggcctcaaagcttcataaagacgatcatccgctcagagtatgctatgctgcaaatgtgttccgggcacaggagcgtgaaggaggacgccccgccgaatttgagcaagtcggcgttgaactgatcggcgatggatcgacaagcgctgacgcagaagtgattgcgctcgtcattttttcgcttaaaaatgccggcctgacttcatttaaaatctcgatcggccatgtcggtattttagacgccttgtttgtggaagttttagggaatgaagaaagggctcatgtcctgcggcgctatttatacgaaaagaactatgtcggctatcgggagcatgtaaaatccctcaatttatcctcaattgataaaagcaggctgctggagcttttggagctgaggggcggtattgaaacgtgcagcagggcggcatccatcgtcgattctgaaaaaggaaaacgtgcggttttagaacttgaaacgctatgggagacgctcggcgattatggttgcacagacgacattaagctcgatttaggcatggtcagccatatgagctactataccggtgttttgtttgaaatctatgctgaaaacgtcggctttccgatcggaaacggcggcagatatgatcagcttctcggccgcttcgactcacccgcaccggcaaccggtttcggcatcaggactgacaggctgctggaagcattgaagccggcggaagaacaagaaaagatcgatgtcgtcatcttcagcacagaacagagaaaagaggcaatcagatttgccgaagaagaacgaagaaaaggcaaaaaagtcgtcatgcaggacttagcgggaatcggagatattgatcaaatgacaaagtcttttcaaaacgtgacctattttatcggagccagaaaggaagagaagcatgggtaa

SEQ ID NO: 4213 - DNA, 735 bp, Bacillus licheniformis
atgaaatttttcaaaactcttttttttatttttttcgtagcagttcttatgaccgccgttcttatactgttttctaaagatgcgttaagcccgttagccgaaatgttgcacagcagccataaaactgctgctgacaatgcgaataataaaggagagcgtcagccgcttgacgttccgctgatcaaccaaatggacccgccgaagctttataacggctgtgaagtcgccagcctggcgatgatcttaaactacagcggatatagtgtcacaaaaactgaacttgccaatgaggtgaaaagagtgcctctgcaatatgaaaacggcttaaagggaaatcctaacgacggctttgtcggcgatatggaaaacggacccggactgagtgtctaccatggcccgatttacgatttggcccattcatacgcaggtaataaagcggtcgatctgacgggaagtgagccgggaaaaatttatgaacagctgaatcagggcagaccggtttgggtcatcaccactgtacatttcaccccagtcaacgatatggaaacatggaatacaccgtcaggcaaagtcgatgtgacgtacagcgttcacagtgttgccgtgacaggctatgatgaggattacgtttatgtgaatgatccgtacggatataaaaacagaaaaacagacagagaaaattttgaaaaatcatggaaacagatgggcagtcaggcgatcgtgatcgccgcctaa

SEQ ID NO: 4214 - DNA, 666 bp, Bacillus licheniformis
atgaagagattagcaggtacggttattttgtcaggtttgctcgtatgcgggtttggacaggctctgcctgaaaaagctttggccgccgaggtcgttcacaaaacgatcgtagtcgagaaaggccaaacgtatgacggaaaaggcaagcggctgattgcaggtccggagctcggggacggcagccaacgcgaggatcaaaaaccgattttcaaagtggaggatggtgcaacgctcaaaaatgtcgtgcttggcgctcctgctgctgatggtgttcacacatatggaaacgcttccataaacaacgttgtttgggaagatgtcggcgaagatgccttgactgtcaaaagcgaaggaagtgtcacgataaacggaggatcggcccggcttgccgcggacaaaatctttcagattaataaagcgagcacatttaccgtgaaaaattttactgccgatcaaggaggcaaattcattcgccagctcggaggctcgacatttaaagccgtggtcaatattgataactgtacgattacaaacatgaaagaggcgatcttccgaaccgacagcagtacaagttccgttacaatgacaaatacaagatactcaaaagtcggtcagaaatggatcggtgtgaagcatgctacggaaagaaacaatcatgaattttaa

SEQ ID NO: 4215 - DNA, 519 bp, Bacillus licheniformis
ttgagaaaaacgaagcgctacccggtgtccggcgccaattccttatggcacatctatcagacggttccgttttttaaagtagtcaaaaactttattgtcattcaggcggcgcgctatacgccgattcttggaatgaaaaactggatgtaccggacgtttttgcggatgaaaatcggagagaaatgctcgtttgctttaatggtcatgccggatatcatgtttcccgaaaaaatctcagtcgggcgaaacaccgtaatcggctataatacgaccattttggcgcacgagtatttaataaaagaatatcggctcggtgaggtgatcatcggcgatgaagtcatgatcggagccaatacgacgatcctcccgggcgtcgagatcggagacggcgccgtcatttccgccggtacgctcgttcataaagatgtgcccccgggcgcttttgtcggcggcaatccgatgcggctgatctatacaaaagaagaaatggaaaaaagattggagacccccgctgaataa

SEQ ID NO: 4216 - DNA, 648 bp, Bacillus licheniformis
atgaaagttaatacggttttatttgatttggatggaacgctcatcaatacaaatgagctgattatcgcctcatttttgcatacgctcgatcattatgcaccgggacgctataaacgggaggatgttcttgctttcatcggaccttccctttatgaaacgttctcaagcattcaaaaggataaggctgaagaaatgatcaccatgtaccggacatttaatcatcagatgcatgatgaactggtaaccgagtatgagacggtttacgagacgcttgaacgccttgcggaagaaggctataagctcggcatcgtcacgacaaagctgcgggacaccgtcatcatggggcttaaactgactgggcttgatgcctttttcgagacggttgtgacgctggatgacgtcgagcggccgaagcctgaccccgagcctgttttgctcgccctttccaagcttggcagccgtccggaagaagccattatgatcggtgataattaccacgatattttagccgggaagaatgctggaacgaaaacagcaggcgttgcatggacgattaagggagaagaaagcctggccaaacacgagcctgattttatgcttcagcaaatgagcgacctccttcacattcttggggtggagaaagtttga

SEQ ID NO: 4217 - DNA, 948 bp, Bacillus licheniformis
atgaagggaactttaaaagccggcgctgtggcggggctgaaaacaacgtggacgcttggaaaagtgatttttcctgtcacgctgattgtcagccttcttcagcatacaccggtgatggactggttgatcaaactgatcacgccggcgatggggattttcgggttgtcaggggaagcggcgataccgcttgtgctcggcaacatgctgaacttgtatgccggaattgcgggaattttaacgcttgatttgaccgttaaagaagtgtttattttagcggttatgctgtcgttttgccacaacttgattatcgagtcgactgttgcttcaagggtcggaatcaaaatatggctgattttgctcgtgcgcatcggtctcgctgttttttcggccattatcatcaaccttgtctggcatggcgggcaggatgcggccaaatacggcttaatctcagcgaaaagcgccgctccttccggctggtttgacattgcgctagaagccgtgaccaaggcgggtcttggtgtccttcagcttgcagccatcgtaataccgctgatgatcatcattcaatatatgagagacctcggctggctgaatgctttttcaaagtggtttgcaccgataacgagaatgcttggaatgaaagagaacacctcaatgacaatggttgccgggctgacgatcggccttgcatacggggccggcgttatgatcaaagcggtcgaagaagacggcgtcagcaaaagggatgtcacgcttgcttttatttttctcgtcgcctgccacgcggttgttgaagatacattggtatttatcccgctcggcattccggtctggcctcttttgttgatcaggcttgcgaccgcggttctgctgacgatcgcgatttcgcgcttctggagaaagccgggttattccgttcgcagaaaggaagctttgtatgaaagttaa

SEQ ID NO: 4218 - DNA, 813 bp, Bacillus licheniformis
atgaatgaaacgattgaaccattaaatccgattgcttttcaactggggccgatcgctgtccattggtacggtattatcatcggccttggcgctttgctcggtttgtggctggcagtcagggaaggcgaacggaggggactgcataaagacacctttgtcgatttggtgctttttgcgattccgattgccattttatgtgcaagagcatattatgtcatttttcaatggggttattacagtgaacatcctgaccagattattcaaatatggaacggcggccttgcgattcatggcggactgatcggcgccgtgctgacgggaatcatttatgcgaaagtcaaggggctttcgttttggaagctggctgatatcgctgctccaagcattctgcttggtcaggcgatcggacgctggggaaactttatgaaccaggaagcgcacggtgaggcggtctcaagagcgtttttagaaaacctccacctgcctgattttatcatcaatcaaatgtatattgacggacaatactaccagcctacctttttgtatgaatcgctgtggagctttacgggagtcgttgttctgcttcttttaagaaaagcgaatttaaagagaggcgaactgttcttaatctacgttatttggtattcgatgggacgctactttatcgaaggccttagaacggacagtctgatgctgacggagaatcttcgcatcgcacaggttatttcgatcgtactgatcctctgtgcagctgcgctgatagcctacagacgtttcaaaggcagagagattaaacggtatcaggagatgtag

SEQ ID NO: 4219 - DNA, 933 bp, Bacillus licheniformis
gtgccgaaagttcgaacaaaagatgtgatggataaatttaagcttgagctcatcagcggagaagaagggatcaaccgcccgattacgatgagcgatttatcaagaccgggccttgaaatggctggttattttacatactatccaaaagagagggttcagctgctggggaagactgagattaccttttttgaaaagcttccagaggaggaaaaaaagcagcggatgctgtcgttatgcacggaaattacaccggctatcatcctttcccgtgatttgccgattccgcctgaactcgtggaggcatccgaagaaaacggcgtgcctgtgcttcgttccccattaaagacgacgcgcctgacgagccgtctgacgaattttcttgaaagccagctggctccgacaactgcgattcacggcgtcctcgtcgacgtttacggcgtcggggtgctcattatcggaaagagcggcgttggaaaaagcgaaacggctttggagcttgtcaaaagaggccatcgccttgtggcggatgactgcgttgagatcagacaggaagaccaggatacattgatcggaagcgcgcctgaattaattgagcatctcctggaaatcagaggtcttggcattatcaatgtcatgacgttatttggcgcgggggcggtcagaagctttaaacgaattacccttgtcatgagcctggagctttgggagcaaggaaagcagtacgaccgcttagggcttgaagaagaaacaatgaaaattattgatacagacgttccaaagctgacaattccggttcgtccgggaagaaaccttgccgtcatcatcgaagtggccgcaatgaacttcagactgaagagaatggggctgaatgccgcggagcaatttacccataagcttgcggatgtaattgaagatggtgagcttgaagaatag

SEQ ID NO: 4220 - DNA, 480 bp, Bacillus licheniformis
ttgaaatacaatattcatgatacaaccgtgctgaacgaagacattttgacaccggaagaaaaagagacatgggttctttatatgaaagtactgactgctgccggcttgggggatgtctccgaatggatgaagctcgatctcagcatgccgcaaatgaaggttttaatgcttctgaacaaccacggcacactgaaagtctcagaaatcgccgaaaaaatgggagcttccctttcgaatatgaccggactgctcagccgccttgaacaggcgaactttatcaaaagaacacattccgagcaagaccggcgaacgattgtggttgaattaaccgaagatgcgaaggggatttttcggagcctttacaaaaaagggcatgaaaagctcaaaagagcgcttcagaagctgaatgaacaggaaaaaaacaaagtgaatgaaggccttaccattcttgaaaaagcgttaaaagctgacgatgaatag

SEQ ID NO: 4221 - DNA, 135 bp, Bacillus licheniformis
ttgaatgaattatttttatcatccttaaaaaagcacgttttgtcaaaagaaatttttcaacaaaaaaagctgcaccggtttccgggcagcttgtctattcatcgtcagcttttaacgctttttcaagaatggtaa

SEQ ID NO: 4222 - DNA, 1560 bp, Bacillus licheniformis
gtgaaccaaaagtgggctgtattattgtttacgatcggcgtgtttatggctgctttagacaacggcatcatttcagcggcactgacgacaatcaatgattcttttcaagtatccccctcatggggagcatggggcatcacgctttatacgctcggtttggcagtcagcgttccgatcgtcggaaagctgtctgaccggtatggacgcaaaaagctgtttatcatcgaagtcttgctgtttggcgccggttcgctgctcgttgcattgagccaaaacttcccgatgttcttgttggcgaggctgattcaatcgcttggcggaggcggaatctttattatcgggagctcgcatattctcactgcgctgcctaaagaaaaacagggaaccgccttggggcttttaggtgcgatgaacggaatcgcggcagtgctcggtccgaatatcggcagctttattttggatatgaccggaagctggcactggctgtttttgatcaaccttccgattgccgcagcactgatcatcctcagcgttccattgatgaaggagacaaaaggcggaacacgaaaacccctagatctggccggaactgtgatattgtctcttgcgattttagctgtgatgtacggaataacgaatataaacggacagcgcctgtctgccgtcttgtccgatccaaaggtttacttttttctcctgatcggctgcgcgctgtttgcgggactcattttttacgaaaagcgcgtagagctgaagggaggcgacccgatccttgcctacagtttattaaaaaacaaggtgtttcaatggacgctttttatcggatttttatccggcggactcttggcagccgttatttttattcctgcatatgcggaacaatatttgcacgtcgctcctgaaaaagcggggtattggatgacgcctcttgcgctggcttcagggataggagccgggctcggcggaatgctcgccgatcgaaaaggaccggtaaaggcggcccggctctctggcgtcatttcgttcgccgggtttttgctcttgtcctcctgggtgacagagaagtgggaatttgttttggcaagcatcatcgcaggggtcggttttggctttctgttaggcgcgccgttaaatatgcttgtatccgaggcggcaaaacaggattacgggacagcgctcggtacattatcgctcgtcaggcagatggggatgaccttggcgcccgcgctgtatgcaggatatataacggccggctacgaaaatatcggcacacatatcaaacataagctgaatgatgcagggatcactctgaaggggtttgcaggcggtgagacggacgtatcgcggctgagcgaatccctcagccaaattcccgacccaaaagtaaaagacatcataagcgaagcgatccatgaaagtgtgggagcggggttttttaacctctacttcacagccgccgtcctttcacttgcagtcattgcttctgtcagcgttttatcgctttataggaaaaaacaaaccgacacggcaagccgtctaaaaaaagacgtgacaaactaa

SEQ ID NO: 4223 - DNA, 3990 bp, Bacillus licheniformis
atgaaaaagtacagaaatcgccaaacccttttattgttggccgcagttttactttttgccttgcagatcccgatttcgtccgcatcgggtgaagagcatattcagcctggttcaccggttatcaggcatactcctgttgaacaagttcaaaaaggagatgacatatatttttccgcgcaggcggccgccgaaacggtcattttatattacaagcagcatgacgaattgccgtatcgggcgattccgatggaagttgagccgggcagacagaacgcctatattgccaaattggaaagcgaatccatagcatccggcaaagtccagtactacattgaagctcaagtcggcgactcctctgtgaagacggatgtgtatactgtcgccctgaaaggcatgcgtacagatacacaaaagcttccggagctgttgatcacggaaatggtagtcgacacgtcaaacaccggtggaaaggacggctatgaatttattgaagtttataacaataccaataaagctgttcatctgaacagctacaaaatcaagtacagacatcctgaaaagggcaaggaatcagacgtcatctggccttttgagcacgatgatgtggcgattccttccggtcaaacacacgtgttttgggtgaaaaaccgctcaaacggtcatctgacggaaagtgatttcaatcggtattacggtgttcaccttcgtgaaggcaaaacgcttactgctctcaaagggggcggcatggagaatacggcgccgagagaggtgatcatctgcacaaacagcggagaagaggtcgcatccgcccgttatcaaagcgagccggataaaaccgatgtcgccaaaaataaagcgcttctgtatcgatatccgctggacggaacgaagcatatgaaaatcatatcggccggggaagaaaaaccgtcgcctggttcgcttctgaagacgcaggcaccttcacagacggtgacggttatgccggacagagaaaagccggagatccatgatatgacggatcatcaagctgtaaaaccgggtgaaacgatccagctcttagctgatatgaaagacaatcggcaagtgaagcaggcgcagtttttctaccgcatgaatgatgatgagccgtttaccgaagtccgtgttgaaaaaagccgcaatgacggcctgtaccgccacaatatctattttgccgaactcattggcaaagaaaaagtggagtactatatgcgggccggtgatggatcaaatgtttcgtcgactgaaaagaaaacgataccgctcgaacagcgcattttgaagggactcaggctgaatgtaagcgaaggcggaaccgtttccggaaaaatgctgttgaaagccacatcagaaaagccgccttctgaaacgacaattcgtattgacgggattgaacaaaaagaaggtgaaccggcgcttgaaaaaaaagcctactttgctttcgatgtcaatcaaacgaatctgtattttaaaaatgctgtaacgatcggcaggagagttcaaaaagtttttgacgattcgcgccgccggtatgcgacaattacggtcccggtttctccggatgaatttaaaaaaggaaagccgttttcgattaaagttcgttcaggcacgaaatcaacaccatttgaacaaactgcagaagaaaacagggatgattttgtcctcaagaacccccgcctcatactcgcggatgggaccatcatccgcgatgagcgatacgacgatccgaaagccgagcttccggccggtgacggccctggggcgcatgaatggtatgaattccgttttacgattccggaagccaagtttgcatcgcttgcgagtcaatggcatacacgcgcctggaacgaagggcagcacatcgttgaagcggagaatggcgaagaaaggctcatccgcagggtaacggtcgataacacaggtcctgagatcaaaacgtcattaaaagacggcaggacgtataaagggtcgtttgagatcaatgcggccgcacacgataaatggagcgggatgaaaagcataaaagcctttcttgacggcaaaaagattgcgcttccctatctcgtatcttctgcccgcctggatgcgggaaagcacgagttgaaaataaaagcggaggacagcgccggcaacctgtcaatcgtaaaaaaggcattttacattaaagaggaaaagccggacaagcccgctcgggtcaaaaatacacccggcagcacacatgctaagctcgccgtccgcgtcaaggacccgacaaaagataagatgaaagtgtcattccatcagggatttcagtacacagtaaaagacgaagagcatgttgatgtgtcagcgaacgaaagcgggacggaacctccgcaaagctttgcggtcaggggagaaaaggcgctgacaaaagaagagcgcagcggcatgtccgcacttgacggaaaaggttttgaaacctcatcaacaacaaagtttccgtaccatcgctttgatgtaaaagtggatgaaaatacggggccgaacgacaaggtggaagtgctgtggcgcgggagttcgcttcccggcagaaaagtctccatgttcgcctggaattgggccagcaagaggtgggagacgcttgcattccatgttgcaaaggatggcaaaccttttaccctcaaaggaagcataaaagccgccgattatatccgccaatccaaggcgagcatcatcattcaggatcaaattcagctttcgcaaaatgactatacatttgtgtggatgtctgatacgcaatattattcggaaagctatccgcacatttttgaacgtcaggtcaagtggatcgcggaacaaaaggacaagctgaacattcagtacgtctttcatacgggggaccttgtggatgaagcggatcagccgctgcaatggaagcgcgccgaccagttcatgaaagttctcgacgacaatcaagttccatacggcgtgctggcgggcaatcacgatgtcagccataaagaccggtcatatttgaaattcggcaggtacttcggggagagacgttttaaacaaaaaccgcattacggcgggtcttatcagaataacaaagggcactacgacctcatttccagcgggggcaacgactatatcatggtgtcgatggggtggggaatcggaaaaaaagaactgcagtggatagatgatgttctgaaacgccatcccgatcgaaaagcgattttggcatttcacgagtttttgcttgtcagcggaagcagaagtccaatcggggagaaaatatttgaacagatcatcaagcggaatccgaatgtgattgccgtattgagcggtcactatcacagctccaacttaaaagtcgacaagcttgatgataacggggacggcaagccggatcgcaaggtttatcaaatgcttgccgactatcagggcggtcctgaaggaggccaaggttatttaagaattctccatgtggatccgaagcatgacacgatccatgtcaaaacgtattcgccatatcttgatgactataacttttatgatccgcaccaatttggcccgaaggacgagttcaacattaaaacggatctgaaaccgaggaagaaaaaggttaaaaccgattattttgagctgaatgtcttttcgaacaaggaaattgggaaagcaaaaacggtgaaaagcggaaagacggcttccgtgacgtggaaagatttgcagccgaatacaacctatttctggtacgccgcagcttcagatcaatacggcggcaacagcaggtctcaaatgtggagattgacgacaaaagacgatggcatgaaatcctttttaatagatcaaacagccggggcgggctcggccctgaggcaattgtcggggagcccccccccggccgggatgattttaaagaaagggacaaacctcccaattgctgaaatcagcttgtggctggcggcggttttcctttgcgaacgcaaaaagcatttgttttcctaa

SEQ ID NO: 4224 - DNA, 360 bp, Bacillus licheniformis
atgatgagatggattataaacgttcttgtcaatgccttattattaattgtcattgccggttactttgatgcggttcacgtcagaagcatcggagcagccattacggcaagcttgattttatccatcttaaatatgtttgtgaagcccgtgctggtgattttgacgctgcccgtcacagtaattacgctaggtttatttttgtttatcatcaatgcgatcactctttatatgaccgcgtccattatgggggacagttttgacctggacggctttgggacagccatttttgcgtcgatcgtcctgtcggtttttcacttgctcattcaaaaagcaattatcgaaccgatgtccagaaaataa

SEQ ID NO: 4225 - DNA, 201 bp, Bacillus licheniformis
atgaaaaggctatttcgatccgaaacagacagaaagattgccggggtcgtcggaggtcttgctgaatatttaaatatggatgcgtcattgctgagaatcattacggttctattatttatattttcgaccggagttcccgtcctgctgatttatattgtctgggtattccttgtgccgaatgaaggagacgtcaacagatga

SEQ ID NO: 4226 - DNA, 1095 bp, Bacillus licheniformis
atgaagcatgagaaagaacgaattttaaaattggtcgaggaaggaaagctgtctgcaaaagaggcgctgatcctgatcgaaaaacttgaagaagactacaaggaaaccgagagcaaggtgacagccctgtctgaggatgtcattgattcggaggacttctacagcgaaaagaaaaaagaaccgaagccttctatcggttcaaaactgttcgaatggattgataccgctgtaaaaaaagtaaaagaagcagacttggatttgaatttcgggcactcgtacgatgtccagcatatattccagtttaaagacactgatttttcgactctggatattcagcttgccaacggcagcgtcaaccttgtaccatggagcgattccgacatcagagtcgaatgccaggcaaaagtgtaccgggctgaaaatcaggatgaagcaaggcaggcttttctccagcatatcgactgtggtgtggaaggcgataagttcatgatccgtaccgagaaaaaaacgatgaagaccaaccttaccgtctatataccggacaaagagtacggcaaaatccgctttaaactgtttaacggcccggtcagaggggaacatttaaacgtaaaagagctgtccgccaaaacgacgaacggcgtgctgtcgttctctgctctcacggcaggaaaagcttcattggaaactgcaaatggacaaatcaaactagccgaccatacttgcggagagattgaagcggaaaccatcaatggattgatcgaccttaaaggttcatgcgaggcgcttgacctgcagagctttaacggcaatatcgcggcaacagtcaaaaatccgcactgccggacggcatatgtgaaaacaacgactggaagcgtagagttgaatgttccccgggactgcgctgttacagcggagctgaaaagcaatctcggttctctgtctcatgatctttcagatgcagaaattttaaaggaaaaaaacgagacaatccagaaggaaatgtacctaaaagcaaatcaaaatcatgatcatagcatgaccgtgtttttggaatcgaagacaggatcgatccatttaaaccatacacaggagtga

SEQ ID NO: 4227 - DNA, 327 bp, Bacillus licheniformis
atgacgagaaacaacgcgctgatttcttcaatttgttattttagtgttttttttgccccgcttattttgccaatcgcagcgtattttataacagatgatcaagaaacgaaaaagcatgcgatgcgttcgcttatttcgcatattattccgtttataagcgtagtcatattggcagcaggcgcgataagcggtacgcttatctttggtgacggcggttatttggcggtcattttcatgatcggaggtttcgtttttttcgggatcatcagtttgattattgtggtctggaacgtagttcaagggattaaaatgctgactcaggcctaa

SEQ ID NO: 4228 - DNA, 231 bp, Bacillus licheniformis
atgaaacagaaatcggaagtatacgcctcatccgcctcccagcttcttagtctgattcaggaacaaaaaaggatgaatcaggagatcgtgaaccgattggaatcgatcaattccgctcctccgctttccagcgaaatccgctatttaaaggttctgctgaacagcagcagcacccatattttaaacagtatgagtgaagcgaccaaacacatcagccggactgaacgttaa

SEQ ID NO: 4229 - DNA, 370 bp, Bacillus licheniformis
atgaagatcgatcgcatggatcatttggtactgactgtaaaagacattgatgcgacatgtgatttttacagccgtgtgccggggttgaatgcggtcacttttcgagaaggaagaaaagcgcgacattcggcaggcaaaaaataaacctccacgaagccggaaaatagtttgagccgaaggcacagcacccgatgcccggctccgcagacctgtgtttcatacaaatgccggcattgatgatgtgattcgtcatctggaggggctgtccattaaaattgaagaaggccccgcagagcgaatgggcgctgaagggccggtcgtttcggtttatatcagagatcccgacggaaatctggttaaaatatcatga

SEQ ID NO: 4230 - DNA, 2874 bp, Bacillus licheniformis
atggcaacgaaacgaattgaggtgaaaggtgcaagggcccataacctgaaaaatatcgatgtctctattccgagggatcagcttgtcgttttgacaggtctttcgggatcagggaaatcatcccttgcgttcgatacgatatatgcagaggggcagcggcgctatgtcgagtctctctccgcatatgcccgccagtttttaggacagatggacaaacccgacgtcgatgcgattgaaggcctgtcgccggcgatcagcatcgatcagaaaacaacgagccggaacccccggtcgacagtcggaacggtgacggaaatctacgattatctccggctgctgtttgccagaatcggaaagccggtttgccctgttcacggcattgaaattacctcgcaaacgatcgaacagatgacggacagaattttggattatcccgagcggacgaagatccaggtgcttgcgccgatcgtctcgggaagaaaaggatcgcacgtgaaagtgctcgaacaaatcagaaaacaaggctatgtgagagtccggatcgacggcgaaatgaacgacctctcagaggacatcgagctcgaaaagaataaaaagcattcgatcgaagtcgtcgtcgaccgcatcgtcataaaagaaggcgtaaccgcccgtctcacagactcgctcgaaacggcgctccgcctcggcgaaggccgtgtgatcatcgacgtgatcgggcaggaagagctgctgttcagcgagcaccatgcctgtccgcactgcggtttttcaattggggaactggagccgaggatgttttctttcaacagcccgttcggcgcatgtccgagctgcgacggcctcgggtccaagctggaagtcgatgtagagctcgtcattccaaacgatgagctgtctctaaaggagaatgcgattgcaccttgggaaccgcagagctcccaatattatccgaagctgcttgaagcggtatgcagccactatggaatcgatatggatattccggtcagagacctgccgaagcaccaccttgagaaaatcctctacggcagcggaggcgagcagatttatttcagatatgaaaacgacttcggacaagtccgggaaaactacattgagttcgaaggcgtcatccgcaatatcgaaaggcgctataaagaaaccagctcggattatgttcgtgaactgatggaaaaatatatggctaatcagccgtgcccttcatgcaaaggctaccgtctgaaaaaggaatccctcgccgtgctgattaacggccttcacatcggtaagataaccgaaatgtcggtagctaacgcccttcaatttttccgtgaacttgatctttcggaaaaagacatgaagatcgccaacctcattttgcgggagattgaagaaaggctcggattcttgaacaatgtcgggcttgactatttgacgctcagccgcgcagccggcactctgtcggggggagaagcgcagcggatcaggcttgcaacgcaaatcggctcaaggctgaccggtgtcctttacatccttgatgagccgtcaatcggtcttcatcaacgcgataacgaccgtctgattgagacgctcaaaaacatgagggatatcggaaacacattgatcgtcgtcgagcatgacgaggatacaatgcttgccgccgattatttaatcgatatcgggcccggcgcgggtgtacacgggggagaagtaatctccgccggaacgccggaagaagtgatgaacgatgatcaatctctgacagggcaatatctttcagggaaaaaattcattcctcttcctgccgagagaagaaagcctaacaaccgctttatcgaggtaaaaggggcaaaggaaaacaacttgaaaaatgtttccgtgaaatttccgctcggcgtgttcacagctgttaccggggtatcgggatcagggaaaagcacgctcgttaatgaaattctccacaaaacgctggctcagaagctgcatcgggctaagacgaaaccgggagaatacaaagaaataaaaggaatcgagcacctcgataaagtgatcgatattgaccagtctccgatcggccggacgccgaggtcaaatccggccacatataccggcgtgttcgatgacatccgcgacgtgtttgcccagacgaatgaagcgaaagtcagaggatacaagaaagggcgcttcagctttaacgtcaaaggcggacgctgtgaggcctgcaaaggcgacggaatcattaaaatcgagatgcacttcctgcccgatgtatacgttccttgtgaggtttgccacggaaagagatacaaccgtgaaacgcttcaagttacgtacaaaggcaaaaatatctctgacgtgcttgagatgacggtcgagaatgccgttcaattttttgagaacatcccgaaaatcaagcgcaagctgcagaccctctatgatgtcggtcttggctatattacgctcggacagccggctacaacgctttccgggggagaagcgcagcgggtcaaattggcatctgaacttcaccgccgttcaacgggaagatccctttatattttggacgagccgacgacaggactgcacgtcgatgatatcgcaaggcttttggccgttctgcagcgcctggtcgacaatggagatacagtgcttgtaatcgaacacaatctagatattataaaagcggctgattatttgatcgacttgggtcctgaaggcggagacggcgggggaatgatcgtggctgccggacctcccgaagaagtcgtgaaagtcgaagggtcatataccggccgttatttaaaaccgatcattgaacgcgacaaaaacagaatgaagaagcggcttcaagaaaaagaagctgtcagaccgtaa

SEQ ID NO: 4231 - DNA, 1986 bp, Bacillus licheniformis
gtgaaagaccgctttgaattagtctcgaattatcagccccagggggatcagccgaaagcgattgatcagcttgtcaaaggaatcaatgaaggcagaaagcatcagacgcttttgggggcaaccggtactggaaagacgtttacgatgtcgaacgtgattaaagaggtcaacaaaccgactctcgtcatcgcccacaacaaaacgttagccgggcagctttacagcgagtttaaagaatttttccccaacaacgcagtcgaatattttgtcagctattatgactattaccagcctgaggcctacgtgccccagactgatacatttatcgaaaaagatgccagcattaacgatgagattgataaattaaggcactctgccacgtctgctctttttgaacgcaaagatgtcatcattgtggcgagtgtctcttgtatttacggcttgggttctcctgaggaatacagggaaatggtgctctcgctcagaacggaaatggaaatcgagcggaatgagctgctcagaaagctcgttgacatccaatatgcgcggaatgacatcgattttcagcgcggaacattcagggtgcgcggcgatgtcgtcgagatctttccggcttcaagggatgagcactgcgtccgagttgaatttttcggggacgaaatcgaacggatcagggaagtggatgccctgactggcgaaattttaggggagagggaacacgtcgcgatcttcccggcttcccacttcgtcacccgggaagaaaagatgaagaaagcgatcataaacattgaagaggagctggaagagcgcctcaaagcgcttcgtgaagaaggcaagctccttgaagcgcagcgtctggaacagcggacgagatacgatttggaaatgatgcgcgaaatgggcttttgctcgggcatcgaaaactattcaagacatttgacgcttcgtccggcaggttcgactccatatacgctgctcgattactttccggatgatttcctgatggtcatagatgagtcgcatgtcaccataccgcagatcagaggaatgtacaacggagaccaggcgagaaaacaggttctcgtcgatcacggattcaggctgccttccgctttggataaccgtccgctcaggtttgaagagtttgaaaagcacattcacaacatcgtgtatgtgtcggctacgccggggccttatgaacttgagcatacgcctgaaatggtagagcagatcatccggccgacagggctgctcgatccgattattgaggtaaggccgattgaagggcagatcgatgatctgatcggtgaaatccagcagagaatcgagcggaatgaacgcgtcctcgtcacgacgctgacgaaaaaaatgtccgaggatttgacggattatctgaaggaaatcggtatcaaggtcacgtacctgcattcagagattaaaacgctggagcggatcgagatcatacgcgaccttcgcctcggcaagcatgacgttctcgtcggcatcaacctgctgagggaaggactcgatattcctgaggtttcactcgtcgccattcttgacgcagacaaagaaggatttttgcggtccgaacgctcgctcatccaaacgatcggccgcgccgccagaaatgccgaaggccgcgtaatcatgtatgccgacaaaatcaccaactcgatggaaatcgcaatcaatgaaacgaagcgccgccgcgaacagcaggaggcttataatgagaaacacggcattacgccgaaaacgatcaacaaaaagatcagggacgtcatccgggcaactcatgctgctgaagaccaggaagaatatcaagtgaaagaggagccgaagctttcgaagatgacgaagaaagagcgggaaaaagtgatcgctcaaatggaaagcgacatgaaggaagcggcaaaagcgcttgactttgaacgcgccgccgagcttcgcgacttgctcctagagttaaaatcggaaggatga

SEQ ID NO: 4232 - DNA, 234 bp, Bacillus licheniformis
gtgtttacaaaagccgtttttgcactgatatttccttttattcttgtcttgttttttacaagggtgacctataaccattacgtcggaattgcgctcactgcagcgctgttgttcgcttcatatttaaaaggttatacggaaaccttttttattgtaggacttgatatcgcctcgctcgtcgccggttcgctctatgcggcaaaaaaggcgggcgaaaagaaggaagactcatag

SEQ ID NO: 4233 - DNA, 294 bp, Bacillus licheniformis
atgaaaagggcttttctcgcaggtgctttcgtttgtttaatagctgtattggtttcggctgcggccggggattggacgctgattttcaaagtttcgggagcagccggcctaggcgcgattctgttgtctgctttatgttcgggcgtatttgtcagcggtgaccggttcaggggaaatcacgatgcagaaacgaaagagcacggggagtggaacagcaagctggcaaacgctctcgccattttcgccatgccaaacctcctggccgccggaatatcgttctttttcgccttttaa

SEQ ID NO: 4234 - DNA, 1212 bp, Bacillus licheniformis
ttgtcagttgaagaaagcttaattgaacttttaaaaggagcaggattgttctttttgcacccgctcttctattttatgatgattatgagtcttgcttacggctatgcccggatcaaacgtgaaagaaagacgttccatacgcgtattgaagatatttatgacgagttcaaatttacatattccaagggacttctggcaggacttgtactgtccattgtttcgttcggcttggggctgtatctcccgatgggcatgctggttttaatagcggcggtcagcgttgccgcagctttaactttcagacagagtctgctgtcagcggcatatacgcttggcgtgagcatcgtcgttggtttatgtattgaatacaccggtttcggagcgcttgacgcgtttctgccgcagctgtccctcgcgaattggtcggctgctgccgtcttgctcggacttctgttggtggcggaaggagtgcttgtctataaaacggcacatatcaaaacgtcccctgcgattgtcatgagcacaaggggtctcccgatcggacagcagattgcgggcagaacctggcttctgccgttgtttattcttattccgggacatgcgatcgaatcatctgttccgtggtggcctgttttgtcatttaacggcggctttgagctcttgtggattccgtatttcatcggcttcggccaaagggttcaaggatcgcttccgattgaaagcattaaaattacagcgaagcgcatcagcgtgcttggcatcatcattctgctgatcgcggccggaagcatatggtggactccgcttgccgcccttgccgccggagcagcgatcgcaggaagggcctttttatcctggaagcagcggatgaacgacaattccgcccctttccatttttcaaagagagaccagggcttgatggtgctcgggattattccgaacacgccggcagccgatctcggtctcaagatcggcgaaatcatcacgaaggtcaacgggattgaagtgaaaaatgcggcggacttctacgaagcgctccaaaagaacagggctttcttcaagcttgaagtcgtcggtttaaacaatgagattcgttttgaacaaagagcttcttatgaaggggagcatcatgagctcggcatcatctttgtaaaagaagaggatgcggtgatgaagcatgccgaggcagcagcctcagcagaaacagaataa

SEQ ID NO: 4235 - DNA, 153 bp, Bacillus licheniformis
gtgccagcatttgtcgtcacgaatgcgcatgaaaagcaccggcgtttaagcatcatgacgaaagtttctgcggctgacggctcaggcatcccgcctgaacggccgcccgtcatttcctcgtgccgacgctttagacaagctgggtttccttaa

SEQ ID NO: 4236 - DNA, 354 bp, Bacillus licheniformis
ttgaaaagggcaagtattgtgagagagaaaaaatactatgaattagtggagcagttaaaagttcgatcacaagacgttacgttttccgctacaaaggcagtaggattgcttatgctgttcagcagatacctcgtgaactacacttcggtcgaaagtgtggaagatattaatgaggattgcgcggaactttatttcaactacttgatggacaaccacaagcggctcggcatcaatctgaccgacatcaagcggtcaatgcagctgataggagatattcttgatgtcgaggtcaatcattacctgaaagatttttctttgtcgaatgtgacgctttggatgagccaggagaaataa

SEQ ID NO: 4237 - DNA, 1440 bp, Bacillus licheniformis
atgaatcagaagattgtgcggctcatcattgcgctcagcctgttatgcggcttggtaacaggcgccggcccgattccgttacatgatgtcgtttcaaaagcatcagcggctgaagaagctgcagccaaaagcaccgctagaaacgaattggagaaaattgagaaagcatatgacctgatttcaaatgaatatgtggagcaggtcgacagggaaaaactgttggaaggagccatacagggcatgctttcaacattgaatgacccatactcggtctatatggataaacagacggcaaagcggttttcagattcccttgattcctcttttgaaggaatcggtgcagaaatcggaatggaagacagaaaaatcattatcgtttctccttttaaacagtctccggcagagaaagccggattaaagccgaacgatgaaatcatcagcatcgacggcgattccatgagcggaatggatttgaatgacgccgtattaaagatcagaggcaaaaagggatcgacggttacactgaaagttcaccgacccggaatgaaagaccagctgacatttacgattaagcgcgatgaaatcccgctggaaacggtgtttgcttccataaagaaagtacaggataaacctgtcggctatatcgcaatatcttccttttccgaacatacggcaaaagattttactgctgaactgaaaaagcttgagaaaaagggaataaaagggctcgttttggatgtaagaggaaatccgggcgggtacttgcaaagcgtggaagacattttaaaacattttgtgacaaaagatcatccgtatatacaaatcgccgaaagaaacggaaataaaaaacaatacttctcaaaattaaaagagaaaaaaccataccctgtgagcgtgatcacggacaagggcagcgcttcggcttcggaaattcttgcaggcgcattaaaagaagccgagggctacgacgtggttggcgatccttcctttggaaagggaaccgtccagcaggcggtgccgatgggagacggtagcaatattaagctgacgctgtacaaatggctgacacctaaaggaaattggatccataagcagggcattcagccgaccgttccagtcacgcagcctgcatatttctcggcggggcctttacagctgaaagaacccctcaagccggatatgaacaacaatgaaattaagcgggcgcagttcctgctgaaaggactcgggtttgtccccggccgggaagacggctattacaatgaaagcacaaaaaaagccgtcatggcgtttcaggcagcaaacaagctgaagcaaacagggatcattgaccaaaaaacggcaaatacaatgaacctgcggattgaggagaaaaagatggatgaaaagaacgatcttcagctgcaagccgcattaaaagtgctgtttaacaaaaagtga

SEQ ID NO: 4238 - DNA, 1059 bp, Bacillus licheniformis
atgaaagtattcaacattgccagcatacccggtgacggggtagggaaagaagtcgtacctgctgcacaacgagttttgaaagcggtttcggatgttcacgggggactctcatttcggtttacggagtttccatacagctgtgagtattatttggaacacggggaaatgatgcctgatgacggcttggagcagctgaaagagttcgacagcatctttcttggggctgtaggaaacagcaagcttgtccccgaccatatttccctgtgggggctgctcattaaaatccgccgcgaatttgaacaggtcatcaacattagacctgcgaaatatttgcaaggaatcaagtctccgctggccaacccaaaagatttcgatctgcttgtcgtcagggaaaacagtgaaggggaatacagctcgatcggaggcagaatcttcagggatgaagatgaaatcgccattcaaaatgccgttttttcaagaaaaggggcggagagggcgatgcgctttgcttttgagttggcggctaagcggaaaaagcatgtcacaagcgcaacaaagtcgaacggaatcgtttattcaatgcctttttgggatgaagtctttgagaacacggcaaaagactaccccgatattaccgcagattcgcagcacattgacgcgctgtcggccttttttgtaacgaggccagagaagcttgacgtcattgttgccagcaatttattcggcgatattttgaccgatatcggggcggcgattatgggaagcataggtgtggcgccggccgccaacattaatgtaaacggcaaatatccatctatgtttgagcctgtgcacggctctgctccggacatcatcggaaaaggaatcgccaatccgatcggccaaatttggacggcaaaaatgatgctcgatcatttcggggaagaagaactcggtgcaagattgcttgacgtgattgaagacgttctaaagagcggctacttaacgcctgatatcggcggttcaagtacgacggatgatgtgacagaagaaatcatcaagcgcgtgaggaccatataa

SEQ ID NO: 4239 - DNA, 126 bp, Bacillus licheniformis
atgctgttgatccggccaattatataccgctttaaaatgaaagccgattcgtccggagatggactgaatcggctttttgttattcaaactggatttttctcaaaatttattcttgtcagaaaataa

SEQ ID NO: 4240 - DNA, 1251 bp, Bacillus licheniformis
ttgaaaagaaagcttatgacgctggggctgaccgctgtgctcggatcgtcggcagtgctgatccccttaaaaagcaaccatgctttagcttatgaagacttggagaaaaaaaagagcgacgttcaaagcaaaaaatctgaaaacgagtcaaaactcgaaaaaacgaaacaggagctttcagagcttgaatcaaaggaagcaagcctgagaagcgagatcgagaaaattgaccgtaagatgacggacacgaatgaaaagctggaaaagaaaaatgaagaaatcgataaaacaaagaaaagcatcgaagagctgaaaaagcaaataaaaaagcttaaagaaaagattgagaaacgcaataaaatattgaaagaccgtgttcgctcaatgcaggaaaacggcggttctgttcaatacatagatgtgcttctcggctcgaaaagcttcggggatttcatcagccgcgcgggtgcggtttcgacaattgtagaagctgataaagacctgatggaagagcaaaaacgcgatcttcagcttgtcgaggaaaaggaaactaagctgagcaaggatcttgaaagccttgaaaaagcgctcaaagacctggaagatttaaaaaagacgctcgacaagcagcaaaaagagaaagcaaatgtcatgaaaaaagtgaagcaagataaagatcatgcacatgaagaacttggttcactcgaaaatgaagcagaaattttaaagcgccaggatgaagcgatcaaagccgaagaggcgcatcgcaaaaagcaggaagctgaagcgagccgccaggcttcaagcggccaatcggaagcttcctcatctaaaccgtcggcaccaagcagctcaggctttatccgccctgcttccggcacatttacttccgggttcggaaagcgttcgctcggaaatcacttcggcgtagacatcgccaagcgcggttcaggcgttccgatttatgcggccgccgccggaacggtctataacgcccattactcgtccagctacggcaatgttgtgtttattacccataacatcaacgggcaaacatatcagacggtctacgctcacatgtcttcaattaaagtgcagacaggccagcgtgttgaacagggacaagtgatcggaacgatgggaaatacaggccaatcctacgggcagcatcttcactttgaaattcataaaggcctttggaacaacgcgaaatccaatgctgttgatccggccaattatataccgctttaa

SEQ ID NO: 4241 - DNA, 891 bp, Bacillus licheniformis
atgattagaactctcggacggcatttgcgcgagagcttaaaatctctcgggagaaacgcgtggatgactttcgcatccatcagtgctgtaacagttacacttatcttggtcggcgtgttcatggtcatcatgctgaacgtatacaatatgacattaaaagccgaacaagaagtcgaagtcaaagtgctggttgacttaacggccaaccaggatcaaaaaaatacattggaaaaagaaataaagaaaataccggaaatcagcagtgtcaaatactcatctaaagatgaagaactcaaaaacctgaaagacagctttggggaagacgggaaattctttgcgatgttcgagcaggaaaacccgctgaacgatgcatttgtcgtaaaaacaaaagaccctcaagacacaccgaaagctgccaagaagcttgagaagctgaccaatgtctataaggtgacatacggacaggagcaggtagaccgcttgtttaaaatcagcaatgtcgccaaagtcatcgggattgcattggtcatcggcctgctgtttacggcgatgtttttaatttctaatacgatcaaaattacgatttttgcgagacgcaaagaaatcgagattatgaaacttgtaggtgcgacaaactggttcattcgctggccatttttcattgaaggtttgctcttgggtgtatgcggttctatcattccgatcgctattttgctcggaacgtatcatcatgccgttcagtggatcgctccgaaagttcaaggcactttcatacagctcttgccgtacaatccgttcgtcttccagatttcagcgatcctggtgctgatcggagccgttatcggtgtatggggaagcttgatgtcgattcgcaaattcttaaaagtttaa

SEQ ID NO: 4242 - DNA, 687 bp, Bacillus licheniformis
atgatcgaaataaaagatgtatataagacttattccaacggggtctcggcgctgaacggaataagcatctctatatatcccggggaatttgtttatgttgtaggaccgagcggagcaggaaaatcaaccttcattaaaatgatttaccgcgaagaaaagccttccaaagggaagattgtcataaacaataaaaatttggcgcagctcaaagaaaaagagattccttttatcagaaggaaaatcggcgttgtattccaagactttaaactgctgccgaagctgacggtgtttgaaaatgttgcatttgctttagaggtcatcggggagcgcccagaggtgatcagaaaaaaagtgcttgaagtgcttgatcttgtccagctgaagcacaaagcaaggcaatttcctgatcagctgtccggaggagaacagcaacgggtttcaattgcgcggtcaatcgtcaacgaccctgatgtcgtgatcgctgacgagccgacgggaaaccttgaccctgagacgtcttgggaaatcatgaagacgctcgaagagatcaacaaccgcggaacaacagtcgttatggcgactcataacaaagaaatcgtaaacaccatgaagaaacgggtcatcgcaatcgaagacggggtcattgtgcgtgatgaagctagaggggagtatggttcttatgattag

SEQ ID NO: 4243 - DNA, 129 bp, Bacillus licheniformis
gtggctttcagagaaaaagtaagcatgccttgccagtcaggaggcgaaaagaaccttcttcacgttcaggtgaaaaaggttctttttttgttgaaaaggtctttttgcctattgggaaaacggaattaa

SEQ ID NO: 4244 - DNA, 327 bp, Bacillus licheniformis
atgaaaatgaagctgtttactctgtttatggctgtttcttttgtgctggctgcctgcggcggcaataacaacgaaagcaaagagaaaaatacaggcgggcaagcaactgcaaccgacggggaagagatttaccagcaaaactgcacaggctgccatggtaaggatttggccggcggttccgctccgagtttgaaggaagttggcggcaagtataaggaaagcgaaattaaggacattgtagtcaacggccgcggcggaatgcctggcaatcttgtagacgaaaaagaagctgaagcggtcgcgaagtggctttcagagaaaaagtaa

SEQ ID NO: 4245 - DNA, 855 bp, Bacillus licheniformis
atgaatatggacaaaacgagatatcaattgtttacggtgctgcgtgactacggctatatcctgtttggatcagccgtcgtcgctgtgacatttaatatgtttttgcttcccaaccggattgcagccggcggagtcagcggcatcagcaccattttgcaatcgttcggctttgaagccgcctatgtgcaatgggcatttaatattcctttatttattgccggggttctggtactcggaggaaaattcggcatcaagacgcttgtcgggtctgtttttctcccgtttgtcgtatacgtgacgcgggacattgctccggcgacagagaatccgctcttggccgccattttcggcggtgtcggcatcggagtcgggatcgggatggtctttctcggaaggggctcgacaggcggcactgcgctggccgctcaaatcattcataagtacaccgggctgtcgcaaggcaaatgtttggcgctgattgacggaacgatcgtcctgtccgcgatgtttgtttttaacatcgaacagggactttatgctatgcttggcgtttatatatcaagcaaaaccatcgatgtcatccaggtcggattgaaccgttccaaaatggcgatgatcattacgaaccgggaagaggaagttcgacatgcggtactgaataaaatcgacagggggattacgaaaatatcagcggtcggaggctatacagatgatgagcggcctattttgatgtgcgtggtcggccagaccgagttcacaaagctgaaacaactcgtaaaacacattgatgagtctgcatttgtcattgcgatggatgcttcagaggtgcttggcgagggttttaaacgcgcataa

SEQ ID NO: 4246 - DNA, 984 bp, Bacillus licheniformis
atggctgaccccgacttttggggagatcagcagaaagcgcagacgatcattaatgaagcgaacgcgttaaaagactatgtcaacacgtacaaaaatttaagcgagtctcatgaagaactgcaaatgacacacgatcttttaaaagaagatcctgaccaagacctgcaaaatgaactggtcagcgagctgaaaagcttaacgaagcaatttaacgaatttgagctgcagctgttgttaagcgagccgtatgataaaaacaatgcgatccttgagcttcacccgggagccggcggcacagaatcacaggattggggttcaatgcttctcagaatgtacaccaggtgggcagagcgccgcggatttaaggtggaaacccttgattacctcccaggggatgaagcgggaatcaagtctgtcactctcctgatcaaaggccacaatgcatacggctatttaaaagccgagaaaggtgtgcacaggctcgtcagaatttctccgttcgactcatcagggcgcaggcacacgtcgtttgtgtcttgtgatgtcatgcctgaattcaacgaagaaatcgacattgagatccgcacggaagatattaaagtcgatacgtacagggcaagcggcgccggcggccagcacgtcaatacgacagactccgccgtcaggatcacccacctgccgacaggcgtcatcgtcacttgccagacggaacgctcgcaaattaaaaaccgcgaacgtgccatgaaaatgctgaagtcgaagctgtatcagcgcagaatcgaagagcagcaggcacagcttgacgaaattcgcggcgaacaaaaagaaatcggctggggaagccagatccgctcatacgttttccatccgtattccctagtgaaggatcatagaacgaacacggaaatggggaacgtgcaggcggtcatggacggagacattgactctttcatcgacgcatatttgcgttccaagctttcctaa

SEQ ID NO: 4247 - DNA, 2526 bp, Bacillus licheniformis
atgcttggaattttaaataaagtgtttgatccgacaaaacgcacgctcagccgttatgaaaagaaagcgaacgagattgatgcgctcaaggcagatatagagaagctttcagacgaagctttgaagcaaaagacgatcgagttcaaagagcgccttgaaaaaggcgaaacggttgacgatcttttggttgaagcgtttgccgttgtcagggaagcttcccggcgcgtgacaggcatgtttccgtttaaggttcagctgatggggggcgtcgcccttcatgaagggaatatcgccgaaatgaaaacgggggaaggtaaaacgctgacttccacaatgcccgtttacttgaacgctctgtcagggaaaggcgttcacgtcgtgacggtcaacgaatacctggcgagccgcgacgctgaagagatggggaaaatctttgagtttctcgggctgacggtcggcctaaacctgaacagcctgtcaaaagacgagaagcgtgaagcctatgcagcagatattacgtattctacgaataatgagcttggctttgactacttgcgcgacaacatggtgctttataaagagcagatggttcagcgcccgcttcattttgcggtcatcgatgaagtcgactccattttgatcgatgaagcaagaacgccgctcatcatttctggacaagcggccaaatccaccaagctttatgttcaggccaatgcgtttgtccgcacgctaaaagcggatcaggactacacatacgatgtgaaaacaaaaggcgttcagctgactgaagaggggatgacaaaagctgaaaaggcatttggcatcgaaaacttgtttgacgtccgccatgtcgccttaaaccatcatattgcccaggcgctgaaagcccatgcggcgatgcataaagacgtcgactacgtcgtcgaagacggtcaggtcgttatcgtcgactcttttacaggccgtttgatgaaaggccgccgctacagcgacggacttcaccaggccattgaagcgaaggaaggccttgagatccaaaatgagagcatgacgctcgcgacgatcaccttccagaactatttccgaatgtatgaaaaattggccggaatgacgggtaccgcaaaaacggaagaagaagaattccgcaacatctacaacatgcaggttgttacgattccgaccaacaagccgattgcccgcgatgaccgaccggatttaatttaccggaccatggaaggaaaatttaaagctgttgcagaggatgtcgcccagcgctatatggtcggacagccggtacttgtcggtacggttgcggttgaaacatctgaattgatatcaaggctccttaaaaataaaggaatcccgcatcaagtgttgaacgcgaaaaaccatgagcgggaagctcagattatcgaagatgccgggcaaaaaggcgcggtcaccatcgcgaccaacatggcgggccgcggaacggacatcaagcttggcgaaggtgtaaaagagcttggcggactggccgtcatcggtacggaacgccatgaatcaaggcggattgacaaccagctgcgcggacgttcaggccgtcagggggaccctggtatcacccaattttatctgtccatggaagatgaattaatgaaacgcttcggcgcagagcggacgatggcgatgcttgaccgcttcggaatggacgattcgacgccgatacagagcaagatggtttcaagagcggtcgaatcttcacagaagcgtgtggaaggcaacaactttgatgcccgtaagcagcttctgcaatacgatgacgtgctccgccagcagcgcgaagtcatctataaacagcgctttgaggtcatcgattccgataacctccgctccatcgtcgaaaatatgattaaagcttcactcgagcgggctgttgcttcatatacgccgaaggaagatctgcctgaagagtggaatcttgacggccttgtggagcttgtaaatgcgaatttccttgatgaaggtggagtggagaaaagcgacattttcggaaaagagcccgaggagattacagagctcatttacgaccgcatcaaaacgaaatacgatgagaaagaagagcggtacggctctgaacaaatgcgcgaatttgagaaagtcatcgttctccgcgaagtggatacgaaatggatggatcacatcgatgcgatggatcagctgcggcaaggaattcatctgcgcgcttatgctcagacaaacccgctccgcgagtatcagatggaaggctttgcaatgtttgaaaacatgatcgcggcgattgaagatgatgtagccaaattcgtcatgaaggctgaaatcgaaaacaaccttgagcgcgaagaggtcattcaaggacagacgacagcccatcagccgaaagaaggcgatgaggaaaaacaagcgaagaaaaaaccggtccgcaaagcggtggatatcggacgcaatgatccttgctactgcggaagcggaaaaaaatataaaaactgctgcggaagaacagaataa

SEQ ID NO: 4248 - DNA, 564 bp, Bacillus licheniformis
ttgatggagttcaacgtcagaggagaaaatattgaggtaacaccagcgttaagagaacacgtcgagaagaagattggaaagcttgagcgttattttgaaaataacgttgatgcgattgttcacgtcaacttaaaattctacaatgatcaggaatcaaaggtggaagtgacaattccaatgacagacctctctctccgtgcggaagttcaccacgaagatatgtacaatgcaatcgatctcgcaacgaacaaactggaacgtcaaatacgcaagcataaaacaaaagttaaccggaaattccgcgaaaaaggttcttcgaagcatgtttttgcagaaggaaacggcatcggaacggccgtgcaggaagacattgaggatgaacagccgcaggttgtccgtcaaaagcgctttaatttaaagccgatggataatgaagaagcgattttacaaatgaatatgcttggacacagcttctttgtattcacgaacgccgaaaccaatctgaccaatgtggtctaccgaagaaacgatggaaaatacggtttgatcgagccgaacgaataa

SEQ ID NO: 4249 - DNA, 378 bp, Bacillus licheniformis
ttgacaagcaccgacgattacatgctcttaacgacttattatcagcttttgtttacgattgaagaggggttttgctatttaatagaagcgaatcaagatttggcgaagacagaaggagagcggatttttaacgatttaatctatgctttttttcagttggattcgtcgcacgctgttttgctgtcgattttggagacaagctgtgccaaatcttcgattcgtttttttgacagagtcttccgtgagtttgacagcttgatctactacaattatccgtctgctgaatttcagcatgacttgatccatcactttttaccgctttatcgggaatggatgaaaacgatccaccaatgcatgaaaccttatgtcatccattaa

SEQ ID NO: 4250 - DNA, 306 bp, Bacillus licheniformis
atggaaaagattgagctgctctacagcgaaacaaaacatatgctcgctcaaataaaaggcgccccggaaagcgatgagctggttcaggcaattgaagattttcttaaaaaacgcgatggcttgatccgcgagatcaagccgcctctttctgagacggaaaagcggcagctgcagcaggtgacggatatggagccattgatcatggccgaactgaaaggctgcagcaggctgtcaagcaggagctgcttcaggcgaagcagaagcgtgccatgcatcattcctatatcaatccgtacgccaacatga

SEQ ID NO: 4251 - DNA, 402 bp, Bacillus licheniformis
atggctttaaacaatccgtatgcagcttatcagcaaaattcaatcaacatggcgactcctggagaattgacgcttatgctatttgacggctgccttaaatttatgaagctggcgaaacaggcgattgaacaagaggatatggaaacgaaaaatacgaaccttgtcaaagctcaaaacattatacaggagctcaatatcacccttgaccggaaagtcgaattggccgcttcgatgggggcgatgtacgagtatatccaccgccgcctgattgaagcaaacattaacaatgacaaagatatcgtggcggaagtcgaagggtatgtcaaagatttacgcgatgcctggaagcaggcgcttcaaattgaacggcagggccggttcggatcgggcggactggcataa

SEQ ID NO: 4252 - DNA, 1482 bp, Bacillus licheniformis
atggcgatcagaatatcaggattagcttcaggtatggatatagacgacattgtcagcaaattaatgaagacggagcgcgtcccgcttgataagcttactcaaaagaaacagactttggaatggcagcgcgacagctatcgtgaaatcaatacgaaaattaaagatttgcaggaatccatcaaccttatgctccgtcccagcacgtacggcgcgaaaaaggtgacaagctctgacgagtcggcggttacggcaacaggcaccacgaatgcggcgtcaggcacgatccaagtcaacaagctggcgactgcggccacctataaatcttccagcctttcagggtataccgggagcgatcaaacgctaactttccaagtgacagcacctggagaaacgactgcgaaaaaagttgaaatcagcgtcagcagcacggatacgctggatgacatcgtttccaaagtcaacaaatcaaatttgggcgtaaccgctatgaaagaaaagatttataacggttctgaatatgtagaaacgatcgctttcacatcaaaagcaaccggcgcagggggcagcatacaggcagctgatgatgcgacggcgagctttatgtccaatcagctcggatttgcgcttgatgccgacaacaagctgacagccagccaagccggccaaaacgccgaagttgtcatcaacggattgcagattgagaagacaacgaacaactttaccgttaataatgtgacatatcagttgaagaatacgacaaacagccccgtttcgcttgatgtagcgactgatgttgacgggatttatgaaaagattaaagactttgtcacacagtacaacgaactgatcgatatggtcaacggcaagctcacggaaaagaaataccgcgactatacgccgctgacagaagaacagaaaaaagatatgacggaaaagcaaattgagctgtgggaagaaaaagcgaaaagcggattgttaaggggcgacacgattttaagcggcgccaccaatcaaatgaggacagatttttattcgaatgtctctgtgaacggcgaatcgctgcagctcactcagtttggaattacgacatcaagcgtatacagtcagcgcggtcatttagagatcaacgaagaaaagctgaaagcgaaaattaaagaagaccctgacagtgtggcaaacctctttatggcgggaacgagcagcacggaaaattacaatgaaaaaggcatcatgagacgccttcagacggttttgaccgatacgaagaagcagattgaagataaagccggaaattcagctatggcaaacaatcaatttacaatcgggaaaaacttgaatacagttgaatctgatatttcgtccatgaataaccgcctgacacaaatcgaaaatcgctattatacaaagttcacggcgatggaaaaagcgattcaaaaaatgaatgaacaatcgacatacttggcgcaattgcttggacaataa

SEQ ID NO: 4253 - DNA, 342 bp, Bacillus licheniformis
ttgtcgatcaatagattgtcatctttagaacccattattgatgcttacaaaacacagatgttgaataaacagtatgaagctgtggaacgcccgcagcagacggacgctgcagaatttacatttgctcagcttgaaaaaaccgtacaaggcgcaaacaaccttttggagccgtcgcaggtgcacctacagtttgtgcttcacgaaaaattgggagagtattatgtgaaggtcgtggacaatcggacagaggaagtcgtccgcgagattccgccaaaggagtggctcgatttttatgcggcgatggcggaatttatggggttaattgtcgataaaactacatag

SEQ ID NO: 4254 - DNA, 933 bp, Bacillus licheniformis
atgagaatcaaccacaacattgcagcgcttaacacgctgaaccgtctgtcagcaaacaacggcgcaagccaaaagaacatggagaagctttcttctggtcttcgcatcaaccgtgccggagatgacgcagcaggtcttgcaatctctgaaaaaatgagaggacaaatccgcggtcttgaaatggcttctaagaacgctcaagacggcatctctcttatccaaacagctgaaggtgcattgactgagactcactcaatccttcaacgtgttcgtgaactagttgttcaagctggaaacactggaacacaacaaactgaggatttaacagctatccaagacgagatcaaagcattaaaagacgaaattgacggcatctcagaacgtacggaattcaacggtaaaaaattgttggatggtactttcaaagcaccagcagatccagcaaacccagctgcaggtgaaaaatctttagttttccaaattggagctaacgcaacacaacaaatttctgttaacattgaaaaaatgagcactgatgcattaggagtcaaagatcctgcagatactacgggcagaactctagtaaccaaccaatcagttaaagatatcgatgtaactaaatttgctgataatgcagcaactgcaacagatgtaggttttgatactcaacttaaaatcgttgattcagcgatcaaccaagtatctgcacaacgtgctaaacttggtgcggtacaaaaccgtctagagcacacaatcaacaaccttggtgcttcttctgaaaacttgacagctgctgagtctcgtatccgcgacgttgacatggctaaagaaatgagcgagttcacaaagaacaacattctttctcaagcttctcaagctatgcttgctcaagcgaaccaacagccgcaaaacgttcttcagttgcttcgttaa

SEQ ID NO: 4255 - DNA, 225 bp, Bacillus licheniformis
atgctagtcttatcccgcaagctcaatgaagcgattcaaatcggagacgatatcgaagtgaaaatcatatccgttgacggagatcaggtgaaaatcggcatcgacgcgccgaagcatatcgaaattcaccgcaaggaaatctatttggcgatccaggaagaaaacagccgggccgcttccatctcaaacgatttgcttgcgaaattatcctcacaaaaaaagtga

SEQ ID NO: 4256 - DNA, 432 bp, Bacillus licheniformis
atgatcattaaaacaaagtatcacggagaaacgcaaattcaagaagaccagacaatcgtgtttaaaaacggcctgcctggatttacaggggagaagaagttcgtcatcctgccgctttccgaggattcgccgttcgtcgtccttcagtcggtgcagtcggaagagctggcattcattgtcgccagtccgttcgtctttttcaaagattatggctttgatcttgatgaaacgacggttgaacttcttgaaatcgaatctgccgaagacgttgaagtaatggcgattttaacgatcgaagagccattcgagaaatcaacggccaatttgatggcgccgatagtggtgaaccgcagaaagatgcttgccaagcaagtgattttgcatgactcttcttatctgacaaagcagccgataggaggggaagcatgctag

SEQ ID NO: 4257 - DNA, 567 bp, Bacillus licheniformis
atggagatgcctaggctgatcatgcaaaatatccccggccgcatcggtttaacaacgacgccgccagatttgaaaatggaacagccgcgcgctgacttgaaaatcgagcagccgccggccgaactgaagattacaaccaccccttcaaagctcacgattgaccagacaaaagcttgggaagacttagaaagaaagcatatatttaaaaggattgaagaaggggcgcagcagggctatcaggattggctcgccggaatggcacggaccgctgaagaaggagacgaaatgatgcggatcgaaatcgaaggcaatccgcttgcagaccaggcgaggcggaacagcgagcctgaaccgattcaaatcggcgttcattttacgccgtcatttgacagggtgaaaatcgcatacgaaccggctaaagtgaacattagagcgacgccgcgcaagcctatcatcgaagcaacgccgaataaaccggttgttaactatacgccgggcagtgtgaaggttgacatgctccaatatccggaggtaaaaatagatgtggaatacccaaaacaaaagtaa

SEQ ID NO: 4258 - DNA, 912 bp, Bacillus licheniformis
atgcgggtaacccaagggatgattgcaaaaaattctttgcgctacatcaattcaagctatggaaaactggataagcttcaatcccagatttcttcgggaaaaaagatcacaaaggcatccgacgatcccgtcgtcgcgatgaaaagcctgaagtacaatacacagctgtcccaggttaaacaatatcaaagcaatgcctcgcaagcttttacatggcttgaaaacacggaaacgaacattacagaaggcattgatatcatggcgaaaatcagggagctgaccgttaaggctcaaaacagtacaaacggcaaggatgaattaaatgcgatcggggtcgaaatcggccaactgaaagaccagctgattcagatcgccaatacgcaggtcaacggccgctacctttttaacggaacgaactctgacgtcgctccgatcacaaaaaacgccgatggtacttacacatacaattttgaaaactatacaagcagctctgacgttctcatcaatgtttcgccaaacgcaaccttaaatgtaaactcaaatccgatttcggctttcggcggacaatcaagcagcggacaaaacgtctttgaaatgattgagtctctcgaaaatgccttaaaagcgggaacaatggaaggaatggaaaacgccctttcagacattgaccagttctccaatcagatgagcaatgagcggtctgatatcggagcgcgctacaaccggctcgaattgatcaatgcgcggctgagcgaacaggaagagacggcgacaaaggtattgtcagacaacgaagatgttgagcttgaggagatcattactgaatttattacacagcaatcggttcacagagctgcacttgccgtaaatgcgaaaatcgttcagccgacactggttgactttttaagataa

SEQ ID NO: 4259 - DNA, 1524 bp, Bacillus licheniformis
atgacaaatccaacttttttagggctggaaatcgcaaaaagaggcttgtccgcgcagcaatcagctctgagcgtgacagcaaacaatatatccaacgccaataccgaagggtattcaagacagcgtgttacatttaaagcatcaaccccttatccgtccgtatcaagagactctgtcggacttgcaggccagatgggtacaggcgttgaaatcggttcggttgaaagggttagggacagctttctggactatcaatacaggacgcagaatacaaaggccggctattacaatgcaaaagtggacgcttttaaccaaatggaagggattatgaatgaactgaacgacaccggactaaacaaagttctgaattcattctggaattccattcaggaattgacgaacaacgcccacgaaccgagcgctgcttctgttgttgcgcaaaaagggcaggcggtcgccgatacatttaacactctgtatgaatcgctgacaaccgttcaatcaaatttaggcgaccagattgatcaaaatgtgatgacgattaactcgcttttgtcccagctgaacagcttgaacgagcaaatcgccaaagtcgagccgaacggctatctcccgaacgatttgtacgataagcgtgatcagctccttgatgaactgtcttcaatggttaatatcaaagtcagctatgcgaaaaccggcggcaatccactcgcaaccgctgaaggcattgtgtcaatagaagtccttgacgtaaacggccagtctctgggcaaggttcttgacgggccaaacttcacgactgaaactgtcaaagtgaattacgacaacgatacaggccttgtgacgggcgtttccctcggcgggacggacatcggcatcgattcgtttactagcaaagggtccctgctcggtttaatcgaatcttacggatatatgtcaaacggtgaagaaaaaggtttgtatcccgaaatgctcgcagatctggatacgatggcgcttgcttttgcgaaagagtttaatgcagtccatcaaagcgggtttacttcatcgggagaaccgggaggcattttctttgaatttaccggaggagaggctgagcctgcaaagggagccgccggcaaaatcaaagtagccgatgagatcatgaattcaaaaggcgataaagtcgccgcatcgctgaatggtgaagcgagcgacaacgccaacgcgacaaatctcgctaatgtcttcaccaagaaaattcaaatcggtgacaaaacgacgaccgttttagactattacgcaggcatcatcggtgaaatgggcgtaaaagctcaggaaacaaacagactggccaaaaatacagaaacgcttgtaaacactgctgaattgaacaggcagtctgttagcgccgtatcattagacgaagaaatgtcgaacatgatccaattccagcatgcttataacgcggctgcgagaatgattacgctgcaggacgaagtcctcgataagattattaacggcatgggtgtcgtgggaaggtag

SEQ ID NO: 4260 - DNA, 477 bp, Bacillus licheniformis
gtgaaacgggtgattgaagagctggagcgcttatgcgtgctgcatgaacatctgctgtctctgtcggaacaaaaaacggaggcgctgaagacgaacgaaataaaggcactttcagaaatcgtgacgaaagaacaaaagtatgtgcaggccattgaacaaacggagcagtcccgcattgaagcaactaaaagctgtatcggcagctcggacgcgacgatcagcgcatgtatcagcaaagctgcgggcggcgagaaaaaggtgctggaacagctgtatgccaagctctcacagctcgtcacccgtttgaaggatgtgaacgatttgaacaagcagctgacttttcagtcgcttcaatttatctcgcttacatttgatatgctccttccgaatgaaggcggttcgaattacggaaaagagcagcagccaaaccagacaggcggggtgaaacggctttctttattcgattcaaaagcttag

SEQ ID NO: 4261 - DNA, 267 bp, Bacillus licheniformis
atgaagatcaaccaatatggaacacaacctgttaatccttatcataaatcatttgaaaaacaaacagcttcttcacagggagcagcccagccggaagacaaagttgagatttccgcgaaagcaaaggagctgcaaaaaggccctgatttaatgaaggagcgtcaggagaaaattgcccagctgaaagcagccgtggagaatggaacgtacaaagttgacggcaaaggcatagctgaaaaaatggtcaatttttataaacagcaataa

SEQ ID NO: 4262 - DNA, 420 bp, Bacillus licheniformis
atgagtcaattggcgaattgtccaagatgtaacgcattgtttatgaaaagcagttttcaaaccgtttgcgcttcatgcttgaaagaagaagagcgcgcgtatgaaattgtttataaatttctgaaaaaacaggaaaaccggcagtccacgatgtttcagatcgtagaaaaaacaggtgtcgaagaagagttaatattgaagtttattagacagaaacgcattcaaatctctaatttcccgaatctcggctatccgtgcgaaaggtgcggcacgcttattcgggaaggacgttattgcatgtcatgcgagcaggatttggcatcgcaaatgagtcaattagaccagctggagcagcttgaaagagagagaaataatagttctaaaggcacgtactatacctttaagcccaaaaatgactga

SEQ ID NO: 4263 - DNA, 735 bp, Bacillus licheniformis
atgaaaacccgctttgcgcaagcaatcgaagagggagggaataaactgaattgtttaatttgtgcagcgcctcttttacattctctctcatggcattcttttttctttttacgatcagaagagaaaatatgcagggaatgtaaagagaactttatcgagatcaaaggaaccgtatgccctaagtgcggacggccacaggggagcgaagagctgtgcggtgactgcgcaaaatgggaggccaatccgttaacccgctctcttttgaggcaaaaccgctctgtttatctctacaatactttcatgaaagaagtccttgcccgttttaagttcagaggtgatgctgaactggtcttcgcttttgccccttcatttatcagcgcttttcaacaatacttccgccgcagcccgtctgttttagttccgatacctctcagtgaagaacgtaaagcggagaggggatttaatcaggcggagcgtcttgcttccttattacaaatacccgttattcatcccttgatcagaatcgaaaatgaaaaacaatccaaaaaaagcaggaaagagcgaattaagccaaaaaccgtttttagaaccgaaaaggggtcagtaaagaatctggatgtcatattgattgacgacttgtatacgacaggagcgacccttcatcatgccgctgattgcctgatgacatccggagaagcaaaatctgtatcatcatatacattaattagaagctaa

SEQ ID NO: 4264 - DNA, 285 bp, Bacillus licheniformis
atgctagtcaacgccaaagaagctgttttggaagagttgtttgatcagtatatcgatcagctgcacatgagctgtacgtgcagcaggtgcagggaggatgtgctcgccttggctttaaatgcagtaaaaccgcaatatgtaacagatcagtcgaagctggcttacataaaagcagagctcgttgacaaacaaaagaatacatcaatgcttgtcaccttggctgaagctgccagaaaggtgaatgaaaacccgctttgcgcaagcaatcgaagagggagggaataa

SEQ ID NO: 4265 - DNA, 1395 bp, Bacillus licheniformis
gtgattcacatcgaacaaccggcattctatacccgtgaattgcggtcatgtttggagcagcgccaccttctgaaaagcgaacttccttttcgtgaatccgtcgttgattggcatatccaagaaggcttgataaaaacggaggaaggtattaaaaaaacgaagaaaggctttatttgtttgaggtgcggccagcacgaacgctcatttttcgcccggtatccttgctatcggtgcagtaaatgctgcgtgtactgccgatcctgcgtcatgatgggcagggtgagcgattgtacgcctctgttgacttggcacatgcatgtcagccataaatgggcgcctgttcatacggagtggaaaggcgcgctttcagcaggtcaggagaaagcggccaaatccattatcaatgctatacgaagaaaagaagaactgttggtctgggcggtttgcgggtcggggaaaacagaacttctctttcaagggatcgaattcgcgctgaacaacggcttgacagtatgtatcgctactccgagaaccgatgtcgtactcgagcttgctccgcggtttcgccaagcctttccaggggtggaaattgccgctttgtacggaggaagctcagacgttgggaatctctcgccgcttatcatttcaactacccaccagctgctccgctataaagaagcatttgacgtgatcatcatagatgaggtggatgcttttccgtattctattgataacacgctgcaatacgctgttaaaaaatcggcaaaacggcaaagcgctcacatctatttaactgccacgccttcagcagatatgaaaaaaagggctgagagcggaaagctggacaccgtccgtattcccgcgagattccaccgcagccccttgcctgaacctacattgatttggtgcggaaattggaaaaagagtttgaaacgaagaaaagttccttttcgcctcaaaaaatggctttttaagcaccaagaactgcagcaaccggtttttttattcgttccctctgtccctgttcttaaatctgtggtcagtgtgctgaaaaaggaaacatttcgcgctgaaggagtttatgccgatgaccctgacagaaatgaaaaagtgaaccggtttagggaaagtaagcttgaggtgctcgtgacaacaacgattttggaaagaggagtgaccgtcaaaaaagcgcaggttggagtattgggggcagagtcggcggtttttaccgaaagcgccctcgtccaaatggcgggaagagccggcaggcatcccgagcacacagatggagacgtctgtttctttcattacggcaggacaaagtcgatgaatgcggcacgacgtcatattcaaaacatgaataaaatgtctaaaaaggaaatgttgattgactag

SEQ ID NO: 4266 - DNA, 843 bp, Bacillus licheniformis
atgaaaacagcagtagtaacagacagtacggcatatatacctaaagacctgcgtgaccgctacaatattcatatgatacctctcaatgtgatctttggagagacttcatacagggaagagatcgatatgagctggaaggactattacaaagaagtaaaagcccacgaaaatctcccgacgacttcccagcccgcctacggcgagttgatttctctctatgaaaaactcggtgaaacatatgacgcggtcatcagcatccacctttccagcggcatcagcggaacattcaacagcgctgtatcagcaagcggtatgcttgaaggaattaaagtgtatccgtttgattcggaaatcagctgcatggctcagggtttttatgcgatcgaggcggctgagatggcggaaaaaggagcggctcctgaggaaatcatccgccacttggatcatatgaaaacctcgatgagggcttattttatggttgacgacctttcacatttgcaaaggggaggacgtctgagcggcgcccaggcttttgtcggaagccttttaaaagtaaagccgatcttgcattttgagaacaagctgatcgttccctacgagaaaatccggacgagaaaaaaagcgatgaaccgtttatttgagctttttggcgaagatgccgagaaaggaaagccgctgagagcggttgtgattcatgccaaccgtgaagaagaagccgatcaaataatcgaagaattgtcgaagcaatatgcacatgtcgaattttataaaagctatttcgggcctgtgatcggcactcaccttggtgaaggagcgatgggtatcgcctggtatacagtataa

SEQ ID NO: 4267 - DNA, 690 bp, Bacillus licheniformis
gtgactaaagtaaatattgtaattattgacgatcatcagttattccgtgaaggtgtcaaacggattttggatttcgaacctacctttgaggtagtggccgaaggagacgacggagatgaagcggctcgcattgtcgagcactaccatcctgatgttgttatcatggatattaatatgccgaatgtgaacggagtagaagcgacaaaacaactggtcgacttgtatccggaatcaaaggttattattttatccatccatgatgacgaaaactatgttacacatgcattaaaaacaggagcccggggctatctgctgaaagaaatggatgccgatacgctgatcgaagccgtgaaagtagtagctgaaggcggatcttatctgcatcctaaggttacacacaatcttgtgaatgaattccgccgtcttgcaacaagcggtgtatcatctcacgctcagcatgaggtgtatccggaaatccggagacctcttcacattctcacaagaagggaatgcgaggtactgcagatgctggcggatggaaaaagcaaccgcggaatcggcgaatcattatttatcagtgaaaaaacggttaaaaaccatgtcagcaacatccttcaaaaaatgaatgtaaacgacagaacgcaggctgttgttgtagccattaaaaacggctgggtagaaatgagataa

SEQ ID NO: 4268 - DNA, 1158 bp, Bacillus licheniformis
gtgagcgtttccaaaatggactccaaagttttagattcaatcattatgaagatgttaaaaacggttgacgggagcaaggatgaagtctttcaaatcggagagcagtcccgccagcaatacgaaggcttggtagaagagctgaaacagattaaacagcaggtcaacgaagtcatcgatcttggagacaggctggaagtgcatgcccgccatgcgcggaaccgcttgtcagaggtcagcagaaactttcataaattcagtgaagaagagattcgcgaagcttatgaaaaagcccacaaactgcaggttgaactgacaatgatccagcagcgggaaaagcagctgagagagaagcgtgatgatctggaacggcgccttttggggcttcaggaaatcatcgagcgttcagaagggcttgtcagtcagattaccgtcgtcttaaactacttaaatcaggatctgcgccaggtcggcgttctccttgaagatgcgcaggccaagcaggatttcggactgcggattatcgaagcccaggaggaagaaagaaaaagggtctcaagggaaattcacgacggtcctgcgcaaatgctggccaacgttatgatgagatctgaactgatcgaacgcatcttcagagacaaaggaacagaagaaggctttcaggaaattaaaaacctccggcaaaacgtcagaaatgctctttatgaagtcagaagaatcatttatgatttaaggccgatggctttagacgatttgggattgataccgacgctcagaaaatacttgaacacgatcgaagattatcatggaaaagcaaagattcatttccaatgcatcggagaatccgaagaaagaagaatagcaccgcggtttgaggttgcactattccggcttgcacaggaagcggtgacaaacgccttaaaacactccgaatcaactgaaattcatgttaaagtagaagtgacaaaagattttgtgacgctgattatcaaagacaatggaaacggctttgacttaaaagaagtaaaaggcaagaagaacaaatctttcggtctgctaggtatgaaagaaagagtcgatttgctcgaaggctcaatgacaatcgattcgaaaataggtcttgggacatttatattgattaaagttccactgtctttgtaa

SEQ ID NO: 4269 - DNA, 639 bp, Bacillus licheniformis
atgctgcaaagctatctgactgttgcaggtgaagggacccatgaaatcgtgattgaaaaatcccggtttatatgccacttgagccgcgtcagtactgaagaagaagcacagaactttatcaaccacataaaaaagcagcattggaatgcgacgcataattgctcggcttacgtcataggagaaaatgatcaaattcaaaaagcgaatgacgacggagaaccgagcgggacagcgggcgtaccgatgcttgaagttttgaagaaacgcaaccttaaagatacatgcgccgttgtgacgagatatttcggcggcattaaactcggcgcaggaagattgataagggcttacggaaaatccgtgtcagaggggctgaaccatgtcggcgttgtcgaacgaaagctgatgcgggtcatgcacaccactgtgaactatacatggatcggcaagcttgaaaacgagcttcgcgagtccccttatcaaataaaagacgttcactatgcagacgatgtcgaatttgaaacgtatgtcaaggaaagcgaaaaacaggcatttacggaatggataaccgaattaacaaatggcaagagtgagaatagagaaggcattcaagtctatttggaagaagcttttaataattaa

SEQ ID NO: 4270 - DNA, 1077 bp, Bacillus licheniformis
atggctgagcgtattaaagtgaaagtgcggaaaaaaaagaataaaaagagaaggctgattaaacggtttatagtccttatgctgctcgcacttctcgcagtcggcggagtgggcatatataaaattataaacacgatttccgcggctgacggcacttatgatgagcttgaacgcggagagaagtcgaagctcagggacgatgttgttgatattcaaaaaaagccgttctcgattctttttatgggggttgaagattattcgacaaacggcgagcacggccggacggattccctgattgtcgtgacgctcgatcctaaaaagaagtcgatgaaaatgctgagcattccgcgggacacaagggttcatttggccagcgacacaaccggcacaaaaacaaaaattaatgcggcctatgcaaaaggcggcaaggatgaaacaattgagacggttgaggatttcctcggaatcccgatcgactactatgcaacggtcgattttgacgggtttaaagatgtcatcgatgaaatcggcggaatcgatgtcgatgtgccgtttgactttagcgaaaaaagcgatgtctccaaatcgaagagaatctattttaaaaaaggaaatatgcatctaaatggtgaggaagctcttgcctacgcaaggatgagaaaacaggataagcgtggagacttcgggagaaacgacagacagaagcaaattttaaaagccgctcttgatcaaatctcaaaaccgcaaaacctcgctaaaattgatacaattgcccaaaaagcaagcaaaaacattcagacgaattttagaatcacgcaggcgctggcgcttcaacaaatttacagcggctttgccggcgatgatatcaaaacattaaacatcacaggacaggatcttacgattgcaaatgtttactactttgagcctgaccagcaaaacctggaaaacgtgcaaaatgaattgacccatcatttgtacccggactcagctgccgattcgagcggaacatcgtctgaatcttccgcaaccgctgacggtgcggacagctcagctgaatcgtctgctgcttcttattga

SEQ ID NO: 4271 - DNA, 375 bp, Bacillus licheniformis
atggatgatcattaccttggacaaatcgaacaaatagtgaaagcattgtataaatcctggtcttcagattcaagttcaaaatggagtaaggataaccctgccaagggacaatgcggcgtaaccgcgctagtcgtaaatgatatattaggtggagaaataaagaaaacaaagctgcctgaagggtggcatttttataattttgtcaatggtaaaagatatgatttaacggtttctcaattcaaagaagacatcctgtatatggatattccctcaaatagagacgaggcattctcagataccagcgaaaaacagtataattatttaaagcatagtatgatcaatcatttgccttgttcaaatagtaagttacgctag

SEQ ID NO: 4272 - DNA, 1065 bp, Bacillus licheniformis
atgtcttatgaacgcactgtaattgcgttttttgtctctctcattactgttttaattattactccgcttgtcaaacgtctagcaatcaaatccggggtcgtggatcagccggataaacgaaagatacatgataaagtaatgccgagaatgggcggtttagccatttttataggagtattgaccggttcgtttgccggcggcctttatgaaaacagaataacagcaattacactcggtgcttttatgatcgtcattttaggcattgtagatgacaaatacaatttaagcgcgagaattaaatttatcgtacaagtattagtagcctgcatcatcgtcagtacaggcttgaaaatggaatttttatcgattccgttttgggatcttcgctttgatttggggtggctcgcatacccgttgacgattttgtggatcgtcgggatcaccaatgccatcaatttaatcgacggattggacggactggctgcgggtatatccgtcatcggcctctcgacgattgccgtcatggcgttttctgccgataaaatcttgatcttctctttgtcgctggtagtcatcggaagcacggtcggctttctgttctacaacttccacccggcgaaaatttttatgggagacacgggctcgctgtttttgggctatgtgatctcggttctgtcgctgctggggctgtataaaagcgtgactctgttcagcgtcgtcatcccgattattatattaggagtgccgatatttgacacgacatttgcgatcatcaggcggattttaaacaagcagccgatttcggctcccgataaatcgcatattcaccacaggctgatggccttcggcctgtcccatcggaaagccgttatcgtcatttatttaatcggcgtcgtcttcagcctgagcgccattcttttaaaaaccgcaaccctatgggtgtccatcttcatcatcttcggcttaatactgttcatgcagatcatcgcagaggtgacaggccttgtaaatgagcagtacaagccttttacgaagttttacaggcggatggtgaagaggaattaa

SEQ ID NO: 4273 - DNA, 1182 bp, Bacillus licheniformis
gtgaaagcagatcaattcatacacgtcatagtagcgacaggtgaatgggggcaggatcagctaagatacagaaggcaccgccttgctgagtttttagcaggccgcaaggagacgaaggaagtcatttgggtttgtccgtctgaaaatccttcccgtgagacttttacattgcttgacaacggaatcaagcaatttgcagtcaaagattttttgaaaaagaaaatattcaggtttgcccgctacaaagatgttttctatcaaagcaagctgaagccgctgcttgaccggctgaaagaagacgttcagggagaaaaggtgtgcttatggtacaccttccccggctttccgctgctgtcgtcgctttatcaatgggatcaggtcatctatgactgcagcgacctgtgggcggccccgatcagcggtagccaaagccttgtctcaggattcaggcaaaaggtcatttttgaagctgaaggcagaatcatcaaagctgctgatacgattttttgcacttccgaatacttgcaacaaaatgtagcagaccggcttcaaggagagacaaagccggtttttacaatcgaaaacggtgtggagtacagcttgtttgcagaaaatatgcaaaaagcggatgtattgaagggaagggaaggaaccgtcctcggctttatcggaggaatcaagccgaagctcgattttaagctcgtcaaagaagctgccagaacaaaaaaagagtggacatttttatttgtcggtcctgacgggacaaacggagacgaagattttaaagcgcttcttgaagaagataatgtcatctggacgggccccgctgcgccgtcagaagtaccagcttatatgaatgtagtggatatcggtatcatgccgtataaaccgtcgccatataacaatgcggtatttcctttaaagctgtttgaatttttggctgccggaaagcctgtcgcaggtatgaacctcccttcaacggaaaaggttgaacaggaacacgtttaccgtcatttaacaggaaacgaccccgctgaatttacagcggtttgtgaagagctggagcttgcgcatgatgatgtttcccatgtggaactgcgcagaaagatcgcacgtgaaagagactggcatcatctatttttaatgatgcttgataaattgaacttgaataaggatgcataa

SEQ ID NO: 4274 - DNA, 759 bp, Bacillus licheniformis
atgacgaggcaaaaacctttaatctctgtcattacgccttcctataacgcggaggaatttatcgaaaaaaccattcagtccgtcttaaatcagacgttttccgactgggaaatgatcattgccgatgattgctcaacagatgggacaagagacattttgaagcgctatgaagaagatgatgagcggatccatgccatttttctgaaagagaatcaaggtgctgcagcggcgcgaaatgcggcgctcagcaaagccgaagggcgctatgtcgcctttttggacagcgatgatgtttggaaagcagaaaagctggataagcagctcgccttcatgagaaagcatcagcatgctttctcatttacggcatacgagctgatcagccaagacggcgaaccgcttcataaaaccattcatgcacccgtaagccttacatatgatgatgtattaaaaaatacgatcatcggctgcttgacggtgatgattgacagagaacaaacgggtgatatccggatgccgaatattagaacccgccaggatttggcgacatggctgtccgtattaaagcgggggttcaaggcatatggactgaacgaacccctcgcggaataccgcatcgttgaaacatcgatctccagaaacaagtggaaggcggcgcgaaaaacctggtacgtatacagggaaatcgaacgacttcacttgatgaaagcgacatggtgctttttccattacgctaagaacgcagtaatgaaaagattataa

SEQ ID NO: 4275 - DNA, 678 bp, Bacillus licheniformis
gtgatgaatttaatcaaacgtattgctggtagagtgaaaaagtttattgtggcgattattgcgcttcctcttattcttggtcttgtcggctattttatgccgaagggaagcgttgctccatctaattacacggctactgtaacgatatcaaccgggaactatggagaagcgaagtacaacaatgcaaagcaagtgccgctgctgttgaaaaacgaagcttttttaaaggacattttcccggatatgccggaagaggatctggcgcaattgaaagacgatctggcgattgaaatcagaacggattcacttttcaacttaagctacacagggcctgataaacaggaaactttggatactttaggaaaaattaaagatgcctatatgaaaggcgataaggcgctgttctcaaaaagagaagaagtcattgaaaagaatattaaggcgcttgaagacgaaacagtcagcgctgattccaaagttgacaaacagcggtttttgtatgagcttgaaacaagcaagcttgatatgaaggctgctgaagaaattgagccgttgatcgtgcttgataaccaggctgccggcatgtcgcctaagaaaagagcggtgctgggcgtactgatcggtttagcgctgtcattttttatcattgtcattccggaagttttcagagaacgttaa

SEQ ID NO: 4276 - DNA, 1455 bp, Bacillus licheniformis
atgagtctcaaacgttccgcggtcaatgttctggtttggctcgccgcattgaccgcagggttagcattcgttgtattggcccagtccaatgcaaaaaaaatcttgctggcgtgtctaattttgattgcgctggctgtgatcgttgtgctccggaagtatttgtcgtccgagcaattgctgatgcccgtattatatctgctcatcgctgcaacttttgccaacaatgctttttttgcgattaaattgggctttttcagcctgtttccatatcgaatacttctgattctggcaggattcttattcatagcggaaatgttgaaaggcagccagcaccttgaaaagtggaagcaggtgcatgtcaaaggcattctgatgtttttcgcgttttggttctgctatggactgatttcgctgctatgggtcaagtctgccactgatggcataaaatatctgttcctattggcaatgggaatgttttttgtttttctggttgtcatgttttttcaaaaaatggatcgtattctcgcgttttattacatatggcttgtcatgaccgtatttttaatggtcatcgggttttacaatcactttacgttaaaccacctgccgagctcgaccctttataacgggccgcactataaacagcactatccgacatccgtttttttcaaccagaatgactttgcgacatttctgtccatcagctttttcttttatttatcttttttcaaaaacattaaaaacagctacttaaaaatagcggggctgctccttgcgttctgttcggcatacttgattttcctgactggatcaagagccagcatcctgggggtcatagccggccttgccgtttatgtgttcattttgctgccgaaggtgcttaaaaaatgggcgctcatcgccgcagctgcaggatgtatcgcttttgtcacactgtttgcaggaaagattaccggagctttttatacatactttttggctccgcaaaccgcacacgatttcagcgagccgctgccatccaatgtcgccagggcgaatttgttgaaaaacgccgggcattatgtgctggatacttacggatttggcgtcggcgccggcaatgtgccatattatttggagcatcatgcactgttcgatacggaccgggtcgtggaggttcataactggctcgttgagatcatgacgaattttggagtggtgatgatgctcggttatttaacgatgtacatttatttaataaccgtgctttacagatattataaaagatcgcttggaagacggccaaagcttcttattgaaggtttgacagccgcgctcgtcgccttccttgtgtcaagcatcagtccgagttccgtctcgaatttatatttccattgggtgttcctcgcgcttgtgattgcgacggttaatacctttagagtctgcggaacggatgaaaccgaacagtataggtga

SEQ ID NO: 4277 - DNA, 930 bp, Bacillus licheniformis
atggaaaaagtactagtgacaggcggatgcggatttatcggctcgcatattgctgaacagcttctaaaagaaaattaccgggtttcaattcttgataatttaactacgggacaccgctccaacattgacggtctcccaattgacttttatgagcaggatatcacgaagccggaagtcatcgacgtcatcaaaagcattgatcccgattatattgttcatttagctgcacaagtaagcgtagcggagtctgtcagcgattttttaaatgatgaaaacatcaatatcagaggatcgctccatatcattaaagcagctggtgaatgcaatgtgaaaaagatcgtctttgcatcatcagcggctgtttatggaaatccggattacctgcctgtcgacacccgtcaccaaacaaacccaggctcaccctacgggctgacgaagcttacagtggagaactatttaaaactggcttatgatctatatggaaccgagtattgcattttgcggtacagcaacgtgtacgggccgcgccaggatgcaaaaggagagggcggcgttgtatcgattttctccgatttgctgaccagcggcaaggctccggtaatttttggagacggagaacaatcacgcgattttatttatgtcggtgatgtagcttctgccaacgtaaaggcgctaaaagctcaatcaaacgtttgtttaaatgtttcaaacggcttttccatcacggtcaatgagctgtttacagagatgaaaaaagcgacgaactctgagctttctccgatttatcaagatgaacggccgggggatatccgccacagcacactgtgtaatgaagaaacaaagaaaatcttaaactgggaaccaaaaatgccgcttgctgaaggactggaaaagaccatttcatattataaaaaagaaatgaatacgtaa

SEQ ID NO: 4278 - DNA, 1341 bp, Bacillus licheniformis
atgataatgttgaaaagaatcgctgtcattggaacgggatatgtcgggctggtgtctggaacttgttttgccgaagtgggaaactcggttgtctgctgcgatattgatgctgaaaaaataagaggactctcagccggagtgatgccgatttatgaaaacggcctaaaagaacttgtggataaaaacgtaaacgaaaatcgcttatttttctctactgatattccaaaagcgattgaagaagctgagattatttatattgcagtcggtacaccgatgtcggaaacaggggaagcggatctgacatttgttaaatccgttgccgaaatgatcgggaagcacctgaacggctataaagtcatcgtcaacaaaagcactgtccctgttggaacaggaaagctcgtacaagccattatagaacgcaattcaaaaggggaattccctttcgacgtcgtgtcgaatccggaattccttcgtgaaggaacagctatttacgatacgatgaatatggaaagagcagtcatcggcgcgacaagcgaaaaggctgctgccattattgaagagcttcataagccatttcaaacgaaaatcgtcaagtctaaccttgaaagtgcagaaatgattaaatacgctgcaaatgcatttttggctacaaagatctcgttcattaatgatatcgcgaatatttgcgaaagggtcggagctgatgtatccaaggtgtctgaaggcgtcggactcgacagcagaatcggcagtaaatttttaaaagccggaatcggctttggcggctcttgcttccctaaagacacgatggctttattgcaaatcgcgaagtcagtcggttatccttttaaattgattgaagctgtcatcgagacgaatcaaaagcagcgcgcccacattgtgcaaaagctccttgatgtgttcggcgatttaaacggcatgaccatttcggttcttgggctggcattcaagccgaatactaacgatatgcgctcggcgccgtctctggatgtcattccgatgctgagaagcctcggtgctaaagtcaaagcgtttgatccgattgctgtacctgaagcagaaaagcttctcggcgatcaagccgtttacagcgaagatctgtatgagacgattcaggatacggatgcgtgcgtcatattgacggagtggccggaagtacagaacatggatattgccaaacttaagtctgctttgaaaaaccccgtcttaatcgatggaagaaatatatttgaaattgaacaaatgagaaacgaaggcatgatctaccattcaatcggacggccggaagtacagggagaaggaatcctgaccaacgtataa

SEQ ID NO: 4279 - DNA, 1179 bp, Bacillus licheniformis
ttgaaggttctttggattaccagcgtttatccaagcagtcaaaggccgggagaaggcgtttttcatgaaacacaggttcaggcgctgcagatgcagggcgttgatgtgacggtcatatgtccattgcctgtgaatcctgctcctctcaggctgctgaaaaaaaaataccgtcaagtgcgaacagtcccggaatatgaagaaagaaaaggcatcccggtttacaggccgccgtatacggctttgcctggacagctaaaatgggctcagccgcatcgccggatcgcaaagtctgtattgaggacgatcgagaagcacgggcttgcgccggatcttatccatgcccatttcgcgatgccatccgggggtgccgctgccgttgtttcacagaagctgaaggttccttatgttctgacgttgcacggaagcgatgtcaatatttatccccattacagcaaaggcgcttttcgagcatttgaaacagctgtgcattccgcagcaaaagtattggctgtcagcgaagcgctgaaagccaaaacgaaagaaatgaccggtgctgaaagctcggtgcttcctattggagtcaacctggaccggtttcaaaagccctccgcttcaacacttgaattgagggagaaactcggcctgccgcaagacaaaaagttgctgacgttcgtcggccgcttggtgaagggaaagggagtagccgagctggcagaagcggtcaggcagcttgatgacagctacagagctgtattcatcggcgacggaccggagaagcagaacatccgtcaaatcgccggtgaaaaagcagtattgacggggcaggtcgcaaaccatgagatatcagaatatctggctgcatcagatctgtttgtgctcccttcgtattctgaagggatgccgactgttgtcattgaagcgctcgctctcaaggttccggtgctttgtacggcggtcgggggggttccgtctttattcggaaagcatgaacaccttctgatcaagccgcgctcggcttccagcataacagaagctgtcaagggatatttggaaggcggcaattggcaagaagccatcgctgaagagctgtatcaaacggtgcacgaggattatgacgcctttaaaaatgccggaaagctgctggatgtgtatggggatgttgtcaagaacaaaaattaa

SEQ ID NO: 4280 - DNA, 1440 bp, Bacillus licheniformis
atgtctaccattacgaaacaaatattaagcggtgcaaaatggacaagtgtttcaactttgatcgtcacggtcattcaaattatacagtttgcactgctcggcaatatcatgacaattgccgaattcggtttggtcggaatgctgaccaccgtaacgattttcacacaaattgtactcgatatgggattcggggccgctttaattcaaaaggagaacatcagtgaacgccaattatcgaccttgtattggctgaatatcctaacgggcatccttttgtttatcggcctctttttcctgagtccgttcatcgcagacttttatcagcgggacgaacttgtttttctagtgcggattttggccgtcatgtttttaatcgccccggtcggccagcagtatcaatatatgctgcaaaaagatctgaagtttaatgtgctgagcaaaatagaagcgggagtcaccgttttgtcttttgtgctcctgctcgttttggtttttctgatggatccgattgtggcctatgcattgtcacaagtttttcttaattcggttaaaggcatcatgttttttgctgtatatttaaaaaaatggcgtccttctttcgtctttgcattgggggaagtgaaagaatttttctcgttcggcgcgtttcagcttgcttcaaggcttgtaaacaggcttggcgccaatatcgacatgattttaatcgggcggtttctcggtgcggaagcattgggaatctataacctggcgtatcagattattacgattcccgtattaaaaatcaatccgatcgtaacaagggtagcgtttcctgtcttctcaaagaatcaaggggacaaccaaacgctgcgcgaaggctttttaaatatgacaaagcttctcgcgctgatttcattcccgctcctgatcggactgacgactgtttcagatttatttgttgaagtcgtcttcggagaaaaatggctgcaggccgtaccggttctgaacatcctcgctattgtcgggctgctcagggttctgatgaatccgaacggatcggttttgctggcgaaggggcgagcagacctggcattttattgggacagcgggatcatgctcctttatgggctgtctctttacgcggcggtattaacgaatgatttgacgatcaccgcctggacatatgcagcgatcagcctggtcaatttctttatcggcagatggctgctcaaatatgtcatccagctgaagctgggcgaatatttcagaaccgttggaaaaccgctggccttgacgctgctcatggcattgctggctcttgtcttgagcgtcggcagcagacatctgcttcacggcgccatgcttcagctggcagtttccgtcgggatcagcgggattttttacggttttctggtcggcaaattttatcggcgggctatgagggcccaattaggaagatga

SEQ ID NO: 4281 - DNA, 660 bp, Bacillus licheniformis
gtgagtatcgacaaaagtttaagaatgtacaatgaatattcaagccagcaaacttattcctgtgctctatctaaaaaagcagtacgttatttatatatgaaacggataatggatatcgtcctttccttgattgggctcgctcttacactgccgtttattctgctgttttgtatattaatctgtatcgaaacaccgggttctccgttataccggcaggaacgcgtcggaaaagacgggaagcatttcaaggtgatcaagctgcgttctatgagaattgacgcagaaaaatccggtgcgaaatgggctcagaaggatgatccgcgcatcactgcagtcgggtcttttataagaagaacaagaatcgatgaacttccgcagttgatcaatgtgctggccggagacatgagcattgtggggccaaggcctgaaagaccgatgtttaccgctcagtttcaccacgaaattccgggatttaaaaaccgcttaatcgttaagccgggtttaacgggacttgcgcaggtgaacggaggctatgatatcagtccgagagaaaaattggtgcacgatctgtattacattcggaatttaacgtttcttctcgatttgaaggttatgctgaaaacgattaaagtagtattgactggcgaaggagccagataa

SEQ ID NO: 4282 - DNA, 1488 bp, Bacillus licheniformis
ttgagggtttttcttaaagctgtacctatgttgttgttagggttctttttgtttgtgcctaatgtatttgcggccaactctgtcacaagattagacggtgcaaaccgatatgaggttgcggtgaacgtttccaagcaggggtggacaagtgcaagcactgtgattgttgcaaatggaaaggcatatgcagacgtcctttcagcgactccatttgcctatcgaaacaacgcgcctgttctattaacggaagcgtctaaactgccaacggccactaaaaaccgaatcagtcaattaaaacctagcaaagtgatcgtaatcggcggaaccgtcagcgttcaaaacggtgtcgtaagcgagatcaaaaagcttggtgtgtcatctgtcgaacgcatcggcggagcgaatcgctacgaggttgcggcgaatattgcgaataagctgccgagcaattcgaaagctgtcatcgccaacgggacggcctatgctgacagccttgcgatcggcgcatatgccgcgagaaacggcatcccgattcttttaacatcgtcgaattccataccgacagcgacaaaaaatgcgatgaagagcaaaggaacaacatcgaccattgtcgtaggcggtgaagtcagcatctccagcagcgtttacaaacagcttgcttctccgacgcggatcggcggcagcaaccgctatgaagtcgcggccaatgtcgtcaagaaatattattcttctgccaagaatgcaatcatcagcaacggctatgcgtatgccgacggattaacaggatctgttctggcggctaagcaaaaccgtccgatgatgttcacgaatgcatcatctttgccgacaccgacaagagaagtgatcggttccaaaaacatgacgacgtttactgtgcttggcggaacggtttctcttcaatccaatgtcgtgtcacagctgaagaatccgatcgtcggcaaaaaaatcttcattgatgcagggcacggaggtacagacagcggtgccgtcggcaacggtttatatgagaaaagcgtgaaccttgatgttgcaaaattaattaatacgaaactatcaaacggcggtgctctgccaattatggcgagaacgaacgacacttacctgacgctcgcacagcgcgtgtcaaaagcgcagtcaaatcatgcggatttgtttgtcagcatccatgcaaactcggcaacgccagctgcttccggaacagaaacctactattatacaacatatgaatctgccaacagcaaacggctggcaaccgagattcaaaaccgtctctatgttgcattgaatacaaaaaaccgcggtgtaaagatcggcaacttccatgtcatcagggaatcaaaaatgccaagctgccttgttgaacttgcgtttatcagcaatgtaagcgatgcgacaaaactcaaaagctcgacttacaaagaaaaaggcgctaaagcgatttacgacggaatcgttgcttactattaa

SEQ ID NO: 4283 - DNA, 2145 bp, Bacillus licheniformis
ttgaaaaagatgaagcttctgcttctgtcgtcagtaactgccgcagctctgatgtttacacaatctgcccaggctgccgacaaaaccatttcggtaaagttaagcaattatttgggcaataaatcaagcgttgatgtcgacattaccggcgcatacgaaatcccgggctcgggaatcgccgcgacagagcggtacggcggggcgacccgcttcgatgtggcaaacaatgtcgcatctgccggatggacgaacccgagcactgtcgtggttgtcaatcgggacgcttttgcggacgcgctttctgcaactccgcttgcaaagaagtacgatgcgccgattctattaacggatgcgggtacgctgacggcgaaaaccgaaactcaaattgccaagatgaagcctgataatatcttaattatcgggggaacaacgagcgtttccaaaaatgttgaaaacacgctgaaaaagtatggggcaattgaccgcatcggcggcgccaaccgctatgatgtgtccaaaaacatcgcgagccggatggggtcctacagccaagcgattgttgccaccggcttagtcttttccgacgctctgtctatcgcgccttatgcggcaatgaacggttatccgatactgctctcagggaataatacaatccgaagcgattacaatattccgagcaaggttacgatcgtcggcggtccgttgagtgtcagcacaggcgttgaaaacacattaaagaaaaaagcggctgttacccgcatcggcggagcgaacagatacgaagtgtcagcgaacattgtcaacacgcttaacatgaacgcatcaaaggttttcatgtctaatggaacgacttttgcggatgcgctggccggttccgtccttgctgccaaacaaaagcatcctttgctgcttgtccaagcgggcagcctgccgactcctgttgcagatgtagtcgcgaaaaaaggaacacagtcttttgctttgcttggggggaccacctcgatcacggattcattgaaaaatagcctggcagatatgtttaccggagacggatactctgttaacgtgtcgagcggaaagcttgtgctctataaaaataatagagccgtcaaaacgcttggaacgtcatttacggcatcacctaaaaaatattcgacgtcaaattccatcagcatcaacggaaggccttatttaggcaagatgaagtttacgattgaatcaagcaaatatgttcggccgataaacgaaaacattccgttcgaagattatttaaaaggtgttgtgccgcacgaaatgccggcaagctggcagacggaagcgttaaaagcccaagcggtggcggcgagaacttattcggtcggttccgcaggaaaagtagtggccgatacgcaggcgtttcaagtatacggaggatacgactggaattcgaagacatccagcgttgtaaatgccacaaaaggacaagttttaaaatataacggcaatttgatttcagccgtttactcgtcaagcaacgggggatatacggaagcaagcgcagaggtatggggcggcagtgtgccatatttaattgccaaagcggatacatatgacccgcaaaacagctggtcgatttccttgaataggacgcagatcaataccagcggcttaaacctgagcagccctggcacatggtggaatacgacaaatgaaacgaactccgcctatttgtctggactgaaaagctggtttattaccaataaatatcctagtgcagaatctattaagattacgaaaatctcaagcctgaccctgagcagcgcaaaaactgccggtcagcggccgaaaacagcagaggtgaagttttcttactttgttaaagaaaaatcaaatggctatgttctatcaaacggaaaactttcagaaaaaacagcgacgatttccgtgacgacgactcaattaagatcgatgctgggcggcatgaatatgaagagcacgtatgcttctgtatccagcaatacgaacgcttttactctcagcggtaaaggattcggacacggcatcggcatgagtcagtacggagcaaatgccagagctgctgccgggcacgattacaagaagattttaagtttctactatccaaatacgactctatcaagctattaa

SEQ ID NO: 4284 - DNA, 321 bp, Bacillus licheniformis
atgaaaaaactcatagttctaacattatcaatgctgcttttgttgtcagcctgcggcacttcgggccaatcggaggacaagtcaagctcagacaataaaaatgcggcctctgaagaaaccgtcactaaagaaggttcattcgcggggttggctgacagccacacaattgcggtgaacattgacggcaaagaaacaacgcttcaagtcgatgaagatcttcaggacaaagtcaattccattgaagaaggcaaaaaagtcgaagtccaatatacaaaaggtgaaaatggcgttttggagctgaaaagcatcgaaacaaaataa

SEQ ID NO: 4285 - DNA, 126 bp, Bacillus licheniformis
ttgattataagtttcttaaaattcgaaaacaacaaaaatttatatgtgtccttttggatagacgaaatcattagaaaaatgtttcaaaaaaaccaatcaatctgcaaaatttttcgctataattaa

SEQ ID NO: 4286 - DNA, 921 bp, Bacillus licheniformis
atgagagctgaaaagaggaagaaaaagaaaaaaattctatatacaattatcgctttgattggcattttcgttctcagcacaggcagttatgcctattacttatggcataaagcggcatctactgtagcgaacattcatgaaaatattaacaaatcaaaaaaacgcgattcagctgttgacattgataaccatgacccgttttccgtgcttctcatgggtgtcgatgaacgggacggtgataaggggcgcgcagactccctcatctatatgacggtgaatccgaaaacgaaaacgactgaaatggtcagcatcccgagggatacgtatactgaaattatcggcaaaggcaagatggataaaatcaaccactcctacgcattcggcggcgttcagatgacggtagacacggttgagaacttcctcgatgttcctgtcgactactttatcaaagtcaatatggaaagcttcagggatgtcgtagatacgctcggcggcattactgtaaacagtacattcgctttcaactacgacggatattcattcggcaaaggcgagattacgctgaacggaaaagaagcgctcgcttatacgagaatgaggaaagaggacccgaacggcgacttcgggcgccagaacaggcagcgtcaagtcatcgaaggtatcattaacaaaggcgccaatatatcatccatcacgaaattcggagatatgttcaaagtgatcgaaaacaacgttaaaacgaatctcacgttcgacgatatgtgggatatccaatccggctataaagaagcccgctcaaaagtcattcagcatgagctgaaaggcgacggcacaaaaatcaacggaatctattattacaaagccgacgaaagttccctttccgacattacagccgaactgaaagaaagccttaataaataa

SEQ ID NO: 4287 - DNA, 1143 bp, Bacillus licheniformis
atgaagaaactaaaagtcatgacagtattcggcacgcgccctgaagccataaaaatggctccgctcgtgctagaattaagaaaatatcccgaaattgagtcttatgtgacggttacagcccagcacaggcaaatgcttgaccaggtgcttgaagcttttaacataaagcctgattttgatttgaatatcatgaaagaaaggcaaacgctggctgaaattacgtctaatgcgcttgtgaagctggacgagctgtttcagtctatcaaaccggatattgtgcttgtccacggtgatacgacaacgacatttgcggggagtcttgccgcttattatcaccagatttccgtcggccatgtagaggcggggctcaggaccggaaacaaatactcgccgtttccagaagagctgaacaggcagctgacgggatcggttgccgatcttcattttgcgccgacagagcaggccgaacagaatctgctccgcgaaaataaagatcctgagacgattttcatcactggaaatactgcaatcgatgcacttcgcacaacagtaagggacggctattcacaccccgttcttgaaaaaatcggaaatgataagatgatcttgcttaccgcccaccgccgggaaaatttagggaagccgatggaaaacatgtttaaagcgatcaggcggatcgtcgaagagttcgacggcgtccaggtcgtttatcccgttcatctcaatcccgctgttcgtgaagcggctgcaaagcatttcagcgatttgaataaagtccacctgatagagccgctcgaagtcatcgattttcacaactttgcagctgaagctcacttcatcctcaccgactctggaggggtgcaggaagaagcgccgtcgctaggaaagccggtcctcgtgcttcgcgatacgacggaacggcccgaaggcgtccaggccgggacgcttaaactggcaggcacggatgaagataagatttaccagctgactaaacagctgttgaccgatcaagatgaatatcgaaaaatgtccagggcttcaaacccgtacggggacggacaggcttcgcggcgaattgcggaggcgctgctttatcggtacggataccgaagcgcgcggcctgatgtgtttaaagataaataa

SEQ ID NO: 4288 - DNA, 147 bp, Bacillus licheniformis
ttgatcaacggatgttttatgatgagaatatcgtccataagcaatcgatgggcgggattaattccaacgagaaaacacgggcaaagcggtaatcaatcgattcagcagacgattcttaaaaaagctgttcatacagaaaacaggtga

SEQ ID NO: 4289 - DNA, 879 bp, Bacillus licheniformis
ttgaagaaagttcgtaaagcgatcattcccgcagcgggccttggaacacgtttcctccctgcaacgaaagcgatgccaaaggaaatgcttccaatcgtagataagccaaccattcaatatattattgaagaagccgttgaagccggcattgaagacattatcatcgtaaccggtaaaagcaaacgagcgattgaagatcatttcgatttctcgccggagctcgaacgcaacttggaggaaaaaggaaaaactgaactccttgaaaaagtgaaaaaagcgtcaaatctcgctgatatccactatattcgccaaaaagaaccaaaaggactcggacatgccgtttggtgcgcccgcaactttatcggagacgagccgttcgcagtgctccttggagacgacattgtccaagcggaaaaacctggccttcgccagctgatggacgagtacgaaaagactctctcatccgtaatcggcgttcagcaggtgcctgaagaccaaacgcaccgctacgggatcattgatcctttgacaaatgaagggcgcctataccaggtcaaaaactttgttgaaaaaccaaaaccgggcacagcaccgtctaaccttgcgattttgggacgctatgtctttactcctgaaattttcatgtacttagataaacagcaaatcggcgcaggcggagagatccagctgacagatgcgattcagaagttaaacgaaatccagcgcgtattcgcttatgacttcgaaggcaaacgctatgacgttggagaaaaactcggttttatccagacaactctcgaatttgccatgcaggacgacgaactgaaggattcgctgattccatttatgcaggaccttctggcaaaagaagaagtttaa

SEQ ID NO: 4290 - DNA, 912 bp, Bacillus licheniformis
atgaaactaaaagtttcgtttcgaaatgtttcaaaacagtatcagctttatgaaaaacaatcggataaaattaaagggctgttttttccgaataaggataaaggtttttttgctgttcggaatgtctcctttgacgtgtacgaaggggagacgatcggatttgtagggattaacggatcgggaaaatcgacgatgtccaacctgctggcaaaaatcattccgccgacaagcggtgaaatcgaaatgaacgggcagccttccctgattgcgatttccgcaggattaaacaatgcgctgacgggcagagacaacattcgtctcaagtgcttaatgatggggctcacaaataaagaaatcgatgagatgtatgacagcatcgttgaattcgcagaaatcggcgagtttatcaatcagccggtcaaaagctattccagcggaatgaaatcccggctcggctttgcgatctcagtgcatatcgatcccgatattttaattattgacgaagcgttatcagtaggtgatcaaaccttctatgataaatgtgtcgacagaattaccgagtttaaaaatcaagggaaaaccatattctttgtcagccattcaatcggtcaaattgagaaaatttgcgatcgggtcgcctggatcgataatggcgagcttcgcatgtttgatgacacaaagacggtcgtaaaggaatataaagaatttatcagctggtttaaaaagctttccaaaaaagagaaagacaaatataaaaaagagcagttagccagccgcaaacaggtcttgtccgaagaagatctggctcatctcgaaaaagacaagaataaacaaaaatctttggcaaatatcattccgattgcaggtttgtccatcctggtcgtattggctgccggagcgatgtttgtttaa

SEQ ID NO: 4291 - DNA, 828 bp, Bacillus licheniformis
atgaatgcattagtgaaaatactgaaagaacaagtaacatcgtttcctttaatcttgcgtttggcagcttacgaaacaaaatcaaaatatcaaatgaattatttgggcgtgttatggcagtttttgaatccgctcattcagatgctggcttattggtttgtatttgggatcggaatcagaaagagcagtgagatgattacgggggtcggcgaagtgcctttcatcatatggatgcttgccggtttgattccctggttttttatcagcccgacgattcttgatggttcaaacagtgtatataagcgaatcaacatggtggccaaaatgaattttccaatcagctctcttccttcagtggcgattgcggctaacctgttcagctattttgtgatgatggcgatttatgtcattgtgctgcttgcgtttggcatttatccaaatcttcaatggcttgaatatatttactatttgttttgcatgattgtttttatgttcgcattcagtttgtttaattcaacgatcagtgtactggtcagggattatcagtttctgctgcaatcggtgacaaggctgttgtttttcctgctgccgattttttgggatatctctacgcagctgggggacaagcacccggcattgttgaacgtgattaagctgaatccgcttttttatattatcgacggatttagaaacagctttctcggcggaagctggttcttcgaagatataacatatacgttgtatttctgggctttcacattattgctcttgactgtaggatctgtcctgcatatgaaattcagggacaggtttgttgactttctttaa

SEQ ID NO: 4292 - DNA, 3618 bp, Bacillus licheniformis
atgaacaaaaaagttttgaaaagaaaaataaaatttattaaagaccctattgagaactatctcaaaaaaagaaatcatagaagaaacaataagtacgctaaattttataaaaaattgaatgttgtggacaacacaattttatacgaaagccgtgatgggaagagtatcactgacagtccttttgcaatatttgactatttgataaaaaatccagaattcaaccattataagcatatttggactattgcagattttgaagcgctcgagccagttatctccaagtataaagatatgccgaatgttgagtttgttaaaagaaattcagataaatacctgcaatatttggctactgccaagtatctaatcaataactctacgttacagtcattttttatatgcaaagaagaacaagtatatataaacacatggcatggaacgccactgaaaagcatgggatttgatattccaggaaatccagcccattcacaaaacgtacttagaaactttataagtgcagattacctgctgagtccaaataagcatactaccaatatgtttttgaacagctataagttagaagggctgtacagcggtgagatcattgaagaaggctatccaaggattgatttaacccttaacacgagccccgaagagtttaaaagttatttaaaagacttaagtttactgatctcaaatgataagcaaacgatcttatacgctccaacatggaaagggaatagtgtatcaaaagtaaaaaacgacgtttttcaaattatttctgatatgaattatttagaggagaaaatcggcagtgattataatgtgttaattaaagttcacccgtttttatatagtgaggcttctaaagtttcagagttaaaagggaaactgatacctgactttattgatactaaccagttgttaagtactgtcgacatattaataactgactattccagcatattttttgattttcttgtcactgatcggccgattttgttttatatgtgggatgccgatgactacaataaacaacgaggaaaatatattaacaatgaagatcttccaggtcctgtcctatacaatgtaagggaattagtcgaagcaattggcaatattcatcaagtgaaatcagaatttcaaacaaattatgaaaagaataaagtgaaatttacgaatcacgacgacggaaatgttacgaaaagagtagttgagaaaatcttcaaaaacaagggacaattgaatgtaattagagatctggataaaaagaaagaaaagatcttgatctatccaggaggaatgaaaaataacggcattacatcttctttccttaatttaatgaataatattgactttgataaatatgatgtaagctgttttatgaaaactccccactcaagagaggttctaaacaatatcaacaaagtgaataaaaatgttaggttcatatttaagcctggtttaccagtttacacgttgtttgatgtatataaagataagctggtgcacaataggggagctaacggtaaacttgaaaagaagttgtacccagaggatgcatatttaagagaacataaaaggctttttggaaaatctaaatttgattatgtaattgatttcagcgggtacagcttatactgggccaagtatttagtttgtgcagatgcaaaaaagaagatttgctatatgcacaatgacctcttgtcagatagtgaaagattggttaatgggcgtcgtccgcacaaaattaatctgagaggattattctctatttacaataaattcgataagctagtaagtgtttcaaagggaacgatggagttaaataaaaagaatcttgctatatatgctgatgaggacaaatttgactatataatgaactctattaatcctgaaaaaattctcgggatcgatcatttaaaagaaaaggatactgagaaattagcaatcgctgaacagaaccatgaagaaatcatagccaataaaagttttaaagcaagggcaaagattgtaaatgtcgaaggcttcttcattatcaattcactgtttgataaagtgaatcaaaaattaacaccggctaaggaatttgaaaataaagaagtcaccataatacgagaagctcatacgaatgatggaaaagttttttataaatttactatagatgacagtattattgggtggctgaacctagaggcttttgagttattgccagacagcattttacttgagaggaaagtcaataaactggcagtcattcaacaccctaatggaaacgacatctggaataaaccttataaaactttagatgtacaaaaagtatcttccagcaaacaatataaagggattatcgttgaggtagataaagaagtcagaactcaacattctttctacagcagaatatatattaatgatatattaatagggtggattgataattcagcattgaaaattgtaaaagagtatcagtcacatccagaggatacagaaaagcaatctgcgataaagaatgaaaaagccaaaattaagcgcaaaaattataaaaaacactcaaagattattcaggggctggagaacagaacattagaagaaataaagatgaatttattcgcgactattacaaatggcgaaaattatacaatctggaccaaagcctatcctaataacgggtgtaaagaaatatcaactgctgaagaatttaacgataccattgtcattgtcaaaaaaagccataagacaaaagaaggggaatactaccggttctatgcagatggaaaagcaattggatggttggactctagagcttttaatattatagaagagcctgtcattgcaagaagcagagaagtgaaatacaatgcgattgtgaacttaagcgatgctgactttatatataataaaccttttgatttacctggatgtacacctatagaggactatcaaaaattcaatgaacaagaagtggaaattgttgaagaagctcttacacaagaaggcacttattgcaaagcagtcttaaataataaagtgttggggtggataggacgcaaatctttaaatgtaattgagcctcctggaataaaagtaggtaagactcttgttccttatccatctgaatgtaactacaactttgttaatatgggcagactctcccctgaaaaagggcaagataatctaataaaagctttccatactcatattcagagttatcctgatagcaggctttatattttaggggatggtcctttaaggaaagatctccaaaaaatagtggacagtttggaacttcaagattacgtctatctgatgggacaactggaaaatccgtttggtttcatgaaaatgtgcgactgttttgtactgtcttcccattatgaaggacaaccaatggtattattagaggccatgactttaggaatgagaatattggcaactgacattattgccaatagaacagttttagaaaacggcagatacggaaccttagtagatgatagtatagccggtcttgaaaatggtttaaaagcagtaagaacagagattaatactgttatgcaagcttttgattataatgagtataataaaaaagctatggataccttctacaaagttttgaactaa

SEQ ID NO: 4293 - DNA, 2136 bp, Bacillus licheniformis
atggatagtgcaattccgatagaatttcagctgcgggaaataaaaattaatgattctcgcctctattttgtgttcgaaagttctgtctctcttgatcatctcgatgttttggcagttaaccgcaatacgaaaaaagagatgcgtgcaacttgtaacaaaataagcgattcagagcagttaaaagcagcggaaatatctttagataccctatctaacctgatgatagacgaaacggtcatcgatttttatgtactttatgaaaataatgaaaaaaatcaatgcaaaaagaggatatacacagcatcaaaaccgatagagctgtcttggcataaggatcgagccaatcagttcatttatcttccgtataagacccgaaaaggccacttcgctcttgatgttttacgaagaaaagcagtggctgaaccggacagcattaagttaagctccgacggaaaactaatgatcggaggctatacttttctgctggatgctgaagaacgttcaatcgtaaaaagcagaaagctggttttaaaggaaattagccaaaacgataaagaaagggttttcaatttccctttaaaaggcgttcagcgcgtcgatttgtcagctgattcttctgatcatgccgttggatttgaggcggaaatcgatctgaaaaagctgtacgaggagaacaggatgcctgctttctttaagttttatatagaatacgtaggtgaagatgctgcaacaggggaggaaatcgctataaaaagcagggcattcaagcttatagatgatatagaaagtttttcaattgttgacacaaaaaaaggaccggctcgttttcacatttatccgcagaagcgaaaacggggtatgcgtctaagaatgaatgactatacgatcaaaacccgtgcggtttattttgccaaaggaaaaggaaaaaggctgatgtcagtcatccgcaaaggcaagaataaagcaaagaaaaagatttcgggcatggtgaagagagcatactattttacttttggactggccggcaaactgcctgttaaaaagaaaaccgtcatttttgaaagctttgccggtaagcagtacagctgcaatccgagagcaatttacgaatatatgaaggaacatcatccggaatacaacttaatatggagtgtaaatccgagttatacagaaatttttgaagaaaaaaatgtcccttatattcaccgattcacgctgaagtggctgttcgccatggcaagggccgaatattgggttgtaaacagccggcttcctttgtggatcccaaaaccaaagcacacgacatatgtgcagacatggcacgggactccgctgaaaaggcttgccgtcgatatggaagaagtgcacatgccgggcaccaacactgagaagtacaagcaaaatttcactaaagaagcatcgaagtgggactatttaatctccccgaatcgctattcaaccgaaatctttgcccgcgcttttcaatttaacaaaacaatgattgagtccggctatccgaggaatgactttctgtatacggacaaccgcccggaaacgatgaaggccataaagagaaaaatgaatatccccgaagataaaaaggtcattttatatgcaccgacatggcgggacgatcagttctataaaaaaggaaaatacaaattcgaccttgatttgaatttggaaaagctgcgagaggagatcggcgataattatgtcatcgttttaagaatgcactatttagtcgcggaaaactttgacctatcgccgtacaaaggattcgcatatgatttctcatcatacgaagatattcgcgaactttatatggtatctgatttgttaattacagattactcttcagtattctttgatttcgcaaatttgaagcgtccgatgattttcttcgttccagacattgaaacctatcgtgacaagctgcgcggcttttattttgactttgaacaagaagcaccaggaccgttggtcaaaacgactgaggaagtaattgagaaaatcaaggaaacagagacatctgactatcgtctgcctgacatttttgagcctttttatgaaaagttttgttacctggagacgggcaattcaactgaaaaagttgtaaaaacggtatttaaataa

SEQ ID NO: 4294 - DNA, 390 bp, Bacillus licheniformis
atgaagaaagtcatcacatatggaacgtttgatttattacattggggacatatcaagttattggaacgggcaaaacaattgggggattatctcgtcgtagcgatttcgactgacgaattcaatcttcaaaagcagaaaaaagcatatcacagctatgagcaccgcaagctgattcttgaaacgatccgctacgtagacgaagtcatcccggaaaaaaactgggatcaaaaggtacaagatgtgatcgatcatgacatcgatgtatttgtcatgggggatgactgggaagggaaattcgacttcctgaaggattactgcgaggttgtttaccttccgagaaccgaagggatttccacgacgaaaatcaaagaggaaatcgcgaacctttaa

SEQ ID NO: 4295 - DNA, 783 bp, Bacillus licheniformis
atgctgcaaacggaaacggttcatcatcttgcatatgttaacggggatttgcccggatttttgaatcatcttgaaaaatcctttatcgaccgcaatgagggggcatttatcgcaacggtaaaccctgagatcgggtatgcggctgcaaaagacaaggattattttaaaacagtttcatctgctgactttatcctgccggacggaatcggcatcgtcctgacgtcaaggctgatcaacagcagattaaaatcgaggatcgcggggtacgatgtatttatcaaccttctcagcttggctgaccgcaaaaagaaaagggtctttttatacggggccaaacaggaggttattcaagctgttgcagatcggctttcaaccgaatatcccggaattgagctggccggatactcacacggctatgtcaaagacaaaggcgaagttgcgaagcaaatcgcggctgccaagccggacatggtttttgtcgctctcggatatcctcatcaggaaaagtttatttatgaacataagcatctatttcctcaggcgattgcgatcggcatcggcgggagcttcgacgtgttcagcggaaaagtgaaaagagcgccgaaaatgttcatcaagctgaatcttgaatggatgtaccgcctgctgaccaatccgacaaggtggaagcgcatgctgaacatcccgaaatatgtcttctccgttctgaaagaggaaagagttcaaaaacagcggcactactatccggagcagatcaaagagcaatctaaaatcgatttgtag

SEQ ID NO: 4296 - DNA, 1164 bp, Bacillus licheniformis
atgaatatacgttctttattggttatggtttactcggccagtctcgctttgaccggttttattttcagattggtaaaagcgcgcgacagagctgtattgcttgtttcctttccggataatgcgcgcgcgctgcttgatgagtatgtcagcagcagccggccgtttgaaatggaagtcctctatacaaggcacgccgtttcccttgcagatgaatatccttccgttcgatcgcaagtgatcaacgagaaaaatccgattcatctcataaaagccgtataccgaatgttcaggtgtaaattcgtgttgacggataattattttctgctgacaagtgttttgaataaacgccctcagacgacatgcattcaaatttggcatgcgtccggcgctttgaagaagttcggactcgaagatatcggaaaccgctatcgatccgccggcgatatcaaacggtttaaaaaagtgtatcgttcatttgatcatatcgttgtcggctcggaaaaaatggcggatattttcaagcggtcattcggcttgggagatgaccgttttttgcggacgggtgttccgttaactgatgagtattttcatgccggaagacaaacagcggaccgtccggaccaaaaggttattctgtatgcgccgacatacagggactattgtttgacgtccgttcgtctccctttctctaaggagcagctctccggggaactgcagggagaatttttgctgctggtcaaactgcatccggccgtgcgggaacagattgcttttgaagagcacgaagggctgatcaaagacgtatcagacgttccgttaaaggatttgctgatggaaagcgacatcctgatttccgactactcgtcggtcgcctttgagtacgctttgttaaataaaccgattttgtttttcacgtatgatatggcagagtataatgaaaaacgcggactgatcgatgattttgaagcagtcattcccggcaaagcctgcatggacagcgaaatgctgctgaaagaaatcaaagaaatgtccgatacaaaggaagagatcaagaagtttgcggaagagtggcatcaatattcaacaggtgatgccagcatgcgcctgttgaactttatgagcgagcatatgacggcaaatgaaaaaagaccggccggttcctaa

SEQ ID NO: 4297 - DNA, 2631 bp, Bacillus licheniformis
gtgaaaaacattagaaaaaccgttatttttgctgcaatcattttgctcgtacatacggcagtcccggcaattcctgctttagcagcatataccgatacttccgtctacaaaattgaaacagcaaaagagtttaatagcgaaagcgaagcgctcaaagcagccgaacaactgaaaaaggacacgggatggaaagccgaggtcaaaccttcagggaaaaacggcacaacatacgttttgacatcagaaggtgtcgaaggggagagcagagcaaaaaatctgcttttgcagtttgaaaaagaaaccggtttgaaggcgtcctatggtccgattggaaaaaaagaaccgttttccaaagcggtatcaaaggaatttgccggtgaagaaaaagccaaggaatgggcgctccaatttgaaaaagaaaccggtctgaaagcaacctatacacttgcagggaacagggaagcatacgtgaaggttgccaccggaggaatcgaaggcgaagacaacacgaaagccatcctcgatcgttttcaaaaagcgaccggcctcaaagcgtcgtatgcaccatacggagcgggacaagcgatcgtcaagatttattctgcagaaatcgcagatgagagcaaagcgaaaagcctgcttgtccagtttgaaaaagaaacggcccttaaaggaacgatagagaccgtaaagaaacaacagcctaaatataaaattgcgacaagttcgatacaaggcgaaacaaacgcgaaaaacctgctgaagcagtttgaaaaagagctcaaagtcaaaggggcatatgaagccgccggtcagccggcacagctatacaatgtgaaatcgggatattttaatgacgaaaagagcgcgaaaaatgccgccggacaaattaaaaagaaaaccggtctcgcctcaagcacggaaaaggtaaaaggtacacgcttctggatcgtaagcatgaaaagcgtagacagtcaaaacctcaaaaaaatcgacgcctttttcaaaaagaaaacgtggcgttatactgctgcaaaggcggggaaaaagcagacatctttcagaatcgtttccgtcccgctttcagatcaaaagaaagcaaacgatggcatccggttttttaaaaacaaaaatattcaggcttctgcgcaaagcaccggcagcacgaccgtcagccgcttccggattgcgtctgctgaaaccgccgttcaagcgcgaatcaataaagggcttgaattctttaagaaaaacggtgcggcgggaacggccggatcaacaggaaaaaaagtgtacagccactatcagctgacaacggaatccgtatacgaacagaacaaagtgacgcaggcgctcaatttctttaaagaaacaggcattcacgcagaggccgtgaagaccggccaatattacagccgctacaaactgagttcggaagctctgatcggcacggaacaattacagcaggcgctcggatttttcagcaagcggaatataccgggcaagattgaacaaacgggtgagtacggctacaggcagtaccgggtgacgacaggtcgaatcacaagcaaagcagatctcgacaagggcttgaatgtctttaagaagaacaatgtcagcgcaacttaccaaacaaagacggtcagcctgtttcatatctcgatcaatgaacaatttacagggaaagaccgtgcggatgctgccgccaatcggatcaaaacgaattacggctggccggtgaatgtcgtcaaagtgaaaaacggcccgcaaatcacaacgactgactacggaatcacgctcagccagatgatcgataaacagatgaaagtcagcccgcaaacggatgcgccggcttatgtttcattgagctacatcaatacggcgaaccaaaccgtcacggctgatctgctgaatatcaggtcaagcccccttgtgacaggcggcaacatcatcggacagctgcaaaaaggggataaagtcaacatcatctcccaggaaaacggctgggcaaaaatcagaatgaattggcgaaatgccagcagggatgaagtcgagaaatatgtcaatccggaaaatttcacacaagacagctcggcatacttccaatttttaaaactgtcgcaaacggccagattgaatgctgccgaggtcaatgcaaaaatcctttataataaagggattttgacaggcaaagggcaagcgttcatcgacgcggcgagagcatacagcatcaatgaactgtacctcatttcacactcgctccttgagacgggcaacggaacttccgagttggctaaaggaacgatgttcaacggcaaaaaggtttacaatatgtacggcgtcggggcttacgacagcaacccgctttactacggcgcaaaatacgcctatgaacaagggtggttcacacctgaggccgccattatgggcggagccaaattcatcggtgaaaaatacattcaccacccgacttacaaacaggacaccctctataaaatgagatggtctccgaatgcccttcaccaatatgcgacagatgtcggatgggcttataagcaggtggggagaatgtacagtctgtatacattgctcgatcaatatacgctgtactatgatgtgccggtttatcggtaa

SEQ ID NO: 4298 - DNA, 951 bp, Bacillus licheniformis
atgactcaatcaccgatatttctgcagcctgagtttaaagagagaatctgggggggaacggctttgcgcgagtcattcggctatgacattccctccgatttgacaggtgaatgctgggccatttccgcccatccaaacggtccgaacatcgttgcttcaggtccttacaaaggaaaaacgcttgccgagctttgggacgaacaccgtgaattgtttggaggtgcagagggggaccgtttcccgctgttaacgaaaatacttgatgccaatcaagacctttccgttcaagtccacccggatgactattatgcaggagagcacgaaaacggggaactcggtaagacagaatgctggtatatcatcgattgcaaagaaggagcagagatcgtttacggccacacggcgagaacgcggactgaactggtcaccatgatcaacagcggtgattgggacaacctgttaaggcggatcaaaatcaaaccgggcgatttttattatgtgccaagcggcacgattcacgctctttgcgaggggacggtcgttttggagacacagcagagctccgatacgacgtacagggtatatgattatgaccggaccgatcaaaacggagaaaagcgcgaacttcacctgacacaggcgatcaatgtcacaacagtaccgcatgtagacagctatgttgacgaatcgacagaaactcaaaaaggcattaccattaagacatttgttgaagccgaatatttctccgtatataaatgggagatcgacggtgccgctgagctgacccaggatgcccctttcctcctgtgcagcgtgattgaaggagaaggaaagctcactcagggcggcgaattatttccgatcagcaaagggacaaattttatcctgccggcggaaaccaatgactttacaatagaaggaacatgtgaactaatcgtgtcacacatataa

SEQ ID NO: 4299 - DNA, 465 bp, Bacillus licheniformis
atgaaagtgatgaatattatccatgacagcatcgtagacggagaaggactgagaacagtcgtgtttttagcgggctgcccgcatatgtgtgaaggctgccataataaacaaagctggaatatcaataacggatttgatatgagtgtagacgaagtattcgaggaaattatgaaaaacccgcttacaaacgtcacctattcaggaggggagccgcttttgcatgcaggcgaactgatcgagctgtcagaaaaaattaagcagcattccgaaaaggacatctggctttacagcggctatacgtacgaacaaatcttgaagaatgaaaagcacagcgccttgctggcctattgcgatgtcctggtagacggcccgttcgaactcaaaaaaagggacttgacgctcctttacagaggaagctcaaaccagcggattattgagcttgcatcatcacaagcagaagcctga

SEQ ID NO: 4300 - DNA, 1869 bp, Bacillus licheniformis
atgacaacaggctttaaagaacagggattattgcaattgacagaaacatttcatgatatcgtcgggtatggaaatcacgatattatgcaggaaaatgccaacgtagacggccgctccccgatggggcaaatgagccggtttgcatccgagagttccagacattatgcgctccattacttaatgtcgccggaaatcaagaaagcagtcgatgacaactttatataccctcacgatttagactatatgccgagcgggacaacgacttgctgtcagataccattgggccggctgttaaagaagggattccacactggccacggctccctcagggaaccgaaggacattatgagcgcattgtcactcgcatctatcatttttcaatcgaatcaaaatatgcagcatggcggccagtcattcccaatgttcgattacgacctggcgccttacgtccgcaaaacgtacgaaaagcatcttgcgaaaatcaaacaatacccgacaactttgacagaagaagagataagggaaagagcgtgggaagaaacggacaacacaacttaccaagcgtgcgaagcatttatacataacgccaacagcatgcattcgaggggcggcggacaggtgccgtttgtttccattaattacggcacggatacgtcaagggaaggccgccttttgatcaaaaatattcttaaggcgacaaaagcaggcctcggcaaaggtgagacgccgatttttccgattcagatcttcaaaatgaaagaaggcgtgaacgttgatcaaacagaccctaactatgacttgtaccggcttgcattggaaacgagcgctgaaaggctgtttccgaacttcagctttatcgactcgcccgtgaacaaacctttttatgacggaacgccggaaagcgaaatcgcttatatgggatgcagaacgcgcgtcatgtccaatattcatggaaaagaaaacagcgtcggcagagggaatttgtcattcacctcgatcaacattgtgaaaatagcgctgctcagcgaaaacgttgaacagttttttgccttgttaaaccgctacatggatttaacgattcaacagctgcttgaacggtacgcctttcaatgcaagaaaagagcaaaggactttaaattcctgtattcacaaggcatctggcatgaaagcgagaagcttgaacctgaggacacgctcgaggatgtgctaaagcacggaacattgagcatcggatttatcgggctggctgaagctttgactgcattgaccggaaaacatcacggagaaagcgaggagtcgtttgaactcggcaaaaaaatcgtccagtcgatgagagataaggccgatgaagccacagaaaaacacaaattgaacttttccttgatcgctacgccggcagaagggctttcagggaaatttgtcaaaaaagacaaagtggagttcggttcgatccgcaatgtcacagaccgggtgtactatacgaattcgtttcacatccctgttcactataagctgactgcggtcgaaaagatcagaaaagaagcgccgttccacttaatgtgcaatggagggcacatcagctacatcgagctggacggagacccgaaaaaaaacattaaagcgatggacatgcttgtgaccgccatgcgccggtcaggcatgggctacgcctcgatcaaccatcctgtcgaccactgcaaggcgtgcggatttaccggaatcatagataatgaatgcccgcagtgcaaaaaccgggatgaggctttgatcgaacgaatcagacggattacaggatatttagtcggagatatgtcaaagtggaattcggcgaaaagacaagaagaaaaggacagagtgaagcatctatga

SEQ ID NO: 4301 - DNA, 984 bp, Bacillus licheniformis
atgaaaattaaagcaacgattgaacgtgtgccgggcggcatgatgatcattccgctctttctgggcgcaacgctgaatacatttgcaccgggaaccgcagagtttttcggcggatttacaggcgccctgattaccggaacgctgccgattttaggagtatttatcttttgcgttggcgcgacaatagattttcgttcttccggatatattgcgaggaaggggctgacgcttctgatcggcaaagtcggctttgccgcattattgggtttgatcgcagcgcagttcattccagacgaaggcattcaaagcgggttttttgccggactgtccgtgctggcgatcgtagccgttatgaatgaaacgaacggcggtctgtatttggcgttaatgaatcacatgggaagaaaggaagacgccggtgcttttgcctttatcagcacggaatcaggcccgtttatgacgatggtcactttcggtgtgacagggcttgcggcatttccttgggagacgctggctgcaaccgtcatcccgtttttactcggctgcattctcggtaaccttgaccctgaattgcgcgatttgttcggaaaagtcgtaccggcgatcattccgttcttcgcattttcacttggaaacacgcttgattttaacatgttgattcaatccggccttttaggcattgttgtcggcgtatcagtcgtcattctctcgggtgcatctctatacttgctggaccgctttgtcgcaagaggagacggtgtcgcgggagtagcggcgtcatcaacggccggggctgcggtagccgtcccgtatgcacttgccgatgcaaaccccgtgtttgcgccggtagctgattcagcaaccgcgatcatcgcgacaagcgtcattgtcacctcgcttctgacgccgcttgcaaccgtctggatcgaaaaacggacgaaacaaagaaaatctccgaaacaaatgacgattgattacaagtaa

SEQ ID NO: 4302 - DNA, 603 bp, Bacillus licheniformis
atgatcggaaaagtgcaagagcagctgggcgaggccgggctgatcgcagtcgtccgcgcagacggtaaggaggctgctgaggagaccattcacagactgatcgacaaagggattactgcgattgaaatcacatatacgacgccgggagcgtctgagctgattgaaaaatttgcgggaaaagacggtcttcttgtcggagcgggaacggtggttgaaagcgaacaggcgagggaagccgcggcagcggggtcaaaatttatcgtcagcccgggtttttcggaatcactggctgaggaggccgcatcattgcatacattttttattcccggcgtattaacgccaagcgaaattatggaagcggtctcaaagggttttcgggttcttaagctgtttccagggggaacatccgggattccttacatgaagaacctcgccggtccttttccgaaggttcggttcataccaaccggaggaatccatcccggcgatgtggagaagtggcttgatgccggagcattggcagtaggtgtgggaagccagctgaacaaagtgtcagaagcggatctccagcgcatctttcagcggcgggctcagcagaaataa

SEQ ID NO: 4303 - DNA, 966 bp, Bacillus licheniformis
atgtcgcttgatgtgatgaccttcggagaatcgatggctatgttttacgcaaatgaagcaggcggactgcatgaggcgtcttcgttttccaaagctcttgccggagcggaaacaaacgttgccgtcggactgtcgcgcctgggttttcgggtcggctggatgagcaaggtcggcgccgattcgcttggaacctttattttaaatgaattgaaaaaagaaggcgtcgacatttctgaagtcaaacgcaccgcagaccggcagacgggcatactgctcaagtcaaaggttgaaagcggagaccctgatgtcacatattatcggagcggatcagccgcaagcacgatgagcattgatgactacccggcagagtatttcaagcaagccaaacatatgcatgtgacgggcatacctcctgcactttcaagggaaatgaggggcttcgcccgccacgccgttcaccagatgaaaaaagacgggaagacgatttcgtttgacccgaatctccgcttccagctttggccggatcagcagacaatggttcatacaattaatgaaatcgccgcgcaggcagactggtttctgccggggatcaatgaaggaaaactcctgacaggctgcaattctcccgaggatatcgctaaacattatgtaatgcagggggtcaaggtgattgtcatcaagcttggaaaagaaggggcttattacaggacatcggaaaaagaaggttatgtgccgggttatcaggtggagaaggttgttgatactgttggcgctggcgacggttttgccgtcgccatgatcagcggccttttagacggacttccgctggaagaagcagttcagagggccaatgcgatcggagcgctggccgtcatggctccgggggatatggacggtctgccgtcaagggatcaattgaaagcttttatggctggagagaaaaacaaccaaaaaataggaggttga

SEQ ID NO: 4304 - DNA, 1017 bp, Bacillus licheniformis
atgaaggataagcaaacagcgaaagtaaccatcaacgaagtcgccgcacatgcaggcgtatcaaaatcaacggtttcccgttatatcaacgggaagattgatgccatttcaccgaaaaaggtgaaaagcatcaaaaaagcgatcgaggagctcaattaccgcccaagccagatggcacaggggctgaaggtgaaaaaaagcaaagttatcggatttttggtcgccgatattacaaacccgttttcagtagccaccttgagaggggtggaagaggtttgcgatcagtacggatacagcatcatggtctgcaacacggacaacagtcctgagaaagaaagggagatgctgcacaagctgaacgcgcattacattgaagggctgattattaatacgacgggaaggaacaacgatgtgctcttggatttaatcagccaggatgtatcgattgtgctcgttgaccggaaagtgcccgggctcaagatcgatgcagtcacaacgaacaaccgcgaagtgacaagtcaaatcgtcaatctcatgtatgacaaaggctatgcccaggtcggtctgtttaccgaaccgattaagggaatcagtccaagggaggaaagggcctccgcctatacagaaatcgcgctggaacgaaacgccggcggtacccctctcgtatatgaggctgacgtcaaagacaaagaatctctattacagtccgtcaaaagctttttggaaatgaaagaagggaaaaaagccattcttggaaacaacgggcttctgatgctgaaaatcatcagctgcctttatgagcttggcatttcaattccggaagatgtcggaattgccggatttgatgatacagaatggtataaattgatcggtccgggcattacgaccatcgcccagccgtcgcatgaaatgggcagggtcgccatggagcggatcatcaaacggattgaaggagacgaaagcgccccgcagacgattcagcttgaggcggagcttgttctcagacagtcgctgtag

SEQ ID NO: 4305 - DNA, 111 bp, Bacillus licheniformis
atgaattttaaagtaaataatggaaagcgtcaacagtcttttcacttttttctgaatattgtaaaggacaatgctgaaatattaaaaaagactcttccaaattttaaatga

SEQ ID NO: 4306 - DNA, 828 bp, Bacillus licheniformis
atggaaaatcgttattctgttcatccagaacaagcgaaacgattcacaaccgcagagcttcgcgagcattttttaatagagtcattgtttgttgaaaacaaactgaatatgttttattcgcatgaagacagggtcgtgatcggcggagccgttccagtaaaggagtccatagcgctcgatgccggcgattttttaaaaacggactatttcctagaacggcgcgaaatcgggattgtgaatgtcggcaagcccggtgcggttaaagtcggtgatgaagaatacgtactggagcacaaagactttctgtatatcggcctgggaaataaagacgttttcttctcaagcttgaatgaaggcggggccaaattttatttcatctcggcgacggcacaccaaaagtatccggtgcaaaaagcttctctttcagagctcccatacgatcatttaggagaagaagcctcttcaaatgttcgtaatctatacaaagtgattcatgcagacggcattcaaagctgccagctgatgatgggcattacgtttcttgaacctaataacacatggaacacaatgcctgcgcatgtccacgaccggcggatggaggtttacctgtatcttgatcttgctgaggatgcaaaggtgtttcatttcatgggcgaaccgacggagacccggcatcttgtcgtcgggaacgaacaggctgtcatttcacccgcgtggtctgtccactcgggctccggcacatccaactactgctttatatgggcgatggccggagaaaactacacatttaaggacatggatgctgtcccgatgaatgtcattcggtaa

SEQ ID NO: 4307 - DNA, 765 bp, Bacillus licheniformis
atgggatatcttgaatcgtatttttcacttgaaggcaaaacggcgcttgtcacaggcccgggaacgggaatcggcaaagggattgccgaagcgctggcaaaagcgggagcggatatcatcggcacttcgcatacgagcggacttgatgaaacaaagcggctgatcgaagaagccggcagaacgtttacttcttatcagcttgatatgggcaaccttgacgaggtcgaggcttttgcaaaagaggtgcctgaccgccatcaaattgatattctcgttaacaacgccgggacgatccgcagagaaaaagcggctgatttttcccgggagaactgggaagcggtgatcaatgtcaatttgaacagcttatttttgctgacgcaggctatcggccggcagatgattgagcgaaagcaagggaaaatcatcaatattgcctctcttctttcatttcaaggaggcattcttgtccctgcatatacggcaagcaaacatgcagtagccggattgacgaagtcttttgccaatgaatgggcggcttataatgtccaggtcaatgcgattgcgccgggctatatcgcgacgaacaatacaaagcagatccgcgacgatcaaaaccgcaatgccgaaatcttaaaacggattccggccgagcgctggggtcagccggatgacattgccggcgccgccgtattcctttcgtcgccggcatccgattatgtgaatggacatgtgttagccgtcgatggcggatggctggcaaggtaa

SEQ ID NO: 4308 - DNA, 1134 bp, Bacillus licheniformis
ttgaaagccgtaacgtttcaagggcctcagcatgttgaagtcagccaggtggaggatgccaaaattgaaaaaagcgatgatatcgttgtcagaattacttctaccgcgatttgcggttcggatctccatctttatcaagggaatttccctcttccaaaaggcttccagctcggccatgaaccgatgggaattgtagaagaaacaggacctgatgtaacaaaagtgaaaaaaggagaccgggttgtcatcccgtttaccgttgcctgcggacattgcttttattgcgaaaacaagctggaaagccagtgcgacaatgccaatccccattatgattcaggcgggtattttggctactcggaaaaattcgggaatcaccctggcggacaggctgaatatttaaaagtgccgtttggcaatttcacgccgtttgtcattcctgaatcatgcgagatggaggacgagtcgcttctgtttttatcagatgtcctcccaaccgcgtattggagcgtgcttcacgcaggcgtcaaaaaaggggacactgtcattgtgctcggctgcgggccggttggattaatggcgcagaagtttgcctggatggaaggggcgaagcgggtcattgcagtagactacttggactaccgcctaaagcaggctgaggcattaaaccgcgttgaagtatttgactttacaaaatatcctgatatgggcgagcatttaaaggagattacaaaaggcggggcggatgtcgtgatcgactgcgtagggatggacggcaaaaaatctccgcttgagtatctggagcaaaaactgaagcttcagggcggcacgctcggaccgattcaaatttctacaaaggcggtcagaaagtgcggaaccgtacagattacgggggtatatggaagcaattacaatatgtttccgctcggcgcattcttttccagaaatgttacgctaaaaatggggcaggctccggtcatccatttgatgccggagatttacaagaagatcgaagagaatcaatttgatccgaaggaaatcattacgcaccagcttccgcttgaagaagccggccgcgcttatcatttgttcaacgaccatgaagatgattgcattaaagtaattttgaagccatag

SEQ ID NO: 4309 - DNA, 1373 bp, Bacillus licheniformis
atgaagggaaaaagatcgaatgcctggctttatttttttggagccttgggcggtgtgctctacggttatgatacaggcgtcatttccggggcgattttgtttatgaaagatgaacttgggctcaatgcctttacagaagggctggttgtcagcgcaatattaatcggggcgattttcggatcgggtttgtcaggcaggctgacagaccgcttcggccgaagaagggcgattatgtcagcggctgtgctgtattgcatcggggggctcggaacggccctggcgccaagcacggaatatatggtggctttcaggatcgtgctcggccttgcagtcggctgttcaacgaccatcgttcctttgtacctttcagagcttgctccgaaggaatcccggggcgcgctttcttcattaaatcagctgatgattacgatcgggattctgctctcttatttgatcaactatgcatttagtgatgcaggcgcatggcgctggatgctgggattgacccttattccgtcaatcggccttttaatcggtatctttttcatgccggaaagcccgcgctggctcttaacaaaaggaaaagaagagaaagcaaggcgggttttgtcaaagatgagaggaggagagcgggtcgatcaggaagtcaaagaaattaaggaagcggaaaagcaggaccaggggggcttgaaagagctgctggaaccgtgggtgcgcccggcgttaatcgcaggggtcggactggcatttctgcagcaatttattggaaccaacacgattatttactatgccccaaaaacgtttacgaatgtcggatttgaagattcggcggccattttagggacagtcggcattggaacggtcaatgtcctgatgacgcttgtggcgatccgcttcattgacaggattggccggaagccgcttttattatttggaaatgccggaatggtcatcagtttgatcgtgctttctttttctaatctctttttcggcaatacctctggtgcggcatggacgactgtcatctgcttaggtgtgttcatcgtcgtatttgccgtcagctgggggccgatcgtctgggtgatgctgcctgagctgttcccccttcatgtcagagggataggaaccggagtatcgactttaatgctccatgcagggaacttaattgtgactttgagttttccggtcctcatggaagcgatgggcatcagttacctgtttctgtgctatgcggccattggaatcgcggccttcctgttcgtcttctttaaagtaacagaaacaaaaggaaaaagtctggaagagatcgagcaggatttgcgggacaagcaccgcggaatcacggcaactgacacacagccggttgaacgata

SEQ ID NO: 4310 - DNA, 957 bp, Bacillus licheniformis
atgctacgatcgcagcgaacgaagaaaaagagactaagaaaatgggtgaaatactcactgtttttcattgctttaatcctgacggcgacggcagccgcaggcggctatgcgtactataaagtggcgaacgcctccaaagatgcgcaagtcaccctttccagaggtgaacagtccgtcaagcggattaaagagttcaaccctaaaaaagataacttctccatcctgttgatggggattgatgcccgtcccggacaaagcatggacaaagaacgaagcgatgcgatggttcttgccacgttcaacagaaaagacaaatcggtgaaactattgagcatcccgcgggattcctatgtcaacatccccggacgcggctacgataaaataacgcatgcccactcattaggcgggcgcgaccttagtacagaaaccgtcgaaaacctgctcgacattccggttgattacgtcatggaagccaatttttcagctttcaaggaagtagttgatgaactcggcggtgtaccgatcacgatcaaagaagactatattgtccggcagattaaaaaggatacgaaaggcaaagtcaaccttcaaacaggcgagcagacgctgggcggagaagaagccctcgcttatgtaagaacgagaaaagccgatacggacttgaagcgcggcgagcgccagatggaagtcatcaaatcgattatcaacaaatccaaatcgcttacttccattccggcttacgacgatatccttgatacagtcggaaagaacgtatcgatgaacttgtcgctgaatgatgcaatcggactgatcccgtttatgacgtccattcaaacggtcgatacccttcaattgaaagggagcgattatcaaccgggcaaagtctactatttccagcttgatcaggaaaacctcaacgaaattaagcaggaattaaaacagcagttagatgtataa

SEQ ID NO: 4311 - DNA, 861 bp, Bacillus licheniformis
atgagattaattgcgatcgatttagacgggactcttttaaataccgaaagcaaaatatccgcagaaaaccgggccgctatcaaaaaggcgctcatttcagactgcatcgtaaccatttgcacgggacgggccacatttgacgtaaaagcgcttctgaacgatttggatattccgattatcgctgcaaacgggggaacggtccacgatttcaactataaactcctaagcagaacgctaatggacaaggaagcgggaaaaaaggccgcccaatacttaacagatcatcaaatctattttgaggtttatacggacgatgcgctgctttctccttttgacggagaacagaaacttaaagcagagctcgatatcgtcacaagcgccaaccctgatgaagacagggatacgctttggcaaggcgcactgactcagtttaaacaattcggcatcaaacccgtccccgacattcgcgagatttttaacggagacgaacatatttataagctgttgtgcttctcatttgatatggaaaagctgaagaaagcaaaagatgatctttctgcctttccaaaactgggactcacttcttccggaagacatatcatcgagattctgcctgatgaatccggcaaaggccgcgctttaaaagagctggcccgccactatggaatcgagaaaaaagacatctacgcgatcggcgacagcccgaacgatctgtcaatgtttgaggaagccggccatcggatcgcgatgggcaatgcaatcgatgagctaaagcatatcagcacctttatcacgaaaagcaatgacgaaaacggcgtcgcttatttcattaacaaactgctggaaaatgaatatcaataa

SEQ ID NO: 4312 - DNA, 1245 bp, Bacillus licheniformis
ttgataaaaaaagcggcaaacaaaaagttggttttgttttgtggaattgcggtgctttggatgtctttatttttaacgaatcataatgatgtacgcgccgatacgatcggcgagaaaatagcggaaactgccagacagcttgagggtgcgaaatacagctacggcggagagaagccgaaaacggggtttgactcgtcaggctttgtgcaatatgtgtttcaatcgctcgatattacgcttccgagaacggtaaaggaacaatcgactcttgggagcagtgtcggccgtcagcagctcgaaaagggggaccttgtctttttcaagaatgccgagctggaatcggacggaccgacccatgtcgccatctatttgggaaatgatcaaatcatccacagcacaaaatcaaacggggttgtcgtgacaaagcttgaaggcagctcttactggagctcggggtattttaaagcgaaaaggatcacaaaagagcctgagatttcgatggatcctgtcgttcaaaaagcaaaaagctatgtcggtgttccttatgtatttggaggcaactctccggatctcggatttgactgttcggggttgacccaatacgtcttcagagaggtgctcggcgtttatttgccaaggtcggctgaacagcaatgggctgtcggtcaaaaggtgaagcttgaagatatccggccgggtgatgttttgtttttcagcaatacgtacaaaccgggaatatcccataacggcatctatgccgggggcgggcggtttatccatgcgagccgttcaaataaagtgacgatatcctacttgtcggcttcctattggcagaagaagttcacaggagtcagacgttttgacaacatgtccctgccaaaaaatccgattgtatccgaagccatcaggcatatcggcgaagtcggttatcaaaaaggcggcacatcgcctaaagaaggctttgatacggctgggtttatccaatatgtctacaaaacggcggcaggagtggagcttccgaggtatgctgacaaacaatacagcacgggtaagaaaattaccaaacaggagcttgagcctggagacatcgtcttctttaaaggaaccactgttatgaatcccgccatctatatcggaaacggccaggtcgttcttgtcaccttgtctgccggtgtaacgacagcagatatggagacgagcgcctattggaaagataaatacgccggaagcgtcagaattgagtag

SEQ ID NO: 4313 - DNA, 168 bp, Bacillus licheniformis
atgaaatttgtcagagccatttggccgttcgtaggtttagttttgatcattgcattcatgtctgctttcaagtattctgatgaattgtcaaacgatgaaaaagctaaaatctctacggagatccaaaaagtgaatcagcaggatcaaacaacagaaaacaagcaataa

SEQ ID NO: 4314 - DNA, 1170 bp, Bacillus licheniformis
atgaaaaaacaactgaactttcaggaaaaactgctgaagttgacgaagcaggagaaaaagaaaacaaacaagcacgtctttatcgtattgcccgttattttctgtttaatgtttgtctttacttgggtcggaagcgccaaaactccttcgcaaatggacaaaaaagaagatgccaagcttacagctacttttgttggcgatatcatgatgggaagaaacgtagaaaaagtgacaaacttgcacggttcggaaagtgtcttcaaaaatgtgaagccgtactttaatgtgtcagattttatcacaggaaactttgaaaaccctgtaaccaatgcaaaggactatcaagaggcagaaaagaacatccatctgcaaacgaatcaagaatcagtcgaaacattgaaaaagctgaacttcagcgtactgaattttgccaacaaccatgcgatggactacggggaagacggtttgaaggatacgctcaataaattttcaaatgagaatctggagcttgtcggagcaggaaataatcttgaagacgcgaaacagcacgtatcctatcagaatgtgaacggcgtaaaaattgcaacgctcggttttacagacgtctacacaaagaactttacagccaaaaagaacagaggcggagtgctgccgctcagtccgaaaatctttattccaatgattgcggaagcatcgaaaaaagcggatcttgtccttgtccatgtgcactggggacaagaatatgacaatgaaccgaacgacagacagaaggatctggccaaggcgattgcagatgccggagcagatgtcatcatcggcgctcatccccatgttctcgaaccgatcgaagtgtataacggtactgtgattttctacagcctcggcaactttgtatttgatcagggctggtcaagaacacgggacagcgcgcttgtacaataccatttaatgaatgacggcaaagggcgctttgaggtaacgcctctcaacattcgcgaagcaacgccgacgcctttaggcaagagcgacttcttaaaacgaaaagcgatcttccgtcaattgacaaaaggaacaaacctcgactggaaagaagagaacggaaaattaacgtttgaagtcgatcatgcggacaagctgaaaaataataaaaacggagtggtgaacaaatga

SEQ ID NO: 4315 - DNA, 450 bp, Bacillus licheniformis
atgtttggatcagatttatatatcgccctcattttaggagtcttactcagtttgatttttgcagagaaaacgggaattgtaccagccggcctcgtcgtaccgggttatttgggacttgtcttcaatcagccgattttcatgctgctcgttctttttgtcagtttgctgacgtatgtcatcgtgaaattcggactttccaaaattatgattctatacggacgcagaaaattcgcagcaatgctgattacgggaattcttttgaaaatcggttttgattttatatatccggtgatgccgtttgagattgccgaattcaggggaatcggaatcatcgtgccggggctgatcgccaataccattcaaagacagggattaacgattacgcttggaagtacgcttttattgagcggagcaacattcgtcattatgtatgcttactatctaatctaa

SEQ ID NO: 4316 - DNA, 1182 bp, Bacillus licheniformis
atgtgggtaatgctattagcctgtgtgatcgttgttgggatcggcatttatgaaaaaaggcgccaccagcaaaatatcgatgcgctgcctgtccgagtgaacatcaacggtatacgcggaaagtccacggtgacaagattaacaacagggatattaatcgaagcaggctacaaaacagtaggaaaaacaaccgggacagacgcaaggatgatttattgggacacaccggaagagaagccgatcaaaagaaagccgcaagggccgaatatcggagagcagaaggaggttatgaaagaaacggtggaaagaggggccaatgcgattgtcagtgagtgcatggccgttaatcctgattaccaaatcatctttcaggaagaattgcttcaggctaatatcggcgtgatcgtgaacgtgctggaggatcacatggatgtgatgggaccgactttggatgaaatcgcagaagcattcacagcaaccattccttataatggacatttggttattactgatagtgagtataccgatttctttaagcaaattgcaaaagaaaggaacacaaaagtcatcgtcgcagacaattctaaaataacagatgaatacctcagacagtttgagtacatggtattccctgataatgcgtctcttgcgctcggtgtagctcaagcgttgggcattgacgaagaaaccgcctttaaaggcatgctgaatgcgccgcctgatccgggagccatgagaattctgccgctgatgaacgccaagaatcccggacatttcgtcaacggttttgcggccaatgacgcagcttccactttaaacatttggaagcgtgtaaaagaaataggctatcctacggatcagccgatcgtcattatgaactgccgcgccgacagggtagacagaacacagcagtttgcggaagatgtccttccttatattgaagcaagtgaacttgtgctgattggagaaacaacagagccgatcgtcaaagcatatgaagcaggcaaaattcctgcggacaagctgtttgattttgagcacaaatcaacggaagaaatcatgttcatgctgaaaaacaagcttgagggccgcgttatttacggagtcggaaatatccacggagcagcggagcctctcattgaaaaaatacaagattacaagattaagcagctcgttagctag

SEQ ID NO: 4317 - DNA, 981 bp, Bacillus licheniformis
ttggctacgattaaagacgtcgcacttgctgcaaaagtatctgtcgctacggtttcccgggtattaaatgagacgggatacgttcatgaagacacgagggcgcgcgtgctgaaagcgatggaagaactgaattaccacccgaatgaagtagccaggtctctctataaaagggagtccagactgatcggactgctgctgccggatatcacaaacccgttctttcctcagcttgcccgcggcgttgaagatgagatccaccgcctcggctttcggctcatatttggaaacagcgatgaaaatctggaaaaagagcttgattatatgcagacgtttaaacaaaatcatgtggtcggagtcatttcagcgaccaattatccggatgcgccaaattatcaagacttgtccatgccgatcgtctttcttgaccggacgggcgagaatgcgccggctgtatttgcggacagccgcgaaggaggcagaatcgcagcggctgagatgatcaagaggaacgcgaaacggattacgctgattaaaggaccggctcaccttcagactgcaagagaccgtttcaacggagcgctggacgtgctaagcggagccgatatcgattttcacgtcatgaaaaccgagacattttcatttccggaagcccaaaaacgggcggcggagctgtttggcacatatccggaaacagacggcgtgatcgcaagcaatgacattgtggcgacagccgttttgcatgaagccttaaaacggaagatcaaagttcccgatgaactgcagattatcggctttgatgacataccgcaaagcgaattgcttttcccctctttatcaacgatcaggcagcccgcctatgaaatgggaaaagaagctgcaaaactgctgcttagattaatgaaaaatgaatatattgaacaatcggcagttcagatgccggttgcctttattgaaagacaaacgacaagaaaggcggaatga

SEQ ID NO: 4318 - DNA, 882 bp, Bacillus licheniformis
atgagtaaaatatgcgtgatcggcagctcttcgatggatttagtcgtgacatcgcccaagcggccggccgccggagaaacggtgcttggcgaatcttttaaaacggttccgggcggaaagggggccaaccaagcggtagccgcggcccggcttggcgccgaggtccatatgatcggctgcgtcggcgatgatcattacgggaaagccatcctcgacaattttcaagccaatggtgtcttgacagactatgtggaaccggttacaggtcaggaaagcggaaccgcacatatcgttctcgcagacggcgacaacagcatcatcgtcgtcaaaggggcaaatgaccacgtcactcctgaatatgttcaaaaagcgctgcctgcaattaaacaggctgatatcattctgattcagcaagaaattccggaggaaaccgtcgattatgtcagcggactgtgcagctctctcggcattcctctcctgctgaatccggcaccagcccgtccgctacgcccggaaacggtcgaacacgcggcctacatcacgccaaacgagcatgaagcttcggtactgtttcagggcatgtcccgggaggaaacgttaaagcgctatccggagaagctgttcatcacagaagggaaaaacggcgtccgctatcacaatggtctggaagaacgtgtcgttccttcattccctgtcaatgcgattgatacgacgggcgccggagacaccttcaatgcgggatttgccgtcgcgctttccgaaggacaaagcatcgaatctgccttgcgctttgcgaaccgggcggcttccctgtcggttctgaaattcggcgcacaaggcggcatgccaaaacgggatgaagtggagcgtgaactgtcatga

SEQ ID NO: 4319 - DNA, 396 bp, Bacillus licheniformis
atgaaaaaacacggaatattaaacagccatatcgcaaaattgctggccgatctcgggcataccgataccatcgtcatcgcggacgccggtctgcccgttccgcccggcgtccccaaaatcgatctcgcactgacattgggtacgcccggatttcgagaggttacaaagctcatcgccgatgaaatggttgtcgaaaaagtgacggcagcccaagaaatagaaagcgtcaatcccggtcaagccgcatttttaaaagcggaattttcaaaccaaaagattgactatatcccgcacgaagcattcaaaaaggcaacgagccaggcgaaagcggtcattcgcacaggggaagcaacgccttatgcaaattgcatcttgcacgcgggagtgatcttttag

SEQ ID NO: 4320 - DNA, 1482 bp, Bacillus licheniformis
atgcatattaaaatgaaggacatttttaaagcctttggccaaaaccaggtgctgtccggcgtttccttcgagcttcaagaaggtgaagtccacgctttaatgggagaaaacggcgccggaaagtcgacactcatgaatctgttgactggacttcacaagctggacagcggaacgatcgagatcgacggaaaagaaacgtatttttcagatccaaaggaagccgaacagaacggaatcgcctttatccatcaggagctgaacatttggcctgaaatgaccgttttggaaaatctgtttatcggcagagagctttcttccaaacttggatttttaaacaacaagaaaatgaaagcgctagcaaaagagcagcttgaaaggctcggtgtctcaatttctcttgaaaaagaagccggagactgttccgtcggccagcagcaaatgatcgaaatcgcaaaagcccttatgacagacgcgaaagtgatcatcatggatgaaccgacggcagcgttgacagaaagagaaattgaaaaactgttcggcgtcattagagcattaaagaaaaacggcgtctccatcgtctatatatcccaccgcatggaagaaatcttcacgatttgcgacaggatcacggtgatgcgcgatggaaaaacggtggacacgaaacggattcccgacaccgactttcatgaagtggtgaaaaagatggtcggacgggagctgaccgaacgctatcctgaaagacagccaaatccgggacgcgtcgtcctcgaagtcaagcaggcatccaaaaaaggagtcttccaaaatatcagcttttccgtccgctccggcgaaatcgtcgggatttcaggactgatgggtgccgggcgcaccgagctgatgagagcggttttcgggctcgatccgcttgactcgggagacattttcatcgaaggcaaaaaagcggcgctcaaaaaaccgagcgatgccgttcaaaagggaatcggctttattaccgagaaccgcaaggatgaaggacttgtgctcgacacgtccatcagagaaaatatcgcccttccgaatctcgccagcttttcgccgaaaggatggattgacaaaaaaagcgagcaggaatttgtcgatcttctgatcaagcggctgacgatcaaaacggaatcgccggaaacccacgcgcgaaacctttcaggaggaaaccagcaaaaagtggtcattgccaaatggatcggcatcggccctaaagtgctgattttggatgagccgaccagaggcgtcgatgtcggcgcgaaaagggagatttatcagctgatgaacgagctgacagaccgcggcgtcgcgatcgtcatggtctcttcagagctccccgagattctcgggatgagcgaccgcgtccttgtaatccatgaaggaacgctaagcggagagctatcaagaaatgatgccacgcaagaacgaattatgacactcgctacaggaggacggtaa

SEQ ID NO: 4321 - DNA, 963 bp, Bacillus licheniformis
atgaaaactcaaccggctgtgaaaaaaagccttaatgttgattctgtaatgcaaaagctcggtccgtttctcggcctgatcattctcgtcgtcatcgtatcattgttaaatccgagctttttagaaccgttaaatattttaaacttgttaagacaagtcgccattaatgcgctgatcgcgtttggcatgacctttgtcattttaaccggcggcatcgatctttccgtcggagcgattttggcgctgtcaagcgcattgatcgccggaatgatcgccggcggcatcgatcctgttttcgccgtcatcatcggctgcctgatcggagccctgctcggcttggtcaacgggctgttaatcacgaaaggtaaaatggccccgttcatcgcaacacttgccacaatgacgattttccgcggattgacgatggtttatacagacggcaatccgattacagggctcggcaaccactacggcttccagcttttcggacgcggttactttttaggcatccccgtccctgcgattacaatggcagccgcctttatcatcctctgggtgatccttcacaaaacgcctttcggccgccgcacatatgcaatcggcggaaatgaaaaagcggccttgatctcgggcattaaagttccgcgcgtcaaaatgatgatttattctcttgcaggcctattatccgcgttggctggagccatcttgacgtcacggctaaactcagcccagccgacggcaggcacttcctatgaactcgacgccatagccgcagtcgtattaggcggcacaagccttgccggaggaagaggacgaattgccggcacactcatcggcgtcctgatcatcggaacgttgaataacggcttgaacctgcttggcgtctcttcctttttccaaatggtcgtcaaaggtgtcgtcattttgatcgcagtcctgctggaccgcaagaaatccgcttaa

SEQ ID NO: 4322 - DNA, 915 bp, Bacillus licheniformis
atgaaaaaaacattaacggttttcaccgcattggcgcttctgtttctgtccgcctgctcgctggagccgccggaatgggcaaagccgaataaagaaaaaggaacggatattaaaatcggtttatctgtctcaactttgaaaaatccgtttttcgtttcattaaagaacggagttgtcaaagaagccaaaaaacaagggatagaagtgattgtcgtcgatgcacaggacgattcggcaaagcagacgaatgatgtcgaagatcttctgcagcaaggcgttgacgctttattgatcaacccggcggactcctccgccatctcaactgcagtccaatcggccaattcgcttggcattccggtcgtcacccttgaccgctccgccgaaaacggaaaagtagaaacgctcgtcgcttcagataacgtaaaaggcggacaaatggcagcggactttattgtggagcagctcggcaaaggcgcaaaagtggctgagcttgaaggcgtccccggcgcatcggcaacaagggaacggggctcagggtttcataagaccgctgatgacaagctgaatgtgatcgccaagcaaacagccgactttgaccggacaaaagggttgaacgtcatggagaacctccttcaaggaaaccctgatattcaagcggttttcgcacataatgacgaaatggcgctcggcgcgattgaagcgatcagaagctcagggaaagagattcttgtcgtcggcttcgacggcaatgaagatgcggttaaagcggttcaggccggagacatgtcggcaacgatcgcccagcagcctgaattgatcggcaagctcgccgtacaagcggcccgcgatattttgaacggcaaaaaagttgaaaaaacgatacccgcaccgctcaaactggaaacgaaaaagtaa

SEQ ID NO: 4323 - DNA, 129 bp, Bacillus licheniformis
ttgcacagcaatggtgcgcatgatgaggaccggaattcggcgcgccgttttgcggaaagggtcagtcaggatcgtctatgttcctttgcaggccgatcagtcccggacgcttgtgtttgcttatcctga

SEQ ID NO: 4324 - DNA, 762 bp, Bacillus licheniformis
atgaaaagtgcaagcaaacaaaaaataattcagcccgttgataagaacctcgatcaagtctatcaggtctcaacgatggtatctttattggacggaatttacgacggggatttttatatgtccgaagcgaaggagcacggagacttcgggatcggaacgttcaaccggctcgacggcgagctgatcggttttgacggtgagttttaccgtctccgttccgatggaaaagcctacccagttcaaggaagcgattgttctccattttgctcgctggctttcttccggccggatatctatcacgaaatcaagcagcggatgccgcttgaggcgttcgaagaagaaatgaaacggatcatgccgagtgaaaacctgttttacgcgattcgcatggacggaacctttaagaaagtcaaaacgagaacagttgaacttcaggaaaaaccgtatgtgccgatggttgatgcggtaaaatcacagccgatctttgattttaatgatattacggggacgatcgtcggcttttggacaccgcaatatgccaacggaatcgcagtttccggcttccatcttcactttatagatgaagaccgcaatgtcggcggacacgttttcgattatgaaatcgaagaatgcacggtgcaaatttctcaaaaactcaatatgaacctcagattgccgaatacgcaagatttctttcaagcggatttcaataaacacgatcttgcagccggaattgaagcggccgaaggcaatcccgagtaa

SEQ ID NO: 4325 - DNA, 1719 bp, Bacillus licheniformis
ttgaataatgtagccgctaaaaatgaaactcttactgtaagaggagcagagcttgtggtggatagtctcattcagcaaggtgtcactcatgttttcggtattccgggagcgaaaatcgatgcggtgtttgacgtattgaaagacaaggggcctgaattgatcgtttgccgtcacgagcagaatgcagcatttatggcggcggcagtcggacgattgactggaaagcccggtgtttgcctggtgacttcaggtccgggagcgtctaatttagcgaccggtcttgtaacagccaatacagaaggagatccggttgttgccctggcgggtgctgtaaaaagagcggatcgtctcaaaaaaactcatcaatcgatggataatgcggcgttgtttcagccgattacgaaatatagcgcagaagtggaagatgcgaacaacatacctgaggctgtaaccaatgcattcagagcggcggcttctggacaggctggcgcagcgtttctcagctttccgcaggacgttacggccggtccggcaactgccaagccggtgaaaaccatgccggcgccgaagctgggcgcggcttcggacgaacaaatcagcgcggccatcgccaaaattcacaatgcgaaccttcctgtcgtgcttgtcgggatgaaaggcggaagacctgaagcgattgaagcggttcggcgtctgctaaggaaagtgaaactgccgtttgttgaaacataccaagcagcgggtacgctgtctcacgatttggaagaccagtacttcggccggatcggactattccgcaatcagcccggagacatgctattggaaaaagcggatgtcgttttgacggtcggctatgatccgattgaatacgatccggtcttttggaatggaaaaggcgaacgaagcgtgattcatcttgacgaaatacaagccgatatcgatcatgactatcagcccgaaatcgagttgatcggcgatatcgcagagacgttaaaccatattgaacatgactctctgccggtttccatcgacgagtcctttgcacctgtccttgattacttgaagaaagcactggaggagcaaagcgaacctcctaaagaaacaaaaactgatcttgttcatccgctgcaaatcgttcgcgatttgcgtgaactgctgagcgatgacataacggtgacttgcgacatcggctcccatgcgatttggatgtctagatatttccgcacctaccgtccgcatggactgctgatttccaacggcatgcagacgcttggggtggctttgccgtgggcgattgcagcaacgctggtcaatccgggacagaaagtcgtgtctgtttccggggacgggggcttcctgttctccgcgatggagcttgagacagcggtcagattaaaagcgccgatcgttcacattgtctggaatgacagcacatacgatatggttgcgttccagcaggagatgaaatacaagcggacgtccggagtcgacttcggcggaatcgatattgtaaaatatgctgaaagctttggtgcaaaaggtttaagggtcaattcacctgacgaattggcagaggtgcttaaagctggtcttgatgcagaggggcctgttgtcattgatattccggtcgattacagcgacaacattcatttggccgatcagcgttttccaaaaaaatttgaggaacattttaataaagaagcctctaagcaatcttga

SEQ ID NO: 4326 - DNA, 879 bp, Bacillus licheniformis
atggagctgcgccatcttcgttattttatggttgttgccgaagaactgcatttcggaaaagcagctcttcggctgaacatgactcagcctccgctcagccagcagattaaacagctagaaagtgaaataggcgtcaccttgctgaagaggtcaaaaagagccgtcaggctgacggcggcaggcggggtctttttaaaacaaatcaaggaaggactttcccagattgatcaggcagtcgacatggctcagcggacggcccgcggggagctgggaagactcgtgatcggctttgtcggctccgcaacatacgagatcatgcctcccatcatcagggaataccgaaaccggttcccgtccgtgcagatcgatcttcgggagctttcaacccccaatcagatcgatgcactgctaaacgggcatattgacatcggggtgctgcatcccccgttgggaaacgacgaactgaagtcatacacggtaaaaaaaagccattgtgtccttgcacttccaaaacaccacccgttgacagaaaaagcccgggtacatttgaaggatcttgaaaaagaatcgctgatcgtcattgccaaagaagcgtggccctctttatacacggaattcaatttcttgtgtgaaaaagccggatttatccccaacatcgcccaggaagctacagaataccaaatggtgatcggcctcgtatcggccggaatgggaatcgccgtcgtgcctacggcggctaaacgattatttaaccttgatgttgtatacaaagaaatcgaagactttccccttcgcgccgaatggattaccgcacatcgaaaggacaaccgcaatccggcacttaagcatttcatcgaaatctcagatcaacactcatag

SEQ ID NO: 4327 - DNA, 1584 bp, Bacillus licheniformis
atggagaagctgaagatcggttcgaaacaaatggttgtcagtcctcattatctcgcttcgcttgcaggcagcatcatcatggagaagggggggaacgcgtttgacgccgctgttgcagtaagcgcgtgcctagctgttgtctatccgcatatgacaggactcggaggggatgccttttggctgatgtatcacaatggaagcggggagatcaaagggtacaatggcagcgggcggtcggggcggaaagcggaccgggatcagtataaaggagagagcgccattccggtcaggggcccaaggagtgcgattaccgtgccggggatggtggacagctgggccgaaatactggctgcgtacggccgtctatcgcttcgagaggtgctgaagccggcgattatgtatgcagaaaaggggttcccggtctcgcctgatcaatgtcaaaacacggtgaaaaacgctgaatggctttcctgtatgccgatcactgcagatatttatcttccgggaggaaaaccgccctctccaggtgagcgttttgtgcagaaagagctcgcgcgcactttgacgttgatcgctgagaaaggaagagacaccttttataaaggggaaattgcccaagctttagcagcctatctccaaaacaacgggggcatcttgaaccttgaagatttcgggctgcatcgaggggaatgggtgtctccgctttcctccacatacagaggatatgcgatctatcaaatgcctccgaattcacaaggatttaccggtcttatgacattgaacattttggaaaactacgactttggcatgatcgagcacggttctttcgagtattatcatctgcttatcgaagcattgaaattaagtttttccgactgcaacaaagtattgactgacccggaattctcacacattccgcttggacgcctgctggacaaagagtatgcccgggagctggccgcaaaaatcggactgccggcgcttcaggcggagagccggccgctcggcagcgatacatcttatgcagcagcagtagatgaagacgggaatgctgtttcgtttattcaaagtttgtatttcgaattcggctcaggtgtgacagctggagataccggcgtcattttgcagaacagagtggcgtttttctcgcttgatcccgaccatgtcaatacgctggagccgggaaaaagaacttttcatacgctgatgcccgccatggcgtttagaggcggcaagccgaaattcctttacggaacgcaagggcaagggggagaaggacagccgcagacgcagacggctcttattacgagaatggtagattacgggatggatccgcaaacagctgttcatgaaccgagatgggtatggggcagaacatggggagagcgggtggaaggtgtaagaatagaaagcagagtggcgcctgaagtgattgcaaaactgcgaaagcatgggcatcacgtaaccgttgtcggtgaatttgacggggtgatgggtcatgccggaatcattgagattgacgatcaaggcttcctgagaggggggagcgatccgagaagcgatggggcagcaatcggcatttaa

SEQ ID NO: 4328 - DNA, 477 bp, Bacillus licheniformis
gtgagcctcgactaccatatgccaaatttaattctcgatgaaacggataaaaaaatcctttcgatcttgcatgaggaaggaagaatctcttatacggatttaggaaagcgtgtgggactctcaagagttgccgtacagacgcggatcaacaacttgattgaagaaggcatcattgaaaaattcacagccgtcatcaatccagtcaaggtcgggattcacgtatcggtgtttttcaacgttgaagtcgaaccccaatatttagaggctgttgccgttgctttggaaaaggagcccgccgtgacaagcctctatcatatgacagggccgagcaagctgcatatgcacggcattttcgcaaatgatcaggagatggaggaatttttgacgaagcgcctgtaccccctgaaaggcgtggtgagcgtcgactgccagatgctgattaaacgttataagagccgaatgggaatgaagctttaa

SEQ ID NO: 4329 - DNA, 585 bp, Bacillus licheniformis
atgaagcacccttaccgggaactgatcatcgcaatgacaagaacgggaatattgggctttggcggcggcccatctgttatcccgctgatccgtcatgaagccgtttctaagttcaaatggatcgatgatgatgaattcggggaaattttggcgattgccaatgcgctgcccgggccgatcgctacgaaaatgtcggcatatttaggtcataaagtaaaaggcgttcctggtgctgtcgttgctacagcagcccatatcatgccgacatgcgccgcgatggccgccttgttcgcagccgttaatgtgctcagccactcaaaaatcgtaagcggcatgatcggcgctgtcacccctgtcatcgccgtcatgctcggcatcatggcttacgaatttgggcaaaaagcattgaaaggcttcggcttgctgaccggcgtgcttttctttattcttgcgtttttgggtcttcaagtgttttccatccaccccggcatcattgtcatcctgtttttaacgtatggcgcgttccattttaaattaaaaagaaaagcggcccgagaaaaggataaaggagtgtccgcttcatga

SEQ ID NO: 4330 - DNA, 537 bp, Bacillus licheniformis
atgatcatcttttatctgttttgggccttctttattgcaaacttattgggctacggaggcgggccagcttcaattccgcttaattttgaagaagttgttcagcattttcactggctgtcaaaagaggaattttcaaacatgcttgcgcttgcaaatgcgctgccaggcccgatcgccacaaaaattgcagcttatgtcggctacagcgtgctcggatggcccggtgttttcattgctcttgccgcaactgtgcttccctcggccatcgcgctcgttttgctgctcaagctgatcggccgctaccgccagtcgcaggtcgtcaaaggaatgaccttgtcggttcagccggttatagccgtgatgatgcttcttttaacatgggaaatcagcggcgacgcgatccattcgatcggcatggttcaatcacttgtcatcgcgctgatctctttagtcgccttgacgaagttccgcgtccatccggctttcctgatcgtggcggccttcgcttacggcgggcttgtcattccgctgctgtag

SEQ ID NO: 4331 - DNA, 753 bp, Bacillus licheniformis
atgatcgatattcattgccacattcttgcgggcgttgatgatggagcagcatgtatgaatgacagtttagaaatggctaaacaagccgccctccaggggattcatacgattatcgccacaccgcaccaccgaaacggtgtatacgaacatccaaaagaagccatccttgcagctgtttcgggtttaaagacgagaatgcaaaaggaaaacatcccggttctcattacccccgggcaggaaatccgcctgtacggcgaattgaagcgcgatcttgagcgcggcagactgctcagcctcgccggcacaaagtatttgctgattgaacttccttaccaccatgtcccacgttatgccgaaaaggtgctgttcgatctccaattaaatggttacattccgatcatcgcacaccccgagcggaaccttgaattgatggagaatcccgatctgctgtaccgcctcgtcaaaaacggcgcctgcgcccagctgacatgttcaagtcttgcaggccgtttcggcagaagcgtcaaacggctcgcccgccgctttcttgaagcgaacctcatccactttatcgcatcagacgcccacaacctcacgacccgatctttcttttttgatacagtagaaaacgattacggccgcgatttcttgaacgtgtttacagaaaacgcgggcctgctcctggaaaaccgggagattcataaagaaacaccgcgtcccgtcaaaaagaaaaagctgttgggcctgctgtga

SEQ ID NO: 4332 - DNA, 618 bp, Bacillus licheniformis
atgagagatcatatcggctttaaagatgtgttcatcgttttgaaaaaaagattcgttctgatcgcactgatcaccattgcggctgctttgtccagcgctgccgtcaacttttattggctcaaacccgtctatcaggcatccgcccaaatcctcatcaacggccgtcaaacgtcgaacttcaccgacatccagaccaaccttgaacttatcaacacatacaacgtcattatgaaaagcccgatcattttaaataaggttaaagacgaacttaacctttcggaaacggctgaagacctgaagcaaaaaatcacggttatcagcgaaaatgaatcgcagattgtcagtatctccgcgactgacaaggattattccaaggcggcgtatatcgcgaatacagtcgccgccgtatttcaaagagacattggcgatattatgggtgaaaatgccgaaatcagccttgttgcgaaagccaatcccgatcattcacctgttcccgtcagcccgaacaagaagttcaacatcgctctttttacagggttcggccttctgtttggcgctgggctagcatttttgctcgagcttttgaaaaataccgttcgaaatgaagaagacatctaa

SEQ ID NO: 4333 - DNA, 144 bp, Bacillus licheniformis
atggatgacaaggaattgaatcaggaagaatttttgagaattcttatgcatgcgtatgacgttggtgaaaaatcgaaagacataacgacgaaagaacttcttgaagatctcattcttcatatcaaaaatggatatacgacgtaa

SEQ ID NO: 4334 - DNA, 1599 bp, Bacillus licheniformis
atgcttcaagacatgatctcaaaaacggttgtgatggatgcagctgaacagtttaagcatgtactgccgtgcacagaagaaaacattcagctcatgaaaaaagcccttattttatacagacaggattccgtctatcgggtcaagccgatgagcgggcatacggtcagcgcttacgtccaggacgttgtcccggtaaaggtcttcatcgacctcgccgacgttaaaaaaagcagctgttcctgccctgctcaaaacatgtgccgtcatgtgcttgccgtttacttatatctatatgcacaatatgatcgattgggaacatttacggagttttggaaggaagcgcaaaaacgccgcgaaaaccgggagattctcggacagcttcagcgcggaatgaagccccgcagccacacgctcgatcaatggacctcctttttcaatacggagttcagacgctgggaggagcatacgcctaaaaaccagcaaacgatgcaatacctttactacgggtatttttcagctttaaaaaagcggacgcctgcggagccggagctgaaaaaaatgtatcaaatccacgcggctcttgcgacatggcttgctatgcattcactcgtcgagaaagggcgcatcgatcctgaaaaagatttttactcgctgaatccttatatcgaacagctgatggatacgatctacagctcgatcgatgaactgaaaacatatgcgctatcgttctcccttgacccgtttttagaaaaaacccccggcgtgattcgggaactgctgctcaagaaagatattttccagtatgaaaggctgcggattttcggggagatctggagtgcgcttctatcccggccaaactggctgaagcgggagctcgatgtgctgaacaatctggagccttcgcctgaaatacaattcggcaggctgcatcttgaatttctgctgaaaaacgatgatgtgattcttgatcaagccggatcgttttcaccggagattcttccgtatacgtttcaatggctcagtgtcatgaccgccaaaaaggactggaagcgcctgaaaaaatggtatgaacaccttgagcagctggcggccggcttctgcagactggataaaccgtaccgggaaatacgcgatgtactaagcgaattcttcctgtttctaagcgattacagcaaaaacgcaaaagaagagcatgtatttgaacggtattgcaaagagtgccttccttatacatttactgaatacagccattttttatataacaaaaaccgctttacggagtggatggagatccacagccttgtcggtttttcaatctctgagatagggcagaacgccttgaaagacattgcggcagcggctcctgaagcattgatcccttcctatcacagagaaatttccgggctggttgaacaaaaaaaccgctcaagctacaaagaagccgtcaaacaattaaaaaagctgcgcaccctttataaaaaagcgaaaaaacaggatgtctggaaccggtttatggagcagttttcagcccgctataaacggctgagagccttccaggaggagcttaagaaaggaaagttgatcgatggcgagtcttaa

SEQ ID NO: 4335 - DNA, 2766 bp, Bacillus licheniformis
atggcgagtcttaaggaaatcgtaatacatgtcgaacagtcagaagactatacatttattttatcttgtcatgacggggatcatcagtttcttacgcgaaatgaaatggaaaggcatttgtttcagtggcacgaatcgtctttttacggaacatttctcgaggaagccggtttagatacccctgcggttctgctgtccccgtggatggcggtcgaatttctcggcaaaaactcatttaattcattcagcgacatcatccttactgaggaaactgaacctttgatgaaaacggcttccaccatttatgagtttatcgcagatgaagactttcttcccgactatgaagcatggaagcaggaaatgctgcgctggaaagataaagaagggattttggaaggctatacagccgaatggttttcacacgctgtcgaagactacatcaactacaatgacgaattaaaagcaaaatgggaatcgattgtcgcacattcccccgcagtcaccacatttcagggacattttcttgatgaagacgattttcttgaaacgattggctggcatgaaaaccctgtgccgtttaccgtcggactccgcttaaatgaacctgactttgacggagacgattggaaaatcgaactgtttttgcgcgacaaaaaaagcggagccattcagttctttgaaggcttgaacaggctgaaaaaatcgtggcaggcatacgctgataaaatcgaccgagaacaagacaggttccgccaaatcgtgccctggctgacgatcgaatcggggacgtcgcttttaacggaagaggaagcatggatcttcctgtccgaagctagcgaaacacttgtcagcatggggattgaaattctgctgccgtcatggtggcaaatcgtgagagacagcaatatgctgctgaaagcaaaagtgtcatcggctccccgcggcgagtcttttgtcggaatgaatgcattgatggacttcaactggcgttttgccaccaatggaattgaactcacagaggaagaattcgagcagcttgtcgccaataaaagacggcttgtcaatatacgcgggcagtggatcaaaatcgacccgaattttatcaaacaaatgaaaaagctgatggagcgggcagaaacagaggggcttcatatgtctgacatcctggcgcgcgagctgacagagcggagcgaaacccgcgaggatgatgatctgttcgatgcttccgcattcagcgatgtacggtttgaactgtcctatcagctgaaaaacatgatcagaaagctgagccagcgcgatgatctcccgtcatacccggtcagcaaatattttcacgggacgctcagagcttatcaggaagacggtttgaactggctgatctttctcagaaactgcggcttcggcgcctgcctggcagatgatatggggctcggaaagaccattcagatgatcgcctatttcgcctatttaaaagaacagggacaacaaacgccgtctcttatcattgcgccgacttccgtcctcgggaactggcagcgcgaactcgagaccttcgcgcccggcctgacggcagcgctccactacgggccaaaacgccctaaaggtgaagcgtttcagacatcttacaaagatgcggatatcgtcttgacgtcatacggcctcgcccaatccgactttgacgatctcagcagcgtcgcctggaactgcatctgccttgacgaggcccaaaacattaaaaatgcgcacacgaaacaatcccgttcaatcagaaagctgaaaggactgcatcatatcgcgctcagcgggactccgatggaaaaccgcctgacggagctgtggtcaatctacgatttcatgaacaaaggctatctcggaagccttggcagcttccataagcgttttgtcctgccaatcgaaaaagaccgcgacgaaaaacggatcgaacagcttcagcagctgatcaaaccgtttttattaagacggacaaagcaggacaaagaagtcgcgctcaatctgcctgagaaacaggaggaaaaagagttcgttccgctctccgcagaacaggcttcactatatgaacagcttgtcaaagatacgtttgaacatatgtcaagcctcgccggaatgcagcgcaaagctctaatcttaagcatgctcggcaagctcaaacaaatctgcggccaccctgccctttacttaaaagagaccgggagcgagctccttaacggaaggtcagtcaagctcgaaaaactgctggagctgacgaagacgattcgcgaaagcgatgaaagctgcttgattttcacccaatatctcgggatgggagatatgatgaagcgcctgctcgagaagtcattcggcgaaccggtcaagtttctgaacggcagcttatccaagcttgaacgggacaaaatggtggagcagtttcaaaacaaggaatttccgattttgatcttatcattaaaagccgggggcacaggcctcaatttgacggccgccaatcacgtcatccattatgacagatggtggaatcccgcggttgaaaatcaagcgacagaccgcgcctacagaattggacagaaacggttcgtccacgttcataaactgatcaccaccggcacaattgaagaaaaaatcgaccaaatgctcgaatcgaagcaatcgctgaacgatcaaatcatccaaagcgaaaattggatcaccgagctttctgagcatgaacttgaggagttatttaccctgaacgcttcggctattacaggttaa

SEQ ID NO: 4336 - DNA, 147 bp, Bacillus licheniformis
atgaaacagccgttccaactacccgaaaaaatggcccgattccgcgggcaattcgaacaatcagcgcgggattttttaattgggactgtcattaaggggcataaacacaaaaaacagctgtctatcgcagacagctgttttatttaa

SEQ ID NO: 4337 - DNA, 879 bp, Bacillus licheniformis
atgaaaatgattgcggtcgatttagacgggacgctgttaaacagtgaaagcaagatctcaaaggaaaatatcgatgcgattaaaaaagcgcgggaacacgggattgaagtagtagttgccacggggagagcatcctttgatgttcaaacgatatttgagccgacaggtattaaaacatggattatcagtgccaacggagcggtgattcatgatcctgaaggcagcctttaccattcggtgccgcttgatcggaaacgggcagaaggaattcttcgatggcttgaagaaaataactactattatgaggtgttcagcgatgaagcaatcttcacgccgcaaaacggccgcgagctgcttgacattgagctggaccgcttgaaaagcgcaaatcctgaggcagacctatcaaggctggaactcgcggctgaacagcagctcagccaaaacggatacgcatacatcagctcctataccgatctgtttttagccggaaaggatgttaatgtatataacatattagctttttcttttcataaggaaaagctggaaacgggctggaggcaatttgaagatgcacaagatattacgcttgtcacttcagccgagcacaactttgaaattgagcatcttcaggcgtcaaaagggctggcattggagaagctttcacacaagctcggcatttcccttcaggaaacagctgccgttggagacagcctcaatgatttttcgatgctgaagatcgcggggaaaagctttgccatgggcaatgcgcgcggagacattaaagagatggctgatgaggtgacgctcactaatgatgaaaatggcgttgctcacatcctgcatcagctgattgaacagcaagtcaaaccggtttaa

SEQ ID NO: 4338 - DNA, 771 bp, Bacillus licheniformis
gtgtaccaagaggaaaggctaatttccatcatcgactatttaaaagagcataaacggatttccgttgaacaaatttgttctttattcggagtttcaagagatacggcaaggcgggatctggttaaactgcaagagcaaggcgccattatcaggacaaggggcggggcgattctgcccaccgttcatgatgaggtcaaagactattcgggcaggctgggcatggtttccgaagaaaaaagcatgatcggaaaagcagccgcttctttaatcagagaaggcgaccgcattattttggacgcttccacgacagtccaatcatgcgcagagcatttgccggatgtcaattgcacgatcatcaccaattcgattaaccttgcggacgttctttcctcaagaaaaggggctgacatccgcctgcttggaggaaagcttcaaaaagagcaccggtttttgtacggcgcctctgtcattgaaaagctgtcatgctatcatgttgataaagcgctgatcggcgtggtgggggtttctgaacatgggcttacaatcgcccatgaggaggacggaatggtgaagcggaaaatgatttcccaagcgaagcaagtcatagcgcttgccgaccattcgaaaatcgggagaacggatttttaccgatacgctgaactcagtgacattgaccttctcattacagaccggctgccgtcgaaaccgtttcagaagctgcttgatgaacacgatgtggagctgcttgtggctgaacatcacgatacttaa

SEQ ID NO: 4339 - DNA, 666 bp, Bacillus licheniformis
atgaacatgctgattgattcagtgcatataccggagattgaaagattgcttgattcatttcccgctggcggcgtcacgacaaacccggcactgatcgcaagggagaacaagccttttaaacagcagattcaagatattcggcggcttcttcccgagcatctgcctctccatgcccaagtgatcgccgaccattggcgggatatggtcgatcaggcgaaggcactctataactggctagatggaaacgtgtctgtgaaaattccggtgacgactcaagggctttacgcgatcagaaagcttgcggctgaaaatatccagaccaccgggacaacggtttataccgctgcacaggctgtactggcggcaaaagccggcgcctcctatgtcgcgccgtatgtcaatcgcattgatcaagagtatggtaatggcgctggcgttgtcaaaacgattgtcggcttattcaacacatactgtttaaattgcaaagtgcttgcggcaagctttaaacataaccgtcaaattcttgccgtcatggaagcggggagccatgaggcgacaatcagccctgagcttataagccgtttggctgatcatccggctgtagatcgtgatatccatgcgtttcgtgagatttggcactctcaatatggaacattttcattttaa

SEQ ID NO: 4340 - DNA, 786 bp, Bacillus licheniformis
atggagatgaataaaggaaaagtggcattgatatgcggcggcggccaaagtctcggagaagcgctgtcctaccggatggcagaggcgggatatgacatcgcggtcgcagacatcaacggcgagaacgccgaaaggacggcagatcatgcagccggtcaatacggggtcaaatcgctgtggattcaagcggattttacaaaggaagccgatgtgaaaaaaatgatcggcagggtcacggacgaattcaataaaatcgatgtgatggtgtacagtgcgggaatcgccaaaagcaataaaatcacggattttgaacttgaagactgggaacggaccatcgaggtcaatttgaccgggtattttctttgcgcgagggaaacgtcaaaggtcatgattgagcagggaagcgggtcaatcattcaaatcaattccaaatcgggaaaagtcggcagcaagcataatacagcttattcagcttctaaatttggaggggtcggtctcacgcaaagcctcgcgcttgatcttgccgaacacaacattcgggtgaacagcattatgccgggaaacttgttaaaatcgccgatgttccaaagcttgatcccgcaatacgcgaaaaagctcggcattccagagagcgaagtagagcgcgtgtacaccgaaaaagtgcctctaggacggggctgtacgtatgatgacatcgccaatgccatcttattttacgcctctgaccaagcatcttatatgacgggtcaatcgatcaatgtaaccggggggcaggtcatgcattaa

SEQ ID NO: 4341 - DNA, 372 bp, Bacillus licheniformis
atggtcatgctttatgaaacaaaaataaacagaatcggagctcaagcagcggcgttttcagatgaaaagatgctcatattatttggtgaaggtgctccggatgaattgaaagattattgtttatcaattgatataaagcctgtagaaggcgacttcaatgaaggcgatgagctcatactgggcggcgagtcctacaaaattacagccgttggcggagccgttcgtcaaaacttggcgaatctcgggcatattacgctaaaatttgacggatcagtttcagccgaactgccgggaacactgtaccttgaacgaaaagaacaactgccggaggtttcagcaggagactgtattcaagttaaaagattctcataa

SEQ ID NO: 4342 - DNA, 1008 bp, Bacillus licheniformis
atgagttcctatcgttcggttgaagtttcaaaagggcctggagggtttggcggacctctggtgatcacgcctgatgaagagagaaataaaatcgtgtacgtcaccggcggaaacaaacccgattttgcggatcatttagctgagctgacggggtgcaccctggtcgacggctttaaaacgacagtacccgaaagcgaaatggccgctgtgatcatcgactgcggagggacgctgcgctgcggactttacccgcaaaagcgaattccgacgatcaatgtgatggcgaccgggaaaagcgggccgcttgccgcccatattacagaagatatatatgtttccggagtaaaaaaagagaatattaaactgctgggagctgtggaggagcctgaacagtctaatattccagaagaaaaacaaatacaaaataaacaaaaccattatagcacagagaaaaagattagtgaacagcagtcgccgaaagggatgatggcgaaaatcgggatggccatgggatcgatcgtcagcacattttatcaagctggacgggaagcgattgaaaccgttatcaaaacaattcttccgttcatggcttttgtggctctattgatcggcatcattaaagagtcaggcatcggagacatttttgccaaatatttatcaccatttgcaggctcactgcccgggttgctactaatctcgcttgtttgttcatttccactgctttccccgttccttggaccgggggcggtgattgcacaagttgtcggttctctgatcggcgttgagattggcaaaggaaacattccgccgaatttggcgctgcctgcgttatttgcaatcaattcacaagccgctgccgactttgttccagtcggtctgggtcttgcggaagcggaagtcgaaacggttgaagtcggggtgccgtcggtgctgtattcgcgttttctcacgggggcgccaaccgtttttattgcttggctggccagctttggcatgtatgacagctga

SEQ ID NO: 4343 - DNA, 549 bp, Bacillus licheniformis
atgaaaaacgtaacatggcttgcggaaaagtttatggacttattcaggcatggcggagaagtgtttgtcggtatgcttacagacatcgttcctttattgattatgctgcttgtcgccatgaatgctctgatacgcctgataggagaaaagcgcgtagaagcgcttgcgaggaagtcgggaaaaaatccattgaccagatacatggttttgcctgtcatcggtacgttcatgctcgcaaatccaatgacgctgtcgcttggcaggttcttgcctgaaaaatacaaaccgagctattatgcggctgcatcctattcgtgccacacgcataacggacttttcccacacgtgaatccgggcgagctgtttgttttccttgggattgccgcagggattacaacgctcgggcatgaaacgacggagcttgctctccgctatcttttagtcgggattgtgacaaactttctcaggggctgggtaacggatatgacaacggcttatgtcgcgaaacagcagggcattgccttgaaagattcgattgatcttaaataa

SEQ ID NO: 4344 - DNA, 444 bp, Bacillus licheniformis
atgatcatttactttatcatcgcccttggagctgcatggcttctccagagcgttttaggtttttggcaaatcaggcatttcaatcgaacgttcgccgcgtacaggcgtatagggagagtcgcggtcggaaggaagaccggcttactcagagccggaacggtcgtcctgtttgtcatcgacaaacgcaacaaaattttgaaggcatcaaaaatgcaaggtgtcaccgtcttttcaagaatcagacctttaaaagggtttgaaggaaagtatttgctgaagatcggacaagcggagcttgcccggcacgaccgcctcacacgtcttgcaattgaagatgccttgagaacattcgacatcatcacgaaagggggtgatgttccgcagaagaaaacacggcttcaaaaactgatgagctttcaaatcaaaaaaagaggtgaaatatga

SEQ ID NO: 4345 - DNA, 963 bp, Bacillus licheniformis
atggaaatgagggatgataaacgccttctgatcaaagtctgcaaaatgtactacgaagaggatatgacacagagccagattgcaaaagcaacagggatatacagaacaaccgtcggacgtatgctgaaaaaagcgcgtgaggcaggaatcgttaaaatcacgatcgatgaccatgtcgggacacactatgatttggaacgggagctcgaacagctgctcgggcttaaagaagtgtacatatgtgatgcaaaaccggaacaaacagctgaagacaagaagaaactcgtcggcaaagccggagccgaaatcttaaaacgagtcgtgaaagacggggatacggtaggcttcgcatgggggacgacgatggcgggaatgatcggggagtttcacggcgtcaaaaaacggagcgcttcattcgtgccgctggtcggcggtccgggcgccatggatacgaaatatcacgtgaacagcatcgtctacagcattgcgggtgactttggaggcacgccttacttcatagatgcggcagccgttgtcgaaaaaaaagaaacgaaggaggaaatcgtcaagtcccactatttcaaaaaaatagaaaggctgtggaacggccttactgtggcagccgtcggaatcggggcgccgcttagttcttcaaatatgatctggaccggattttacggcgatcaggatatcgagcgccttgaagaaaaacatgcagtcggagatatatgctcgcgtttctttgatcgttcgggagctttagtagaaacagagattcatgacagaaccatcgcgatagacatcaacaggttaaaggatttggaatattccataggtcttgccgaatcccatgaaaaagttccttcgattatcggggctgcaaaaggccgctatattaatgttttagtgacaactgccgaaacagccagagaaattgccgaggaggtgagaaatcaatcatga

SEQ ID NO: 4346 - DNA, 348 bp, Bacillus licheniformis
atgtttaatgagatcatgctcgtcgggcgtttgacaaaagatcccgaactgcggtatacatctgacggtgtccctgttgcaaatgtgacgctggctgtcagcaggcctttcaagaacgcagcaggcgaagtagaagcggactttgtcaattgcactctatggcgcaaaactgccgtgaacacagccgaatattgcgaaaaaggctccatcatcgggctgagcggaagaatccagacccgccaatacgtcaattcagaaggcgaacgcacctttattacagaagttgtcgcccggtcagtcagatttttgggagaaagccggaaagcgcatgagccggctgatgcttaa

SEQ ID NO: 4347 - DNA, 372 bp, Bacillus licheniformis
atgaaccatttttacttaaaggaagtatttgtgatcgcaagcaattcagctgctgactgccgtcaatatatgcctatgatttgcttttcagccggtaacaaaaagcacgaaatcagcacatatgcaaatgaaggcatcatgtttcgctatgaaacgaaggacggaatggaaatatacgaatttcaagtaacgcttaaacagaaagagttgtcattccgtctgtatgcttgggacgggggctcatatgtccgcgtatactcagagcggtggctgtcatctcctgttttttttcagtttctgaaaaatacgtatttctcaaataaaaatgaaatgatttttatgattagtggaagaaaaaagcaaaaattatga

SEQ ID NO: 4348 - DNA, 414 bp, Bacillus licheniformis
atgaaaacctttaggcttattgatttaaaaattgtccgccaggatgacacttcaaagcggcttgaggagttcccgctgatcgacggccttatcattaataaggaagacggagaaaaccactggatggttgaagggctggtttctaaagaataccggtattttttcgaatatctccttcaggaaggcaaagaagtgaaagcatatgtaacgatcacgaaaaaaagcaaccgcccagcacagctgttagcgaaggtcaaaaacatcacggtgctcggcgagcatgtttccgtcttattggacggcaaaatggtcagctcaaagctgaggaaaggctccgacaagattttggaagatttaatgaaagaaggatattccggagatcggcttcttgaagcatttaagcaaaatatataa

SEQ ID NO: 4349 - DNA, 381 bp, Bacillus licheniformis
atgtggaaagaatttaaaagttttgcgattcggggaaatgtaatcgatcttgcaattggtgtcatcatcggaggcgcctttggaaaaatcgtaacttcgcttgtcaatgatttgatgatgccgctcctcggtcttctgcttggaggcctggatttttccgcgctgtcgttcacatttgttgatgccgaaattaaatatgggctattcattcagtcgatcgtcaatttctttattatttcgttttccatttttctatttatccgctatatctctaagctgaagaagaaggatgccgaagaagaaaaagctgctcctgatcctcaggaagaattgcttaaggaaatacgggatttgttaaaagagcagacaaaccgttcttag

SEQ ID NO: 4350 - DNA, 435 bp, Bacillus licheniformis
atgcttgatgctcagcaaattaaagaaatcattccccaccgctatccctttctgctggtagaccgtgtgacagaagtagaggaaggaaaacgggccgcgggttataaaaatgtgacagtaaatgaagagttttttaacggacactttccggattatccggtgatgcctggtgttttaattgttgaagcgcttgcgcaagtaggtgcggtggcgcttttgatgaaggaagaaaaccgcggaaggctcgcgttttttgcgggaattgacagctgccgcttcaaaaagcaggtgaaaccgggcgatcagctccatcttgagcttgaagtgcttcgtttccgcggttccatcggcaaaggaaaaggagtcgcaaaagtggacggagaagtcgtgtgtgaagccgaattgatgttttctcttggtgaaaagcaggaataa

SEQ ID NO: 4351 - DNA, 828 bp, Bacillus licheniformis
atgcttagatccatgatcacggcttcaaacacaatgtttgaactgcaaaaacaaattgataatatcagccataatcttgcaaataccgatacaacgggatataaggcgaaaaacacgagcttttcggagctgatcaggcagcagattgaacaggtaaacgagaaaaataatgaagtagctgcaagcagaaagacgccgccaggacttcgcctcggcgtcggagccgtcatgaccgaccggctgacgcataagcagggaagccttaaggagacgggccgcgatcttgatattgcactgacttctccttatcagtacttccaggtcaatgtcggcggggaagtgcaatatacaagagacggggcattttaccttacgcctgcggcggggaacgccaaccagatgcagcttgtgacgaaagaaggacatgccgtccttgatgaaaacggaaatgccatccgcttcaaccagcgctataaacacatcaaagtcgatgaatcgggaagtgtcaccgtttcgtcagacaatcagggagaagcgccactgcgttttaacctggggatcgtccgggctgtcaaacctcaggctctaacagaagaaggaagcaaccttttttctgtcagcgatgaattgagagcaacggctcttatcaacctgaacggagccgggcggcaggacatttctctaaaacagggattccttgaatcatcaaatgtcgacgtatcgaaggaaatgaccgatctgatctcttcgcagaggtcatatcaaatgaattcccgcgccatcacgatgggcgatcaaatgatggggctgatcaattcagtacgttag

SEQ ID NO: 4352 - DNA, 840 bp, Bacillus licheniformis
atgttaaaaggactttatacagcaacttcagcaatgatcacccagcagcgccgcacagagatgctgacgaataatatcgcgaatgcaaatacgccgggatataaagaagaccaaggatcaatacgttctttcccggaaatgcttttgagccggattgagtctgattctttcaaagccggcagcgcttcgcgttcgttttcaacacagacgccaatcggttcaatcaatacaggggtttatatgcaggaactgaagcctcaattttctcaaggcgatctgcaaagcacgaatgagccgacagatattgcaatcagcgaagccgaagttccggtcaacggcgaaacaaacgataaagcggcgcttttctacgcggtccggcttgaaaatggggatgtacgctattcaagaagcagccgtttttctttaaatgaaaataatcaattgacaataaacggccgactcgtcctttcaacggaaaaccggccgatcacggtgggaagcgagaattttcaagtcgctgaggacggaacggtgactgaaaacggccaaaatctggggaggatcgatgtcagaatcgcgctcgatacgagaaatttagcaagagaaggcgatgatctgtatcgtactgaaaacggtgaggcgctgccaagcgcagtcggcaatcctgaagtcacttattctgtcaagcaggggatgaccgaacggtcgaatgtcgacgtgacgagagcctatacggaaatgaccgctgcctaccgctcgtttgaagccaaccaaaaagttcttcaggcttatgataaaagcatggaaaaggcggccaatgagattggaaggatcggataa

SEQ ID NO: 4353 - DNA, 132 bp, Bacillus licheniformis
ttgcaatttatatttgctaatacagaacgtttgttctataatggtattcaaacatactactctttttatcggcagccgttcagctcctttaaagcatttcacataaaaaaacctcattctcaaaaagaatga

SEQ ID NO: 4354 - DNA, 1002 bp, Bacillus licheniformis
atgtttgcaagggatattggtattgaccttggtacagcgaatgtgctgatccatgtcaaaggaaaaggtattgtcttaaatgaaccatcagtcgttgctcttgacaaaaacaatgggaaagtgctcgctgtcggtgaagaagcaaggagaatggtaggacgtacacctgggaatattgttgcgatacgtccattaaaagacggcgtcattgccgattttgaagtaacagaagccatgctgaagcatttcattaacaagctgaatgtaaaaggtcttttctcaaagccgcgcatgctgatttgctgcccgacaaatattacttctgtggagcagaaggccattagagaagctgccgaaaaaagcggcggaaagcatgtatatttggaggaagaacctaaggtggccgcaatcggagcgggaatggatattttccagccaagcggaaacatggtagttgatatcggcggtggaacgacagatatcgcagtcatctcaatgggcgatattgtcaccgcctcttctattaaaatggctggggacaagtttgatcttgaaatcttgaactacatcaaacgcgagtacaagctgctcataggcgaacggacagccgaagatattaagattaaagtcgcaactgttttcccagacgcacgtcacgaggaaatttccatccgcggccgcgacatggtcacaggattgccgagaaccattacggtaacgagcaaagaggtggaggaagcgctgcgcgaatctgtatctgtcattgtacaggctgccaagcaggtgctcgaaagaacgccgcctgagctgtcagccgacattatcgacagaggcgttatcattacaggaggcggcgcattgttaaacggtcttgaccagcttcttgccgaagagctgaaagtgcctgttctcgttgctgaaaatccgatggattgtgtggcagtcggtacgggtgtcatgcttgataacatggacaagcttcccaagcgcaaactgagctga

SEQ ID NO: 4355 - DNA, 276 bp, Bacillus licheniformis
gtgcacgattacatcaaagagcgaacaatcaagatagggaagtacatcgtggagacgaaaaaaacggttcgtgtgatagcgaaggagtttggtgtttccaaaagtaccgttcacaaggatttgacagaaaggctgcctgaaattaatcctgacctggccaatgaagtaaaagaaattcttgattatcataaatcaatcagacatttgcggggcggagaagcaacaaaactaaaatacaagaaagaggaaatctttgaaagagaacccgtgcaataa

SEQ ID NO: 4356 - DNA, 108 bp, Bacillus licheniformis
gtgggagtatttcaaaattctacttggaaaagcataaaacgaagaagctgcgcaaatagcgaattttttcacaagacggatctcatttcacacttctcacatccattt

SEQ ID NO: 4357 - DNA, 429 bp, Bacillus licheniformis
atggaacatatcaatcgaaagattattcaccagctcaatcaaagcactcggatggttgctaaaaaaacgaatgaacagctcgaagcgtacggcctttacggttcacagtggtcgatcctatattgtcttcacacctacggaccgatgacgcagaaagacatatggacttatttgcacgtcgaagcgccgactgtgacaagaaccgtcagccgcctcgaaaaaaacggctgggtcgaacggatacagggcgatgacaaacgggaaaaagtcgtcaagatgacagaagaagccaaaattaaatatgatgacattcaattaaaaatgaaagaatttgaagaggaaatgctttccgtatttgaagaacgggataaaaaaatattccaaaggctgttaagtcaattgttagaaggacaccaggaggagttgtag

SEQ ID NO: 4358 - DNA, 1245 bp, Bacillus licheniformis
atgaagcaagctgaacccatttggaccagggattttatcatggtcgttttgattaatttgtttatattcgtctatttttacgcactattgaccgtgcttccggtctatgcgatgcaggagctcggcggctccgagtcagagggcggccttttgatcagcggcttcatgctgtccgcgatttttgcaaggccgttttcgggagctgttattgagcgttttggcaaaaagagaatggcactcatcagcgtcgtgctgtttactttggcatcatttctttatatcttcattcacgatatctacctgctgcttggcattcgctttttccaaggcatttggttcagcatcatcaccacggtgacgagtgcaattgcagccgatttaattccgccggcccgccgcggggaagggctgggctattttgctatgtcgatgaatttggcggttgtcatcggcccgtttatcgccttgaacctgctggataaaatgagtttttccgatctgtttattttattttcaggaatcgtcactgtagccatcctctgtacggcactggtgcggattcctaaaggaaacgacatccgttcagctgtgttcaggctgtcattttccaacatgtttgaaaagggcgcgattcggattgcaacggtcggcttgttcgtgtcgttttgttattcaagcgtgatttccttcatctctgtttatgccaaatccctcggccttattgaagcaagcagctatttctttatggtgttcgcggtgacaatgatgatcacgcggccgtttacgggaaaactgtatgataaagtcggcccgggagtcgtcatttatccgtccattatcattttttgcgccgggcttttcctgcttgctttacaaacagcagtgcgatgcttttgctatccggagctgtcatcggcatcggctacggatctatcacaccgtgccttcagaccttggcgatccagtcttcgccgcctcaccggagcggctatgcaacagcgacttattttacgctgtttgataccggcatcgcagtcggatcctatgttttcgggttggttgtggcacaagccggtttttcaaacatttatttattctcaggcgttttcgtgctcatcaacctgtttctgtatacatggagccaaaaacctgcatccgcaaaggagaagcgggatatatcaatggctgaataagccgttcaacctcgccgggccgggaacgcccggctcttttcatgcaggctga

SEQ ID NO: 4359 - DNA, 579 bp, Bacillus licheniformis
ttgaactattggctttttacacgcattcatcaattagcaaaccacaacgacatcctggatggcgccatgattttgattacagaaaaagcgatttatatgtatgcgctcattttgcttttgatctggatattcggaaaccgttcttataaaataaccgttcttcaggccggtgtgacgggtattttcggattggcggcaaattatttgctgtcattggtttactatgagccgaggccatttgtcgctcatcatgtggacgtattgattcaccatgctgccgacgcctcatttcccagcgatcatacaaccggggcgttagccatttcgatcgctttttggctttatcatcggaaaattggaagctgcctgattgctttcgggttattgacgggcttttcccgtatttgggtcggacaccactaccctgttgacgtattgggcagcattttggtcgctttattcgtatcacttgttatgtttagattctccacgtatgtgcagccgctttttgaacggatcatttcactctatgaatcgatcttgcggaaattgcggaaagcggtatccagaacggtataa

SEQ ID NO: 4360 - DNA, 930 bp, Bacillus licheniformis
atgagtaaagtacttatttttggccacaaaaatccggatacggatacgatttgttcagcgattgcatatgccgaattaaaaaaggagctcggcatggacgcagagcctgtccgcctcggcgaaatcaacggcgaaaccgaatacgcgcttaagaaattcaatgcagaagtaccccgccttgtgaacactgtcgcgaatgaaacagacagcgtgattttggttgaccataatgagcgccagcagagcgtcgatgacttggaccaggttcgcgtgcttgaagtcatcgaccaccaccggatcgccaactttgaaacgagcgaccctctgtattaccgcgcagagcctgtaggctgcacggcaacgatcttaaacaagctctataaagaaaacggcgttgaaattaaaaaagatattgcggggctgatgctgtcggcgatcatctcagattccctcttattcaaatccccgacatgcacggaagaagatgtcaaagctgcaaaagaattggctgcgattgccggcgttgatgctgacagctatggactagatatgctgaaagccggagctgatttgagcgcaaagacgattcctcagcttctttctctggacgcaaaagagtttacgatgggaagccataaagtagagatcgcgcaggttaacactgtcgacacaaacgacgttctctcccgcaaagaggaagttgacgcagaacttgcaaaagcggtatctgaaaaagggttggatttatttgtgtttgtcgtaactgacattttaacaaacgactcggttgtcgtcgcttcaggacaagctgcacaagcagtggaaaaagcgttcaatgtcacattggcagacaacacagcgacactgaaaggcgttgtatcgcgcaaaaaacaaattgttccgccgttaaccgaagccttaaaaggttaa

SEQ ID NO: 4361 - DNA, 821 bp, Bacillus licheniformis
ttgttcaagcatacgaaagtgctgcagtaccctgccaaacctgaaagacccgaccctgtcttcgcaaagaaaatgcaggagatactcggcggccagtacggagaaatatctgtggcgatgcaatacctttttcagggtggaatacgcggggaaatgaaaagtataaagatttgctgatggatacggcggcagaagaaatcggacacgtcgaaatgattgcgacgatgattgcacggctgcttgaagacgctccggtttacgagcaggaaaaagcagcagacgatcctgtcatcggcgccattatgggcggaatgaaccctcatcacgcaatcgtttcaggtctgggggccatgcctgaaaacagcaccggcgttccttggaatgcaggctatattgtagcgagcggcaaccttctggccgacctgcgcgcaaatgtcaacgctgaatcgcaaggcagactgcaagtcgcacggctgtacgaaatgacggatgacaaaggcgtacaagatatgctcggttttcttttggcaagagatacgatgcaccaaaaccagtggattgccgcgatcaaagagctggaagaaaaagaaggcgtcatcgtgcccggtaccgttccgccagaatatgaaaaagaagaagtttcgcactctttatacaatttttcggatggagaagaaagcgcacagtttgagtggctgatagggaaggcgccggacggagcggaatttcactatgagagcggccctgtcgcatatggagaaaaaccggtcttgaagcccgctccaaaacgaagccacaatacacctgactatggagaataa

SEQ ID NO: 4362 - DNA, 738 bp, Bacillus licheniformis
atgataaaaaatacttctcaccgcccttttccactgcctgaaggaccgtggatgatgacgcaaacatggaatcatgtattatttgcccattgggctgtcgatcctgaagccattcgcggacaaataccggcggccttggaattggagacattcaacggaaaagcgtggatcggcatcttgccttttctgctgacaaatatgcgtccccgttttttgccgccctttcctttcatcagcagatttcccgagctgaatgtccggacatatgtagcatataaaggcgtcccgggcatttattttttcagtcttgacgccgcttcgcgcttggccgtcgccggcgcgcgctcaatgttccacttgccttatttttacgccgggatgcgctttgcacaacataaagaccgctttcagctgacaagcaggagaaaacgttcacaagcagagttttatgcagaatatcaaccggtttcggagcctttctcagctgataaaggaacgcttgaatactggcttgctgaaaggtaccgtttgtacaccacgcataaaaacgagctctattatgaagatatccaccattcagagtggcagctgcagcaggctgaagctgatatttttccgggtccgctcacaagcgcaaacgatctcacactcccagacaccgcgccccttcttcattatgcaaaaaggcagcacgtcttattttggccgctgaaaaagtgggaaagtgaagaaacataa

SEQ ID NO: 4363 - DNA, 408 bp, Bacillus licheniformis
atgaaactgaaggacatcatgacaaccaatgctgaatgctgcgagccttctgccccgattgcggaaattgccggtaagatgcgtgattacaatgtaggttcaattccggtctgcgagaacggaaaattgacggggatcgtttcagaccgggatattgttatcagatgtgtagctgaaaatgaaacagatgcggctgctcgggatatcatgagcacacagatggtgacagggcgcccggatatgtctgctgaagaggctggtgatctgatggcggaacaccaaattcgcaggctgccgattgttgaagatgaccgtcttgtcggaatcgttgctttgggggatctctccgtctcacatgcggatgagaaagcgggagaagctttaagcgaaatttcaaaaccggcttaa

SEQ ID NO: 4364 - DNA, 957 bp, Bacillus licheniformis
atgagagtttttcagggagagggctggacatggtatcagcttgggcctcacgaaaaaacaacagcacaagggctgatccagcccgatcattggccggaatgccgaaactggtttcaaggcgttccctcggccaacatcaattgccttgatatcaatgctgccgttcaaggcaaggaagcgatctacggttcatatatttacgaccaggaagcggaagttcaacaaaaccggacagcatttcatttttacttaacgaaagactattttttcacaatgaatttagatatctcgcaatttgaagaggcaaacagaaggccgatcgatcaacacttaaagcgatgcaaagacgcccctgaagtgttcctggtcctgctgggcgaactgatgagaatgtatttgaaggaacttgagcactttgaagttcaccttggaaaagtaaggtggggatttcatcatgacaacaataaaagcatcattgaactgattcataagcggcgtcacgaactcctggtcataagaagtttaattttatcgatgaaaaaggttgcaatgggccttaaagaaacttttttaaccaaatcgtttgacgaaatcgaacagcgcaggacgttttacgaaatcgacagaggcatgtcattgatcaaagagtatgcgaatgaaatcaattatttgcttcattccgaggaagtggtgacatcccacagaggcaatgaaatttttaaagcgctgacgatttttacgacgatctttacgccgatgacggctttcggcgccctgtggggaatgaacttcgaagtcatgcctgaactctctttaaagtacggctatttattttcgcttattttaatcgccgtttcgaccgcccttgtgtattggtatttgaaaaagaaaggctggaccggcgatttattgagggataaaaaacgatatatgaaaaggaagggctcttttaaatag

SEQ ID NO: 4365 - DNA, 1299 bp, Bacillus licheniformis
ttggagttattgaagctgattgcagtagcaggattaatcgcatttacgggctttttcgtcgcggtcgaattcgccatcgtcaaagtaaggcggacaaagatcgaccaattgatcattcagaaaaaaaagggcgctcttgccgcaaaagaagtgacctcgcaccttgacgaatacttgtcagcctgccagcttggaatcaccgtgacggcattgggcttgggctggcttggtgaaccgacgatgcagaccttgctgcatccccttttctcaaaaatcggcttgaacgagtcgattacacatattctttcatttttggccgcttttttatcagttacttatctcaatgttgtcgtcggagagctggcgccaaaaacgatcgccattcaaaaagcggagaccgttacgctggtttttgcacagccgatgatctggttttgtagaatcatgtttccttttatatggctgctcaatcattcagcccgcatgatcacaagtctgttcggcctgaagccgaccggtgaacacgaattggcctattcggaggaagaactgcgaacgcttttatctgaaagctatcgaagcggggagattaaccaaaatgaattgaaatatgtaaacaatatttttaaattcgacgaacgtacggcaaaagaaattatggtgccgcgcaatgaaatgaccgtcttatctcttgacgacagtttaaaaaaagcgaagcagcttatcaaagaaacgaagcacacccgcttccccgtcatggaggaagacaaagatcacatcaccggaatgatcaatataaaagaactgctgctggcggagcttgcaggggaattttctttagaaacaaaatcgctaaagccatatatccatccggttatccatgtgattgaaacgattcccgtctaccagctgtttgtcaaaatgcagaaagagcatacacatatggcgattctcgtagatgagtatggcggaacatcgggtcttgtgacggttgaggatattgtcgaggaaatcgtcggcgacattcgcgatgaattcgatactgaagaagtatctgctgttcagaaactcgaagatgaccattatatcctaaacgcgaaagtactggtcagcgacgtaaacaacctgcttggaattcatttatcagatgaggagattgatacaatcggcggctggatgctgacgcagaatattgagagcaagcccggaacgacgatcgaaagtgaaggataccgttttaaagtaaaagaaatggacggacatcgaatcgttgcagttgaggttgaaaaaaccgcttaa

SEQ ID NO: 4366 - DNA, 1212 bp, Bacillus licheniformis
atgcagatgggggatacagtatttatgttcttttgcgctttgctcgtgtggctgatgacgccgggcatcgctttattttacggaggccttgtaaggagcaaaaatgtgctcagcaccgttatgcacagtttatcttcaattgccatcgtttctatcatatggattttgttcggctattcactcgctttcgctcccggaaacccattgatcgggggtttggattggatcggactgcacggtgtcggttttgaacccaatgccgattattcggagacgatcccgcatacgctttatatgatgttccaattgacatttgccgtcctgacgactgcgattatttccggaagctttgcggagcgcatgcgctttccggcctttattcttttctcggtgctctgggcggttttcgtttattcgcctgtcgcccactgggtatggggcggaggctggcttgacgagctgggagctattgattttgccggcggaaacgtcgttcacatttcttccggggtagccggtctggtcgttgcgattgttctcggcaagcggaaaaatatgagcgacaccgcccctcacaacctccttctgaccctgctcggggcgactttgatctggttcggatggttcggtttcaatgtcggaagcgcgctgacgatcgatgaagtcgccatgaccgcttttatcaacacgaatacggctgcggccgcggggctgatcggctggattttggcagaatggctgattaataagaagccgacgatgctcggcgccgtctcgggagcgattgcgggactcgtcgcgattacgcctggcgcaggttttgtcacgccattctcatccgtatggatcgggcttatcggaggaatcgtctgtttctggggggggttttcgctcaagaaaaaattcgggtacgatgatgcgctcgatgccttcggacttcacgggctcggcgggacatggggcggaatcgcgacaggtttgttcgcgacgacatctgtcaacgcagacggtgccaacgggcttttttacggagacaccagtctcctttggaaacagctgattgcgattgctgcaacatatttgtttgtcgcaatcgtcacatacgctattattaagatagtcagtatcttttttaaactccgtgcctcagaggatgaagaatcattgggcctcgatcttacgctgcacggcgaaaaagcgtatcaagattaa

SEQ ID NO: 4367 - DNA, 351 bp, Bacillus licheniformis
atgagcggtcaaatgtataaagtggaaattgtaacccgtcctacaaactttgaaaagctgaaaacggagctggccaaaatcggggtaacgtccattacgttttacaatgtacacggatgcggcctgcaaaaagggcatactgagctttaccgcggggtcaaacgcgaaagcaatgtgtatgaaaggttaaaagtcgaaatagtcgtcagcaaagtgcctgtcgaaaaggtggccgagacggcgcaaaacgtcctgaaaaccggggaacccggtgacggcaagatcttcatatacgaaattaaaaacaccatcaacatccgcacaggcgaggaaggtcctgacgctttataa

SEQ ID NO: 4368 - DNA, 573 bp, Bacillus licheniformis
atgaacaccattccttacgtcattgagaaaacggctgccggtgaaagatcgtacgatattttttccagacttttaaaagaccggatcattatgatcggttctgaattcaacgatgacctcgccaatcgggtcaccgcccaattgctgtttttgtcagctgaagacaatgaaaaagacatttcgatctatatcaacagcccgggcggatcaacttccgcgggatatgcaattttggatacgatggattatgtgaagcctgatgtccgcacgatatgcgtcggaatggccgcttccatgggagcgattctcctcgccggcggagcaaaaggcaaacggtatgcactcaaaaacagcgaaatcatgatccatcagccgctcggcggcgtcaaaggacaggcgacagacatggagatttcagcgaagcggatcatcaaactgagggaaaaaatcgagcgcttctttcacgaacgaacgggccagcccattgaaaaactaaaagccgacatggaacgcgattactttatggatgcggacgaagcgaaggcatacggtgttattgatgctgttttgtaa

SEQ ID NO: 4369 - DNA, 606 bp, Bacillus licheniformis
atgaatgaattagaacagcaagcgctgatgaagtattgcctgagaatgacaggcgataaatgggatgccgaggatttagtccaggatacaatcctcaagttaatggaaatcaatcgaacagacgcgtcacatgcttatcaaaagacggttgcaaagcataaatggattgacctgctcagaaaaaggaagcgcgaaagctttctgtctgaagataatctggaagacgggcgggcagagcgcatgaaggcggccgatgacttcgagcacctgctgaaacagctttccggtattttaacaccgaagcaattaacgatttttctgctcaaagatgtgttttcctttcagctgcacgaaatcgccgagacgctcggtaagcccgaatcatccgtcaagtcgcttttatttagatcgcgtcagcgattaaaaaggctttctccggaggttctgcaaaaggagccggcggacggggatgacgaacacatcggtctgcttgttcgggcgatattgcatcacaaccccgatgatctgctcgaatttgccaaacagacatggcgtttcgacgcttcacagccgtcttgcatcagcatgatgaggtgcgctgcctag

SEQ ID NO: 4370 - DNA, 174 bp, Bacillus licheniformis
atgcattcacactccttaaaagaggcctcttacttaataaacggctggctccgccgatttgatacgggtttttttatgattgtaacaaaaaaggcgcctatcgcatttgataggcgccctgagggaagcgtgccttatgactggcttgaatcgtcagactgggttccgtcttga

SEQ ID NO: 4371 - DNA, 876 bp, Bacillus licheniformis
atgaaagaggaagaaaagaatcgtacttccaaaatcacaaagctgcaacaattttttcgtaaacgctgggtatttccggccatctatttgacaagtgccgtcgttgtattaaccgccgttctatggtatcaatcggcttctaacaacgatgtaaaagaccagcttgcagacgatggcaagaaatcagcctatgataaccgggatgatgcggtagaagtaggcaaaccagtcgaaaatgtcgcaatgccggttgctgattctgaaaatgtttccgtcgttaaaaagttttttgaaactgacgcaactaaagaagagaaagaagcagcacttgtaaactataataacacgtacagcatgagcaaaggtatcgacttggctgagaaagacggaaaaacatttgatgtttccgcatctctaagcggtacggtcatcaaagctgcaaaagaccctgtactgggctacgttgttgaagttgaacatgaagatggtttatcaactgtgtatcagtctctttctgaagtaagcgtcaaacaaggtgacaagattgaacaaaatcaagtcatcggaaaagcaggcaaaaacctttacaatgaagaaggcggaaaccatgtgcattttgaaatccgcaaagacggtgttgcgctaaacccgctgaacttcatggacaagccggtctccagcattgaaaaagcaatggaggaacaagcgtctgaagtgaaagaacctgctcagccttctgttgaagaaaagtcaaaaacagaagacaaagcgaaagatcaaacagatggaaaagacgacaaaaccaagcgggaagattcgtctgaagggtcagaaaatcaagacggaacccagtctgacgattcaagccagtcataa

SEQ ID NO: 4372 - DNA, 498 bp, Bacillus licheniformis
atgaaattacgaatcgccaatcgggaagaccttcccgcagtagtcgatatttacaactccaccattgcgtcgcgaatggtgacggcagatacagaacccgtcacgcctgaagaaaggctgaactggtttttgagccataccgaagaaaggcctctttatattgcagaaaatgaaaaacgggatatcgtcggctggatcagctttgaatcattttacgggagacccgcctacgccaaaaccgccgaagtcagcatttaccttcatgaagaccaccgcggcaaaggggcgggttctgcggtgcttgaaaaagcgcttgaagctgctccaaagcttggaatccgttctttaatggcgtttattttcgctcacaatgaaccgagcatgaagcttttcaaaaaatacggcttcaccgagtggggacactttcccggaatcgccgagatggacggaatccggtacgacttaaaaatattaggaaaagaattgaatgaagcctga

SEQ ID NO: 4373 - DNA, 444 bp, Bacillus licheniformis
atggatatggaacgtttccatcaaatgccggcctttatgaaagaggaaatggataacctcaagcgcgtggcggcgccgttcttaaagaaaaggctgatttttctttttatcgcgattccgctgcttcttgcttcatttgtttatctttcctctttttgggggcaggcagcttatggaaccgattcaatgataaaaatcggctgcgctgccgcaggtgcagcattcggcatggcgctgttcagagagtcgtcataccaaaaaagaaatgttcagcaatcggtgatgaagtatatattggaacggatgcaaacaagcgaagtgctttccgatgaacggaaaagccgctacgttcgggcggtcaaagaagagccgtttactgtaatgagaagctttttggaatttttaaatgaagaagagatcagaaggcgcaggctggctgaatga

SEQ ID NO: 4374 - DNA, 1467 bp, Bacillus licheniformis
atggatattattaaaaatatcagtatcacatcgatatttctcggttttatattagttttaaatacgcttttggcaatcgttgtgatctttagagaacgccgggatgcaagctcctcctgggcctggctcttggtgctcttctttattcccgttctcggctttatcctttatttgctcttcggccacaatttgagcaggaatcacctttttcaatgggaagaccgaaagaagatcgggattgaaaaaatattggaacagcagctgaccaagctgaaaaaccgcgagtttgaatttcgcaataaagcgacggcggacagcaaagacttgatttatatgcacattttgaataaccacgccgtttttacagaagacaatgcggtcgagctgttaacggacggacgccagaaattcgacaggctgcttcgcgatattgaaaacgccaaagaccatattcatcttcaatattatatttataaaggcgatgagatcggcaaaaagctccgggatgcgctcatcaaaaaagcaaaagaaggcgttgaagtccgcgttttgtatgatgaattaggatcaagaagcctcaggaaaagctttttcaaagagctgaaaaaagcgggaggatttgtcgaagtctttttcccgtcgcgctttaaatttatcaatttgcgcatgaattaccgcaaccaccgcaagctcgtcattatcgacggcgtcatcggctatgtcggaggatttaatgtcggagacgaatatctcggtctgaacccggcctttggctattggcgggacacgcacctcagaatcaaaggaacagcggtccactcgattcaaacgcgttttatcctggattggaatcaggcctcgcaccatcacgacattacatatatgccaaaccattttcctgacatcgactcccacggaaacatcggcatgcaaatcgtcaccagcggccccgattcagaatgggagcagattaaaaacggctatattaaaatgatatcaacggcaaagcggtccattcttattcagacgccttattttataccggacgcaagcctgctcgatgccctcaggatcgcttgtctgtccggcgttgacgtcaggatcatgattcctaacaaacccgaccatccgtttgtgtactgggcaacctattcttacatcggcgaacttttaaaagcaggcgcctccgtatttatttacgacaacggttttatccatgcgaaaacgattgtagtagatgaggaaatttcatcggtcggcacggcaaatattgatatgcgcagcttcaagctcaattttgaagtgaatgcatttttatatgatgaggaaattgcgagaagccttgtcctatcatttgaaaaagatctgcaagtgtcaagggagctgacctttgaggaatatttaaacagaagcaaatcgatccgcttcaaagaagccatttcgatcctgctgtcgccgattttatag

SEQ ID NO: 4375 - DNA, 1434 bp, Bacillus licheniformis
atgaatagaaggccgttcaatcaaaggacggttgtcagcattgtatatgtaacagccatgtttatggctgcgatggatgcgagtgtcatcaacatggcattgcctgccatcatgaccgaatttcaaacattgccgtctgctgcaggcacagttaacatcggatacttagtcagcttggcggtctgtcttcccgcagccggctggcttggggaccgctttgggacaaagcgtgttttcctagccgcgctttcgatatttacagctgcatccgccttatgcggaatcgctgacaatctggtggcgttaaacgcatttcgcgtgatccagggggccggcggcgggttgattacgccggtgggaatggcgatcttgttcaggacgtttcctccgcatgaacgggccaaaatttcgagagtcctcgttcttccaattgccgtcgcgcctgcggttgggccgatcatcagcgggtttctgacagatcagctgtcatggcgctggattttttacattaatattccgatcggaatgatcattctgctgtttggcctgttgtatcttcatgaacatttggagccggaagcgggcagatttgattggcttggattccttttggcggcgccgggaatggcgttggcggtttttgcactcagccaggggcctgcgcgtggattcggctctccggatgtgcttgcagcaggggccgggggaatgatgctcctcgcaatcctcgtttttgtcgaactgaaggctgagcatccgttgattgaacttcgcttattgaaggaccgggtttttggaatgatgagcgtcatttcgcttctgacagcaggcggactgcttggcatgctctatatatttccgctgttgtgtcaggaagcactcggctactctgcgacagatactgcgctgattacgtttcccgaagcattaggcttgatgctggcgtcccagctgatgccgaggtcgttggcaaagcttggcccgaggcgggtcatttccgttgcgctgttaggcgctgctgtgctgtttgggctgctgagcctgaccggatatgggtcaaatctttggcttctcaggctgctgctgtttttagcgggctttttcttggggcacgcggttggtgcggcgcaggttgtttgttttgccaacatttcatcatcctcaatgggccgggcaacaacgctgtttaatgtgcaaaaccggctcggatctgcctttggagttgctgtcatgtcgtgcgtccttgctgtgctcagccagcccagcgcaggcatagagcctgatttatcagcttaccggacagctttgctctgtgcagccggtttcctcatggctgcgcttttcatcgcactcaagctcaaggacgctgacacaggccgtcaaatggacaagcatgcttcagcacccaaaggtgcggcagcttctggtgagtaa

SEQ ID NO: 4376 - DNA, 225 bp, Bacillus licheniformis
atgacaaatccttttgaaaatgaacacggcacatatgtcgttttaatgaatcaggatggccagtattcactctggccggccttcattcatattccggcagggtgggaggtcgtctgcggggaagcgagccgcagcgcctgtatcgactatatcagctcgaattggaccgatctctcgccgaacagcatcaagctggctgcagaagtacacggcggtcagcaatga

SEQ ID NO: 4377 - DNA, 7158 bp, Bacillus licheniformis
atgcctgaatgtcaacataaccgaaagccattatcaggagcgcaagccggcatttggtttgctcagcagcttgatccggaaaatccgatctacaatacagctgaatacgttgaaattaaaggcccgcttgatcaggagcttttcgaaaaagcgctgcgccatgtcattaaagaagctgaatcatttcatgccagatttggagaagatcaagacggaccatggcaagagatcgttccgtcaacagattttccgctacattacattgatgtcagatcagaaaccgatccggaacaggcggctaaaagctggatgatggatgaccttgcccgtccggttgatctgactcgcggcccgctttttacagaagcgctttttaaagcggcgcaagatcattacttctggtatcagcgaactcaccatatcgcaacagacgggttcagctttacattgatcgccgagcggctgtcaaaaatatataccgcattgatgcagaacaaatcgatcgaccagagcggagcctttggctccctcgatttgattctcgcggaggaaacggcttaccgtgcatcagaacagtatcaggaagatcggcgattttggcttgggcgtttcagcgatgaaccggaggtggtcagccttgccgaaagggcgccgcgtacctcttcaagttttcttcgcaggtctgaacacctgccaagtgaggatgctgatcgtcttctgtctgccgcgagcagaatgggggcaacttggcacgaaaccgtgatggcagcagcagcaatatatgttcaccgtctgacaggggcaaatgacgtcgttctcgggatgccgatgatgtgccgcctcgggtcagccgctcttcatattccgggaatggtcatgaatctcctcccgcttcgaattggcatgcagccgcaaatgagcataggagagctagtcaagcaaatctcgggtgagatgatgaagctgcggcgccatcagcattaccgccacgaagaattgcgccgggatctcaagctgcttggcgaaaaccagcggctgttcggtccgcagcttaatttgatgccttttgagaaccgcttgaattttgccggctgtcaaggcatcgtgcataatcttgccacgggacctgtggacgatttgtcaatcaacatttacggccgtccggacggtggcgggctaaaagtaaacatggatgcaaaccctgctgtttatcatgcggatgaacttgaagatcacggcaatcgttttcttactcttctgaaaacgattgccgtttgcgaacaaactcagccggtggggacgttggacattcttctccctgaagaacgcgctcaaatattgattgaatggaatcaaacagaacacgggcttcccaaagagagtcttccgcagcgatttgaaaggatggcaaaggagtgtcctgaatctccggcagtcgtttgcaatgataaggttctcacttattccgaattaaatcaaaaggctaatcaactggctcacttgctgatcgatcagggggcgaaacccgagacatttattgccttggcgttgccgcggtcagcggaaatggttgtcagcatgctcgccgttctcaaagctggagcggcttatttacctatagatcccgattatccggctgacaggatcgagtatatgctcaacgatgcacagccgctgcttgttatgaccagcaaggaagcgcaagacacgatcggttcgcaaatgccgaagttaatcctcgatgaacaaactgttatggagaaaatgtccggctgttctgaagaaaatcccggcgaacagcattccggcaaccagccggcatatatgatttatacgtcgggatcaaccggcagacctaaaggcgtggtcgtacaagctgaaagcttattcaattttttgctgtcaatgcaggacatgttcgcgcttaatcaagatgaccggctgctggccgtcactacaattgcattcgacatctcagcactcgaaatttatttgccgctgatcagcggatcagcagtcgttcttgccgagaaggaaacggtacaagatccgtccgaattggccaaaatgattgaaacatacgaaattacaataatgcaggctacaccgaccctctggcatgcattggcctcgagcgccccggaaaagctcaaaggtcttcgtgcgcttgtcggcggcgaagctttgcaatccagcctggcccggcaattgcagcagctcgcgtgttctttaacgaacctttatggaccgacggaaacaacaatttggtctacagccgctgcgctggaaggcaactgtacggaacctccgggaatcggctgtgcgatttggaatacgcagctttatgtcctggacgccggattacagccagtgcctccgggaacggctggagaactttatgtggcaggaacaggggtagcgcgcggctacttgaaccgacatgctctcacggctgagcgctttattgcgaatccatacgggccgcctggatcgcggatgtaccggacaggcgacatcgtgcgctggcgcgaagacgggtcgcttgattatatcggccgtgcagaccatcaagtcaaaattcgggggttccgaattgaaatgggagaaatagaagcggtgcttgcaaatcatccggttgttaaacaagctgctgctatcgttcgtgaagaccagcccggtgacccgcgtttattcgcgtatgccgttcccgcttcgggagaaagccttgatcctgccgagcttcgccgcttcgttggtgagacactgcccgactatatgattccgtctgcatttgtcatacttgatgaactgccgcttacgccgaacggaaagcttgaccgcaaatccctgccggctccggcggtgagtatgcatacaggcggacgcgagccgaggactccgcaagaggaaattttgtgtgatttatttgctgaggtgctgggggtgccgcgagtcagtattgatgacagcttttttgacctcggcggacattcccttctggcaggcaggctcgtcggccgcattcgggaaatgctcggcgtcgaactcggaatcggccgtttattcgatgagcccacagccgccggacttgccaaacagcttgatcaggcgcagagcgcccgtccggcattgcgcaaaagagagcgccgcaaggagattccgctgtccttcgcacagcggcgcctatggtttttgcactgtttggaaggaccgagcccgacctataatattccggttgtcgttcatttaactggagatttggaccaaaaggcgctggcagctgctctgggtgatgtggcaacaagacatgagccgcttcgaacaattttcccggatcagcaagggacaacacaccagctgatattggaagaggatcaatcgcgtcccgaactcactgtatcccatgtcagcgaacatgagttggaaaaagtcctggctgaggccgtccggcaccgttaccatttagaaaaggagcctccgtttcgcgcccagctattcgtactcggaccggacaaatttgtgcttcttctgcttttgcaccatatgatcggcgacggctggtctttaatgccgctgacccgtgatttggaaaccgcctataatgcgcgtctgcaaggtgaggcacctgtttgggagccgctttctatacaatatgccgactatgccgtatggcaggaatatctgcttggcagtgagaacaatccggacagtctgattgccaaacagctcgaatattggtcgaaggcattggaacatctgcctgatcagctggagcttccgactgatcacccgcgtccgtcggaatctagctacagaggcggtacgattgatctcagcattgacgaacagctgcacggccgcctgttcgatttgtcccgcagcaccggagtcagcatgtttatgattttgcagtcggctcttgccgcactactgacacggctcggagcaggccatgatattccgctcggcagcccgatagcgggaagaaacgatgatgctttaggcgaaattgtcggattgtttgttaatacgcttgtgcttcgaacagatacatcgggtaatccgagttttcgggagcttctgaacagagtcagaaaagtaaaccttgcagcgtatgagcatcaggaccttccgttcgagcgtcttgttgaagtgcttaatccgcgcaggtcaagagcgagacatccgctgttccaaattatgcttgcctttcaaaatacgcctgaacctgagcttgacctttccggcctcaagtcagacattgaaattcgcagcgtcggagcagccaagtttgatttgacgattgagcttcgcgaacatcgaaaagcggacggaacacccgcaggtatcggcggatttcttgaatacagcacagatttatttgagcgaaatacggttcaaacattggcagaacggcttgtcaggctgctggattcagcagcagacgaccctgatcagccgatcgaaaaactcgatattctccttccggccgaacgggaaaacatgctggctgattggagcaaatcgtccaacagcataccttgttcatctttgcccgttttgtttgaaaagcaggcggcaaaggatccggaagctgttgcggttatatgtgaaaataatgcgctcacatacggcgagcttaataaacgcgctaaccggcttgctcatctcctgatcgccaaaggggtcggccccgaacaatttgctgccctggcgctgccaagatctttggatatggttgtcggattgcttgcagtgctgaaggctggcgcggcatatgtgcccctagatccggactacccggcggaaaggatagcgtttatgttgaatgatgcccatcctgtctgcatcgtaacgagttcagcggtagaatcaaatctttctgttcccggatctgttgaaaggattgtactcgatgatccttgtatacaagaggaactgaaaggatgcgctgctgcgaatccgtgtgatgccgaccgcaccgcgcctttgctgcctcttcacccggcgtatgtcatttacacatccggttcgaccggcaagccgaaaggagtcgttgttccgcatcaaaatgtcgtgcggctgttcggagcgactgaccaatggttccatttcggcgctgacgatgtttggacgatgtttcattcttacgcatttgacttttcggtatgggaaatttggggagcacttctcaatgggggccggcttatcgtggtgcctcatacaatcagccgctcgccggccgaatttctcaatcttctcgttcgcgagggagtgactgtgctcaatcagactccttcagcattttatcaattgatgcaggctgaccgggacaatgctgagacaggaaagctcctttccttgcgctttatcatttttggaggggaagcgctcgagctgaagaggcttgaagattggtatgaacgccatccggatcatttcccgcggctgattaatatgtatggaattacagaaacgacggtgcatgtcagctatatttctctcgatcagcagactgcggcacttcaagcgaacagcctgatcggccaggggattcccgatttaggtgtatatgtgcttgatgagtatcttgaaccggtgcccccgggcgtcaccggagagatgtatgtgtccgggggcggtctcgcacggggttacttgggcagacccgatttgacagcagaccgctttgtcgctgatccgtttggtccgccgggaacccggatgtaccgcaccggcgatcttgcccgcaggcgccaggacggctctctggattatatggggcgggccgaccagcagatcaagatccgcggcttcagaatcgaactcggcgagatagaagcggtgcttgtccgccatcatagagtgaatcaagccgctgtggtcgtaagggaaggccagcccggggacaagcgtctgatcgcctacgttgtcccggcgtctgaagaagaaaccgatccggctgagctgcgacggtttgccgcaggcactctgccggagtacatggtgccttccgcatttgtaaaaatttcagagctgccattgactccaaatggcaaacttgaccgaaaagcgctgcctgagcctgactttgccgcggctgttaaagggcggggcccaagaacaccgcaggaagaaatcctgtgcgatcttttttcagaaatcctcaatgcgccgagagtcggtattgatgacggattcttcgaacttggcgggcattctcttctcgccgtacagctgatgagccgcattcgtgaagcgctcggagtcgaactcggcatcggcgacctgcttgaagcgcctacagtcagcggacttgctgaacggcttgaatccggcggcaggcaaagtgcgctggatgtaatgcttccgctgagaaccggaggcagtcaagatcccctgttctgtgtgcacccggccggaggcctcagctggtgttatgccggtttaatgacggcactcggcaaggaatacccgatatacggccttcaagcccgcgggatcgcaaggcaggaagagctacctgatacgctcgacgacatggctgctgattatattcggcacattcgtacgattcagccaacaggcccttatcgtctgctcggctggtccctcggaggcaatgttgttcatgcgatcgcaactcagctgcaggaacaaggggaagacatatcgcttcttgtcatgcttgatgcttacccgaatcacttccttccaattaaagatgcgcctgatgagcaggaagcattgattgccctcttggcattgggaggatacgacccggacagccttgacggggcaccgctgaacctttccagtgcgatcgatattctgcgccgcgacggcagtgcgcttgccagcctggacgaggctgcgatcttgaacttaaaggagacgtatgtgaattccgtccggattttaagcgaatataagccccgcgtctttcatggcgatattctgtttttcaaatcaaccgtgataccggaatggtttgatccgatcgatccggagtcatggctaccttatttgaacggaaacattgatattcatgatatggattgccggcataaagatttgtgccagccggagccgctggccgaaatcggacgtcgggtttcggaaaagctggacgacttgaaaaaagatacggataagtag

SEQ ID NO: 4378 - DNA, 927 bp, Bacillus licheniformis
atggccattcctgccatcttaccgtaccaaatgccagaagcatcaaatatgccgaaaaacaaggtgtcatggactcctcatccgaagcgtgcggcgcttctgatccacgatatgcagcaatattttctcaacgcttaccgttacggcgagtctccggtcacagatctgctggctaatatcaagaagcttcggaagcgatgtgccgagctcggcatgccggttattttcacggctcaacccggcgcccagacaccggaagaacgggggcttctccaagacttttggggacccggaatcggtcctgatcccgatgagcagaagatcgtggatgagctgaaaccgaatgaaggcgacattgttttgaccaagtggaggtacaatgccttcagaaaaaccaaccttttaggcgtgctggaggagcaggggcgggatcagctcataatcaccggaatctatgcccatatcggctgcctgatgacggcatgtgatgcttttatgcaagatattgaaacattttttgtcggagatgcggtggcggatttctcattaaagcatcatgaaatggccatcacatacgcagctgaccgttgcagtgtcacaattactgcggaacagcttctgagccgactgaaagatggcgaaagccatgaacacgcaaaagaaagctctcatgcactgacaaaacagactattcgcgaacaggtggcatcgcttcttcttgaatcgccggaaaagataagcgacagcgaaaatttgatctaccggggaattgattccgtgagaatcatgagtctcgcagagcgctggcgccgagcggggcgggaggtgtcgtttgtagagcttgcggaggacccttcgattgaaaactggtggagactgttgtcctcctctaaagaagcacctttgccaaatgcagactatcaatga

SEQ ID NO: 4379 - DNA, 1623 bp, Bacillus licheniformis
atgctgaaaggatgcacgacatggccgaaggagtttgcggataaatatcggaaggagggatgctggcgaggcgaaacttttggaaaaatgctgagggagcgggccgaaaaatacggaagccgcattgcccttacatacggagatatccatttaagctatcgtgagttagacaggagagccgattctttggctggcggtcttttaaagctggggatcaaaaaaaatgatcgcgtcgttgtccagctgccgaatatcatcgagttttttgaagtttgctttgcgctcttccggatcggagctctgcctgtttttgcgcttccatcgcatcggcatagcgagatcacgtatttttgcgagttttctgaagctgctgcctacattattcccgatcgtcacgcaaagtttgactaccgcaagctggcgagacaggtaaaggagaagctgcaagggctccgtcatgtcattgtcgccggggaaccggaggagtttgaagcgctggcaagcctttatgatcagccggcacctccgcaaaacgtctatccagaagatgtcgcctttcttcagttgtcggggggaagcacaggtctgtccaagctgatcccgaggacgcatgatgattatatatacagcttgagggtcagcgcagagatttgcaggctcgatcacaacagcgtatatcttgcggctcttccgatcgctcacaattatccgctcagctcgccgggagtgctcggtacgctgtacgcgggaggccgagtcgtccttgcatcaggaggcagcccggatgaaaccttccctctgatcgataaggagagggtaacgatcacgggactcgtaccgccgcttgcgttaatctggcttgatgctgcttcggcgcgccgggacgacttgtcaagcctccaggtccttcaagtcggcggagcgaaattcagcgccgaagctgccagacgcgtttcatcggtgtttggctgcaaactgcagcaggtttatggcatggcagaaggtctggtcaactataccagacttgatgatcctgaagacacgatcgttcacacacaaggcaggccaatgtctccgtttgacgagattaaaattgtggacgaaaaaggacgcgaacttggacccggacagacaggagagctgctgacaagaggtccatatacgattcgcggctattacaaagctgaggagcacaatgccaaagcgttcactgaagacgggttttaccgtacgggagacttggttaaagtcaattcatcaggctatttgattgttgaaggacgagctaaagaccagatcaacagaggcggtgagaaggttgccgcggaagaagtggaaaaccatctgctcgcacatccgggggtactcgatgcggcggttgtctcgatgccggatcaatttctcggcgaaagggcgtgtgcatatattatccctcgcggcgctgcaccggctcaggctgagttgcaatcgtttttgagagaaaggggccttgcagcctacaaaatacccgaccgggtagaaatggttgaagatttcccgcagacaggcgtaggaaaagtcagcaaaaaagagctgcgtgcggcgattgctgaaaaaatgtctgcagctgagaatgtcagatga

SEQ ID NO: 4380 - DNA, 1191 bp, Bacillus licheniformis
atgatagaacgtcatgtcgtgtcagaagcgcttgcagatcagctgttaaaggaatatcaggccggtgcttcattctttttctcttcccctgagcggaccattctggcggaaggtgtttttgcttctgtttctcaaaccgaagagcaaagccttgctcagcggactgcggaagttctgaaaaaagccagggagaacgggcaggaaaatccgattgtagttggagctgtgccatttgacgatgcaaagccggcgcagttaaccgtgccggtcgaagcgtggcatgcggggccgctgacatgtgaagaagacgataaagaggtgcctgaacctgccctgcacccctatgatgtccagcagattccaagcccggaagcgtatatggccggagtcagacaaggattggcaggtatagcagcaggagaatacagcaagatcgtcctttcccggtcattgcagctgacctcgccgatcaaagtcgatatcggtcaattgctgcgaaatcttgcccgccgcaatacaagcgggtacaactttgccgttgatttaaccgggcagtcatctgaagcgcctcgcaccactttgataggcgcgagtcccgaactgcttgtatcacggtccgggttccgcgttacggcaaatcctttagcaggttcaagacctcggagcgatgatcccgaagaagatcgaagacgggcggctgaactgcttgcttcgcctaaagaccgtcacgaacatgcggtcgttgtcgaagcggttgcttccgcgctcaggccgttttgccggaagctggaggtgccggaaccgtcgctcatcagcacgccgacgatgtggcatctttcaacggaattaaagggagagcttacagacctctctgtatcatcattggagcttgccgccgcccttcatccgacgcccgctgtctgcggcacgccgacgaatgcggcgaaagaagcgattaaacagattgagccgtttgaccgcgggtttttcacaggtatggtcggctggtgcgacgcggacggtgacggagaatgggttgtaacgattcgctgtgccgaggcggaggaacacgcgcttcgactgtacgcaggtgccggaattgtcgccgggtcgaagcctgaagacgaacttgccgaaacgtctgcaaagtttcggacaatgcttcttgcgatgggaatgaacagtgagtaa

SEQ ID NO: 4381 - DNA, 771 bp, Bacillus licheniformis
gtgaaaggcaaggttgctttggtgactggggcttcgcaaggaatcggcaaagaagtggccctggcgcttgctggacgcggggtgtttgttgcagcggctgatcaaaatcgaaaagggctgcttgaacttgaagacgaacttgaacaaaaaggactgcagggttcaggttttgccgcggatgtgggcgacagtgccgcagttgaccagcttatcgccgatattgaacgcgagatcggtccgatagacatgcttgtcaatgtagccggcgtgctcagaacgggtctgatccattcgttgagtgatgaagattgggagaagacgttcaatgtcaactccaccggggtttttaacgtatcgcgtgccgtcgcccgccggatggtaccgcgcaggactggagcgatcgtgactgtcggatcaaatgcggcagctgtgccgcggatgcacatggccgcctacgcggcctccaaggcggccgctttaatgtttacgaaatgcctcggccttgaacttgccgagtacaatatccgctgcaatatcatatcgcccggatcaacggataccccgatgcagcggtcgctatggcagtgtgaggaagctgcgcaaggcgtcattgaaggatcacttgaaacattcaaaacgggaatcccgctcggaaaattggcttcgccggctgacattgcagatgctgtagtatttttgctgtctgacggggctcgtcatattacgatgcacgatttgcgcgtcgatggcggagcaacgcttggagcctga

SEQ ID NO: 4382 - DNA, 849 bp, Bacillus licheniformis
atggctcaagaaaaacttcagcagtctgtcaatgctgctgaatgcatcccggttgcgataccggggacagaacagcggtgcatgcgttcactggatgggagccgcacatatcggatttttattgcgaaaccatttggggaacagccgcccgcaggatatcccgtgatttatctgcttgatgccaattccgtgtttggaacgatggtggaggcgttgcggatgcagtcgcgccgtcccgataaaaccggtgtagggacggctgttattgtcggcatcggttacgagaccgacgctccctttgaccgggggcggtattatgattttactctgccggaatcgggcgctgagctgcccatgaggcccgatggagcagactggccggaaccaggcggggcgaaagcttttctgtccttcatcgaacagcagttaaagccggagatcgaacaggaattcacgattgatgtgaaaaggcaggcgattttcggtcattccctaggcggactttttgtcctgcagaccctgtttacaaaaccggatctatttcagacatatatcgccggcagtccgtccatccattggcatccgtcattttttgataaagagcatgactttgtttcgaagttgcaggaagctgatggcgatgtaaaggtattgcttggggccggagaactcgaaaagacgcataaaagcgggatgaacgacaatgcaaaaaggctggccgaccgcttggccgctttggaaagtcagggggttcgcgcggagtaccatgaatttaaaggggaaggtcatatatcggttctgcctgtgttaatcagcagagcgctgcggtttgccttcaagcctgattga

SEQ ID NO: 4383 - DNA, 1020 bp, Bacillus licheniformis
gtgcctaaaaaggttgcagtcatctatgctgtttttattgtgctgattctcacaatctgttatctcagcataacagtaggatcgtttgccgtacatccggctgagctgttatcaacattgcttcacatcaacccgaatgagcaatacgccattctcctgtttgagctgcgtcttccaaggattgtgacggcggcactcgtgggtcttgggttcggcattgccggttccgtcatccaggcgatgacaaggaacggactggccgacccgggaatcctggggattaatgcaggtgcgggggcggcgatcgtcggctacatgctgatctttcaaggccagaccgaaacgacaagcctgctcgctgcaatggggatgccattcttcggcttgatcgggggcattttggctgcaatattcatttttatctttgcctggcacgccggcaacttggattcgggcaggattattctcgttggaatcgcgattaattcagggttcagcgctgtttcgctttacctgtcattgaagatgaatccgaatgaccacgaaatggccacggtttggaaaaacggaagcatctggtcggcgaattggacgtatattcaagcggcactgccgtggctgcttgttcttattccatttctgctgatgaagtccggcctgctcgataccattcgctttcatgaagatacggtgaagagtctcggcgtatccgcgaatattgaaaaggtggtgctgctcacggcttgtgtcggcattatcagcgcctgtgtggctatttcggggagcatggcatttgtcggcctgattgctccgcacatctcgcggaggctcgccggcgtcctgcaccgccactcattgctgttaagcggattgatcgggatgtttctcgtattgtgcgccgattttgccggaaagctgctgttccagccgtccgaggtgcctgcgggtatcattctcgccattttcggtgtgccgtacttcttatttttacttttcaaacaaaaaaagactgttcattag

SEQ ID NO: 4384 - DNA, 1005 bp, Bacillus licheniformis
atgcattcaaagcaaatgacccgcatcattatgatcgccgctccgtttgccatactgctgtctgtttttctgtcggtatgttacggtgcaaaacagcttgagcccgaggtgattttttcggcgctgctgcattttgatccaggcaacacagatcatcaaatcatttggcattcccgtcttccgcgcgctgtcggcgctcttttaatcggagcggcgctggcggtgtccggtgcgcttatgcagggtgtcacccgaaattacttggcttccccgtcgattatgggcgtttccgacgggtcagcgtttgtgatcacgctgttgatggtggtgattccgggttcatcctctctggagatgatgggctattcgtttatcggatcagccgtcggcgccggccttgtcttcggcctcgcctcggtgattccaaacggttttatgccggttcaacttgccataatcgggacggtaacaagcatgctgctcagcagtctgtctgcggcgatatcgatttactttcaaatttcccaggacgtcagcttctggtacagcgcgaggctgcatcaattgaatcccgagctgctgaagtatgccgtgccgttttttgtgatcggcatcattctggcgctctctctcagcaaaaaagtgacagctttatcattgggcgatgacatttccgaaagcctcggccagaaaaagcaggccgtcaaatggacagcgatggcagcggtcgtcgttctgacaggctgctctgtcgccatggcgggaaaaattgcttttgtcggactggtcgtgccgcacattacgcgttttctcgtcggatcggattacagccggctgatcccgtgctcctgcgttctcggcggcgtttttttgacgctggccgatcttctcagccggctgatcaactatccgtttgagacaccgattgaagtcgttacttcggtgatcggcgttcctttcttcctttatttgatcaagagaaaaggaggggagcagcgtgcctaa

SEQ ID NO: 4385 - DNA, 957 bp, Bacillus licheniformis
atgagaaaaatatcaatatttctatttattctccttctcgcgcttggcgcagcgggatgcgggaacagcaaagaaaaggctggcggcgatggcaagagcacagcgtcagctgagaagagcatcgagtacctcgatcatacatacaaggtgaagatcccggccgaacaaatcgtcattacgggaagcgtggaatcgatggaagatgccaagcttctggatgttcacccagccggtgccatttccttctccggaaagttcccggatctgtttaagagcattactgacaaagcaaccgctgtcggcgaaaaaatggagccgaacctggagaaaatccttgagctgaaaccggatgtcatcctggcttcaacgaaatttcctgataaagtggtgaaaaaactggataacatcgcgacgacgattcctgtttcccatgtttcttcaaactggaaagacaatttaaagctgctggctgaactgacaggcaaagaagataaagcgaagcagattatttccgattatgaagccgacctcaaggaagctaaaacaaagcttgagaaaacggcaaaagatacaaaagcgctcgttgtcagaatcagaaaaggcaatatctttatctatccggaagacgtattcttcaattccacattatacggtgagctcggcttcacagctccaaaagaagtcaaggcggcaaaagcccaggagttggtttctttagaaaaactgagtgaaatgaatccggactatatgtttgtccaattctcagacgatgagaatgccgacaatccgaatgcgctgaaagatctagagaaaaatccaatttggaaaagcatttctgcagtgaaaaatgaccgtgtatttgtcaatgctgtagacccgcttgcgcagggcggaacggcatggagcaaggttgaatttttaaaggctgcagctgagaaattggcgcagaacaaatag

SEQ ID NO: 4386 - DNA, 1596 bp, Bacillus licheniformis
atgaaatcttcttatttctatcgtctcttgcaaattgatcatataagaaagcccggcgatcttccggatgaacagcagctcgcagactctttcgttttgatctttcatttgaagggtgaaggcagaatcgatatacaagcatcaggcagacccctccaaaaagaaacgctgtatatcgttccgccttatgaaacattcggaatcacagcttcgtcagaggaaatcagcgtttatctcatcaggctgcagccctactgctatgaagaccgccgcctgacgcttcaagcagacaccgaccctgacgctttttccgaccttcagatgatgaatgtccatcctgtcggaaatctggcctcccgtcttcaggaactttccgccttatggccggcatcttcagcgctccaggagctgaaatgccaagcagatctgcagcagcttctgtacgatatctattcggccaaactgactcatcccgaaaacaccgcatcagccataggaaaaacaaaggagtatattgaggagcattcagatgcacacctgacgcttgatcaactcgcgcaaatggccggaatcagcgcgaagcactacagcgaaacgttcaaaaagctgtacggtcaaagcgtgacagagtttatcactgagacgcggatgacgaaagcgaagcagctgatggcaaaagcgagctacaagctgagggaaatttcaagccaaatcggatatcaggatgaattttatttcagcaggacgtttaagaagcatacaggcttatccccgaccgtttatatgaaaaaaaggcgcagaaagctggctgcctacggccagaacacgatcggacagctgataccgcttcacctcattccttacgccgcttccctgcatccgaagtggacatcatattactataagcattacgcggcagatattccggtccatctgagcgcataccgctttcacgagccgtgggaagaaaacctgcggacattgtcatcggctgacccggagctcattatcagcatggacagcgtgtctcacgaggaacgggaacagctccagtcgatcgcggatgtcttctttttgccttcacaggaacaatggaggaggcattttatgctgaccgcatcccatttggacgaagaagcggaggctcacaaatggctgctgtcttaccagcgtctcaccgagaccgcgaaagaggcgctttatccgatctgcggacgccgaagctttttgtttttgcgcttgcataaacacgagatttatctggcgcataaccgttctgttcaagatgtatttttcggcgaccttggctttgaatcggctgtgtcgctggaagaaccgactgaccgggccgtgtcgatcgaaacaatcgcagcctatcagccggatatcattatgattttcatttttaaagagccggagacgctggcattctacagggagcttcagcagtcggctgcttggcaggatttgaaagcggtgcggcatcaccgggtgtatcaggtgaattctgatccttggcgggaatattccgcatgcagccatgaacgaatcatccgccaggcggttcggctgctgtccggaaaaaatccattttaa

SEQ ID NO: 4387 - DNA, 375 bp, Bacillus licheniformis
atgaaaaaatcgcttgatgcgattgcaaaatggggaaaaataaccggagtttttatgattatcgccggaggcatctatgcctttttcggaatttctttgcttatcatcggagccgctccaggtgtgctgatgattttttcaggaatctatcttcttaaatcggcaaacgccgctcagaaaatgagtcatgacatgccgcaagaaccgcatgaagccttgcttgataactatgtgaagtttatgaaatggcaatttttctacttactatcgaatattgtgatcttcattttatgcataatcgtttttttcttcctgatctttttaggtgttctagccgattcttacagcgggtatgatccttattattacgaatga

SEQ ID NO: 4388 - DNA, 642 bp, Bacillus licheniformis
atgaaaatcggtattatcggtgcaagcggtaaagcgggcagcatgattttaaaagaagcatcagaaagaggacacgaagtgacggcaattgtcagaagtgcgtcaaaaatggcgaacagcgatgcagctgtcattgaaaaagacattttcaacctgacagcggcagacatcaaaggactggatgttgtcgtcaatgcattcggcgcggccccagggcaggagcatctccatgttgaagctggaagaaagctgattgaactgtttaagcaggttcctgaaacaagattaatcgtcgtaggcggtgcaggcagcctttatgtcgatgaggaaaaaacaacccagctgtacgatacgcctgagtttcctaaagaatacttgccgacggctaaaaatcaggggcagaaccttcaggatttgaaagaaacagatggactgaaatggacgttcatcagcccggcggcattttttaatccggaaggaaagcgaacaggttcttatcaaaaaggtcaggaaaacttaatcgtaaacaccgccggagaaagctacatcagctatgcagactacgccattgcagtggtggacgaggctgaaaaaggcgagcatgtcaatgagcgtttcactgttgtcggagaagctcaataa

SEQ ID NO: 4389 - DNA, 402 bp, Bacillus licheniformis
atggtgaacacccgtctttcagtggccattcatatattgtctttaatcgccgcaaacccgcgggaatcttcggaaatgatcgccgggagcgttaatacgaacccggttgtaatcaggcgcatgatcagccagctcaaaaaagccggtattctgacgtcgcggccgggagtggccggggcaagcctgaaaagagatcccgaagatatatctctgcttgatatttaccgcgcggttcagccgcatgaggaattatttgcgattcatgacaagccgaatccaaactgtccggttggaagacaaattcaaacaacgcttgatcaaacgtttcacagcgttcagcaggcgatggagaacgaattggccagcaagtctcttaaagacgtcttaactcatctcttttaa

SEQ ID NO: 4390 - DNA, 537 bp, Bacillus licheniformis
atgaaggagataacagaaggaaaagcagctttggatagccggcttgagccgaatgaagagatcagatctattattctttgcgcttataacgcgagactgtctgcacgttacactccgtacagaggcgtgcttgccgccactgacaggcggttcatgttttattcctccctgtttggctccccttttcatcttgacatccgctatgatgccgtcacctcgtttcgccgcgaaaaagggctggtaacaagaggcgatcatctcgtcgtgatgaacaacggggatcgggaagcatttcaatattttagcggctgtgatcctttagagacattcgtcgaagccgttcgaaagctaaagaaactgcctgaagacatcattcattctgaaaaacgccggctccgggatgtgcccgcagccggctgctcagttattaatatcgtacttctctccatacctcagcactttataaattgccattccatcagaaagatgattttcggaatacctcacgggaatcaaagcaaaaaatacataataggt

SEQ ID NO: 4391 - DNA, 480 bp, Bacillus licheniformis
atgttcggactgcaggatattgtcaaattcctctggtcgttcttgatcgtttttcctgccgtgtcggtgcttcatgtcttgggccacagcgccatggcggtgttgttcggcgggaaatcttcgcttgaaatcgggatgggcaaaaaattgctgaaaatcggccctgttcaaatcagaagtgtctacttcatggattccttctgcaaatacggggatttaaaatacgataaccgtttcacgaatgcgatgatttatgccggcggatcgctgtttaacttaatgtctatatttattatcaatctgctgattatcaaagacatcatacccgaaaatatttttttctaccaatttgtttatttttcaacctattatgtattttttgctttgattcccgtgaggtattccgaaaatcatctttctgatggaatggcaatttataaagtgctgaggtatggagagaagtacgatattaataactga

SEQ ID NO: 4392 - DNA, 1026 bp, Bacillus licheniformis
gtgaacaccaacagtgaacaagttttggatcagaaaagccggccgcttcgggatttaagaatttctgtcaccgaccgctgcaacttaagatgtacgtattgcatgcctgcagaaatctttgggcaggattatccgtttttgccaaaaggcgaactgttgtcctttgaagagcttgaacgattggccaagctgtttgttcatcagttcggggtagaaaaaatccgtctcaccggcggagagccgctgatgagaaaagatatgccggaattagtcgggaagcttgcagggatcaaagggattcgcgatattgcgatgacaacgaacggcgttttgctgccggtttacgctgacaagctgaaaaaagcggggctgaaacgtgtaacggtcagcctggattccctggatgatgagcgtttcaaatcgatcaacggaagaggcgtttccgtcagcaaggtgctggccggaattgaagcggcgaaaaaggccggactcggcgtcaagatcaacatggtcgtccagaaaggggtcaatgagaaggatattttgccgatggcccgctatttcaaagaaaaaggccatattttgcggtttattgagtttatggatgtcgggaacacaaatgaatggaaccgtcagtcagtggtggccaaagcggatatcatccggatcatcaatgaagatatgccgattgaaccgatcgacccgaactacgaaggagaagtcgcaaaacgataccgatacctggacggctcaggagaaatcggttttatctcttctgtatccgatgctttttgcaccacatgcaacagagcaagactatcggcgaaaggcgagcttttcacatgtcttttcgcatcaagcgggtttgatttaagaaccttgatcagaagcgggcagaccgatcaggagctggcggaggcgatcggcaccgtctggcggaatcgcgatgaccaatattctctcgaccgcgctcttgcaaaagcggttccgcggaaaaaggttgaaatgtcctatattggaggataa

SEQ ID NO: 4393 - DNA, 792 bp, Bacillus licheniformis
atggggaaaaacatcacaacaagccgaaaaattttccgttatgataatggagagctggtgcagcaagaagatcagatggcgacggaattccccctgactgtcatggtgaacggcgaggaatttgtcacgcttgtttgctcgccggacagcctggaagaactggtgatcggatttctcgcatctgaaggggtgatccgatttaaaaatgagattaaaaggtttacaatagatgaaagcctcgggttcgcatatgtcgaccttgtcagcacaaaaaagctgcagctgaaggattacacaaagcgggtgatcggctcctgctgcggaaaagggaggcatttttatttccagcaggacgtcaaaaccgcaaaaacagcgattgacggcgtgaccattacgccagagaactgtttgaagctgatgcgcgacatgcagaaaagcagcaagctttttcaccatacggggggcgttcataatgccgctttgtgcagcacagacaagctgattgcagtcagatctgatatcggaaggcataatgcgcttgataaattgtacggatattgtttgcttcatcaggttcctgtgcgcgataagctgatcgtattcagcggcagaatttcttcggaagtgctgcttaaagccgcgaaaatcggggtttccgcggtcatttccaagtcggcgccgaccgagctggccattcagatggcagaggagctgaatatcatgacgattggttttgcgagaaaccggtcattcaatgtatacacgcatcacgagcgaattcagttttcataa

SEQ ID NO: 4394 - DNA, 1263 bp, Bacillus licheniformis
atgaaaaaagcgaaaaacaggtggctcattgctttatgtgctgtaggcattcatttgtcaatcgggtcggtatacgcatggagcgtctttacaaacccgctcgctgaaaccttcggctggagcctcagccagatcagtctgacgttcagcatcgctattttatttctcgggctttcagccgcatttttgggacacttcgtcgaaaaacacggccccaaaaaagcaggcatgctcgccgcacttttcttcggagctggcgtgacgttttccggcttcgccgttcagatcggctcccttcccctgctttatttgttttatggagtcttcggagggatcggactcggcgtcggctatattacacccgtatcttcgcttgttaaatggtttcctgaccgccgcggcttggccacagggcttgccattatgggcttcggatttgcggctttgatcagcagcccgatcatgcaaaagctgatctcagcggtcggtatagccaacaccttttttattctcggcatctgctactttcttgtgatgatgctctcttcgctttacctcgccccgcctgaagaaggctggcagcctgaaggattttcaaccggaaaaagcggaagagcacaaagcgctgatatttcccagctgacggcaaatgaagcgattaaaacgaaacgcttttattatttatggctgatgctttttattaatgttacgtgcggaatcgccatcatatcaatcgcttcaccgctggcgcaggaaagtgcgggcatgtccgccgccgcggccgccgcgctcgtcggcgttttgggcgcatttaacggtttagggcgcatcggctgggcctctgtatctgattacatcggacggccgaatacgtataccgtctttttcgccatacagctgatcgccttcccgcttttgccgttcatttccgacaaggccgccttctctgttttgatggcattgatctatacgtgctatggcggagggtttgccgcaattccggcttatatcggggatttgttcggaacaaagcagctcggtgcgatccacggatacattttaacggcttgggcggcggcagggcttgcaggcccgatgttctcttcttgggtacgcgatgcaacagggagctacagccatagcctgacggtgtttgcggcactgttcgccatcgccctgttcatttcgatattcattagaacggacattaaacagttgcggaaaaaagcggcggttcatgtctcaaactcgctaaaaggatga

SEQ ID NO: 4395 - DNA, 2352 bp, Bacillus licheniformis
atgggaaaaacaaagcatcaaggtccgatgaagctgaataaaaagcccgcgccaaaactgtgggcgtcttgggcgccgatgggactcggaaaggtaaagccgaagcatatcagagatacgatgaaaacagcgtgggacaataaagacaaccttccgtacgcctacagaattttgacgcaaggcgtgtgcgacggctgtgcgctcggtgtgtccggactccgcgatcagacgctcacaggccctcatttatgcacgacgcggctgaacgtcctgcgcttaaatacaatgcctgcgatcgaggacaaatggctgtccgccgacatcgaacagctgcgaaagctggacagcaccgagctgagaaagcttggacgcatcccctatccgctgtcgagaaaaaatggtgaacgatcgttctcgagaatttcgtgggatgaagcgctcagccgaatcgcggacaaaatcaaatcgattgataaacggcagctcgccttttatttaacagccagaggcataacgaatgaggtgtactatacggccgcaaaagcggcgcggtttatcggcacaaacaacattgacaacgcctcgcggatctgccactcgccaagcaaaacggctttaaaaaggtcccttggcatcggcgcctcaagctgcagctaccgagactggatcggaacggatgtcctcgtcttctgggggtctgtcgctgccaataatcagccggtgtcaacaaaatacatgtatgccgccaaaaaagcgggaacgaaaatcattatgatcaatccgtaccgggagccatcgatggagaaatactggattccatcgatacctgagagcgcccttttcggcaccaaaatcaccgatgatgtttaccaagtcaatatcggcggcgacattgcctttatgaacggggtgatgaagcactggtttgaaatggagcgggaggcaccaggttcaagcattgaccgcgcctttatcgatgcacacacaaacgggttcactgagcttaaacagcacatcgaaaaacaaaattggaagacgcttgaagagtcatccggcatatcaaaagagagaatgaaagaattcgccgtcttgctggcccgggcgaaaaccggcgttttcatttggagcatggggcttacacagcaccgttttgcgaccgacaacatttcacaggtggcaaatctcgcccttttacaaggattcatcggcagaaagcattgcggcgttatgccgatcagagggcacagcggtgtgcagggctctggagaaatgggtgccgatcctttcgtcctcccaggcggtgattttgacgaggaaaatgccgcacggatcgagaaggtttggggcttccgcttaccgacttggcaaggcgatacgatcggccagacgatcgaaaacatgctgctgccgagcggaagcgaaagaaaagtaaaagtgttttatacaagcggaggaaactttttggagacgatgccgaaccctgattttatcaaaaaagcattgcaggaagttgaagtgagagtccatcaggacatcatcttcaatacctctaccctggtcgatgccaaagaggaagtcatcattctccctgcgatgacaaggtatgaacagcctggcggaggaacctcgaccagtacggaacggatggtatacttcagccccgaaattaaaggaccgcgcatcggagaagcccgttcagaatgggaaatttatgtagatctcgccaaacgggtccggcccgaagacaaagaactgatccattttgacggcgctgcggaaatccgtgaagaaatcgctgctgccaaccggaattatgacgggattcagcatttaaaaaaacgcggagatgtctttcaatggggcggcgcctggctttgtgaaggcggtgtttgtccgacggcagacggcaggggcaacctgatccctgtcgatcttcctgaaaacagacaaacggaaggacgctttctcgttacgacaaggcgcggaaaacagttcaactcgatgatttatagtgaaaaagatcctttcaacgctgcagatcgccgggatgtcatgatcaatccaaaagatgccgaggagctttatattcaagatggagaagcgatcgttctattcaaccgctacggaactttccaagggcgggcaaaatatgccggcgtacaacgcggaaacacggcagtctactggccggaaggaaatgtgctgatccctaaaggcgtatacgaaaaccatgcccgtattccggaatacaacacggcggtcatgattgaaaaggcggagattttccattcgagaaaagatccgcgctatgcagaaaaacgaatcgaagaactcgaaatgtcgaccgattag

SEQ ID NO: 4396 - DNA, 693 bp, Bacillus licheniformis
ttgaaaaagaggtttgctctgttgacaacgttcaccatgcttttgtcattggcgccggcagcagcttttgcggctgaaaacggaaatgcggacaacagcaaaaaagatgtcaatgttgcagttgtgcttgacgcaagcggcagcatggcacaaaaggttgaaggagaaagaaaatttgatattgccaaagaatccgtaaccgattttgccgacctgctttcaagcgatgcgaatgtcatgctgaatgttttcggacataaaggcaacaataaaaactcaggaaaagaagtatcctgcggtacgactgaaaccgtctatgatctgcagccgttttctttcaattcattcgaaaacgctttaagcggaatcaagcctacaggctggtctccgattgcaaaatctctttatgatgtaaaagatgatcttgccgataaagatgggaagaattatgtctacatcgtgacagacggtgaagaaacatgcggaggggatcctgttcaggcagcaaaagatctgcgcaaatccaacattaaaacgatcgtcaacattgttgggctggatgtaaaaaccgtgaaagaaaaagcaaagcttaaaaaagtagctgacgccggcggcggaaaattgattgaagccgactcagcttctgattttaaaaaggtatggaaagaagaaggcgtaaaactgtctcagtaa

SEQ ID NO: 4397 - DNA, 687 bp, Bacillus licheniformis
atgaagaagaagatgacattgggcattttgaccgctatggttctcagtcttggttcgcctgcttttgcagctgagaaaaaacaggaggtaacagttgccgaagatgcgcccaacgttgcgattatgcttgatgcaagcggcagcatggctaaaaagatcggcggggtctcaaaatacgagcttgccaaaaatgaagtgttcagctttggttccaagcttgaaaatgcaaacgtgctcatgagagttttcggttcagagggaaacaataaaaattccggaaaagtgcagtcctgcaatgcaatcagaggggtgtacggcttccaaacgtatgacgagcaaagcttccgcaattccttaaacggcatcggaccgaccggatggacaccaatcgcaaacgcgctgcaagatgcaaaaaacgcgcttgaccagctggacaacaacgggaaaaacgtcgtctatctgctgacagacggtgaggaaacatgcggaggcaatccggtaaaagtcgcaacagaactgcgcaaatccaatgcggttgtcaacgtgatcggctttgattatgaaggagacttccacggacaattgaccagtatcgcagcagctggcggcggtgaatatttccaggcaaaaactaaaaatgacatcaaaagaatttttactcaggaagcaattgagctttctaaataa

SEQ ID NO: 4398 - DNA, 120 bp, Bacillus licheniformis
ttgtatgatgaattgaataacgaggaaaaggagacatgccctatttatttctccctggtgttcttctacgataataatgtgttaacgactttatttcagaaaggggaaagggagaaatga

SEQ ID NO: 4399 - DNA, 1017 bp, Bacillus licheniformis
ttgaaacagctcataattgtactagcaggaatctgcacgctgattttactcataccaacactgcttgtcctcccttttcacgggggaccgggggcaattaaaacagagaaacacgctcagcaacacgaggaaaaaaagaaagtcaccttaaaagagtctcccgtttcaattccggtctacagaacggctgaccggaaagttgaagacattccgcttgaagagtatgtcatcggtgtcgttgcctcggaaatgccggcagattttgatatcgaagctttaaaagcacaagcgctggcagcccgcacatacattgtgaggcaaatggtgtcagagcaagctgtacagtcgccgaaaggctcgctggtcgatcatacgcagatgttccaggtgtataaaaacaaagaggagctccgcaggctgtggaagaaggattacgattggaaaatcaaaaaggtgaccgaagctgtagccagtacgcaaggcaaaattttaacctatgagcataagcctattgatgcttcgttcttctcgacgagcaacgggtacaccgagaatgccggagcttattggacaagtgatattccgtacctgcaaagcgtgaaaagctcctgggacacaaaatcgccgaaattcctgaaccataaaacgtttactgtcgctgaatttgaacaaaagctcggtgtcaagctgcccggttcaaacagcatcggagagatcaccgaaagaacgccgggaaaacgcgtagcgactgccgtcatcaatggaaagaagcttgagggaagagatattcgcgaaaagctcggcctcaaatcggcagactttgattggaaacgcgacgggaatcagattacagtcacgacaaggggatttggacatggagtgggaatgagccaatacggtgcgcattatatggcgaaagacggcaagaaagcagaagacatcgtcaagtattattacaaaggaacagccgtatccaatgcagatgaatttttaaataaatacatggcgaaaaaataa

SEQ ID NO: 4400 - DNA, 1311 bp, Bacillus licheniformis
ttggaaaaaatcatcgtccgcggcggtcgaaagttaaacggcacagtcaaagttgaaggagcaaaaaatgccgttttaccagttatcgctgcatctttattagccagtgaagaaaaaagcgtaatatgtgatgtgcctacgctctccgatgtatatacgattaacgaagtgttacgtcatttaggcgcaagtgtacattttgaaaataatacagtaacggttgatgcatctcgcactttgtctacggaagctccgttcgaatatgttcgtaaaatgcgcgcatccgtattggtgatgggtccgcttcttgctcgcacaggccattcgagagtggctttgcctggaggatgtgcaatcggttcaagaccgatcgatcagcatctgaaaggctttgaagcaatgggggcaaaaattaaggtcggaaacggctttattgaagcgactgtagaaggccgccttcaaggagcgaaaatttaccttgatttccctagtgtcggagcaactgaaaacctgattatggctgcagctttggctgagggcacgacaactctcgaaaatgctgctaaagagcctgaaatcgttgatctggctaactatatcaatgcaatgggcggtaaaattcggggtgccggtacaggcaccattaaaattgaaggcgttaaggcgcttcatggggcaaaacatacgattattcctgaccggatagaggcgggaacgttcatggttgccgcggcgattaccgaagggaacgtactggtaaagggagcggttcctgagcacttaacatctttaattgcgaaaatggaagaaatgggcgttcaaatcttggaagaaggagacggtcttcggatcatcggtccttctgaattgaagcctattgatttaaaaacaatgccacatccaggtttcccgactgatatgcagtcacagatgatggctcttttgatgcgcgcaaatggaaccagcatgatcacagaaaccgtctttgagaaccgcttcatgcacgcggaagaattccgccgtatgaacggagatattaaaatcgaaggccgttctgtcatcattaatggtcctgtgcagcttcaaggcgctgaagttgccgcaacggatcttcgcgccggcgcagctcttatccttgctggccttgttgctgacggtcatacacgcgtaaccgaattaaaacatttagaccgtggatatgtcaacttccaccaaaaacttgccggtctcggcgctgatattgagcgcgttaacgatgaagaagcagttcatattgaaaataaagaagttgtatccgatttaaatgcataa

SEQ ID NO: 4401 - DNA, 744 bp, Bacillus licheniformis
atgaagacaaaacaaacggttaatgcccttatttttagtgtggttttatttttaattgttcatgtctttcaatcgcttgaagcagcgggcaatacgccgcttgaacagctggcggaaggtttgagccgccatgatgtcgagcttgaagagtggaccatgcatacaaaaaaacagcttaccctaagtgaaaaagatttttttgcaaaactgaaacatttcaagaaacagcatcgacaatatgaatggactttaacgcgggaagacgacgatacagttaaagcgacaggtgtttttcaggacaaaaaaaatcatatcaattccaaaatacatttggtatccacccacaaaaaccagagacttgtttcgtatttattgtatgagcaaaaaggcgcgggaccacgggaaaactggaatgctacatataagcagtttgaacgggatgcattcgacataatgcgagaaaagaccgcaatttttacttgtctaaagggccatttaaatggtatgatgaatgttgttttgcaaaaaaaagcaaatgagctagtacatgaatttgatgcaaagtcagttgaagatttaattgaaccaaatttcgtttctatttctgcttacactaacgagtggaaagaatccatcaagacagaaaaacaccgtatgaatttgcaagtctcgcttagaaatgcgggaatgggcgaaaaacttaccgtcacggttggcacaccaatcgtcacgactgaatattaa

SEQ ID NO: 4402 - DNA, 234 bp, Bacillus licheniformis
atggaagagatcggacaacaggctgctgtcagtatcatcgttcatcttttttttattgcattgacttggtgggctcttctggcggtcaatattgatccgcttatcaggaaaggaaaagtcattcaggcgagggtgttaatgatcatcattacaatcgccgtcggctccaccgtcagcaattttttcttggactatctttattattccagacagcttcaaaatttattttcatga

SEQ ID NO: 4403 - DNA, 396 bp, Bacillus licheniformis
atgaagaccttaaaagtcaatatcgttactcccgacggcccagtatacgatgcggatatagaaatggtaagcgttagagcagagagcggtgagcttggtattttacccggccatattccgacggttgctccgctaaaaattgctgcagtccgtctgaaaaaagacggtcaaactgagctggttgccgtcagcggggggatagtggaagtccgccctgaccatgtcaccattctggcccagacggcggaaacatctgaacaaattgacaaagaacgcgccttggccgcaaaacggcgtgccgaggaacgtttgcaaaagcaaactccagatgttgacattattcgggcagagcttgctttaaaacgcgcgattaaccggttggatgttgcgagatag

SEQ ID NO: 4404 - DNA, 1422 bp, Bacillus licheniformis
atgaaaaaaggacgcgttagccaggtattagggccggtcgtagatgttcgttttgaagacggtcacttgcctgaaatatataatgcgattaaagttacacataaagcgcagaacgagaatgaagtggacatcgatcttacccttgaagtagcgcttcacttgggtgatgattcagttcgtacaattgcaatggcttcaactgacggtgttacacgcggaatggaagccatcgacctgggagagccgatctccgttccggtcggaaacgtaacactcggccgcgtatttaatgtactcggggaaaatatcgatttggatgagccgcttccggctgatgctgccaaagatccgattcacagagaagctccaaaatttgatcagctatcaacagaggttgaaatcttagagacgggtattaaagtcgtcgacttgctcgctccatatatcaaaggcggaaagatcggtcttttcggaggagcgggagttggaaaaaccgttttgattcaggagctgatcaacaacatcgctcaagagcacggcggtatctctgtattcgcaggtgtcggcgagcgtacgcgtgaaggaaacgacctttactatgaaatgaaagattccggcgttatcggcaaaacggcaatggtcttcggtcagatgaacgagccgcctggtgcgcggatgcgcgttgccttgaccggacttacaatggccgagcatttccgtgataaagaaggccaggacgtattgttctttatcgataacatcttccgattcactcaagcaggatctgaagtatctgcacttcttggacgcatgccgtcagcggttggttatcagccgacgcttgcgaccgaaatgggtcagcttcaggaacggatcacatcaacaaatgtcggatctgtaacatcgattcaggcgatctacgttcctgccgatgactatactgacccggcgccggctacgacgttcgctcacttggatgcgacgacgaaccttgagcgtaagctgtcggaaatggggatttatcctgcggtcgatccgcttgcatccacttcccgtgcgctttcgcctgaaatcgtcggagaagagcactatgaagtggcgcgcagcgttcagcagatcctgcagcgctacaaagagcttcaggatatcatcgcgatgctcggaatggatgagttgtcagacgaagataagcttgtcgtcagccgtgcgcgccgcgtacaattcttcctgtcgcaaaacttccacgtagctgaacagtttacaggacaaaaaggttcttacgtacctgtcaaagaaacggtaaaaggcttcaaagaaatccttgaaggtaagtatgatcaccttcctgaggacgctttccgccttgtcggccgaatcgaagaagttgtcgaaaaagcgaaagaaatgggtgtagaagtataa

SEQ ID NO: 4405 - DNA, 855 bp, Bacillus licheniformis
ttggcctcattacgggatattaaatccaggattgcttcaaataaaaaaatgagtcaaattacgaaagcccaggaaatggtttctgcttcaaagctgaaccgggctgaaaacaaagcgaaatcgtttgttccttatatggaaaaaatgcaggaagtcgttgccgatatcgcagtcggatacaccggcaaacacccgatgatgtcaagccgcccagtgaagcggaccgggtaccttgtcatcacagctgaccgcggcttggcgggggcgttcaatgcaaacgtactccgcaaagcgtatcaaaggattcaggaacgccatcaatccaaagatgagtatgcggtcatcgcggtcggaagaatggggcgcgatttctttaaaaagcgcggaattcctgtcatttctgaaatgacggggatcagggacgaagtgacgttttcagaaatcaaagatttggcgaacagcacggtgcaaatgtatattgacgaaacctttgatgaactgtatctgttctacaaccattttgtcagcgcgatttcccaggaggtaacggagaaaaagctgctgcctttgacagatattgcgcctaacaagaaaaagacgtcatttgagtttgaaccggatgaagaagagattctggaagtgctccttccccagtatgcggaaagcttgatttttggcgcgcttcttgacagcaaagcgagcgaacatgctgcgagaatgacggcgatgagaaatgcgacagacaatgcaaaagagattatcgccgatcttgaactgtcatacaaccgtgcccgtcaggcatccatcacgcaggaaattacggaaattgtcggcggtgcagctgctttagaatag

SEQ ID NO: 4406 - DNA, 1509 bp, Bacillus licheniformis
gtgagcatcaaagctgaagaaattagcactctcataaaacagcaaattgaaaactatcagtctgaaatagaagttcacgacgtaggtacggtaattcaggtcggtgacggtatcgcacgcgtacacggccttgataactgtatggcaggtgagcttgtcgaattttcaaacggtgtgctgggcttagctcagaaccttgaagaatcaaatgtaggtatcgttattttgggaccttacaaagacatccgtgaaggtgacgaagttaaaagaaccggccggatcatggaagtccctgtcggcgaagagctgctcggccgcgttgtcaacccgctcggccagcctgttgacggaatgggcccggttctcacaagcaaaacccgtccgatcgaaagcccggctcctggagttatggatcgtaaatccgtacacgagccgcttcaaacggggatcaaatcaatcgatgctttaattccgatcggccgcggccagcgtgagctgattatcggtgaccgtcaaacgggtaaaacgtcgattgcgatcgatacaattctgaatcagaaagaccaggatatgatttgtatctatgtcgcgatcggtcagaaagaatcgacagtccgcggcgttgtcgaaacgcttcgcaaacacggcgcccttgactatacgatcgttgtgacggcttccgcttcacagcctgcccctctattgtacctcgcgccgtatgcaggggttgcgatgggagaggaattcatgtacaacggcaagcacgtgctggttgtgtatgacgacctttcaaaacaggctaccgcatatcgtgaactgtccttgcttcttcgccgtcctcctggtcgtgaagcattccctggggatgtattctatcttcactcccgtttgcttgaacgcgctgcaaaattgagcgacgccaaaggcggaggatctttaacggcacttccgttcgttgaaacgcaagcaggcgacatttcggcgtacattccgacaaacgtcatttcgatcactgacggacaaatcttcctgcagtctgatttgttcttctctggcgtgcgtcctgcggtcaacccgggattgtctgtatcccgtgtcggcgggtccgcgcaaatcaaagcgatgaagaaagttgccggtacgctgcgccttgatttggcatcataccgtgagcttgaagcattcgcacaattcggctcagatttggataaagcgacacaggcgaagctgaatcgcggtgcccgtacggttgaagtacttaaacaggatctgcacaaaccgcttcgcgttgaaaagcaggttgcgattctctatgctctgacaagaggcttccttgatgatgtgcctgttgaggatatcaaacgttttgaagaagagctctttatgtatcttgaccaaaatcataaagatctgctcgattcaatcgcccagacaggaaaccttcctgccgatgaggacatgaagggtgcaatcgaaggctttaaacgtacgttcgcgccaagcaactaa

SEQ ID NO: 4407 - DNA, 555 bp, Bacillus licheniformis
atgagccaatcagctgtctccaaacgctacgcagccgctctgtttgacattgcccttgaatccaagctggtcaatgaaatagaagaagagctgaccgtcgttaagaagatatttattgagcataaagacctcaatgccgttctgggtcatcctaaagtgcccgctgaaaagaaaaagcagattttaaaagactcgttcggatccgtttcgactgcagtcttacatacgctttatcttctcgttgaccgcagccgcacgtcaatcgtcccggatctcgcggacgaatatgtcaaaatggcgaaccggttccgcgggacggaagatgcgatcgtatactctgtaaaaccgctcagcgaagaggaaatttcctctttttctcaagtgtttgcaaaagaagcaggcgccgcttcactgcgcgtcagaaacgaagtgaatccggatctgatcggcggtgtgaaaatccgcatcgggaaccgcatttatgacggcagtgtaagaggaaagcttgaccggatagaacgtcaattagcaggcgaaaatcgaaagaaggggtga

SEQ ID NO: 4408 - DNA, 519 bp, Bacillus licheniformis
atgtcttttttaccacaggttatgggtgcaggagtagggtttaacgccggaacaatgctgttccagcttgttgccatgctgattttgttagcgctcttgaagaaatacgctttagggccgctattaaatataatgaaagagcgtgaagactacattaccggagagatctcctctgccgagaaaaagaatgaagaagcgaagaagctcattgaggagcagcaggcgcttttgaaagaagcacgcgaagaatcccagtctctgattgaaaacgcgaaaaaactgggtgaacagcaaaaggatgaaatcatcaaggctgcgcgccaggaagcagaacgcatgaaagaatcagccagaagcgagatcgtcaaagaaagagaccaggctgtcaccgcgctgcgcgagcaggttgcatcattgtctgtgatgatcgcttctaaagtaatcgaaaaagagctggacgaacaagcccaggaaaaattgatccaagactatcttaaagaagtaggagaaagccgatga

SEQ ID NO: 4409 - DNA, 213 bp, Bacillus licheniformis
atgagtttaatagcagctgcaatcgcaattggattaggtgcacttggtgcaggtattggtaacggacttatcgtatcgcgtacagtagaaggaatcgctcgtcagcctgaggctggaaaagaattgagaacccttatgttcatcggggtagcattggttgaggcccttccgattatcgctgttgttatcgcgttcttagcgttcttcagctaa

SEQ ID NO: 4410 - DNA, 735 bp, Bacillus licheniformis
ttgaatcacgaatctagaattgttaatttcttaggcctcaattttgatttaactagcattctaatgattactgtgacaagcatcatcgtctttctgatagcggtgctgaccacaagaacactcgcgatccggccgacgaaagctcagaactttatggagtggattgtcgactttgttcgcaatattatcggcagcacaatggatcttaaagtcggcagagactttctcgcccttggcataaccctgctgatgtacatatttgttgccaacatgctcggccttccgttttccataacagtaggccacgaattatggtggaaatcccctacggccgatccggcggttactttaaccctcgccgtcatggtagtaggcctcactcattactacggagtgaaaaggaaagggttgggggagtataccaaagatttcttcagaccaattccatatttagtgccgctcaaaatcattgaagaatttgcgaacacattaacattgggattgcgtctttacggtaatattttcgccggcgaaattctgctcggccttcttgccggactggcaaccaacttctattctcaaagcattttcctggggctggttggaaccattggagcggttgtgccgatgatcgtatggcaggcgttcagcttgttcgtaggtacaatccaggcattcatcttcacgatgttaacaatggtttacatgtctcacaaagtaagtcatgaacactaa

SEQ ID NO: 4411 - DNA, 384 bp, Bacillus licheniformis
atgaccgatgcgagtctttcattccgtaggcaacaaaaatatgtcctatatattttagcagtctgcgtgttaggctatggatttctgccatatcaggcaatttttttaggcctgattaccggcactgttttcagctatttcaatctctggctgctggccaaaaggatgcaggccttcgataaagcagtggcaaagggcaaaatgatccgttctctcgggactgcttccagattgtgcaacgccattatcgcggcggccattgcttataaataccctgaatatattcatttggcaggcgtcattgtggggttgatgacaatttatcctgtcattatgatagattcctttatccagctaaaacgttcatcaatggaagagaggtga

SEQ ID NO: 4412 - DNA, 630 bp, Bacillus licheniformis
atgggaaaggtatatgtgtttgatcaccctcttatacagcataagcttacatacatccgggacgtaaagaccggaacgaaagaattcagagagcttgttgatgaggttgcaacgctgatggcatttgagattacgcgagacctgccgctggaggaagtgaatgtagagactcctgtgcaaatggcaaagtcaaacgtcatcgccggaaaaaaactcggggttgttccgattctgagagcagggcttggaatggtagacggaattttgaagctgattcctgctgcaaaagtcggacatgtcgggctttaccgtgatcctgaaacattgaagcctgttgaatattatgtcaagcttccatccgatgttgaagaacgcgaattcatcgtcgtcgatccgatgctggcaaccggaggttcggcggtagaggcgctgaacagcttgaaaaaacgcggcgcaaaaaatatccgctttatgtgtctgatcgctgccccggaaggtgtagacgaagtgcagaagcatcatcctgacgttgacatttacattgccgctctggatgaaaaactaaatgaaaaaggatatatcgttcccggattgggcgacgccggagaccgcatgttcggaacgaaataa

SEQ ID NO: 4413 - DNA, 1248 bp, Bacillus licheniformis
atgaaacatttacctgcgcaagatgaacaagtttttagcgccattcaagatgagcggaaacgtcaacagtcgaagattgagctgatcgcttctgaaaactttgtaagcgaagcggttatggaagctcaaggctcggttttaactaataaatatgcggaaggatatcctggtaaacgctactacggcggttgtgagcatgtagacgtggcagaggatatcgcgcgcgaccgcgccaagcagattttcggcgccgagcacgtcaacgttcagccgcattccggcgcacaagcgaacatggcggtatacttcacgattttggagcacggtgacactgtgttgggaatgaaccttgctcacggcggacatttaacgcacggcagccctgtcaacttcagcggtgttcagtacaacttcgttgaatacggcgttgataaagagacgcagtatattgattacgaagatgtccgtgaaaaggcgctcaaacataagcctaagctgatcgtggccggagcaagcgcatatccgcgcaccatcgattttaaaaagttccgcgaaatcgctgatgaagtcggagcctatgtgatggtggacatggcgcatatcgccggacttgtagcagcaggtcttcacccgaatcctgttccttacgctgactttgtgacgacgacaactcataaaacgcttcgcggaccgcgcggcggcatgattctttgccgtgaagagtttgcgaaacaaattgacaagtcgatcttccctggaattcaaggcggaccgttaatgcacgtgatcgctgcaaaggctgtttcctttggcgaagctttaaaggacgaattcaaaacatatgcccaaaatgtcatcaacaatgcgaagcgcttggctgaaacattgaaaaaagagggtatcgagctcgtatccggcggaacggataaccatcttgtgctggtcgacctgcgctctctcggcattaccggaaaagtggctgaaaatgtacttgatgaagtcggcatcaccgtcaacaaaaacgcgattccttatgatcctgaaaaacctttcgttacgagcggaatccgcgtcggtacagcagctgtgacgagccgcggctttgatctggaagcgatcgaagaagtgggagcgatcattgcgcttgcccttaaaaaccatgaagacgaagcgaaacttgaagaagcaaaacagcgtgtagaagcgctgacaaacagattcccgttgtataccgggcttgattactaa

SEQ ID NO: 4414 - DNA, 543 bp, Bacillus licheniformis
atgaaaaatcttgaacagacatggcgttctatattagatgaatttcatcagcaagcgaatttgcgcgaaggccacatcgtcgtcatcggctgcagcacaagcgaggtggccggaaggcgcatcggcacttcgggaagcgaacaaatcgctgaagcggtctacaaaggactggaagagctcagggacagaacaggaatcgccctcgcttttcagtgctgcgaacatttaaacagggcgttggttgtcgaggaagaaacggcgaaagcataccgtcttcccgttgttttcgccattcctgtcccgaaagcggggggatcgatggcttcatatgcctataaacatatgaaggctcctgttcttgttgaacaaatagaggccgatgcggggatcgacatcggcgacacgtttataggaatgcatttaaagcctgttgccgttcctgtccgcgtctctcaaaaacagctaggcgaagcgcacgtgacgcttgcgcggacaaggccgaagctgattggaggcgtccgcgccgtctatgaagcggagtag

SEQ ID NO: 4415 - DNA, 450 bp, Bacillus licheniformis
atgaaagtaatcattgcatcagatcacggcggaatcaatatcagaaaagaaattatggcattgatggacgaattgaacatcgaatacgaagattacggctgcgaatgcggttcaggatctgtggactacccggattatgcgtttccggtcgcgcaaaaagtggcgaacggggaagccgacagaggcattttaatatgcggaacaggaatcggcatgagcatttccgccaataaagtaaaaggcatccgctgcgcccttgtccacgacgttttcagcgccaaaatgacaagagagcacaatgacacgaatgttcttgcgatgggtgaacgggtcatcggccctggtttagcgagagagattgcaaaggtttggcttacgactgagttttcagccgggcggcacgccgtccgcatcggaaaaatcgccgattatgaagacaagcatgaataa

SEQ ID NO: 4416 - DNA, 456 bp, Bacillus licheniformis
ttgaacatattatttgtctgtactggaaatacgtgccgcagcccgatggccgaagcgctctttaaatctgcggctgccgaaaaaaatctggatgtctccgtcaaatctgccgggttgtttgctcctgaaaacggaaaagcttctttatatgctgtcgaagcgctttttgaaaaaaacatcgctctgaatcatacatcttcacagctttccgaggagaaggtggaatgggctgatcttgttctgacgatgacagagcagcacaagcagctggcagtacatgaattttcaaagagccaagataagatctatacgctgaaagagtatgttaatggagatggcggggacattattgacccgttcggcggttctctcagcgactatcaaagaacgagagatgagctggagcagctgctgagaaaattggcggaaatgcttgcgaagaaatctcaggaatag

SEQ ID NO: 4417 - DNA, 162 bp, Bacillus licheniformis
atgttcaatcttgttcactcctttgtttcatattataaaggattcagacggaaaataataaaatccgctccagaaatcaaaaaagaggggatctccccctctttttctaagttccattatgttatgcaaaacagaaaaaagattttcccatctttcaattaa

SEQ ID NO: 4418 - DNA, 561 bp, Bacillus licheniformis
atgaatgttgatgtgttaataggcgaaatcctgacgctttcgatgatggcttttgcactcggcatggatgccttttcagtcggtcttggaatgggaatggccaagctgaaaaggaaccaggtttttcaaatcggcgtcattattggattgttccatgtcatcatgccgcttggcggaatgattgcgggacagtttctttcgggtgcgcttggtgcgctggcgggatatattgggggagctcttttattggtgctgggcattcagatgattgtcgcatcttttaataaaagcggggagcagatcatctctccgcacggcttcggcttgttcgtttttgccgtcggcgtcagccttgacagcttttcagtcggtctcagcctcggcctctacggaacgaaaccgatattaacgatctttctgttcggtttgttcagcatggtgttaacttgggcgggccttctgcttggaaaaaaggttcaaacgtggctcggcgcctacagcgaagcgctcggaggagccatcttgctgagcttcggtctgaagcttttgctgcccatttaa

SEQ ID NO: 4419 - DNA, 1050 bp, Bacillus licheniformis
atgttaatgaaaacaaaagtatggactgtggatgtaaaacgcgatttgtccacaaactgtccacaaattgcacaggcggcaagactgcttcagcaaaatgaaacggttgcttttccgacagagactgtttacggtcttggtgcaaacgccaaacacagcgaagcagtagctaaaatatacgaagcgaaagggcggccgagcgacaatccgctcattgtccacatcgctgaaattgaacagcttgcagaatttgcggaagttgattcgcctcaggccgaaatgctgatgaagcgtttttggcccgggccgctgacccttgtgctgccgtgcaagcccggggtgttatccacaagggtgacggcggggctcgacacggtcgcggttagaatgcctgatcatcctgtggcgcttgagctgattagacaggccggcgttccggtggctgccccgagcgcaaatctgtccggaaaaccgagtccgacgaaagccgagcatgtcgtcaacgatttgaatggacggattgcgggtgtcgttgacggcggccctacaggagtaggggttgaatcaacagttgtttcatgcaccggtgaaattccggtcattttgaggccgggcggcgtcacaaaagagcagctcgaagaagcggccggccccgtcttgattgaccagggcctcaccgacgaaaaaaaggcgcctatgtctcccgggatgaaatatacgcattatgcaccggaagcacctcttgctattgtgaacgggggagttgaggatattcaacggctgatcgaccaatatcagaaagacgggatgaaagtcggtgtccttacgacagaggaacgggccgatgtctatcaggccgatgccgtccgcatctgcggcagaagagaccgacttgaaacggttgccgccggtttgtatgacgttctccgcagctttgatgaagaacgtctcgattttatttttgcggagtcttttcctgaggaaggagtgggccgggcgattatgaaccggctgttgaaagcggccggccaccgcgtaatcgaagcgtag

SEQ ID NO: 4420 - DNA, 444 bp, Bacillus licheniformis
atgttctaccaattgaggttagcggaaacgaaagacatgaatgcgatcgaagcatttttaaaaaaggcggggacaagccataagggtcttgaggaagcgaagagccagtttatcatgatggaagaccctcccgatgaaatcgtcgcctgcctcggaatggaggaatttgaaaacaaaaaaggactgctgcgctcgcttgtcgtgtctgacaagctcagccaaggccacatcgtttccttgtttcaaagcatgcaggtattgtgcgaaaagcgaggaatccaaaccctttatttagtagccaataagcgaacatcgatggatttccttgaagtgctcggttttaaacaagctgcggcaattcctgatgagctggatgaatccgagcatgtttcagactcactgaacgtaaacggagcggttttaatggagaaaacgtcaaattag

SEQ ID NO: 4421 - DNA, 147 bp, Bacillus licheniformis
atgaacgctgtactggtgataagacagtttctcttctgccggcaatgtgattggcacatcagaaaggggcaaaaggtgtatatccgaaaagctgtatttcccctgaaccgttttggaaaattatatcatattcaaaagcttcaataa

SEQ ID NO: 4422 - DNA, 666 bp, Bacillus licheniformis
atgaagaaatcaaacattgcctgtatgtatatttttcttttattaataggagcgcttgcaaatctcacgacggaagagactgcccaatcatcaggcgggcagcctgccgtgattcctgatgaagcgattcggctgcggattttggcaaacagcgacaacgggagcgaccagagcgtcaaacgcaaaatcagggatgaggtcaataaacaaattacgaaatgggtggaaaacctgacctcggttgaggaagcgagacaagtcatcaggtcgaagctgcctgaaatccaagaggttgccatggatgtcatgaaacgcgaaaatgttcggcaatccgtgtctgtccgttttgatcgtgtttcatttccgacaaagctatacggcaatatagtgtatccggccggagaatatgaggctgttttaattacattaggcaagggagagggagccaactggtggtgcgtcctgtttccgccactttgctttcttgatttttccaatggggaagccgtaaagtcgcctgaagacgaacaaaccgctgccggagaagaccgccgggaagaaaaaacagacgcggcggatgaaacggtatctggcatagataaagataaagaagacaaagaagtgaaattttttcttgtcgaatggattaccgggcttttttcttaa

SEQ ID NO: 4423 - DNA, 120 bp, Bacillus licheniformis
atgtttgatttcttcattttccccaccgttcctctcgttcttcaaccttttctagcaatattatggtcaaagatggaacggtttaaacggctgctgaaaaaaatcctactaagcttgtaa

SEQ ID NO: 4424 - DNA, 1185 bp, Bacillus licheniformis
atgaaaaaaatatttctattcggctgttcgttttattttctagtaggggttatccatattctgctggggagcctgtcaccgtacatcattcaagaatatcaacgggatcttcatgatctatccttcctgatctttttccaattcaccggttttctaaacggcgtcctgcttgcgccgatgtttgtcagacgcacctctcatacggctgtattgacgtttggccttcttcttattctcgttacgcttttaggtgttttcctttttgatatgttcatcttttttgtcatcatgggatttttgctcggctttggcgcgggtactttagaaacgacgatgggggcgtatgtgattgcgcaagataaaaatgcgaaagggatgaatattttagaggtttttttcggattaggcgcgctgctgtttccttttcttatttatatccttacggaacgatatgcctggcatttccccttgtatgctttatttatcttcgtttttgtgctcgcgtgtatgtgggtggtttatttgcgcagaaaaacccccggcactgcttccggtcagatggcttatcaggaaaaaccgactgtatcagccatatttgaaaccggaaggaaagaaaaaaacattttcctctttctcatattcgcttttgtgtatgcgggtatcgagaccaatttcgcaaactttttgccggcgctgatgctggaaaaaggggctgaagaaatcagcgtgatcagcgtcacgtttttttggacgggaatggtatgcggacgtttattgacaagtatttttggcggacgcataacttccgttggctttctgatcttcagcgccggagccttgactgttttgcttttgattctcgcgtggtttccggttcatcaaacacagctgctcctcgtatttttcatcgggctgtcggcagccggcatttttccgtgcgccgtcactcttgcctcgttggctggaaagccttttacagaggaaatcacgagtctcttcatttcgtccgcaagtctgggaggagcgcttctttcattcttgatcggctgggcgattgatgcaagcgcagccgctgtcttcccgtttttgctgttcggcggattggggggcttgctgctggcgatcagcgcggtgatttttttatccggcctgcaaaaaaacaagcagagtcatttggatatgtag

SEQ ID NO: 4425 - DNA, 1047 bp, Bacillus licheniformis
atgaaaatcggaattataggagccggaggaattgcaaaagcccatgcgaaagctctttcaacagtcaaaggtgccgagctttccgggttttttgatatcaactcgcttgcctctcgtaaatgtgcgtttgaatacggaggaactgcctttaccagtatgcaggagctgttgaatcagtcgacggcagtcatcgtttcatcgccgaacttttgccatatagaacatgcgcttgaagcgatggctgcagggaagtatgtattgtgtgaaaaaccgatggctgtctcaatggaagaagcggaggagatgaaaagcagggcgtctcaatccgcttatattccgatcatgggcttcaattaccgccatctcacattcgttaagcgcctaaaagatatgatatccggcaatgaacttggagatattttgtccatcaatgtccattttaagaaaaacagcgccttgagaagaaaaaaatatacttggcgcgatcattcgaaaagcaacaaaacgagcggggcattaggagatttgggcgtgcatttaatcgatctcatactctatttgttcgacagcccgtttaaactggacagtttaaaagtcaaaatgatgacggtcgtcaaagaaaaagaacaaaaacaggtatatgttgatgatcattcagaagtatacggccagcttgaaaatcatgtgtttgtcaatatgattacgtcaaaatgcacaaaatcggatgagtgcggcttcagcatcgaggtcaacggccaaaacggcgtattttactatcattcacggcagaaaaatcagtttttgctgagggccggattgacggagcagatgataacaatgccggacacgtggctgacagaccctgaaaatgaattttacggatgggccgattccttcagagttcagctgatccaatggatgaacggaattcgggatcgcaattttgcatctcttgccacttttgaagatggatacaagacgcagttctacttaaatgaatttttcaataaaggtcagcagctgtccctttcaaaacaagcaaactag

SEQ ID NO: 4426 - DNA, 849 bp, Bacillus licheniformis
atgtcgtatcatgaaacactttcttttcacaccttgcagcaagtaaacaagccgaagtacgccgtattttgcgattttgatgagacatatttcgcccacagcatcaccgatgaatcgagaaaagcgctcatggaccttgaaacatttattcattcgcaccatcttgatcacaagattttgctcggctgggtgaccgggagcagcctgtcatccgttcttgcaaaaatgaagcggggaggctttcgatatcttccgcattttgtcgccggtgaccttggcactgaaatcacttatttctctgaagaaggccaagtctctgataaagattgggaagcccgattgcaagaatcaaatttctcccatgatctggtcgaagaaatcaagcagactctctctaaaaaatatgagattgcgcttgtgcctcagactcagcatggcttttcccgctataaaatcaactattactataaatcgttggatgagagcatagataagagggcgcttgaagccatcaggcggcttgcaagagagcatggaataggagtaaatatcaatcgctgcaaccctttggcaggcgatccggaaaacagctatgatgtggactttatccccttgcggacaggcaaaccgtacattgtggattttatattggataaattcgcgatagagagagagaattcatttgctttcggcgacagcggaaacgatgtggatatgcttaaaaaaaccggacatggttatctggtggggaatgcgacagcagaagccaagtcgctccattcccgtatgacagaaggcagctatacggctggaattttagaagtgctaaaagcccatatcaaacgataa

SEQ ID NO: 4427 - DNA, 1164 bp, Bacillus licheniformis
atgaaaaccgcaaacgaaaacatgacttgcacgagcaaacagctatttgtccttctgaatgatttgaaggaaggaaagctcgctggtgaatgccgtatagacgacacactggccaatcaaaaattaaaagagacattgcagcaggatcaattcgacataaccgccaatttgctgaacagaatggattccccgccctccagagttgactttatgccgcttcatcgactgatcacagaagaagaagtagatgacgtggttcatgcggtgaaagacgtgctgccgaccgggcaatttacaagcggtttttatgttggcgtatttgaagctgaaatagctgcttttttgagcaaaaagcatgtcatggcttcatccagcggaaccgatgccatgattgtcgcgctgaaggctgcgggtgttggacaaggtgatgaagtcattatgcctgcaaacagctttgctgcaacggaaaacgccgtgctcgcagctggaggcactccgattttctgcgatattgaccctgttacattttgcatggatccttcagaaattgaagcatgtgtcactttgaaaacgaaatgcattttgcctgtacacctttatggaaagctgcctgacatggaagccattgcaaaaaccgctgataaatacggcatcccgattattgaagacgcctgccaggcgatcggcgtttccgatctgggaaaaaacagcctttgctccatattaagcttcaatccgtataaaaatctcggcacttgcggaaaagccggcgcaattgtgacggatgatccatcatttgcatccgcatgcatggaatatatgtatcacggctttgaactgaatcaaaaaaataaaaaggcggctgactacggctttaacgctaagattgataatctgcaagccgctattggactggcaaggatgaaatatctttctttaaataatctgaagcgcttatatttagcagatcgttatattgcgcatttgcagcagtatgaagacagaggtctgatcaaattgcctcaaatgaccgatgatcatgtatggcatttgtttacaattaaaatactaaacggaaatcgtgaccaagtcaaagatatgatgcttaaatttcagatatatactacccgattttatcccatcatcaaaacacaccacttgtaa

SEQ ID NO: 4428 - DNA, 990 bp, Bacillus licheniformis
atgcctacgattgacgaaattgcaaaattaagtaatgtgtcaaaaacaactgtttcaagagtactgaacgatcatccctatgtatctgaagaaaaaaggaagcgggttttggaagtcatcgaaaaattggactacatcccgaacacgtctgcacgaaagctcagatccaacaaaacgatgtttctcgcagtgtctgtcccacacgcggaccaccccttcttcgctcagcttatgaagcatatgtccgctgaagcgctgaaacaccaatacaaagtcattgtgtttcagacgttttatcaaaagcagaatgaactgaaagtactggagctgctcaagaggaaagaagtcgacggcgttatgctatgcagcattgaaaatgaatgggaagacatcaaaaaatacgtcaaatacggtcccgtggttatggcaaatgaattccacgccgaagcggacgtgccggtgatctgctatgacgaattcgaagccggatataaaggaacggagctttttattcaaaaagggcatcatttaatggccttttgctgtgacacgatacacagcaaggcccagattatgagaaaagaagggtttatgaaagcattgtctgatgcaggtttgcgtttccaggagaagtggatgttcagccacgcatttaccattcatgacggcttccgcattatggaccagatccacaacatgtccgaaaagccgaccgccatttttacgggaaacgaccaagtggccgcaggaattattaaaagggcccgatattatcaatatgaagtgccaaagcagcttgcagtgcttggatatgacaatcaatcgatctgtgaggtgaccgatccggaaatcacgacaatcgatatacctgttgaagagctggctcaaaaagccgtatgtgcaatggtaaaccttctgaatggggaaagcggcttacagagggatgttgtgacactgtcccctgcattaaaaataagacaatctgtttag

SEQ ID NO: 4429 - DNA, 114 bp, Bacillus licheniformis
gtgtgtcgaacaaaaggggggcggctcaaattcccggtggaaaataggaaccgcagccttgaccgttctggcggcgtgctttaccattttttaacaaaatttttatctgaataa

SEQ ID NO: 4430 - DNA, 867 bp, Bacillus licheniformis
atgaaaacaatttttgaagccctcaggtgggcttcttcttatttgacggaagcgggaagagaccggaatgccgcggaaattttgcttacagatcagctgaacatcgaccgcagcaaactgttgtcaagcttccatgatgtcatatcagagtctgattttgcgaggtttaaaaaatctgtcgagcttcatcatcaaggagtgcctgttcaatatatcaccggaaaagagtccttttacggaagggaattttcggtaaatgaaaacgttctgattccgcgtcctgaaacagaggaagtcgttgaagctgtcctttccgaagcggaaagagtttttcacgggatagatcgtcttaaagctgtcgatgtcggtacaggaagcggggcgattgcagtgacccttgcgcttgagagcccgcgtttttccgtcacggcgacggatatttcggaacaagctttaagtaccgcaagacacaacgctgaccggcttggggcgaaagtggatttcctctgcggtgatttgcttgaaccgcttatcgcgcgacagaagaaagctgatgtcatcgtttcgaatccaccttatatatccgaggaagacatgaggacgctgtcagatgtcgtccgtctccatgaacccgccggggctttaacggacggtgctgacggattgcagttttataagcgtttcatgaaggaaattccatctgtcatcgcagatcaggcactggtggtgtttgaaatcggctggactcaggggaatgccgttaaagacatgtttcaccggttctttcctgatgctgacgtgcgggtgaagaaagatcttaatggaaaagaccgcatcgtctgcgcggtaattgaacaacatagttaa

SEQ ID NO: 4431 - DNA, 1071 bp, Bacillus licheniformis
gtgttagaccgtttaaaatcgatagaggaccggtacgaaaaattaaatgaactattaagcgatccggaggttgtcaacgatccgaagaagcttagagaatattcgaaagaacaatctgatttacaggaaacagttgaagtatacagacgttatcgtagcgcgtcggaacagctgagcgatgctaaagcgatgcttgaagaaaagcttgactccgacatgcgcgagatggtgaaagaggagatttccgaactgcaggaagaaatcgagtcgctcacagatcagctgaaggtattgctgatccctaaagatccgaatgatgacaaaaacgttatcatggaaatccgcggcgcagcgggcggagaagaggccgctttatttgccggcaacctttaccgcatgtacagccgctacgcagagctccaaggctggaaaacagaagtgatggaagcgaatatgacaggtacaggcggatataaagagatcatttttatgatcaatgggaacggcgcatactcaaggctgaagtatgagaacggcgcacaccgcgtacagcgcgttccagagaccgaatccggcgggcgcatccatacatccacggcaacggtagcctgcctgcctgaagcggaagaggtagaagtcgatatacatgaaaaagacattcgcgtcgacaccttcgcatcgagcggtccgggagggcaaagcgtcaatacgacgatgtcagccgtccgtctgacccaccttccgacaggtgttgtcgtgtcttgccaggatgagaaatctcagatcaaaaacaaagaaaaagcgatgaaggttctgcgcgcgcgaatttacgacaaatttcagcaggaagctcaggctgaatatgatcaaaaccggaaatccgccgtcggaacaggagaccgctctgagcgcatccgcacgtataactttccgcaaaaccgcgttaccgatcacaggatcggcttgacgatccaaaagctcgaccaaatccttgaaggcaagcttgatgaagtgattgacgccctgattgtagaggatcaggcaagcaagcttcagcaggcggagagctaa

SEQ ID NO: 4432 - DNA, 384 bp, Bacillus licheniformis
atgctggaatcgattcatcacatcgccatcatatgctcggattatgaagcatccaaaacattctatgccgacaagctcggacttgagattctgagcgaaacgtacagaaaggatcgggaatcatataaactggacctctcattaaacggccgctatgtcatcgaactgttttcttttccggatccgcccgcacgccttaccagacccgaagctgccggactccgccatttagctttcacggtggccgatcttgaccagaccgtcaaggagctcaagcaaaaaggcatcactgctgaaccgatccgcaccgatcccgggacgggcaagcgctatacgttcttccccgacccggacggcctgcctttagagctttacgaagcatag

SEQ ID NO: 4433 - DNA, 561 bp, Bacillus licheniformis
atgaatactgctgatgcggcaaatgaactgggggtttcaaccaaaacggtgcagcgttgggtcaagcagctgcaactgcccgcttcccgaaatgagcttggccactactttttcacggaagacgatatcgccattttaaaagaagtaaaagagcagttgaaaaacggtacgcctatgcaggatgtcacggtcaaacgcccgaaaaaaaccttcttcatcaagaaaaacgaaatgattcaaacgaaagagcctgcaccgcaattgaatgagcggctcgaagaaaggctgcagcgttttttagagcatgaacagcttgaacgcgagctgctccaaaagaaaatcgccgagctggaaagaaagctggagcaaaaagcggacgatgtcgtctcctatcagcttctgcagcaaaggcgcgaactggaagaagaacggcagcagatcaagcatctcgaacagaaaatcagccaattggaaagcatgaaccgtcaggaaaaagatacagccggcagaagagaagaaaaaaaaccaaagagcaaattgaaatcgatcttctctttttaa

SEQ ID NO: 4434 - DNA, 957 bp, Bacillus licheniformis
ttggactttttaaatattttaatcctccttgcgccaatattttttgttattgcgctgggatggttcgcgggtcactttggaagctatgatgctaaatctgcaaaaggggtaagcacgctcgttacgaaatacgcgcttccggcccactttgtatcaagcattttatcaacgccaaaagataagttttacagccagattccgcttatgatttcattggtagtcggtatcgttggattttacgttattattttgcttcttttacgatttttgtttaaatacgatttaacagatgcttcaatgttctcattgaactcagcacagccgacattcgcctttatgggtattcctgtattgggcagcctgttcggcatgcaggaagttgcgattccaatcgcgattacgggaattgtcgtaaatgcgatgcttgatcctcttgcgatcatcgtcggaaccgtcggccgttcttctaaaaaacaaacggaaacgacagacagcatttggaaggtaacaggaaaatcaattttacacggtttgtctgaaccgctcgcttttgcaccgcttgcaagtatcattcttgtattattcggtctgcaaatccctgaattgccgcagaaaatgcttgatatgctcggaaatacgacttcaggtatcgcccttttcgcagtcggggtgactgtcggaatccgcaaaattaaattcagcatgcctgctttgagcatcgctttattaaaagtcgctgctcagcctgctttaatgtttgtgatcgcgatggtcgtcggcctttcttctgccgacatgacaaaagcggttctgctcgtggcattccctggttctgccgtggcggccatgattgctacaaactttgaaagccaggaagcggaaacggcatccgcgtttgtgatcagtgcggtgctgtcgattatttcgctgccgatattgattgcaattacagcataa

SEQ ID NO: 4435 - DNA, 117 bp, Bacillus licheniformis
atgttttgtcaccgggctgcaccaatcaaatatgaaaaaatgggatcggcggctggcaacagggcttcccgcgtttatcagccgccgttaatttgtcccctgaaagggacaacatag

SEQ ID NO: 4436 - DNA, 1704 bp, Bacillus licheniformis
gtgaacaacatgagaagaacgaaggaaggacatttggagacttctttgcggggtaaagacgttctttccattccaacgctaaataaaggtgttgcattttctcttgaagaaagaaagaacctcggtctagaaggacttctgccgccgactgttctcagccttgatcagcaggcggaacgggcttacgaacaattttcccgtcaacctgacagacttcgccaaaacgtatatttgaacgatctgcaaaacagaaacgaagtgcttttctataaattattgcaaaaccacctgcgtgaaatgcttccggttgtctatacgcctactgtcggcgaagcgattcaggaatacagccacgaataccgcagaccgcacggcgtttacttgtcaatcgatgatatggacggaatcgaaacggcttttaaaaacctgcaggcgtctgctgatgacatcgatttgatcgtcgctacagattccgaaagcattttggggatcggcgactggggcgtcggaggcatcaatattgcgattggtaagcttgcagtatatacggcggcagcgggaatcgatccgagccgcgttatcccggtcgtactggatgtcggaacgaataatgaaaaactgctaaacgatccgctctatatcggaaaccgtcatccgcgtgtagaaggcgagcgctatgaacaatttatcgacgcttatgtcgaaacagcattgaagcttttccctaacgcgcttctacactgggaagatttcggaaataaaaatgcccgcaatatcatgagtaaatataaccataaaattgcaacatttaatgatgatattcaaggaacaggggctatcacgctggctgcgattttagcagctgtcaaaaagaccggcacgtctttgaaagaccaccgggtcgtcatcttcggacctggttctgctggtataggaatcgctgaccaaatccgcgacaccatggtgcttgaagggctttcagaagaagaagccaaccgtgcattctggacagtcgattacagaggattattaacgacaggcatggatcaaatcatggatttccaagaaccgtatttgcgcgatacggaagaagtgaaagattggaaacgcaatgaaaagggagagatttcctttgaggaagtcatccgtcaagtgaagcctacgatcctgattggtacatcaggtgttgccggcgcctttagtgaagaaatcatcaaagagatggcggctcatactgagcgtcctgtgattctgccgatgtcaaatccgacacatctggccgaagctgttcctgaagacttgttcaaatggacggacggaaaagcgcttgtggcgacgggaagcccgtttgaagctgttgagtacaatggcgtgaaacacgaaatcggacaatccaataacgcttttgtattccctggattaggcctgggtacaatcgttgcgaaagcgaaagtcatcacaaacggcatgtttgctgcatctgccaacgcggtcgcgaacatggtggatcatgaaaagccgggtgcaggtcttctgccgaaaatcgacgacctgcaagacgtatccgttcaagtggcgatcgacgttgtaaaagctgccattaaagacggcgtggcccaagttcagcctgaagatgtcgaaaaggctgtccgcgaagccatgtggcgtccggagtataaaacaattgttgcaaaacaagactaa

SEQ ID NO: 4437 - DNA, 585 bp, Bacillus licheniformis
atgtacatcatgaagcaaagcggctggcttgaactcatatgcggaagcatgttttcgggcaaatcagaggagctcatccgccggatcaaaagggcgacgtttgcgaagcaggaagtcaaagtgtttaaaccagccattgataatcgctacagcagcgaatcggttgtatcgcataatgggacatccattgtgtgccatgccatcgcatctccggaagaaatttttcaatacataagcaaagaaacggatgtcatcggcgtcgatgaagtgcagttttttgacgaaacgattgtcggcacgttaacttctctggctgatcagggctaccgtgtgattgcagcaggccttgatttggatttccggggcgagcctttcggcgtcgtgcccgatctgatggctttagcggaaacggtgaccaagctgcaagccgtgtgctctgtctgcggatccccagccagccgcacgcagaggctgatcaatggaaaacctgcttcttatgacgatccggtcattttggtgggggcctccgaagcatatgaagcgcgctgccgccaccaccatgaagtgcctggaaagccgaaatga

SEQ ID NO: 4438 - DNA, 201 bp, Bacillus licheniformis
atgaaagcaggaattcatcctgagttcaaaaaagcaacagtcaaatgcgcttgtggaaacgaatttgaaacaggttcagtaaaagaagaggtacgcgttgagatttgttctgaatgccatccgttctacactggccgccaaaaattcgcttctgctgatggtcgtgttgatcgctttaacaaaaaatacggtcttaagtaa

SEQ ID NO: 4439 - DNA, 1284 bp, Bacillus licheniformis
gtgaaagatgtatccatttcatctttggaaaatatgaaattaaaagagctgtatgagcttgcaaggcattataaagtctcttattacagcaaactgacaaaaaaggaactgatttttgccattctgaaagcaaacgccgaacaggaagatctgctgttcatggaaggcgtattggaaatcatccagtccgaagggttcggctttctcagaccgatcaactactcgcctagttcagaggatatctatatttccgcctcacaaatccgccgttttgatttgagaaacggtgataaagtgtccggaaaggtccgccctccaaaagaaaacgaacggtattacggcctgctgcacgttgaagcggttaacggcgacgatcctgaatcagcaaaagaacgcgtgcactttccggcattaacgcctctttatccagatcgccagatggtgcttgaaacgaagccgaatcacctgtcaacacggatcatggacatgatggcgccggtcggctttggacagcgcggtctgatcgtcgctccgcctaaagcgggtaaaaccatgctcttgaaagagatcgcgaacagcatcacaaccaatcatccggaagcggagctgatcgtgcttcttatcgatgaaagacctgaggaagtgaccgacatcgaacgttcggttgcaggagacgttgtcagctcaacgtttgacgaagttcctgaaaaccatatcaaggtggccgagcttgtattggaacgtgcaatgaggcttgttgagcataaaaaggacgttatcattttaatggacagcattacaaggcttgcccgcgcctataaccttgtcattccgccgagcggcagaacgttgtccgggggaatcgatcccggcgctttccaccgtccaaagcgtttctttggagcagcccgcaacattgaagagggcggcagcttaacgatcctggcgaccgctctcgtcgacacgggctcgcggatggatgacgtcatctatgaggaatttaaaggaacagggaacatggagcttcatcttgaccgttctcttgcggaaagaagaatctttcctgccattgatattcgccgttcgggtacgcgtaaagaagagcttctcgttccgaaagagcaccttgatcgtctgtggtcaatccggaaaacgatgtctgacacgcctgacttcgtcgagaaattcatgagaaaaatgaaaaagacgaaaacgaatcaggagtttttcgatattctgatccaggaatggaaacaagccaatatgtctgctgcaaggcgctga

SEQ ID NO: 4440 - DNA, 948 bp, Bacillus licheniformis
atggaacttgttcgtgtgacagaagcggctgcgctaaagtcagcgcgctggatgggaagaggtaaaaaagacgaagccgacgacgctgcgacaagcgccatgagggatgtgtttgacaccattcctatgaagggaacggtggtaatcggagaaggggaaatggacgaagcgccgatgctttatattggagaaaagctcggcaacggctacggccctcgagtagacgtagcagtagaccctctcgaagggacgaacatcgtcgctagcggcggatggaacgctctcgcagtcattgcggtggctgatcacggaaacctgctgaatgcgcctgacatgtatatggataaaatcgctgtaggtcctgaagctgtaggctgcatcgatattgaagcgcctgtgattgataacttgaaagctgtggcaaaagcaaagaataaagatgtggaagatgttgtagccacgattttgaaccgtccgcggcatgagaaaatcatccatgagcttcgcgaagcaggcgccagaatcaagctgatcaatgacggggacgtggccggtgcgattaacaccgcttttgatcatacaggcgtcgatattttattcggctcaggaggcgctccggaaggcgtactctcggctgttgcactcaaagctctcggaggggaaattcacggaaagcttcttcctcaaagtgaggaagaactgagacgctgtgaaaagatggggcttgatacgggcaaagtgctccgcatggaagacctcgtcaaaggagacgatgcgattttcgccgcaactggcgtcacagacggagagctcctgaaaggcgtgcaattcaaaggatctgttggaacgacccacagcgtagtcatgagggcaaaatccggtacggtacggtttgtggacggaagacacagtctcaagaaaaaacctaacctagtcatccggccataa

SEQ ID NO: 4441 - DNA, 1290 bp, Bacillus licheniformis
atggaaaagttaaatatagctggcggcgatcctctcaatggcacagtacatataagcggagcgaaaaacagcgctgtcgctctcatacctgcgacgattttggctgattcgacggttacgcttgaaggccttccccatatttcagacattttgacgcttcgcgatctgctgagagagatcggcggaaacgttcactttgaaaagggagaaatggtcgttgatcctgcgccgatgatcagcatgcctttgccgaatggaaaagtgaaacagcttcgggcttcttattacttaatgggcgcgatgctaggacgctttaagaaagcggtcatcggccttccaggcggctgccaccttggtccgagaccgattgatcagcatatcaaaggttttgaggcgctcggagccgaagtgacaaacgaacagggtgcgatctatctgcgtgcggaggaattaaaaggcgcgcgcatttatcttgatgtcgtcagtgttggagcaacgatcaacatcatgcttgccgccgtgcttgccaaaggcagaaccgtaattgaaaacgctgcgaaagaacctgagattatcgatgttgccactcttttaacaagcatgggagcaaaaataaaaggcgccggtacggacgtcatccgcatcgaaggcgttgaatcgcttcacgggtgcagacactcgattattccggaccggatcgaagccggcactttcatgattgcagctgcttccatgggacaagaagtgctgattgataatgtaattccgacgcatttggaatcgttaatcgccaagctccgcgaaatgggggttcgaatcgaagaaagcagcgagcagattttaatggtcggcggacagaaagagctgaaaccggtcgatttgaaaacgctcgtataccccggctttccgaccgatctgcagcagccgatgacatcgcttttaacgaaggcaaacgggacgagcgttgtcactgacaccatttactccgctcgcttcaaacatattgacgagctgagacgcatgggtgcgtcgatgaaggttgaaggaagatcggcgatcattaccgggccagctcctttgcagggcgccaaggtgaaagcgagtgatcttcgggcgggagcatgtctcgttgttgccggtctaatggcggaaggtgtcacggaaatcaccggtttggagcaccttgacagaggctacagtcagcttgaagaaaagctgacaaagctcggggccactgtctggcgcgaaaaattgacagaccaggaaattgaacagctgcaaaactcgtga

SEQ ID NO: 4442 - DNA, 636 bp, Bacillus licheniformis
atgctgttttttattgatactgcaaatttagacgaaattaaagaggcgcacgctctcggcgtgcttgcgggagttacgacaaatcctagtttagtagcaaaagaaaacatttcgtttcatgaccgtctgcgtgaaattaccgaagtggtttctgggtcagtcagcgccgaggttatttctctgaaggctgaagagatgattgaagaaggaaaagagcttgcgaaaatcgcgccgaatattacggtgaaaattccgatgacgcctgacggcctgaaagctgttaaagcattaaccgatctcggaattaaaacgaacgtcacactgatcttcagcgcaaatcaggcgcttcttgccgcaagagcaggagctacgtatgtttccccgttcctgggacgccttgacgatatcggccacaacggcctcgacttgatcagtgaaattaaacaaattttcgatgtgcacggtttggacacgcaaatcatcgccgcgtccatccgccatgcgcagcatgtgactgaggccgcgctcaggggagctcatatcggcacgatgcctctcaaagtcattcaccagcttacaaagcacccgcttactgataaagggatcgaacagtttttggctgactggaataaataa

SEQ ID NO: 4443 - DNA, 858 bp, Bacillus licheniformis
atgcctttagtatcaatgacggaaatgttgaataaagcaaaagaaaacggatatgctgtcggacaatttaacttaaataaccttgagttcactcaagcgattttacaagccgctgaagaagagaaatctcctgttatcctcggtgtatcagaaggtgcgggacgctatatgggcggttttaaaaccgttgttgcaatggttaaagcgctgatggaagaatacaacgtaacagtgcctgttgcgattcacttagaccacggttcaagctttgaatcttgtgcaaaagcgattcatgcgggattcacttccgttatgatcgacgcttctcaccatcctttcgaggaaaacgttgcgacgacttcaaaagttgttgagctcgctcatttccacggcgtatcagttgaagctgagcttggaactgtaggcggacaggaagacgacgtaattgcagatggcgtcatctacgcggatcctaaagagtgccaagagcttgttgagcgcacaggaatcgactgccttgctcctgcattaggttctgttcacggtccttacaaaggcgaaccaaaccttggatttaaagaaatggaagaaatcggaaatacaactggtcttccgctcgtacttcacggcggtacaggcattccgactgccgacattaagaaagctatttctttaggtacggcaaaaatcaacgtcaacactgaaaaccaaatcgcttccgcgaaagctgttcgcgaaacgctggctgcgaagcctgaagagtatgatccgcgcaaatacctcggacctgcacgcgaagctatcaaagaaacagttatcggcaaaatgcgcgaatttggttcttcaaacaaagcataa

SEQ ID NO: 4444 - DNA, 375 bp, Bacillus licheniformis
atgaatgagaagattttaatcgtagacgaccagtacgggattcgggttctgctgaatgaagttttcaataaagaagggtacaaaaccttccaggccgcaaacgggattcaagcgcttgacattgtgaaaaaccagcgccccgacctcgttctgctcgatatgaaaatccccggaatggacggaattgaaattttaaaaagaatgaagatcatagacgaggggatccgcgtcatcatcatgacggcctgcggagagctcgacatgatccaggaatcgaaggagctcggagccctgacacactttgctaagccttttgacatcgacgaaatccgcgatgccgtcaaaacgtatctgcccataaagtccaacggatag

SEQ ID NO: 4445 - DNA, 531 bp, Bacillus licheniformis
ttgcttaaaattttcaccactcaattgacgggaatcttcaaccggattcaagagggcgaggcccaatcgatagaggacggcgcccgcttgttggctcaggcggtcatcagtgatcattcggtttatgtatacggaaaaaatgaattggaaggcattttgaaagaagcgatgtacagttctgaaccgttcccctcagtcaaaccgctgcagaaggacgaagaaaactggcccgattttgaaatgacggacaaagtgctgatgttctgcgccggttcagcggatgacgaagaactgaaaatggcggaaaaactgtatgaaaaaggaatcggacttgttgtcgtctccccttcgggaaaagacggcgtcccgatcgcatccttcgccgatgtccatatcgattcaaagctgagaatgccgcttcttcccgatgaagacggaacaaggtacggatttccgtccctgatggtcagcctctatatttatcatgccctatcctttacattaaaggaaatcctccaggaataccaataa

SEQ ID NO: 4446 - DNA, 138 bp, Bacillus licheniformis
atgaatatagtaccagtttcgggccgccattatcatcagaaagagccaaaaaaagcccgccggcgtgatttgccggcaggctttttcttttttacagcttttccgaagtctttagcgaagcatgtacgaagtctctga

SEQ ID NO: 4447 - DNA, 1608 bp, Bacillus licheniformis
atgacaaaatatatctttgtaaccggaggagttgtatcctcgcttggaaaaggaattacggcgtcttcgctcggccgcctgctgaagaacagaggtttgaatgtcaccattcaaaaatttgacccgtatatcaacgtagacccgggtacgatgagcccgtatcagcacggtgaagtgtttgtaaccgacgacggtgcggaaacggatcttgacctcggccattatgagcgctttatcgacatcaatttaaataaatacagcaacgtgacaacaggaaaaatctattccacggtgctgaaaaaagagcgcagaggcgattatttaggcggaaccgtacaggtaatacctcatatcacaaatgaaattaaagaccgtgtattccgcgccggaaaagaaacgcacgctgatgtcgtaatcactgaaatcggcggaaccgtcggtgacatcgaatcgctgccatttcttgaagcgatccgccagatcaagagcgatgtcggccgcgacaatgtgatgtacatccattgtacgcttgttccatatcttaaagcggcgggagaaatgaaaacaaagccgactcagcacagcgtaaaagaactgcgcagcctcggcattcagccaaatgtcatcgtcgtgagaacagaaatgccgatttctcaggacatgaaagataaaatcgcgctcttctgcgacattgatcctaaagccgtcatcgaggctggagatgcggatacgctctactccattcctctcgaccttcaaaaacaaggcctggacagcctggtttgcagccacttgaagctggattgcagagaagccgatatggaagagtggaaagaactcgtcaaaaaggtgaaaaatctgtccaaaacggtaacaatcgctttggtcggtaaatacgttgagctcccggatgcttacatttcagttgtagaatcgcttcgccatgcgggttatgcgtttgatgcagacattcaagttaaatggatcaatgcggaagaagtgacggaagacaacgttgccgatcttgttcaaaatgcggacggtattcttgttccgggcggattcggagaccgcggtgttgaagggaaaatcacgacagtcaaatatgcccgcgaacaaaagattccgttcttcggcatttgcctcggaatgcaggtggcatcgattgaatacgcgagaaacgtgctcggccttgaaggagcgcactcagccgaaatcgatccgtctacaccgtatccgattatcgaccttctccctgaacaaaaggacattgaagacctcggcggaacactgcgcctcggactttatccgtgcaagcttcaagaaggatcgaaagcatatcaggcatatgaaaatgaagtggtgtatgaacgccaccgccaccgctacgaattcaacaatgagttcagacagcagatggaagaagccggttttgtattttccgggacaagccctgacggccgtctcgtagaaattatcgagcttaaagaccatccatggtttgtcgcgtctcagttccatcctgaatttacgtcaagaccgacaagacctcaggctctgttcagagacttcgtacatgcttcgctaaagacttcggaaaagctgtaa

SEQ ID NO: 4448 - DNA, 123 bp, Bacillus licheniformis
ttgggctcttcaaaacgaagagattcgagtgatacggactatcagctccctttcaagaaattgaaagggagctttcttgtttttccgcctcctaatcatttaaatcatttagaaaagatctaa

SEQ ID NO: 4449 - DNA, 516 bp, Bacillus licheniformis
atgagtttgaaacaatactcagaggagcagctaaaggaaatggctttagttgaaatcgcatacgaaattttctcggaacacaaaaaaccgattacattccaggagctaacagatcaagtggcttccttgcttggaatggggaaagaagagctggaagaccgcatcgcccagttctacacagatttaaatatcgacggacgctttttggcgctgtcagaccaaacgtggggcctgcgcagctggtatccgtatgatcagcttgatgaagaaacccagccgactgtaaaagcgaaaaagaaaaaagcgaaaaaagcggttgaagaagatcttgatcttgacgaattcgaagaaatcgacgaggatgatattcttcttgacgatgtcgaagaagatttggacattgacgccgatgaattcgatgaaatcgatgaagccgacgatgatgagctggatgatcttgaagacgagatcctggatgatgatgaagattttgatgaagaggaagacgaagagtaa

SEQ ID NO: 4450 - DNA, 159 bp, Bacillus licheniformis
gtggaaaatcgccgtctggcccggcttgatctgccgccggcggacaggctgccggcgcagtttttttgttttgaaggggccggacgctcccggctgttctatgtttcaatcccgcttgccgccgatttccaatgcaaccggcaaaaattattgaattaa

SEQ ID NO: 4451 - DNA, 1140 bp, Bacillus licheniformis
atgatctttaagctgagcgaagagcaccaaatgatacagaagatggtgcgcgactttgcccatcacgaggtggagccgactgcgaaagagcgggatgaggaagagcggtttgacatggaactgtttgcaaaaatggcggaattggggctcacgggtataccgtggccagaggaatacgggggaatcggcagcgactatctcgcctacgtcatcgcggttgaagagctttcgaaagtctgcgcctcaacgggtgtcaccttgtctgcccatacatcgcttgcgggctggccgatttatgcatttggaacagaagaacagaaacaggaatatttaaagccgatggcccgcggcgaaaagataggagcctacggattgacggagcccggttcaggctccgatgccggcggcatgaaaacgaccgcagaaaaaaaaggcgatgaatatattttgaacgggacgaagatctttatcacaaacggcggaatcgcggacttctacatcgtgtttgccaaccttgccccggaacagaaacacaaaggcacaaccgcctttatcgttgaaaaggacttccccggcttttctgtcggaaaaaaagagaggaaactgggcatccgttcatcaccgacaaccgaaatcatctttcaggactgccgcgtgcctttaaaaaaccgccttggcggggaaggtgaaggctttaaaatcgcgatgaagacgctcgatggaggcagaaacggaattgccgctcaagccgtcgggattgcccagggcgcatttgaggcggcgaaggcgtatgcgaaagagcggaagcaattcggcaggccgatcgccgagcagcagggcatcgcttttaaactggctgatatggcgacggagattgaagcttcaaggcttttaacctaccaggcggcatggctggaatcagaaggactgccttatggaaaggcttctgccatgtcaaagctttacgcaggggatacggccatgaaagtgacgacggaggccgtgcaaatattcggcgggtacggctacacaaaggattatccggtcgagcgctttatgcgcgatgcaaaaatcacacagatctatgaaggtacgcaggaaattcagaagctcgtcatttcgagaatgctgatgaaataa

SEQ ID NO: 4452 - DNA, 1131 bp, Bacillus licheniformis
ttgaattttcagtttacagaagagcagacccgcatgcagaaggttgtaagggattttgtcaaacaggaggtcgctccttttgtacctgaaatggaaaaaggccgttttccaacctctcttttgaagaaaatggcggagcgcggctggatggggcttccgataccggctaagtacaacggggccggtcatgactttatcacctatatgatgaccatacatgagctgtcaaagaaaagcgccgttcttggtgcggttctatctgtacacacgtcaattgtcaccattcccattcttttaaacggtaatgagcggcaaaaagagcactacgttaaaaagctggcagcagggcagtacttgggagctttttgtttaaccgaaccgagtgccggttccgatgcgggcagtctaaaaaccagggccgaaaagcgcggcgatacctatgtgctgaacggaacgaaagtttttattacaaacggcggagccgcggacatttatcttgttttcgcttcaaccgatccggaggcgggaacgggaggcatttccgcttttatcgtggagaagggcacgccgggctttttcatcggaaaaaatgaagagaaaatggggctccacggttcgctaacggtcactttaaattttgataacgctgtcattcccgcccggcagctgctgggggaggaaggaatgggattcaaaatggccctgtccaacctggataccggccggatcggaattgcggcgcaggctctgggtatcgccgagggagcgctttctgaagccgttcaatttctaaaaaaacggtatccggacggagagctgtataagaacggccaagcgcttgcctttaagctggccgacatggcggcgaggacagaggcggccaggcttctcgtctaccaggccgcctcgttgaaacagcaaggcatgcagacggggaaagctgcttcaatggccaaattgttcgcttcggaaacggcgatgtatgtcgccggagaggccgtgcagctgctcggagatttcggatacacaaaggatttcagcgctgaacgatatttcagggatgcgaaagtgtgtgaaatttatgagggcacgagcgagatccagcggatcgtcatcggtaaacatttataa

SEQ ID NO: 4453 - DNA, 864 bp, Bacillus licheniformis
atgaaaaaagacacgatcatggtcatcggagccggccagatggggtccgggatcgctcaggtctctgcccaggccggatacaatgtttacatgtatgacgtatcacctgaacaaattgaaaaaggaatgaagcgcatttccggccagcttttcagacaggcggaaaaaggcaagctgccgcatgaagatgtgaagcaaatctaccagcgcctttctccgtcggctgcgctcgacgaagcgcgggaagcttttctcatcattgaagcggctgttgaacaaatggacgtaaaaaaagacattttcacgcggcttgatgaagtgaccgaagactcagcgatattggcatcaaatacatcgtccctgtcgattacggaacttgctgccgtcacaaaaaaacctcaaaacgtcatcggcatgcattttatgaacccggttcccgtcatgcagcttgtcgaagtcatcagggggcttgagacgagcggcgaaacatatgaaaccgtcgtggctgcggcggagcggatgaacaaggttccgatagaggtgcgggatttcccgggatttatctccaaccgcatcttaatgccgatgattaatgaggcggtttttgcactttatgaaggcatcgccgagaaagaaagcatagacggaatcatgaagcttggcatgaaccatccgatgggcccgttggctctcgccgatctgatcggtctggatacgtgtctgtatattatggagacgctgcatgaaggctttggcgacgataagtacaggccttgtccgctccttaaacaatatgtcagcgcaggacgactcggaaagaaaacgggcagagggttttatacgtatgaaaagcagccgacataa

SEQ ID NO: 4454 - DNA, 1179 bp, Bacillus licheniformis
gtggcgagatcagttattgcaggcggcgcacgcacgccttttggaaaactcgggggcgcgcttcagtcaaagacggctgcggagctcggcggaatcgccgtaaaagaggcattaaaacgttccggtgtaaatcctgaggatgtcgatgaagtcatcatgggctccgtacttcaaggcggacaggggcagctgccgtcgaggcaggccgcgcgttttgcgggactcccgtgggacgtcaaaacggaaacgattaataaagtgtgcgcttcaggtttaagaagcgtcacaatggcggatcagatcatcagggccggtgatgcggaggtcattgccgccggaggtatggaatcgatgtcaaacgccccttatttgcttcaaaaagcgaggtgggggctgaggatgggagacggggcggttaaagatttgatgatcgcagacgggctgacatgctcatttacgggcgttcacatgggctcctacggaaatgccgctgcgaaagagttggagattgctagggaagagcaggatcggtgggcgctcaggagccacatgcgagccgtacacgctgcggattcaggcgcgctaggagaagagatcgtcccggtcagcatccaagagaagcggggcggcgaattaacggtcgatcaagatgaagcaccgcggcgcgacacgtcaatggaaaggctgtcaaagcttgccccggtttttgaccataatgggacaattacggcgggaaacgcgccgggggtaaatgatggggcatgctcacttatcgtgatgaatgaagacaaggcaaaggaactcaatgtgaaggcgccggccgtcattaaagcgcacacatcaattgcagtcgaagcaaaagactttccgaaaacccccgggcttgtcatcagagaactgcttaacaaaacgggagctgagctttctgatatcaaactgtttgaaatcaatgaagctttcgctgcggttgctttggcaagcggaaagatcgcgggtcttgacatggagaaggtcaatgtcaacggcggcgccattgcgatcggccatccgatcggcgcgagcggagcaagaatcattttaacgcttatgtacgaattaaaacggcgcggcggcggtatagggattgctgccatttgcagcggcggcggccagggagacgccgtgatgatcgaggtataa

SEQ ID NO: 4455 - DNA, 2115 bp, Bacillus licheniformis
atgaatgtcttgctgtcgttgaatttcattgcgtttttaggtataaccgcttacgccgtttatctgttcgtctatttgatcagaacgagaatcagttacatcaggctcggacaaaaagaggattttgataagcggacgaaggagcgccttcaaaagatatgggagaacgtgttcggccaaaagaaactgcttaaagataaaaaaagcggcatcatccatgtcatgtttttttacggctttattctcgttcagttcggagcgatcgattttattttgaaagggctcgttcctgatcaaggccttccgcttggcggcgtctacccggcgtttacgttttttcaggaaatcgtcacactgatgattttaattgcggtagtctgggcttttcacaggcggtatatagaaaaactcgtcaggctgaagcgcaattttaagtcggggatcgtgctcatgctgatcggcggcttgatgtttaccgttttactcggaaacggtatgaacatgatctggcatgaacattcattatcatggcacgaaccgatggcatcaggcatcgcttttgccttcggctttatgggggaaaccgcttcagcggcagtgttctacgcggcgtggtgggcgcaccttctcatcctgctgacatttttagtctatgtaccgcagtcaaagcacgcccacttaattgccggaccggcaaacgtatttttcagccggctgacaaacccgggaaagcttcaaaaaatcgattttgaagatgaaacaaaagaaacgttcggcgtcggacggatcgaggaattcaggcagtcccagctgatcgacctttacgcatgcgtggaatgcgggcgctgtaccaatatgtgcccggctacaggaacaggcaagatgctttcgccgatggatctgattttgcggctcagagaccatttgacagaaaagggagcagcagtgacatcgagaacgccttgggtacccgcaccgctctttcagcatacgaaaggcaaccagctggccatggcggcagggggagaagggtcaagggaagcggctgcttcagaactttacaacccgagcttaatcggcgacatcatcacagaagaagaaatttgggcctgcacaacatgccggaattgtgaagatcagtgcccggtcatgaatgagcacgtcgataagatcatcgatctccgccgctatctcgtgctcacagaaggaaaaatggatgcagatgcccaacgcgccatgacgagcattgaaaggcaggggaacccttggggattaaaccgaaaagaacgtgaaaactggcgtgatataagagacgatgttgaggtgccgacagtaaaagaaatgaagaaaaaaggcgagtcctttgaatacctgttttgggtcgggtcgatgggatcgtatgaccggagaagccagaagatcgccatggctttcgctcgcctcctcaatcaagccggggtcacgttcgcgatattaggcaataaagaaaaaaattcaggcgatacgccgagacggcttggcaacgagtttttattccaggagctagctgcaaaaaacattgaggaatttgaaaaaaatgatgttcaaaaaattgtaactatcgacccgcatgcatacaatattttcaaaaatgaatatcctgattttggtctgaaagcggaagtttatcatcatacagaaattcttgctgccctcattgaagaaggaaagctgaaacctgagtttccggttcacgaaaccgtcacctttcatgattcatgctatttgggccgctacaacgaggtttacgatccgccgcgcgctattctccgctccattccgggcatgcgtttagcggaaatggagcgcagccgtgaaaacggaatgtgctgcggagcggggggcggcctcatgtggatggaggaagaggcgggcgcgaggatcaacgttgccagaacggagcaggcgctcagcacatcaccttctgtcatcagctcgggctgtccttactgtttgacgatgctcggcgacggaacaaaagccaaggaattggaggatcaggtcggcacgtatgatgtagcggagctgcttgaacgcgccgtattcgggtcagagcaaaaagaacatgcctcatag

SEQ ID NO: 4456 - DNA, 1192 bp, Bacillus licheniformis
ttggtgccgcttatgattatggtatgttttctcatcctgcttcttgcgctcgatttccattttggccgcaaagcctttgagaagaaagcctacgagcccgttttttcagagaagaaaagcgatattgaactgattcataatggagaagacttgtgtgagcggctgctggatgacatccgccaggccgaatcgtcggtgcatgtcatgttttatattgtgaagaacgatgacatcagccttgaatttttgaaggtgctgaaggataaagcgaaatccggcgtatgcgtacgattgctgatcgaccggatcggcgcgatgaaggtgaagaaaaaaacgctctccggcctgaaacaaagcggtgtgcacgtttttttcgccaacaagccgggcttcccctatttcttttaccggctgaatgcgaggaatcatcgaaaaatcgccgtcatagacggaaagatcggctatgtgggcggatttaacatcgcgaaagaataccttggtaaaaaagcggaattcggaccgtggaaggattaccatttgcgaatgacgggagaaggcgttgccgacttgcagcacatttttatatcggacttcaaaagagaagcgccgcaggcaaagccggccaacagcgtatttccgccgctgcagcaaggagctgtcacccatacaacccatgcgacaaagggattttctctagaggaaaaatacatttcatttatcgaacaggcaaaagaaagaatcatgatttgcacgccgtactatattccgagcccggctttgcagcaggctgttctctcagccagggaaaggggcgtgatcgtgtcggttctcgtgccgatgaaacccgatcatccgcttgtcaaagaggccgcctacacgcactttccagcccttttaaaagcgggctgctatatttaccggtactacagaggcttttatcatgcaaaagcattaatcgtcgatgaccggcatgtgatgatcggaacatcgaattttgacaacaggagcctgtttctcaatgatgaagtgaatgtcgtcatccatgataaagactggacaaagcaattcttcgacgtcgtcaaggaaagcattgaacacgccgagcttctgacaaaggagcggtatgcgaagcggccggtgatgcagcggcccgtcgaatggctggcgaaatcgatttcattctttttataaa

SEQ ID NO: 4457 - DNA, 267 bp, Bacillus licheniformis
atgaaccaagcagagtcgattaaactccgcgcccaatcgatgacgttaaaaaacttgattgagctgtacaagctttgccgctcagccagacatcagctatatatatgctcaagaaaaacgatgtgcaaaatcaaagatttaattgagctggaaatgttcagaatggccaatcgcgaaaatgagtgcctgattgtcatcgaagggaaaatggctcaggaattagtaaaaaaagcacaatcgattctttctgacgctcaagttcaataa

SEQ ID NO: 4458 - DNA, 1671 bp, Bacillus licheniformis
atgaacatagtcgaacaaatgaaagatgtgctgaagcaggaaattaaggaagctgtcatgaaagccggcctcgccgaagaaagcgagattccagaagtcgtactggaagttccgaaagacaagtcgcatggcgactattccactaatatggctatgcagctggcgagaatcgccaaaaaagcgccgcggaatattgccgaagaaatcgtcgcatcctttgacaaaggaaaagcgtcgatcgacaaacttgatatcgcaggacctggctttatcaatttctacatgaacaatcaatatttaacgaagctgattccggctgtgcttgaagcaggagaggcctacggtgaaacaaatatcgggggcggggaacgcgtccaggtggaattcgtctcagcaaacccgacgggcaacctgcaccttggacatgcccgcggagccgctgtcggagattccctctgcaatgtacttgaaaaagcggggtatgaagtgagccgcgaatattatatcaacgatgccggcaatcaaatcaacaacctcgcgttatccgtcgaagcccgttactttcaggcgcttggaaaagataagccgatgcctgaagacgggtatcacggcgaagatattaaggaaatcggccaaaagctcgccgacgaattcggcgatcgttttgttcatgaagaagagagcgaacgcctcgcgtttttccgcgaatacggcttaaagtacgaattgggcaaacttcgtgaagacctggagaatttccgtgtcccatttgatgtctggtactctgagacatcgctttaccaaaacggaaagatcgatcaggcgctcgaagcccttcgcgaaaaagggcatatctatgaagaagacggagcgacatggttccgctcgacggcgttcggcgatgacaaagaccgcgtgctgatcaaaaaagacggatcctacacgtatcttctgcctgacatcgcttatcacaaagacaagcttgaccgcggcttccaaaagctgatcaatgtatggggagcagaccatcacggctatatcccgcgcatgaaagcggctattgaagcgctcggttatgacaaagaaacgcttgaggtcgagatcattcagctcgtccacctttacaaaaacggcgaaaaaatgaaaatgagcaaaagaaccggaaaagccgtcacaatgcgcgatcttattgatgaggtcggccttgacgctgtgcgttacttctttgcgatgcgcagcgccgatacccatatggactttgaccttgatctggccgtctcaacatctaatgagaatccagtttactacgcgcagtacgcccatgcgagaatttgcagcatgctgcgccaaggcgaagaaaaaggcatttcttttgaagggaaccttgatcttacgaagatcggttctgagaaagagtatgatctgcttaaagtgatcggctcgttccctgaggccgtcgctgatgccgcagagaagcggattccgcaccgcattacaaactatatttttgaattggcatctgtgcttcacagcttttacaatgctgagaaagtcctcgatccggcagatgaagaaaaaagccgggcccgtttatcattgatgaaagcaacgcaaatcacattaaataatgccctcaagctgatcggcgtatcagcgcctgaaaaaatgtaa

SEQ ID NO: 4459 - DNA, 429 bp, Bacillus licheniformis
atggatcaggagacacccgttcatatctatgtgaaatctgttatccgggaaggatcggacacggagacgatcgagttccggacaactggattttattatatgaaaaaagataaaatatatctttcttatcatgaagagcatgatgctggaaaggtgaagacgatcgtcaaggcaagtgaaaacgaagttctggtcatgcgttccggcgccatcgaaatgaaacagcgcttcaggccgggcagccgcaccgtcactcattataaaatgccattcggcagactcgagctcggcgtggatactaaagctgtatcagtcacacatcagccgccggacggaaagatcagcattgagtacgatatgattgtaagcgatgaacaaaagcatttacataagatgtcgatttcgtatagaggaggacacgagtcatga

SEQ ID NO: 4460 - DNA, 873 bp, Bacillus licheniformis
atgagatttgatgaagcatattccggcaaggtgtttatcgcaagccgccccgattgggaagaggcggacgccatcctttacggcatgccgatggattggacggtcagctaccgtcccggctcccgcttcggtccggcgagaatccgcgaggtgtccatcggacttgaagaatacagcccttatttggacagggagctggaagaggttcatttctttgacgccggcgacatcccgctgcctttcgggaacccgcagaagagcctcgacatgattgaagaatatgtcgacagcattttagataaaggaaaattcccgctcggtatggggggagagcatctcgtttcatggccggtcattaaagcgatgtacaaaaaatatcccgatcttgccatcatccatatggatgcgcacacagatctccgcgtcgactatgaaggagagccgctctcgcattcgacgccgatccgtaaagccgcggaactgatcggacccggcaatgtctattcattcggcatccgctccggcatgaaagaagaatttgaatgggcaaaagaaaacggcatgcacatttctaaatttgaagtgcttgagccgcttaaagccgtcctgccgaaactcgcggggcgtccggtttatgtgacgatcgacatcgatgtcttagatcccgcgcatgcgccgggaaccggtacggttgacgccggaggcatcacatccaaagagctgctcgcttcgattcacgaaatcgcccgctcagacgtcaatgtcgttggaggagaccttgtcgaagtcgctcctgtctatgaccattcggaacaaaccgcaaatacggcaagcaagctgattcgcgaaatgctgctcggctgggtgaaataa

SEQ ID NO: 4461 - DNA, 831 bp, Bacillus licheniformis
ttgagcggactttggtatacagagaagcaaacgaaaaatttcggtattacaatgaaaatcaacaggactttacatacagagcagacagattttcaaaagctcgaaatggccgagactgaagaattcggcaacatgctgtttttggacggcatggtcatgacatctgaaaaagatgaatttgtctaccacgaaatggtggcgcacgtgcccctgtttacgcatccgaatcctgagcatgtgcttgtggtcggcggcggagacggcggcgttatccgtgaaattttgaagcatccgagcgtgaaaaaagcgacgcttgtcgatattgacggcaaggtgatcgaatattccaagaaattcttgccttccattgcaggcaaacttgacgatccgcgcgtcgaagtaaaagtcgatgacggcttcatgcacattgcccaatctgaaaatgagtacgatgtcatcatggtggattcaaccgagccagtagggcctgctgtcaacttgtttacaaaaggcttttacgccggcatagcaaaagcgctaaaggaagacggcattttcgttgctcagacggacaacccttggtttacacctgaactgatcacaaacgttcagcgcgatgtaaaagagatcttcccgattacaaagctgtatttggccaacattccgacatatccaagcggattgtggacgtttacgatcggttcgaaaaaatacgatcctcttgaagtggaggacagccgcttctttgatattgagacgaaatactacacaaaagaaattcataaagcggcattcgtccttccgaaattcgtcagcgatttaatcaaataa

SEQ ID NO: 4462 - DNA, 417 bp, Bacillus licheniformis
gtgattgtaaagacggatcgattcattttcaggagtcattccaagtccattatattcccaatcgccgatttttcttttataatggctaagctaagcacagatgtgcatactgtgcgcttttggaggtgttctcatttgcagagcaaacaactgctcaaattgtatataaccagccgccggaaaaggtttttattgatattttttctgatcggagcggccgttttgtttttcagccccgtttatatccgggaggctgccgttccgtctttgccggattggcttctcgaagtcagcggatctgtttatttgatgcatatggtcgctgtcctgtccgcagcctgtttgttctacggcacagcgaatggatgcggcgttcagcaggtgcaattgcaacaaacagaacggtgttgccgttga

SEQ ID NO: 4463 - DNA, 489 bp, Bacillus licheniformis
atgcggcgttcagcaggtgcaattgcaacaaacagaacggtgttgccgttgattttgctcggctgcaccgtttctgcttttgtgatgatctgcctgctgttttggagtgcggccatcggctggtttacattcggcggctacggtgcggagaatgttcatcctttttttgagctgtcgggttctcccctctggtttgttgtctcacgcctgttcattgactggtggtcgctttgctttctgatttttctcggcttggcgggagtgctgatcgcaaagaaagagcagcttgctctatggctgccgcttgcgtggtcctcgggtttaatgctccttttcaaattcaatatatcctttaaagggctgctcccgggggaaggcatgctgttgtccatccatgcagcaggagcttccccgattctggccgcatcagtcaacgaaggtgcagttttcgtattatggctgatttcatatgtggcgaccgccaaaaaa

SEQ ID NO: 4464 - DNA, 2076 bp, Bacillus licheniformis
atggacatgatgacggacaagcgggtccgtttaaccatcaagacgatacgcgcatttttgttcatgggagcattgatgctgatcttcctttcaatcgttgtcatgacggtggtcttggcggccaaatggcaaggcgctccttcgattcaggtgccgaggtctaccgtgctgtatgacggaagcggaaagcaaatgggggaaacgcattacgggcaaaagcggtactgggtttcgctgaagaacatcaatcccgcagtcatcgatgccacgcttgccgttgaagaccggaactttttccggcaccacggctttgactatatgaggatgggcggcgccctcattgccgatttaaaggcgatgtccaaagttcagggagccagcaccatcacccagcaatatgcgagaaacctctacctcggccacgataaaacatggaaaagaaagtggaatgaagctttttatacgataaggcttgaacaaaactacacaaagaaagatattttggaaggctatttaaatacgatttattacgggcatggagcatacggaatcgaagcggcttcccggctgtattttggcaagcgggccaaagatatcaatacggcggaggctgcaatgcttgccggcattccaaagggtccttcagtttattcgccctttgtcaatgaaaaaaaagcgaaagaacgccaggaaatgatcctgacaatgatggagaaacaaaacaagctgacggaaatgcaggcggcagcactgaaaaaaatgccgctccgctttgaaaaacaggataagcaaacaaccgaaaaaaccgctccgtacttttatgacgaagctgttaaagaaatttcgcgattgctgcgtttgacgccggagcaagcggaaacaggcggctacaacgtattcaccacgctcaacccgcgtctccaaaaaattgccgaggatacgatcgaacacacgatagattcgtcatccgacattcaggcgggatttgcagcgatcaacccgtccgacggcagcgttctcgcgcttgtcggaggacgcgactacgaaaaaagcccttttaaccgcgtaacgcaggctatgcggcagcccggctccaccatgaagcctttcctttattattcggcggttcaaaacggctttacaccggccacccgaatgaggagcgcggaaacgacatttgagctcgggcaaggcagcgcttattccccgagcaactatcacggctattatgcagacggtccgatcacgcttctgcaggcactggctttgtccgataacatttacgccgtgaaaacccaccttttcctcggcatggacaaactgattgatgccgcaaagcaattcggcatcaacagcccgctgcaaaaagtgccgtcgcttgcgctcggaacatcccctgtgaagccgattgaaatggtgaacggatacgccatgtttgccaacggcgggaaaaaaatcgaaccttcctttattacgaaaattaccgatccgaacgggaaggttctttatgaaaaaccgaagcggagcaaacaaatccttgacccaaaagcggcttttatcacggcgaacatgatgagcgggatgttcgacaaatcactcaacggctatacatctgttaccggccggacgatcgcagatcagctgacgcgccgatacgccggaaaatcgggaacgaccagcaccgacagctggatgatcggcttttatcccggtcttgcttcaggcgtgtggacgggatatgacaaagagcggacaatcgatgccgtcgcagagaaaaactatgccaaacaaatttgggctgagtttatggaaaaagcgcttgaagacgcgcccgccgcagctttaatgccgcctgaaggcgtgaaagggatgtacatcgacccggctacaggttatgcggcggcgcccagctgcccgtccaaatatttcgcttattttatcaaaggtactgaacccgagcaggtttgctatggaaaggaaatctataaggagcaaaacgccgggcacgaaaagcccgccgctcccccccataagcggcaaaagtggtgggaaaaatggtttaaaaaaggagaataa

SEQ ID NO: 4465 - DNA, 516 bp, Bacillus licheniformis
atggaacaaggaaaaaagaaaaaaacaatcggattcaacattattaaaagcgatccgacagacggacacgggggatttggagcaggcgcattaagccttgacaacatctcgcctgtcattgtcgatgttgaagagaaagaagcgtttgtggatatcggcgccatgcacgcccgcagcacggttgaaaaaggaatcaaatttttgccgaacaaagaagaggtgccgaacggaaaaccttactggcttgtgtgggttacgatcgaccgcagggaagaaggcccttattatgcgggtgtgacggcatgcgaaatgacggtcgacagaagcatccgccgcggctacaaatcgcttccggagcacgtcaatttaatggataagtcgatgaagcggaagattatcgtcgagcatatggatgaaggttctaagcgcgttcttgccgattttctgaaaaaccatgatcaagggctttgggaccgttcatcagacgagctgaaaaagggactgctccagcaatag

SEQ ID NO: 4466 - DNA, 690 bp, Bacillus licheniformis
ttgtatatgagaaagagggaaagccacattttagaccgttttcttatttatccgctggaaatgattccgtatgttgttttgacacttgctgccgcattcactgtgcatgaggtcgcccatgcgtatgtggcttacaaattcggcgatgagacggccaaacggcagggcaggctgacgctcaacccgcttaagcatcttgatccgtttggaacgattttgatctttatattgggattcggctgggcaaagccggtgcccgttaaccgcttttattttaaaaacccgaggctggccggatttctcgtgtcaatcgccggaccgatcagcaatctgatccttgctttcatcggttttatattgctgcttttgtccgtgaagctgtccgggacgctgcctgccggtttttacagcggtttgcttcaattttttacgatttgggtgaatctcaacctgcttttatttctgtttaatttaatgccgttcccgcctcttgacggttttcgggttatacaggatgtggtcgcccccgaagtgcgggcgaagctgtcgaaatatgaggcgtacggctcgatcgtctttctgattatcgtcattacaccgcttggccaatatgtattctggccgtttttgaatgacgggcgggaattgatcatatcgatatttaacagcgttttccggccgctgatgtag

SEQ ID NO: 4467 - DNA, 186 bp, Bacillus licheniformis
atgccatacgtaactgttcaaatgctggaaggccgcacagatgaacaaaaaagaaatctcgttaaaaaagtgaccgaagccgtctccgaaacaacaggcgcacctgcagaaaaaatcgcggtcatcattgaggaaatgaaaaaggaaaactacggtgtcgccggcaaacgaatgagcgatatgtaa

SEQ ID NO: 4468 - DNA, 807 bp, Bacillus licheniformis
gtgaagaaacgttctttattcttatctctattactttccgtcagtctcattcccggtgtgacggccggtgccgccaagacgggcgggcatgagcacgagcacgatcatgaagcaagaggaacttatattgattctttgcctaaagcgaaagattttaaagacttgaaaggaaaagttcaaattgaaagaacggtcaatacgaaaatactggatgagaaaggaaatgtgacgggaacgaaaacgtttaaaaagaatacgggcaaagggtcgttttcaacccaggcaggcacgggaagccagaaagtgagcgtccttgccgtggctgacgctcagtatcgggcgaaatacagcgattggcagacaagaatcgtccaaattattgagcaggcggatgtcatgttcaacagggatcacgatgttgattttgtcgtcgaagctgtggcgccttggacctcttcaggcagcaacagctctcaaattctatcaaaccttcagagcaatttcagcgggcgcagctataaattcgtcgtcggatttacggcgaacagtaattttgacgccggcggcatcgcatacgtatacaacagcaagccgaacggcagcgccttcagcgtaaacctcgaccagggaacggccaacacggcaaaagctgcaacccacgaattttcccataacttcggcttgaaccacgatgtgcaaggaagcggaatccgctgcattatgaactacgactacgcatacacggtcgatgtttgggattcagctcacaatagccagatcactaaaaacaaagcttggtataaataa

SEQ ID NO: 4469 - DNA, 177 bp, Bacillus licheniformis
atgaaaaattctgctagttatcaaaaaattccttcaattcatccaaaaagaggaaatattacatacgttcttttcactgcttctttcaatttccctacaaaaattccaaaacgcagacaaaaaaacaaaccaaaaaacctaccgtttttcggcaggcttatgaacaaagatttctga

SEQ ID NO: 4470 - DNA, 504 bp, Bacillus licheniformis
ttgttaaaagaacatgcaaagctgatgaaggtcttctcggattcgggggagattgtcgggcggaaaaagctgcagaaaatcatttatatcgcaaagaaattggagcttcctttttatgaaaagtatgattttcatttttacgggccttattcagaggagctgacgcttcaagtcgaagaactttgcaatctcggatttctccatgaagtcaaagaaaaaaagggcggctattatcaataccgctattcacccactgaagcgggaaagcagtttttgagccagtgtgagctggatatgcgggatattaaagcctatttagacgacgtaaacggccagtcatcgcgttttttggaactggtgtcgacgattttgtattttgaggggctggagcaggaagagattagagaaaaagtgtttaccgtaaaaagcaaacagcggtatacggacgaagaattcgatgaagccgtcgcttacataaaaaagctcagaaatctttgttcataa

SEQ ID NO: 4471 - DNA, 1299 bp, Bacillus licheniformis
atggcgtatccaaacggaaaattatcagaagaaaaagtgtttaaagatcctgttcaccgctatgtccacgtacgggacaagctgatatgggacttgatcggaacccgcgaatttcagaggctgcgcagaatcaaacagcttgggacgacctatttgacgtttcacggagccgaacacagccgtttcaaccattctctcggcgtctatgaaattgtcagaagaatggttgatgacgtttttaaaggcggggaggaatgggatgacagcgagcgcgatctgtgcctttgcgccgcattgctgcacgatttggggcacggcccgttttcccattcgtttgaaaaggtcttccggcttgatcatgaagactttacgagagcgatcattttaggcgatacagaagttaaccgagtattaaacaaggtaagtccgacatttgcaaaggatgtcgctgaagtcatcgcgaaaacctatcaaaataagcaggtcgtcagcctgatctcaagccagattgacgctgaccgcatggactaccttcagagggacgcctattacaccggcgtcagctacggtcattttgatatggagcggattctccgcgtcatgcggccgcgcgaagaccaaatcgtcattaagcaaagcggaatgcatgctgttgaggactatattatgagccggtaccagatgtactggcaggtctacttccatcctgtgacaagaagtgcggaagtgattttgacgaagattcttcaccgtgcaaagcagcttcatgaggaaggctatgttttcacgcatgcgccagtgcatttttattctatttttgaaggcaatgtcacattggaagattatttaagtcttgatgaatcaatcattctttattattttcaggcctgggaaaaagaagaggacgaaattttgtctgatttatgccgccgttttatcaaccgcaggctgttccagtatgcggaattcaatccgaatgaggaaatggcgacttactttgaactgaccaacttgtttaaagaatcagggattgatcccgaatattatcttgtggtggattcgtcctcagatcttccttatgatttctacagaccgggggaagaagaggaacgcctcccgattcaattgctgacgcacaacggccagattaaggagctgtcgcggcagtccgatattgtcgatgcgatatcaggcaagcggagaacggaccataagctgtatttcccgctcgatttaatcgaagggctgcctgacggccgtcatgcgaaaagaatgaaagaattgctcggactgaaatag

SEQ ID NO: 4472 - DNA, 141 bp, Bacillus licheniformis
ttgcccgatctgcttgttttctttaaggtctgcttctattatatcgagtctgtttttttgaaaacatccttgaatttacccggccatttgttccagcctgccaaaaagccgttaaacaagcaaaaacgcctgacccgttag

SEQ ID NO: 4473 - DNA, 225 bp, Bacillus licheniformis
atggctaatgaatttcgagtatgcgacgattgccaggccaccaatttaaagacgcttttgccccgtctgaaagaaattgatccggatgcaaaagtggaaatcggctgccagtcttactgcgggccgggacgaaaaaaatcgtttgcgtttgtcaataatcgtccgctgtcagctcctgatgaagacgagctgatcgaaaaagtgaaaaagaaactcaaaaaataa

SEQ ID NO: 4474 - DNA, 165 bp, Bacillus licheniformis
ctggcaatcgtcgcatactcgaaattcattagccatttcatacgcttcctttcgttttgttcatctgtctttatgaaaggcattcaactgtgccgaacttttataaaaaatgacaccatccttcattttacaaggattctttcattcctgcaaggatcgcgctaa

SEQ ID NO: 4475 - DNA, 786 bp, Bacillus licheniformis
atgaaacaaagacaagacgcttggtctgaggaaaatgatttactgcttgctgaaacggtattgcggcatgtcagggaagggagcacacagctgaacgccttcgaggaagtcggagacagactgaacaggacatcagccgcctgcggttttagatggaacgcagttgtccgccaccaatacgaaaaagcattgcagctggctaaaaaacagaggaagcaaagaatgcgcgccctcggaaacggacagccggcgaaaaaacgcttattatacaagccgccggtcgaaacgaatgctgaacctcctgcagaaagcgttgttgagcagaagaaagcaaccgcagattcaagcgaacagcagccgatcgccagcgagcatctgccttatgttgatgagagctttaaagaagagttagctagtttatctcaccttctatcgccaaatcagccgcaggccggccatacagccgatacatcgaaagacatgacgatcgatgatgtgatccgcttcctgcaaaactatacaggaaacgaagaacaaactgccgctttaaaaatggaaaatgaacgtttaaaacaggaaaacgaagaactgacgaagaaagttgaaaagcttgaagcggaagtcaaaaagctggaaaaagaccagacaaccatccaggaagactacgaaacgctcgtaaaaattatgaaccgtgcaagaaaactagttttattcgaagaagacgaacacgctgcgcccgccttcaaaatggaccggaacggcaatttagaaaaaatggctgaatag

SEQ ID NO: 4476 - DNA, 87 bp, Bacillus licheniformis
atgcatacaaacatttttcgatacgaggatacccctttctttaaaaaagggggtatttttacctttctgcggcttgcttttatatga

SEQ ID NO: 4477 - DNA, 330 bp, Bacillus licheniformis
atgaagtttgttttatatgcggttcagttcggcactgcggcccttttgtttttgttttctgcattggcaagctggtatcaaggcagcgagcttttaaaggtgccgtgggagtggaaatatacagccaagtttacaagttggctgtacggagaggactccattaaaaacgcacataatatttcacagcttgattttttcgtctatgcggccaagcatacgccggcaaccgttattttaatggccgtcagtttggcgtatatcatcgctttggcggcttatcttctcatcaaaacatatgtaaaacgaaaaagcgcttcgagcgcagcataa

SEQ ID NO: 4478 - DNA, 846 bp, Bacillus licheniformis
atggcaaagcaaccgattgatctactcatccagccgaaatggagaatcattgaccaatccagtctcggcccatattttgatgcaaaacaatcatttgcgatagatgatacgctgtgcgcttctgtcgggaaaggtttatctccggcgaccgcgcgttcctgggtgcaccatgacacgattgtgctcggaatccaggatacaaggctcccttatttacaagaagggatttcattgcttgaagaagcgggctatcaagccatcgtccgcaattccggcggactggccgtcgttttggacagcggggttttaaacgtttccctgatttttcaggataagaaaaacggaattgatatcgacagaggctatgaagcgatgtttgagctcgttaagcgaatgctgtcatcctatgacgcagcaatcgaagcctatgaaatcaaaggctcctactgtccaggaagctttgatttgagcatcgggggaaggaaatttgcgggaatttcccagaggcgcctgagaggcggagtggctgttcaaatttatttgtgcgctgatcaaagcggaagcgggcgcgctgagctgatcaaacgcttttacgacaccgccttgaaagacatgcgcgggaaaacaaaagccgtttatcccgatattcgcccggaaacgatggcttcgctttctgagcttctcaatgaagacatttcggtgcaggacttgatgctcttgcttctgacacagctgaaagagctgggcggggagatttatcaaggccctctcacgcccgcagaagaggaagtgtatgagaaaaaccttgtccgcatgattgaacggaatgaaaaggtttttggatag

SEQ ID NO: 4479 - DNA, 1206 bp, Bacillus licheniformis
ttgcggacacaagtgggaattatcggagcgggacctgccgggcttatgctcgctaacctgctccaccgcaggggaatcgaagcggttgtgatcgaatcccgctcgcgaaaggagattgaagagaccgtccgtgcaggcgttctagaacagatgacggtagatttgctgaatgaaacaggtgccggtgaacggatgatgaaaacagctatgtttcatcaaggaattgagattcgctttggcggcaagcggcacagaattgatatgcacaagctgacgggggggaaatacattgccatctatccccagcatgaagtgatcaaagatttaaccgccgcccgcctgcaatcggaagggcgcatcgttttcaatgtgtctgacgtccgcctttcaaatattgatacagaagcgcctgtcatcacttatcagaatgaaaacggcgatacagaagaactgaactgcgatttcatcgcagggtgcgacggctttcacgggccgagcagacaaagcattccgaaggagatccgcaaagagtacgaaaaggtgtacccttacggatggctcggcatattggctgaagcccctccgtcctcgcctgaacttgtatatgcccatcatgaagacgggtttgccctcgtcagcacaaggacaccggaaatccagcggctttacctgcaagtcagtcctgcagattcagtcgggaactggccggacgaaaggatatgggagaagcttcacctaaggctgtcggccgatgacggatggaagctgactgaaggcccgatcattcaaaaaaacattgtctcgatgagaagctttatatgcgatccaatgcaatacggcagactctatttagcgggggatgccgcgcatattgtacccccgacaggtgcgaaaggcctgaaccttgcgatggcggatgtccagcggcttgcatgggcgctcgaagactattacgaaaccggaagaatcgaacggctggccggctattctgagtcttgcctccgccgcgtctggaaagctgaacgcttttcctggtatatgacatccctgctgcatcgccatcacggctacaccccttttgactaccagattcaattggctgaacttgaccatgttacgacttcaacggcggccgctcaaagtcttgccgagaattacgtcgggctgccgcttgaattcggagaaccgtctttaagcgtcacttga

SEQ ID NO: 4480 - DNA, 969 bp, Bacillus licheniformis
atgaataccgcagcattagctgatgacagagtattcgccgaaaaaaacagagcggtgattgtagccgctatgtattgcggctattctgcaggcggtgtgctggcttccctcgtcggcatgttcgccgtgcccgtgacaagctggagagtgctctatctgatcggagccgtgccgctcttcgtgctcccgttctttttcagcaggtttcccgaatctctgtcattttacgttttgaagaaaaagacgaaagcgctggctgagattttcaatcaggtgcatccggcgggacgctacagggaagacgacaattatcaaatctcggtgattgcgaaagaaaagaaaggctttccggtaaaaaaactgtttggacaaaaacgtgcagccagcacattcgcattctggctttccgttttcagctgccttctcatggtttacggcttaaatacatggcttccgaaaatgatgcaggcgtcaggctacgggctgtcgtcaagcttgtcattcaacttggcgctttgctgcggacaagccgcaggagcggtattcggcggatatttggcagataaagccggccataaaaaagtgcttgcggctatgtatgtcatcggagccttttgttttgcagcatttggaatgacgatgaaccccgttcttctgtacttgctgattgccttaggcggggcatgcaccgtcggagcgcaaaatatcgccaatccttatatttctgagtattatccgaaagaaatcagagcgaccggcatcggctgggcgctcggggtcggcagactcggagcgatcattgcgccttcgctgtttgcattgatccttgcttccggcatggagccgaagcaggctttcatggtgttcgcgatcccgagtgtttttgctgcactcggcatcatgctcgtccaagagaaacacgcttcatttgattttgtctctaagtcggaaagcgcgggtatacattag

SEQ ID NO: 4481 - DNA, 1476 bp, Bacillus licheniformis
atgaatgttcaaactccatcggaaaaactcgtaaaaccttttgactgtcagcactacataaacggcaggtactttccttcagagaaaggcagcacgtttgacaacatcaatccggctacacaggaaattatcggaagcgttgcggaaggaggcaaaaaagaggtcgatcttgcagtcgcggcagccaggcgtgcattaaacggacgctggaaaaacatgaccgctgacgaaaggattcggatcatcagaaaggtcggcgacatcatacttgagcgtaaagacgaactggcgaggcttgagacattggatacgggaaaaccgctttcgctctcaagcactttggatattccacgtgccgctttcaactttcatttctttgcggattttatgagaggagccggaacggaagcttatcaaactgacgatcttgcaatcaattatgcgattcgccgtccggtcggcgtcgtcgggctgatcaatccgtggaacttgccgcttcttttgctgacgtggaaattggcgccttgcctggcggcgggaaatacagccgttatcaaaccggctgaactgacgccgatgacagccacccttctcggggaaatctgccatgatgcagggatgcctgacggagtcgttaatatcgtccacggatttggaccagattccgccggtgctgcgctttctgagcatcccgatgtcgatgcgatatctttcaccggagaaacgacaaccggcaaagtcattatggaagctgcttcgaaaacattaaagaaactttcctttgaattgggagggaagaacccgaacattatttttgccgatgccgacatggatgaagccgtcagcacctcattgaaatcgagtttcgtcaaccagggggaagtatgtatgagcggctcccgcatctatgtcgagagggaagcgtatgacgaatttctgaacaagttcgttgagaaaacgaaaaagctcaaagtcggcgatccttttgatccggacacgaatatcggcgccttgatttcttctgaacacacagagcgtgtgatgaactacatcgaattggccaaacgggaaggcggcaatattttaaccggaggaaaacgccctgaaggacaggaatccggctgctttcttgaaccgacgattatcaccggactttcacgcaattccaggctcatcaaagaagaaatcttcggtccggtcgtaacggtgattccgttcgacgatgaggaggaagtgattgcacaggctaacgacacacattacgggttaagcgcgaccttatggacgaacgacctccgccgggcgcaccgcgtagccgggcaaatcgaatcgggcatggtgtgggtcaacagctggtttctccgcgatcttcggacgccgtttggcggcatgaaacagagcggactcggacgagaaggaggcattcacagcctcgaattcttcagcgaattaaccaatatttgcatcaagctgtaa

SEQ ID NO: 4482 - DNA, 123 bp, Bacillus licheniformis
atgttcctctatgcggaacaaatcagacattttttccgaaaatttgatattttccgcttttttattttttatatcgtgttatattatggaataaaaggaaacaaaaacaagggagagagttga

SEQ ID NO: 4483 - DNA, 780 bp, Bacillus licheniformis
atgactgttgagacgaaggaccaccagctgctcggttcagtaaaaaatgcgcttcggctgcttcaatcgtttaccttagacacaccggaaaagaaactaaccgaactcgcctcgtcgcttggcctcggaaaaagcacggtctcgcgccttttgtctacattggaaagcgaagggtttgtcatgaaggacccggaatccagaagatacaagctcggcttatcggtcctgcagttaaacaccattgtcaactccactcttgaaatcaaccgcgaatccctgccggtcctcaaacggctgaccgatgagaccggcgaaacgtcgcatatcgcgatgcgccgcggtctcagcgtcgtttatctcaatcggacggaatgcccccgcccggtcgaacttctctcatatatcgggcggcaaaacccgatgcactgcacaagctcaggtaaggtgcttctcgcctttgatgaagagggcatattggacgagtatgtgaaggaaggcttgaaaagctgtacgaaagaaaccattacagacggggacaaattgagggaggtgctgaaaaccgttaaagaaaacggatttgacgtcagttgcggggaattcatagatggtgtcacatcaatctcagctcccgtcagaaaccacgcaggtcgagtgttgtacgccgtcagtgtcgaaggtcctgcaaaacgcatcaaggcccggcaggcgaaaatcatttaccaagtgaaacaagcggcccgggatatttccgaaaggatcgggtactggaaacgaatataa

SEQ ID NO: 4484 - DNA, 951 bp, Bacillus licheniformis
ttgtatgatcttcacacgcactttataccgcgcgatgtgctgctttggctggaagacaatgaaaagagagtccacgctgtccgcgaaaaaaaggctggatgccaagcggattttttgacggtcaatcacaaatggggctttgaattaaaagagcttttctaccaggaggctttatatttggaagcccagcaggaggccggcgtcacacactcattggtatcgccggttccccagcttttcctttacgatctcgccgaagaaatcacggacgaattatcttttgtatacaacaaagcgcttgccgaatgggttaaaaaatacgacggccgcctctcgggactcggcacagtcccgctgaacagcccttcaaaggcgagcgagcgcctgaatgaagcgatgaacaacgggcttaaaggagcgattatcggacccggcgcttcgcaactacttctctcggacgaagcatttacaccgttttgggaaacggctgatagaagaaaagcgattatctttatacatccgctcctttctgaagatccgcggctccgccgcaggatgctgccaaacttgatcggcgttccgtgggaaacgacgatttgtgccgcagaccttttgttaagcgggtttacagaccggtttcgcaatgtgaaaattcttttggcccacggaggcggctttttgccttatcagatcggaagactgaacaaagggtatgacaaatgggccggcgtttcttcatcgctttcggctccgccgcgcgaatatttgcggaagttttggtttgatggtgtgctatgggagcaagaaagcgcggcatatttgaagaagcttgtcggagaagaccgccttgttccgggttccgattttcctttcgacctttgtcagtggccgcctctcgatcccggccggaaaggagcggagtctctgctgaatgtagcgattgaagcataa

SEQ ID NO: 4485 - DNA, 972 bp, Bacillus licheniformis
gtggcagatctatttacaacagtgcagggaaaagtagcaggaaaaggagttaaaatcgtatttccggaaggtttggacgagcgtattcttacagctgtcaacaaattggccggaaacaacgtgttaaagccgatccttgtaggaaacgagcaggaaatcaaagataaagcaaacgggttgaatttaacgctggatggcgttgacatatacgatcctcatacatatgaagggatggaagaccttgttcaggctttcgttgaacgccgcaaaggcaaagcgacggaagagcaggcccgccaaatccttttagacgaaaactactttggaacgatgcttgtttataaagggcttgccgacggccttgtcagcggtgcggctcattcaacagcggatacggttcgcccggcgctgcaaattattaaaacaaaagaaggcgtgaagaaaacgtcaggcgtctttatcatggcgcgcggcgatgagcagtacgtattcgcagactgtgcgatcaacattgcgcctgacagccaggaccttgcggaaatcgcaatcgaaagtgcgaacacagcgaaaatgttcgacatcgaacctcgtgtcgccatgctcagcttttcaacaaaaggttcggcaaaatcagacgaaactgaaaaagtagccaacgcggttgcaatcgcaaaagaaaaagcgcctgagcttacacttgacggcgaattccaatttgacgcggcattcgttccgtctgtcgctgagaaaaaagcgccggactccgtcattaaaggagatgcaaacgtatttgttttcccaagccttgaagcggggaatatcggctataaaatcgctcagcgcctcggcaactttgaagcggtcggtccgattctgcaagggctgaacatgcctgtaaacgacctgtccagagggtgcaacgctgaggacgtttataatcttgcgctgattacggcggctcaagctctgtaa

SEQ ID NO: 4486 - DNA, 765 bp, Bacillus licheniformis
atgagcgaacagcaaaaaacgaatgaagccgcacaaacgcttgacggctggtatgcccttcacgatttccggacaatggactggtccgcatggaaaatgctttcaagcgatgagcgccagatcattatcagcgaatttaccggccttcttgaaaaatggggagctgcccaaaaagaaggaaacggaagccatacgctttacagcatcgtcggccagaaagcggacttcatgctgatgattttgcgccctacgatggaggaattaaatcaaatcgaactcgagttcaataaatccaaactcgctgaatacacgatacctgcttattcatacgtatccgttgtcgagctgagcaactatatgggaagcggagacggagacccttacgaaaatccgcaagtgcgggcgcgcctgtaccctgagctcccggatgccaaatatgtctgcttctatccgatggataaaagaagatcgggcgatgacaactggtacatgctgtctatggaagagagaagaaacttgatgcgcagccacggaatgatcggacgcggctatgcgggaaaagtaaaacagattattaccggctcaatcggatttgacgattatgagtggggtgtcacgctcttttcagatgatgtgcttcagttcaaaaagctcgtctatgaaatgcgctttgatgaagtaagcgcccgctacggtgaattcggttcgttctttgtcggcaaccgccttgcaaaagaacagctgcctgcatttttgcatgtgtaa

SEQ ID NO: 4487 - DNA, 282 bp, Bacillus licheniformis
ttggccagcaccatcttaaactccgcaatgcccagcagatcaattgtaagcggcagccttaccgtttttccgttgttcaaaatttgccctgttgtcagcgctcttccattcaccgtatctttcgttgtggcggaaaatcccgacggcaaagtaaattcaaccgttcccagcgccaagattgagttaggacgatatgttaactcaatatccgagaacgaccactcctgtttgctggcgcctgttatcaccgaatacaaggaagcgctcgcagccgggcggtag

SEQ ID NO: 4488 - DNA, 204 bp, Bacillus licheniformis
atgtcaatcataaactcggttcgtgatgcttcaataatgtcaataatgtacagccagatccatcgtttgtcaacaaaaaatcaggagaatgaagagaagggaagcgggcaggccttttgtcctttactaaagcacagcggagaaaatcaagaggaacaacgcctggttaaattctattattttgcatttattttaaaaatatga

SEQ ID NO: 4489 - DNA, 1347 bp, Bacillus licheniformis
atgcctaaattggtttcttcaaatcttgtaaaaggtaagatcatcaatattagtccgccgcagacgctggctcttagtttcttgattatcattgcgatcggggcttgtttattgaagctgcctggcgcctccactacttatatctcatgggtggatgctttatttacggccacctcggcaactacggtaactggccttgttgttgtagatacaggggcagattttacagttttcggacaaaccgttattatgtgcctgattcaaatcggcgggctcggcttaatgacgtttgccgtcctcgtcgtcatgatgatcggcaaaaaaatcggcttgcagcagcggattcttgttcaagaagcatttaaccagacttctttaggcgggcttgtccgcttggtcaagcacctgtttattttcacgattgtcatagaatttgtggcgtttctgatcctttcgatcagatgggttcctgaatatggtttgcaaaaaggcttgtttcatagtttgtttaacacgatttcagcctttaacaatgcgggattttccctgtggcctgacaacttgtctcaatatgtcggcgatccgattgtcaaccttgtcatcacaggccttttcattacagggggaatcggctttaccgttctgctggatttatggacaaagcgaaacttccggaaattatcgctgcattccaagctcatgatcgttggaacattgatcatcaatacgacagccgcgttgctgattttcattttagaatactcgaatccgggtacgctcggcggactgcctttggccgacaaaatgtggggcgcttacttccaaggcgtgacaccgagaactgccggattcaatacgcttgatatcgcccagatgacaacgccgtccctcctgttaatcatcgttttgatgtttatcggagccggaagtgcgtcaacgggaagcggaattaaactgacaacgtttatcgtgatgatcttggcgacgatcacctttttaagggggaaaagcgagacggttgtgttcaaaagggcgattaagatgaaaaccattttaagagctttagccatcattgtgatcagttttttattcgtgcttttcgcattatttatattgacgatcacagagaatgccccatttttgaaaatcgtctttgaagtattttccgctttcggaacagtcggcctgtcgatgggactgacacctgatttaacggccgcaggcaaagcggttatcatgatgatgatgtttatcggccgcgtcgggcctctgactatggcgtttacgctggccaagccgaagaaggcgccgatccgccatcctgaagatgaagtgattacaggctaa

SEQ ID NO: 4490 - DNA, 537 bp, Bacillus licheniformis
atgaaatttaaaaaaaatcagtttcagccgcttcaggagcttgagatgccggatttccggcagcaaatgggccccaatccttatccgcagatggggcagatggggcaaatgtaccagcagcagggacagcagcctttcacccaaatgggagggcagcaatcgtatcagcagcccggtccccagctgacccagccgcagccggcaggcgtccaggtccctccaatgccttcaggacagcagccttcaccgagcatcccaggcatgctgccgcttgagcaatcctacattgaaaacattttgcggctcaatcgcggaaaagtggcaaccgtatatatgacattcgaaaacaatccggaatggaatgcgaaagtctttcggggagaaattgaagcagccggccgcgaccacatcattttaagcgacagaaaaacgggcacacgctatttgctgctcatggtgtatcttgactatattacgtttgatgagccgatcacttatgattatccgtattcaatggcctcatatacaccaagataa

SEQ ID NO: 4491 - DNA, 1146 bp, Bacillus licheniformis
atgaaagaaatgctatggcttgtcaaaaacacactgaatgtcacttttaaaaagaagatcaatatctttctgtttgtatgtctgcccttgctaggcatattcgtatcgcttttgacagagggaagcatggaaaagacggatttgcgcgtcggaatcatcaatcatgacggcggacgaatcgccgaagatactaaggattttttgaaggggatcgagaatgtcaacatcagtgcggtcagtgaagcagaagggaaaagtcaagttgcggcaggggagattgattgcgtcattacgtttgaacaaggcttttctcaaagcgtgcagagcggcgaaccggctcacatcgcaatcgcatctgtcaaaggcgctgaaatcaccggattcgtgaaatcgtatgtctatcattatattgataatatcgccgcaatcggcaaatcggcgcaggggaatgaaaagcgctttgaggaaatgtataaaaattaccggaattctgaaacgagtgtcaaaacatctacgattgaagacacggcgaaaaatagaaacatgacggagcggacggtcggttttcttctgatggcgatgcttttttcagcgggaagcttgaccgaactgttagtaaaggaaaaagagaacagaacgtatttcaggcttttgaccacaccgataacggcaaggcagtacgtcatgtccaatgtggccgtcagtatgtctgtcatcacatgccaaacctttttaacattgattatggtgaaatatgttttccggatggaaaccggcatctcattttgggagatggcagcggtgctgctgatctttgcgctgagcgcggtcggcctggcattgatcacagtcgtctttgcaaacagctccaggtcatccggggtattgcgaaatttgatttttatgccgacgatcatgctgtcgggatgtttttggccggttgaaatcatgccgtctttcgcacagcgaatcgcggactttcttccgcagcggtgggtgttggatacgctggcaaaattgcaggagggacagcagcttcaaggtctgtatttgaatatcatgattctgtttgctttcgctgctgtctttttcctcatcgtcatttacaaattcaaacgcaataatgatgtgagaaacttcgcttaa

SEQ ID NO: 4492 - DNA, 1122 bp, Bacillus licheniformis
ttgaatacactcatcattgcgaaaaaagaaattgtatctgcttttcgggacaaacggacgttcctttttatgctggcatttccgattgtactgattatgattttaggcactgcgctgacgaatgctttcgatcaacaagcagcggtcggcgaggttcgtgttttgtataaagacaattctgacggagcgttttcgcaaggctttaaaacattcgtaaaggaagcgaaaacatccggcgttcattttaaaaaagtgttgtccgatatggatgaaaaacaagaaatcaaacaggggaactacgatgcttatcttgagatcgaaaacagcggcatcaagctttaccaaatggataaaaacagtatgaaaaacagcattattcaaggaatgctgaccgcgtttgcaaaccggtacaatgccgcagcggagatcatcaaagctgctcctgagcaagcgggcgccgtgctcggggacgcaccgggcgacaattatatcaaggagacgtcgctcagctcagacagaaagcccagctccatggattattatgcggttgccatgaccactctgatcgcgctttacagtgcattaagcgccagctatttaataaggggggagcggcttagaaaaacagccgaccggctgatcgcggcaccggttcataaaggcgagatctttgcgggtaagctgatcggcaatcttgtgacaaacggattgtgtatttttgccgtcgtcgcagtcagcaaatacgtatttaaagcgtactggggagagcatcttgggcttgtagcggccgtgctgttcagcatcgtattgtttgccgtatgcctcggcctcggcgtcagttatttgacgagaacgggggaagcggcagtggcgatcattaacgtgttgattccgctagttgcatttttcgggggcgcttattttcctgtcgacgatgcggaaggtgttttagctttgatcacagacctgtctccgctcgcctggacgaacgaagctattatgaacatcatatttgcggacgatttagcggcagggctgcctgccatcttgctgaacatcggcttatccctgttatttctgctgattgccgttgtctcattgcagagaagggaggggctgtag

SEQ ID NO: 4493 - DNA, 936 bp, Bacillus licheniformis
atgaatgtattggaaatcaatcatctgacgaaaaaattcggcgacttcgttgccgtcgacaatatatcactctcgatcgaagagggcgaaatatttggattgctcggcgcaaacggggcgggaaagagtacgaccattcacatgatttcgagtttgttgagaagcaatgaaggcgagatcacgattctcggaaaaaacattgcgaaacaccgcaagttcgccaagatgaacatcggcattgtcccgcaggatctggccatttacgaagatttaacggcatatgcaaatgtgaaattttttgccgggctttatggtctgcgcggggcccatttacacaatcgggttgaagaagcattgcagttcgtcggtttaagtgataagcataaaagcttcccgaaaaatttttcaggcgggatgaaaagaaggctcaatatcgcctgcgcgatcgcccacaggccaaagctgatcatcatggacgaaccgacggttggaattgatccgcattcgagaaattatattttggaatccgtcaaaaagttaaatgcgatgggatgcacgattatttacacgagccattatatggaggaagttgaagagatctgtactcggatcgccatcgttgatcacggaaaaattatcgccgagggaacgaaggagcagctgaaatcgatcattaccaacacaaaagatattcaagtcgttcttaaatctgcggaaaatatcgatatcggcgaactgaaaacgatcagcggcgtggaagcggccgttcttgaagacaatacgatcaaaatcaactcggatgcaggcgtcaataatttaaaccagattattgaaaagctgatgaaaaacggggccgagattcgttcattggaagaaaaagcgcctaatttggaaaccgtgttcctgaccttgaccggaagacagttgcgcgattag

SEQ ID NO: 4494 - DNA, 1107 bp, Bacillus licheniformis
atggaattgcggattatgaccggcaaactgattttgttgggatttatcatctatcaatgcgttttttcggaaagtgacaatctgccgtggcttgtgttcagccttcttgtttacgtctgtatcaacctcgggattgcgattttacctaaaggaaaaacaaaaaagctttttattatcatttctgtcatcatttcaatcgtttcttatgcagaagtgcaccccctatttattttattccttccttttaccctgtgtgaaggagcagccgattttgggctgccgaagtgggcggtacttgccgcttcaatcgttccggtcttgtttatcaatgaaagcatctcagcggtctacgcgttgacggccgcttttcaatttttactgtactgggcggcaagccatgatgcagcgcggattgaaaagcttgaacatcatattgatcaaacgagaagagacctgcagaagctgacaaacatgctgcgtgaaaacaaagagtttatcagacaatccgaatatacttataagcttgaggagcgcaaccggctttcccaggaaatacacgataaaatcggtcattccatgacaggagcgctgattcagctcgaagcggcgaagcgcgtccttgacatagacaaggaaaaagcttcagagctcctgcaaaatgcgattaacatctccaaggacgggatcgaaaatattagattgacgttaaaaagcgtcaagccgccctcagaacagatgggcatccacagattgaggctgtttatcgatgaatgttcggcgcagtaccatatgaatatttcatttttgcataaaggcgatttggatgttatttctcagattcaatggaagattatttttgaaaacatcaccgaagcgctgacaaactcggtgaaatatgctgaagcgacacatgtatccatctgtattcatgtgctgaatacgctcattaaagccgaagtgaaagacaacggaaaagggcggcagaaaatcaagaaagggatggggatcatcgggatggaggaacgggccgcttctgttaacggaaaggtgatcgttgacggttcaaacggcttctctgtcaccaccctgctgcccaagcatgaatga

SEQ ID NO: 4495 - DNA, 693 bp, Bacillus licheniformis
ttgcattttgacagaagggatgtgcacggcggaggaccggtctccgttcaaacgatgaaaattaaagtgatcattgcggatgacaattcattcataagagagggcatgaaaatcatattgagcacttatgatgaatttgaagtgctggcgacggtggaggatggcttgcaggcggtcgaattttgccgcgcccaagctgtggatattgcactccttgatgtccgcatgcccaacatggatggagtggaagctgcgcggctcatttcagaaacgggcgccaagccttttatcttaacaacgtttgatgacgacgaatacatcgtcgctgcgatacggaacggcgcaaaaggctatttgctgaaaaatgccgaacccgagcgaatcagagacgcgattaaaagtgtgttcaacggccatattgtgatgcaggatatcatcctcgacaagattaagtccaatttggcggagcataaagaagcggaacctaagatagacgaaagcctgtttaccgaacgcgagctcgggattatggcgctgatcgccagagggctgtccaataaagaaatttcgaaggagctgtttatctctgaaggtacgattgccaattatatttcctcgattttggggaaaacagggcttgaacatcggacgcaaattgcgatttattatttaaccggtaaagttaacttttaa

SEQ ID NO: 4496 - DNA, 378 bp, Bacillus licheniformis
ttgatcgtgaaattatttttgattttaggtgctgtcaatgctatgcttgcggttgctttaggagcgttcggagcccatggtcttgaagggaaaattcccgagaaatatttgcaaatctggcagaccggcgtccagtatcatatgtatcatgcgctcggtttaattaccgtcgcgctcatcgcgtcaaaactggcaggtgcggtaagcgtttctgcggcagggtggctgatgtttgccggaatcgttttattttctggaagtttatatgtcctcagccttacgcaaatcagcgtcctcggtgcgattactccgctgggcggcgtaacgtttattgccgcatggatcatggtcgttgtctcagtggtcaaatatttgtag

SEQ ID NO: 4497 - DNA, 1302 bp, Bacillus licheniformis
ttgaaactgctttttggggctttacaatggacggcatttattattgcgtccgcaatcgtggtgcccattgcaatcgggcagtcattcgggctgaaccagggagagaccgcgggggtggttcaaagcacttttttcgtgctcggcacaacggcttttatccaatgtttattgggacaccgcctgccgattaatgagagtccggctggcctctggtggggcgtctacacgatttatgccggtcttacagggaccgtattcgcgactcacatcgaaacgctccaggggctgcagggagcgatgctgctaagcgcggttttcttctttatttttagtttatttaaagtcattgataagctggctgtgatgtttactcctgttgtgacaggcatttatttactgctgctggtcatccagcttagcgatccgatcgttaaaggtgtcatggggatcggctaccggaaaaacgaggtcgatatacccgtgttttttctggcggttgtgattatgctggctacgtttctgatgagccggtcaaacgttccgattctcaagcaatattcaattttaattgcgcttttcggcggctggatcttatttgccgtattcggcgtggcgaaggcgcccgagcgtgcgaaccagctgttccaccttccggatatttttcctttcggcatgccgatgtttgacagcgggctggttgttacttcgttgttcattacagttttgttaatcgtcaatatgctcgcaagcatacgggtggttgaaggagcagtcaaacagtttgagaagctggaagagaggaagcgggcccgtccggccgggtttatcgcctctgtcagccatttgctgagcggactgctcggagctgtagggaccgtgccgatatccggagctgcagggtttattcaaacgacgaggatgtcttccaaaaaaccgtttttgctcgggagtctgatcgtaatcgtcatcagcttcttcccgctggtcatgaatacttttgccagcctgccgtctccggtcggttttgcggtgaacttcgtcgtgttttcaacgatggtcggcctggcatttgccgaattcgattcttatgaaaaggacgaggccggcaacatccgctttgttaccgggattgcgctccttgccggtgtgggggttatgtttgtacctgagagtgctttggaagggatgcatcctgtttttgtttccattttaagcaatgggcttgtccttggaacaatcgtagcgattgctgcggaacaaatacagcttaggaaaaagaaatatgacaatatcgtgtcatga

SEQ ID NO: 4498 - DNA, 309 bp, Bacillus licheniformis
atgaacatacatatatcaagtttgctgcaaaagatggaggacgaattgaaaaaagcaaaggaatgccaccaggaaaacgaattgaaaatgcacatcgcggtgatccgctccctttgcgacgtcattgtggaaccgcagcaggggccgtccgtccagtcttcgccttatgttcaaacggccaataaaccatcgagcgatcagctgatgctcgaaaaaatgatggggagcgccggtgctgaacaatacaaaaaacaagagaaacaaaagcatgaagatgacggcaacggagattctatttttgatttctag

SEQ ID NO: 4499 - DNA, 180 bp, Bacillus licheniformis
atgtatgttcatcaaatcgatcctccaaaccgttttcagtttccatttcattttaccaaattaacttctctcatgccgaatgcacttttcaaatattccttgcgaaaaattgcctctgctgctatgaagcattgtcttttacatttcaaaaaagaatattccccggcaaaacgcgggtga

SEQ ID NO: 4500 - DNA, 1383 bp, Bacillus licheniformis
atggcagaacgaacaacctccatcgaaacgaccgttaccgagcaaaagcaatattttttaagcggggcaacactagctgttgaaaatcgtctggaacagctcaacattctaaaagatgctgtaaaaaagaatgaacggaacatacttgaggcccttcagaaagatcttaataaatcagagcacgaagcctatatgacggaaataggcattgtactggaagaaatccgcttcatcagcagacgattaaaaaaatgggccaaaccgaaaaaggcgaaaacggccgtttcgcacatcggttcaaaaagcatcgtcattcctgagccttacggcacggttctgatcatcgcgccatggaactatccgtttcagcttgccgtctcgcccctgatcggcgcacttgctgcggggaataccgccgtcatcaaaccgtctgagcttgctcccgccgtatcaaccgttatatccgagatgatcaaagatatctttccgcccgaatatgtgtccgttattgaagggggagtgaagacaaaccaagagctcttgcggcaaaaatttgactatatcttttttacgggcagtgttcccgtaggcaaagttgtcatggaagccgcggcaaaacagcttattccagtcaccctcgagcttggcggaaaaagcccctgcatcgtgcacaaggatgctgatctcaagcttgcggctcaaaggattgttttcggaaagctgacaaacgcaggacagacttgcattgcgcctgactatctgctcgtacacaaagatgtaaaaaatgagctgatgcgcgctctgaaacaatcgatccaaacattttacggagaaaagccggaaagccatccggcttacggaaaaatcataagtaaacgtcatttcgaacggttaatccgctttttacaaaacgagaatatcgtcacaggcggaacatatcaaaaagacgcactcaaaattgctccgtccattatcgatgaacctgactgggaatcgccggtcatgcaggaagagattttcggaccgatccttcccgtcatcggctatgaaacgatcgaagacgttatccaaatggttcaaagccgccctaaaccgctcgcgctctatttgtttacgaatgaaaaaacggtacagaggcacatcctcagccggatttcatttggcggaggatgtatcaatgacacgctgatgcacacagccacaccttacctccccttcggcggcgtaggcgaaagcggaatcggaagttaccatgggtatcacagctttaagacgttttcccatgaaaaaagcgttttaaaacagacaaacctgtttgacatttcattccgttatccttcatcgaaaaacgggctgcggatcatcaaaaaacttctcaggtag

SEQ ID NO: 4501 - DNA, 678 bp, Bacillus licheniformis
ttgaaacagattttgaatgacagctggtggcaacagctgaaggacgagtttgataagccttattatcaagaactgagggaaatgctgaaaagggagtatgctgaacacaccgtatatcctgaaccgaacgatatatacaatgctttgcattatacttcctatgaaaatgtgaaagtcgtaattctcggccaagacccgtatcacggtccgggtcaggcccatggcttaagtttttccgtacaacccggcgtcaatccaccgccttctttgaaaaatatttttatagaattgcagaatgacatcggcgccgacatcccgaatcacggttctctcgtcagctgggctaagcaaggcgttctgctgctgaacaccgttttgaccgtgagacggggccaggcaaattcgcataaagggaaaggctgggaacagctcacagatagtataatagatgttttaaacaaaagagacaaaccggtcgtttttattctctggggccggcatgcccaaatgaaaaaagaacgaatcgatacatccaagcattttattatccaatcgccgcatccgagcccgttctcggctagaaacgggtttttcgggagcagaccgttttcaagagccaatcagtatttggaacaaatcggggatgagccgattgactggtcccttccgaatctttaa

SEQ ID NO: 4502 - DNA, 819 bp, Bacillus licheniformis
atgaacatatctatcgtagttgtcacgcataatcgggtcaccgctttgtgcgaattgcttgaatctattgcaaaacagtctgttgaaccgtttgaagttattattgttaatgatgccggggagagcgtcgactttgttgagcgcctttattcagagcttccgatcagagttatacatctgaaagaaaacgtgaagcatgtaaaagcgagaaatataggggtgaaagaagcttccggagatgttattatgctgtgtgatgatgatgattttttcacgccgtgccatatggagagaatgttgaatgcgctggagaccgccgattttgtttattcggatgctgagattgtgtcttttgaagaaaaagaggatatgagaattccgacaagccgttacctttttgcgtattcctttaacttggatgaaatgaggaagttttctacatatgttccttcaggaagtatgtacaaacgatctcttcatgacgaaatcggctacttcgatcctgccgtccacaattattgggattgggactttttcctgagagcggctgagcggtttcgcgtgaaaagagttcctttcgcaagcgtaatctatgcgttttcagaccagggtgacaaccagtccggagatcttggcggaatgaggcagtattacttggatgtcttgagtgaaaagcatcagcttggcaagctgccgacaaagaactttttcgtgctactcgaagaacctgccatgaaaaaaagggaagcggaaagcgaaatcgtctgggatggaaaaccggttgcatccaggctcaccgctgcaagacaattgaactaa

SEQ ID NO: 4503 - DNA, 813 bp, Bacillus licheniformis
atgacaatgcacaaagcactgacaatcgccggctctgactcaagcggaggcgccggcattcaggcggacttaaaaacgttccaggaaaagaacgtctatggaatgacggcccttacggttgttgtcgccatggaccctgagaacaattggaatcatcaggtgttcccagttgatacggaagtcatccgcgctcagctgtcgacgattgtggacggcatcggtgtagatgcgatgaaaacgggcatgcttccgacagttgacataattgaattggcggcagacacaattaagaagcacagcatgaaaaatgtcgtcattgatccggttatggtatgcaaaggggcaaatgaagtgctgtatcccgagcacgcaaaggctttaagagagcttttggctccgcttgccacggtcattacgccaaatctttttgaagccggccagctcagcggccttggagaaattaaaacggttgagcaaatgaaggaagcggcaaaggccatccacggcctcggcgcccaacacgtcctcattacagggggaggcaaactaaatcacgaaaaagcggtagatgtattatttgacggccgggatgcagaggtgatcgaaggagaaagaatcgacaccccatacacgcacggggcgggctgcacctactccgcggcaattacggctgagcttgccaaaggttcaaatgtaaaagaagccatttattctgcaaaagcgtttattacggaagcgattcgcgaatcgttccgtttgaatcaatacgtcgggccgacaaagcactccgctttacgactcagcggcaaataa

SEQ ID NO: 4504 - DNA, 267 bp, Bacillus licheniformis
gtggatcaaaaccagcagaaattgaccgctatgcgtttgaaaaaaatagcggaccatattgaggatacgagagaggaatacaatggtttgctcctccagatgaagaagctgatcggcggtattgaagataaaacaattccaaatgatgaggaagtacaaaagaaacttcaggacacttatgaacaaatgaaagaatatgctctttttgtggaatcgatcgaatctttcttaagatcatctgcaagaacgatcaaacgggaaagctaa

SEQ ID NO: 4505 - DNA, 1437 bp, Bacillus licheniformis
atgaatcaagatcaggagcttcgtcaaaaggcaatgaaccgggttgaagaataccgggatattgtaaaccttgatccctatcggctgcattatcatatcatgcctcctgtcggactgctgaatgatccgaacgggttcattcagtggaaaggggtgtaccatcttttttatcagtggatgccttttaaaacggggcacggtgcaaagttatggggacactactcctcagcagatctggttaactggcggcatgaagagatcgccctcacgccgagcgactggtttgataaaaacggttgttattcaggaagcgcgatcgctgaaaatgatgtgctgcatctgttttacacggggaatgtcagagacggcgagggaaatagggagacctatcaatgtctcgccgtctcaaaagacggcatctcgtttgaaaagcagggggttgttgcaaggcttccgaaagggtatacggctcatttccgcgacccgaaagtatggaaaaataacggcagctggtacatggtgctcggcgcccagactgaaaatcttgagggaagggcggtgctgtttcaatcggataatctgaaggactggcagttcctcggcgatatcacaggttcaaatacagatcagctcggggaattcggctatatgtgggaatgccctgacatgttcgaactggacggcaaagacgtcttaattgtctgtccgcaaggccttgaagcagaagagatgctctaccaaaacgtctatcagtcaggctattttgtcggtgaattgaacgagctgaaaccctggtttacacacggagatttcgaagagcttgaccgcggctttgacttttatgcgccgcagacgacaaaagacgaatcaggccggaggatattggttgcctggatgggtgttccagaccaagatgaacagagccagccgacgattccgcatcaatgggtgcactgtatgacattgccgagggaattgcatttacaaaacgataaaatcgttcaaaaaccggtcgaggagcttagaacgctccgccaaaacgaaaaaaacgcggcaatatcgcttaatcaaggcaccgaaaaattggacattgttcaaccggacaaagctgagcttttcatcagtccgaaagttattgaagagggttttgagatttccttcaggggtgcagcccgactcatatacaataaagcagaaggcatcataaccttggagagaaacagttatgttgatgaaaaaacggaagccagacagtgccgtttgcaggagcttcgcaatttaaacatctttttagacgcctcttctattgaaatcttcgtcaatgagggagaggaagtctttacggcaagatattttccttacccgggaaataatgatgtttggatcagtgccagaaaagaaatcataatgaatgtgacatcctggacaatggcataa

SEQ ID NO: 4506 - DNA, 1380 bp, Bacillus licheniformis
atgattcataaagaaatcgctgtacgtcttatacagcttcttggcggagaagataatgtcatcagtgcagctcattgtgcgacaaggcttcgtttggtgattaaggacgaagcaaaaatcgaccaggaaaaggtcgaagagctggaaggtgtaaaaggagccttttcaagctctggtcaataccagattattttcggaacagggcttgttaataaagtgtatgaacagtttgccaaagagctgaatcttgaccaaaaggaaacggttcagcacagcgatgccgcaaagggaaaaatgaatcctttagcgcgatttgcgaaaacgctgtcaaatattttcgtgccaatcatcccggccattgttgcaagcggtttattaatggggctgttgggaatgatgaaggcatttcagtgggtcgatcctgatgcggcgctgtataaaatgcttgatatgttctcgagcgcggcatttattatccttccgatcttgatcggtgtcagtgctgcgaaagagtttggcagcaatccttacctgggggctgtacttggaggaattttaattcacccgagcttgttcaatccttggggacttgcaactgcatcaccggatgtgatggacttttacggactcaaaatcgagatgcttggctatcaaggaaccgttgttccaattttgcttgccgtatatgtgatgagtaaaatcgaaaaaggcgtaagaagaatcgttccaaatgcgatcgatctattagtaacaccgtttgtcacgattatttcaacgggattcattgcttttatcgcgatcggtcctttaggaagaatgcttggtacagggatcacgaacattttaacatatgtgtatgacgttgccgggcctgttgccggactgattttcgggggaacatactcgctgatcgttctaactggtgtccaccacagtttccatgcgattgaggccggccttatcgctgatatcggcaggaactacctgctcccgatctggtctatgtccaatgtcgcccaaggcggggccggacttgccgtattctttttggcaaagcgtgcaaaaacaaaagaaattgctttacctgccgctttctcttcttttctcggcattaccgaacctgttattttcggtgtcaacctccgttaccgccggccgtttatcgcggcaatggccgggggagcgctgggagctgcatacgttgtctttatgaatgttgcagcaaacgcatacggtttgacgggaattccgatgattgcgattgtcgccccgcttggaatgggcaacctgatccactatttaatcggaatggcgatttctgtgactgtcgcatttatcacagcctttatcttaggcattaatgaagacgagaaaaagtga

SEQ ID NO: 4507 - DNA, 831 bp, Bacillus licheniformis
ttgaaaatctataaagtattgaacaacaatgcagcaatcataaaggaggatggtcaagaaaaaattgtcatgggacctggtatcgcttttcaaaaaggcaaaaacgataccattccaagaaacaaggtagaaaaaatttttaccattcatgaagaaaatgaaaagtttaaacaaatcctcgaaacacttccggaagaacatattgaagctgccgaagagatcatcagctatgcggaagggcagctgtccgcaccgttgagcgatcatatccacatcgcccttgtggatcatttgtcatttgcgatcgagcgagtccgcaaaggattcgtcattcaaaataaattgttaaatgaaatcaaagcgctttataaaaaagaatatgagatcggactctgggcaatcgatttggtcaaagaaaaactgaaagtcgaattgcctgatgatgaagcgggttatattgcgctgcatattcataccgcaaaaatggatgcggaaaacatgcagaagactctaaaatacacgaacatcatcaaagaattgatagaaaaaatcgaatgctgtttcaatcagaagattgacgaaaacagcatctcatatcagcgtcttgtcacgcatctcaggtatgccatcaaccggctggaatcaaatgaagcgtttcatgtcatggacgatgacatgctttatttcatccggcaaaagtatcctgaaagctaccgatgtgcggcagggctggcggattacgtaaaaactgaatatgatcttcatcttccggaatcagaagtcggatatattacgctgcatgtccagcgtttaaatgattcctataggtaa

SEQ ID NO: 4508 - DNA, 291 bp, Bacillus licheniformis
atgaaaggtttgatatcatttttaaaattatggacagccgtgctgctgaatgcggtgatgcctgtcagagaaaatcagatgaaggtgacggcgttcgccggcggtacatatcaggctgccgatgcttatcaggcaggcggcttttcggaaaaaagagaagagaagacagagcggatgtcgggctgtaagagaatgaagcccggcagttatacgacagaacccagccgggctgtttgcaaaaaagcggtgaaaagggtaagagccggaccaactctttacacgggaacttaa

SEQ ID NO: 4509 - DNA, 2421 bp, Bacillus licheniformis
tgagaaaaagtatcgtgcgctattttgttatggcttttattctattatttgcgttatccacattcctcaccggagtgcaggcaacttccgttcccgataaaaagtcgcctgagcttgagaaagctgaaatctacggtgatattgatgtgacgtctgataaacagacgacggttatcgtggaactgaaagaaaagtcgcttgccgaagcaaaagcggacggagaaaaacaaacgaaggcttctctaaaaacagctcgaagcaaagcgaaaagcaaagcgctgaaaacacttaaaaaagcgaaagtaaaccgcgaatacgaccgtgtattttcgggcttttctatgaaactgccggccagtgaaattccaaagctgctcgccgtcaaggaagttaaagcggtttatccaaacgcaacttacaaacctgacagcgtaaaaggaaaagacgtgacacttgcagcagacgccatttatccacagatggataaaagtgccccgttcatcggagcggatcaggcatggaaatcgggctataccggtaaaggcattaaggtagccgttattgatacgggcgtggattacacccatcccgacttaaagaataatttcggcccatataagggctatgactttgtggataatgattatgatccacaggaaacaccgacaggcgacccgcgcggcggagcgactgatcacggcactcatgttgcaggaacaatcgtcgcgaacggacagattaaaggcgtggcgcctgaagcaacgcttcttgcttaccgcgtgctcggccccggcggatcaggcacaaccgagaatgtgattgcgggcattgaaaaagccgttgcagacggagcaaaagtgatgaacctctcattgggaaattcgctgaacagccctgattatgcaacaagcatcgcactggactgggcgatggctgaaggggttgtcgccgttacgtcaaacggtaacagcggaccggaaaactggacggtcggctcgccgggaacatcaagggatgcgatttccgtcggcgcatcacagcttccgtataatgagtattcggtgacgcttccttcgtattcatcagcaaaggtgatgggataccaagaggaaaaggatcttgaagcattgaacggtcaagaggtggaactcgttgaagccggcctcggacaagctgacgatttctcaggcaaagatgtgaaaggaaaagttgcggttatccagagaggcgtcataccatttgttgataaggctgaaaatgccaaaaacgccggcgctatcggagccgtgatttacaataatgcaacaggggaaatcgaggccaacgtcatggggatggccgtaccgaccgtcaaattgtcaaaagaagagggcgaaaagcttgttcaacagatcaaagaagggaaacactccgttgtcttttctttcaaattggacaaaaagctgggggaaacaattgcctcattctcgtcccgcgggcctgtcatggatacatggatgattaaacctgacgtttcagcgccaggcgtcaacatcgtcagcaccattccgacccacgatccgaaaaacccgtacggttacggttcaaaacagggaacaagcatggcttccccgcatgtcgcgggaacggcagccatattaaagcaggccaaaccggattggacgcctgagcaaatcaaaggcgtactgatgaatacggcggaaaaactgacggatgaaaatggaaagcctctccctcacaatacgcaaggagcgggcagcatccgcatcatggaggcccttaaagcttcatccattgtaacgccgggcagccattcatacggaacattcctgaaagacaaagggaaacagacgaaaaaacaagcgttcacgattgaaaacctttcttcacacagaaaagcctatcagctcgaatactcctttaaaggaacgggcatcacggtatcaggaacggaacgagtcgtggtaccggccaatcaaacaggtaaagcagcggcaaaagtaaccgtcaattccgcgaaaacgaaagcaggcacatatgaaggcacggtttacatccgtgaagacggaagaaaagtcgccgaaatcccgctcctattgatcatcaaagagccagactacccgcgcgtcacatccgtaacagttgaaccgggagcaaagcagggcgcttacacgatcgaagcctacctgccgggcggggctgaagagctcgcatttctcgtctatgatgaaaacctgaaccttctcggccaggccggcgtttacaaaaaccagggcaaaggctatcaatcttatcaatggaacggcaaaatcaatgacgccgcatcccttaagtccggaaaatactatatgcttgcctatgcatccgccaaagggaaatcaagctacgtattgacggaagacccttttatcgtcgaataat

SEQ ID NO: 4510 - DNA, 123 bp, Bacillus licheniformis
atgaaggataagccgaataatacgataaaagaaagcatatacacgatgtcctccgattgcttttttcacgttttgaagagaaggggagcttctcctgaacgcattatccgtattttaacataa

SEQ ID NO: 4511 - DNA, 255 bp, Bacillus licheniformis
gtgtatatgctttcttttatcgtattattcggcttatccttcattattgtctgctttatatttttcacgactttgtacttcgccgtcaacctgcagaagcgcgagcccaagccttttcaaaaagctgcggagcaaaccgtcgataccatcatcctcattccgctcagctggctgtttaccgctttatacatatgcattctgtttattcttttcccaatccgccattttctcgatttttttcagcaaaaacgctaa

SEQ ID NO: 4512 - DNA, 1008 bp, Bacillus licheniformis
atgttgtcattaagcatactggatcagactcctgtttctgaaggaagcaaacctgaactggctttgcagcatacggtggagcttgcgcaagcggcggagcggctcggatacaagaggttttgggtttctgagcaccatttttccaggaacttggcagggtcaagtccggaggttctgatcggttatcttgcggctaaaacagagaagatccgtataggatccggcggcgtcatgcttccgcattacagcgcctacaaggtggcggaaaacttccgcgtcttggaaggacttgcgcccggcaggattgatctaggtgtcggacgtgctccgggagggatgccgatcgcttcaatggcccttcaaaatggaggaagacggatggctgaccaatatccagaacaaattcaggacctcgtcacatatttatacgatcaagccgatgaacatcaccgctttcccaacttgaccgcaacgccgaacatcgccacagcgcccgctgtttggctgctcggctcctcaggggaaagcgcaaggcttgccgcccaaacaggggcatcatatacatttgctcaatttattaacggtgaaggcggagaagaggcggccagactgtacaaagagaggttcgaaccttctgtattgggggaacagccaaatgtgatcgttgccgtatttgtgatttgcgctgagacagaagagaaagcggagaaccttgccaaaagcttggatttttctttattggccaatgaacaggggatggtgaccgaaggctttccatcattggaaacggccctgtcctatcaatattctccttatgaaagaaagagagtggaagacaatcgaaaacggatggtcatcggaacgccgcagcaggtaaaggaacagctgcttgaactggccggcgcttacggaacggacgaaatcatggcggtgacgatcacccacgattttcaagacagattggattcataccggctgctggccgaagcgtttcatcagtcaatttag

SEQ ID NO: 4513 - DNA, 168 bp, Bacillus licheniformis
atggataaactaaaggagctcccagtactgatgaatgagacgaagcaaaaaacgcacccgccagccgtagaagaacgctttgcaaaaggctgtttattcggaatccttttcagtctgcccttttggctgatgttttatcttttccttcaatacatgctgataagataa

SEQ ID NO: 4514 - DNA, 750 bp, Bacillus licheniformis
atgaataaaacgattgaaactattttaaatcaccgttcgatcaggtcttttacagatcggctcctgaccgaagaagaggttcgcctgcttgtggagagcgctcaaagcgcatcgacgtcaagctatattcaagcatattcaatcatcggtgtcacccatccggacaagaagcgcaagcttgcggaattggccgggaaccagccatatgttgaaaaaaacggccatctgtttgtattttgcgcagatctttacaggcatgacaaaatcgctcggaaaaagggtgtagatattacagcttctcttgaagggacggaaacctttatggtcagcgtcatcgatgcagcgcttgccgctcaaaatatgtcaatagcggccgaatcaatgggcctcggcatctgctatatcggtgggattcgcaacaatttgaacgaagtctccgagcttcttgaaacacctgaatacgttcttccgctgttcgggcttgtcgtcggccagccggccaacccttcggccaaaaaaccgcgtctgccgcttgatcacatttatcatgaaaatgtctatcaagcggatgatgccgagtttgaaaagcatttgtccgcatatgacgaaacgatttcaaactattatcaaaagcggacggacggcaaacggtctgacaaatggacagaccagatcaccggcagcctcaaaaagccgccgcgtgcgtatatgaatgaattcgttaaaggaaaaggtttgaacaaaaggtaa

SEQ ID NO: 4515 - DNA, 1176 bp, Bacillus licheniformis
gtgaaatccgtaattgaagaattagatgcattatttccggaaatgatcgaactaaggagacattttcaccaatatccggagctttcccatcgcgaggtcaatacaccgcgcaccattgcaaattacttggaaagcctcgggattggcgtgagaacgaatgtcggcggccaaggggtcgtcggtcacattaaaggcggccgccccggcaagacggtcgccttgagagccgatttcgacgctctgcctttacaggatcaaaaaaatgttccgtaccggtcgactgtccccggcgtcatgcatgcctgcgggcacgatgcccacacgtctgctctcctcacagccgcaaaagccctggcaaagcatcgaaaagacttgaagggaaatgtcgtgctgatccatcaattcggtgaagaggttacaccaggcggcgccaagccgatgattgaagccggctgtctcgaaggcgtggatgccattttcggcacccacatctgggctccgatgcccgtcggtcaagtcggtgtcaaatcaggcccgatgatggcagccgctgataaatttaaagtcacgatatccgggcggggcggacacggaggcgcgcctcacctaacgacagacgctttaatcacgggagcctcggtcgtcaaccatctccagcaaatcgtcagccgcagaatcgatccgacagaagcagccgtcttgtcgatcggaacatttcattcaggccaggcatttaacgtcattgccgaagaagcggtcattgaaggaacggtccgcaccttttcaaagcatgtccaggaaacgatcatcgccgagatcgaacgcgtaattaaaggcgtctgcgacagcaacggggcctcgttttcactcgattatgaaaaaggctacccgcctgtcgtcaaccatgaaaatgaaacggacatcgtccgtcaatgcgccaaacatgtcgtgggccctgaagccgtcatcgaactcgaaccgaatatgatcggcgaagatttctcttattatcttgaacatgtccctggatcattcttttttaccggcgcgggcaatccgcagactggagccgtttacccgcaccatcacccgatgtttgacatcgatgaaaaaggcatgctgaacgcggcgaaaattcttgtgtcggcggctctagcatttttaaaccaagactaa

SEQ ID NO: 4516 - DNA, 1170 bp, Bacillus licheniformis
atgggccagaagaaaaatacgacaagtccctattatcagggcgatttgatttttatattagccatgttctttttaatcagtgtgatcgctgtttacgctgcggagccgtctttttcaccgaagggttatccggcaaagcaattgttcttttatctgctcggtatttcggtgatcgtcggctttctctattttgatctggagcagcttgaaaagttaagcatttacatatatttattcggcatcttgtcgttgctcgtgttaaaagttagtccggagtcgatcgctccgattaaaaacggcgcaaaaagctggtttcaatttggtacgatcacgctgcagccgtcggaatttatgaaaatcggcctgattatgatgctggcttcggtgatttccaaagcaagtccgaaaggctcgcgctcgatgcaggaggatgttcgcctgttgctgaaaatcgcgggagtgtcggcggttccggtcggattgattttaatgcaggacgccggtacggccggtatctgcatgttctttgtcgccgttatggtgtttttatcaggcgtgaactggaagctgattttcatagtcgcgggatcgggcatcacgctcgtactgctcgttctgtttttggtgatcaattttccggagttttcaaaggatacattgcatatccagcaatatcagatcaaccgggtgatgacatgggtcgattcgagccagcaggacgcgaatgatacgtatcagaccgaaaaagccgttacggcgatcggctcaggagaaatcttcggaacgggcattaacaatttgaaagtatacgttcctgaaggccaaaccgatttcatctatgccgtcatcggcgaaagtttcggctttatcggctgtacatttgtcgtcatcatgtttttccttctcatttaccggcttgtcgtgctgattgataagatacacccgtacaacaagtttgcatcgtttttctgtgttgggtatacggcgctgattgtcatccacacattccaaaatatcggaatgaacgtcgggctgatgccggttacgggcgttccccttctgttcatcagctacggagggagctctgtattgtccgcgctgatcggctatgcgatcgtttataacgccagctgccagctgacgaaatataaaggctatatgtttaaataa

SEQ ID NO: 4517 - DNA, 1185 bp, Bacillus licheniformis
atgagtcagaaaaagaatattacaaatcccttttaccagggggatttgatttttgtctatattgtcttttttatcataagcgttgtggctgtgtacgctgctcagcagtttaatcaatataatgaaccctttgcgatgaaacagtccctttactatttactgggggccttcatcatcatcgtgtttctttattttgatttggagcagcttgaaaagctcagcttttatttctatctgctcggcattttgatgctgatcgtgttaaagttcagtccggcatatatcggatcatacaggtttgcgccggtcatcaacggtgccaaaagctggtttatgcttcccgggtttacgctgcagccgtcggaatttatgaaaatcgggctgatcatgtacttggcttccttcatgtctaaaaacggccctgtcggcaagcgtacgttaaaagaagactggatttttctgctgaaaatcgccggtatcatcattgttccgttcggcttgattttagagcaggatacgggtacagcagggatcgtcgcgtttgtgatccttgtgatggtatttctgtcgggcgtgaactggaaattgatctctcttatcttcggaacgggtcttgcagccgttgctttgattttatatgtcatcatcaaatttcccgatgttgcgggagcgctcggggttgaacaataccaaatcaaccgcgttatgacctgggtcaatccgagcgaacagaatgccgacgataaaatgcaggtcgaaagggcgcaaatggcgatcggttcaggaaaagtattcggaaatggtgtaagcgatcttcaagtctatgtacctgaggcgcaaacagactttatttttgccgtcatcggcgagagcttcgggtttgtcgggtgcacttttgttgtcatcatgtttttcttcttaatttaccggcttgtcgtgctcatcgaccgaatacatccgttcagcaggtttgcctcatttttctgtgcgggctttaccgctttaattgtcattcatacctttcaaaatatcggaatgaatatcggcattatgcccgtgaccggcgtcccgctgcttttggtcagctatggaggcagctcagtcgtagcaaccttgctcggcttcgcggttgtctacaattcaagctgccagttaacaaagtatcaaagctatatgttcaaataa

SEQ ID NO: 4518 - DNA, 150 bp, Bacillus licheniformis
atgcaggaagacggcatccgcttcctcacaaatgatatgacgtacaaaagaacaaaatgtttcgattttattgcgaacaaattcctattctattttaaaggatttttccaactattgtcgaatgtgataaattcattgatttttgcttga

SEQ ID NO: 4519 - DNA, 1356 bp, Bacillus licheniformis
ttggataaagcacttcaaaagcgtaaacggcttgatatcataaaatttttggtcccttcgcttatcggaattattctgtttatgattcccgttaaaattgaaggaaatttaacgattccaattgctgttttttcaaatgcattgcaggagctgcttcagcagcaattgccgctgatcatgacggtcatcgtaaccgcaacatttatcttaacctttatcaccaaaacctttcatccggctttcatcaaaaaaagcgagtttttctataacctgctgaatgtatctttattttggtatatcgtccgcctagtcggcatgattttcgccgtgatggcgtactttaagatcggacctgaagcggtgtatgccaagagtaccggcggaacattattattcagcctgcttcccgttctcttctccgtctttctatttgcaggcctttttctgccgtttctgttgaatttcggcttgctcgaactgtgcggcgctttgatgaaaaacctgatgaggcctgtctttaagctgccggggcggtcatcgatcgattgtatggcttcatggctcggcgacggcacgatcggcgtgctcctgacgagcaaacagtatgaagaaggattctacacgaagcgtgaggccgccgtcatcggcacgactttctcagtcgtctccatcacgttttgcctcgtgattatttcacaggttggccttcctcatatgttcgttccgttttatttgacgatattgctggcgggtgccgcagctgcggtgatcagcccgcggattccgcctttatcaagaaaggctgatacttatattacagatcaagcggatcaggatcaagagaagattcccgaaggatacactccgttccaatgggggctcagccaggctgtcgcaaaagcaaaacaaaatacaagcgtcaaagatttcttgcaggacggggctaaaaacgtactcgatatgtggatgggcgtcgctcccgtcgtcatggcgctcggcacagccgcgctgattgtcgctgaatatacgccggttttcaaatggcttggactgccgttcattcctcttctcgagctgctgcaggttcctgaagccgctgaggcctcacaaacgcttgtcgtcgggtttgccgacatgttcctgccgtccgtgctcggaagcggcattgaaagtgaaatgaccaggttcatcatcgcctgtgtatcggttacacaattaatctacatgtccgaagtcggcggccttttgctaggttccaaaatcccggtgacgttccttgacctcgtcttgatttttctcgttcggacgcttattacgctgcctgtcattgtactgtgtgcccactttattttttag

SEQ ID NO: 4520 - DNA, 261 bp, Bacillus licheniformis
atggatatgtttttcgcttacttgctgattgcaagcgccactcctttatttttatggctggacaacaaaaaggtcgcaatttcttctattccgcccatcattttaatgtgggtattcttctttttctatatgaccagcagcctttctcctacaggacactctctcatgatcgcactctttattctcaacgttgtcatcgcccatgtcgccgctttcatcatctacggacttccattgatccggaagcacatgagccgataa

SEQ ID NO: 4521 - DNA, 1200 bp, Bacillus licheniformis
atgaacttgatcaaatggattttgttttccgttatttcattcgccttttttcagccggcaccagccgctctattaaaagaaaaggacgactatactattcttgtttatatgattggttctgacatggaaagcgattttcatatggcaagcgatgacattcaggaaatgatggatgcgggttcatcttcaaacgtcaatgtcgttcttcagacaggaggagcaaaaaaatgggcgaacccgtcgatcagtcacaaggtgaatcagaggtggaaagttgaacatcagaagctggtgcccctcgaaaatgtcgggaagaaaaatatggacagtcccggctccgtcacagattttatcacatggggagtcaaaacatatccggctaaaaaatatgtattgatcttttgggggcatgggcttggctcagttgacggctacgggggagacgaaaacttcggcaataagaaaatgaaaataagcgagctgcagtcgggaatcaaaacggcctatgaacatacgaagcaaaagtttgatttaatcggttttgacaactgcaaaatggccgggattgaaacggcatatgccttgagggattatggtaagtacatgctggcttcagtcgactatacgaatcaaaacggctgggattataaaagggcgctgcagtctgtacaagacgacccttcaatcgatccgaaagagcttggcagggaaatcgctgcaggctacgtacagcagtcaaaagaaaacggtgaaacagaagacctgcagcagtctttaattcaattgaaccgtgtcaaagacgctgtcgatgccctcgacagattgagcgtaaacatgaacctggcattgaaagagcctgacggaaagcgcctgctccactacgcgcgtctcgctgctgaagattatgcagatgaatcggatatggttgatttggcggatttgtcaagcttgatcggtcagcagatcggagccgagaaagaagcaaaagaggtcgtaaaatccgtcaagaaggctgtcatcatgaacatcaaatctccggagcacccaagaggaagcggcatgtccgtttattatccggccagagacaaccataagcggtttgcggaaaaatcgaaaatataccgcctgcttgacttcagcagccggtatcaaacattcatcaaagattactcgcattcaacatttaactttgatctatag

SEQ ID NO: 4522 - DNA, 456 bp, Bacillus licheniformis
atgagcaatatagaagaacttcgtctttttcgaaaagaagatattgaatggctgcagacctggtttgaggatgcagaggtgaaaaggcggctggaagggatgctccctcttgacgaatggttcaattttgcaggcggtaatgaaaactaccgggtatgggcggctttagaggacggcaagcctgtcggcgttgtcatggttgaagttgaggaggacttgaccgggaacattgcccttttagtcgatccgtttttgcgcggagggggatatggaaaagcgctcatcaaaaggacgatggcattgccggaaatgagccggatcaacaaatggttcgccggaattgaagaggataacaagaggtgcttagcgtgcttccgatccgtcgggtattcattggaacacgaacagccggacgaagactgctactactctcttatttatttcccggaatcttaa

SEQ ID NO: 4523 - DNA, 1809 bp, Bacillus licheniformis
ttgctgaaattttattcgttttccaaaaagctgcctcaaaccgcttccatcatattttacggtttaacgttgttttggcgctgcgatccttttaagtcggcggttctgtttttaattacactgctgaatgcaatgctcggacctctcctagtctggctgagtgcagaggtgatcgatgagattgcacgggcgccgtttgagctgtcttcttggaatgcactggtttgggcggcctttgcatacattgcttttacgctgatcgtagatgcccttcagcctgtagctgaaatgcagaaaaggctccttaccgccaagctcgaagcttatcttgatgaaatgctcatgaaaaaggcaatttccattcctgatatcgcggcttttgaagacgcatcttttcataccaatacacaaatcatccgctataatgaatattttgtcacgatgtgggtttccatcgtgtctcaaaccttcggcggaatggtgatgattgcagccagcagtttattgattggcatggctgcaccgtgggtgccgctgctgtttctcatattggccgttcccaaactgtactgggaggcgaagttaaacaacgcgacctttgaaggacggaaagaggttcaggaactgaggcggcgcgcggaatattatgcaggtgtccctcttatgtctgaaacagccggagaggtcaagatatacaatcttgttcctttttttaaatccttttataaaaacacctcgatggagctcctccatacgctgtccaacgatcaaaaaaaactggcgctgtatcagctgttctggtcggtattacaatctttggccgcaggtgccgtcctgatttacatcgttcaccaggcttttcatgggggattatccatcggggatgtgatgctgtttatcggagccgcggttcagttcaatgaaggaatcaatgaaatgttcgctgcttttgcgatcggagcaagagaaacgaggcacctcggaaatgtgcattcttttttaaacagcaaaaattccatggaaaatggggaaaccgctccagctgttcaaaagcaaaaaggatttacatgtgatcaagtggaattttcttatgatggaaccaaaacggtacttgatattcaacagcttgatattccattgaataagacgaccgttctcgtgggagaaaacggatcaggcaaaagcacactcgttaaattgcttctgcgttattttgatcccaatcaaggcacgatctcgtataatggtttaccgctttataagtatgatatagagcattaccggtcaaatgccgcggccgtgtttcaggattttttgcggtacgaaatgacattgaaatacaatatcggtctgggcgacatttcttcatgcaccgacttggccaaaataaaaagtgcttcggctttcggcggagtggatcagtttttgcataagcttgaagacggctatgaaacagagcttggcagattgttcggcggcaggaatttgtcggggggagaatggcagcggatcgccatatcccgcgcatttatgcgtgatgagtctgccgacattttaatatttgatgaaccctcttctgcgctggatgtatttattgaggaagagatatttgataagctgcaaaagctgacgcagggcaaaacagtcattattgtctcgcaccggttaagcacggcccgttttgccgaccacatcatctttttagaaaaaggaagggtggcggaggccggaacccatcaagaattgatgaaaaatcaggcacagtacgcagagctttatcgcctgcaagctgaaaaatacgcgcaataa

SEQ ID NO: 4524 - DNA, 1935 bp, Bacillus licheniformis
gtgtggaagatgaagcatattcaagagccgctgcaaacggcgggcctgcttgggaaaatggtctggaaatccggtccgcggctgatgatttgcatggttatcttcatgctgatcgaagccggagcacctttaatccaattgtacgtttcaaagcaaatgatcgacggcattgtcgatcaggaagccgtcatctatccagaaatatgggctgtcatttatgcgggaagcctggtcatggtcagtgtcgttaaatcattggaaaaatgggtgaaggcaatgctttctgagaggtcgatgatcacagtcaacagtttgttgatcgacgcttttgaccgcattccggggatgcgtttttttgaggatccaaagtacagggaccggctggaaacactgcgggatcgttcgacatggcttccttcccaattcattaatatcagttcgaacttggtgaccgccgttatgtctttggcgggcgtcgttttgatcatcgcctatctgtcgcccgtccttgctttcatccttattttgtcgaccgctccatttgcttttgtccataatcattacaatgaaatggagtgggaatatcacaaggattatgcccctgtaagaaggagggccgcatatgcgcgccacattctgctcgggagacgatcggccaaagaagtacgcctttttggcctggggtctttctttcttgatttatatcaatctgcttttaaaggcctatattctgtgctgcggaatattcaggtcagaagcgcgcgctggtcggttttaacgggtttcttatcgggggcgggaacgggtttggggtacttttggattctgtcccaatcccattcaagcagtttttctgtgggggatatatcgctgtacttgggggccgtgttccaattatcaacggcactccgggatatcgccaaagaaggtgcagatacgttggatatatggagaatgggaagagacttttttctttttatgaacgccgaaaaggatatcaggcttccttccaatggcgaatctctcgagggcgaaggaccgctggcagtcgaattcaaaaatgtcaccttccgctatcctttcagagaagcggctgccggctcccgggtaaatgaagctgatgtggatgaggaagacttggatatgctcgatgagcttgaagatgaagagatgcggggacaagacgaacagcctgaatcgtatgacatgcacacaggcgatgttctgaatcgaattagcttttcagtatcaccgggagaaagaattgccattgtaggggcgaatggatctgggaaaacaacgctcatcaaactgctctgccgtttttatgagtatgatgagggtgagattaaagtgaacggcaaagacatccgcaaggtcgatcttcaacagctgagaaacaaaatggcggtcgtgtttcaggagtttggcagatacgaattgtcactccggcacaatatcgcgataggccgaacggaagctttaggcgatgaagaaaaacttcgcgccgccgctcgggccgccaagctggaaccgattgtcgaagagttgcctgaagggctggaaacaatgatcggccctgaatggggcggcaccgatttttctggaggccaatggcagcggatcgctttagccagatcgtttatgaaagatgccggacttgtcatattggacgagccggccgcatctttggatattcgggctgaatatgatattttccggcagtttcaaagcttcacagagggaaaaacggtgatcatgatttcccatcggttcagtacggtaaagatggctgaccgcatactggttttgaaaaacggaagaatcgcagaagagggaagccatcaggaacttatggacaagaacggggaatacagcagaatgttccgcatgcaggccaaatcgtttcaggggaaggatgaggtatattgctga

SEQ ID NO: 4525 - DNA, 2001 bp, Bacillus licheniformis
atgaaaatatggtttggaatgcagggaaacaacaccgctttatggcaagagtgggtttccgccgtcaagaaatggggacgggcggaacggattcacagctacagctgcgggatcgcaaacatggctgaagcgcatatccgatacgatgaagcttttagaccttcaactcaaataaatcttttgcaccccgtcatcttagacggttggatcagcggcggtcttaacgcaaaatcggatggcacccgaaagatcgagcaatatgacaagctgtacgcatcattgaagcaggacaaagctgccatgctgtctcactcgcatggcgaatatacgatggtctggtgggatgacagtctgcatagccttgttttggcgactgatacatacgcaacccgtccggtttactactgggtcagtccgaaaggagaatggtatgcagcgaatgacatgcgcatccttttgcttgttcatgacattccttttgcgatcgatcaagatgtgtgcagaatgtttcctacttcgggctttgctgtaggagaaaacggctttgaagatcggacattttttaaaggaatacgcaaagtgcctgcggcgtcctacgcttttctcggccgggatcaagcggttcacgtgcacagctattgggggcttccgcagctattaaacgagaaagatcttgctggagacgctgttccgaggttccgggagctttttcaggaagtgacagcagatcgtttaaaggatgaaaggcatattgtcgaattaagcggcggactggattcagctgccgtaaccgccgccgcagttgcaggcggacgcaaggaacagctgctggccgtcaatatatcatttgccgaacccgacatgatattaagccacgacagggaccttgtaaagaatatgatgcgagatatggatatccccggcctgatcattcttggagacgctacagccaaaattccaaacgcggaaattgggcgtgatccgctttggtttgtagacggtcctgatccgagagccaattcactggttaatgagacttttacagtgatcgctgaggagtatggtgcctcgtctgtccttacaggtgagggcggggatttcatttttagcggagaagtgtcagtgatcgattccttgcttcggcagagacggttttctgaaatctacaaattgcttcgcgaatggtcaggcggcagcatgaaagagatgctgaagctcggatttcaatacggaatcgcccctttcatgccttatattggagaaaagctctattacgacctgctgtggtcagatacggaatatgagctgcctgaatatttcactgaagaacaccgaaagagagaatgggagatcaataaagaggatcatctacgctatcgaaaaagccgggagctctcagtgtggggcaagaggtttcactatgactttttgtggccgagagcgaggtacatggatgctgttggtgtgacattgcatacgtaccatccatttttggaccggcggctgatcgagttctcattttctgtaccgcctgaacagcattttgatgttttaaaagggcttgatgaacattatgcaggctctaaaatgcttcttcgcaaatctttcaccgatatcctgcctgcctatgtttataacagatcaacgaaaacaacatatgcccatatggccaggaaaagctttatgaatgaccgcagacacgttcttcagttatttgagccgggagagcgcgtcttcgttgaagaactcggcatcattaagcgcgatatatggtggaaacacttgctggctatggctatccgctctgaagatccaaataatgatctgggcatgggctatcagtacatgagatctgttattgacttggaaatatggctaagagaagcatccaaggggaaggagcaccttctcgaccggagccgtccggtaaagccaagggtcatggctgatatcgaaaccgtcaatacgccggagaaagccaaaatatactcgtatcaatga

SEQ ID NO: 4526 - DNA, 465 bp, Bacillus licheniformis
atgaaaaaaagagcgcttgtcaaaaaccacgaatattttacaaccgttcatgcttttgtacgtatgatgctgttaaattatgactttgaagaagcttatgaaaaaattgcgatccacctgtttccgctgtatgcgagcgcaaagcaaagaggtgcagggcttcttgatatagacgaactgcaccggaacggcgaatatttgtattcccttgatgaagacgaccatttggtcacttcatgcgtttctattgcattaacgattcaatctatattattcagcaatgggtctgatgctgatctcatgatcggggtcaagaaaattgatgacaagctgttttctcacgcgtgggttcaaatggaaaacggcaaatcgatcgatccgaatcataaaaataagaatttaaaagttttacagacatataagatgagcgcttacgctgaaaggtgggtgttatctctagtatga

SEQ ID NO: 4527 - DNA, 273 bp, Bacillus licheniformis
ttgaaaattattcgaaatcaagagacagcgacaaccgtgttggaaaatgaatgcatcgtcctaaacctggacaatgggcagtatttcggattggaaggggctttaaaagagctgtggatcgaaattgaaaatgagcgaaaggataaaaaagatattctgatcaagtggcaatcggcgttcgatcagacggaagaagaactatcagcgatattaaatgaggcgatacaggaactgacacatcataagctcattaaaatagaggataaaagctga

SEQ ID NO: 4528 - DNA, 633 bp, Bacillus licheniformis
atgatacgcgtgttgttagtagacgactacagggttctgacatccggaatgaaggaaatattaaaaaaatataatatggatgtcatcgtttgccacgaaggaaatgaagctctcgacctcttaaaaaaccaagaggtacatatagacgtttttctttatgatttaaaaatgccggggatgaacgggttggaactgtctcttaaaacgctggaaatcgaacctcaatccaaaattatcattatgttttcgggagatgaaattcactcatattttaataagttgatcgaggccggagttaaagggtttatagataaatcgtatacagacagcatgatagcttcgagtattttattgtgtttaaaaggggctgtgttatttcccgacggcttgctgcaaaaactgaggctcgactccgatctctcggtggacgagcatttaacagacacagaactggatattttgcagaaggtggccagcggtaaaacaaataaagagatcgcagcagacctgcaaatgtcgacgcggaacgtagagtatcacttgagcaaaatctataaaaagctcaaagtaacgtcgcggtactgcgcagtaaaaaaagggacgatgcttaatttgatcaagcagaaagtatag

SEQ ID NO: 4529 - DNA, 117 bp, Bacillus licheniformis
atgcgcaaattggaaagtgctcaagttaaaagctatggttcattcctgactgttactctttctaaaaagagcaagccgggcgacggcaaattcggccgcggcgtaaaacgcggttaa

SEQ ID NO: 4530 - DNA, 366 bp, Bacillus licheniformis
atggcagcaaaacaatcggctgaacacagccactttccttggaagcatattgtcgggttcgtgttgtccattgtgctgaccttattggccttgtgggtgatctatacggatttaagcatggctgcaaagctgtggattattttcggttttgcgatcattcaagctggacttcagctcttaatgtttatgcatatgactgagagtgacagcggcaaaatccaagtcgggaatacgctgtttgccgcgtttattgcggttgcgattattgccggttccgtctggatcttcgctgctcacaactatcacggagacaaccctgagggcggttctccaggtgcaaaacattctgagcacagcggacattaa

SEQ ID NO: 4531 - DNA, 615 bp, Bacillus licheniformis
atggaacatgcagaacacagcaattctaacgctcctatggaataccgttctgaaatcggaaggttgaatatccttggcttttggatttttcttggagcggagattgctttattctctacgttatttgcgacctatgctgttcttcataacagaacagcgggaggcgtactgccggcagaactgttcgacgcgaagctcgttttaatcatgacgttcctgctgttaacgagcagtttcacatgcggcattgcagtgcatgaaatgcgccgcggcagtttgaaaggcgtgatgatctggatgatcattaccctgttgctcggtgctggctttgtcagctatgagctttatgagttcaatcattatgtacacgaaggtgccactttatcgacaagtgcttactggtcagcattctttgttctattgggaacccacggactgcacgtatcgatcggtatcttctggattatcggcatattgcttcagacgaaaaagcgcggcctcaccccgcaaacgtctgctaagctgtttatctcaagtttgtattggcacttcttagacgtggtatggatcttcatctttaccggtgtctatttgatagggttggtgaatgtataa

SEQ ID NO: 4532 - DNA, 1950 bp, Bacillus licheniformis
atgaatttgaaatgggacgaattcataattacaggtgacccattaattcttggagcacagatttccattttgcttacttcaattgcaatcgtatttgtgctgacatacttcaaaaaatggaaatggctttggagagagtggattaccaccgtcgatcataaacgtttaggaatcatgtacatcattgccgcagtcattatgttcttccgcggcggtgtcgacgggttaatgatgcgtgcccagctcacgcttcctaataacggctttttagattccaaccactataatgaagtatttacgactcacggtacgatcatgatcatcttcatggcgatgccgtttcttattgggttaatgaacgtggtcgtaccgcttcaaatcggtgcgcgggacgttgcttatccttacttgaacaacttgagcttctggaccttcatggtcggagcgatgctgtttaacatttcattcgtcatcggcggatcgccgaatgcaggatggacggcttacatgccgcttgcaggcaatgagctgagtcctggacctggacagaactattacttgctcggacttcagatcgcgggtatcggtacgcttctcaccgggatcaactttatggttaccatcctgaaaatgcgtacaaaaggcatgactctatggcggatgccgatgttcacttggacaacgctgatcacttgtgtgattatcattttcgccttccctgtcttgacagtggctttggcgctgatgacatttgaccgcttgttcggaacagcctttttcactttggcaaacggcggtatgccgatgctatgggcgaacctgttctggatttggggacatcctgaggtttacatcgttattttgcctgctttcggtattttttcagaaatcattgcaacatttgcgagaaagcagctgttcggctataaagcgatggtttattccattgtggcgatttcggttctcagctttatcgtttggctgcaccactttttcacaatgggcaacagcgcggcggtcaactcgttcttctcgattacgacaatggcgatatcggtgccgaccggggttaaaatctttaactggctgttgacgctgcatcgaggcagaattaaaatcacaacgccgatgctgtggtcgcttgcatttattccgaacttcgtcatcggcggtgttacgggcgttatgcttgcgatggcagctgcggattatcaatatcacaacacatacttcctcgtatcgcacttccactacgtgctgatcgcgggtactgtgtttgcatgtttcgccggattgatcttctggtatccgaaaatgttcggtcacaaactgaacgaacgcatcggaaaatggttcttctggctgttcatgacgggctttaacatctgtttcttcccgatgtatttccttggattgcagggaatgcctcgccgtatttacacatacggagcagaagacggctggactgcattgaacatgattgcgacattcggcgcattgctgatggccgcaggattcatcgttctctgctataacattttctacagcttccgtcattcaaaacgcgaggaatcaggagatgcttggggaatgggtcgcacgcttgaatgggctacatcttctgcgatcccgccgcactataactttgcggttctgcctgaggtcacttcacctgacgcatttgcgcaaatgaaggaagacaatgtcgagattcatcctgaaagcaagtttaaaaagattcatatgccgagcaattcaggccgtccgtttatcatgtcattatgcttcggatttgctggattcgggcttgtctttgaatggttctggatgggaatcgtcggtctgatcggtgtattcctctgtatgattcttcgttcatttgaatatgacgacggctactatgtaagtgttgaggaaataaaagagactgaacgaaagaatgccaagtaa

SEQ ID NO: 4533 - DNA, 960 bp, Bacillus licheniformis
ttgttcagagcatttaaaccactgattatgctgactctgctttcctccgtttttttattgggcggctgcagtcaaatcgcggtattggatcctaaaggaccggttgcttcgcagcaaagagatcttattctattatcgattggatttatgctgtttatcgtagcggtcgtatttgtcctttttactgtgatgattgtgaaataccgtgagcgtaaagacagaaagtctccttacagcccggaagtagaaggcaatacatttttagaaatcgtctggacagtggttccgattttaattgttattgcgctgtcagtgccgacagttcaaacaatttattctctagaagaggctccaaaagcatcaaaggacaaggaacctttggtcgtatatgctacatctgtcgattggaaatgggtattcagctatccggaacaggatatcgaaacggtcaactatttgaatatcccgacagacagaccgatcttgtttaaaatctcatctgccgactctatggcatctctgtggattccgcagcttggcgggcaaaaatacgccatgtccggaatggaaatggagcaatatttacaggcagaccatgagggtacttataaaggccgaaatgcaaacttcacaggcgaaggttttgcagaacaaaagtttaatgtcaatgcggtatctgaaagcaagtttaatgactgggtgaagaaaacgcagaaagaagctcccaagctgacgaaaacccagtacgatgaactgatgcttcctcagcatgcggacgaaatgacgttctcatctacacacctgaagtacgttaatcacggaaatgatgcggaatacgccattaaagcgcgcgaaagactgggctataaaccgttgtctccgcactctaaatcagatccgtttgaaaacgtaaagacaaacaaagatcaaaaacaatctgaagaccaagattctcactag

SEQ ID NO: 4534 - DNA, 990 bp, Bacillus licheniformis
ttggcaatattagtatgcggaggggcgggctatattggaagccatgctgtagcggaactgttaagccgcaatgaagatgtcgtaattattgataacctgcaaactggacatgaagaggcggctttaaagggagcttctttctataatggagatctgcgcgatgaagcatttctaagaaaggtgtttcaggaaaacgacattgaggctgtcatgcatttcgcggccgattcattggttggagaaagcgtaacagatcctctcaaatattatgacaacaacgtttacggagctgtttgcctgttaaaggtcatgaaagagttcgatgtgaagcaaattgttttctcatcaaccgctgcaacatacggagaaccggatcgggtgccgattatggaaacagatccgacggatccgacaaacccgtacggggaaacgaagcttgccattgaaaaaatgctgaagtggtctgaaaaggcatacggaatccgtcatgtcgtccttcgctactttaatgttgccggggcgcatgtagacggcttgatcggcgaggaccaccagcctgaaacgcacctgattccgatcattcttcaagtcgcgctaggcaaacgggacaagattatgattttcggcgacgactatccgactccggatggcacgtgcatcagagactacatccatgtgatggatctggtcgacgcgcatattctcgctgtcgagaggcttcgaaacggcggagaaagcgccgtatacaatctcggaaacggaacgggcttctcagtcaaagaagtcgttgaaactgcccggaaagtgacaggctgtccgataccggcggaggttgcagagcgccgcgcaggagacccggcacagctgatcgcctcttcggaaaaagcggtgaaagagcttggatggcagccgaagtacgccgaactggaaacgatcattgacagcgcgtggaagtggtttaaagcacatccgaacggctatcaaagctag

SEQ ID NO: 4535 - DNA, 108 bp, Bacillus licheniformis
ttgcttttttcattttaccaccttcagcattttccggcttgtattttcatcatttcttcaaataaaaagttgggggaaaaacgaattgagagaccttcattccattaa

SEQ ID NO: 4536 - DNA, 102 bp, Bacillus licheniformis
atgaaggaggcgaaaaaacttgggctgcaaattgaagatgtgaaagaatttcttcgcagtcagcccatccaaagcgatgctgaaaaacagataaagcaataa

SEQ ID NO: 4537 - DNA, 219 bp, Bacillus licheniformis
atggtatcaaaaggattaaggccaaaagctccgccccctttcaggagaaaggcaatcgaaaccgatacagaagaaagtgtatggggctgctggcatcagcgttggtcagcaatgcctctaaaacgccttaatcaatccggtctggtaccccttaagagagtgaagctggaaaaagtgaaacaacctatgtacagggcaaaaggtaaggctgctccttaa

SEQ ID NO: 4538 - DNA, 629 bp, Bacillus licheniformis
atgatgaatatggggatagcagcaatctgcggaagctcccgcgaaaacggaaatacggaagagttggtgaatcgattaggtagacggacttgatgccgataagatctacctgcgaaactatcacattgagcccgtatcggactacaggcacggcaatacagcccctttgtatcctgatgatgactacagagacctgatcagccgggtgctggagaaggatatcctgatttttgccactccgatctattagtacggaatgtcgggtttgatgaaaaactttattgaccgctggtcacagacattgattgagcacgggagatctgcatttaaacagcaaatggcgaaaaaaacgtctacgtcgcggctgtcggagacgatgatccccgcttgaaagggctgccgcttattcaacagtttcaatatatctttgattttatgaacatgacattcgacggctatttgctcggcaaagggaacaagcccggcggcgtggtgacagaccggacagcgattgtgtctgcaaatgaactgagaaggaagctggcagaggcggaaacggggcaaaagcatggcaaataaaaaggcgaacaaacggttttatttatggaaaaagcatttattcgagatga

SEQ ID NO: 4539 - DNA, 315 bp, Bacillus licheniformis
atgggagaaggcaaaatagattacagcaaagctgcggcatctccggagttccagcggttgttaaagcggaaacgggcttttattgtaccgatgacgattttctttttgctcttttatttcctgctgccggttatgacatcatacttcacatttttgaatcagccggcagtcggggccatcacgtgggcatgggttttcgcgattgctcagtttgttatgacgtggacgctgtgcattgtgtatacgaaaaaagccggtcaattcgatcaaattgcaagcgatttcaaaaagaagattggaggcgttgattcatga

SEQ ID NO: 4540 - DNA, 1539 bp, Bacillus licheniformis
atgagtgccacagcctttattttgtttcttgccattgtcgccctcacgcttgtcattacgtatttcgccgctaaacagacaaaaacggccaatgagttttacacggcgggagggggacttaccggcattcaaaacggactggctattgcgggagattacatgtcagcggcttctttcctcggaattgccgggatgatcgctttgaacgggtttgacggtttcttctacagcatcggcttcctcgtcgcttatttagttgtcctttatattgtggcagaaccgctccgaaacctcggtaaatttacaatggcggacatgattgcctctcgttttaaacaaaagaaaattcgcggtgtcgccgcattaaacacaatcacgatctccaccttttatatgattgcacagttagtcggcgccggcgcgctgatcaagcttctgctcggcatcgattatacgctggcagtgtgcattgtcggggttttgatgaccatctacgtcgtattcggaggaatgattgcaaccagctgggtccagatcatcaaggccgttcttttgatggcggggacgctcatcatttcggtcatcgttttttcaaaattcggcttcagcctgacgaacatgttcgaacaaatgaaaacagctactccgctcggggcggattttctaaaccccggcaataagtataaagttcctcttgaaacactttcactcaatttggcgctcgtccttggaacagccggcctgccccacattctcatccgcttttatacagtaaaagatgccaaaacggcaaggaaatcggttgtctcggcaacatggattatcggtatattttatattatgacggtctttctcggttttggtgctgccgcttttgtcggttttgaaaacattttagctgccgataaagcggggaatatggccgcaccgctgcttgctcaggcgctcggcggagattttctgttcgccttcgtctcagccatcgctttcgccacgattttggcggtagttacaggacttgtcctgtcggcggcttctgcttttgcgcatgatatatacagccagattatcagaaaaggcgcggctacggaaaaagagcaaatgattgctgcaaggtgggcttccatcggcgtatccgtcctttcaattctgcttgctgtctttgcccaatcgctgaatgtcgcgtttcttgtctcgcttgcatttgccgtggcggcaagcgccaatttgccgctcattatcttcaccgtcttctggaaaagattcaatgccgccggcgctttggccggcagcctgaccggccttttaagcgctctgatccttgtctccatcagcccgagcgtatgggacccggccggaaacgccatctttgttggagacccgctcatcccgctttccaacccgggaatcatctctattccgctcggctttttaggcgcttatcttggaacgattctatcttcaaaaacccctggtcaagacgcgtttgcagaaattcaggtcaaagcgcatacaggcatccacatggatcaatcttaa

SEQ ID NO: 4541 - DNA, 1500 bp, Bacillus licheniformis
gtggaatacgtgatcggggtcgacctcggcaccagcgcggttaaaatcatccttgtcaatcagcggggagagctgtgcggcgaggtctccaaaccattttccatcattcagccccattccggttattctgaacaggatcccgcagaatgggcggtaaaaacgaaggaagccattaaggaattagttatgcatttcccgggaaaagcatctcagattaaagggatcagcttttccggacagatgcatggattggtacttttaaacggcaaaggagaggttttgcgaaacgcgatcctgtggaacgatacacggacaaccgaacaatgccggctgattaacgagaaagtcggaaaggagcgcctgctcgagatcgcgaaaaacccggcgctcgaaggctttacccttccgaagcttttatgggtgaaagaatatgaaaaagagctgtttgaaaaggcggccgtttttttgctgccgaaagactatgtcaggtacaccatgacggggcgtcttcacagcgaatattcagatgcggccggaacgctcctgctagatgtgagacatcaaacatggagcggggaaatctgcagaaagctcggcatcccggagtccttatgtccggatttgattgaaccgggcgcttgtgtcggcggcctcagaccggaattcgcggccgaaaccgggctgtctcctgaagtcaaggtgtttgccggcggcgctgataatgcatgcggcgctgtcggcgccggtattttaaaagaaggaaccgccctttgcagcataggcacctcgggggttgttctcacatatgaatcaaaccgtgatcaagagtttaatggcaatattcattttctgaaccatgcagcccccgatgcgttttattcgatgggagtgacgctttctgcaggacgcagcttcagctggtttaaagatgtatttgccgggcaggcgtcatttgacgaattaatcagcgatattggccattcccgtcccggggccgggggactgctgtttaccccttacttgtcaggggagagaactcctcatgccgacgcagatattcgcgccagcttcatcgggatggacagcgcacatacacgggcggactttgtcagagccgttattgaaggcattacattctcccttcatgaaagcattgaacaattccgtgccgggggaaaagacatcagccgtgtgatttcaatcggaggaggcgccaaaagcaatcaatggctgcaaatccaggcggatatcttcaacgccgacatcatcagactgacaagcgaacaggggccggcatacggtgcagccatgatcgcggccgtcgggtgcggctggtttccgtcgcttgaggcttgtgcagaccgattcgttctcatcaaagaaaccttttcgccccgccgtgaatacagcagacaatacgaagctctctttcaaatttacagagatgtctaccggcacacgaaaacgctgaacgagcggctggcaagctttcgggaataa

SEQ ID NO: 4542 - DNA, 1347 bp, Bacillus licheniformis
atgttttttagaaatatcggaatgattgagtatgaaggggccgattcggaaaatccttacgcatttaaatattacaaccctgatgaatttgtcggcggcaaaacgatgaaggaacaccttcgcttcgctgttgcgtattggcatacctttgatgcggacgggaaagaccctttcggcgacgggacgatgttccgggcgtggaaccggctgacacatcctttggataaagcgaaagccagggcggaagcggcttttgaattttttgaaaagctcggcgtgccctatttctgttttcatgatgttgatattgtcgatgaaggagcaacattgcgtgaaactttcacgtatttggatcaaatgtcgtcttttctcaaagaaatgatggagacaagccatgttcagctgctttggaatacagccaatatgtttacgcatccgagatatgtccacggggccgcaacttcttgcaatgcagacgtctatgcctatgcagctgcaaaagtgaaaaaaggcctggacatcgccaaagagcttggagcggaaaactatgtgttctggggcggaagagaaggttatgaaacattgctgaatacagatatgaagcttgagctcgaaaacttggcttcattttatagaatggcagttgagtatgcgcgtgaaatcggttttgacggccaatttttaatcgagccgaagccgaaggagccgacgaagcaccaatacgattttgatgcagccacaacgatcgcttttttagaaacttacggtttaaaagaccattttaaacttaatcttgaggcgaatcatgcgacattggccgggcatacatttgagcatgaactaagggtggctgccttgcacgatatgctgggttccattgatgccaaccagggcgatttgctcttgggctgggataccgatgagtttccgaccgatctgtattctgcggttctggcgatgtatgaaattttgaaagcaggcgggtttaaaaccggcggcatcaacttcgatgctaaagtaaggcgcccgtcatttgccgatgaggacttgtttcacgctcatatcgcaggaatggatacgtatgcagtcggcttgaaagtcgcctcccgtctgcttgaagacaaagccctcgaccagatcattgaagagcgttatgaaagctatacgaaagggatcgggcttgagatcaaagaaggccgcaccgatctgaataagcttgccgcatacgctcttgaacacgaccaaattgaaaatcagtcaggccgccaggaacgactgaaagcgaccgttaaccgttacttattgaacgctttgcgcgaagcgccggcagaaaaggagacacgctag

SEQ ID NO: 4543 - DNA, 1164 bp, Bacillus licheniformis
ttgaatacagcggatcaagcccttgtaaaaaaaatgaacaaagccctgatttttgagcagattattgaaaacggacccgtctcaagggccaaactttcggaaataacaggattaaataaagcgaccgtttcctcccaagtgtcttccctgcttcaaaaggacatcatttatgaaaccggccccggcgagtcaagcggcggcagaaggcccgttatgctgaaattcaatcgaaaagccggctatgcggtcggtgtagatgtcggaaccaattatataattgttgcgttaaccgaccttgaagggcatttgattgaacaattcgaacgaacgcttgatgaagaagacattcaggcgacagaagaggcattaatcgaattgacggggcttgccgttgacaaaataccgccttccccattcggattgaccggaatcggcgtgtgcgtgcccggcttggtggacaacgaacggcatgtagtctttacgccaaataagccgatccatttgattccgataaaagaaaaactggaagaaaggttcggcgttcccattttaattgaaaacgaagccaacgccggcgccgttggcgagaaggaatacggggaaggcggccagcttgagcatgccgtgtttgtcagcattaataccgggatcggtttagggattttaatgaatggaaaattgtttagaggtgtgcaaggtttttccggagaagccgggcacatgtccattcactttgacggtccgttatgccggtgcggaaatagaggctgctgggagctttacgcttcagaaaaagccgtcttctctcactatgcagcgaattccggggcccagctttacgaaaccgttaaagaacttgcagaccgcggtgatccgggcatgatggagacgtttgaacgctttggctttcatatcggcatcgggcttctcaacatcttgaaaacgttgaatcccgacaccattatcttgcggaataccatagtggaatcctatccgagcatcgtcgatgcgatcaaaaaaacgattgcctcaagaagcgcagcagaagccttgtctaattatcatttaaaaatctccacgctcggccgcaccgcctcagcgcttgggatgtcctcccttgtaaccgaacgttttctggaacggtttatgaacgagagattttaa

SEQ ID NO: 4544 - DNA, 150 bp, Bacillus licheniformis
ttgcagattgttgataaaatcccaaaacggctttttgttttgggattttatcatcctttcagcgtgattgaaaacccttgcagtctaggaaggtcgagcatcggagcggagcgaatgttggaattcgtgagcaccgacgcgcaggcctga

SEQ ID NO: 4545 - DNA, 675 bp, Bacillus licheniformis
atgacgcgagtctcagaagaagcaatgaaagatctgttgtcggtctattttattatggggtcaaacaataccgcaggggatcctttaaccgttattgaaaaagctttaaaaggcggtgcgaccctttttcaattccgcgaaaaaggcgagggtgcgttgaaagccggagatcaaacggcgtttgcccgacaggtgcaggcgctgtgcaaacagttcaatgtaccgtttattatcaacgatgatgtagaactcgcgcttgaacttgacgcagatggcgtgcatatcggccaggatgatgataaggccgcagacgtcagagcgagaatcggggacaaaatcctcggcgtttccgcgcatacacttgaagaagtcttaaaggcggaaaaggatggagcggattacatcggtgcggggcctgtttaccctactgaaacaaagcgggatacaaaagctgtgcagggcgtctcgctcattcaagagatccgcaggcagggaattggcattcctgtggtcggaatcggcgggatcacggtcgaaaactgcgtccccgtcatcgaggccggggcagacggcatcagtgtcatcagcgccatcagcaaagccgccgatccaaagcaggccgtcgaggcgtttagcgagaaagtccaagctgccaaacaaagcgcacattcctaa

SEQ ID NO: 4546 - DNA, 810 bp, Bacillus licheniformis
atgaatatggaagatgccgcaaggggaattgagttagtcagaaagcaaaaaccgctcgtacacaatatgacaaacaatgtcgtcaccaactttacggcaaacggtttgctggctctcggcgcatcgccggtgatggcgtatgcgagggaagaggccgccgacatggcaaagatcgccggagcccttgtgctgaacatcggcacgctcagccgtgaatctgttgaagcgatgattattgcaggaaagtcagctaatgaacatggggtgccggttatttttgatccggtcggtgcgggggcgacgccgtttcgaacggaatcggctcaagcgatcatgcgcaaagtgaaggtttctgccgtcagaggcaatgctgcggaaattgccaacacgcttggggaagactggctgatcaaaggcgtggacgcgggtgaagagagcggcgacagaacggagctcgcaaaaaaagccgcgaaattatgggatacagcagtcatcataaccggtgctgaagacgtgataacggatggtacaaaaacgtataccgtgggcaacggacatcagctgcttacgaaagtgacggggacaggctgcttgtttacctctgtcatcggtgcgttttgcgccgttgaaaaagacgtttgccgtgccgctgtatctgcagccgctttttatggaacagcggccgagttggccgcggcgaaaacggaaagccgggggcccggaagtttccaaatcgagtttttgaatcagcttgctgccgttgaagctatggatataaaagaacgcggcaggatcagagaggtggaataa

SEQ ID NO: 4547 - DNA, 918 bp, Bacillus licheniformis
atggacatacgccacttaacctatttcttggaggtagcccgtctgaaaagcttcacaaaagccgctcagtcattatacatatctcagccgacgatttccaaaatgattaaaaaccttgaagaagagctgggcatcgagctgttttaccggcgcggccggcagatcgagctgactgatgcggggcaaagcatgtatgtgcaggcccaggaaatcaccaagtcatttcaaaatttaacttctgagctgaacgacttgatggacgtcaaaaaagggcatgtgaggatcggtctgccgccgatgatcggctccggtttttttccgaaagtgataggggatttcagagataagtatccgaacgtcacctttcagcttgttgaacacgggtctgtgaaagtgcaggagggagtagaggacggatcgcttgatatcggcgttgtcgtcctgcctgcaaaagaggagatttttcactcctttacaattgttaaagaagacttaatgctaatcgtccacccgtcccatcgttttgccgatgaggaagagatcgagcttcggcagttaagcgaagaaccgtttattttcttccgggaagactttgttcttcacgaacggatcattacggcctgcttgaaggcgggatttcagccgaatgtcatttatgaaacctcacaatgggatttcatcagcgaaatggtttccgcgaaccttgggataggtcttttgcccgaaaggatctgccgggatcttgaccctgaaagggtgaggatcattccgctggtgaggccggccattccttggcatgtcgccgtcatttggagaaaagaccgctatctgtcgttcgcggcgagggcgtggattgatcatacaaaatcgtatatatggagcgagaattcaaaaacagaaaggaatgcaggcgaatga

SEQ ID NO: 4548 - DNA, 270 bp, Bacillus licheniformis
atgagcaaaacgattaaacttaaccatgcagcggttatgaagaagctggaacaagtaagcagcacgcttcaagccgtatctttaaaaagcccgccagccggagcgctcgggcggaacaaccttgattttacgaaaaagtggcttgaacgagaagccgaaatttgcaatatggtcaaacagtataaagaggctgttcgtaaaaacattgaggacacccgctcaaatgtggacacgctgaaggaacaggatgaggcgattgcccgaagatag

SEQ ID NO: 4549 - DNA, 429 bp, Bacillus licheniformis
atggactactcagacacgctgcaaaaaatacacggtgtcctctcccataaggcggcagagctggaagaacaaattgcaaggctggagcgggcaaagcgcgatgtagagcgggaacaaaacctcggaatcgaagaaatcaggcagattttgcggccgaatcttaatgagtcgtggaccggaagcagggcagccgattttaacgaagcacgtgatgaagcgcacacggcaatgtacagaattttcaccgatgagtatgatcggtatattcataaaatcgatttaaagatatttgctttagatgctgaaaaaggagctgttcaggctgcaagctggtcagccgaccgggcggactttctgatggaaaaaggagaggaagccgtcgacgctctgcacagcacaatcaacggtttaaaaggatggttgaaatga

SEQ ID NO: 4550 - DNA, 387 bp, Bacillus licheniformis
atgaaaacattcattaaaggattaggtcaggtcgctcttttgtttttattcgcccgtttcatgaatctgattgtcgaggttcttcatataaacattcccggcagcattctcgggattatcgtcatttttgcgcttctccatttcaaaatcattaagctggaatggattgaaatcggcgcgctgtggcttctcgcggagctgcttttgttcttcgtcccttcagccgtcgggattatgaactacggagatattctggctgaattcggcacaagcattatactcgttgtcctcatcagtacattcgtcgtcatggtgtcgaccggaatgctgactcaattgattgccaaaagaaaggaaagaaaaaaaacatgctcatcggatgcttaa

SEQ ID NO: 4551 - DNA, 684 bp, Bacillus licheniformis
atgctcatcggatgcttaagcctgatcgcaacagttttaatctatttgggcgcaaaagcggtgtattcacgccatccaaaggtgtatgcgtcacctttattggtcacgccggtgatactggtcggcctgctgcttttcatcaacgtcccttttgaagcgtacaatgcgggcggacgcttgttgacggacatgctccagccggcaaccgtggcttttgcgattccgctgtacaaatactttccagtcttaaaaaaatacgcggttgagatcattatcaacgtggctgtaggctgctgtatcgcgatcctgtcaacagcgtttatcgcaaaactcttcaagctgaatgaagacctgatcgagagcctcgttcccagatctgtcacaacgccaattgcaatgaacgtttctgaaatgatcggcggaatgccggcggtgaccgctgtttttgtcatattgaccgccttgttcggatcagtgatcggaccgatggtcattcgctacttccggattgataatgaaatcgcgaggggcgtactgcttggcacaagcgcccacggcgcaggtacgtcaaaagcatttgagctgagctccgtgtccggaacgatctcaagcgtgtcgatgatcctggccgcgatcatcacgctttgcgcagcgccgtttctgatttcccttattgcagtgtaa

SEQ ID NO: 4552 - DNA, 421 bp, Bacillus licheniformis
atggcctttgtcaaagtattgttgacgaccgcttttctcacaggggctttcgcaggattcctgtgggcattttccaaagaaaaaggcgatggatttttctcggaaatggcggcggatggatcgggagtcttcacacttttcggtttgatcggtttactgaacgtcaaactgttaaaagcaatttccccaaaactgctgcatgacaggtcttttaggtgtatttcttttattctggccgttgtattaattgatgatgtctatattcatatggctgatcgatttctaaatgaaaaaaccaaattggcggaaaaaccttcaccaatttggtttttttttcggctattacactgcaataagggaaatcagaaacggcgctgcgcaaagcgtgatgatcgcggccaggatcatcgacacgcttgag

SEQ ID NO: 4553 - DNA, 1467 bp, Bacillus licheniformis
atgaattacggaattttaatatcgataggtatttatatggcgggaatgcttttcatcggatattttgcatatcgcaggacatcaaatttgaccgattacatgcttggcggaagaaatctgggtcccgccgttaccgcgttaagcgcaggagcttccgatatgagcggctggctattaatggggctgcccggtgcgatgttcctgaacggattgagcagcggctggatcgttgtcggtctgacaatcggcgcttatttgaactgggtgtatgtcgcgccgaggctaaggacgtatacggaaacggccggcaacagcattactatacccgattatttcgaaaaccgttttaaagacggttcaagactgttacggatgacgtcggcttttgttattttagtatttttcactttttatacatcatccggaatggtggcgggcggagagctgttcagaaccgcattccacctggattatcggatcggcatctggctgacggccggggttgtcattctttatacgctcttcggaggctttttggctgtcagctggaccgattttgttcaagggacgatcatgtttatcgcgctcatcttaatgccggtagtcgtgtttgttcaactggggggaattgcgccggcgttttcggaagtgaacgcggttaacccggatctcctccgtccgtttcaaggaacaaccgtaatcggtatcatatctttactggcatggggtctcggctactttggacagcctcatattattgtcaggtttatggcgatttcaagcgtgaaagaattgaagagtgccagaagaatcggcatgggctggatgatcttttcgatttgcggagcgatgctgacaggactcgtcggcattgcctatttcagtgcgaatcatcttacgttaaagaatgccgagacgatattcattaagcttgccgaccttttgttcccttcaatgattacggggttcttgctggccgccatattagcagcggtgatgagcacaatttcttcacagcttcttgtaacctcaagcgcgctgacagaggatttttataaagcgtttatccggaaaggggcttctgataaagaacttgtacttgtcggaaggctgtctgtcctcgccatttcactgatcgcactcttgatggcgcttcatccgaatgaaacgattctgaatcttgtcggctatgcatgggcaggcttcggggcggcatttggccctgtcgttttgctgagcctgtattggaaacgaatgacgaagtggggcgcgcttgcagggatgctgtccggagcgctgaccgttattgtgtgggagcaagtgaaagcgtttgacccggtttatgaaatcattcccggatttattgtttgtacagtcgtgatcatcgccgtcagcctgatgacaaagaagccgcgggcagagattgaaaaggaatttgagactgcggttgaacagctgaaaggttga

SEQ ID NO: 4554 - DNA, 1191 bp, Bacillus licheniformis
atgcatacattaaaaataaaacatccattcgctgcaaaaatgaaaaagggctatcccctaatcgaaaaagaggccgtttcttcgcaagaaaacggcataaaagaaggatcgctgatcaggataaccgatgaaaacggcaggtttttaggaaagggctattatggcgagcaaaacaaagggatcggctggattctgactcgaaacgagggggaatcgattgaccagtcattctttttaagcaggctggcgaaagcatttcaagccagaaaatcgctttttcaagacccggatacgaccgcttttcgtttgtttaacggggaaggcgacggaatcggcggctttacgattgactattatgacggctactatttgttccaatggtacagcaaagggatttatacgcttaaagaaacgattatggaagcccttgatgaattgacggattataaagctgtttatgagaaaaaacggtttaatacggccgggcagtatgtggaagatgacgactttgtcaaaggcgaaagaggagactttccgatcattgtgaaagagaacggcattcattttgccgtttacctcaatgacggagcgatgaccggcgtttttctcgatcagcgccatgtccgcaaggcggttagggaccggtatgcggaagggaaaaccgcgctcaacacattctcatataccggcgcattttctgtggcggcggcgctcggaggcgctgaaaaaacgacgagcgttgatgttgcaaaccgcagcttaagcaggacgatcgaacaattcagtgtgaacgggctggactatgaagctcatgagattaaagtcatggacgtttttaaatattttcaatacgcggccaaaaaagaactcgcctttgaccttgtcatccttgatcccccttcatttgcgagaacgaaaaagcatacattcagcgcggcaaaggattacaaaaatcttttaaaagacgcgattcgaatcactaaagatcaaggtgtgatcgtcgcttcgacgaacagcagcgcatttggaatgaaaaaattcaaaggctttatcgaagaggcatgcaaagaaacggggacgcgctttacagtgcttgaggagcattcgcttcccgaagattttaaaacggtgaaaagctatcctgagggcgattatttaaaagttgtctttttacaggttcgccatcgttaa

SEQ ID NO: 4555 - DNA, 381 bp, Bacillus licheniformis
atggcgcgaatcgaccacgtaggactgatggtgaaagacattgatgcttcgatcgcattctaccagaatgtgatcggaatgacgctgaaaggcagaatgacccatacaaacggcgtcatgaaactcgcttttttaggctttgagaacagagacgagacagagctcgaactgatcgagggatataacgacaaccttcctcaggaaggaaaagttcatcattttgccgtctcgaccgatgatatcgaggctgaatttgatcgcgtaaaaggcgccggcatcaagctgatggaagatgagattaccgtattgccgaacggcttccgctatttttttctttttgggcccgaaggagaaatggtcgagttttttcaaagaacataa

SEQ ID NO: 4556 - DNA, 948 bp, Bacillus licheniformis
ttggttaaagtactgttgacgctcaacggactgttttaccgcgctgcgccgcgcttgagagaaagggtcgaacggctcggcgccgaatttgcgtttttggattcaaatcggttgacgagacaggatttactgactcatatcaaggatgtccatatttatatcgccggcgttgaaaaagcggaccgggagctgatcgacgccgctccgggactccggtatatcatgaaattcggcgcgggaatcaacaatattgatgtggaatatgcaaacgaaaaagggattctcgtcacgaatgcacccggccaaaatgcctcggcggtcgccgatttggcattcggtcttctgctgtctggcgcccgttcgatcccgcagtcaaacgcggcagtcaaagcgggcttatggcaagcggcgatgggctatgagctcgatggaaaaacgctggggcttatcggttttggggaaatcggcaaaaaggttgcaaggcgggctgccgggtttaatatgaacgttttggcgtacggcacatacaaagactacaatgcagccaaacggctgaatgtgcggttcgccgagcttgacgatctcctggaaaaatcggactttgtatgtatcagcacatcattgagacctgccacctatcatttaatcaatcaagaaaaactggcaaaaatgaagaaaaccgcgtacctgatcaacattgcccgcggagaagtggtggacgaaagcgcgcttattcaagcgcttgagcaaaaacagatcagaggcgcagcattggacgtctttgaaaccgaaccgccggctgcccggatcgccggtctcagcaatgtcatttgcacggcgcatatcggcggcgctacgtatgagagcatcaggcgcatcgaagagatgacatatcaaaacatcaaaaggtttatcgaaaaacagcagccggctttccgcgttcaataa

SEQ ID NO: 4557 - DNA, 864 bp, Bacillus licheniformis
atgaaaagcgaccgaaccatgcatattatttcttgtacagacaataactacgcacagcatttaagcgtgatgttctcatcattgctgacgaatatggatcagacgcgcgaggtgaaactgtatgtcatcgacggagggattgaaccggagaataaaaagcgtctggaagagacgaccctccaattcggagctcctattacatttcttaatgtggaaaaaagccagtatgacaaagcggtcgaaagcagccatattacaaaagcggcttactatcgaatttccattcccgatctgattgatgacgaatccgttaaacgaatgatctatgtcgactgcgacgccttagttttagaggatatatcgaagctgtgggacatggacatttcaccttatttcgcggcggcggttgaagatgcaggccagcatgaacggctgaaaaagatgaacatcagcgatgaagcaaaatattttaactcgggcttaatgatcatcgatatggaagcttggagaaaaaacgacatttcgaaaaaagtcatcgactttatcaataacaacgatgaagacatgtttgtgtttcatgaccaagacgcattgaacgcgattctttatgatcagtggctcgaacttcatccgaggtggaacgcccaaacacacattattttaaaagaaaaaacaccggcttccctcatcgatcaaaagcgctatatggaaacaagggcaaacccggcaatcgttcatttctgcggcggaaacaagccttggaattcaaacacctcacacccgtacgcccgtcaatattttaagtatttgcagtccacagcctttaaccagccggccaaattgtctaaaaaccatgtcagctaa

SEQ ID NO: 4558 - DNA, 135 bp, Bacillus licheniformis
atgatccttttttttttcggcctatcaacggtgtttatttttcgaaaaaagggaatagaacaaaaaaagaaaaggagatggacgacatatgaaaagcgaccgaaccatgcatattatttcttgtacagacaataa

SEQ ID NO: 4559 - DNA, 171 bp, Bacillus licheniformis
ttgaaatcgattgatctcacaattttatcattaaaaagaaaaggaatccgaactgagaaagtgtcaaaaaatcagtgccctgatcgattaagcaatgcgaacgaaaaaacagacaagcatagatacaaaaatcgtcaatccaagaacaagcgtaaagaaaaagaggaatga

SEQ ID NO: 4560 - DNA, 126 bp, Bacillus licheniformis
atgaacattgcccaaacgtacatatgcattctgcctttatgtacgttttatctttccaaatttacatttgaaataatgaggaactcactattgattaaaggaatgatcaacattgaaatcgattga

SEQ ID NO: 4561 - DNA, 1216 bp, Bacillus licheniformis
tgctgataaggaatcctttcaaagaaaaatactactcacatgataggcgggcattaaatatgcttgcactcagagtgccgggcctggcttttattctcatgatctatgtcgcctctatcgtgctgcaatttcttaatgggagctggtccattttattgcttaatgtgtttacggtattgaccgccatctttgctttgttgcattggcactcatatcgctgggttaagaaaagggtgattctgtacttcgtattacaaggtttgatcacttttacacttgctaatgtcatgtcaggctttttagtgctgatcatcattggcctttatgcatttttgatcggacagattataggaatggcagacagaagaaagacgttcctcatcctttatttattgcttctgctgtcaatcactgtactatatcatattcacaaaggtgaatatttgcattttcttgtcatagcagtacctattatgatcgtgattatcacatatgccgctacattttttgcccaagtcgatgaaaagacaaaagcgcagctgactcttgaaaggctggagctggctcatcagcaggtagaacagctgacgctgcaaaacgagagacagcgtatggcccgggacttgcacgatacgcttgctcaggggctggtcagtttaaatatgcagctggacgctattcatgttcatctcgccaaagacaacacagagagagcaaaagaaatcgttcaacaatctatgaatagagtgaaaagcacactagctgatgcacgttcagcgattgacgatctgcgcagcaaatcagaagaaatcggttttttaaaagaaagaattacctcattaatggatcattttcaagagtcgacaggcatggcttgctttttagactacagattagaccaagtgccggacgttcgaacagctgaaaactgttattacatcattggagaatgcatagcgaatgccgtaaagcatgctgaagcagaaacgatctcagtgtccatttgggatgatgataagaggaagtttaaccgtcaaggataacggcaaaggatttgatgttgaaaaaggcaagaaaaagagaggacattatgggcttctcggcatagaagaacgcgtcagagcaatgaaaggccaattcaatataaagagtacaacatctaaaggaacacaaattgatatcactgtaccaattcagggagagatgccagatgaat

SEQ ID NO: 4562 - DNA, 639 bp, Bacillus licheniformis
atgaataaggttttaatcgttgatgaccatcttgtcgtgagggaaggtctgaagcttttaattgaaacgaatgatcactacatcatcataggagaggcggaaaatggcaaagcagcagttcgccttgcagatgaattaaaaccggatattattctcatggatttgtatatgccggagatgagcgggttagaagccattaaactaataaaagaaaaacacgacatccccatcattattttgactacgtataatgaagatcacttaatgatcgaaggaattgaattaggggcgaaaggatatctattgaaggatacaagttcagaaaccctttttcatacgatggacgcagcaataagaggaaacgtgctattgcagcctgatatcttaaaacgtctgcaagaaatccaattggagcggatgaagaagcagagcagtgatacgcagctgacagaaaaggaagtcatagttctaaaagcaattgctaaaggtcttaaaagcaaagcgattgcctttgatttgggcgtctctgagagaacagtaaagtctagactaacgtccatttacaataaattaggcgcgaattcaagaactgaagcagtgacgattgccatgcaaagaggcgttctgacattagactaa

SEQ ID NO: 4563 - DNA, 1125 bp, Bacillus licheniformis
atgtcaaaaatgttatataaattaggaggatgggttgctcgcaatcgcataaaagtaatatgcgcatggatcgttgtgctagttgcttcgataggccttgcaatcacgttaaaaccaagtttttctgaggatatgtccatacctgacacaccttcggaaaaagcgatggatgtcattcaaaaagaatttccccacggtcctgataaagggagcatacgggttattttcggtgctgaagatggggagaaactgacttcgaagtcagcggaaaaagcaatagaaaatacgttaaaggaaatcgataaagatggttccgttgactcgattgcaagtccttttgtgacaggaacaatcgcgaaagatggcacagttgcctatgctgatatcaagtataaatcatcagcagatgatattaaagattactctatcaaacacttaaaagacagtttgaaaatggctgattatgaaggattgcaaactgaactaagcggagatgtaccaggagctgagatggagataggcggtatctctgaaattgtcggcattattttggcctttatcgttttggccattacgtttggctctttattaatagcaggtttgccgattttaacagcactgattggattaggtgtaagtattgggcttgttttgattgggacacaagtattcgatatcgtttccgtcagtctatcattagccggaatgattggccttgcagttggaattgattatgctttatttatttttacgaagcaccgccagtttttaggcgaaggtatacaaaaaaatgaatcaattgcgagagctacaggaacagccgggagtgcagtcgtttttgccggacttactgttatcgtagcactttgcggattgactgtcgttaacattccttttatgtctgcaatggggctgacagcaggacttagtgtactgatggctgttctcgcttcaatcacgcttgtgcctgccgtcttgtcgatagcggggaaacggatggttccgaaagcaaacaagaaaaaagaaaaacaaagcgcggaaacaaatgtctggggacgctttgtcacaaagaatcctatcatgctatttctgccaccctttctctacggtttttttatcggctga

SEQ ID NO: 4564 - DNA, 954 bp, Bacillus licheniformis
atggatgttattagcataggagagacaatggcgctgttcactccgaatgaagacggccctctcagatacgcaagaaactatcaggtgagaatagcgggcgcagaaaccaacacgctgatcgggctttcgaagctcgggaaaaaagccggctggattacacggcttggaaaagacgagttcggggcgatgattctttcttctgtcagaggagaaggagtcgatgtgagccaggtgaagctcgatgacgcggcgccgaccggtttgttttttaaagaaaggaaaagcgcggccaaagtcaatgtcttctattacaggacgctttcagcggcgagttttttaaagaaatgcgatattgatgagcaatacattgagaaagcggggcttttatacattacgggaattaccccggctttaagtgaaagcgcttcagatgcggtgttttatgcagtggagctcgccaaaaagcacaataaatgcgttgtatttgatccgaactttcgaaaaaagctctgggacggagagcgggcgcggcagaccatgtttgaacttatcaaacggtctgatatcgtgcttccggggttgagcgaagggcgttttttgttcggcaccgctgatgagaaaaaaattgcggaagccatccgcgggctgggggctgaaactgcgatcatcaagcttggttcaaaaggcgcctattatgccggcgggaacgaaagcggctatgcggaaggctatcagattcaggcagcagcggatcccgtgggtgccggagacggctttgcggccggcgtattatcgggtttgattgatcaaattccgctttcagaagctgtcaaacggggctgtgccgtcggtgccatggtagcggcggtaaacggtgatattgaagggctgcctgaccgcgaatcactgtttgcgtttatggaacaatctgatgaagaagatgtcagccgataa

SEQ ID NO: 4565 - DNA, 759 bp, Bacillus licheniformis
atgtcagtaaaatccgcggtacgtgttgtacgtatatttgaattgctgtcaaatcatccggatggattaaccgtaaaggaaatcagcaaagaactttcgctgcctcagagcagtacattcaatttggccgctacacttttggatgaaggttaccttcagcaggatgctgtcaagcgttacaggctgggggcaaaactgattcaagttggaaccgctgccatggagtcgatagacatttcatcgcagggcgttccttttttaaaacagctgatggacggcgttcaggaaacggtgtttatggccgttctatccgatgatcagctcgtctacatcgcaaaaatcgataacaacaggtcaatcagaacaaccgcacagcccggctcgcgcaaaccgctttattgcaccgggcttggcaaggcatttttggcattcatgccggaggacaaaacggaagggctgctcgaccgcatggagtttatccggtttaccgggcataccatcactgccagagaagagctggaaaagcagctgcagacatttttggaacagggatatgccgttgacaatgaagaaaatgaagaaggtttgttttgtctggcggcgcctgtctatggtccggatggcgtgatgaaggcggcgatcagcaccgccgggccaaaggagcgcatgctcgcaagaaaggccgttatcgttgagcagctgcttcacacagccggaaaaattacagaaagcattggcggatatagaaagccgctttag

SEQ ID NO: 4566 - DNA, 1350 bp, Bacillus licheniformis
atgaagagaaaaatgatgatgttcggattggcgctatcgatcattgcaggcggcgtggtcgccgatggaacggggaatgcagctcaagcggcctctcaggaaacagccatcgcaaaagatatcgaaaaattcagcaaaaaattcaacgagaaccgcgcctatcaaacgatttaccatttaagcgaaacgatcgggccgcgtgtgacaggcacggcagaagaaaaaaagagcgccgcttttatcgcctcacagatgaaaaagtcaaatctgaaagtaagcacacaaaagttcagcatacctgaccggctggaaggaacgcttaccgttcagggaaataacgtgcctgcgcggcctgccgccggttccgccccgactgcagcagaaggcttggccgctcctctctatgatgccggcctcggcttgcccggcgacttcacagaagaagcgaaaggaaaaatcgccgtcattttgagaggagagctgacattctatgaaaaggccaaaaacgctgctgacgcaggcgcaagcggagttatcatttataataacgtcgacagcctcgtccctctgactccgaatctaagcggtaataaagtcgatattccagttgtcggcgtcaaaaaggaagacggggaaaagctgctttctgaacaagaagcgatcctgaagctgaaagctcataaaaatcaaacctcgcaaaacgtaatcggcgtccgcaaagcaaaaggtgtcaaaaatcctgacatcgtttatgtgacttcgcattatgacagcgttccatatgcaccgggagccaatgacaatgcctccggcacttcagtcgtccttgaactggcccgaattttgaagacagtgccagccgacaaagaaattcgctttattacattcggagccgaagaaatcggactcctcggttcgcgccattatgtcagcacattgtcaaatcaggaagtcaaacggagcgttgccaactttaacttagatatggtggcgacaagctgggagaatgcttcacagctgtacatcaatacgcccgacggttcggcaaacctcgtctggcagctaagtaaagccgcttctttaagccttggaaaagacgtattatttttacatcaaggcggatcatccgaccatgtcccattccatgaagccggcatcgactcggccaactttatttggagagagccgggaacaggcgctttggagccttggtaccacaccccttacgacacgattgaacatatcagcaaagacaggctgaaaacagccggtcaaatcgcgggaacagctgtgtataacttcaccaagaaggaaaacagaaaaccgtcttacagctcagttgcccagtaa

SEQ ID NO: 4567 - DNA, 1362 bp, Bacillus licheniformis
atggccggattgaaaaagaaccgggccctgtttttaacagccgttgcatcagggacgatgctgaatccgctcaactcttcaatgatttctttggcgctgcacagcatccagcatgagtttcacctttcatttgcaaccgtatcgtggctgatttcatctttttatctagccagtgcggtcgcacagcctgtcacaggaaaaattggcgatttaatcggccggaaaaagatgtttttgtcagggcttgttctcgttgccgtatcggcaatcggcgctcctctcgcaccggctttttccgtcttgttgatcatgcgtttgtttcaatcgattgggagcggcgccatttacccttcgggagtgggcctgatcagaagccacattcatgagaagcaggcgtctgcactcagtgtgctgtccattttttcttcggcaatgaccgcctttggaccgaccgtggggggatttttaatcgtactcgggggatggcccgccatcttcctcgtgaactttccatttattttgttcagctttttgctggggatgtacatgttcccgaaagatgagaaaaaagccggcttaaatgtccgcgccgtgatcaagcggcttgatctcaccggaattcttctgtttgcgggcggaatcgttctcctgctggcatttctgctctcattgagcacgggcgagccccgttttgccgaggggatgttcggactcgtcttgcttttgatgtttgtttggtgggagctgagagtgaacagtccgtttattgatatcaggctgttgatcgcacgcaggacgttaacttcggtctatgctcaatttattatgctgaacatctttaactactgtttgttttttggacttccgagttattttcaggatgaaatgcacctttccgttcaaacgagcggtcttttgatgctgttcatgtccgggacgagcgtattgatctcgcctttcgtcgggaaatggattgaccgttcaggagaaacgcagcccgtgttaattggttcttgcttaatggcagcgggcgctatcctgctcacattgttttttgtcgatgcaccgatgttgtggaaaggcatcatcctctctttgctcggggtcagctacggcctcggcaatgtcgccctgcaggctgccatgtttacggcaagtccgccggacatcgtcgggacgacttcggggctttttcaaacatgccgctatcttggctcgatcttttcgtccgtcattctgggtctgttgtttggagaagaaataaccgcggggcattttcaggatctggggatggtcatgattgcggttgccatcggcagcattttgatgagcttcagatttatcaagctgatgaaggattga

SEQ ID NO: 4568 - DNA, 213 bp, Bacillus licheniformis
atgaaatcggatattgaaaaacgtgcggaatgcggtttgcaaaacggaacggaagcaatgatgaaccgggagtcgcaacggcttgatgctgctttatacggggccgtcctcaatgctttcggctgtgatgataggagccgtctgatgagcggggaagcgggggcgggcggtaaagcgggcggagctggcgaaaggctgctgtaccctaagtaa

SEQ ID NO: 4569 - DNA, 117 bp, Bacillus licheniformis
gtgaaaagttcaaaaaaacttatcagtacgctgacaaaagaagaacgccatcgccgggccatgatttccaaaacaaaaagcggaaagaagtcgagcgtcttgccggagatcaagtga

SEQ ID NO: 4570 - DNA, 660 bp, Bacillus licheniformis
atggatatggcgatagataagatgataggactgcctgaagcccagatagaagatttgagaaacctgatggaggactggaagaacgaactcctcgtctataaatttgccttggatcaaatggatacgaagttttcgattatcagccaggaatataatttaattcacggccacaacccgattgaacatacgaaatcaagggtgaaaagctttgaaagcctgattaacaagcttgtgcggaagggctgcgatattacgacaaaggccgctaaggagcacatcaaagatatcgccggtctcagaatcgtctgctcgtttttatccgacatttacaatatggttgaagtgctgaaggaacatgaagacatcaaaattttaaaaatgaaggactacattaaaaatccgaagccgaacggatacaggagtcttcacttaattgtagaagtgcccgtttacttgaccaaccgcgtcgagcacgccaaggtggagattcaaatcaggacgatcgcgatggatttctgggcgagcctcgagcataaaatctactacaaattgaacaatgaagtgccgaaccagctcactgatgagctgaaagaagcggctgacatcgcgaactacttggatgaaaagatgcttcatattcgaacaaaagcggatcaataa

SEQ ID NO: 4571 - DNA, 234 bp, Bacillus licheniformis
gtgggagagtttttatttccgagcgccgtcagccgtcagctcagagcctatcctattataaacattttttgttattgtggaaataaattctttttaaattacaaaaaaacaggctcatatgaaaagcggagcgcctttcgatatgaacctgcagtttttcggaagaaggcttcgtgcgcgaatgaattaatactttacaaaagcggagcccacaatgatcagcaaaataaataa

SEQ ID NO: 4572 - DNA, 150 bp, Bacillus licheniformis
atgttaaataagctaagaatgttgtatgaaaaaacaacaatgaagtggctgctcaacacttcctattactttctcattctggtgctgctgtttttaatttacggattccatacagcaaatacaggttcatatatttataatgacttttaa

SEQ ID NO: 4573 - DNA, 1509 bp, Bacillus licheniformis
atgaaactgattgaaacaattaaaaaatacgcgcaaacacaacccgatacccttgcttttgtgaatgaagaagaaaagctgacatacggagagctttggtcacaatctgagcgccttgccgcaaggattcaaagcgaagctttaacagatgcttctccgatcattgtctacggacatatgaaaccggttatggcggtttccttcctggcttgtgtaaaagccgggcatccgtacattccagttgacgtatcgattccggcagaccggattctgaaaatcatcaacagttcaaaagccgagcttctgctcaataattcaggcacttcggttgacacgggagatgccctcatttccgtagtggaaccgggcgttcttgaaggagacggggtgccggagacagatcccggacgctgggtacatggggaagatactttttacattatctacacatccggaagcacgggaaatccaaaaggcgtgcaaatctcagccgataaccttcagagcttcacagattggatcacgaatgactttccggtggaaagcggccaagtgttcttaaatcaagccccgttttcctttgatttatcggtaatggacctttatccgtgcctgcagtccggaggcaccttatggacggttacgaaagacatgattaatcggccgaaactattgtttgaagcactgaaacagtccaacgtcaacgtctggacatcgacgccttcattcgcacaaatgtgcttgatggatccgtcttattcggaagagctgcttccggagctgagcttgtttatgttctgcggagaaacgcttcctgcgtcagtcgccagacagcttaaagaaagatttccaaaggctcgtgtttttaacacatacggcccgaccgaagcgaccgttgccgtcacttccatcgaagtaacagacgacgtattaaacaagtattcttctcttcccgtcggttctgaaaagcccgaaaccgaaatcgtaatcatcaatgaagacggaaaagccgtccaagacggggaaaaaggcgagatcataattaccggagcaagcgtcagcaaaggctatttaggcgaaaaagcgctgacggaaaaagcgtttttctcttacaacggctcccctgcttaccgcaccggtgacgcaggttacaaagaaaacggccagctcttcttcctcggaagactcgatttccaaatcaaactgcacggctaccggattgagcttgaagaaatcgaatatcaaatcaatcagtcccgatatgtgcagtcggcagtcgttattccattctaccgcgaggagaaaatcgagtatctgatcgccatgattgtgcctgccgaacacgatttcgaaaaggaataccagttaaccagcgcgattaagaaagatttgggcagcaagctgccggcctatatgattccgagaaaattcatgtatcaaaaagagattccgatgacagcaaacggtaaaatcgaccgcaagagattaaaagaagaggtaaccgtatga

SEQ ID NO: 4574 - DNA, 1158 bp, Bacillus licheniformis
atgacgccttatggttcatttcttttcttcattatattaggaattttactggcgccgaccatcattctcggactgaacggaaaaagcttccgcttatataatatggcggtttccgttctggttctggcgcttattttttcgaacagcctgcacgggctgatcatgctgtgcctgtttacgctttggcagacggttctgatcaaaggctatatcgcttaccgtctaaaagcgaacagcggcatcgtattttgtctggctgcagcagcttctatcctgcctctggcactgtcaaagctgctgccgtttttcgccgttgacaactgggcaacatttctcggaatctcgtatttaacttttaaaggggttcagctcatcattgaaacccgcgacggtctcattaaaaagcagctcccaatcagcagactgctttactttattctcttttttccaaccatctcgtcaggtccgatcgacaggtaccgccgttttgaaaaagacgatcagacggtttggacaaaggagcaatacgaagaactgctttacaaaggaatcaataaaatttttctcggctttttgtacaaattcattatcggctactgcattaatacgtatgtcataatgaaactgccgtttttgacttccggcagcttctcgcatggattggcatacatgtatgcgtacagcctttatctgttttttgatttcgccggatacacggcttttgcggtcggcgtcagctatatcatgggaatcaaatcccctgaaaactttaataagccgttcatcagccgcaatattaaagatttctggaaccgctggcatatgtcgctttccttctggttcagagactacgtcttcatgcgctttgtcctttggatgacgaagaaaaaatggatcacaaaccggatggctgtttccaatatcggatatgtactgctgttccttctgatgggcgtctggcacggccttgcccctcagtacatcgtctacgggctgtatcacgcgctgctcatggtcggctttaacttctttgaaaaatggaataagaagcacaagtggtggccgaacaacaagtggacgacagccgtctcaattgtggtgaccttccactttgtatgttttggatttttaattttctcagggaaactaatacactaa

SEQ ID NO: 4575 - DNA, 237 bp, Bacillus licheniformis
atggattttaatcaagaagtactttcagttttagcagaggtatgtcaggacgatatcgtaaaggaaaatccggatattgatatattcgaagagggaatcctcgattccttcggcacggtggaattgctgctcgcattcgaaagccattttaacatcacagtgccgattacagagtttgaccgggatgcatggaacacgccaaatcaaatcataaagcagctgaatgagttgagataa

SEQ ID NO: 4576 - DNA, 1170 bp, Bacillus licheniformis
atgaaaaagcgttttttattcgggccaatcatcttggcatttttactttttttcaccgcgatcttgatcccaaatgcatggctgacaaagctggttcctaaagatcgcgtcgaaacttcagctacagaattaaacccgatgatgttccaggggatgtatcttcaaggcaaagcgcttgaagacccgaaatatctgccgattttcggatcatcggaattgtcccggttagatgcattccatccgtctaactattttaaagtaaacaatcaagggttcacgccttacctggtcggaaaaggcggctcacagtccttgattcacgcgatcaactttgcggcgcagtctgatcaattaaagggcaagaaaatcgttttcattatctctccgcagtggtttcaaaaacacggctcggacgaagcccactttgcgccgaacttctcggctttgcaggcatacgatcttgtgttcaatcaaaatgtcgattccgggctgaagaaaaaaatcatcaaacgcatgcttaaatttcatgcagtgaaaaatgacgctctgctttcagccctttttaaagccgagctcgaccaggacaaggtggcactgtctcttctgacgccgccggcaaaagcttaccaaagcattctggagaaaaaggacatctattattccatggttgaaggagacggaccgaagcggaccatttcccaagatgtaaaaaacaaatcgtgggatgaattaaaacagatggccgaaaaggtcggcgccaaagaatcccggaacaatgagtttaaaatctcaaacggcgtttataagaaattgaagccgaagctgaaaaagcttaaaggccataataaaaagatgaactatgccgagtccgtcgagttccacgatttccatctcatgatggatgttttgaaagaatccggcgcagaaccgctgttcatctcggttccggtccacggcaaattttacgactataccggcttccctaaaaaaggccggacggatttctataaaaagatcaaaaaagaaatcgaacaagagggctttcaagttgctgatttaacgaatcatgaatatgatccgtacttcttgaaagatacgctccaccttggctggaaaggctgggtttacgtcgatcaggagatcgaagctttttataaaaagtcatcataa

SEQ ID NO: 4577 - DNA, 1092 bp, Bacillus licheniformis
atgacaaaacaaacgatcagcgtacagctcagtacagcaaaaaagcaaaagccagaggctgacaagctcgaattcggccggacctttaccgaccacatgtttatcatggactatacggctgaaaacggctggcacgatccgagaatcgttccttaccagccgattgaaatggacccggctgcaatggtttaccactacggacaatccgtttttgaaggattaaaagcttatttatcaagcgaaggcagagttcttctgttcagacctgaaaaaaacttcgagagactcaataaatccaacgaccgcctctgcattccccgggttgatcctgaaatcgttctggaagggctgaagcagctggttcagatcgacaaggaatggattcctcaagctgaggggacatccctttatatccgtccgttcattatttcaacagaaccgtaccttggcgtcgccccatccaatatgtataaaatgctgatcattttatcgccggtcggatcttattacaaagaaggcatccgccctgtgaaaattgctgttgaaagcgaatttgtccgtgctgtggcaggcggtacaggcaatgcaaaaacggccggaaactacgctgcgagcctgaaggctcaggaagttgcggaaagcaaaggcttctcacaagtgctgtggcttgacggagttgaaaagaaatacattgaagaagtaggcagcatgaacatcttcttcaaaatcagcggtgaaattgtcactccggctctaaacggaagcattttggaaggcattacgagaaactccgtcatccatctcttaaaacaatggggactctccgtaaccgaaagaaaaatttcagttgatgaactggttcaggctcacaaagacggcctgcttgaggaagcattcggcaccggaaccgccgctgtcatttcccccgtcggcgagctgatctggaaagacgaaagccttgtgatcaacaacggtcaaactggagaaatcgccaaaaggctctaccaaacgatcaccggtattcaaaaaggcgctttgcctgacacattcggctggacagttgaagttgataaagtaagccagtcctgctaa

SEQ ID NO: 4578 - DNA, 171 bp, Bacillus licheniformis
ttgcacccttatcgtaaaattcgccggcggcaggctctgtttccaccctacttgcctctttttcaatccgacttgcaatccctcccgcataaaacgattccattttatatactttatgttaaaattatcaataaccatgccggaaaggagagattatccgttctgatgtaa

SEQ ID NO: 4579 - DNA, 1263 bp, Bacillus licheniformis
atggatcaaacaaaattgagcgtctgggaaaagaattacacgttccttttcatctccaggctaatcaaaatctctgctgactgttttgccttcaattctattttatggtttttaatctttgacggaaaaggtgcaatcggcacttccctgcttcttgccgtcacttttctccccgaagcctttttggcgccgattacagggcctttagtcaaaagaagcgccctgaaattctggatgtacttttcggatttaacaagggcagccgtcgtcattactataccgatttgctatttaaacggcttttcaccgatgtggtttgttttaggcctcatgatcatccattcggcaacaggcgcgacatataacccggcgtcaattacgctgattccgcagatcgtgaacgaaaatctcatccaaaaagccaacgcgattctccagtcttcttcagaaatcatcaggctgggagccgttacattgtgcggagtgctgctgacttttatcggtcctgcaacgactttggtcttttcatttatcttttatatcatatcgggcctattcatgctttgcatcaaatacagcatcacccggactcattcacagtctaagtctcttgctcaaagaggtacatattttgcgagattaaaaagaggatttacattggtgaaaaaccacaaaatattatatccgctcgcgatttattgcatcttcatgaacctggcggcttcaccctgggaagccctttccgcggtatatgttgctgaggatttaaacggaacgccgttcatccactcgctgctgaaggcgacgacggcaggaggagcatttttactgggatttatccttgcaaaagtaaaaatcaacaggtacggactcctttttattacggcaggcattctcgaaggtgcagcttattttatcgcaggactgaatactttcctgccgctcgtatttctcgccgcctttgcattcggggcagccatcagctcgattaatgtccccgaattcacgattatccagacatctgtcgaaggggatgaccagcctcaagtgtttgcagtcatccatatgatcacaaatctatcgcttcctttaggggcaattgcctgcggatatgccgcaaaaatgcttggcgcgggaaacgtgattgcaatcggcggcttcatcgaaatcattgcgggcatcggcatcctcatatttactcagcttgccagggcccggcggtcagatctgataaaagaaaaagaagctagcgcaaatatgtag

SEQ ID NO: 4580 - DNA, 1329 bp, Bacillus licheniformis
atgaaaaaaggattgaaaatcgtaacaattggcggaggttcaagttatacgcccgagcttgtcgagggattaatcaaacggcatgacgagcttccggtcagcgagctctggctcgtcgatataccggaaggggaagaaaaacttaatatcgtcggcacgctggcgaagcgaatggtcgaaaaagcaggcgtcccgatcaaagtccatctgacgctagaccgcagggaggctttaaaagacgctgattttgtcacgacgcaattccgcgtcggcttgctcgaagcgagagcaaaagatgaacgaattcctttaaaatacggggtgatcggtcaggaaacaaatggaccgggcggccttttcaaggggcttcgcaccattccggtcatccttgagattgcaaaagacatcgaagaactgtgccccgacgcgtggcttgtcaattttaccaacccggcaggcatggtgactgaagcgctgctccgctattctaatttgaaaaaagtcgtcgggctctgcaatgtgccgatcggcatgaagatgggggttgcaaaggcgctcgatgttgatgaaagccgcatagacattcaatttgcaggattaaatcatatggtgttcggactcgacgttttccttgacggcgtcagcgtcaaagacaaagtgatcgaagcgatggcagatccagaaaatgcgatgacgatgaaaaatatctccggagaatcgtgggaacccgactttatccgcggccttggcctgattccgtgcggctaccaccgctactactataaaacacaggaaatgcttgaacacgaactggaggcttcaaaaacggaaggaacgcgtgcagaggttgttcagcaagttgaaaaggaattgtttgagctgtataaagatccggagctggcgatcaaaccgccccagcttgaaaagcgcggcggcgcatattacagtgatgccgcctgcaacttgatcagctcgatttacaatgacaagcacgatattcaacctgttaacacgatgaataacggagcgatcgcaagcattcctgatgactccgcagtggaagtcaactgtgtcatgacgaaaaacgggccgaaaccgatcgcggtcggagatttgcctgtcaccgtgagaggtcttgtccagcaaattaaatcgttcgaacgcgttgcggctgaagcggctgttacaggcgattacaacactgcacttgtggccatgacgatcaacccgctcgttccgtccgacaaaattgcgaaacaaatactggacgaaatgcttgaagcgcataaagagcatcttccgcagttttttagatctgtagaagcatag

SEQ ID NO: 4581 - DNA, 330 bp, Bacillus licheniformis
atgtccgaggaattggaacgaacgatatttcaaattatccttcacggaggaaacggcaggagcttttgcatggaagcgatagccgaagccaaaaagggagatttcgcagctgcaaaagaaaagatccgggcggctgacgaagaactgatcagggcgcatcactttcagacagctttgattcaaaatgaagcgaagggtgcgaaaaccgaaccttcactgctcatgattcatgcccaggatcatttaatgaatgcgatgaccatgaaagatttggccgcggagattgtcgagctctatgaaaaaatgaatatccacggaggtgtcaattga

SEQ ID NO: 4582 - DNA, 1353 bp, Bacillus licheniformis
gtgaacaagtttaatgcatttttagaggagaagatcatgccggttgccggcagaattgccgcccagcgccatttgcaggctctcagagacggcattattctgaccatgccattaatcattatcggatcgctgtttctcattttagccaatttgccgattccgggatatccggaattcatggcggggattttcggcgatcaatgggctgagaaattaagctatccggttaatgtcagctttgacattatggcgctgatcgccacgtttggcatcgcctaccgtctggcggagaaatatgatatcgatgccctgtcatcgggcgccattgccgtagcagcttttctgcttgcgaccccctaccagattccgttcacacccgaaggcgcaacagaggaaattttagtgtcaggcggcatcccgatttcattaatgggaagcaaaggtctgtttgtcggcatgctgatcgcgatgttctccactgaggtttaccgctgggtcgttcaaaaggatattgtcgtcaaaatgccggacggcgtaccgccggctgtcagcaaatcatttatcgctctgattccgggattcgccgttatcggctcgatctgggcggcccgccttttaattgaaatgacgccgtttgaaagcctccataatgtcgtcaacgtccttttgggaacgcctctttccgtccttggcggcagtctcggcggaagccttattgccgaaactgtgaaaatgctgctgtggtcctgcggccttcatggagcaaacattgtcggcggagtgatgtcgccgatctggtacggagcgatggacgaaaaccgtctcgctttccaagccggagaagcgctcccgaacatatttacgacgcagttttttgagatttggatcaacatcggcggcagcggcgctactttggctttggtcattacgatgtttcttagggcgcgaagcaagcaaatgaaacagctcggcagactcgccatcggccccgctgtttttaacatcaacgaaccgattatcttcggcatgccgatcgtcatgaacccgatgctgctgatcccgttcatcgtgtcgccgctgctgatgataacggcaacctatattggaatgagcacaggtcttgttgcaaagccggctgggattgccgtgccgtggacgatgccgcccggcttttccggatatttggcaacaggagggaaaatttccggagcggtcatgcagctgatcaatctgttgatctcgtttgtcgtatactatccgttctttagaatgtgggataaacaaaagctgaaagaagagagcgaactggagaccggaacggctgcaagcgacggtcaacaggtcagtgtatag

SEQ ID NO: 4583 - DNA, 306 bp, Bacillus licheniformis
atgaatatcttattagcttgcgccgcaggaatgtcaacgagtctgcttgtgacgaaaatggaaaaaagtgcagaggaacaaggaaaagactataaaatctgggccgtttccggaggagaggttcagaatcatatcgataaagccgacgtattgcttcttggcccgcaagtccgttacatgctcccgcaattaaaaaaattaggagaatcgaaaggtgtacccgtcgatgtcatcaatacggtccattacggaacttgtaatggagctgaagtgttaaaatccgccgaacagcttgccggctcttaa

SEQ ID NO: 4584 - DNA, 1950 bp, Bacillus licheniformis
atgctcaatgctcggcttaagcttatccttggcgaattgataggggcagaatcaccattaaccagcgcatatttggccaatgagctaaatgtgacctctcggacgatcagatcagatgtgaaagaattagaccggcttctctccaaaaacggcgctgccgtccaatcgatcaggggtgcaggctatcggctctccatcaagaatgaccgcctctttcgccagcttctgcagcacacatttcatcaagagctttctactcccgtttttccaaatgagcgtattctctatttattaaaaaggcttctcttaactgaggagtatgtcaaacttgaagatttagccgctgagatgtatatcagcaaatcgacggtccaaaacgatatgagagatgtgaagaaaaggcttaaaccttacgacattgagctgaagatcaagccgaattacggctttaagctgaagggagatgagatgaagctgcgatcgtgcatcgcagagcacctttttccaaagcgggaaacggatattgatattatgaacacccggatatccattctcccaaaagaagagcttgctatgatccgtcaaacgattttagaaaaaataagcgaagatcaaatttctctttcagatatcggactaaacaatcttctcatccacgtcgccattgcatgcaaacgcatccgaagcggcaaacatgtttctctttattccaaagatgtaaaggagattatgaatcataaagaatatgaagtggcgagggcgattgtccgcactcttgaacaaaagctgcacgtggcgtttccagaaaaagaaacggcctacatcgccatccatttgcttggcgcgaaaaggacggttatggccgccattcgcagcggtgcaatcgaaagcatgatggatgaagaagagacagaccggctgacgcaattgatcatgaaaaccatcgatcaaaaattcaccctcggcattggggatgacaaagaattaaaaatcggtctcggccttcacctaaaaccggctttgaatcgctgcagatacggcatgaatatcagaaatccaatgctggatgcaattaaggccaattatccgctcgcatttgaagcgggtattcaagccggtgaagtcatcaaaagagagacgggatttgacattcaggaaagcgaggtcggctacctcgcgttgcatataggcgcagccatggaaagaagaaacatgaacaggccctcaaaacgctgtatgattgtctgtgcttcaggggccggaagcgccatgctgcttcaggacagactgcgggcaacattcggttcaaagcttgagatccttggaacggttgattactacaagctgaatcaaatgtcgctccatgcactcgactttgttatcagcacaataccgctgtccgatgatcttcccattccggtgattcaagtaaacacaatactgggagggggagatttaacgaaaatagaacaagtgcttgccgaagatgacggaatcgcttcgacttatacgagaaaagagcttgtctttttgcgggaaagtctgtcttcaagagaggatgtccttcgctttctgtgcggaaaagtgacgcaatcagggcttgcagacgcggggcttgaagcctcggtctttgaacgggaggccgttgcgcccacttgcttcggcaatctggttgcgattccgcatccgatgacaccaaaaaccgcttcaactttttgggcggtttgcacgctgcaaaaaccgatagtctgggagaataagagggttcaattcgtctgccttctttgtgtagaaaaggacaatacagcaaatttgcaggagatgtacaaatttttgggccgtgttttagatgacagggcgattgtccgggaactcctgaaatgcaaaacgtacggggagtttatgtccgtctttaaaaaaagcgggccggctcatcgatatgccaaatga

SEQ ID NO: 4585 - DNA, 108 bp, Bacillus licheniformis
atgaaaaaaatgattaaaagcgccgtcaaatgggcgcctgtcatctatccgatcgcatggaaaatcattaaaaaccgaagggagaaaaagaatctgaaagccggttaa

SEQ ID NO: 4586 - DNA, 591 bp, Bacillus licheniformis
atgaatccagctcacgaacctctcccgctcgaattttacaacaagccaacaattgaacttgccaggtccctgttgggctgtcttctcgttaaagaaacggaagaagggcctgcttcaggatatattgtggagacagaggcttataaagggccaggggacagagcagctcacagctatggcaaccgccggacaaagcgcaccgaaatcatgtatcgtgaagccggcgtggtgtatacgtacaccatgcatacccacacactcatcaatgttgtaagcggaggagccgatgaacctgaggccgtgctgatcagagcgcttgaacctcatgaaggcctcgcgctgatggagaagcgaaggagcggaaagaaaccgcgcgattggacaaacggtccgggaaagctgacaaaggcgctttccatcacgatgaacgattacggcagaccgctgacggggccgccgctttatatcgcaaaagggtatgaaccccaagatattttgagcggtccgcgaattggcattgacaactcaggtgaagcgagggaatacccttggcgattctggataaaagggaaccgctatgtctcaagatag

SEQ ID NO: 4587 - DNA, 672 bp, Bacillus licheniformis
atgcactcttcaaatccagtcaaaagacagtctgcaagtgattacgcttataacgaattaagaacgaaaatcatcgaacttgaatatcctccctctgaacagcttgctgaagacagtcttgcaaagggtttaaacatcagcagaactcctcttcgccaggctctttaccggctggagcttgaaggattggtcagtaaacagccgaacggccggcttcgcgtatgcccgatttcgctcgctgaagcgaaagaggtttttaaagtgcgtgaagcgcttgaaggactactcactgccgaagccgcacagctggtgacgccggagagccttcatcagcttgaagaccgcatcgaactgatgaagctggctgccgtaaagggccgcaaaacagatacggtcaaatacggatcagaatttcattctatcttgcacgccatcagcacaaatgcaaccgcaaaacgttttctggatcagcttgaaagcaggattgaacggtatcgcagaatcagcggatacaaaaatcctgactacaaaccgtctgtatctttcaatgaacacttggatatttttaatgccgtcaaagaaaaaaacagcgttttggcagaagccgccatgcgttcccacattaaacgaagcttacgttcaattgaagaaacgctcgaacgttcatactaa

SEQ ID NO: 4588 - DNA, 1116 bp, Bacillus licheniformis
atgggcaaacaaggtgtatttaaaccgggattagaaggcgttattgctggagaaacgaacatttctttcttagatacggaagcggaacaaatcgtcattaaaggctatgatttaatcgaacttgcagaacaaaaaacatatcttgacctcgtctatcttctccttcaagataagctgccagatccaatggaattgaaaggaattgaaagcgctttaaaaagtgcgtatgaactgcccggcggaatctatactattctgaagtcgcttccgaataatacccatccgatggatgcgctccgaaccgggatttccgctttagcaggatatgatcccgaattgaatgacagatctcaagcagcaaacagaagcaaagcgctgcgcttgatcgcacaggttccgaatattaccgccaacagctaccgcatccttcaccagaaaaacgtcatcacgcctgacaaacagctttcattcagtcagaactttttatatatgctgacggaaaaagaaccgactccccaagaaacagccgtctttgatcagacattaatgctttacagcgagcacgaaatgccgaactccacatttgccgcaagagtcatcgcatcgacaaacacagatatatacggtgctttcacaggcgctgcagcatcgctaaaaggacatttgcacggcggtgcgaatgaagcggtcatgtacatgctgctcgaaggagaaacaaaatcgggcttctgcaagctgattgaacataagttaagcagaaaagaaaaaatcatgggctttgggcaccgcgtctatatgagaaaaatggacccgcgcgcagccttgctgaaaaaggcgctctattcgctttctcataaaaccggcagacaggatttatatgagatgtgcgatgccggcgaaaagctgatgcgcgaagaaaaaggcctgtatccgaacctcgactactatgcggctccagtctattacctgctcggcataccgatcgatctctatactccgatatttttcgcggcacggtcggtcggtcttagcgcgcatgtcattgaacagcatgaagacaacaggctgttccgcccgagagttcactatacgggaccgcgtcatcttcatccataa

SEQ ID NO: 4589 - DNA, 1440 bp, Bacillus licheniformis
atgaaaactgaaagtcaaacgctccaaaactgtgatcaattgctggaagagatcgccgactatacggtaaatgccaagatttcaagcgaagaagcgattgaaaccgcccgttacgtcttaatggatacactgggctgcggaatattggcgctcaaatatccggaatgcgccaagcatctcggcccgattgccccgggtaccgtcgtcccgaacggcacccgcgtcccgggaacgcaatttgagcttgatcctgttcacggcgcctttaatatcggctgcatgatccgctggctcgattataacgacacatggcttgcggccgaatggggccatccgtcagataacctcggagcgattttagcctgcgccgactatgtcagcaggcagctgctcgcggcgggcaaggaaccgctcacgattaacgatgtcctgacggcaattgttaaggctcatgaaatccaaggcgtccttgctctcgacaacagcttaaacagaaacgggcttgaccatgtgctattcgtaaaagtcgcctccactgctgtggcatgctcactattggggggcacaaaacaggatgttatcaatgccgtctcccaggcctgggtcgataattcaagcctgcggacgtaccgccatgctccgaataccggctcgcgtaagtcctgggcagccggtgatgcgactagccgcggcgtgaggctcgcgatgatgaccttgaaaggcgaaatgggatataaaaccgctttgtctgctccaatgtggggttttcaggatgtcttattcggaggaaaagaattgacgctcgccagaccgctcgactcttatgtcatcgaaaatgtcctttttaaaatttcgtatccggctgaattccacgctcaaacggctgctgaagccgcgatcaggcttcaccctgaagtgaaggacagacttgatgacatcggccaaatcgtgatcacgacgcacgaatcggccatccggattatcgacaaaacgggagaattacacaatccggctgaccgtgatcactgccttcagtatataacagcgatcggactgatctacggcgatattaccgctgaccattatgaagacgaaaccgcgcaaaatccggagatcgacaggctgcgcgaaaaaatgacgacagtcgaaaacaaacagtattccgtcgattatctcgacccggaaaaacgctcgatcgccaacgctgttcaagtgttttataaagacggcacacactcggaaaaaatcgcggtcgaatacccgattggtcatcggcgccgccgcaacgagggcatcccgctcttaaaagacaaatttatcaataatttaaaaacgcgctttccggcggggcaagcggaacgaatcaacgccctgctgaatgatcctcacagattaagcggtgcacctgtaccggatttcatggaattgtttgtcatttag

SEQ ID NO: 4590 - DNA, 918 bp, Bacillus licheniformis
atgtggattgtctcgaaacaatcaactcaggaagagctggccaatgcattcagaaaactgatgaaagcacctgatattttgaaaatacccggtgttcatgacggaatggctgccattaccgcaaaaaacatcggcttcaaagcgctctatctctccggggccgcctacacggcaagccgcgggctccctgacctcggaatgatacactcccaggaaatcgctgaaaaagcaagcgaacttgtgagagccgcaaatcttccgcttttggtcgatatcgacaccggctacggcggtgtcctaaatgcggcacgcacggccgccgaaatggccgagagcagagtcgcagccgtccaaatcgaagatcagcaactgcctaaaaaatgcggacatttaaatggaaaaacgctcgtacccgcagaggacatgatcgcaaaaattagagcgataaaagaaaccgccccttcgctcgttgtcgtggctcggacggatgcaaaagcagcagaagggatggaagccgccgtcaggcgcgccaatttatatgccgacgcgggagccgatgccatctttcctgaagcattaacgagcgcagccgaattccgggaaatggcttcttccattaaagcgccgctcctggccaatatgaccgaattcggaaaaacgccttattatacggctgacgaattccaaatgctcggctgcagcatgattatttaccctgtgacttccctgcgcgccgccgcgaaagcttatgagcgggtcttcgcggagattttcgaaaaaggcacgcaaaagggtgtgctcgatgacatgcagacacgcgaagaattatatgatgcgattcattactacgactatgaaaaactggacgaaaatattgccaaaacggtgcttcccgaaatcggaaaagaacaccgttga

SEQ ID NO: 4591 - DNA, 1194 bp, Bacillus licheniformis
atgacaaagcataaagcggacagaagcttgaagtcgctgcttgaaattctattcgtttcaaccaggcttggattgacatcattcggaggtccgatcgcacatttaggatattttcatgccgaatatgtccgtaaaagaaaatggatggacgaaaaaaactatgccgatctggtcgctttatgccagtttctgcccggtcctgccagcagccaggtggggatcggaatcggcgtgatgagagccggcgtcctcggcggaatctcagcgttcatcgggtttactcttccatctgtcatagcgcttgtattatttgccatggttctgcaaggcttcgatattggaacagccggctggattcatggactgaaaatcgtcgccgtcgccgtagtcgcccatgccgttatggggatggcgcaaaagctgacacctgataaaaggcgcaaagcgattgcgctgtttgctctggtcgccactcttctctggcagacggcttttacacaggtcggagtcatcctgctcgccgctttcgccggatatcttatctataaagagcaagttgaaacggatgattccgtcatgcagtttcctgtgtcgcgccggtttgcagcggtctgtctcagcttgtttttcgggcttctcattttgctgccggtgctcagggaaatgacatcttccggctggattgccatgtttgacagcttttacaggtcgggttctttggtcttcggaggagggcatgttgtcctgccattattagaacgggaatttgtaccggcgggatggttaagtgaagaggcatttttggccggatatggagccgcacaagctgttccggggcctttgtttacattcgctgcatatcttggtgcggtgatcagcggctggcaaggcggattgctcgccacagcggcgatttttctgccggcgttcctgctgattctggggacgctgcccttctgggatacgctgcgccgcaatcctaaagtaaaaggcgctttaatgggagtgaatgcagctgttgtggggatattgatttccgcgttttatcacccgatctggaccagctccgtattggcgccgatcgattttgcattcgctgcggttttgttcagcctgcttgtctactggaagctctcgccgtggatcatcgttgcagccggtgctgtcggcggtgcgatgttgcagctgttgtaa

SEQ ID NO: 4592 - DNA, 309 bp, Bacillus licheniformis
ttggaagataaggtattgcgaaagctatttctaggatttattcaaattcatattctgcaccacgccagcgaacacccgattttcggattgtggatgcttgaggaattgaaagagcacggatataacatcagtgcgggaacgctgtatccgatccttcattctatggaagctgacggacttcttcgaaaagaagaacagaatgtggacggaaagatcagaaaatactattcaaccacggaaaaaggagcaagcgtactgaaggaagccagattgaaagcatatgaactgtttaaagaaattaaagaatag

SEQ ID NO: 4593 - DNA, 1716 bp, Bacillus licheniformis
atgatacgccgctttttttcatactataaacctcataaacgtttgttcttcatcgatttcagcagcgcgatcgtcgttgcagtgctggagctggcttttcctctagttgttcagtggttcattgatacgctgattcccgggggagactggcttgaaatcgtctgggtaagcatcggcctcttactgatctacctgctcagcacaggtctgcagtacattgtcaattatctcgggcataagctgggcatcaacattgaaacagatatgcgccaggagcttttccaacatgtacagcgccaatctttccgctactttgacaatacaaaaacaggacatatcatcagccgcatcacaaatgatctgtttgatatcggagagctggcccatcacggaccggaagatttgttcatcgccgtgatgacctttttaggtgcattttggattatgctgacgattaatgtgaagcttgcattggttgcagttctgtttgtgccgttattgattatcttgatcatctattccaatatcaggatgaaccgggcttggcgccagatgtacagcgaaatcgccgatgttaatgccagggttgaggacagcgtttcaggcgttcgcgtcgttcaatcttttacgaatgagcgctttgagatatcccggtttttaaaaaacaatcaaaagttccgcaaggcgaagctgaagggctacaaaacgatggctctcacgactgccggaacctttttgatgacgcgcctgatgattctggcagtgctcgtgttcggagcttggctcagtttttccgggaatatgtcctacggggaattcgtcgggtttgttctttatgtcaacgtgctgtttaagccgattgataaaatcagcgccattttggagctttatcctaaaggaatggcaggatttaagcggtttacggagttgatcgatacaaagccgcagattgtcgaccgcaaagatgcgattgatgttccggcgctggaaggaaacatcgtcttcaagaatgtgacgttcggctatgaaaaacataaacccgtcctgcgaggcatcgatctgtcaattaaagccggagaaaccgtcgcctttgtcgggccgtcgggagcgggcaaaacgacgatcagctcgctgattccgcgcttttacgatatagacggcggggccatcacaattgacggcatcgatattcgcgatatgacaaaacgctctctccgttcgcaaatcggcatcgtccagcaggatgtgtttctttttacgggaacgctccgcgaaaacattgcctacggaaaactggatgccacagatgaagaaattcagcgggccgccaaaatggcgcatttggaacagctgatcgagtcgctccccgacggttatgaaacccaggtcggcgaaagggggctgaagctgtcagggggccaaaagcagaggattgccatcgccaggatgtttctaaaaaacccgccgattctcatattggacgaagccacatcagcacttgacacagagacggagcaggtgattcaaaacgctttgacggagctcgcaaaagacaggacgacgcttgtcattgcccacagacttgctacgatccgcaatgccgaccggatcgtggtcgtgacagagaatggaatcgcagaagaagggacacatgatgaactggttgagcgcggcggtattttcgcaaatcttcatcgtgtacagtatcagtcgtaa

SEQ ID NO: 4594 - DNA, 660 bp, Bacillus licheniformis
atgcgagacattcagttgtttttggccggggactcaacggtttgcgattatgatgagaatagggcgccgcgtgcaggctgggggcagaaaatcggcgagtttttaagcgcaggtgttttgatccgcaatgaagcggcatcaggaagaagctcaaaaagctttattgaagaaggcaggctgaagcgaatcataacacagatcaaaagcggcgattatttgtttgtccagttcggtcataacgaccaaaaaccggatgatcgctatacagagccatacacaacttacaagcagcatttgacccggtatatagatgaggcacggttaaagaaagccaatcctgttctgattacaccggtccagagaagatcatttgcaagcgatggccgctttaaaaatacccatggcgactatcctgatgcgatgatacagcttgcggaagagcttcgggtgccgcttatcgatctcgccttcaaaagccgtcaattgcttgaatcgctaggaccggaagcttccaaaaagctgtatttatggcttgaaccgggggaacaccccaactatccggacggagccagggatgacacccacttttgcgacttcggggcaaaagaaatcgctaagcttgttgcacaggaagcaaaagaagcgggaattcctttataa

SEQ ID NO: 4595 - DNA, 483 bp, Bacillus licheniformis
gtgaaaacaaatcattttagaggaccgatcttttgtccgccgccattcaagccggcacctaaaccacagccgcctcaaaaaccgcagccggacaatccgcaaccggataacccgactcagaagcctgtgcttgaggcaaaaactattaacagcaataaagagtggtcaacttcagacatcgaaattacttatagaccaaacgcatttgtcggttcaagctatgttgaatttcattttccgtaccgctttcatgcaagcacaagagatacactaaatggaaaaacgcttgactatacacaaattttaaatgatggacaaacggtcagagttcctgtctatgctttaagttcctctgagttcaaactggtcatggttcggaaaacgcttccaaatgccggcactcacagaattactgctgaactgcagcaaaatggaaaaaacatcaaccatgctgaaacaactttggagattgtccctcgttaa

SEQ ID NO: 4596 - DNA, 474 bp, Bacillus licheniformis
atgttgaaacgtaaatttatcggtaaaattggagtcggcctattaacttcagccgcattgttttctttcattcttccgacggaagaggcgagcgccactttttacagaaacgctccgacgctgcatgtcgagacggttgacagcaataaagaatggacaacttcagacattgaagtcacttacaaaccgaacttttttgtcggttcaagctatgttgaatttaacttcccataccgcttccatgcgaatacgagagattcgctgaacggcagaacactgaactatacacagattttaaatgacgggcaaacggtcagagtgccggtttacgctttcagctcttctgagttcaaactggtcatggttaggaaaacgcttccaaacgccggcactcacagaatcaccgcggagctgcaaaagttcgggcgaaactacaaccacgcagaagctacagttgatatcctgccacggtaa

SEQ ID NO: 4597 - DNA, 1230 bp, Bacillus licheniformis
atgggtacgcttaacagccaggcagatcttgcggctcattcgaaagcaaagccgaacagggtatggatcgctgtcatattgggtattttatcgggaatcggtccggttgtgatcgatttatatttgcccggccttccacagatggcaactgatttacatacgaatgcttccgtcgttcagctcagtttaacatcgtgtttactggggctggcaatcggccaaattgtcatcggccctttcagcgatgtccttggaagaaggcttccgctgatcgtgtcgctgtccgtttttgccgcggcctcttttttatgtgctatgacatcttctgtatgggttttgatcgcgatgcgctttattcaaggcgcggcgggggcaggcggcatcgtcatatcacgcgcgattgcccgtgatctatattctggaacagaattgacaaagttcttttcgctcttgatgcttgttaacgggatagcgcctatcatatctccggtagcgggcggacagctgatgaaatggacgacgtggaacggcgtatttttcatcatcggcctttttggcctgctgatgattttgtccgttatattcggggttaaagagtcgctgtctccggaaaaccgtacggcaggcggattcaaagagacgtttgtatcatttggaaggctcttcggccagcgtacatttatgggatacgccttggcgcaagggctgatcgtagcggggatgttcggctatatatcggcctctccgtttgttttgcaggacatttacaaattgtcggctcaagcctttagtttttgtttcgcattaaacggcctgggcattattatcgcagctcagattacgggcaggcttgccggccggttcggtgaagcgtcccttttgcggagcggtttgctgctgtcttttaccgcaagcgttgttttatttgtttctgtcttttttaaagctccgctgattcttattttaatcccgctgtttgtcgtggtttcctgcatcggaatcgtgacgacgaccagcggatccttggccatgcagagccaggggaaatcagccgggagcgcatctgcgcttctaggactgcttccgtttattttaggagctgccgcggcgccgctcgtcggtattgccggaagccatacagctttgccgatggcagtcgtcattctgttttgcaatatcagcgcgctcgcttgttttaacatactggttcggcgggcagcgcttaaatga

SEQ ID NO: 4598 - DNA, 777 bp, Bacillus licheniformis
atgaattcattttttatgttatttcaaaaagaatggacggaaagctggagagacggaaagctgctttggctgcctgtcattttgatccttctgggcttgattcagccgctcagcctgtattatatgcctcaaattatcgatatggccgggaatttgcctgagggatccgtgatcgacataccaaggccgagaggtgaagaggtaatggcgagcaccttgtcccagttcggcacggttggtacggcaattttcgttttcagtgtgatgggcagcattgttcacgaacgaaaccaaggatccctttcattggtgatggcgagacctgtcagcccgcttcagtatatcggcagcaagtggcttcagcaggtgctgctcgtattggtttcgtttgctgcaagctacggtttggctttctactatacaaatctgctattcggcaaggttgaatttgaccggtttttagttagtttatccgtgtacagtatatggattatatttgtcatgtcggtcacgatgtttttcagtgctctgtttcgccatatcggggggattgccggcatgagcatctgtttcatcgccttcgtttcattggcgggatccttatttccccgctttaccgaatggatgcctgataaggcgaaaagccaggctgattattttatcatgcacggttcatgggaccatgctttcggctggatggtgttttcgtctttgggaattgtaattcttttgttcatgtgcaccgtttttgtttttaaaagatatgaatcttactaa

SEQ ID NO: 4599 - DNA, 888 bp, Bacillus licheniformis
atgctgtccgtcaatggcttaacaaaaatgtatcagcagcaccaagctgtccaaaatgtcagctttgaccttgaatatcagcaatgcgttgcccttctcgggccgaacggagcgggaaaaacgaccacattgcaaatgctttccggtttattggcccctacatcaggacgcatccgctttttggggagagaatcgataaacaggctggaaatcggatatttgcctcagcatcctgcgtttttttcatggatgacagctttagaatatacggtattcgctgcaaggctttccaaaatgaaacgtcgtgaagccctggaaaagagtcgaaccgctttgcgctatgtcggtctggaaaaggaagaagaccggaaaatcggcggtttttcaggaggaatgaagcaaaggctcgggctggcgcaggctttggttcatgagccgaggctgttgattttggatgaacctgtttccgcgctggatccggcggggcggcgcgaagtgcttgatatgatgaaggatttaaaaaagaagatgacaatcctattttcgactcatgtgctgcatgatgccgaagaggtgtgcgatcaagtgatcatgctgaaagaaggggctgtcaaatggtctggtccgcttcacagattgaagaaccgtcatttaaagccatcatatatgctgacagctgaagaaagtcttgaaggatggctggaacacctgccttatgtcagcaaagtcgtgtatcataagccttcacaagctgaattttatttaacagatcggtctgacaaccgccgactgttggctgaatgcttgaacagacaagtatcgattgttcgttttgaacaaaaaacgatgtccttggaagatatgtatctgaaggtgatggggctatga

SEQ ID NO: 4600 - DNA, 185 bp, Bacillus licheniformis
atgactggagcagatataccttgggcgctgctcgccccctttcattgtgctgtatttcattttagcagtgtccgcattggtcagttgcataaaacaggagaaaacgaatggcccaaagtggatgtggattttgatcattttcgggatcagttttgtcggtcccgtctcttactttatcatcggta

SEQ ID NO: 4601 - DNA, 219 bp, Bacillus licheniformis
atgaatcttgacatgactcaggaaaaactgctgctgctgctttgcatttcaccgcttttatttgcgcagagtatctttctatttcttaatgcgaagaaaaagggagccaatgcgtggttctggggaatatggggcttgatccaaacaccgatgcctttattattctattatttatttgttgtaaggccgtttcataaaaaaaggaggccgttatcatga

SEQ ID NO: 4602 - DNA, 324 bp, Bacillus licheniformis
gtgaatgaacgagatgaaaaagaaacggttacacatttgaaacgcgaactcgaaagaattgatgataattttgtgccgccggttcctcaagcatttgaactgaatcagcgtttagcgcggtttaagcaagagcgcaagcgggcgcttaaaaaggaattgctttgttttatcgtcatggcgctggtgattttatcggcctacttgacgatttccgttcaagtaccggctgtttttatcatggtgcagggagcggcgcttatcttgctgccagcgcttgccctgatagaaaaaaggcggcatacggctgatgaggaggctgattaa

SEQ ID NO: 4603 - DNA, 534 bp, Bacillus licheniformis
gtggatcaagcagatgaaaaagaactgatcatacgggcaaaagacggtgaagatgcggcttttacgaaactgtttcagcttcattacccctttgtatatcaatatgttctgaaattaacgctgaacccagatctcacagaggacttggtccaggaaacgatgctgaaagcgtatgtcagccttcatcagtttcagggcaatgcaaaattttcaacatggctgatctcaattgcttcccggctgtttatcgaccatcagcgccggaaaaaacgcgaaaaccgcaaaacgcaagcagcaggagaggaagccttgcgaaaaatgaaatggaatcctgcccttcacggccacgaatggagcgaatacttggagctgtttgctgcgcttgagcctgagttcagaatgccaatcttgttaagacactattacgggtttacttaccctgaagtggcaaacatgctgaaaataaaagaaggtaccgtcaaatcgcgcgtgcatcatggattaaagaaaattcgaaaggagtggggacagtga

SEQ ID NO: 4604 - DNA, 1254 bp, Bacillus licheniformis
atggagcggcaaaaacaaatcgtctatgaagaaaaacaaattttaaggaaagatcatatgatcttttggggtgccgtcttttgtttctggtttgctacatacatctatgtccctgttttcggattatatttagacaacatcggattttcatattcagcgataggaatcgtacttggaagctacggcgtcactcagatattactgcgttttccgttcggcatcctgtctgatgttctttcgccgcttagaaaacagctgttgatcagcggctttgcaatgtctctgttgagctgctgcatatttctgttgtccgattcgttcatcatggtgatcacagccaggctgctcgccggtatgaccgcggcgatgtgggtgatggcaaccgttttatactcgcagtattttacaaaagatcaatcatcaaaagcgatgggcatcctgcagtttttaacggtccttccccaattcatcagcatggcagtcagcggctacctcgtccatttgttcggctggatgtttccgttttggatcggtgttgccgtatcatgcatcggactgattctgtcattttacattaaagataacgggccccgccatacggccaaggggatggctttgtcagactatgttaaacagacgttgcgtcttcctgatttaaaagcgattacaacattatcgtttttagcccacgctgtactatttatgaccgtgttcggatttacgccgatttacgcggaatcggtcggaatcgatgagaaacagctgatttgggttatgttcgccttttttgttccgcaaacgctggcttccgtgtggtgtatcttttacaaagtaaaggccgccgatgcactgatatggatatcttatgtgataacggctgttttcttttgcttgctgccgtttgccgaaacccttttcgcggtatgtatcgtccacgccgtgacaggactgacattgggatttatttttccgcttttggtcagcaaagtcgttcagcttggtacgcctcagctcaaaatgtctgtgatgggtttctatcaatctttttatgcgctcggtttttttctcggaccggttgtggcgggaaaagtggctgaactgttcgggctgccggaggtgttttggtttgccggcgcattgtcactggccgctgcatgtatcatgcttttttccaaacagtttcgtatatttacagcaggaagacgggataaatcctcaaatatcgttcagccgacgaaggtcttccgtaagtga

SEQ ID NO: 4605 - DNA, 132 bp, Bacillus licheniformis
atgccccgagacaggcggaagaaaaagggcactctcaagacccgtattaaagaagaaaacagcgatgaacctcttgtgggattcatcgctgtttcacttacggaagaccttcgtcggctgaacgatatttga

SEQ ID NO: 4606 - DNA, 1599 bp, Bacillus licheniformis
atggatcagcattcaaacgagcagaaatctgacatggagactgatgatacgttaacaaaccggcagggccacccgatcacaaacaatcagaatatcagaaccgtgggcaaccgggggccatcaacattggagaactatgatttcctggagaagatcagccactttgacagggagagggttccagagcgggtcgtccatgccagaggagccggagcgcacggctattttgaagcttatgggacagcaggcgatgagccggtctcaaagtatacgagagcaaagctttttcaggaaaaaggcaagagaaccccggtgtttgtccgtttttcgacggtgactcacgggatatcctcaccggaaacgctgcgggatccccgcggatttgcggtcaagttctacactgaagacggtaactgggatctggtcggaaacaacttgaagatcttctttatccgcgatgcggtaaagtttccggatttaatccatgcatttaagccggacccggttacgaatttgcaggatggcgaaagaatctttgacttcatttccaacacgcctgaagcgatgcatatgatcacatttttgttttcgccttggggtattccggcgaactaccggcagatgcaggggtccggggtgaacacgtacaaatgggtgaatcaagaaggggaagccgtgcttgtgaaatatcactgggaaccgaagcagggcataaaaaacttgacgcaaaaagaggcggaagaaattcaggcgaagaatttcaatcacgccacacaggatttatatgaagcgattgagcgcggagattatcccgagtgggagctgttcgttcaaatcatgagcgatgatgagcatcctgagctcgattttgacccgcttgacgacacgaagctgtggcctgaagatcaatttccttggctgcctgtcggcaaaatggttttaaacaaaaatccggaagactactttacagaagtcgaacaagcggcatttggaacaggggttcttgtcgacggacttgacttttccgatgacaaaatgcttcagggacgtactttttcctactcggatacacagcgctacagagtgggagccaactatctgcagctgccgatcaatgcgccgaaaaaaagggtggcaactaatcagcggggcggccagatgcagtacaaggtcgatttaggcaaaaatcaaagcccgcacatcaactatgaaccttcaaccatcaacgggctgaaagaagcaaagcaggatggcaaagaatacaccccgcatgtggaaggaaaccttgtgcgcgaaagtatcgacaggcagaataatttccagcaggccggggacacttacaggcatttcgaagactgggaaaaggacgagctgattacgaatctggtcaatacacttgccccgtgcgaccaaagaattcaaacgaagatgatcgatatgctgaagcaatgcgacaaggaatatggaagcagagtcgaggaaggattaaaaaacgcctccagccaaaatacatccagccgagagccgatcggagcagaaggcgccgaagatgccccgagacaggcggaagaaaaagggcactctcaagacccgtattaa

SEQ ID NO: 4607 - DNA, 153 bp, Bacillus licheniformis
ttgtttttatttgtcgtcatcaaaggatcacctcgcgtaaattttaattacaaaacaatgataacatttctcaagaaaaaaacaatatttatttataattattataaagaaaaatttattatcgttgatttgatcatgataaatgctgaataa

SEQ ID NO: 4608 - DNA, 1458 bp, Bacillus licheniformis
atgacgacaaataaaaacaacctaacaaccagctggggcgctccagttggagacaaccaaaactcaatgacagctggttcacgcggaccgacgctgattcaggacgtccacttgctcgaaaagctcgcccacttcaatagagagcgtgtgcctgaacgggttgtgcatgcaaaaggcgccggtgcgcacggttattttgaagtcacaaatgacgtttccaaatatacaaaagccaaatttttatcagaagtcggaaaacgcacgccgttatttgtccgtttttcaactgttgccggcgaaaacggttcagccgattccgtccgcgacccgcgcggtttcgctgttaaattttatacagaggaagggaactatgatctcgttggaaacaatacacctgttttctttatccgcgatgcgattaaattccctgacttcattcatacacaaaagcgccatccggtcacacatttgaaaaacccggatgccgtatgggatttttggtcattgtctcctgaatccctgcaccaggtaaccatcctgatgtctgacaggggcatccctgcgacttaccggcacatgcacggcttcggctcccacacattcaaatgggtgaatgccgaaggagaaggcgtctggatcaaataccacttcaaaacagaacaaggcattaaaaacctgaccgaagaagtggggacaaagattgcaggtgaaaaccccgattatcacacacaggacttgtatgaggcgattgaaaaaggcgacttcccggcatggaagctgtacgttcaaataatgccgctggaggatgcggatacgtaccgttttgatccgttcgatgtgacaaaagtatggtcgcaaaaagattatccgctgattgaagtcggccgcatggttctaaaccggaatccggaaaactatttcgcagaggttgaacaagctacattctcccctggaacattggtgcccggcattgaaccgtctcccgacaaaatgcttcagggacgcctgttcgcatatgcggatgcacaccgctaccgcgtcggcgcaaaccataacagcctgccgatcaaccgtccgaaagcggaagttcataattatcaaagagacggacaaatgcgctttgattcaaacggcggcggctctgtctactatgagccgaacagcttcggaggccctcaggaatctccggaaaataaaacaacggcttatccggtgtcaggttcggcggacagcacggcctacgaccataacgaccactatacacaggccggcgatctttaccgcctcttgagcgaagaagagcggacccgccttgtcagcaatatcgtaggttcgatgaagcaggtgacaaaagacgaaattaagcttcgtcaaattcagcatttctataaagcagatccggagtacggcacacgagttgccgaaggattgggcttgtctgttccgcaggaagtttaa

SEQ ID NO: 4609 - DNA, 417 bp, Bacillus licheniformis
gtggaagacgagcagctcgtccctttattaaaaaagcggggtttacgaattacagctcagcgcgtcctgattttaaaaacgattgcttctttgggcggccatccatcggcggaagacattcaccgggaattgccgtacatgagtctcccgacaatctacagcaacttgaaactatttgtgaagctcggcattttaaaagagctgtctcacggagacgcaaaaagcaaatatgaactgtttacatcacagcattatcatgtcatttgtaaatcatgcgggaagatcgctgatctggactatcctcacctcaaagaggtagagcatgcggcagcacaattgacgaactttaaagtgaactcgcattttctaggaatctatggaatctgtacaacatgccaagaacagcagcagaggtga

SEQ ID NO: 4610 - DNA, 954 bp, Bacillus licheniformis
atggaacgaaaaaaagtcggcctgttagtcatggcatacggaaccccttatcaggaagaagatatcattccgtattacacgcatatccgtcatggaaaacgaccgtccgatgatatgattgaagacttgaaaaaacgctacaagcatatcggcggaatctctccgctcgcgaaaattacgctcgctcaggcaaaagagctggaaaaaacgttgaacgagcgccaagataaagtcgaatacgtgatgtatctcggcttaaaacacatctctccgtttatcgaggatgcggttgaacaaatgaaaaaagaccaaattgaagaggccgtttccgtcgtcttagctccccactattccaccttcagcaccgaagtatacaatcggcgcgccaaacaggccgcagcagcaatcggcggaccacggatcgcatcgattgacgagtggtatcaggaagaaggctttattcgctattggtctgaagaaatcggcagcattttaaacgacatgtctgaaaaagagcgggaaaaagcggccgtcatattctcagcacacagcctgccggaaaaaatcagggagcatgacgatccttacccggatcagctcgagaaaacagcacaactaatcggagaacggctgtcatttgaccagatcgccgtaggctggcaaagcgagggcaacacgcccgatccttggctcggcccggacgtccaagacttaacaaaggaactgtatgaagaaggcttccggtcattcatttacgcaccagtcggttttgtatctgaccacctggaagttctgtatgacaacgactatgagtgcaaagtggttacggacgagcttggcgcaagctatcaccgtccgcctatgccgaacactgatccgcggttcatcgatacgcttgcttcagtcgtggagcgaacatacaacagcacagaacaggagaaagcggagctgtaa

SEQ ID NO: 4611 - DNA, 942 bp, Bacillus licheniformis
atgagggtcttgaaaaatgaactttacaggctgatggtgacgaaaagtacctggattgtgttaagcttgctgcttgtcatgacaatcgctgttgcatggatggtcagcaatggcgaaaaggagaaggagacaggtaactggaaagagcaattaaccgttcaaaacgctcagtatgaaagagaaatgagagagctgagcccagcggttcccaaataccaatttttaaaagaagagatcgcggtcaatcaataccggcttgagcataatttgccgccttctgcgaaatacaatgtttggacgatgctgaaggagttaaaaccgatcacaacattaatcgcgttgattgcaatcgtgctggcagcgaactccatcgcgcttgagcacagcaaaggaactattaaatttgcgattgcaacaccggtcaagcgttggcattatctattggggaaatacttgtcgatcttgctcaacactgtatttatgtttgctgcgacacttttatttgcgtttgttttagggtatgccctgctaggtttggagggaagccaatactatttgtcctatcgaagcggcgaagtgataaagatgtcaatgctgaagtttttagccttagactatggagccgctttattgaatattattgtgctggccacgctggcctttatgatttcggtcatcctaagaagcgcggtcgtctctgtcggtctttcgctgttcgtcttttttacagggtctgcgattactcaatttttagcggcaaaatttgattggaccaagtatacgatctttgcaaattcagatctcagtcaatacattgatggggagccgtttattcaagatatgactctttcattttcagcggctgtgattgctgtttattttattctttttctggctgtctccttttgggtttttcaaaagcgggatattgtcacgtcataa

SEQ ID NO: 4612 - DNA, 903 bp, Bacillus licheniformis
atgagtcaagtcgaatttgaaggtgtaagtaaacgaataaaaggcagaccaattgtccaaaatatcacatttcaaattgccccaggtacaatttttgggctgctcgggccaaacggcgctggcaagacaacacttatcaaaatgattgtcgggatggcaaagccgacatcaggagatatccgcatcgacggctattcagttaaaagcaattacgaggaagcggcagcccgagtcggttctgttgttgaaaacccatccttttatgagcacttaacaggataccaaaaccttaaatatctcggcggattccacagccacgtgtcaaaggagcgcatagaagagatcgttcagcttgttgatttgacaggaagtattcataaaccagttaaaacgtattcattaggcatgaaacagcgtttgggccttgccgtcgcgctcttgcatgatccggaatttctcattctcgatgaaccgacaaacggccttgatcctcagggaatcattgatttgcgcgaacaccttcagtacttggcgaaaaccttcaacaaaacgattttgatttcgagtcatcttctgtctgaggttgagatgatttgtgatgaatacggcgtcatgaaaaacggagaactcctgcaaattaagagcaatcaccgcgataccgatacggttcgttatcggcttacattaaacggccacgccgatgaagcggctgacctgttgaatgagtaccagtatgcaggcggtctcacggaagataaaaatgagatttatgtcctttgcatggaagaagacattatgaaagtcgttaatctgttaatggagaacaaaataagagttctgcatatgaagcaggaaaaacagtcgatagaacaaagctttctggaattgatcaataaggggtga

SEQ ID NO: 4613 - DNA, 750 bp, Bacillus licheniformis
gtgaaaaatttgctcaaagcggaatggatcaaactcaggaactctgattttacaatgacgagcatattcattcttaccgcatctttagtgtttacagggtttatggcaaaacgaatcaccccgtttgcgggagggaatgaatggacatcgttaaggcatcttacattgctgttggtattcagcacgatttatccctggcttgtctcttcggtcacagtatttttgcataaggatgaactgaaaaaccgagtgtggctgaatcgaatcttatcgccgcagcctttcgcagccatgctttttgctaaggttttgtttattggactgttcgcagccgcattatatgccgtctgtgtgatcgaatcgcttgccttcggtttaatatcggggttccccgggcctgccccttggttttcttggatgctgggcttcattctcaatctcttgtcaacctttccgctgatctgtacggtcctatggcttaaattcaccagtaaggaaaagacctcattaaacattatcgtattcatttgttcactgctgagtttcggcgtttcgcaatcccctttagggcttctctttccatggtcttttcctgtgacggccctcattgcaatggagaagtcagttgccgttcttatcggttcgattgtttggttcacggcggtttcgctgctctttttttctcttctattgaaacagatcaggccataccaaaaaggaggaatacaaaatgagtcaagtcgaatttga

SEQ ID NO: 4614 - DNA, 714 bp, Bacillus licheniformis
atgaaattgtttaaagtttatttttggttaagctgtcccgaagcggtgaaaaagagaatgaaatttcagacgtttgcatgtacggttatgatcatcacagtgctcgccgttttgcttaattatcttctcttttataaaaacggggcaaataaagaaatccgtagcatggagggaatgactgtttatgtcgtctcggtttggctgacttatattacaggcagaagattatttggacgcatgatgcatcaagcttttatcttgcggtatcccgttcgcctgttcacttgggtgctgactggaatcgccgtgataactatcgtctcagcgctggtcttgctttacggctgtttggcagtcagtctgctgtttcaaaaggatgttttgttttcgccagagcgtttagccgctgttgcgatactggcggtgatcatgtcttccgtccagttttttctgaagacgttaaaggcagaatatctatttgtgctgttgatgacgctgacgccgttttttatgcaaagtggaacactttatttgccgtggggagtttcttggcttttgttgactgaatattcagtgaacgatataggcctggcagtttatcttatttcggcgggttatatagcggtctgtatgtgttggatcttaaggagcggggaggaaaagatccgtgaaaaatttgctcaaagcggaatggatcaaactcaggaactctga

SEQ ID NO: 4615 - DNA, 636 bp, Bacillus licheniformis
atggttgagcttccaattgtcatgaaacatgttgaggtgcgggcgggagacaggaaacttcttgaaaacgtcagccttgctgtggacaaagggagccgggttttgctcaaaggagaaaacggatcgggaaaatcgacgtttcttaaagcaattaccggcttgtctttatttgcgggcgaaattttgatttacggtcaatcgattatccaaaacagggaagctgctgtcgggcatatcggctatgtcagtgacgaagtgccgcttcatgagcatcttactggaacggacaatctgagagtccatgccttgcttcacggaatagatgacgatgaccggatctattctgaactagagcggttcggtatcaatccggctgatgacacgaaagtacagtactattcaacaggcatgaggcaaaagctgaagatcgcaatggccttatttcatcagccttccatcttaatattggatgagcctttaaatgggctcgaccgaaaagcgcaggaaagcgttgtagacatcataaggcggtatgacgggaccatcatggcatcaagccattggaacgaaacttttatcgaattgtttgatcgttttctagccatagaaagcgggcgtttaaatgaaattgtttaa

SEQ ID NO: 4616 - DNA, 288 bp, Bacillus licheniformis
atgctagaaatgatcaattcaattggtgctgtcgcaggatttgcggggtttatcggaatcattattttaatcagccttgacggaaaggatgaacgcggggcatatattcaaaacaaattctttcgggtgatgttctttttgcttacacttggaatatccgccgttatttttacaagttcatgggtcgatttgtcgttcgccaattataaaaacatggtcacactggctttttcgctgccgtatttcattggattcttcattttgttgggaattcgttcaagggtgtag

SEQ ID NO: 4617 - DNA, 279 bp, Bacillus licheniformis
ttgtactctatatatgtaaatgatttgcaaataaagagggtgattgagattgaaaagcaaagcggggtgttaaccaaccggattcctgtgctgcgagcagagaaagggtggacgcaaaagcagcttgccgatctattgggtgtaacaagacaaactgtgatttccattgaaaagaataaatacaaaccatccctgttaatggggtttcgcattgccgcgttatttgagaaggacatcaacgaggtatttcaataccaactagaggaggatgatcgctga

SEQ ID NO: 4618 - DNA, 189 bp, Bacillus licheniformis
atgtatgaatatcaaacagtttcaatcgctgtaggagcattcaacggaaaacttgagaaaaattattctgatgtgattcatgaatatgctgaaaaaggctggaagcttcacagcgtcttttctgttccatcaagggccggaggccaggtttcttctatcgaactgatttttgaaaaacctaaatcttga

SEQ ID NO: 4619 - DNA, 1332 bp, Bacillus licheniformis
gtgaaaagaatatatatttttctcttatgttttgcagtcctgctgccggtcggcggaaagacggctcaagcaaaagaacaagcaggagaacagtatcttttgcttgaacatgtaaaagataaatcgaaactgctggacacggcggaacaatttcacatccatgccgatgtcattgaagaaatcggacttgcaaaagtgaccggtgaaaaacaaaagcttgctccttttacaaagaagcttgctgaaaaagtcggggctgacgtcattgaaaagccgattgcaaatacagcagtaaacgaaacggaatcagtcatcagcggttcgcctgcatgggggcttgacggtattttggaactaaaagaatatctatggttcgctgcaaagcagacggattcctatcgcacgtatcaaatcgaaagagggcatccggacgtcaaagttgccttgattgacagcggactggatcttgaccatccggacttaaaagcgtccgtcaatacaaatggcggctggaattacattgacggcaagcctgtatccggagatccgacaggacacggaacacaaacagccgggatgatcaatatcattgcgccagatgtgacgataacgccttatcaagtgctggacgaaaaaggcggagacagctacaacatcatgaaggcgatggttgatgcagtcaatgacgggcatgaagtcatcaacatcagtacgggaagctatacttctcttgacagggaaggaaaagtgctgatgaaagcttatcaaagggctgcaaactacgctgcaaagcatcaggtgctggtcttctcttccgccggcaataaaggagtcaaccttgatgagatgaggaaaacggaaaacaaggtgcatttgccgagcgctttgaagcacgtcgtatcagtcagcagcaatatgaaaagcaacaatatttccccatactccaatcaagggcgggaaattgaattcacagccccgggaggatatttgggagaaacgtatgatcaggatgggatggttcgtgtgacagacctcgtactgacaacgtatccgaaagggaaggacaacaccgcattagaccagatgctaaacatcccaaagggatattccctctcatacggaacaagcttggccgccccgcaggtagctggaacagctgcactggttatatctgaataccgggagcgccatcacaggaagccatcggctaaacaagtgcatcacatcctgaggaaatcggcattagacctgggcaaaccggggaaagatgttatatacggctacggggaagtacgcgcttatcaagcgctgaaaatgatgaacaaggagtga

SEQ ID NO: 4620 - DNA, 2157 bp, Bacillus licheniformis
ttgttttttcataagacaccgtttatagaacagatgcagcagacggaatgcggactgtgctgtatggcgatggtagccggacggtatggttcgcatcatactctgcatgagctgagggatttatcgggatgcggcagggacggtatgaccctttttcatatgcgtcagctcagcgaaaatctgggatttgacgcaaaggtgtacagggcaggcgcggcagaacttccacatgtgcgtctgccggcaatcgctttttggtccgataatcattatgtggttattgatcaaataaaagaccggcatgtcaacatcatcgatcctgcgattggacgaaaaaaactcagtatcgaagcttttctcgaaaattacagcgggatcgtgctggagatgatccctaccgagcggatcaggccgaagaaaaaaccgcccgtctggaggcattttctttttcatttaaaagaatccccttctctgcttgcgaccgtgctgttgtttgcgatgatctttcagctcgtttcattaggcataccgatgctcgtgcaatacctgatcgatgacatccttgctcaaaatcagcaggctctgctgcaaacatttatgacgggcgttcttgttttaatgctcgttcaaggcacggttcaattgatcaggggtcaatttatcattaaattaaataacttccttgacaaacgaatgatgagaacatttttctcgcatattctgaagcttccctatcaattctttcaattgaggtcgttcggggatctccttttccgcgcgacaagcctccggattgtcagggatatgatgtcttcccaattggtcctcggcgtactcgattttggcgcacttttatttatctcgttttatatgttttataaatcgccgcctttagcagggctggttattctgctggctcttctgaatgtcgggatcacggcgctcagccgcgggaagctgagagaaaaaaaccaggacgaaatcgcaaagacttcgcagattcaaagctatcagactgagtttttatatgggatttttggtattaagactgtgggaatcgaaaaagaaacgtatcaaaaatgggatcactatctgggggaactgatcggggcataccgacgcaaggaagggtttcttaacatcgtgaactctctgacaggcacgatgcagatcatatcaccaatgctgattttatggattggtgcaatgctcgtgttcgaagggaatttatcggttggggagctggtggcatttcatgctttatccacacaattctttaatacaagcagctcgatcgtccaaaccgtcaactcggtaatcttgacgacgtcttatcttcatcggatacaggatatccttcaaagcccgattgaagagacacctggaaataaagacaactccccgattaagggggagatccggcttgaacgggtttcgttccgttacagcccgcacagcgaagaagttattaaagacgtaagcctgcatatcaagcctggcgaaaaaatcgctatcgtcggacaatccgggtccggaaaaagcacgctggcaaaacttattcttggcctctatatgcctacaaaaggcagtgtgttctatgatggcgtgaatattaaaaacaaggatttaagcgctcttcgcaaacaaattggtgttgttccccaagatgtaacgctgttcaaccgcagcattaaagacaacatttctttatacagtgaagatgttgacattgagcggatacatgaagtcgcaaaaatggcgcaaatatacgatgacattcaaaatatgccgatgggctttaatacgatgatttctgaaatggggatgaatatttcgggagggcagcgccagcggattgccttggcccgtgcactgctaaaccgccccgctgtgatgctgttggatgaagcgacgagttcgctggatcatcaaaatgaaaaaaaaatcgacgcctttttaagggagctgaaatgtacaagaattgtcatcgcgcataaactgacttcaatcatggatgccgataaaatcatcgttttggaagacggcatggttttaaatgtgggtacgcatgaaacattgctgaatgagagcaagttttacggagatttttatcgaaagttccttgaaaaagagcaatctgcagaggtgatgatgtga

SEQ ID NO: 4621 - DNA, 3081 bp, Bacillus licheniformis
atgagcatgaaagaattcgaaatttatctgtataaagctctttacagcaatgaacgaggcggtcaaggtcaagaacatccgtccggcttttttccggaaaacggaaaaactccgtctcgtcctacggattttcacctttcttctgtccaacattcacccaatgagcctgtgcagctgcaaggcaaaatgccggaatgggctgcctgtttgtctgaaattatgaaatacaaccctaaagcggtttccgaattaaaacacccgcttccccacatgtcatttgtcaccttctttgttccttttcttttatttgcacaagaacggatgtcgaaagctttttctgaatttgagaagcaggaaggcggtctatcgggcataatcgacgctgccggctatcaagacggcatcatgtctgaacttcaccaatgccttgataagctggcgacgagaacccttatcacagagctgaatgtagcccgggaagacggccggctaaagggggcgtcaccggaagagcgatatgtttactttgttgaacaatacatttccgatcctgaaatttaccgggaatttttcgagctttaccctgtgcttggcaggctgatggctgagaaggttctcagggtgctcgagattcatgaagaaattattgggagatttttaagcgaccgcagcctgattgcgaaaaaatttaatatcgcttcccccgaattgattggatttgaaggggatttgggagattcccacaaaaacgggcagagtgtcaaagtgctggtgttaaacaacggaaagctcgtgtataaaccgcggtccttgtcaattgacgaacattacagggagctgctgaactggctgaacggacggggaatgaagtacagcctccgtgctgcggaagtgcttgacaggggaaattacggctggcaggaatttgtaaagcatgaaggctgttcttcagaagaagaactggaaagattttatttccggcagggcggacatttggcgatattgtacggattgcgctccgtcgattttcataatgaaaatatcatcgcctcaggcgaacaccccatcctgattgatctggagactctttttgacaaccatgtcagcattttcgctcaaaatcaaaacctccatgtcaccgcattggagctgaagcattccgtgctgtcttcgatgatgcttccggtcaaattcaaacatgatgaagtgctcgattttgatttaagcgggatcggcggcaaaggcggccagcagtcaaagaaagcgaagggctacgccgtcctgaattacggtgaggacaggatgtctttaaaagaaacatcgctgaccaccgaggaaaaattgaatgcgcccaaactaaatggacgtccggtgtccgccgtttcctatacggactttatcgtggaaggatttaaaaatgcttatgccattatgatgaaacataaagaagaactggcaggaccatcggggtttttgaatctgtttaagcacgacgaagtccgccacgtcttccggccgacacatgtgtacggcaagtttctcgaagcgagcacccaccctgactacttgaccgccggagataaacgagagcaattatttgattatatgtggatgctcgccaaacagtcggaaaaggcaaacgtgtttattccggacgaaattgtcgatctgctgctccatgatattccctactttactttttatgctgggggcacttccctgctcaattcaagaggggaagaatcggaaggtttttatgaaacatcaagtattgatttggcaaagaaaaaaattcaatctttctcggaaaaggatttgaatcatcagctccgctatatttctttatcaatggcgacgttgattgaaaatgtctgggaccatgcagaaagcgggcttggacagaaggaaacggtcgctgatctcggaaaagaggtcaagcatatagctgatgatttgctgcagaaggcgatctattcagagcgcggtgaaggtcctttctggatcagcaataatgccggagacgaaaaaatggtgtttttgtcgccgcttcctatggggctttacgacggaatggcagggctggcaatattttttgcacaagcaggcaaggttctgaacgagcaggtatatacggatacggcaagatcaatgatagaagaaattcaaaaggaagaaagttattgggttcaaaatgggaattcccattctgcttttttcggcacaggctcattcatttacctgtattcctatcttggcagtctatgggaagacgattccttattggaaagggcgttgaacctcattccccgagttttggaacagccgaatcaaacacaaaacccggattttatcgcaggggattcaggattgctgacagtgcttgttaatctgtacgaaatcaagcagcacccagcagtattggactctataagacaggtactgagcagattgaatgatcgaattggccgcttacttgattcaatcgagcaggatgccgtttcgttgacgggattttcacacggcttgacggggatcgcattttctatcgcaaaggcggcgaaggtgatacacgatgacagctgcaaagagcttgtcctaaagcttgtcgaagaagaggaccgctattttcaaaaggatcatctaaactggctagatttacgaaatgattcgcatacgctgtccccaagctactggtgtcatggagctcccgggattttgctggggagagcgcacattcaggcttttattcctgaattgactacccggactttaaagcttcaagaagcgcttcaaagttctttaaatctagcagactgtcaaaatcattcgctgtgccacggtttaattgggaatttgaacattctgctggatatcaaaaggctgaaccgggaacttcatgtccctgatgatatattttacatttataaaacgaaaaaccggggatggaaaacgggtttgcattccgatgtggaatcgcttggcatgtttgtcgggacggcaggaatagcctacgggcttttgcggctcctcgatgaatctgttccatccgtattaactctcgatattccgacgggcaggtga

SEQ ID NO: 4622 - DNA, 219 bp, Bacillus licheniformis
atgaaaacaatgaaaaattcagctgcccgtgaagccttcaaaggagccaatcatccggcagggatggtttccgaagaggaattgaaagctttggtaggaggaaatgacgtcaatcctgaaacaactcctgctacaacctcttcttggacttgcatcacagccggtgtaacggtttctgcttcattatgcccaacaactaagtgtacaagccgatgctag

SEQ ID NO: 4623 - DNA, 225 bp, Bacillus licheniformis
atgtcaaaaaaggaaatgattctttcatggaaaaatcctatgtatcgcactgaatcttcttatcatccagcagggaacatccttaaagaactccaggaagaggaacagcacagcatcgccggaggcacaatcacgctcagcacttgtgccatcttgagcaagccgttaggaaataacggatacctgtgtacagtgacaaaagaatgcatgccaagctgtaactaa

SEQ ID NO: 4624 - DNA, 3159 bp, Bacillus licheniformis
atgaatgaaaaatccgccggatatcacgaacggcttcccgtcgcccaaactcaatccccgctcgtaaacgataagataaagtattggcgttcccttttcggcgatgatgataaatggctcaataaagcagtttcattattaagccatgaccctttgtcctccatcgcacaatcctcggtatcccagtcagtcgggctgaaagacagccgtcgcggcccatggcagaagatgcaaaagcggatctttgaaacgcccttttcctacaaggattctgctctgcaagattcagaattgctgttcgactccctgctgacccgttttgcgtctgcagcacaagatgctttggaggaacaaaatatcatactttctcctcctctttgccggcaggtgctgacacatttaaaacagacgcttcttcaaattgcccttcaaacattaatactggaactaaacattttaaggcttgaagatcaattgaagggcgacacccccgaaatgcgctatcttgatttcaatgataactttttagtcaatccaggatacctgcggaccctgttcaacgagtatcccgtattgctgcgccttctgtgcacaaaaaccgattactgggttcaaaacttttctgaactgtggaagaggctgaggcaggaccgcgaacagctgcaggctgcatttcatattgccggcgatcctgtccatattgagcttggggtgggagactcgcacaataaaggaaagatggcagccatccttacatattccgatggaaaaaagattgtctataaaccgagaagccatgatgttgacgacgcatttcaacttcttctatcatggatcaatgaccgaaattcaggcagccctttaaaaactttgagattaatcaataaaaaacggtacggatggtccgagtttattcctcacgaaacgtgccatacgaaaaaagaactggaaggctactatacacgcctcggcaaacttttggccgttttatacagcatcgatgccgttgactttcaccacgaaaacattatcgcctccggcgagcatcctgttttaatcgatcttgaatcaatttttcatcaatataaaaaacgagacgaacccggctcgaccgccgttgacaaagcaaactacattctttccagatccgtacggtctactggaatcctgccgttcaacctttacttcggaaggaaaaaccgggataaagttgtggacatcagcggaatgggggggcaggaagctcaggaatcaccgtttcaggcgcttcaaatcaaaggatttttccgcgatgacattcgcctggagcatgaccgctttgaaatcggcgaggcgaaaaatctgccgactttagatcaccagcatgtccctgtcgcagattatcttcattgtatcatcgaaggattttcagcagtataccgtctgatttctgatcatggcgaaagctacctggctacgattgaacattttaaaaactgcaccgttcgaaatattttgaagccgacagcgcactacgcctctcttttgaataaaagctaccaccctgattttctcagggatgcggtagaccgtgaagtgtttttatgccgggtggaaaagtttgaagatgcagacacagatattgcagcggcaaaaacagagctgaaagagctcattcggggagacatcccctattttctgtcgaagccttcagatacctatttgctcaatggcgaagaagaaccgattgccgcttattttgaaacgccgtccttcacaagagtaattaagaagatctcatcattttcagaccaggacttaaaggaacaagcgaatgtcatacgcatgtcgattctggctgcatataacgcgagacatgaaaaagacgcaattgatatagaccaaaatcacccgagtcctagatcaggcgccttgcagccgctcgccatcgctgagaaagcggctgacgatttggctgaaaagcgaattgaaggcaatgatggaaaggacgtcacttggatcagtacagttattgaaggcgtcgaagaaatctcttggacgatctcccctgtcagtcttgatttatataatggcaatgcaggcatcggattttttatgagctatctgagccgcttcgcaaaacggccggagacttactcgcatataaccgagcagtgtgtatttgcgattcagcgagcgttgaatgaactgaaggaaaaagaagaattcctgaagtacgccgactctggggcattcacgggggtttccggctatctgtattttctgcagcatgcgggaacggttcagaaaaaaaacgaatggatcgaactcatacatgaagctctgccagtccttgaagctgtcatcgaacaagacgaaaactgcgatatcatcagcggttctgccggtgctctaatggttctgatgtcattgtatgaacaactggatgacccggtttttctaaagctcgccgaaaagtgcgccggccatttgcttcagcataaaacaaatattgaaaacggagcggcctggaaagatcctcatacacaaaactattacacaggatttgcccacggcacttccggcatcgccgcagctttatcccgattcaataaagtgtttgattcgcaatcactgaaaaaaatcatttcgcaatgcctggcatttgaaaagcagctgtacatcgcttccgaaaaaaattggggatcaaaaggaagagaacaactgtcagttgcatggtgccatggcgctgccggcatattgttgtcgagaagcatcctccgagaaaacggagtcaatgatcccggactgcataccgacatcttgaacgctcttgaaacaactgttaagcatgggctcggcaataaccgctcattctgtcacggcgatttcggccaactcgaaatcctaagagggttcagggaagaattcagcgaactgaacaccattatacagaatacggaagatcggctgttgacatattttcaagaaaatccattcagtaaaggggtatcacgaggtgtggattcagccgggctcatgcttggtttaagcggagtcggctacggcatgctgcaatgccaatatggagaagaactgccggaactgcttcagctcagtccgcctcaagcgcttatcaaaaagaacagcaaagcttttaaaagagaaaacgtgttttaa

SEQ ID NO: 4625 - DNA, 1026 bp, Bacillus licheniformis
atgaagaaattaatcagcatcatctttatctttgtattaggggttgtcgggtcattgacagcggcggtttcggcagaagcagcttctgccttaaactcgggcaaagtaaatccgcttgccgacttcagcttaaaaggctttgccgcactaaacggcggaacaacgggcggagaaggcggtcagacggtaaccgtaacaacgggagatcagctgattgcggcattaaaaaataagaatgcaaatacgcctttaaaaatttatgtcaacggcaccattacaacatcaaatacatccgcatcaaagattgacgtcaaagacgtgtcaaacgtatcgattgtcggatcagggaccaaaggggaactcaaagggatcggcatcaaaatatggcgggccaacaacatcatcatccgcaacttgaaaattcacgaggtcgcctcaggcgataaagacgcgatcggcattgaaggcccttctaaaaacatttgggttgatcataatgagctttaccacagcctgaacgttgacaaagattactatgacggattatttgacgtcaaaagagatgcggaatatattacattctcttggaactatgtgcacgatggatggaaatcaatgctgatgggttcatcggacagcgataattacaacaggacgattacattccatcataactggtttgagaatctgaattcgcgtgtgccgtcattccgtttcggagaaggccatatttacaacaactatttcaataaaatcatcgacagcggaattaattcgaggatgggcgcgcgcatcagaattgagaacaacctctttgaaaacgccaaagatccgattgtctcttggtacagcagttcaccgggctattggcatgtatccaacaacaaatttgtaaactctaggggcagtatgccgactacctctactacaacctataatccgccatacagctactcactcgacaatgtcgacaatgtaaaatcaatcgtcaagcaaaatgccggagtcggcaaaatcaatccataa

SEQ ID NO: 4626 - DNA, 852 bp, Bacillus licheniformis
atgtctgcagaacaattgccgatatggacgaaagactgcgtgaagggctcattgccgaaaaggggaaatgatagtcataaaggaacttatggaaccggccttttgctcgcgggaagcgatgatatgccgggagcggctctccttgcaggaatcggggcgatgcggagcggtctaggaaagcttgtcatcggaacgtgcgggagtgcgattccgctgatcctccccgttcttcctgaggcgacgtattggcgggacggcgccgaaaaggcggcgtcaggcgagattgccgaaccttaccgggcgattgcgatcgggcctgggctgccgccttcgcaaatgactgagcaagcggttcaaagcgtattagcgaaagactgcccggttgtgcttgatgcgggtgctctttcaaaacgatcgtaccaagaaaggaaagcgccggtggtattaacgccgcatccgggcgaattttcgaaaatgacaggcttgtccattcgagaaattgaagcaaaccgggccggttatgctcgagattatgcggaggaacaaggtattacccttgtcttgaaaggcaatgaaacgatcgttgctttccccgacggcgagtgctggaggaatgtaacgggaaatggggcgctggcaaagggaggaacgggggatacgttaacaggtatgcttctcgggatgctgtgctgtcatgagaattcgagagaagcggtgctgaatgctgtccacttgcacggcgcatgtgcggacgcatggacaaagaccagatcggctcatgcgcttcttgcgcatgaactttccgatctgctgccaacggtatggaaagcgtatgaggatggaaataagtga

SEQ ID NO: 4627 - DNA, 1749 bp, Bacillus licheniformis
atgaacaatgaagacgggtggattctgccctacatcaagaaaaatacaaggcttttgatcattgtcgtgctgcttggcgggttgacggcatgctcggcggctgctctcatgtttacctccggttatttaatatccaaagcggctacgcgtccggaaaatgttttgatgatctatgttccgatcgtagcggttcgcaccttcgggattctgcgctcggtgtcgcgctatgttgagcggttgacagggcaccatatcattttgaaaattttatccgatatgcgcgtcaggctttacaggatgctcgaacctcaagctttaaaatggcgtgaacgtttccgaacgggggatatgctcggcattttggccgacgatgttgaacatttgcaggacatgtatttgagaacggtatttcccgggctgtcggctcttcttttatatggcgtattcatcgcagctatcggctttttttcatggccttttgctggactaatggcggtctatgccgcggttttcgtatttcttgttccgcttgtttccctgcttgtgacaagggcaaaaaatgttgcgctgaaaagaggacggagccacttgtaccgtcagctgacagacgcggtcatgggggtgagcgattgggttttcagcggccggcaaaacgactttgtccattcgtatgaagcggcagaacatgaatggctggcgatcgaaaagaaacaggtgcgcttcagtcgttggagggactttgccatgcaatgcctggcggcaggacttgttcttctgatgctaatatgggcgggcggccaaagcgcggaaggggctctggctcctgtgtttattgcggcgtttgtccttgttgtgtttcctttgacggaagctttctttccgctttcggacgcagcgacttcaatccctgagtatcaggattctttagaaagaatggacggtctgcagccgccgaaaagggggaacggggccgatgttcagcaggaacgggcggaggctgtaggtttggacgatgtcacgcttcgctttgaagacgtttctttttcttatgagcaaggccagccggtgttggacggtgtttcatttatattaaagcagggtgaaaagaccgctttgctaggcccgagcggtgcgggtaaatcgaccatcttgtcgttgatacaaggggcgcttgctccttctaaaggaaacattacattgaacgatatttctgtgcagtctcttcagggagaaatttcacgcgtagtctccgttttcaatcagcagccgcacctgtttgatacgacggttttgaataatatccggctcgggaaccctgacgcgagcgatgaggacgtgtattgggcggcgcgccaggtgaagcttcacgattatattcagtctcttcccgatggatatcatacatctgtacaggaaacgggcatccgtttttcaggtggagaacgccagcggattgctttggcgcggattctgctgcaggacgcacccaccgtcgtgttggacgaaccgaccgtaggccttgatcctaaaacagagaaggagcttctttcaacgatgtttcaagtacttgatggaaagaccgttctatggattacacaccatttggcaggagccgaagcggccgaccggattctgtttttagacaaagggaagcttgcaatggcagggagccatcagcagcttttggaaaacaatccgcgctattcaagactttatcgtctggatgcgcctgtcagccggcttttttag

SEQ ID NO: 4628 - DNA, 1710 bp, Bacillus licheniformis
ttgcaatataaagggatgaaacgaatacttgcagtactcactgtcctgacatgcatgcagggcgccgccattatcatgcaggccgaatggcttgctgaagcggttacccgcctttttaacggagaacgcgtcggttcgctctttccgctgctcatcttatttaccgccgcttttttatttcgacatgctgttacccttgtcaggcaaaagctgatatttgactatgccgccgagacgggggccggcatgcggaaaaagtttttggagaagcttttccaatccggccccaggctggcgaggaaagaaggaaccggtcatgtcgtcacgctcgcgatggaaggaattgcacagttccgccgctatttggagctgtttttgccgaaaatggtcagcatggccgttataccgccggcggttgtctgttatgtcttttttaaagacacatcttccgctgcagtcttaatgattacgatgccgattttaatcacttttatgatccttcttgggtatgcggctaaaagaaaagcggacagccaatggaaaacgtatgagatgctttcaaaccattttacagattccttgcgcggcctggaaacattgaaagtgctgggcatcagccgttcacatactaagaatatatttcatgtgagcgaacggtacaggaaggcgacgatgagtacgcttaagatcgcctttctgtcatcgtttgcacttgattttttcaccatgctgtccgtagcgaccgttgctgtttttctcggtctcggtcttgttgacggcagcatctcgctggagccggctcttgccattctgattcttgcccctgagttttttctccctgtccgggaagtcggcaatgactatcatgctacattgaacggacgcgaagccggtaaagcgatcaaggcgatattggattcgccgggtttcaaggatgaggcgcctttaagtcttgagcgatggtctgacgacgatcaaatcgagttcaagcatgtagatgtgcggcatgaagatgaggaaaactgctctttatccgggatttctctttcatttaagggaaagagaaaaatcggaatcatcggggaaagcggtgccggaaaatctacgcttatcgatgtgctcggcggcttcctggaaacgaaaagcggcgttatcaaagtcgggggaaaaaagagaacgcatttgcagacggacagctggcaaaatcagctcttgtatattccgcagcatccctatatctttccggatacgctcgcagccaatatccgtttttatcatcccgccgcttctgacgaagacgttgaacaggcagcaagagctgccgggctctcggagctgattgatcagcttccaaacggcttgaaagagcggatcggtgaaggcgggagggcattaagcggtggacaggcgcagcgtacagccgttgcccgggctttccttggcaaccgtccgattattcttttagatgagcccactgctcatttggatatcgaaacagaatacgagttgaaaaaaacgatgttaaaactgtttgaagacaagctggtttttttggcaacccatcgccttcactggatgcttgatatggatgaaattatcgtgctgaaagatgggcaggtggctgaaaccggtacacatcaagaactgattgaaaagcggggcgtttattacgagctcgtgaaggcgcagtcgtttggaggtgcatcatga

SEQ ID NO: 4629 - DNA, 1017 bp, Bacillus licheniformis
atggtatctcttaatgaattttggtttatattagtcgctgtgctgttcatcggttttttctttcttgagggctttgatttcggcgtcggaatggcgatgcggtttctcgggcgcaacgatcttgaacggagggtgatgatcaatacgatcggtcctttctgggatgcaaatgaagtctggctgctgaccgggggaggcgcgattttcgccgcttttccgaactggtatgccacgatgttcagcggatattacattccgtttgtctttgttcttcttgcattgatcggccgcggggtcgcgtttgaatttagaggaaaagtcgaaaccgcaaaatggaagaatacatgggattgggtcgtatttttcggtagcattctgccgccgtttttgttcggtgtattgtttgcgagcatcctgcgcggcatgccgattgatgccgatatgaatctgcacgccggttttaccgattatgtgaacgtctattccgtgacagggggagtcgccgttacgcttctctgcctgctgcacggcctgatctttattacattgagaacggaagccgatttgcgcgaccgggcaagacagctggccaaaaaagtcgtattcgccgttttggcggcgcttgttgcctttgttgcattatccatttttgaaacggacttgttcacgggcagggggcatgtgacgataccgcttgcggctctgattgtcgtttgctatgtgctgtcgatcgtgtttatgaaacaaaaacgcgacggctggacatttgccatgacgggcgcagggatcgctcttacagtggcgacgattttcactgcgctgttcccgcgcgtcatgatcagctcggtgaaaagcgcatatgacttaaccgtttataatgcttcatcaggcgactattctttaaaggttatgacgatcgtcgcgctggcactgcttccgttcgtgctgggctatcagatctggagctactatgtttttagaaaacgggtcagcagcaaggagccaatgatttattaa

SEQ ID NO: 4630 - DNA, 1407 bp, Bacillus licheniformis
gtggacgaactcattttggcaagatttcaatttgcttcaacaacgatctttcactttatttttgtaccgatgtcaatcgggcttgtctttatggttgctttaatggaaaccctttatgtcgcaaagaaaaaagacatttacagaacgatggctaaattttgggggcacttatttttaattaattttgcagtcggtgttgtcaccgggattttacaagaatttcagttcggaatgaactggtcggagtactcccgctttgtcggtgatgtattcggcgctccgctcgcggtggaagcgctgctcgctttctttatggaatcgacgtttatcggtttgtggatcttcggctgggaccgccttccgaagaagattcatttgctgtccatttggcttgtttcgcttggcacgatcatgtcggcgttttggattctagcggccaactcgtttatgcaggagcctgtcggatttgcgatcaaaaacggacgcgcggaaatgaccgatttttttgcgattattaaaaacccgcagctatgggttgaatttccgcacgtcattttcggtgcgcttgccactggggcgtttttcattgccggtgtcagcgcgtataaaatgctgaaaaaacaggaattgctcttttttaaaaaatcctttcaaatcgcgatgattgtggcgcttgtttccgggggcggcgttgcgttcagcggacatgagcaggcacagcatctgatgaagagccagccgatgaaaatggctgccagcgaagcgctttgggatgacagcggcgatccggctgcatggacggtgcttgcgaacattgacacggacaagcaggaaaacaaatccgagctcagcatcccgtatgcgctcagctatttggcttataaacaattcagcggcgatgtgcccggaatgaagacactgcaaaagcaatatgaagaaaaatacggagaaggaaattatattccgccggtgaaaacgacattctggagtttcagaatcatggccggatcaggacttttaatgatcgttgccgctttgaccggtctttatctcagcttccgcaaaagactcgaaacaagcaaatggttcttgcggacaatggtggctttgatcgcctttccattcattgcaaatacggcggggtggatcatgactgaaatcggacgccagccgtggacggtgttcggtattttgacaacggcgcagtccgtgtcgccgaacgtatcagcgggaatgctgctgttctctgtcatcgcgtttacagcgatttatcttgtgctggcgctcgttcttgtctatttgtttgtgcgggagattaaaaaaggggctgcacaccatgaccaccatcatgatgattccgtatcgacagacccgtttgatcaggaggtttaccatggtatctcttaa

SEQ ID NO: 4631 - DNA, 183 bp, Bacillus licheniformis
gtgattcttcgcgaaagcctgtcgcatcaaaagaaaaccgttatatgcagtgaaacaaattcggggttttccttcagtgtgagcgcgccttacggaaagttctgctgttttgtccaatctgtgaaatcttccttccgccttctgcgcattcccttcatccatttgctgatttatctccactga

SEQ ID NO: 4632 - DNA, 789 bp, Bacillus licheniformis
atggaatctaaatcacttgttctagtcgaagagcttgctttaaaaaagcaaagcatctttgtgcaaagcccgcttcgctatcttttacgggctatgctggccagtatgtttatcgggttcggagtcattgtagcgtttaaaacggggaatctcttttatgttgaacattctccgttcacatatccaattgcagcaatcacctttgggggcgccattattctgatcgtctatggcggaggagatttatttacgggaaatacattttattatacattggctgcgcttcgtaaaaaaatgcgctggcccactgtgatcaagctgtggatgttcagctatgcaggaaatttaatgggcgccgtttttttcgcaggcctcatctttgcgaccggcttatttaaagatccttcttccaccggctttattctcagcgtggcggagcataaaatgaatacgccggtgaccgaattgttctttaaagcgattctgtgtaactggcttgtctgccttgcgtttttcgttccgatggcgcaaaaaggggacggagcgaaaatgttctctatgatgctgtttgtctttactttctttatttccggttatgaacacagcatcgcgaacatggccacttttgccgtctctctggtcaccgagcatccggagaccatttcgattgcaggcgcaatccataacctaattccggtaacactcgggaacctggtcggaggcgcgtttatgatgggcttcatgtaccactatgccaacaagccgggcggtgaagaaatcatcaaataa

SEQ ID NO: 4633 - DNA, 138 bp, Bacillus licheniformis
ttgaatcgcgacacgcaaattccgtttgatgctgacagaacagacaccgtggttcaatgtgcggctccccatttaaaatatgtccaaattgccggcaaagcgaatgaaaactttgcatcgctgaacctccatttttaa

SEQ ID NO: 4634 - DNA, 330 bp, Bacillus licheniformis
ttgaaccacggtgtctgttctgtcagcatcaaacggaatttgcgtgtcgcgattcaaggaagaccgagccggggagtcggcatggaagaaatcatgttcgaatcgctcgatcaaaacggaatcgccttgaatatggccgaagtcgcaattttgcctgaagaagttccgctgtttacaaaaaagcttgtcgatcagggcatcattatcagtgctctccacaatcattggatttttacagaaccgaatattttatatattcattttcaatctgtagaaccgccgttaacattcgcgaaaaaaacagctgccgctttatccgtattgcgatga

SEQ ID NO: 4635 - DNA, 1332 bp, Bacillus licheniformis
atgaatggcaacaatattattcggaatttgatgctggaaatcccttcagcacccggaaaccttggaaaggtgacaacggcgatcggccttgccggcggtgatatcggagagattgaaacgatcaaggtagggccgaattatacgatgcggaacattacggttcaagttgagcatgaagaacagctcaccgagattcttgaagtgatccgcaacttaaaagaaggcatccatcttcataccgtttcagatgacgtgctggctgcacatgaaggcggcaaaatccgcatgaaaagcaagatgccgattcgctcgcttgctgatctgcgtcgggtgtatacgccgggtgtcgcgaacgtgtgcgagctcattaaagaagagccgcaaaaagcgaatatttataccggaatcggcaattcggttgcaattgtaacggacggcacggccatccttggcttgggagacatagggccagttgctggaatgcctgttatggaagggaaagccgctcttttcgaccagcttgcggatatcagcggggttccgattctgctcgacacgaatgatcctgatgaaatcgtaaggacggttaaaaacatcgcgcccggctttagcggcattttgtttgaagacatcggttcaccgcattgttttgaaattgaagagcgcctgaaaaacgacctgaatattccggtcatgcatgacgaccagcacggtacggcggttgtgacgctggcggccgccatttcagcagccaagagtgcaggggtggatctgaagcaggcccatgtcggccaaatcggcctgggcgcggcgggtgtcgcgatctgcaggatgtttatggcatatggagtaaaacgtgttgtcggaacggataaatcgcttgaggcgatggcgcgtttagagaactatggcggccatgcggctgaaagcatcgaagaattgatggaaagctgcgatatcgtcgttgcgacaaccggtgttccgggattgatcaataagaaatgggttcgggaaggccaggtgattttggctctgtccaatccgaagccggagattgagcctgaggatgcgctcgaggccggggcagcctacgctgcagacggacggtctgtcaacaatgtgctggggttcccaggtattttcaggggcgtgttaaatgccggagccgattcgatcagccacccgatgctggttgcggccgctgaagcgatcgcatcctgcacaagacaaggcgatcttgtgcctcatccgctgaaccctgaagttcacgagattgtggccaaagcagtcgaaagggtcgcactttcagaaatgggaaaaatcaacggataa

SEQ ID NO: 4636 - DNA, 1398 bp, Bacillus licheniformis
ttgaaaacagcacggttgccatcaatgttggaaatcatttgtgtattaggtgcatttttagcgatagtttgttcatttacagtcaaattcgagctgccgattcagctggcattgtttatttcatggttcttggtgattttgctcggactgcgcctggggcaccggtatgaagatttgcaaaaatcgattacaaacggaatttcaaatggacttgaagcgatattgatcctgattgccgtcggcgctcttatcggcacatggatagccggcggtgttgtgccgactttgatttattacgggcttgagtttatccacccgagcatattcctgcttgccacgctcattatttgttcgatcacatctgttgccacaggtacgtcttgggggactgtaggaacggccgggatcgccatgatggcaatcggggaagggctggggcttccgcttccgcttgtagccggagccgtgctgtccggagcctactttggagataaattatcgccgctttccgatagtacggtgcttgcgtcatccctttcaaaggtcgaagtgattacccatgtcagagcgatgctgtacttgtcgattcccgcctatttaatcacggcggtcctgttcaccatcaccggctttatgtatggaagccgaaatgttgatttggaaaaagttgaatttttgaaagcttctttgcagaacacgtttgatattcacatttggatgcttgttccggctgttgtcgtcatcgttctattggcgatgagaaagccatctgtgccgacgatcgcgatcggcgcacttttgggcgcgatctgggctgcggtcttccaaggcatggactttgcggatgcgatcggcacagcatacaacggcttttccattgacaccgggatcaaatttatggacgagctcttaaatcgcggaggaatagagggcatgctcggttcggtcgtcgtcatcattctcggtctgggctttggcggcctcttggagcacttaggcgttctaaaagtgatcgtctccaagttccagcaaaagctgacttctgccggcaacgtcacattctcgacgattatcgtcgccttcttggcaaatgtgttcggctgcgcgatgtatgtctcgctcattttaacaccgaaaattatggaaaaaagctatgacaagctcggaattgaccggagggtgctgtccagaaacgcggaagtcggcggtacgatgacgtcgggcatggtgccgtggtcggacaacggcatatatatggcggggattctcggcgtctcgaccttctcttatgtgccgttcatgtggctgagctttgtttcaatcggccttgcgattttgtacggatacacaggtaaatttatttggtacaccgataaaaaagactcgccggttcagtag

SEQ ID NO: 4637 - DNA, 1428 bp, Bacillus licheniformis
atgaaagctgaaatgacataccggacggaaaaggattttctcggagagaagaagattccggccgatgtctactacgggattcagacattgcgggcagcggagaacttcccgattacaggatataaaatccacgaagaaatgatcaaggcgctggcagtggtgaaaaaagcggcggcgcttgccaacatggagacaaaacgtctttataaaggccttggagatgccatcgtccaagccgctgatgagatccttgaaggaaagctgcacgatcagttcatcgttgatccgatccaaggcggcgcaggcacttcaatgaatatgaacgcgaacgaagtcatcggaaaccgcgcacttgaactgctcggccacaacaaaggcgaatatattcacctgagtccgaatacgcacgtcaacatgtctcaatcgacaaacgacgtattcccgacggcgattcatatttcaacgcttaagctgctggaaaagctgctggacacaatggaatacatgcttgatgcctttaagaaaaaagcacgcgactttgaccacgtcattaaaatggggcgcacccatcttcaagacgccgtgccgatccgccttggacaggagtttgaagcctacagccgcgtgatcgaacgcgacatcaaacggattaaacaatcgcgccagcatttgtatgaagtcaatatgggcgctaccgcggttggaacgggattaaacgcggatccgcgctatatcgaaaatgtcgtcaagcacttggctgagatcagcggtcttccgcttgtcggcgctgaccatctggtagatgcgacgcaaaatacggacgcttacacagaagtttcagctgcattaaaagtatgcatgatgaacatgtcgaaaatcgccaacgaccttcggttgatggcatcaggtccgcgcgcaggacttgcggagatttcccttccggcaagacagccgggttcatccattatgccggggaaagtcaatccggttatggccgagctgatcaaccaaatcgccttccaggtcatcggaaacgatcatacgatctgccttgcttctgaagccggacagctcgaactgaatgtgatggagccagtgctcgtctttaatctcctgcaatccatcagcatcatgaacaacggattccgttcgttcactgatcactgtgtagcaggtattgaagcgaatgaaaaacgcttaaaagcatatgtcgaaaagagcgccggcgtcatcactgcggtcaatccgcatcttggctacgaagcagctgcaaggattgcgagagaagccattttaacaggccaatccgtccgcgatctctgtcttcaaaacgatgtgttgacagaagaagagcttgatctgattttgaatccttatgaaatgacaaaaccggggattgccggggctgaacttttaaatcgggattga

SEQ ID NO: 4638 - DNA, 990 bp, Bacillus licheniformis
atgaaaaagttactgctgttgaccaccggcgggaccatcgcttcagtagaaggcgaaaacggactggctccgggggttaaagcggaagagcttctcagctatttatctgatgatcattcaaattatacgatagattgccaatctttaatggatatagacagcaccaacatgcagcctgaacactgggtgatgatggctgaggctgtatatgaaaattacagccgctacgacggctttgtgatcacgcacggaaccgatacgatggcctacacctcagcggcgctttcatacatgctgcagaatattgataagcccgtcgcgattacgggttcccaagttccgattacgtttaagaaaacggatgcgaaaaaaaatataaaagatgcggtccgctttgcgtgcgacggcatcggcggagtatatgtcgtctttgacggccgcgtcattttaggcacgagagcgatcaaattaagaacaaaaagctacgatgcatttgaaagcatcaattatccttacatcgctttcattcacgataaggaaatcgagtacaacaaacgggttcccgaagtaaagccaggcgctttgaaactcgatacctctttaaataccgacgtttgtctggtgaagcttcatccgggtttaaaaccagagtttttcgattgtctgaaaggttcatataaaggcattgtgattgagagctacggaagcggcggcattccttttgagaaaagaaacattttagaaaaagtgaacgagctgatcgattccggtatggtcgtagcgatcacgacgcaatgccttgaagaaggagaggatatgagcatttacgaggtcggccgcaaggtaaaccaggatgccattatccgctcgagaaatatgaacactgaagcgatcgttccgaagctgatgtgggctttagggaaaaacggacaacaagctgaagtcaaaaagatcatggaaacgccgattgacgacgatatcatcatataa

SEQ ID NO: 4639 - DNA, 348 bp, Bacillus licheniformis
atgaatttagatcgattaacaacactgagaaaaaacaaaaaatggtcattgcaatatactgccgaccgcctcggtattgcgaaaagcacttacgcgggctatgaatcgggataccgccgcccttctttagaggcgcttatcgaaatcgctgatttattcaatacctccaccgattttttgctcggaagagttgacgatccccgggatgaaaaggctaaaaacgaagccattgaactgacggattgggctaagctcaagctggcagtcgacggaacgcttctttccgaagaagaaatcaagcagatggttgcgtttatcaaggtcaaaaaagggctggatgcggagtaa

SEQ ID NO: 4640 - DNA, 1047 bp, Bacillus licheniformis
atggcgaaatacagaggttatatcggaacatatacaaaagcagacagcgtagggatttatacatttgagcttgatacggaaaaaaaggcgttaagcacgccgaagccggcagcaaagctgggcagtccgacatatttgaatatcgccaaagacaatgacatgctttatgcagtggtcaaagacggcgataagggcggggttgccgcatatcgtattgacggttccacaggagagctgactatcgtcaaccagcagaccggggaaggaccgtcgccttgccacgtcagtgtggatcaagataaccgttatgttctgtccgccaattaccacaacgggacgatcttggcatatcctttaaatgaaagccgcggcctgcttgagccttcatcaaaagtacagcatgagggatcaggaccgcatgagaggcaggaaaaagcgcatactcattattcaggattctcacctgatgagaaatatgcagtggccgtcgatctcggaacggatcatatcatcacgtatcaattgaaagagggccggcttgaagaagtgaaaaaacacgctgctgcaccgggctcagggccgagacatatcgagttccatccacaggaaaagtatgcgtatgtattaacagagctgagtaatgaagtcatcgtgctggaatacaaccccgatttgggtgaattcagagagattcaagtgatttcggcattgccggaaggctttgacggccatagccaaggcggcgccatccacatcacgaaagacggcaaatttgtatacgcttcaaaccgcggccacgacagcatcgccgtcttcagcgtcaacgagtattcgggcgaactttccctggttgaacacgtatcaactgaaggggaatggccgcgcgactttgagattgatccttcagagcaattcttagttgcttccaaccaggaaacagggactttgacattgtttgaaagagaccggacaacgggccggctgacgcttttagagtctggagttcctgctcctgaagcggtttgtgtgaaatttttacatcaataa

SEQ ID NO: 4641 - DNA, 690 bp, Bacillus licheniformis
atgacgaaaatcatgattgtcgaggacagcgaagacattcggaagcttttacgcgatcatttagaaaaatacggatacgaaactgttgcagcgactgatttcacctctatccttgaaatatttctccaagagaagcccgacctggcattgcttgacatcaatctgccggcatacgacggttactactggtgcaggcaaatccgccagcattcgacttgtccgatcattttcatttcggcgagaagcggagaaatggatcaggtcatggcgatcgaaaacggcggcgatgattatatagagaagcctttttcctatgaggtggtgctcgctaaaattaaaggccaaattcgcagggcatttggagaatacgcagtaaaacaaggtgaaaaagtgattgaatttgaaggcgtccagctgtttgtcgaacgttttgagctgcactgccgaaatgagaagctcgagctttcaaaaaaggaaagcaagctcttggaagtgctgcttgaaagaggagaaaaggtgacaagcagagaccggttaatggagaagacatgggaaaccgatacatttgtagatgaaaacacgctaaatgtctatattacaaggattcgcaaaaaactgcgaagcatggacgtgcccttctcaattgaatctgtgcggggcgaagggtatcagctgaggacgaaatcatga

SEQ ID NO: 4642 - DNA, 981 bp, Bacillus licheniformis
atgaagctgttcctaaaaaaccatgccgttctcatttttctgtttctctttcagggcggattcgtgtttttttactattggtttgccggcatgcagactttcactcaccttttttacattctcggcgttcagcttctggcgctggcgctttatctttcgtacaaatggtatgaagaacacagagtctaccagtggctcagctcagaacaaaaagatacagaaattccttttttggggacgtctgaattttgctcagagctctatgaaaaacatatggagctgagccggctccaccaccgcaaaatacatgagatggagtccaagctggaagacagggtaacctacatgaatcaatgggtgcatcaggtgaaaacaccgctttccgtcatcaatctgatcatccaggaagaggacgaacccgtttttaaacaaatcaaaaaagaagtccagcagattgaatacggactggaaacgctcctctattcatcaagacttgacctgtttgaaaaggattttaaaattgaagccgtatcacttggcgagctgcttaattcgcagattcagcgctataaacgctattttatacagcaccgggtctatccaaataaacaggttcccgctgaagacgccgttatttactccgatcgaaaatggctcaaatttgccgttggccaggtcatcaccaacgctgtgaagtattcgtcaggaagaagcgaacgcatcgatatgacgatattccgtaaaggcgaacgcatcatcctggaaatcaaagattatggagtcggaattccttcacaagatttgaaaagggtatttgagccttattacaccggggaaaacggacggcgctttcaggaatcaacaggcatcggcctctaccttgtaaaagagattgaggaaaagctcaattatgatgtgagcatcgcttcagaagttggaaaagggacggctgttcaattttcgttccttacaaaaatgtaa

SEQ ID NO: 4643 - DNA, 123 bp, Bacillus licheniformis
atggccattcaagcctttcataaacgcattttggctgaaagcattccggaggagcccgctggaatggataacataccggaaacggtcatccttaaaaagcgcagcaaaaggaggatatcatga

SEQ ID NO: 4644 - DNA, 777 bp, Bacillus licheniformis
atgacaacaaatatgctggtcgttaaaaacatcaataaaacatataaaggacaagtctcccatcaggctttaaaagatatttcattcaatgtcgaggaaagtgagttcacggcgatcatggggccgtccggttctggaaaaacgacgcttctcaatatcatttcgacgattgaccgcccggattccggcgacattttaattcgcggagaagacccgcatcatttaaaaagggcgaagcttgcccactttcgccgcaggcagctcgggttcgtattccaggattttaatttgctggatacactgacgatcggcgaaaacatcatgctgccgttaacgcttgaaaatcaaccgctttccgtcatggaagataaacttcaggcgattgctgaaaaactcggcattgaacaacttttgaacaaacggacgtttgaagtatccggcggacaaaagcagcgggcggccatcgcaagagccgtcattcatcagcccgccctcatcctcgccgacgaaccgacaggaaacctcgattcgcaggcatcaaaagacgtgatggagacgatgcagcatcttaatgaaaacgacaatgccacgatattaatggtcacgcacgacccatttgccgcaagctattgccgtcgcgtcatttttattaaagacggaacattattcaatgaaatttaccgcggcgccaaccgccaagtattttatgaagagattctgaatgtgctgtctatgctgggaggaaataccaatgacctttcttcagttcgcttataa

SEQ ID NO: 4645 - DNA, 1877 bp, Bacillus licheniformis
tgacctttcttcagttcgcttataaaaacgtcgtccggaataaaagagcctatctcgccttctttttaagcagctcattttcagtgatgatttttttcacatttgcgatgtttttgttccaccccgctttagaggaaggctacttaaacaccattgcaaaacgggggttgtcggtggctgaatggatgattttcgccttttccattctgtttgtgctttattccgtcaacgcctttctcaagtcgagaagcaaggaattcgggatcctcaccatccagggaatcgctccgggtcaattgaggaagctgattaccgcagaaaacatcatcatcggcgtgctttcgaccgttacaggcatcatcggcggtcttgtttttgcaaaaacattctttacgatcggcgcttatattctggaaatggacgctttgccattgtatctgccttggaaagcgatggcccttacatccgcctgctttcttgcgctgtttattctgctgtcgcaatttacggtgttatttattaaatcaaaaaccgttgtcaagctgatcaaaggcaccgggaaaattaaaccggagccaaaaccgtccattattttttcggtcgtcggcatcggctgcctcggctccggctactggcttgtattgttcgccgacatccattttccacaaaccgtcacgatcttaattttgacgatcatcgggacttatttcttcttcagccaaagcagcatttggctgctgcggctgttaaaaaagcggaggtcattttatttacgaggaaaaaacgtgctttggatatccgatcttgtctatcggctgaaggataatgcccgcctgttctttctcgtttgcatcatttccgcggtcgcctttaccgccatgggtgcattggtaatttccaagacttctatcggaaaattggattcccgatatgagatagagtacttattatacagcgggagccaaaaggaacaaacacacgttaaggtgatcgaacaaaaattgaaggacggacatttttcgtatgcaaaggaagtgacaaaaggaatttatatgagctatagccagggagatctccttcctccggtgctcctggtctctgaaggcgaattccaaaagcacttcaagttaaattccggtgaactgaaagacggtgaggcgctgtattatccaaacgcctttgaggcaaaagaaaagcgggaaattcctgagaccttggacatgttgaacaaagatttgaagccggcaaatgaacggctaaaggtaaaaggtattaaaaaaccgctcatttcgttagaaagcatcgttgtcgtaaacggcaaaaccttcgaaaagctgaaaaaacaaggcgaatccctcacattgtacggctatcagtacaaccgctggaaagagagcctcgacatgagccaatcattggaaaaagatctcagagaaaaatctcacaatatccaatttcattttaagcaaaggccatcaattattttgaaactgttcagcttccaagcctgagtctgtttatcggattctttattgcggttctcttttttacggcatccgggagctttctgtacttccgcctgtttaccgatcttgaagaagatcaagagcgctaccggtcactctcaaaaatcggcctgagcgaaaaggaaatgtcgcagagcgtaacgattcaattggccatcctgttcttctttccgttcgtactcgcctcaattcatacgtattttgcgatgaagacgctcgaggcacagagccttggtcatttcgcatctccggtgatcatgacaataggcggatttctgatcttccaactattattctttatgatgattcgaaaaagctatctgaaaaaattaaaaggatttttaaggtgat

SEQ ID NO: 4646 - DNA, 351 bp, Bacillus licheniformis
atgaaaaaaacaatttctctcattacagccgctttagctgtatgtatcggcgcatttctgttgattcataatgaagtgacagacaggttcaatccacttgtgaagaaagaaagcgtatatgtccagatcaacaaagacgataagcacctgagcccgggccgctatgagtacacgctggaaggatataatgacaccggtaaggaaaaagaaattacattctccgccagcgtttcccttcgaagaaacgcctatctaaaggtacacgcgaagggaaaatatgttgagacatgggaagaagtacagcccggcggcatgccgagtgccgttcagaaaaaattgatcaagcaataa

SEQ ID NO: 4647 - DNA, 174 bp, Bacillus licheniformis
atgattgttggaataattggttttatactggtggttttccttctctacgcctccatgttgccgtccggggaaaaaaacagcggcagcagctcttcgactttttttattggaggtcctgactcatccggagacagcgggggtgattgcggcggcggcggcgatggcggctgttaa

SEQ ID NO: 4648 - DNA, 252 bp, Bacillus licheniformis
atgatttttttactggttttattggctctgtttattttgtattcattcttttttgacaagaacaacaaaagttcttataaaaaagcggcaccgaaaagcagaatattgatccgccaggcagctgcgccgaccggagttttgagggtaatcgaaaccgctcccggacagacggcaaaccgccgaacctccgaaggtatgcgcccgaatctgcggcttgtcatgagcccgacgcaccaaaacgaaaaaaaataa

SEQ ID NO: 4649 - DNA, 841 bp, Bacillus licheniformis
tgtgaaaaaaacgaaaatgttacttgtgctgtctatgttgatgggggtgctgtacgggtgttccggccatgaaacaaaaggagaggaaaaaacagaaccaaatacggctcaaaaagcggcaaaacaatcaaaacagcaggcggaacatgatccatcatccaagtgggtcaaagtgaaaagcccggcccgcattccgattctcatgtatcacagcatttcctcaggaaacagcctgcgcgtaccggaaggggaattccgcgggcatatgaaatggctgaaggataacggctattacacgttgacacctgaggaagcctatattgtcttaacgcaagataaaatgccgagtgataaatgcgtgctgattacgtttgatgacggttatacagataactttgaaaaagcgtacccgattttgaaaggctatgggatgaaggcgacaatttttatgatcggcaaatcggttggcgggaagaaccatttgacggagaaacaaatgaatgaaatgaggcgaaacggcatttcgattcaaagccataccattcatcacgttgaattgaacggactggcaccgggacagcagctcgatgaaatgacgcgttccaaagcgctgtttgatcgcatgttcagccaaaatacggtgatgctgagctatccggtcgggcgctacaacgaagatacgctgaaacttcgcaaagcaggcaggctatcaaatggccgtcacaacagaaccgggagcggcatctagggatcaggggatgtatgcgctccaccgcgtccgaatctcgccggggatgtcgccggacgcctttgggaaaatggtggaacacagcagacaata

SEQ ID NO: 4650 - DNA, 216 bp, Bacillus licheniformis
ttgatgaagacagaccgacatgcacaagacctcatacataaagcggaaaaactcggtgtgaaagtttatccggtatccgatttctggattaagcctcatgaaagcagctcttcaatcgtcatggcgggatttgggggtcttactgcagcggaaattgaagaagggatcagcagactgcgtaaagcttggctctcctcctcaaagcaggaacagtga

SEQ ID NO: 4651 - DNA, 630 bp, Bacillus licheniformis
atgaacggccgattggttgcgttggaaaatccgggatatgatggtgtgcgttctgttttccttaaccatggatgtgatattcagccaattggtctggagacggatgggatcaatttgacacagcttgctgccacacgggcgaaactcgtttatattacgccatcgcatcagtttccgtatggaatggttctgccgatacagaagaggctgaaattgcttgaatgggcaagccgtgagaaggcctatattatcgaagacgactatgacagcgaattccgctatcagggcaggcctattccatcattaaaagcgcttgataaaaaagaaaatgtcatttatttagggactttttcaaagtcatttcttccgggagcgagattgagttatatcgttctgccttcaaaactggcggatgaatttcaagagaagcttggccgctacagccagtctgcttcacccatcattcaaaaagcgatgtttttatttaggaaagaagggtttttcgaaaggcacatccgtaaaatgaaaaaagtatatcaagaaaagcacaaaacattaatatcggccattaaaacgtatttcggaaatgacgtggaatcatcggcgaaaaagcggggctccatattttga

SEQ ID NO: 4652 - DNA, 2247 bp, Bacillus licheniformis
atggaatttattttacactactatcccgcggcaatgattgctctgattctcatcggtttttggggatcgcgggtgaattcgcgttttaagaagtttttaatcatactgtgtcttatgacgaacggtgtgtatattgtatggcggttcggctttacgctgcccgtctctcgccccgccgatatcgtgatgggcgtcatcctgattgcaactgaatgtatcggctttttacagctcttggtcttttatacgctagtatggaaggaaaagaagcgggagccggaaaagctgggcgatcaagaccatcggccgagcgttgatattctcattgcaacttataacgaggagcgccatgtgctgaaaaagtcggtggcaggctgtctgaacctcgactatccaaaagagcttgtcaacatttatttgtgtgatgacggaaggcggacggctattcaaaagctggctgaggaacttggcgttcattacgttacaaggcaaaacaatgagcatgcaaaagcggggaatttaaaccatgcgatgagctgctcgaacggggaactgattgtgacgatggatgccgatatggttccgctcccttcatttttgcagaaaaccgtcggctattttaagaaggaaaaagtggcttttgttcaaacgccgcaggctttctataatgaagatccttatcagtacaacttattttccggagcgaacattccgaatgagcaggactttttcatgcgcaggctccaggctgggaaagaccgttttaatgctgtcatgtacgtcggcagcaatacggttttcagaagaacggctttggaggaaatcggcggttttgcgacaggtgtgattacggaggatatggcaacagggatgcttttgcaaacaaaatttaaatctgttttcgtcaaagaagtgcttgcggtcggtctctcgccggaaacgtggacggatcttttgaaacagcgcgaccgctgacattcagtgcggaaagaagtggaatccgcttttcttaaaaggcttgacgcccatgcagcgaatcctttattttgacggcattctcttttggtttttcggcgtttttaagatggtatacatcctcgcgccgctcatgtttttgctgtttggcatacatagcttaaagactgatctgtggtcgatcacttcgttttggctgcctgcgtttttaggttcttacctttcatttaaagccgtttcggaccggcagcgcagtatgaactggagccatatttacgatacatcgatggcgccgcacatggcgatatcggccttgtcggaattcattttcaaaaagcggtttgattttaaagtcacaccgaaaggcgtcaacacagatcggcgaaaattcaaatatacaacggcgctgccgtgtgcgattttgctcgcaatgacgctgcttgcactcggaaaaaccctttatgaattgttgtttcttcatacgtttggtataaacgtcacttcgtataatttattttgggttctctataacatgacagggctcatacttgcgctgctcgttgcctttgacaggccgaggttccgaagctctgagcgtttcacagtcaacaagccggcggctttttccaccgtttcagtagatgagcacaaatgtgaactgatcgatgtgagcgacacgggcgcgcgtatcagactgccttatacggctgattcggatatgtactatcatgtagacggtctgatcatagatgcggtcggaaaagtcccggcccgggtgatgtggacgacgaaggacgaggccgacattgaaatcgggctgcacttcaaagagatggacaaggaactgtatgtgaaactgatcggttttatgtttaatgaagaaaatgcaaaaaaggccgaccgggaaaagcgggctgatacgttgtcaacagtgatacgctttttaacgaaaactgaaaaaagccctgatgcattcaagagaaaatacgtgcgcgaggcctttcaaggtctgggaacactgctgtttccccgtgattcagagaaaggggctcacgaggttatgattaaggatatcagcttgtcaggctgtcagttgaatccggcttcccgcttgaaatcaatgaacatgtgctggtttctatcaatgagaaggacccggatcagcggctggcgctcgtctgctggataaagaagcggagaaagcgatacacagcgggattgaaatttttagatgaacatgcatcaaaatcaatgggagacccggtagcataa

SEQ ID NO: 4653 - DNA, 1353 bp, Bacillus licheniformis
atggaagcaaaaacaaaggtacaacatataccgattcaaacaacaaaagaacaggatgaaaatttttttgcaagagcaatgaatgttaaaatcggcatcattccgctgcccgtatatttgctgctcttcgctttgattgtgacgtttgtctatatgcacgatctgaaaagcgacattttaacagccattgcggttacgggctttttcggattcaccctcgcccaaatcggaaagtcgctgccgcttcttcgttctgtcggcggtgccgctatacttgcgacgtttattccttcagctatcgtctattaccatctcattcccgatgacattatcaaatcaacaactgaatttacagaaaactcaaactttctttatttgttcatctctgccattgtagtcggaagcattttaggaatgaaaagagaaacgctggtcagggcgttcattaaaatttttattcctctgattgcagggaccattgctgcagcggcagtcggtctggcggtcggtacaatgctcggcctcggatttcagcatacgctgctgtacattgtaattccgatcatggccggaggggttggcgagggagctattccgctgtccatcggctattcggaaatcatgcacatgccacaagggaaagcttttgcacttgtcattccttccataatgttcggaagcttaagcgccgtcattttgtccggaattttaaatgtaattgggaagaaaaagcctgaattgacaggcaacggaaaagttgaccgttttgatagcggggacgcacagccgctcgaaagccgcgacaaagacaaagaaagcgtttttaatctttcctactttgcgtcaggaggcattctcgccgtctcattatatttggtcggtatgctttcacatgacttgttcggatttccagcacccgtcatgatgcttctgctggctgttgccgtgaaactgtttcgtctggctccggcgaatttggaaaacggcgcctacggcgtgtcgcgcttcttttcaactgctgtgacatatccgctgctttttgccattggcgtctccatgacaccgtgggacaagctgatcgcagcttttaatatcgccaatattattacgatcgtatccgtcgtggtcacgatgatagccgtcggcttttttgcagggaagtggctgaatatgtacccgatcgaaaccgcgatcatcaatgcttgccattccggccagggaggcaccggcgacatcgcaattctcagcgccgcagagcgcctcgagcttatgccgtttgcccaggtgtccacaagaatcggcggagcgataaccgttacgctgacgctgctgctgctagcccagttttattga

SEQ ID NO: 4654 - DNA, 861 bp, Bacillus licheniformis
gtgtcagctttattcaaaaaattgatgttatcttcattgatcggggtttccatcgggtcagcgctgtttgcaccgaatgcgggtgcacaagagccggcggtgaagcctaaaaaagtggatgtcattgcacacagaggcgcttcgggatatgcgccggaaaacacgatggctgcttttgataaagcgcttcagatgaaagcagattatatcgagctggatgttcaaatgtccaaagacggggagcttgtcatcattcacgatacgaccgtaaaccgtacgacagatattgactcagtgctgccggttgccgtaaaggatttgacgcttgccgagctgcgcaagcttgatgccggcagcttcttcggtccgcagttcgcaggagagcgcattccgacatttgaagaagtgcttgaccggtataaagggaagatcggaatgctgatcgaattgaaagagcctgcacgctatccgggaatcgaaggaaaagtgtcagcagcattgaaagagcggagaatggataagcctaaaaacggaaaaatcattgtacaatcgtttgattttaactctgtctataaaattcatcagctgcttccatcgatgccgacaggtgtcttgacgtcaaaagcggcggacttaacagatgcaaagcttaaggaattttccggctatgccaaatacgtgaacgccaacttgaaaaatgtggccgctgatcctacgcttgtgccgagaattcatgcgctcggcatgaagattacgccttggaccgtccgctcccgcgatgaagtgcctccgctattaaaggccggcgtggacgggattgtgacagactttcccgactatgttccgaaaaaagtacggtag

SEQ ID NO: 4655 - DNA, 270 bp, Bacillus licheniformis
atgaaaaaaatagcagcgggtcttttgtctgccggtctgatcatcggtttttcctggggcgccggcgatgtggcagaagcaaaaacgaaggtaaagacgtacaaaaactgcaaagctttaaacaaagactataaaggcggcgtcgcccgtacgaaatcggtgaaaaacaaaggcggaaaaacgaagtacaagccgtatgtttcaaaagcgctttatgatgccaataagaagctggaccgcgataaagacaaaattgcctgtgagcgctga

SEQ ID NO: 4656 - DNA, 639 bp, Bacillus licheniformis
ttgaccaaatctcagtatttctttaaattgcatcctttgatggtgccggccggctggaaggtgaaggaaaatcatttgtatcaaaagccgattcgcgacccccgccatacgctattgatcttggagaatgaaagctgcggtaaaatggtacaagttgaatatgctggagaactgaagtacgtcatcaggatgcaaaatgctgatcaatcgaaggtcagcgaagattctgacgcgccgtatgaacagctgatcgaacggttggaagacttgatgcgtgcctctgatggcgcccgcaatttgctaaggcttagaatcccggccggctggacagttgcgcatcactctttaactgatacaaaccccgatgaactagcgcctgacagcaaggcttggctgtctgacttcaaacgggaccttttgaagctgcggcatgatgaagaacgccttctgctcgatgtagagtggtatcccgagtgcagtccggcaggccattatgcgctgaaattgataaagaacgggaactgggacagccctttggaagacatgctgtgcatccatccgaaggaattagcgtatgagattaacgctgttttgaaaaagacttgcgaacatcaatatgtggatgaaaccggcgcataa

SEQ ID NO: 4657 - DNA, 1920 bp, Bacillus licheniformis
atgaaaaaaatattctctcataagctaagcttttttgtattagctgttgtttttgtatgggctaaaacctatgcttcctattttttagagtttaatttaggtgtgaaagggtctacgcagcacatgctgctgttcatcaacccattgagcttcacgattgctgcactcggtttggctttgtttgcaaaaggccgccggtcggcgatatggatcatcatcattgatgctgtgatgacgtttgctttatatgcaaatgtcctgttttaccgtttctttgatgactttttgacgtttgcaaacttaaaacaagccggaaacctcggcaatatgtctgacggcgtttttgacatcatggcatttcatgacatcgtctatttcgcagatttgatcattttgattgctctatgtgtgaagctgcctgaactgaaggcgtcacaactgaaaaaaagatgggctgcagccgttgttctcagcggagtggctctgtttttcatcaaccttgcagttgccgagacagaccgtccggagcttttgacaagaacatttgaccgaaattacatcgtcaagtatttggggccttacaattacatgatctatgatggtgttcaggctgcccaaaacgcgagccaaaaggcatacgcgagcagcgacgacctgacgagcgtcatcaactatacaaattcgcattatgcgaaaccgaatgacgagtatttcggcgcagcaaaaggtaagaacatcatcaagattcatttggaaagcttccagacgtttttgatcgattataagctgaacggaaaagaagtcacgccgttcttgaacaagctggcgcacggccaggatgacatgatgtatttcgataactttttccatcagaccggccaaggtaaaacagcggatgccgaattgatgatggacaacagcctttacggacttcctgaaggcagtgcgtttgtaacaaaagggcaaaatacgtaccagtccctgccggcgattctgaaccaaaaagaaggctacacaagcgccgtgctgcacggggactacaagtcattctggaaccgcgaccaggtgtataaacaaattggctatgacaaattctttgacgccagcacatatgatatgtcagaggataatctcgtcaaccttggcttgaaagacaagccgttctttgaagaatcaattccgaagctgaaatcgctcaagcagccgttctatgcgcatttaatctcgttgacaaaccactatccgttcattttggatgaagaggatgccacccttgaaaagggaacaacgggagacaaaacggtagacggttacttccagacggcgcgctatcttgacgaagcgcttgaagatttctttaaagagctgaaaaaagcgggattatttgatgattctgttatagtgatctatggtgaccacaacggaatctcagagaatcacaaccgtgcgatgaaagaagtattaggtaaagagattacaccgtatcaaaacgcgatgaatcagcgcgtaccgcttatgatccgcattccgggcaaaaaaggcggagtcaaccatacgtatggcggtgaaatggatgtcatgccgacacttcttcacctgcaaggtattgacagcaaaaaatacatcaactttggtacagacctcttttctaaagaccacgaccaaaccgtggctttcagaaatggaaactatgtaacgccgaagtacacgatgattgatacgaccgtatatgatacaaagacaggaaaagagatcaagggcaaccaagagacggaaaacctgaaatcgcaggtgtccgaacagctggatctgtccgaccaagtactctataaagatctgttgagattccacgagatttcagacttcaagcctgttgatccatcaaaatatcattacggaaaagaaaaaaccggagaataa

SEQ ID NO: 4658 - DNA, 144 bp, Bacillus licheniformis
atgagagaatatttttttcatgataacctctacctttttaaacttttttcagaccgctttctgtttcagtcaatgaagcgtgaggaaacgataatatatcattctactaaaagtctcggcggttttacaagcacgtcctggtga

SEQ ID NO: 4659 - DNA, 558 bp, Bacillus licheniformis
ttggaacaggaaaaaaagcagacatttgatgtgaaaagcagaatgtcctttagagtatgggtttttgcagggactgcaggtttcggattgattggagcatggctcttttatgaagcaataaaactcgaatcaaaatattccttgctgtacgtgggcgttggaactttcggggtcatctacggtttgatgacctttctaatggtttttccggccttcacgaaaaaaggaaacatcatcttcaccattatcgagggagaagacgggcggatattctcagggaagaaatctgtgttgttcaaggacatcaaaagccttaaaatggcggagcaccgctacagcccgaaaggcattttcttgatggatatactgatagagacacgggggaacggcagggtgcggattccgacgtacaacattctgcctgagccggaattttataaagcggtcgagctgtacatcctgccgtatatgacggaggaagcgcgtgcggaatggatcggtcagtttacagaagcgcaaagaaaggcttatttaaatgaatttcataaagatatttaa

SEQ ID NO: 4660 - DNA, 837 bp, Bacillus licheniformis
atgaaaaagaaagcaatggacataatattgatcattataggcgcatttttctttgcgttagccgtgaatctgttcgccatcccgaatgacttgggagaaggcggcgtcacggggatcacgctgattttatactacgtttttgaatggtctccgggcatcacaaactttgtactgaacggcattcttctgattatcggctatcgctttttggataaaaagacgacgatttacactattattgcggtggcggccaattcgttctttctgcacgtcaccgaagattggacggtgccggccgatgaagtgatcatcagcaccatctttgccggggtatttgccggcgtcggaatcggcatgatcatccgtgtcggcggaaccaccgccgggtctgcgattctcgcgagaatcgccaataaatattttgactggaacatcagctatgccttgctgatgatcgatttagttgtcgtcttcagttcctactttatcattggagctgaaaagctgatgtttacgattgtcatgctgtacatcgccacgaaggtcatggacttcattatcgaagggctcaacacgaaaaaggcgatcacgattatttccgagcataaaaacgagattgcggcgcaggtcaataccctgatggaccgcggcgtcacgatattatcgggacgcgggcactatacgggcgactccaaagaaattttatacattgtcattaataaacaagagctgtccatgctgaagaaaattattagaagcacagataaaaaagcatttgtcatcatccacgatgtcagggatgtattcggcgagggatttgttgatatttcaaaatag

SEQ ID NO: 4661 - DNA, 441 bp, Bacillus licheniformis
atgaacaaacaaaaacggcaatggctcatcaagcagaccattctcgaacatccggtagaaaatcaggaacagctggcatccctgctggaaaaacgcggcatcaccgtttcgcagtctaccatttcccgcgatattaaagaaatgtatcttgtgaaacagcccggtgaaaacggaaaacttgtctacacgacaaatgcttctttatccatcaatccttccaaaatattaaaagataaaatctctgacgttgtcctgcatgtgcatcgaagggacaacttgatcattattaaaacaatgcccggcaacgcccatgccatcggcgttcttcttgataagctcggaagcccggaaatgctgggctgtatatgcgggaacgatacatgccttgtgatttcccagtcacctgaggcagcccaatcattttatgaccatttatgctga

SEQ ID NO: 4662 - DNA, 1236 bp, Bacillus licheniformis
atgacaacaccgatacacgtttactcagaaatcggccctttaaaaaccgttatgctgaagcggcccggtcgggaactggaaaacctcacacccgaatatctggaaaggcttctctttgacgatattccctttttgccagcggtgcaaaaagagcatgaccaatttgcagaaacattaaagcaacagggggctgaagttctttatttagaaaagctgacggccgaagctttggatgacgcattagtccgcgagcagtttatcgatgagcttttaacggaaagcaaagcggatatcaacggcgcatacgacaggctgaaagagtttttgcttacctttgacgccgattcaatggttgaacaggtgatgagcggcattcgaaaaaatgagcttgaacgcgaaaaaaaatcgcatcttcatgagctgatggaagaccattatccattttatctcgatccgatgccgaacctttatttcacaagagatccggcggccgccatcggcagcggactgaccatcaacaaaatgaaggagcctgcccgccgaagggaatcgctgtttatgcgctacattatcaatcaccacccgcgttttaaaggacacgagattccggtttggctcgaccgtgatttcaaattcaatatcgaaggcggagatgagcttgtcttaaatgaagaaaccgttgcgatcggggtatcggaacggacaacggctcaggcgatcgagcgtcttgtccggaacttgtttcagcggcagagccggattcgccgtgtactggccgtcgaaataccaaagagcagagcctttatgcatttagataccgtcttcacgatggttgaccgagatcaattcacgatccatcccgccatccaggggcctgaaggagacatgcggatcttcgttcttgaaagaggaaaaacggcagacgagattcatacaactgaagaacacaatttgccggaagtgctgaagagaacgctcggcctttcagatgtcaacttgatcttctgcggcggcggagacgaaattgcttcagccagggagcaatggaatgacggctccaatacactcgcgatcgctccgggggttgtcgtcacctatgaccggaattacatttctaacgaatgtttgagagaacagggcattaaggtaatcgaaatcccgagcggggagctttcaagaggacgcggcggcccgcgctgcatgagcatgccgctctaccgagaagatgtgaaataa

SEQ ID NO: 4663 - DNA, 1008 bp, Bacillus licheniformis
atgaaccaaacgattaatttaaaaggcagaagctacttagctgaaaaagatttttcagaagaagaaatcctctatttgctcgatctggcccagaaactaaaagaaaaaaaagcacaaggcatcaggcatcgctatttggaaggcaaaaacatcgctttgctgtttgaaaagccttctacaagaacgcgctgcgcttttacgacagcctgtatcgacctcggtgcgcatcccgaatatttgggcaaagacgacattcagctcggcaaaaaagagtcgatcgaagacacggccaaagttctcggccgcatgttcgacggaattgaattccgcggatttgaacacgaaaaagtgatctcactggcagagcattccggtgtgccggtatggaacgggctgaccgatttatggcatccgacgcagatgcttgcggactttatgactgtgaaagaacatacgggacgcgtaaaaggcgtcaagctcacccatatcggcgacggccggaacaatgtcgccaacagcctgctcatcggcggcgcaaaagtcggcatggacgtaagaatctgttcgcctcaagagcttttccctgatcaggacatcgttaaaatggcggaagcgttcgctgaagaatccggcggaaaaatcaccgttacaagcaatacagataaagccgtgtccggagccgacgttctgtatacggacgtctgggtatccatgggggaagaagacaagtttgcagaaagaatcaaactgctcaagccttatcaagtgaatatggatctcgtcaagaaaacaggcaacgacaacgtcatcttcctgcactgtctgcctgccttccacgaccttcatacaacctacggacaaaatgtttacgaacagcacggccttaaagaaatggaagtgacggacgaagtgttccgcagcaaacactctaaagtgttcgatgaagctgaaaaccgcatgcacacgattaaagctgtcatggcagcgacgctcggcgatcttgactga

SEQ ID NO: 4664 - DNA, 1407 bp, Bacillus licheniformis
atggcggaagaaaaaaaacttgggctgtttgcgctcatcgcgcttgtcatcggatcgatgatcggcgggggcgccttcaaccttgcaagcgacatggcttcaggggcgggggcgggagccattttaatcggctggatcatcaccggagtcggcatgattgccctggcattctctttccaaaacttgacgacgaaaaggcctgatttagacggcggtattttcacttatgcccgggaaggattcggccatttcatgggctttaacagcggctgggggtactggttcgcagcccttctcggcaatgtcgcatatggaacgctgctgttcagcgcaatcggatatttcatccctgcgtttggagacggacaaaacatcgcatcaattatcggtgcaagcgtgatcctctggtgcgtgcactttttgatcctccgcggtgttcagtccgctgccatgatcaacttaattacgaccatttcaaaacttgtaccgattttcgctttcattatcgccattatctttgtgtttcatcttgatttatttacgaacgatttctggggaaaagggctgtcgctcggttccatcggaacacaggtcaagagcacgatgctggtgaccgtctgggtgtttaccggaattgaaggggccgtcttattttcaagccgggccaagaaatcaagcgatgttggcaaagcgactgtcatcggcttgatcagcgtactcgtgatttacgtcatgattacgatgctgtcgctcggcgtcatgaatcagcaaaacttggccgagcttccgaatccttcaatggccgcgatcatggagcatatcgtcggcaaatggggaaccgtgctcatcaacctgggattgatcatttccgtattgggcgcctggctggcctggacattattcgcgggcgaactcccgctgatcgcggcacgcgaaggggtcttcccgaaatggttcggcaaagaaaataaaaacggtgcgccgacaaatgcgctgactttgacaaacgccattatccagctgtttttgctgacgtttctcatttcagatgcggcctaccagtttgcattttccttggcttcctcggccatcttgatcccgtatctgttttccgggctttatcagcttaaatacagctggctgcacaaagagcctaaccggggcaaaaatctcatcatcggcaccatcgcaagcatatacggcgtctggctcgtatatgccgcgggacttgattacctgcttttgaccatgattttatacgctcccggcattctcgtattccgggctgtccgcaaaggaaaagaaggccccgtcttcaataaagccgagcttttgattgccgccctgattcttgtattggccgtgatcgccgtgatcagactggcttcgggaagcatttcaatttaa

SEQ ID NO: 4665 - DNA, 951 bp, Bacillus licheniformis
atgaaaaaaagaaaaattgtcgtcgcacttggcggtaatgccattcaaaccggagatgccagcgcagaagcgcaaaagcgcgcgcttgaagaaacggccatgtatttggcggatatgatcgacagcggcgctgaattaatcatcacgcacggaaacggcccgcaggtcggaaacctgatgatccagcaaaaggaggcggattctccgaaaacgccggccatgccgcttgaaacctgtgtttcgatgacccagggaatgatcggctattggctgcaaaatgcccttgaccgggcgcttcacgcaaaagggaaaggcggacatgcggcaaccgtcatcacccgcgtcgccgttcgaagcgatgatgaagcgttccgcaacccgacaaagccgatcggtccattttacagcgaagaagaagcgaaagaactgatgaacagccgaaacggcggcctcgtttttaaagaagatgccggaagaggctggcgccgcgtcgtaccgtctccggccccggtatcgattcttgaacacgatgttatcaatgatcttgtcgaacacggacatatcgtcattgcagccggcggcggaggcgttcccgtcatcgaaaacggcgatgccgtctccggtattgacgccgtcatcgacaaagactttgcagcctgcaaactggcggagcttgtgcaggctgacgaactggtcattctaacaggtgtcgactatgttgccgtcgattatttaaagccgacagaacgtgcgctgaaacgcgtcaccaccgaagaactgaaaggttatataaaagaaaagcaatttgcagaaggaagcatgctgccaaaagtcaaagcagccattcagtttgctgaagctaaaaaaggcaacaaaacggtcatcacatccctgaaattagccaaagacgctctccaaggaaatgccggcacgattgtcgtccaagcctaa

SEQ ID NO: 4666 - DNA, 678 bp, Bacillus licheniformis
atgaagaacaaagacatcgtacatcagctgaaaaagtttcctcttctcgcttccctgaataaaagagatctggaagatatgaaacagtttatctattggcgctcttaccataaaggccagatattatttatggaagacgacccccgggaacgaatgtaccttcttctcgacggctttatcaaactcgaaaaatcaaacgaagccggatccatgttttataccgactatgtacgtcctcataccctctttccatttggaggcttgtttcgggatgagcattatcactatgccgccgaagccttaacagatattgaactctactatatacccatgaacatcttcgaagatctcgtccgggacaacaaaaacctgctttacgatattctcaatcatttatcagacatccttgcccttcacgaggaaaggctgaagcgcatcacactctcccatgcccacgacagggttacacaagccatttattatttaaccgaaagcctcggtcaaaaagaaagcaactcaaccgtcatcaactgtccgatcaccgctgccgaaatcgccaaaatctcggggacatcccgcgaaaccgtcagcgccgtcctgaaaaagctccgctgcgaaggcgttatcagtcaaatgaacaagcagatcatgatcaatcggccggaatattttatgtag

SEQ ID NO: 4667 - DNA, 1437 bp, Bacillus licheniformis
atggccagacaaacgtggaagattcccgacgattttattctcggcgcagcagcgtcggcgtggcagacagaggggtgggacgggaagcggccgacacaggattcctatttggatatgtggtacaaaaatgatcctgatgtatggcatgacggatacggaccggctgtggcaaccgatttttataaccgctacaaagaagatattcaatatatgaaagacatcgggctaacccactaccggacatccattaactggtcgcggtttcttttggattatgaaaccgccgaagttgacgaggtgtatgcaggctacattgatgacgtcatcgatgagctgaagagatgcggagtagaaccgatgctttgtcttgagcactacgaaatcccggctgtcctgctggaacagtatggcggatggggatcaaaacacgtgattggcttatttgcggcttatgcagaaaaagcgtttgaacggtatggggacagggtgaaatactggtttacctttaatgaaccgatcgtgccgcaaacacggatctaccttgacgcacttcgctatccgtacgagcagaacacgaaaaaatggatgcagtggaactaccataaagcactggcgacagcaaaggccgtggcaattttccggaaaaggaagcccagttttagagaaggcgcaaaaatcggcgtcatcttaaatcctgaggtcgcgtatgcgaggtcaagcgcgccccatgatcagaaagcggcccaagtttatgatttgttttttaacagggtttttttagatccgagcataaaaggcgtctatcccgatgaattgatggagctcatggccaaacacgacatcctttttgaccatgatgaagaagagctttccgtcatcaagcggaatacggtcgattttgtcggtgtgaacctgtattatccgaagagagttcaagcgccttcaaggcaatggaatgaatcgacgccttttcatcctgcttattactatgagccctttgagctgccaggcagaaagatgaatccgttcagaggctgggagatctgcccgcgcattgtgtacgatatggctatgagacttaaatatgagtatggaaatatcgaatggctgattgctgaaaacggcatgggcgtcgaacatgaagagcgttttaaaaatgaagagggggtcattcaggacgactacagaatcgattttatttcagcccatttgcgagaggcgatgaaagggatcgccgacggcgcaaactgcaaaggatatatgctttgggcattcacggacaacgtctctccgatgaacgcctttaaaaaccgctacggccttgtcgagattcgattggagaacaaccgcagcagggcgctgaaaaaatcggcttgcttttatcgggatatcatcaaaaacagacggtttgaaacagaggaattccggtataaataa

SEQ ID NO: 4668 - DNA, 1320 bp, Bacillus licheniformis
atgagcaggatggcgaaggtgactgagatgtttgagcgggtcgcttttaaaattacaagtttcaaatatatcatggtcattaagtcggcgtttgtcacactgatgccggtcatcattgccggggcgtttgcggttttgatgcagaatatggtgatgagccccgagacgggacttgcggttttcaggccttttcggttcttgtctgcgcttgagccgattatggcgtcaatcaattatgcgacgctgaactttattacgatcggcgcggtgtttttgatcgggattgagctcgggaagctgaatgggcatgaatcgttttttcccggcttgatggcgctcatgtcctatatctctgtcattccatcggcggtgctgttggaagtgaacggttcgatgcaggaagtggttaacgtgctggccaaggaatttacggatccgaagtcgctgtttttggggatgtttatttcgattgtgtctgttgaaatcttcagcaagctgtcaagcatggaccggctcaagattaaaatgccggacagcgtgccggcaaatgtctctgtatcattcggcactttatttccttcgattattaccgtcacgatcatcgccagcttcggatttgcgtttcatcggctgacgggggtatatcttcatgaagccgtgtacaatgtcgtgcaaaagccgcttgagggcgcgattcaaggtcttcccggcattctcttgctggtgtttgtcgcacagtttttctgggtgatcggcatacatggaaaccagatggtgaagccgatcagggagcctttgctgctcgcttcgattaccgtcaatatgaatgcatacgcagccggcgaatcgattccgaatatcattacgatgccgttttgggatgtgtacatgagcatcggcggatccggcgtcacaatcggtctgttgatcgcgatgtttatcgcggggaaacgggaggatttgcgcagcattacaaagatttcgtttggtcccggcatcttcaatatcaatgaaccggtcatctttggggttcccgtcatgctgaatccgttaatggcgattccatttattgtgacgccgcttgtgacgggtgcgatcggttacatcgcgacagcggcgggctttgccggaaaagccgttgtcatggtgccgtggacgacaccgccgattatcaatgcctggctgtcaacaggaggaagcctcggtgccgtcgtcacacaaatcgtatgcatcatcgtctccgtccttatttatcttccgtttgttattttattgaatcagacctttacgattagttctgaaaaaaatgtgtctatgtaa

SEQ ID NO: 4669 - DNA, 156 bp, Bacillus licheniformis
atgacccgctgtttcagtgaaacggcgggttgtctgctttgctggccgtccaacctgaaaaatttcctctcccaaaggaaaaaatatgcaccgaaaagaaagcgttttcattgtaaagtaaaagcaaaccaccaaaaaaagggggagagtaaatga

SEQ ID NO: 4670 - DNA, 1392 bp, Bacillus licheniformis
atggacaaacaacggttcaaaaacgaagtaaacaagatcgatgtccctacaaaagaaatccgcgaatcgattgataaaggcatcaagcgggccaagcgggaaaaaacgtttcggccgaagcgcgccgtgaaaaggactgtttttgtttcgagcgcggccgccgtgctccttctcggtagcggcttcgtttccccagcgatgcaaagcgtgttggctgacgtcccgctgattggaaaagcgtatcaacaattccatgactatgtcggccaaaacttggtggcgggccagcttgtcactgaactgaacgagaaagcgtccagcaacaacatagacgtgacagctacaagcgtttattttgacggcggaatcatcggtatgacgtttaaggtgaaaagcgatacaagaaaagatttagatgatggagcgagaatgattcatttcacattatttaatggcgagcgcaaatgggctatcgcttctcaaggagacttgaagaaaacagaggacggctataccggctacattcaagtaggctatccagacaaacatattcccgataaactgacactcccggttacgatcacaaatattaacggaatcagagggaaatggaagttcgacattccggttgataaactgccgtataaaacgctccacataaccaaaaacaatacacaatcggctgatggccataagctcgccgtaaaaacggtaattctcggaaaagaatcgactgtcatcgactatgaagtatccaattcagaggaacatccgaacgatcgtacatcggttataaaagtgaccgatgataaaggaaatgaaattccttatttgagtggcgggcagtggacgacggacagtacaaagaacggaaacaaggttcgtcacgaagaaaggctgatccttggaaaagtgaataaaggaacaaaacaccttaagattgaggcgagcagcagtatgggcgattccgaaaagacgctgcctctcacaaaaacgcccgccgcgctgagcgctgaccgtcatgacttccagattgccgttgatcaggtgaaacaaaacggaagtaaattgtctgtcgactatcatctgaaacatgtcgatcaatctaagattgatattgacagcatgcaaaactttttagaaacgatgtcactggttgattctgcttataaaagcattgacgaagcgccgatgggacacagcgtaaaaggtaattttacaaaagtgcttgatcctaaaaagctccgattccgatcagactttacgttagatggtgaatttggagcgaaaaacttcagccttgaccgatattcgcttgatgtcgaatttggttatttaagcgcattttattctacaccgtttaagccgatcaaagtgcagttgccacagtaa

SEQ ID NO: 4671 - DNA, 549 bp, Bacillus licheniformis
gtgaagcaaatcagattagttaagaaagctgtcgcaggcaacgccaaagcttttgaaatgctgtttcaaaagcacagcgaacagctttacagaacagcttacatatatgtgcgaaataaggaggacgcgttagatatcgtacaggaaacggcgtacaaggcatttttatcgattgcccagttgaggaatcccgaatactttttgacatggctgacgaaaatcctcattcatcatgcatatgccatattggacaagaaaaagaaagtggttttaatggacaggccgctgctggacgaaggccgggagcaggagatgcatgcggacgacagaatagggatgcttgaagctgttcagcagttgcgaaaagaatatcaaaccgccatcattttattttattatcacgacctgccgattcatgatatcgccgaggtgatgaatgctcctgaaggaaccgttaagacctatctgaaaagagcgaagcttgaattaaaacaactactgactgggggagaagacgcatggacaaacaacggttcaaaaacgaagtaa

SEQ ID NO: 4672 - DNA, 414 bp, Bacillus licheniformis
atggctaaaggttatacaaatgaaggaacgaaatgggagtttgcacattccttctggcttgtgttcacatgggttccttttggatttttaagctggtttgcatttatttatatcgcagcgcgaactaaacaaggaaaatggttatttgccggaatcggatacgcagcggcggttttattggctgcctttacagccagaacgttcctcttcgatttggcaatgaaagcattactcattgtttggatcatctcaatcattcatgctttcaaaacaagagccgaatatttggtgcggcttgaggccgtatatcggatcaaacgatcaagtatgaatgacctgagggaagagcttatacatgaacaggccccgcacggccaaaccggaacttctaaagtgacgctgacaaaaaaataa

SEQ ID NO: 4673 - DNA, 1233 bp, Bacillus licheniformis
atgaagaacaaattgattgaacgcctcatttcttatgcgaaagtggatacgcagtcaaatgaaaacagtcagacgacgccttccactcccgggcagctggcgcttgccaatatgcttgtcgaagagctgaaagagatcggcatgaaggacgtcacaatcgatgaaaacggctatgtgatggcgacgcttccttcgaatacagaaaaagaggtgccgacgatcggtttcttggctcatgtggatacagcaacagattttaccggaaagaacgtcaatccgcaggttatcgaacaatacgacggaaaggatattgtgctgaatgaatccctcaatgtcgtcttatcgcccaaggaattccccgagctagcagattatgcgggacatacgttgattacaaccgacggaacgactttgctcggcgccgacaataaagctgggatctctgaaatcatgacggcaatggaatatttaattgcgcaccccgaaatcaaacacgggaagatcagagtcgcttttacacctgatgaagagatcggcagagggccgcacaagtttgacgtcgaggcgttcaatgccaaattcgcgtatacggttgacggcggaccgcttggcgaactgcagtacgaaagcttcaatgccgcagccgcgaaaatcacttgtaaaggaacgaacgtccaccccggcacagcaaaaggaaaaatggtcaatgccgccaaaatcgcgatgcagttccacgccgcattgccggaaaacgaagctcctgaatttacagaaggttatgaaggcttttatcatctgctttcaatcaagggcgatgtttctgaaacgagcctctcttatatcattagagattttgacagagaccgatttaacgagagaaaagacaccgtccaaaaaatcgcaaacaaccttaaagcgaaatacggcgaaaacagcgtcacagtggacatgaatgatcaatattacaacatgagggaaaagatcgaaccggtcaaagagattgtctacattgcctataaagcgatgaaaaaccttgatattgaaccggtcgttaaaccgatccgcggcggtacagacggctctcagctctcatatatggggcttccttgtccgaacattttcacaggcggggaaaactttcacggaaaatacgagtatatttccgccgacaatatggtaaaagccgcgaatgtcatcgtggaaattgtgaagctgtttgaagaaagagcttaa

SEQ ID NO: 4674 - DNA, 1479 bp, Bacillus licheniformis
atgaacagaattcagcaggcagaagaagcattaaagaaagccgggaaaaaagtgaatcgccgttaccgaatgggctatcacatgatgccccgggcaaactggataaatgatccaaacggacttattcaatataaaggggagtatcatgtcttttatcaacatcatccgtatgatgagaattgggggccgatgcattggggccatttgaagagcaaggatcttattcactgggagcacttgccggttgctttagcgccgggagacgaatttgatgagagcggctgtttctcaggaagcgcagtcgaatataacggcgacctcgctttaatctatactgggcataatatgatagatgaagagaaagacgatttctaccaaactcagaatatagcagtcagcaaagacggtatcgtctttgaaaaactgaaagaaaaccctgttattgcagagccgccggaagacagcgcacgtcattttcgcgatccaaaagtatggaagcatcgtgagaactggtatatggtggtcggaaactcctcaaaagagaacgtcgggcgggtcatcttataccgctcgcctaactttgtagattgggagtacgtaggcgttctcgcccaaagcgacggaaatctcggctttatgtgggaatgtccggatttctttgaactagacggcaaacacattttgctgatttcccctcagggtatagaggctgatggtgaatcatatcaaaatctgtatcaaacaggctatttgattggagactatgatgaagaaacgaatgagtttgtacatggctcctttaaagagttggatcacggccacgacttttatgccgtgcaaactttattggatgacaaaggccgcagaattgcgattggctggatggatatgtgggagtcagagatgccgacgaaagcagacggatggtgcggggcattaactttgccgcgtgaattgacgttgaaggatggtcacaaaattttaatgaatcccgtcgaggagactaaattacttcgtggatcggaacatcatgagtgtgacaatcaatcgatttccggcagctattttataaagacagccgaaaagcttcttgaagtggtggccgtttttgatttgacaatttgcagtgccgaaacggttggcttaaagatccggggaattgaacaggaagagacaatcatccagtacagcttggttgatcacaagctgacgctcgactgttcaaagtccggcaaagcgcgggacggtgtgagaaacgtacggcttgaagcggatgagaagctcactttgcatctgtttctcgacagatcgtctattgaagtatttgcaaatcatggtgaagcgacaatgacaagccgcatatatccgaaggaaggaagagcggggattgagctgttttctgagaaaggcaacgtacgggttgaagaattcacttactggacgttgaaagatatttggaaaggtgatgaagccaaatga

SEQ ID NO: 4675 - DNA, 1236 bp, Bacillus licheniformis
atgaaaagctcaaacagtctgtattggaaactaagcgcctattttttctttttcttttttacttggtcttccagctattctttatttgcgatttggttagggcaagaaatcaatttgaacgggtccgcgacgggcattatcttttctgtaaacgctatctttactttgtgcatgcagcctttgtacggttttatctccgataagctcgggctgaagaaaaacatattatttatgatcagtttgctgctcgtatttacgggtcccttttatattttcgtctacggaccgcttttgcaatacaacgtctttcttggggctatcgtcgggggaatttatttgggaactgcttttctcgccggaatcggtgcgattgaaacctttattgaaaaggtcagccgcaaatatcaatttgaatatggaagaacaaggatgtgggggtccctcggctgggctgcggcgacattttttgcaggtcagctgttcaatatcgatccgaatatcaacttctgggttgcgtccgcctcagcaatcatattggtggccattattgtttccgtaaaaattgagatgacagatgatgaaaaggaaagagcagactcggtcggattaaaagacgtaggagggctttttctcttaaaagatttctggtttttgatgctgtacgtgatcggcgtaacatgcgtgtacggcgtctatgaccagcagttcccgctttactacgcttccttatttccgactgcggccttggggaaccaaatatttggataccttaattcattccaagtatttattgaagcgggcatgatgtttcttgcgcctttcatcgtcaataagctcggtcctaaaaaaagtttgattttagcggggctgttaatggctttccggattatcggttccggacttgtcagcggaccggtcggaatttcatcgatgaaactcattcatgctttagaattgccgattatgctgattgcgatgtttaaatatttggcgactaattttgataatcgtctttcatccgtactttatcttgtcggctttcaattcgcatcccaggtaggcacgtcgattttttcgccgcttgcgggaggtttatacgacagcatcggatttcgccacacttatctcatcatgggagcaatggtcctttgtttcacccttatttcgatttttaccttgctagactcaaagaaagatgttgaatttgctcaaaatctacaaagcaatcatatatag

SEQ ID NO: 4676 - DNA, 849 bp, Bacillus licheniformis
atgagaaggaaattcggacctttaacgatactggaatatatatgccttgttttgctggcggctctgtttatatttccgctgatttggatggtcgcttcatcgatgaaaccggaagccgatatttacaacaatatcagcagcattaaagcgtttcttccgtcttttcatccgtcggaatggtttcaatcctacagggaagtgctgtcacggtttgatttactaatgtatattggtaacagtctgttttacggtttgtgtgtggcagcgggagcggtcattatcaacggaatggcgggctttgcattcgccaagctgcaattcacaggtaaaaaagtgctgtttaccatattgctggcgcttttaatcgtgccgatggaaacgattttaatctcgcagtttacaattgttcataagctcggacttgttgatacgcgccttgccgtgattttgccggcgcttgcgggggctttcaatatttatttgttccgaaactttttcatggcgatcccgggggagatgattgagtcggccaagctggacggagcaaatacatggcagattttctggcgggtgatgctgccgatgtccaaaccggctgtcgctacggtggggacattggcttttatcggcagctggaatgactatatttggccgctgatggttttgacggataagtcgaaatttccgatccaggtggcgattacagccatcaacagcaccgagccggtttatacgaaccaggtgatggctgtcttgacgatttccacgattccgctgattctgatctacattgtagcccaacgctacattttagatggcctgggcggttcagggacaggcatcaaatag

SEQ ID NO: 4677 - DNA, 939 bp, Bacillus licheniformis
atgaataaaattccgttgaaagaagcaaggacggcctttccgctgaaaaaaatccctgccagtaaaatagggtggcgggacaatgtgctggcctatacatttttaggtccggccttgctgattttgtcagtgtttctcgtgattccttcgattatggcggtttactacgcatttacagattattatttgttaacacctgacctgcgcaagtttgtcggttttgacaactttatcaaattgttcaaagaccctattttcttgaaaagtttgagcaacacattgaaatttgttgtccttgtgattccattacagatcggggccgctctcgggctggcccttctgttgaataaaaagcgcaaggccaatacgtttttcaaagtcgcatactttagccccgtcgtcatgtcgcttgttgtcatctccgttttgtggctgtacttgctgaatccgaatgaaggaatgataaataacgtactgacgcatgtcggtttgccgccacagccgtttttgacaagtcctaatcaggcgatctttacaattgttttcgtttcagtctggcagggagccggatttcagatgctgatttttttagcgggcctgcaaaacattcccggagatgtctacgaggcggcgcaattggatggtatgaataaatggcagcggtttatttatattacattgcctttgttgaaaccgacgtcggtttttatctttattacgacgctgatcagtgcgtttaagctcctcgtgcagccaatggtcatgacccaggggggaccggtcaattcaacgatgacagttgtctattatatttatcaaacgggatttaccgatcggatggtcggctatgcaagttcaattgcgctcttgtttggcacgataattggattggtgacgcttgcgcagcgcaagttggtgaaggaggatgaaggcggatga

SEQ ID NO: 4678 - DNA, 1299 bp, Bacillus licheniformis
atgaaaaggtggctcttcggaattttttcgttgttgctgatgtttgcgatgtggggctgcagcaatagcaaaagtgcaaatagccaagatgggaaaacgcttacgatgtgggtgcacgtatctgatgacagtgaagaaggaaaggtctatcaaaagcgggtggacgcttttaataaaaagtatgcctctgaaaacatcgaggccaaaattgatttcatccccagaagcggaaacggcggcggatatgaagacaaagtgaacgcggcgctgacaacgaataccctgccggatgtgatcactttggacggaccgaacacggcggcttatgcgaaatccggcgttattgcgccattggatgagtatatcaaagaccaggatgatttattgccgagcattaagcaacagggaacctaccaggggaaactgtatgcgatcggtgtcagcgaatcatcggtcggtatttactataacaaaaaaatgctgaaggacgccggcgttgacttgaaaacgctgccaacggttgagaatccatggacgtgggacgaattccttgagctttgcaaaaagctgaaaaataaatatgacaaaccggccatcgatatgcagttgcagtcaaaagacgaaatgctgacctatgcgcttttgccatttgtttggtcggctggcggcgatgttctttcaaaagatggcaagaaagcggagggtgtttttaacgacaaactgaccgttgaagcgatgacatttattcaaacaatgctgaaagagggttacacgacccggactccggttaagcaggcgtttgaaacggaaaaatatccgatgaaaatgagcggtgtctggacggtaaccgacatggaaacaaattttcctaatgtcgattatggtgtgatgccgtatcctgtgtcgccaaaaacaaaaaagcttgtgtccccttcaggaagctggcagtttgccatgacacagacgtctgaaaacaaggaatgggcggcaaaattggtcgattggatgacaaacaaggaatccaacttggaattgagccgttcgatcgccgcgctgcctgtgcgctattcatcagagaaagtgctggcaaaagaattctcagatgaaatgaatgtcttcttgcagcagctgaaagaaacggggcatgcacgaccggtgacaccggcatatccacaggtgacgcgcgcatttcagcaagcgatcgatgacatcagcttctttgatcagcatcaggatattcaatcggttctggatacgcgtgcaaaagaaatgcaatcagccatcgataaggcaaactag

SEQ ID NO: 4679 - DNA, 975 bp, Bacillus licheniformis
atgaagcctagcattcacgacgttgcaaaaaaagcgggagtttcaccaacaaccgtatcgcgggtattaaataaccgcggctatattagtgaaaaaacaaaagaaaaagtctataaagcgatggaagaaatcaattactttccaaacgatttggcccgctctttatttcgtaaacgaactcatttaatagggctcatcatccctaactccagcaacccgtttttcggcgaactggcctttcatattgagagcatctgcgctgccatgggctacaaactgctgctttgcaacagcttaaaccgcaaagacaaagaagaaaaatacttggaaatgctgatgcgaaatcaagtggacggcgtcatcgccgtgacttacaacaggggaattttaaattatcatcggcaaaacctgccgattgtcgccatcgaccattacttgtcggaaacgattcccgtcatcggctctgataactatgacggaggaagaaaagcgacagaactgttaattgcaaaaggctgccggcacatcatccatatcaacggaccaattgagctgaaaacaccggcaaatcttagaagaaaagcatatgaagatgtgatgcgacaacacgggagacagccgattacatatgaagttccctttcatcaaaattaccgggaaatcatttcaaaactgtttgatgaacagcctgcagctgacggcatttttgccagtgatgacctcatggccgctacagtcatcaccgaagcaaaaaaacgcagaaaagacattcccgggcaattaaaggtgatcggctacgacggaacggaagcggttcagtccattctcccggaattgacaaccatccagcagccgatcgaactcatttccaagacggccattgagattttgtccaaagccattgaaggcgaattcgatgatttgccgctggaaacctatttgcccgtacagcttttagaaggagagacgacttaa

SEQ ID NO: 4680 - DNA, 531 bp, Bacillus licheniformis
ttgaacgtaagccacttttttcctgaaacccttgtttctcttgtaaaagacatgttaaccaaaaccgatggttcaacaaccaaagcgattgaaacgctgatcggcggcaaagccgaaatcgaagtttttcagcaaaataatattgattatgacaagctttcacctgaggaagcaaggctgtttcaacgcgatgatgacatcttgtttagaacctcgtctttgaaaacaggcgatgattatttatcttataattatgtctatgtcaaaacaaacttactgccgcccgccatcaaacaagatttgcaggaagaaaggcttcccatcgggaaaatcattgcagaactggagtcaaggcgtgaaattttcagcacgggcgactgcctgggaaaacatttcacacaacttgtacctgtttcagcagaccggacatatgcttttaaaaaataccagatcatcagcggccgacagtgcatgttctatgtctgcgaactgtttgatttagaaaaaatctgcaaactgactgcgggctga

SEQ ID NO: 4681 - DNA, 684 bp, Bacillus licheniformis
atgaacaaaaaaacagtgtttaaagcgttcggaatgttgatgacaggggtattgttttttgcgctgtacagtgcggccgcacttccttctgcacacgcggcaaacgaaaaaaaaccgacggtcacgagccatacgtacaaaaacattaaggctttgaaatacccgcaagtttcaaatgtaagccccaaatctctccaaaacaagatcaacaaagattttaaacattatattgagcagtcctacaaagattatgtaaaaaacaagaaagacggccaacagcacggataccaaacggattatcaaacgtcctttgaagtgaaataccggaccggccaaaagctgagcatcctgacaagcaattacgtctattccggcggagcgcacggaaatacggcagtccgctctttcaactatgaccttgtctctaaaaaacgggtgtatttatccgacatcctaaatacaaaatcgaaaatggataagacaaaaacatacatttacaactatattcaaaaacacagcgacattttctttccggatgtgaagaagaaagacatcgtcctcggtaaaaacacggccttctattacactaacgacggcattgcgatcgtcttccaacaatacgatgtcgccccttatgccgccggaaatccggtcgttgcagttccgaaaacggtgtatcaataa

SEQ ID NO: 4682 - DNA, 162 bp, Bacillus licheniformis
atgtgtgaatttttcgtcaggacagccgttcaaacagtcaacaagatgctgaacaaacagaataaattagaatttttttcaatttttatttccaaaaacagaaactttttattgagttcaccggtctataatgtgtacctgatttcaaaatgggtattataa

SEQ ID NO: 4683 - DNA, 1131 bp, Bacillus licheniformis
atgacacaatcaaccgatgtactgaagcaaacgcctggaagaaaaatcggaccgtacagagctgatcaggtgggcagtcttttaaggtctgagcccgtaaaaaaagcgcgcctccaaaaagcgaacggcgaaattagcgctgaacaattgcgcgaagtcgaaaacgaagagatcaagcgcattgtcgaaaagcaaaaagaaatcggtcttaaagccgtgacagacggggaattccgcaggtcatggtggcatttcgattttcttgaaggacttgacggcgtagaaggatatacagcggacaagggcattcaatttcataatgttgaaacgaagccgcgcggcatcaaagtaacaagcaaagtcgactttacaaaccatccgatgctggaagattataaatttcttcatgatattgcgggcacacatacgccgaaaatgacgattccgagcccgaatatgctgtttttcagaggaaagcttggagaaagcccgtatgaggatcttgatgaatttcatcacgatgtagctcaggcttacaaaaaagcgatccgcgcattttacgatgccggctgccgctatttgcagctggatgacacggcctggtccgtatttttctcagacaaaggacatgagcagatcaaagctttcggccgccagcctgatgaactgcgccagtctttcgccaacacgattaatgaagcagttgaagggcgcccggacgatttgacggtcaccatgcacatctgccgcggcaacttccagtcgacatgggtggcggaaggcggctacgatgcggctgctgaaacgattttcgacggactcaatttagacggacttttccttgaatttgatgacgagcgctccggcggcttcgaaccgcttcgctacgtccaacggaaagacttgcaaatcgtcctcggtttaattacatctaaattcggcgagcttgaaaacccggatgatattaagcggcgcattgaagaggcgtcccgatatgccgatctgaaccagctgtgcttgagcccgcagtgcggctttgcttcaacggaagagggcaacctgcttaccgaagaacagcagtgggaaaaactgcgccatgtcgtcgagatcgctgaagacgtatggaaataa

SEQ ID NO: 4684 - DNA, 2235 bp, Bacillus licheniformis
atgattaagaaaaggaaaatcgatatattcctggtcttcattcttgtattatctgcagcattaaacttgtacggcatctggaatagtgacacagacaacgcctactatacggcggccgttgaaagtatgacccaaagctttcataacttcttttacgcatcatttgatccggcaggctttgtaacagttgataaaccgcctgtcgcactctggattcagacactttttgcacttgtattcggcgtgcacggctggagcgtcgttctccctgaagccattgcggaagtgatttccgtagcactcttgtactttattgtaaaacctacttttggcaaaacggcggccagaatttcagctcttattatggcgtgtacgccgattgccgttgcggtcagccatacaaacaacgtcgacagcattctcgtcctttgcttgatgattgcaacgtggctgttgtttaaagcagtccggaaaggaaaaatcggctggctgctcggcgcattctgtatgatcggtgtcggttttaacgtcaaaatgctgcaagcttacatggtattaccggcattcctgctgttttacatgattggagccaaaacgacgattcgcaaaaaagttgtgtctcttatcacagccgtgatcgttctggcaggtgtttccgtttcctgggcggttgtcgtcgacagccagcccgagagttcgcgcccttatatcggaagcagccagaccaactctgtccttgagctggcgtttggctataacggcatccagcgtctcacaggtcaaaacggtgcaggcgggggcggaacctcctcatctgatcatgatcaaaagaatcagcagcaaagcggcgatattgaaaacaactcagactcggcaaatggacaaatggctccgccgagcggaggcgaaatgccttcgggcggaccggatggccggcagggtgatgtccaaagcggcggcggaggtcccggtggcggcacaggcggcatgtttggcactggaaccccgggtcctctcagactattccaatctgagctttcaggacaggctagctggctgatcccgtttgtcctcttcggcatcatcggtttgctgatcgcgggtcttcgcagacaaagaaaattcaatgaaacaacgactgaaacaattttctggatgatgtggcttctgccggtcgctgcattcttcagcatcgcaggattcttccatcattactatctgattatgctggcagctccaatcgccgctttgtcaggtgcaggctggacggcgctcgttcgcctctatcaggaagaaagcggctggaaaaaacggctgctgccaatcggcattttgctgacaaccgcatttgaattgtatattttgagtccttatctcagcgaaatcggcttcatctggagcatattgatcggcgctttcggcattgtcacaagctgtcttctcatctttctcaagaaaggaaagtcattcagctactatgtatcacttgcagcgctgcttggcatgctgatcgggcctttctattggacaacggcgacgcttgctgacggtgtaaacggcatgattccacaggccggacctaaatccgcacaatcatttgccggcggtggcggaggaggtaagatgcagaataacgacggcagcggacctcccggatttggcagccaagacggccaaacatacagtaatcaaaacaacaataatggccctggcttcggtccaggttcaaacagccaaaacagcaacgattcttcagctgataccggttccggccaaaacagccaaaatcagaatgacgaaggcgcaagcggccgtcaacaaggcagaccaagcggcggcggcagccctggaagcgtcgagtcggtcgatgaagaactgttgagctaccttgaaaagaacaacaccggtgaaaaatatttatttgcagtctcaagtgcaacttctgctcaatcttacatcatcaaaacgggcaaagctgtgatggcgatgggcggattctcaggaagcgacccgattttgacggttgaaaaacttgagaagctcgtcaaaaacggcgaagtcaagtacttcatgatcggcgacggccgaggccgggacaattcagaaatcaccaactggattaaagaaaacggcacagaaatttcaaaaagcgaatacagcagctcttcttctgatgattcacagtcaggcggacctggcggaaatcaaacgctttataaagtggagctggattga

SEQ ID NO: 4685 - DNA, 978 bp, Bacillus licheniformis
atgcagaaacaagtcacattttcaatcgtagtccctgtctacaacgaagcggaagtgcttcaaagcacctatgaccgattaaaaaccgtcatggactcgacaggcgatccctatgaactgatttttgtaaacgatggttcaagcgatgacagcattcacacgctgaagtcgcttgctcagtcagaccaggcagtaaaatgcatcaatttctcaagaaacttcggtcatcagatcgcgattacggccggcacagactatgctgccggcgaggcgatcgttgtgatcgacgccgatttgcaggatcctcctgaattgattttggaaatggcggaaaaatggcgccaaggctttgacgttgtatacgccgtccgcacaaagcgagaaggagaaacatttttcaaaaagcaaacggccgccatgttctaccggattttaagaaaactcacagacgttgatatcccggtggatacaggagacttccggctcatggaccggaaggtggtcaatgaaatgaacaagctgaaagaaaaaaacccgttcgtccgcggtcttgtcagctggctcgggttcaagcagacagccgtctattacgagcgccacgaacggcttgcaggggaaacgaagtacccgctgaaaaaaatgctgaagctctcgctcgacggcatcacttcattttcctttcagccgctgaaactggcaagctactcaggaatcgtgctgtcagcgatcggctttatatacgccttcatcgtcgtctgcatgaagctgtttacgacaagcaccattacaggatggtcgtcgatgatcattctgcaatgcttgttcagcggatttatcctgatcatcctcggggcaatcggcgaatacatcggccgcatttatgacgaagtgaaagacaggccgctttatatcattgacggaaaatacgggtttgaagaacagcggcgggcgcgagctccccagcgccatattatgtag

SEQ ID NO: 4686 - DNA, 996 bp, Bacillus licheniformis
atgagcgtactagttgtcgggggagccggttatatcggttcccacgccgtttacacgttaattgagaaaaaagaaagagtcgttgttgtggattccctggcaacaggacacgcagaagccgttcactccgaagctgcgttttataaaggggacattcgcgaccggcattttctcaagcaagtatttgaaaacgaggacattgaagccgtcatgcatttcgcagcatctccgatttcctcgaaatccaaaaacgtgtttacttcctttaacgaaaacatcacaggaatggaaacactgcttgacgtgatgaaagaatacgatgtcggccggatcgttttcgcgtcaagcgcggccgtctacggcagtccagaagacctccctgtcacggaagaaaccgaacctgagcccgttcacgcgcacggcaaagtcaaatggatgatggagaaaatgctgatggaagcggaaaaagcgtacgggctgaaatatgtgatcctccgctccttcaatgcgtgcggcgctcacccatccgccatcatcggcgaagaccgggggagcgaaacacatctcatttcaaatgttctgcgaaccgctctcggacaccttccttttgttcacatagatcaatctgaagacggaactggcgtccgcgattatgttcacgttcaagatttggcagaagcacacgtgctcgccatcagtcacttgcggaaaggcaaggatagccgaatctacaatctcagctatggcgaaagctactccgctgaacaaatcatccttgccgcccaatatgtcacaggcattcccctcatcgccgcaaagctgacagaaacggacatcgattcacaagcaacatttgccgcttcttcctccagagccagaaaagaattaggctggaccccacagcacaacagcctgatcgcgatcatccgcgacgcctggaactggcactctgcgaatccgaatggatatgcgtcggagaaggtgaagcaagggtga

SEQ ID NO: 4687 - DNA, 147 bp, Bacillus licheniformis
gtgaattcagctgaaattaaatattttaataaaaattatgtggctatccaatttttatatgatttcatctggtatggctcgggatatattgatatgctgattgatttgcaggacaaaaaacacccgactgcttacttgatcgattag

SEQ ID NO: 4688 - DNA, 141 bp, Bacillus licheniformis
ttgctggtgatcaccaactgcggaaaagacgatgatgcattcacatatcaaaaaggatatccaaaagaagacagtccggcatttaaagagtatatgcgaattaaaagtggattagcggggcgatgcgacgttaaggcatga

SEQ ID NO: 4689 - DNA, 1164 bp, Bacillus licheniformis
atgataagaaaaaggtttataaatttaaccgcattaatagtgctcttgctggtaatcactggctgcggaaaagatcaaaatcaggagataacgtataaaaaaggctttcctaaggaggatagccgtggattaactgagtttatgaaatcctaccttactggcagtactgataaaaaaatcttagaagagaatgatgttactttattttcaacagtcaatcaccaaggccaagcaattcggtactttcaatatactcaggaccagttaaaagtatattataagcccttgtttactgcaaaaaaacctaaaacgactttaaatagtttgtaccaaatagaacgcttagaaaagttgttgcaccatcctattcaagacaaagaaaaatatcatcttcctgctattaaaatgctgtcgaacaatcaactgcaagtcaaaacaaagaaaaataaaaaaacattggatttgccgaagcttttgaaaaactatggagtaaagaaatccgatgaattagagattaatttatatgcagtgaattctaaatgcttttcagtggttattcaagattttagtatgaaagatcgtattaatagcacaataggacttttcataacgcaagacttaacaaatattgagtctacagttatcactagagaaaaactgcaaaacacattatcaaaaggaaaattaaaagattactatgatttattcaccaaggtagacaaatcgggaagatatttgcttttattttttgatgatatgattttagataaaaggaccaatcaattaattgatattaaaaaagatgattatttaagcaaagacggtaaatatgtttatattaacggagctaaagaacaagaaacaaatgtaatgcctgatggtattcaacagatacaaacagtggataattatctaaaaggaaatgaaaaatatgaagctcaatttaagattgacttcaaacaaattgcaaaagagatggattttaacgcgggcgatgcaaggatagctaatatccaatattttaataaagattatgtagttttgtatatttcctatcacggaaagacaattggtacagcaggttctgttaatgtacttattgatttacaaaaaaacaaacaacagccaaccgcttatttagttgatttaggaattgaatcatag

SEQ ID NO: 4690 - DNA, 1434 bp, Bacillus licheniformis
atggcttatcataatagagaaaaagaaatcacgaacattctcaaaaaccatgaaagaaaagcgaaccagctgctgcggttagcccaatccagccgtctgcttgatacttttaataaaatatgggtttcgatagaaaataaagaacttccgaattttgtatcaaaaaacgtaatggattttaatgtggcggatatcaaatcggaaatcaacgattggataaaggatttaaaagagtgccaggagaatgccaggcgcaaatttgagtctatggaagaccccacaccggaagacttaagaaaacgcaacaatatttcgagtgacgccgttcttttaattagccaatacgagaatctaaaaaatggcattgatcaggtggaacaagatttcagcaatgtcgcccgcacccaccgcgccccgatgcgcgaagctttgacagacctctcaatcttgtataattcagtttaccatgtaaaaggcgatttttcggattataagaatgtttctgtttatgtgcatgggattgaggatgatggggatggattcaataaaagtgttagaaaagcagcaaaagacggtgatattataatacgtataaatagtgataaaacaagagaatactatattgttgaaataataaatggtgaaaaagtaattaagagagtagaaggattgaaaaagttaaaggatacaaaacaatacaaagcaaaagcgggaagggtgcatatcgtctacgaaacagagcatatgaatgaacatcgccaagcaacaagtgatgatttagcagaaaagctaaatgagatggggctgatgaatgagaagacaaagatcgatatgttcgggcacagctatggcggaagaagatcgctgcaatttgcgatggattacgctgaccatgtgcgaagcatcacaacaatcggaactccatatgataaaaatctcttagctaccggggcaaatagagcgcgctggctcgcagacagtcctcttgctaaaagacatactacggatacgagtgaatatttagattttaaagaagataacagaaataatgatgagggaaaagactacagcaatgcttatacagatatggacagcaaggcgatgactgatgacattaatcatttaaaatccgccaatcctgaggtctatcaaaagcttcagaaaatggacattactgctgcggcaggatacagaacagaggatacggtgagtttttccccttactataccgcaagcgggaagcataaaataaatagtgatgatattgtttcagtcgaaagtcaacatggggaaattttggggaatcttattgatgaaagaccagagattgaagtaaaaggttccggtgtaaccaatcctggacatatttatgaagttgaagactctgaatttgttgacttgattcgggaagttaacaaaaaagaagcagaatag

SEQ ID NO: 4691 - DNA, 639 bp, Bacillus licheniformis
atgggacattttcgcttcaacaaagaactttcacacaaggcagcgggaaccattagtcagctggaaaacgcctttagccatgtatttgagaacatggtgttttttcgtgaagaattagaccggcacagcggaaaagccgcagcagcgctgcagaaaaaaatgagcgacaacatcaactttttcagtaaagcaagcagctgtttattatattttgcagacagtgtacgctgttttgcaaaagcggtcgaactgacggacgaatccgacaagccggccaatgttcagccgcagtcgagatcagaaagaaaccatacgttttcggctgaaagagttcaaagtgaaattaaagtaaacggtgaatcgttacaccaggcaaccggaaagtttgaatcaaatctatctacacttgatgaagttttgcaccattttgacacaatgctcagagaaatgatgtatgaaacagaatttccgtgggaaaaattcgatgacgtctggtctgatgcaaagtcgcacatcaactcaatcatgacggagcttaaaaaaagagtcaaagaactttcggcaaatgctaaaaacatcgttaaggaattaaagcgcgtcgataacataatctcacagcaactgcaaagagtgaaatga

SEQ ID NO: 4692 - DNA, 297 bp, Bacillus licheniformis
atgctgttaaaaaagaactatcttcctgtcggcagtgttgtcggcttacataatgattcaaggcgtctgctcgtcatcgggcggcaaatgttttctgaaacaaatcacgtgatcagagattatgcagctgtcgactatccaaatggatttaccgatccaaaagagcagcttgttctatttaataaacaggacatagaagtggtataccattacgggtatgttgatcaaaaagaattgcagcttgatgaactgctaacagaagctgaagcaggaaaaaaagaaaataaggagcaatga

SEQ ID NO: 4693 - DNA, 126 bp, Bacillus licheniformis
atgaaaatgcctaaaatattaatgagaaaatacatgatgccaactcccgaatgttttttgaaaataaaaaagctcttatttttcatgggttccgataaagaaagcatgaaaaataagagcaaatga

SEQ ID NO: 4694 - DNA, 1194 bp, Bacillus licheniformis
atgtattttctcattaatattttaggcattttcattgtcatgtctgtaatttatttttgttccccgcgaaagaaaagcgtaaaatggaggccgattctctcccttttcatcgttgagcttttggtgacgtggtttatgcttgggacaaaaatcggcggatgggccatcaacctgatcgcctctttcttttcgtggctgatcgcttgtgcaagcgacggcatcgcttttgcctttccgtccgtgatgggcaatgaaaccgttgactttttcttcagcgccttgctgccgattatttttgttgtgacattttttgatatactggcttatttcggaattttaacatggatgattgataagatcggctgggtaatttcgaaagtctcacgccttcctaaattagaaagtttcttttcgattcaaatgatgtttctgggcaatactgaagcgctcgccgtcattcgcgggcaattggctgtattaaaggataaccgcctgctgacgttcggcattatgagcatgagcagcatcagcggatcgattctcggttcttatttaacgatggttcctgcgacatacgtatttaccgccatcccgctaaactgcttaaatgcgttgatcttggccagcattttaaacccggtggaagtcactaaggatgaagacattatttacgtaccgccaaaagaagagaaaaaggactttttctcaacgatttcaaacagcatgatggtcggaatgaatatggtcatcgtcattctcgccatggtcatcggatatgtcgctttaacctcatgtttgaacggtattttgggcttgatcgtagacggtttgacgattcaaaagatcttttcttatatcttcagtccgttcgcattcctgcttggactggcgccgggcgacgcgatgtatgttgcacagctgatgggcatgaaactcgccacaaacgaattcgtcgcgatgatggatttaaaaacgcagctagacgcgatttcaccccatacagccgccgtggccacaacatttttgacgtcgtttgccaacttcagtacgatcgggatgatctatggaacgtacaattccttatttaacggagaaaaatcggcgattatcggaagaaatgtgtggaagctcctcgtcagcggaatagcagtgtcgctgttgagcgcggggattgtcgggctgtttgtttggtag

SEQ ID NO: 4695 - DNA, 2082 bp, Bacillus licheniformis
gtgaataacaatgatggccgccgcaaagtcaatgggcacagcaaggatcaacaactcgaacagtaccggtctgacaacaggggcaaaaaaatgacgacgaaccaaggtttgcgcgtatctgaagacgagcactccttaaaagcaggcgtgcgcggtccgacgctgatggaggactttcatttccgtgaaaaaatgacccattttgaccatgaacggattccggagcgagtcgttcatgcgagggggtttggcgcgcatggctattttcaggtttacgagccgatgacggagtatacgaaagcaaagtttcttcaagatccgtcagtgaaaacaccggtgtttgtcaggttctcgactgtcgccggttccaggggctcgggtgacactgtacgcgatgtcagaggatttgcgacaaagttttatacagaagaagggaactatgatcttgtcggcaacaacatccccgttttcttcattcaggatgccatcaagttccctgacctggtgcacgcctttaaaccggaaccgaacaacgaaatgccgcaggcttctacggcgcacgatacgttttgggactttgtcgccaacaatgaagaaacggcccacatgatcatgtgggcaatgtctgacagggcgattccgcgaagctacaggatgatggaaggcttcggcgttcatacgttcaggtttgtaaacgaagaaggcaaggcgcgctttgttaaatttcactggaagcccgtcctcggcgtccattcgctcgtctgggacgaagcgcagacaatcgccggaaaagatcccgactatcaccgccgcgatctgtgggaagcgatcgaaagaggcgatgaagtggagtatgagctcggcgtgcaaatgattgacgaagaagacgagttcaagtttgacttcgatatccttgacccgacaaagctttggccggaagaaatcgtccctgtcaaaatcatcggcaaaatgacgctgaatcgaaaccaggataacgtttttgcggaaaccgaacaggccgctttccatccgggccatgttgtgccggggatcgatttcacaaacgatccgctattgcaaggccggctcttttcttatacggacacacagctgatccgattgggaggtccgaactttcacgaaattccaatcaaccgcccggtctgtccgttccataacaaccagtatgacggctatcacaggatgacgattaacaaagggcctgtcgcttatcataaaaattcgcttcaaaacaacgatccggcgcctgcttcagaagaagaaggcggatatgtgcactacgaggaaaaagtcgagggcaaaaaaatccgccagcgcagcgaaagctttaacgaccactattcgcaagcgaagctgttttggaacagcatgtcccccgttgaaaaagaacatatcatttcggcgttccgctttgaagtcggaaaggtcaaaagcaaggacgtccgccgccaagtcgttcatatgtttaaccgggttgacggggagcttgccaagcaaatcgctgcgggtgtaggcgtagagccccctgaaaaagacgaaggctccaacgtgacgttcaaatcccctgcgctcagccaggagaatacggtgaaactgccgcagacaaggacagtcgccattttagcagaacaaggttttgatgatgaagacttgagccgtgtgttgaaagaattcaaaaaagccggcatcattccggacatcgtcagctcggcactcggagtaatcgaaggggccggcggcacagaaattgaagtcggaaacactttgcagacggtcgattctgtgctgtacgatgccgtttatattccgggcggccaagaaagcatagaacgcctgaaattgcataaagccgcatcggattttgtcaatgaagcattcggacattataaagcggtcggagccgcaggcgaaggggtcgatctcctgctgtccgccgccggggcccacgcggcttcacagccgggcattatcacctctcgtggtgataagaacaaagacgacttcggcaaaaagctggtcgaagcgatcagcaggcaccgccattgggataggcaagtttaa

SEQ ID NO: 4696 - DNA, 453 bp, Bacillus licheniformis
atgaaattcaaaatcgaaacacttccaaactaccgcattgcatatatgcgccgagttggtccatacggccccgccaacattgaggtaatggaaagattaaaaaaatgggctaagaaaaaagatcttcttgaatccgccattctgtttgcgattccacaagataacccgaaaacaacgcctcctgatcattgtcgatttgatgcttgtattgtgataccgcatgattatcaagtcgatgataccgtttttgaaggcgaaatttccggcggacaataccttatttacgaggttgaacatacagcagaagctattcaaaaagcatattcagatattttctcatccctgcaaaacaatgaataccaattggacaataggccaatcatggaaaaatacgttggtgatatggtgaacagtccgtattgcgaaatatgtgtgcccttaaaatcggtttaa

SEQ ID NO: 4697 - DNA, 1419 bp, Bacillus licheniformis
atgaaatataaaacattagctcaatttccgaaagattttttgtggggcgcgtctacttccgcttatcaagtggaaggcgcttgggacgaagatggaaaagggccttctgtcatcgatgcgcgcgaaagctacccggaagggacaaccgattttaaagtcgcaagcgaccattaccaccgctataaagaagatatccctttatttgcggaaatgggcttcaaagcgtaccgtttttcgattgcctggacgcgcatcattccggacggggacggtgatattaatccgaagggaatcgaattttacagccgtttgatcgatgaacttctaaagtatggaatcgaaccaattgttacgatgtaccactttgatctgccgaatgctttgcagaaaaaaggcggctggtcggacagggccacgattgatgcttttgaaaagtatgcgaaggtcctttttgaaagctacggtgaccgcgtcaaatactggctgaccatcaatgagcaaaatatgatgatcctccacggatctgcactcggtacactcgatccgaacttggaaaatccgaaaaaagagctttatcagcaaaaccatcacatgctcgtcgcacaggcgaaagcgatcaagctttgccatgagatgctgccggaagcaaaaatcggtcctgcgccgaatattgcgctcatctatcccgcttcttcgaaaccggaggacgtgctggcggcttttaactataatgcgatccgaaactggctttacttggatatggccgtattcggacggtacaatacaacagcgtgggcatatatgaaagaaaaaggctgcacaccggtcatcgctgaaggggatatggacattctgcggtcggccaagccggattttatcgcgtttaactactatacatcgcaaacggctgaagcaagcaggggtgatggcagcgacacggctgcgcgaggcggagaccagcatttgcagacgggagaagaaggcgtatataggggaagcagcaatccacacctaaagaaaaacgcatttggctgggagatcgaccctgtcggtttccgttcgacgctgcgcgaaatttacgaccgctaccagctgccgctgatcgtcactgagaacggcctcggcgcgtttgatcagcttgaagacggagatgtcgtaaatgacgattaccgcatcgattatttaaaagagcatatcaagcaaattcagctggcaatcacggatggagtcgatgttttcggctactccccatggtctgccatcgacttaatttcgacccatcaaggctgttcaaaacgctacggatttatttatgtgaaccgcgatgaatttgatttgaaagacttgcgccgcattcgcaaaaaaagcttttactggtataaaaacctgattgctacaaacggcgaaacactcgattaa

SEQ ID NO: 4698 - DNA, 1860 bp, Bacillus licheniformis
atgaatgttcaatcaatggcaaaagaaattctggcgcgcgtcggcggggagaagaacgttgtatcgctagtccattgcgcgacaaggctccgcttcaaactgaaagaccgttccaaagcagacagagaagcgcttgaaaatacggatggcgtggtaaccgtggtggagagcggcgggcaatttcaagtcgttatcggcaataacgttcctgaagtatataaagaaatcggccggatctctcaactgttggaaagttctgcggccgatcacagtcaaaaagagaaaggaagcctcgccggtagattagtagatgtcgtatccagcattttcactccgctgctcggcgtcatggcgggagcggggattttaaaaggcctgcttttgatttgcacaaacgccggctggctctcgccggaagagacgacatatacgattctatacgcggcagccgacagcctgttttatttcctgcctttgctgctcgccgttacggccgccaaaaaattcggagcgaacccgttcatagcgctgacgattgccggagcgctgatctatccgacgatactcgaactgaaaaacagcggcgcccatacggagtttttcggcattccggtcgtcttgatgaattatacgtcgaccgttatcccgattatccttgcggtatttgtgatgagctatcttgaaggattatgtatgcgctttattcatgaaagcgtcaaaaactttattacccctataatctgcctgacggtgatggtgccgttaaccttgatcgtattcggaccgctcggcgtttacacaggaaacgggatcgcggcggcgattctgtccgtttttgatctcagcccgattttggcaggagcgattatcgcggccttatggcaaatccttgtcatcttcgggattcactgggggatcgtccctgtcattttgaacaacattgccgtccacggcaaggactacattaagccggcgacggcagccgccgtgtttgcccaaacaggagccgcatttggcgtcatgctgaagacgaaaaacaagaagctgaaagcattggcaggatcagctgccgttaccgggatattcgggattactgagccggccgtctacggggtgacgctcaggctgaaaaagccgtttgtatgcggtgtcatcagcgcggcggcaggcggagccatcatcggatactccggcagcgtcgccctcgcttccggcgctccgggcttgttgacgattccgattttttacggaccgggttttctcggctttatcatcggcatttcagtttcgtttgttttatcgattttgctcacttacattgtcggctttgatgaccctgtggaggtgacaaaagaggagcctgttgaaaaaagcgccggtgaaccgatttacagccctttgcaaggagaagtcctgccgttaacagaagtatcagataaagtgttcgcatcgggggcgcttggagagggaatcgcggtggttccgtcaaaaggcgttgtcaccgcccctgcggacggcatcgtgacaacggcatttccgacgggtcacgcatacggcataacgaccgaaagcggagccgagattttgattcatattggaatggacacagtcaggctcgaaggaaagcacttcaatcctaaagccgtgcaggggcaaaatgtgaaacggggtgatatactcgcagaattcgatctggacgctttgaaagaagaagggtttgacgtgaaaacgccgatcatcgttacaaattccggtcaatacacggatgtcattccaacggatcaaaaaaaggtgaaaactgaagaacggatcatcactttaatttcatcaccaagggaggaaaataatcatgaaatataa

SEQ ID NO: 4699 - DNA, 834 bp, Bacillus licheniformis
gtgaaaattgccaaagtgatcaacaacaatgtgatcagtgttttaaatgaacagggtcaggaattagtggtcatgggcaggggaatcgcttttcaaaaaaagcctggcgaagcggtggatgaatcgagaatcgagaagattttcaggcttgataataaagatgtatcagaaaggtttaagacgctgttggacgaaattccaattgaatttatggaaatgtctgaagaaattatctcctatgcgaaattaaagctcggcaaaaagctgaatgacagcatttatgtctcgctgaccgaccatattcatttcgccgtcgaacggcataaaaagggactggatattaaaaatgccctgctttgggagacgaaacggctgtataaagatgagttcgccatcggcaaagaggcgctggccatcattgaaaagaagacggggacagctcttccggaggatgaagccgcctttatcgcgctccatatcgtaaacgccgagctgaatgaagaaatgccgaacatcgtcaatattacgaaagtcatgcaggagattttaagcatcgtcaagtatcactttcatatcgaatttgacgaagaatcgcttcactattaccgcttcattacccatttgaaatttttcgcccagcggctgttcagcggaacctatatggaaagccgggacgactttttatttgaaaccgtcaaaaataagtaccgggacgcttatgtttgtacaaataaaatcaggcagtatatcgaaaaagaatacggtcatcagctgacaaacgaagagcttctgtatttgacgattcatatcgagcgagtcgttcatcaaaaatag

SEQ ID NO: 4700 - DNA, 735 bp, Bacillus licheniformis
atgaaaagcaatggttcacttctttcggcattgaacccgagcgccaagctcttttcccacctcctggtcatgtgcattctcatgtttgtttcaaatccgaaaccgacttttttcatttggctgtttgcggttgtcatcgggatttttttcgggggatggactttgtcttatttaagtaaacggctgctgccttatcttattttttttattctcgtattttggatgatggccgcttttgggaaaggcgaggaaacgatttgggaatgggcctggttccgcgttaccgaggaaagcgtcggcaatgggctgacaatcgcgctgcggatgctcggctttgtcacatacggtctcttgtttacgtcaacaaccgatttgacgcagtttattatgagcctgattcatcaatgcagattgtcgcctaaatgggcttatggcttgctggccggcttccgttttgtcccgctttttcagtcggagctttcgcaaatgaaggcggcgcacaaaatcaggggctataagcaaaaaaacagctggaaggcgtttattcgctatgcgctgccgttgttttcgcaaggcatccgcaaatcggaaagaatcgccgttgccatggaagcgagagggtttaccggtacaaaagaccgcacctactatcaaacagcggggctttccggaaaagacttcgtatattttgcgggtctggcatcagtcgcagcggggattttgctcactttttaa

SEQ ID NO: 4701 - DNA, 1593 bp, Bacillus licheniformis
atgcgttcatttctcggatgcagtaacctttccgtccgtttttatcatcgtcctgaaacagtcttggaccgggtctcgctgtcgattgagcagggagaaaaagtgctgatactcgggccgagcggaagcggaaaatcgacgctgttgtccgtgctttccggcatcattcctgaacatatcgaagctgaagtcagaggcgaggtcaaccgcagaaagagcgccggcgttatgtttcaggatccggattcgcagttttgcatgcttcatgttgatgaggaaatcgcgtttagccttgaaaatcgatccgttccgccaaaagatatggaccgcatcatctcggagctgatggagctggtcggtttaaagatagataagaaaacgccgatcgaaaccttgtcaggcggtatgaagcagaggctggcattagcgtgcctgctcgctttggagcctgaagtgctgttttttgatgagccgacggcgcagctggacccggccagccggcaagacatctttgccttgctccgcgacgtttcccgaaaaagcggacagacgatggtgttcgtcgaacacgtgctggacggctgtatcgagtggatggaccgagtcatccttttcaatgaaaagggacagatcatcgctgatggaaagccggaagaaatcgtcaaacattttcagccggaaatgaaagcggcaggcatctggcagtccaaactgtaccccgcagtatgggaagatgttaccacacaagatgatcatccgctcgccgtcaagctctcttctacattgaaaatgaaagaggaggaagcgaaaaacaggccgtcagcagacagggacatattgatccgcacagaggacgcggcgatcggctatcggaaaaagatcgttgccgacggcatcaacctggagattccaagaggggaatggatttccgtcatcggcgggaacggcagcggaaagagtacgtttttaaaaagtctgatcaggcttgaagcggtcaaaaaagggcgcatttatctggagggccgggagctgaagaaatggtccgatcgtacgctttacgagaaggccggctttgtctttcaaaaccccgagcttcaatttattcgggacacggtgtttgacgagatcgcgttcggagcgagacagcggagctggccggaggagcaggtcgaaaggaaaacggctgaattgctgcaggaattcggacttgatggtcatcaaaaagcgcatccctttacattaagccttgggcagaaacggcgtttaagcgttgcgacgatgcttttgtttgaccaggatttgctgctgcttgacgagccgacattcggtcaggacgaaaagacggcaaaagaattgatcaagcgcttaaaggagcggcaggaacggggaacgacgattgtgatggtgacgcatgacatggacatcgtagacgagcactccgaccgggtcatcgtatttcatcaagggaaagcggcatatcaaggaacgccgtatcaattgttctctgaccaagacctggtccgccgcttttcattgataccgccgcttcactaccggttcatgcacgaaagaaaggagagggttcccgtatga

SEQ ID NO: 4702 - DNA, 600 bp, Bacillus licheniformis
atgaattggaacatgaaagaagtcgtcatgacagtcatcttgtctgtggcatgcggcgtcatttatttagggtggtctaccttgtggatccctgtttcagctatcgtcgggcccgtcggagcgaactttatgttcggcatatgggtgatcgccagcccgattgtcgcttatatcatccgtaaaccgggtgcggcgctgattgccgagacggcagctgcggcggtcgaactgctgaccggaagccattttgggctttcagcattattaatcggtgtgttccagggagccggtgcggaaatcgcgtttgcgatctttcgctataagcgctataacttgtttacccttatgctttccggtgcgctagccgcggtggggagcgcgacatacagcctgatggcaaacggttttgcctactatacgacgcaaacgctgatattgacgcttatcatccaaatcatcagcggcattgtactcggcggctggctggcaaaagccgttgtcgaagcgcttgcgaaaacgggagtcctgaaccagtatgagatcatgaaagaacaccggaagaaggatgatgccgatgcgttcatttctcggatgcagtaa

SEQ ID NO: 4703 - DNA, 687 bp, Bacillus licheniformis
atgagtttttccgcagaacttcgccgcgaggcagaccctatttttgaagccatttttgagcatccgtttgtactggggctggcgtccgggaggctggaaaaggagcagcttattcattatgtaaagcaagattacgagtatttgaatgcctttattcaaatctacggaattgcgatttccaagtgtcaaaatcgaaaagatatggaaatgtttcatgagcagatttcatttgtgctagacagcgaagtgcacccgcacaaaaacctgtgccgggccgctggggtggagtacgaaactctgcagggctatccgcttgcgccttccgcccatcattatgtccgccatatgctgacggcggcgcacgaaggtacgctgggagagatattagccgtcttgctgccttgtccatggacatattgggagatcggaaaaaaactgatgaaggacgttcagcctgatccatcgcatccattttatgactggatctgtttttacggaaacagaacggattcaatcacgacaaagttttgcgcccgcctggatgaatgggccgaaacagcgggcaaggctgaaaaagaaaaaatgaaggagctctttttgcaaagctgtcagcttgaatacggcttttgggagatggcttatacggttgaagattggcctgtggaaatgggggcggtgagacgatga

SEQ ID NO: 4704 - DNA, 159 bp, Bacillus licheniformis
atgatgatgtttatcttgattttgacaatggccgtgtatttgttctattctttcagcaaagacaaccggccggccaaaacaaacaacaggaatcatcagacactgactgttattagggaaaactcttttaccgccccttccaatgatgtcaattgctaa

SEQ ID NO: 4705 - DNA, 1272 bp, Bacillus licheniformis
atgctgaaagaaaaacaactcgcagaaagctgggagcatgaagaacgctggaaagggatcacaaggccgtatgaggcggctgacgtcattcggctgaggggcacgctcgagattgaatacacgattgcaaggcgcggcgccgaaaagctgtggaagcttctccatacagaggatttcgtcccggcgctgggcgctttgaccggaaaccaagccatgcagcaagtaaaggccggattgaaagcgatttatttaagcggctggcaggtggctgccgatgccaatatgtcagggagcatgtatcccgaccaaagcctttatccggcaaacagcgtgccggaagtcgtcaagaaaatcaaccgcacgctgcagcgcgccgatcaaatccaccatatggaaggaaaggaagacatcgattggtttgctccgattgtggccgacgctgaagcgggcttcggcgggcagctgaatgtgttcgagctgatgaaaagtatgattgaagccggcgccgcgggagttcactttgaagaccagctgtcgtctgagaaaaagtgcgggcatttgggcggaaaagtgctgcttccgacgcaaacggcggtacgtaatttgattgccgcgcgcctcgccgcagacgtgatgggagtcccgaccattcttattgcccgcacggacgcgaatgcggcagacctgatcacaagcgacgtcgattcatatgatgcaccgtttttgacgggagagcgaacagcggaagggttcttcaaaacaaagcctggccttgatcaggcgattgccagaggtttggcgtatgcgccgtatgccgatttgatctggtgtgaaacgtctgagccgaatattgaagaagcccgccggtttgcacaggcgatccatgaaaaattcccgggcaaactgctcgcctacaactgttccccttcgttcaactggaaggccaaactggatgacaacacgatcttgaacttccagaaacagctcagtgaaatgggctataaatttcaatttgtcacactggcaggcttccacgccttaaatcacggcatgtttgaattggcccgccaatataagcaccgcggaatggcggcgtactctgatctgcagcaggccgagtttgccagcgaagtccacggctatacggcgacaaggcatcagcgcgaagtcggaacgagctactttgatgaagtcgcccaggttgtgacaggcgggacttcatcaaccactgcactgaagggatcgactgaagcggaacagtttcaatcataa

SEQ ID NO: 4706 - DNA, 1590 bp, Bacillus licheniformis
atgaaaacagaggagaagagaattcatataaccggatcgataaatccgcattatgaagagattttgacaaaagaagcgatggagtttatcggacgtcttgaacgccatttcgggggaagaagacgggaattgctgcatttgcggacgatcaggcaggctgaaattgatcaagggaagaacccttgttttttggcggaaacgaagcacatccgcgaggcggactggacagtcgcgccgctcccccgggatttggaggaccgcagggttgaaatcaccggcccggtcgacagaaaaatggtcatcaacgctttaaattcaggagcgaaagtctttatggccgactttgaagatgcgaactcgccgacgtggaaaaactgcattgaaggccaggttaatttgcgggatgcggtccgcgggacgatttcttttacgaatgaacagggcaaacgctatgagctgaaagagaaccccgccgttatcatggtcaggccgaggggatggcacttggaagaaaagcatgtgctgatcggcggcaggcccgtgtcagcaagcctgttcgattttggtctttattttttccataacgcaaaagagctgatcaaaaaaggaagcggcccttatttctaccttccaaaaatcgaaaaccacctggaagcaaggctgtggaacgacgtatttgtttatgcgcaaaacgacttgcgcattccgcagggcacgattaaagcgacggttctcgttgaaacgatcctggcggcctttgaaatggatgaaatcctctacgaattgaaggaacattcagccgggcttaactgcggcaggtgggattatattttcagctttattaagaaattcaggaacagggatgaagtcattcttccagatcgctcagccgtgacgatgacagttcccaacatgagagcctactccctcttggcgattcaaacgtgtcataaacgcaacgtccatgcgattgggggaatggcggcgcaaattcccgctaaagacaaacctgagatcaatgaagccgcatttgccaaaatccgcgaagataaggaacgtgaagtaaaagacggccatgacggaacatggatcgcgcatcccggcatgattcaaacggcgctcgatgtattcaatcagcatatgccgtcggcgaaccagattcatagaaagcggaaagacgtaaaggtcgaggaaaaagacttgctggaagtaccgaaaggcagaattacagaagcaggcgtccgtaccaatatcagcgccggcatccgctatttagcttcatggctgtcgggcagaggcgccgctccgatcgaccacttaatggaggacgctgcaaccgcggagatatccagagcccagctttggcaatggattcgccatccgaaaggggttcttgacgatggccggaaagtgaccgccggaatggtcaagatgatgaaagaggaagaaatgcagaaaatcttcgaagcagccggcatggaacgttttcggaacggccggttcgaagaggccggacagttatttgaacagctgattttggatgatgaattcgcggagtttctaacgatacccgcttatgaaaaaatgtga

SEQ ID NO: 4707 - DNA, 138 bp, Bacillus licheniformis
atgagcttgaaaagtccgatggaatttttcagaacgcttccgaaaaaaacgtgccctgaatgcggcgaaaagatggaggagcaggctgaatcttacttcatggaatgcgagcgctgtcttgccaaaaaaggcgagtag

SEQ ID NO: 4708 - DNA, 123 bp, Bacillus licheniformis
ttgtttgttttttattttcatcatcactttcacctctttatgttccctattctagaagaaaaatatgaacaagctatgaataaaaagagaacaatctatttttgtttgaatggaaaaaaataa

SEQ ID NO: 4709 - DNA, 2082 bp, Bacillus licheniformis
atgatgaaaataaaaaacaaacaacttgatgtcattctggttctaattttgttggcagctcttattctgaatacatataacatttggctggacgatgccgccaaccagtattacttggcagcagtcaaaagcatgacgcaaagcttccacaatttcttcttcgcgtcattcgactcttccggattcgtatcagtagataaaccgcctgtcgttttatggattcagactatatttgcgaaaatcttcggcgtgcatacgtggagtgtgattttgccgcaggcgcttgcaggggcgggttccatctatctgctttacgcactgataaagccgaaattcggaaaaggcgccgcccgcatttcagcgctggtgatggcgctgacgccgatcgcggtcgccgtaagccgaacgaataatatcgacagcatgctcgtcttcacgctcctacttggtacatggtgcctgatgaaggcggtcaaacaaggcaggctgatctggcttctcgctgcattcggtctcatcggcctcggattcaatatgaagatgtttcaggcattcatggtgcttcccgcgttcttgctgttttatctcattgcggcccatgcgaattggaagaaaaaaatcgtttcagcggttttatcgcttattgtcctcaccggcatttcgctttcttgggcgcttgcggtcgactatacatcagccgacagccgcccgtatgtcggaagcagccaaaccaactctgtgcttgaactggctttcggctacaacggcactgagcggcttctcggccagacgacgggcaacgcccgcggccatatgaacggctttggaggagacatgcagcagccgaacggcaatgcgcaagctcagaacggaaaccgttcgtccggcggctccaatggacaaaacggcgcgatgcagccgctgggtgcgggcggtacggcagacggcagttctcaaggggcaaacggcggcagccagcagccagccggaggcggaccgggcggaggcaacggcggtcccggaggcaatggcggcccgggcggaggtcaaggcggcggacaaagcatgaacatgttcggcaccggtgacgcaggaccgctgaggctcttccaatcggctttatcgggccaaatcagctggatgctcccatttgcattattaggactgctcggcacgatcatcacctggtttcgcggccgccgcgaaaaagcaggcgaaatgaaagaaacgatcttttggtctgcatggctcgttcctgtcgccgggttcttcagcatcgccggattcttccaccactactacttgattatgatggcgccgccgatcgccgctctgtcaggaatcggatggtacgcgatgtacggcctttacaacaatcataaagactgggcaagctatctgctgccggcagccgttctcacgacagcagcattccaagtgtacattttaagcgcttatacaaaccaaatcggcagcgcttggatgtatgtcatgggaatcctggggctgggtgtcaccatcgccttactgatgctgaagcgacgccatccattcggaaagcagctcaccatcatcagcttgtgcgtgcttcttttgacaccggtctattggtcggcaacaccgatcctttacggagggaacagagttcttcctgaatcagggcctcagctgcaaagctccaacggaggcggaatgttcagctcggacgtggacacaggactgctcacatacctccgggaaaataataccggcgaagagtaccttttcgcgacattgacaacggtaaccgcagccacgtatatcatcaatgccgacgaaaatgtcatggcgctcggaggcttcaacggcacagacccgatcctgtcggtcagtgaactgaaaaacctcatcaaaaaaggaagagtaaaatacttcctgattagtgaaaactcaggcaacagcgagctcgtctcctggatcaaagaaaacggaaccgaaatttcgtctgaccaatacagcagtacagacagcttcgcacagcagggtgcaagaggcggcccaggcgtcggacagcggcaaacgctctacaaggttgagctgtag

SEQ ID NO: 4710 - DNA, 1941 bp, Bacillus licheniformis
atgagcattaatcagctgatcatccgcaacctgaaaaaaaatatacggaactattacctttatgtgtttgcgttgatcttcagcgcagcgctttattttgcgtttgttacgctccagtatgatccggcgatcaatgaagtgaaggcatcgataaaaggcgcagcggctttgaaggcagcttccattctccttgtggcaatagtagcggtgtttgttttgtatgccaatacgatatttatcaaaagacgaagcaaagaaatcggtttattccaattaatcggcatgaggaagcaaaaaatcttccgcatcttaagcttggaaaatgtcatgctgtatttcggctctttggtcattggggtgtttgccgggttttcgatctcaaagctcgtgctcatgattttgtttaaaattgtagatgttcaagccgaagccaaattgaatttttccgtcgaagcgcttgtgcaaaccgtcattgtattctgcggcatctaccttctcgtaatggtgatgaattatgcgtttatcaaaaagcagagcattttatctttatttaaagtgacatcagctacggaggataaggtaaagagaatatccgttttccaaatgatcatcggcttattgggcatcttgtttattttatccggatactatgtatccactgagcttttcagcggaaaattcaagaccgtagatgagctgttttatgcgatgagctttattctcggaaccgtcatcatcggaacgtacctcttctataaaggatcggtcagctttgtctccaacatcatccgcaaaagcaaaggaggctacttgaatatttatgaagtgctgtccctttcatcgatcatgttccggatgaaatcaaacgccctattattaacaatcattaccaccgtttcggcgctggcgatcggattgttatccttgagctatatttcgtactattctgcagagaaaaccgccgaacaaaatgtggcggctgatttcgccatgacaaatcaaaaggatgcaaagcgttttgaacaacttttgggcgaaaataacatttcttacaacaaaaaggaaattcatgtcattcaagcggtttttaatctggaaaaaattgtcgatggagatcctgaaaatatggctggagacccggggaaattgcccctcgccgtggtcagcgatgcagagattgccgggatggacgtgcacaaaggagacgtcattttctcaggatataacgaccttctccagaaacttatggctttaaaagagaccggtgccgttaaggtaaagagcaggcatgagacaatcccattaaactatttaggcttgaaaaaagagtcccttttatccttcaactttaccagcggcggattgcctgttgccgttgtagatgatgcgctgtttaaacgtcttagccaagacaaagatccaaagctgcagcagaagccgagccttttttacggaatcaatttaaaacatgaagatcagcttcagcaggcaaatgagctgtttgcaacagtgaatcaaaacgatcagcatttatcgctccttgatgcaagcacagctcaaaaatcgcttttcggccttgccatgtttattgtaggctttttaggactaacgtttctgatcacttcaggatgcatcctatattttaaacaaatggacgaaagcgaagatgagaaaccgaattacacgattttgagaaaactcggtttcacacggaacgatctgttgaaggggatacgaatcaaacaaatctacaacttcggcattccattagttatcggcctgtctcacagctacttcgccgtccagtccggctggttcctattcggggcagagctgtggacgccgatgatcatcgtgatggtgctgtacaccgtcctgtactctattttcggcttgctttccgttctttacggcaagaaagtgatcaagtcggcgctgtag

SEQ ID NO: 4711 - DNA, 762 bp, Bacillus licheniformis
atgatgattttagaagcgaaaaaaatacgaaaaagctatggaaataagcacaataaacacgaagtgttaaagggaatcgaccttcagattcaaaagggggaatttgtcagtattatgggcccgtctggttcaggcaaaacaacattgctcaatgttctgtcctctattgaccaggtgagcggcggaacgattaacatcaaccaagctgagatgacgaatatgaaggaaaaacagcttgccgagttcaggaagcagcatttaggatttatcttccaagaatacaatttgctcgatacgctgacagtgaaagaaaatatccttctgccgctgtcgattacgaaaatatcaaaaaaagaagccggtcaaaagtttgaggaagtcgcgaaagaattaggcatcttcgagctgaaggataaatatccgaatgaaatttccggggggcaaaaacagcgcacatcagcagccagggcgtttattcatgagccgagcattattttcgctgacgaaccgaccggtgcgcttgattcgaaatccgcatcagacttgttaaacaagctgagccaattaaatcaaaagcgccgggccacaatcgttatggttacccatgatcccgtcgccgcgagcttctgcagcagagtggttttcattaaagacggacaaatttatacgcagctgaataaaggcggacaggacaggcagatgttcttccaggacatcatgaagacgcaaggcgtgttaggcggggttcagcatgagcattaa

SEQ ID NO: 4712 - DNA, 1005 bp, Bacillus licheniformis
atgctgaaagcgtttttgaccgagaggcgaagctggatcgccatatttgttttgcagcagatcctctttctgtttatcgcttatgtcgatgcatccattccttttacgtcgattttgtatatgacctatttgtcctcgtttatttttatcgtttttgtaattgtccgctttcggaaggaaacgaagttttataaaagtcttgaagaatgggaccacaatctcgatgtgacaaacattcgagaggcggaaaccccttttgaaacgatgattgaaaaaagcatagccgaacaaacgaaacagttaaagcaagaggcggcacagcatcgcctggcattggagaatgaaaaagatgagctcatggcctggatacatgaagtcaaaacgccgcttaccgccatgcatttgatcatggagacgattgaggatcaatctttaaaagcgaggcttgcgtacgaatggctgcgcatccacctgctgctcgaccgccagctccatcaaaagcggatgtcatttatcgaaaatgacttgtcccttgaagtcctagagcttaaacctatgatctttaaagaaataaaagatttgcaatcatggtgcattccaaaagggatcgggtttgatatacagctggaggcgggggaagtgctcagcgatgcgaagtggctgtcttttatcattaggcagctgctgacaaacgcggtgaaatacagcgaagcatccgatgttttgattaaaagctatgagcaggatggcaaagtgcatctcgctgttcaagactttggacggggcatcgatccaaaagatatgccgcgcgtgtttgacaaaggctttacatcaacaacggagcatcatgatcaggccgccacgggaatggggctgtacttggcaaaaaaagcggcaaagccgctcctgattcatatcgaggttgattctaaaccgggaacgggtacaacctttacgctgatttttccaatgcggaatgaattttcccgtgtgctgggcgtgtga

SEQ ID NO: 4713 - DNA, 687 bp, Bacillus licheniformis
atgtttaaactgctgttgatagaagatgatgaatcgctgtttcaagaaataaaagagcggttaaccgggtggtcatacgaggtatacggcatcaacgatttcagcgaagtgatgcaggagtttgcggcgattaagccagactgcgtcatcatcgatattcagctgcctaaatatgacgggtttcattggtgccggcagatccgctcccgttccaacgttccgattctctttttatcttcgcgcgatcatcctgctgatatggtcatgtccatgcagttcggagcggatgattatattcagaagccgtttcattttgacgtgctgattgccaagatccaggcgattttccgtcgcgtctacgactataatacagagcctgagattcttaaaaaaacgtggtgcggtgcaaccgttgatcccgaacaaaaccgcgtcagcaataaggcgggggcgatcgaactgacaaggaatgaaatgttcattttaaaacaattgatcgaccaaaaaaacaaaattgtcagcagggaagaattgatgagaagcctatggaacgatgaacgctttgtcagcgataacacgctgacagtcaacgtaaaccgcttaagaaaaaaactcgatgccttgaacttggggcaatatatcgagacgaaggtcggccagggctatatggcgaaagaagaaggatga

SEQ ID NO: 4714 - DNA, 1410 bp, Bacillus licheniformis
atgactgaacaaacgaaaaagtttcctgaaggttttttatggggcggagcggttgccgcaaaccaagtggaaggcgcctataatgtcggcgggaaaggactctcgacagccgatgtgtcgccgaacggcgtcatgtatccattcgatgagtcgatggagtcattgaacctgtatcatgaaggcatcgatttttaccaccgctacaaagaagatatcgctcttttcgccgaaatgggatttaaagcattccggacatcgattgcctggacgcggatttttcctaacggcgatgaaactgaaccgaatgaagagggactcgaattttatgatcgcctctttgacgagctattaaaatacaatattgagccagtggtgacgatttcccactacgaaatgccgctcggtctgattaaaaaatacggcggctggaaaaaccggaaagtgatcgattgctatgagcattatgcgaaaacggttttcacccgctataaagaaaaagtaaaatactggatgacattcaatgaaatcaacatggttctgcatgcgccgtttacaggcggaggccttgtgtttgaagaaggcgaaaacaagttaaatgcgatgtaccaagcggcgcatcatctatttgtcgcaagcgctcttgccgttaaagcggggcacgacatcattccggacgctaaaatcggctgcatgatcgccgcaacgacgacatacccgatgacgccaaagccggaagacgtgctcgctgcgatggagaatgagagaagaacgctgtttttctcggatgtacaggcgcgcggggcttatccgggctatatgaagcgcttctttaaggaaaacggaattacgattgaaatggctgaaggtgatgaagacatcttaaaggaaaacaccgtcgactatatcggtttcagctactacatgtcaatggtcgcaagcacgagtccggaagacttggcaaaaacggaaggcaacctgctcggcggcgtcaaaaatccgtaccttgaatcgtccgaatggggctggcagatcgatcctaaagggatccgcattacgctgaatacattgtacgaccgctatcaaaagccgcttttcattgttgaaaacgggctcggcgccgtcgatgtcgtcgaagaagacggctccatccaggatgactacagaatcaactatttgcgcgatcatttaaaagaagtaagagaagccattgcagacggcgtcgacttaatcggctacacatcatggggcccgatcgacctggtcagcgcatccaccgccgaaatgaaaaagcgctatggctatatttacgtcgatcgtgacaatgaaggaaaaggcacgctttcaagaacgagaaagaaaagcttttactggtataagaaagtaatcgaaacgaatggcgagagtttgtga

SEQ ID NO: 4715 - DNA, 1845 bp, Bacillus licheniformis
atggattataataaagtatcgaaggacattttacaactcgtgggcggtgaagagaacgtacagagcgtgattcactgcatgacaagactgcgtttcaatctttatgacaatgcgaaggcagaccgcgcgaaactggaaagtcttccggctgtaatgggcaccaacatcagcggccagcagtttcaaatcatcattggaaatgatgtccctaaggtgtataaagcgatcattgccaacagcgggctcagcgatgaaaaagcgggcgagcagcaagctagcaaaaagaaaaacgtgctgtccgccatttttgatgtgatatcaggcgtatttacgccgattctcccggcgatcgccggagcgggtatgatcaaggggatcattgcaatcgccgtcacgttcggctggatgagcgaaactagccaggtccacaccattttatccgccatcggcgacggagcattttacttcctgccgattttgctggcggtcagtgccgcgagaaaattcggcagtaatccttatgttgcggcggcgatcggagcggcgattctgcatcccgatctgacagcgcttctcggttcagggaaaagcatttcctttgtcggattgcctgtaaccgctgccacttattcgtcgaccgtcattccgatcctgctcgcgatttggattgcatcttacgttgagaaatggattgacaaagtcaccccgacttcgttgaagatgatttttgtaccgacgctgacgctgctggttgtcgtgcctgtcacattaattacggtcggtccgctcggtgcgattgcagggaactatctgtcaatcggtgtgaacggtttatttgaaaatgccggtttaatcacgatgatccttttagcaggaacgttctcgctgatcgtcatgacaggaatgcactatgctttcattccggttatgttcaacaacattacgcaaaacggctacgattacttgatacctgcgatgttcttggcgaatatggggcaggctggcgcgtcatttgccgtcttcctgcgatccagaaataagaaattcaaatcattgtcgctgacgacaagcatcacggctttgatggggattacagagccggcgatgtacggtgtcaacatgaggctgaaaaagccgtttgtatccgcgcttctcggcgccgctgtcggaggagcattttacggcatcaccggcgtagcagcatatattattggcggaaacgtcggtttgccgggaattacgacgtttatcggcccgacttttatacaggcaatgatcggtatcgtcatcgcgttctttgccgcaacggcgtttgcttttgtattggggtttgaagacattccttcagatgaagccgctgaacaaggagccgctccatctgaagcgggcgcgggagagatcattcaaagcccgctgaaaggcgaagtcaaagcattgagtgaagtggatgatgcgacattttctggagaagtcatgggaaaaggcgtcgccattgagcctgaagaaggcaaagtggtgtcgccggtatcaggcacgatcacaaccgtttttcaaacgaagcacgccctcggcattacaagcgacaatggggcggaaattattatccatatcggaatcgacacggtgaaattgaacggcgagcactttaccgtgcatgtcaataaaggcgacgctgtaaaaccgggagacgagcttgtctcatttgatatggatgcgattaaggatgcaggctatcagttgatcacgccggttatcatcacaaatacggaccggtaccagtcgatcaaacctttgaaatcagatgaaagcgttgacattgaggaagcgctgatcgcgctggcgtag

SEQ ID NO: 4716 - DNA, 543 bp, Bacillus licheniformis
ttgcaaaacaaagcagcagacagactcattttattaggcatcagtttacatagcatatattggttgttcattttatttttgttttttcatttcaaacatcagcttgacgcttatgctgtttggaatccaaatgtcacggacggatatatggaggctggaactttcgtagctgcgctgaaattgatgctctactcaggcacattatttaatttgggcctcttgttcattttgggcttgctgatagtgatattagcacagtcgatcatttttattgccttggaaatcgccgcttacgtaaaaatcaaaaaagatccgttttctccatggggatcttttattttagcgatgggcattaaaaacattttcacgaacttatcagggattccgtttatggctgccggattcattcttcataagcagcaggaaccgaaagaagcagttgtagagccggcggcgcgaaggaaagcaaggcgaaaccctgcattgcttatgaaaaaggcggcgaaagctagaaaacgaagaaatgaaggtataaagtcttag

SEQ ID NO: 4717 - DNA, 990 bp, Bacillus licheniformis
atgtgtacaagtatcacgttgacgactgcgggccgggagcatttattggcgaggacgatggattttgattttgagcttaacggggaggtgctgttgcatccgcgtcgctacaaatggaaaagtgaagcggacggcagcgagcatgccggccggtatgcgtttatcgggatgggcagaaggctcaagaatgctctgtttgccgatggtgtgaatgaaaaaggattgtcttgcgcggcgctttatttcccgggctatgctgtgtatgaaaacgaggcaaaagagcaaagccgcaatcttgcgccgcacgaattcgtgacatgggtgctgtcggaatgcggcgatttggaggatgtgaaaaaagcggctgtttccttaaacattgttgagagagaggtcagcttgctgagtacggtgacgccgctgcattggctattaacggaccgctccggggcaagcgtcgttgttgaaccgacggcagacggcattcaaattcatgataatccggtcggcgtgctgacgaacagtccggatttcccttggcatttgaccaatttgcgcaactttatcggtcttcagccgggacagtttgccgcgaaaaaaatgggaggcctgacgctgtcggcttttggtcaaggttccgggctgtccggattgccaggagattttacgccgccatcccgctttgtcagggctgcatttttgaaagagcacatgaagcctgtgtccgatgaaacagaaggcgtctctgccgcgtttcatgtcctctccaatatgaatattcctaaaggggttgttatgactgatcaaggcgaagacgattacacccaatatacggcggtaatgtgcagcgagacgtgcagctactattttcaccattatcaaaacaggcagattcaaaaggtttgcttattacaggaagatctggacagcaacgaattaaaggcgtttcagccaaagcaggaagagacggttcattctcttcaatcataa

SEQ ID NO: 4718 - DNA, 120 bp, Bacillus licheniformis
atgattatactaaatttaaagaaaaaagaaaaattgttgaatgaatttatgtgccgggatgaaaacccggcttttttctataacccctttcattttgacgaatcttttccaattcgataa

SEQ ID NO: 4719 - DNA, 835 bp, Bacillus licheniformis
atgagtcttattttattaattattattgcatgtatagtaaagtttggatctaactttgttcttgataaatttatatttccttctatcaaatacatgagtaaggagagctttaaaaagtttagaaagtttgttgaacaaaaaaataccttattaatttataaaaagacattgagagctagtgagtacttttttattttattaatgattatctttattgccgtaagtttattttgtgttttatcaccaagcaactctcttctcaattttttattttttggattactagctttctttcttttttgtactatctttataggggattttaatttaaatattaaaaaagaattagaaaaaaaatcaaaaagaatacgagagtttaattgaaaatactatctctaaagtgaatagaaatagttatatttttgatagattaaaagtgttttttggaaaaacaggaatgagtctgtattttcattgtttatttttaattttaattttaacttttttaaccgaagttaacagtataccttatagtattttttatttatttttattgaccctacctctaacgttagcaagttggatttacttttcaactttcaatacggaagaacaaaatattagaaggattattgggtacctgttattgttgattataaccatttcaaaaagtttttccgattttaaaattgtaatagggttagaggttgctgattctgctaatgactatatcatgttcttaatccttacggtatttacagctatagatcgacttttaaaaagtatagttgatgattatactaaatttaaagaaaaaagaaaaattgttgaatga

SEQ ID NO: 4720 - DNA, 1014 bp, Bacillus licheniformis
atgggttttaaaaggagttttaaaataatgcctggtgtcaaacttaatataaataaaaaaagtgttgggatgactttagggggcaaaaatggcaggataacttataatacttctggcaaagtaacaacaagtgcaaaaacccccggtacaggtctatcttatagttccagtaaatctatttcttcatcacaaaaacaaagtcacttgaataataacaattattcaaataatttagagcttaatgcttacctcaatcatttaacttcatttcatacgagattaacgagcaggcaaataaattgggaagaaattaaaaaagagtcaccgccagagattaatgtagctcaattaaaaagcgatttaaataattataaacccaatttctttgagagaattcttagattagataaaacaaaaattgaaaagttaaataaagaaattactgatgcagaaactaaatataagaaagaatatgatgagtgggcaaagcaacaaaaatttgtgaaaattattgatgacaaaaacagtgttgcttatagtgaaattttagaagatattattaagattgaagatactataggaaaaataaaagagattatttcgaatgaaaatagtgaagttttattgaatctattagtggacacatcaattttaccgaatcaagaagaatacatctcttctgctgggaacttgttaactaaaaagctaaccaaaacaaaatattatcaaaaccaattaaactttattgccagtctttctataggtttagcaaaagtaatctttcaaataattcctgttgagactgtatcgattaatgttttagaaaaaagaattgatacagtggatggacatgagaaaacaatgactatctttggcgttaaatttaaaaaagagcagttcatggctttaaatattaattacattaaaccaattgatactcttcaactctttgaaactagtttggattttaaaaagactaagggtctccaacctgtagaaggtatacacctttaa

SEQ ID NO: 4721 - DNA, 1428 bp, Bacillus licheniformis
atgaatatgagaaagtgtttcatccaagtccttgcattgcttttcatcattgctgcatgtttcgcgccaaaccaagcctctgcacaaactcaaaaacctgttttttcagaagtgacggtacatgatccatcgattattaaagcgaatggcacgtactatgtcttcggctcccatttagcttcggccaaatcgacggacctgatgaattggacgcaaatttcctcgagtgtccacgacggcaatcctctgattccgaacgtctatgaagaattaaaagaaacctttgaatgggctgaatctgatacgttgtgggcgcctgatgtcacccagcttgaggacggcaagttttatatgtattacaacgcctgccgcggggattctccgagatccgccctcgggcttgctgtcgcagacgacattgaaggtccatacaaaaataaaggcatttttctgaagtcgggaatggatgggatcagcaatgacgggacgccttatgacgcgacaaagcacccaaatgtcgtcgatccccacacattctttgatcaaaacggaaagctgtggatggtgtacggctcctattccggcggaatttttattttagaaatggacaagaaaaccggatttccgcttccgggacagggatacggcaaaaagctgatcggcggcaaccacagccgtattgaaggcgcatatattctctaccatcctgaaacacagtattactacctgtacatgtccttcggggggcttgccgctgacggcgggtacaacattcgcgtcgcccgctccaaaaaccctgacggcccttattatgatgcagaaggccacgcgatgattgacgtccgcggcaaagaaggaacgctttttgacgatcgttcaatcgaaccatacggcgtcaaactgatgggaaatttctcatttaacaataaaaacggctatgtgtcgccgggccataactctgccttttacgatgaaaaaagcggtaaatcatatttaatcttccacacccgcttcccgggacggggcgaggagcacgaagtccgcgtccaccaattgctgatgaacaaacaaggctggccggttgtcgcccctcaccgctatgccggagagaagcttgaaaaggtgaaaaagtcagatgtgattggcgattacgaattggtgaggcacggcaaagacatctccgcagatattaaagaatcgaaagaaatccgcttgaatcaaaatggcaaaataacaggcgcagtagccggaacgtggaagaacacggggcataacaaaatagaactcaagatcgacggaaaaacctacgatggcgtgtttttgcgtcagagggatgcggcttctgagcgtaaggtgatgacgtttagtgcgttgtctcgtgagggagatgcggtttgggggagtagtttaaaaagagcggaattttaa

SEQ ID NO: 4722 - DNA, 135 bp, Bacillus licheniformis
ttggatgaaacactttctcatattcatttgttctcctctcttttaaaacgctttcattttttgacaatccatcatatgctgcttatccaaggtttattacgagcaaaaaagctcccgacaaaatcggcagcctaa

SEQ ID NO: 4723 - DNA, 1446 bp, Bacillus licheniformis
atgagcaaagccagttttagagactatgcattaagcggcgatattacgaaagcgctcgatcacttaggatataaggagccgactgcggtgcagagcgaagtgattcccgcggtgcttaaaaagcgggatgttgtggtgaaatcgcggacggggagcgggaagacggccgcgttcggaattccgctttgcgagctgaccgaatgggaagagaacaaaccacaagccttggttttgacaccgacgcgcgagcttgccgctcaggttaaggaggatttgacgaacatcggccgctataaaagaataaaagcagcggctgtttacgggaagtcatcctttgaacggcaaaaaacggagctcaagcaaaaatgccatatcgttgtcgggccgccgggccgcgtattggatcacattgaaaaaggaacccttccattagaaaaactgaaataccttgtcatcgatgaggccgatgaaatgctgaatatgggatttatcgatcaagtgggagcaatcatccgccatttgcctgaagaacggctgacgatgctgttttcagcaacttttccggaggatgtggagcatctatcccttcaatatatgaaagaccctttgaaaatcgagattaaagcaggcggtacgacaaccgcagtcatcgagcatcaactgatcattgtaaacgaaaatgatccattttcgcttttagtggatctgttcattgttgaaaacccggacagctgcatcgtcttttgccgcacacaggagcaagtgaatgagttgcagcggcgcctatccgttttgggttatccgtgcgagaaaattcacggcggcatgcctcaggaggatcgttttgccgtgatgaaccgtttcagacggggagcgttccgctatttaatcgcgacagatgtggcggcaagaggcatcgacattgagaacatcacacatgtcatcaactatgagctgccattagatcaagaaagctatgtgcatcgtaccggaagaacaggccgagccggcagccggggaaaagcgattactcttgccagtgcgcgtgaaaagaggatgattgctgacattgaagactatatcggttttcccattcctattattgaagcgccgtcaaaagaagaaattgcacgagcaaaagcggcttttctaaagaaaatcaatgcgaagccggatctcaaaaaggacaagagcgaatcgttaaataaggaaatcatgaggctctactttaacgggggaaaaaagaagaagctgagagccgttgatttcgtcggaacgattgctaaaattgacggcgtctccgccgaggatatcgggattatcacgatccaggagcaaggttcattcgttgaaattttaaacggcaaaggtccgctcgtcttagatgcgatgaaaaacacgacagtgaaagggaaattgctgaaagtgcataaagcgaggaaataa

SEQ ID NO: 4724 - DNA, 603 bp, Bacillus licheniformis
atgttctcttttaaaaaaagccgattcttttggctgagaagcaatgttattctaatattgttaactgctctattgttgttgaataaaccttattgggaaaaaaacgccaatgttatgttttttatgtttgtttgcactgctgagctgtttatcattttacttgcattggtatatggttttcaaacaaaaaagacaattgcgcgccctccttcaagagctataagaaagaccaatatcccaataggtatatttgttttttctatttttagtttattttttggatttgcgatgtcaggggatataccgtatcccaattctgcgcttatcatatatttaacaattaacatggtgtttgcatttgtttctttgtttgtaccaacattaatcattaagctatatgaagtcaacgtatatgacgaatcaaatgggctgatcaccgacttttttcgatatgtagccattctggtttcctctttaaattacgaagtccaaatcgttttagcccgcctcccttttgtattacagcgtctactgggcgtcattttcatcgctgttttgctgtgggagcttactatgatcggattaatttttgaaaacaattga

SEQ ID NO: 4725 - DNA, 780 bp, Bacillus licheniformis
atgttagactctaaaattatattaacaacaaatgaactcgttgccgcatttttattgtgtaggtatgaaaaagctgctgaagatattatcaatgatcagcagttgattcaagatgaaaaagatattgagccattttcaattcaagccgaaaatcttttaaaacaaagaggatattgggctgatgacacagaatctaatttacaaaaagggttagaaaacctgattcacttactcattcaatcaaatcgaaaagttcgttgtatccatcggaaaagggtgctgattgtacaccatgttcaaaaagatgaactcattgtgcaggagatcgaaaatcaaaatcatagtttttcgattttaagaagcagagagtcgtttttagaaatgttgaaaacattttatcattcatatacagataaaaaaccagaacatgaaatttttgaaatggatgaagattcatttgatgagtttcacgaggttgaagctgacgttattaaaagaatggcggaagacccgaaaacgcatccgactataagtcaattttcctttgactttttagcaaacaaccaagagctcgataatatttcttttgtagaaagtgactatattcaaaatcaaacaagattagatcaagttgcttttttattaagaagtgataatttcatttggcatttagattatgaaaatattaaaaaaactggctcgctatatcttctaccagtggcagtcgacgaatattttgggaaaatagtggatacaatgaatgaattttatgatttatag

SEQ ID NO: 4726 - DNA, 1593 bp, Bacillus licheniformis
ttgaaagttttagatgtctctgaagtcattgacgcgatagaccaattgattaaggaaaaaaagcaagaggaaaaagaaatcaatgccataagggaaagtgtacaaaaaattgcagagcttgatgatgcattaaaaggagaaggcggaaatgcgatcaaagaacacttttcggttcttcatcttcccgtgctgctatattttcagcactttattgatcaatacatacagaatttaaaagatattaaagcgaaaatcagaacttatgaatcaacagaaggttttgtaaaagaagaatttctgacgcatgatgtcaaaaagggcttaacagaactgaaacgtcaaacgaatgatacggttgattcgattaatgacgaatttgataaaatcagccacttgattgggggcggatctatctctttggcatcatttaatgagcatatttccgaagccaaaaaacatgtgaacaacacggtgtctgatttaaaagagcttgatcgcgatgctaattctatattaaaacaatcgtcaaattcgatcgctcagctatccaagctcactgaaaaggtgaacacttggtcaaagggaggcgcgatcttatctaaaaaaacgattaaagaggttgaaaactacttttctgaaacagatgtcgttaaacaaatgattgacgaagccgttgatttagcagaaaaacaagacgatccgacaatgatgggcagaatcgctgaatggcttgatttaatcggaacaggaaacggcgcgttggccgtaacaaaaggcgtcatagccgtgaatgtactggcgacgaaaatgcttgagcttgaaaaagacggaaaaggaaacttccgtgtgaaagcctctccgaaatggacgcaaggagctaacggaaaatacgattccaaggtggctcagtttgtttacaacatcctgaaaaaaggcgatccaaactcaagcaaaccaataaaaaaatggctcggcaaatttcaaaataaaccaagcggccttttgagaaagattgttggattggggcctaacacaacaaggatctcctacaagaaaattttggagagccaaagtttcctaaagcataagccagaggaactgaagagttataagactaaggttgatgtgaaagggactgttgggaagtttaaggatgaagctagtattacaaaactcgccaaaaaaataccttatgctggaacaatattctccttgactacaaatggagctgagttttttagtgatgataataaagataaatcttggttcgaaaaatttggccgattttcagcagggattggaatggatgctggagttggagcgttgaccgctagcggagctggactgggttcattagtatgtccaggtcctggcacccttattggaggagcaattggagctggtattggtataactggatccataattgcgggagatcaagtaaaagaatggggagaagatgctgcaggttggatagaagataaaggtaaggaagctggtgaatggttaagtcaaaaggcctctgaaactacagatacaatttcagacggactctcaggtgcaaaggaatttgtcactagctggttcaggtaa

SEQ ID NO: 4727 - DNA, 270 bp, Bacillus licheniformis
atggcagaaataaaggtaaaagcagaagaagtcaaaacggcgttttcaaaccttcagacaaaaatcagcgcactttcgatatcaggttcaaaagccgatatcgctaattcttcaatggatgtagtgaacaaaataaaaaaaatcgaaaaggaatacgagcagctattaaaaaaatacaaggaggcgctatcttcagttgaaaaggacgcatggtcaaacattaaagtcctgattgatactgataaaaacatctctcaaaaaatgaaataa

SEQ ID NO: 4728 - DNA, 393 bp, Bacillus licheniformis
atgtctaaccatgctgctaaaatctcttctttggaaaaagatatttcttctttatctcacaatataaaggatacccaaagcaaaatcgctgaactgaaaaaagcaaaaacagctattaccggtgaacttcacaccctttcaaacaatgccactctcatcaatcagccagatattacatcacatatatggaatggcagacatacaaatcaatttatcaatattagatcaaacattgcacacagctatcaaaacatacagagagaaacagatggtctgatttcgcatattgagcaagagattgaaaatcttgaaatgcaaatttctaatatggagatgtttctaagtatacaaaaacaacagcttacagatataaaaaaacaagtcaatcattga

SEQ ID NO: 4729 - DNA, 1302 bp, Bacillus licheniformis
atgagaatggttgatatcatcacaaaaaaacaaaatggagaagaattgacaacagaagaaattcaatttttcattaaaggctacaccgacggcagcattcctgactatcaagcgagcgctctggcgatggccatctattttcaggacatgacggacagagagcgggccgatctcacgatggcgatggtcaactcaggcgaaacgatcgacctttccgcgattgaaggtatcaaggtcgacaaacactcaacaggaggcgtcggcgacacgacgacgctcgtacttgcaccgcttgtcgcggctctcgacgtacccgtcgccaaaatgtcgggacgcggcctcggacacacagggggaacaattgacaagctcgaagcgatcaaagggtttcacgtggaactttccaaagatgaattcatcgagctcgtcaaccgcgacaaggtcgccgttatcggccaaagcggaaacttgacgcctgctgacaaaaaactgtacgcccttcgcgatgtgacaggcacggtcaattcgatcccgctgattgccagctcgatcatgagcaagaaaatcgccgcaggggcggatgcgattgtccttgacgtcaaaacgggcgccggcgcatttatgaaaaccgatgaagatgcagtcaaccttgcaaaagcaatggtccgcatcggaaacaatgtcggccgccaaacgatggccgtcatctccgacatgtcccagccgctggggtttgccatcggaaatgcgcttgaagtgaaagaggcgattgatacattaaaaggcgaaggtcctgaagacttgactgagcttgtcttaacattgggcagccaaatggtcgttctcgccaaaaaagcggagacccttgacgaagcaagagagaaactgatcgacgtgatgaaaaacggaaaagcgctgcaaaaattcaaagacttcctgcagaatcaaggcggcgacagctctgtcgcggataacccagaaaagctgcctcaggctgcctataaaatcgacgttcctgccaaagaagcgggcgtcgtgtctgaaatcgtcgccgatcaaatcggcgttgcggccatgctgctgggcgccggccgcgcaacaaaagaagacaaaatcgacctcgccgtcggcatcatgctccgcaaaaaagtcggcgacgcagtcgaaaaaggcgaaccattggttaccctatacgcaaaccgcgaaaatgtcgatgacgtcatcgcaaaagtctacgacaacatccaaatcgcggaaacagccgaagcaccgaagcttgtgcatacggtgattacggaatag

SEQ ID NO: 4730 - DNA, 1182 bp, Bacillus licheniformis
atgaaatatctcatcgggctcattggtttatttgtcgtcttagggcttgcatggctggtcagcagcggaaagaaaagagtgaaataccgcccggttatcgtcatgatcgtgctgcaattcgcattgggatatatattgctgaacacgggtgtcggaaactatctcgtcggcggttttgccaagggcttcggctatttgcttgaatatgcggcagaaggtgtgaattttgtctttggcggactggtgaatgtgaatgaatccacattcttcatcagcgtacttctaccgattgtttttatatctgctttaatcggtattctgcaatattggagaatccttccgtttattataaaatatattggtcttgcgctcagcaaaatcaacgggatgggcaaactggagtcatacaatgccgtggcttcggcgatactggggcaatctgaagtattcatttcgttaaaaaagcagcttggcctgctgcctaaacacagactttatacgctgtgcgcttcggcgatgtcgaccgtctcgatgtctatcgtcggcgcctatatgacgatgctgaagcccgaatacgttgtcaccgcgctcgtattgaacttattcggcggatttattatcgcttcgattatcaatccttatgaagtcgatcgagaacatgatatggtagaggtacaggaagaggaaaaacaatccttctttgaaatgctgggcgaatatattatggacggctttaaagtcgccgtcgtcgtggccgccatgctgatcggatttgtcgcgatcatcgcaatgattaacggcattttcagcgccgcactaggtatatcattccaggaactgctcggatttatttttgcgccgtttgccttcctgatgggtattccatggcatgaagcggtgaatgctggaagtatcatggcaaccaaaatggtctcaaatgaatttgtcgcgatgcagtctctcgcacaaggcagcttccatttcagcggccgcaccgaagcgattgtttccgtcttcctcgtctcatttgccaatttctcatcgatcggtattatcgccggtgcggttaaaggactgaatgagaaacaaggaaacgtcgtcgcgcgcttcgggttgaaattgctgtacggcgcaacgctcgtcagtttcttgacagcgaccgttgtaggattgatctattga

SEQ ID NO: 4731 - DNA, 672 bp, Bacillus licheniformis
atgacgattgcaaatctcattgatcatacagcattgaaaccgcatacacaaaaatccgagattaagaaattaatagaagaagcgaaagcataccaattcgcttcagtctgcgttaacccgacatgggtcgaatttgccgccgaagagctgaagggaacggaaatcgacgtttgcacggtcatcggttttccgctgggcgccaacacgacagagacaaaagcgtttgaaacaaaagacgctatcgcaaaaggcgcgacagaggtggacatggtcatcaacatcgccgctttaaaagacggaaacgatgactttgtcgaggccgacatccgcgcggtcgttgaagccgcaaaaggtaaagcgcttgttaaagtcatcattgaaacgtgtctgttgacagacgaagaaaaagagcgcgcctgccgcctggctgttgctgccggtgccgactttgtcaaaacctcaaccgggttctcaaccggcggagcgacagcggaagatatcgccctgatgcggaaaaccgtcggacctgacatcggtgtcaaagcatccggagggattcgtacaaaagaggacgttgaaaccatgatctcaaacggcgcgacccggatcggtgcaagcgcaggcgtttccatcgtcagcggagcagaaggaaaaaatgaagataactactaa

SEQ ID NO: 4732 - DNA, 939 bp, Bacillus licheniformis
atggacaaggaaaaacagcaattgagcattgaagcagcgaggctctactatcagtctgactacagccagcagcaaatcgccgaacagctgcagatttcaagaccgacggtatcaaggctgctgcagttcgccaaggaaaaggggtatgtccaaatccgcgttatggacccgtttgaagatatggatgcgctcggtgcgatgcttgaggaaaaatacgggcttctagaagcgcatgttgtcttttcgccgaccgcggattatacgaccatcacgcattatctcagccgcttcggggccgaatatatgcacggcgcagtcaaggacggcgacattgtcggcgtcagctgggggacgacgatgtaccaaatcgcccaaaatatgcagcctaaacaggtgaagggcgcagaggtcgttcaactgaaaggcggaatcagccattccagcgtcaacacttattcgtctgaaacgattcagctgtttgccgaagcttttcaaacgatgccgaggtatttgccgcttccggtcgtgtttgacaatccggaagtcaaacagatggtggaacaggacaggcacatcaaggggatcatagaaatgggaaaacaggcaaacattgcgttatttacagtcggcacggtacgcgatgaagccttgctgttcaggctggggtattttcatgaagaggaaaaagccctcctgaaagaacgtggagtcggcgatatttgttcgcgcttttttgatgcggaaggaaacatttgcagcgatgctatcgattcgcggacgatcggcattgaattggctgacttgagggaaaaagaacggtcgattctcgtagcgggcggcagccggaaaaaagccgctattcatggtgcgctcaaaggcaagtatgccaatgtgctgattattgatcagcacacggcgaaagaactgcttgatgactga

SEQ ID NO: 4733 - DNA, 435 bp, Bacillus licheniformis
atgtacatcatcagcaagcttgaaagacaaaatgtgaaagtgacagaaataccgaagtggggctcttacttgagaaaaacgtgggaaaaccgttttgccgcaagcatggagcttccggaaagggacgcgatcttggtgagccattttttgtggcatttattcagctatgggatgaagccgtgttttaccggcggacaggccgatcaagcctttagcgaacagccgaagcgcgattgctttttattctaccagcacacggatgacgcctatattcttgaacatgctgaacaactgatagccgcagatctgaaaggagaagaagatgcatatataacggataaacatatgacatggacatatgcggtgacgcatgagtctgcatacggaccgtattttgcaattcagctggatgagaaggagcatgaacctatataa

SEQ ID NO: 4734 - DNA, 1095 bp, Bacillus licheniformis
gtgaaagcacccgtgaggtatatatggattggtatgatcctgtgctttttatccgtcagtctggccgtcggctgtatcaaagctgaagatcagtcagatgatgagaaaaatgatgaagcgcttcagcctgccgaacacttcgtttaccgtcatttaatgagcgatcaggggctgatcaaaaccggcttttccgaccagcctgtttacttgtcggaatcgcttggcttgtggatggagtttttgatcagcaaaaaagacggcgagcatttccatgagcaatatcagcacctgaacgaatccttccttatgaacaacaacctggtgtcatggcaaatccaaaacggtcaggcaagcggggtgaacgccctgatcgatgatctcagaatcatggtgagcctcgatcaagcggcagctctatggggaaacagcgagtataaacaaaccgctcggaacatcggtgccgcattaagaaaatacaacatgaacaacgggatattgacggacttttacgactccgcctctcaatccgcggcaaaagatatcacgctttcctatatcatgccagatgcgctatccatcttgaaaaagaatggagtgataaataaagaactcgaaagtcggaatgccagcattctttatcgcgcccctttgaaaaacggttttctcccaaaagcatacagtacagaaacgaaagcatacacctatgaccatgaagtcaatctcattgatcagctttacgcagcttggcatttacctccgaaggatcaaaaagccgctgtattagcggattggctcaaacagacgtttcaaaccggcggaaaactgtatggccggtattcgctcgatacaaaaaagccggcggtccaatacgagtctccatccgtttacgcgttggcgattttattcttcatcaaccaaaacgaagataaaaccgtcattaaagcgctgtatgatcgaatgaatgattttgaaattcttgattcgtccgagacgtattatgggggatatatgagcggaaatgatacgcattcttttgataatctgctgcccctattagccgaaaggaagcttttaaatgaaaatctcattcaatga

SEQ ID NO: 4735 - DNA, 852 bp, Bacillus licheniformis
atgaaaatctcattcaatgaatcgcataaaatgttcgcttatatgacaggacttgcagcagcgcttgcgttgttcatccattatatctcagtccagcggttcgaacccgttctcatcatttgcatcacacttgccatcatcgcagcaggaatatgactcggatcgatttacgcactggctgggaccatcatcgtcctgtttgttctcggcactttgatgatgttttttcacacaggccaaggagaagctgcttcgtctgaaaccggactgcaaatgctcgtcatctggggagtggcgctgttgctgttttcctttatgtcagggagaatacacgacatcgcgatcggacttcaccgctccgtcaaacaccttcaagacgaaatcaaaagctttgttgcgattgacagggtgacaggctttgataataaacagaggatgaagctggagctgtcagaagaaatcaagcgggcggagcggtatggcaactcgtttgtttttttactgcttcatatgcattatttcaaagagttcaaatccctgtacggagaaaaagaaaccgatcgtctctttcaatttgtcagcagtcaaatcagatcatgtgtccgggaaaccgataaaaagttccggcctgccgaggagcggttcggcatcctgctgacacacacgcctgccgaacatatgcccgccgtccttgaaaaactgaagaaacagctggatacgtaccagctgaaaaacggcaagtatgtcaccttgaccttccacgtgtgccacttatcatatcagaacgatttaaagactgccgatcaatttttagaagaactagaaaacgagatgatgatgaatgaactgtaa

SEQ ID NO: 4736 - DNA, 1731 bp, Bacillus licheniformis
atgaactgtaagcggctattacttctatacgcggctgtgcttatcctgtctgcggctttttatgttccggacagcgccgaggcaaagcagcaggagcacggcattctcatcgtctattcaacattggatggaaaagagtcagccgatgtgaaaattctcgaccttatcgccggccatttttcatcccgtgtggccgtcataaaagacgcggatgtcaaagcatcggatctcgcaacaaaagaccgcgtcatctattacggacaaacgaaaagaaagctgagcaaaaagctcgcgcagctgatcagctcctccaaaaaacctgtgatagcgatcggctttaacgccgggcagttcagccaatttgcaggtcttacgctcaaaagcaaagacaatgtgtatcagattcgcagcacaaatgaggaaatcgattcctctttagaaagcggagtccgtgtcctcgacgtatcaggattgaagggaaaagcattgtacacatacaaagctgacgaaggaaaagctcgtccttttggatggaaaaccggcaaaggaaacgtgtacatcgggttaaccgatttgctaaacaacagcctcctcgccgctaaacagctcagacaggcatttggtgaaacggccggcagcacgctgttatatttgcggcttgaggatatcagcccgatgtcggatgaaaaactgctgctccaagccggatcttatctgcataaacggaatattccttttatcctttctgtgattccggtatatgtcaatcctgaaacaggcgacaaagtctatatgtctgaaaagccgaagctggtcaaagtactgaggaagcttcaggatatgggcggaagcgtaattgtccacgggtatacccatacataccgctacagcgaaaccggtgaaggattcgagttttgggatgccaaagccgatcagccgatcacatcggaaaatgcggaagaacccgcgacccttttgcaaaaggaacagagctttccgaatgaagaggcatatcaaaactatttgaagccgttcagaaagaatgaagaaacttacacgcggcagaagctgacgaacgctattgaggatctcaccgcggaagggctgtatccgctcgcgtttgaagcgccgcactatacgatgtcagagcacggctatcaaatcgcctcacaatatttcacaagcttgttcggccaggttcagcttagcgatacaacatggaaaacgtcaggcgccggtccatttgttacgaatccggccatgctccatgggatgacgctctatcccgagacaatcggctatgtcgatcaatcggagcaaaatccgctcggcaaagtcgaggagcgcatctctcaaatgatcgattttgaaggcggagtagccggcgcattttatcatccttatcttggaatgaaatatcttcctgaactggttgatcaaatggaacgcattccaaacagcgaatggctcgatattaaaaagacaaagcaaactgttaacacagataaagtagaaattcacacaagcggagatggaacgattcaagtcaaaagcaaagtcagccccattgagacgtttttcgatcatcaccagcaaagcccgctggaaaaggcgctttggattctctctcttattgtgctcttgtttgttgtcatgtttgtgagctataccctttacttgagagccacattaaaaaaacgaatctttaaggagagaaaaagccgtgggtaa

SEQ ID NO: 4737 - DNA, 1263 bp, Bacillus licheniformis
gtgggtaatgttctgttcctagtctcgttaagcttaatatgggtcatgcttctgtatcacatgtttttgatgcagggcggattccgccactatatgaccttcgaacggaacattccgaagtggaaagagaacgtgaaggatctcccgaaggtcagcgttctgattccggcgcataacgaagaggtcgtcattcggcagacgctgaaggcgatggtcaacctctattatccgaaggaccggctggagattattgtcgtcaacgacaattcatccgaccggacgggtgacattgtggatgaattttccacgcaatacggctttattaaaatggtcgtgaccaaaccgccgcatgccggaaagggaaaatcgtcggcgctcaactgcggttttgccgagtcaaacggggacgtcatttgtgtatatgacgccgacaacacgccggaaaaaatggctgtttattaccttgtcctcgggctcatgaatgatcagaaagccggagcggtggtgggaaaattccgcgtcatcaatgcggcgaaaacattgctcacaaaatttattaacatcgaaacgatttgttttcaatggatggcacagggcgggagatggaaatggttcaaaatcgccacgatccccggcaccaatttcgccatcagaagaagcattatcgaacagctgggcggctgggatgataaggcgctggccgaagataccgagcttacgatccgggtctacaacctcggctaccacatccgcttctttccggcggccgtcacttgggaacaggagccggaaacgtggaaagtctggtggcgtcagcggacaaggtgggctcgcggcaaccagtatgtcgtcctgaaatttttggctcagtttttcaagctgaagagaaaacggattatttttgatttgttttatttcttttttacgtattttttgtttttctttggcgtcatcatgtcaaatgcgatttttgtcatcaatttattttataatctgcatctttcattcggttttttgtctatcattttatgggttttggctttctttctatttatgacggaggtcatgattacactgagcatcgaaaaaacagaaatgaacaggcaaaactttttcatcgtttttctgatgtactttacatactcgcaggcttggattgtgctcgtgatttattctttattcgtagaaatcaagcaccgcctgttcaagcaagaggttacatggtacaaaacagaacgatacaatcaaaagaaaagcgggtga

SEQ ID NO: 4738 - DNA, 2127 bp, Bacillus licheniformis
ttgaaatatatcatcatatgtctggcaagcttcttgctgatcacggcgacgggacaagcggctgcagccaaagacgttacagtagacggctcgatcctgggggaaaacagccgggaacaagccaagcagcaagtgctcacaaacgatctcttgactttatacggggcaaaagacagcgccgagctgacgtatcaaataccggcgggcgcctcctctacccatcagcagcttacacttaaatacgaggcctcagaccttttaatctcaccgtcttctttaacagccgtgattgatggcgaaccggtcaaaacggttaagcttgaagggaatgacggaaagaaaacgctgaagctctcgctgaacaaaagccagtcgtctccagggtttcacagcttatcactgaagttctacggagtggttcatgaaggcgtctgcgtcagacaggactcctccgggaactggatcaaaatttatccggacagtcgtctgaatatcggggaaaagaacgaatctaaaggagcggcgctcgaacattatccttatccgttcgcccagtccggcagctccgtggaaaaaacggcaatcgtcattccggaccatccaagttcggctgaaatcgaagcggcagttaaaacagaagcatacctcaaaacggttgacaacagcatcagcacgaagatcttgggtgaatctgacctggcgaagatcgacaggccgacgattgtgatcggcgttcaccatcactggagcggcaaagtgaaaaagctgttgaaacaagcgaaactcgaagcaaaagaagacaagcttttgcttgcgaaacggatgctcaaagcaaaggataagcagcagcctgtattgtttgcggccgcagcatctgatgatgtgctttctgaaaaaatcagcgtcatcaccgacaaaacgtatgccgcccagctcagcggcgacacgctggcaatcggcaaacttcagcagcatagcaaacggggcggcagcaagctgacacttgaggatttcggggcgggggatttgacaatcggttcgggacagacatcttccgagcatttttattatcccgcgccagctctattagacaagaatcagcctgcaaagctttcgcttgcgatgaaaaaatcgaaaacgattcaaaagcaggccggccaaagcgacttagctgcggaacaggcggagctgaaggtcatgatcaatggccagcctcattccgtcggacttgacgatataggaaaagaagacaaaaacggcttttaccatgtttctttaaaagtcgatccgaaacttttgcaaaaaagccgttacattgatattcaatttgccgcttcaggcttgaaagagaacaacccttgctacgcggtgaacgaggacaaatggatttttatcgataaacaaagtgcattgtcttaccatgtcatcgacacgtcagcttcagcagattttcaagcgtggccgcttccctacgcgggtgatcataacaataaaacgctgatgatcctgcccgacaatgcggatcagtcgaagattgatgagctttcgcttgtagtcggctccttcggcagcgaagcccggcaggcattcacagtaaaaacatcctcggaagtcaaaccggatgacgtgaaaggaagaaacgtaatcttcatcggaagcgtcgatcaattctctctgctgaaggaaaaaacagccgaattggctgttccgacggcgaaaaacggaacatttgatgtgtcatcttttcaaatgctgaatgaaacgacaaaacaagtcgcgtttactcaaacgtcgctgtgggattcaaattactcgatggctgttttcgcgccgtttaaagggcaaggcacagcagtcacaaaagaaatgatcaactttttgaacagcaatgatttcgcagcaaccgttgtgaatgaaacggacagccatcagctatttacaaaccatcaacagctgacagcaaaatccgccgaaaccaagacggatgataaacaggaaagcaatcagcagcatgtgctgtacattgccatcctgatcgtaatcatagcggcagcggttattttgatcttgacaacggcaaggcgcagaaaaagaaaggccaatgccggcggagggattgacgaataa

SEQ ID NO: 4739 - DNA, 1290 bp, Bacillus licheniformis
gtgaagccgtcattaagcaaaatcggagagaaaatgattgagaaaacaggggtcagggctgtgatgagcgatattcaggaagtcctggccggcggtgaacggtcatacattaatttaagtgcgggcaatccgatgattttgcccggcgtgtcagccatgtggaagtcggctcttgccgatctccttgacgatgacaggttttcttcggtgatcggccaatacggatcgagctatggaaccgatgaactgattgcaagtgttgtccgcttcttttcagagcggtatagcgccggcattcgaaaagagaacgtgttgattacagccggaagccagcagctgttttttctggcgatcaattcgttttgcggaatgggaagcggatctgtgatgaaaaaagccttgatcccgatgctgcctgactattcgggatacagcggggcggcactggagcgggagatgattgaggggatccctccgctcatatcgaaattggatgatcatacgtttcgatatgagctcgaccgtaaggggtttttagagaggatgcggaccgatccgtgcatcggtgctgtcttgctatcgcgcccgaacaatccttgcggaaacatcttgcctaaagaagatgtagcattcatttcagacgcatgccgagaagcgaatgttccgctgttcattgattccgcatatgctccgccttttccggcgattcactttatcgacatggaaccgattttcaacgagcagatcattcactgtatgagcctttcaaaagccggcctgcctggcgaaaggatcggaatcgccatcgggccgtcccggtatattcaggcaatggaagcttttcagtcgaatgcggcgatccattcttcaaggctggggcagtatatggctgcatcagtattgaatgacgggcgcctcgccgacgtgtcgctgaatgaagtcaggccatattaccgcaataaattcatgctgctcaaggaaacgcttttatgcaagatgcctgaagacatcaaatggtatctgcatcaaggggaaggatcgcttttcggatggctgtggtttgaagacctgccggtgaccgatgcagcgctgtatgagtatatgaaagcggatggagtcattatcgttcccggatcatctttctttcaccgtcaatcccggcgcctggcgcattcacaccagtgtatacgaatcagcctaaccgcggcggatgaagatattataaggggaatcgatgttttagctaaaattgcgaagggtgtatatgagaaacaggttgaatacttataa

SEQ ID NO: 4740 - DNA, 1239 bp, Bacillus licheniformis
atgacgactttgacaggggacattgtaaacatggtcaacgagcagattgtaccgaacatacatgaattgcagacgtaccaaaatgataaaggacagattacagagcatcacgaaagggcggaacagcttctgctgcaattgattgaagacgcaggagccatttatgaagcggttcacttaacggctgcaaaagaggcgtttaaagaggacgttttggattggatcagccgcggattaggggagacgccgtattttgaccggttattgacggcttaccgggctccgcatgatcaggagacgaccttttttgcggcgccgatcgtgacgccgaatgggcctcatgcgaaaggctgctattttgaagcctttttagccgttcgtgaagaacctgccatgatgaggccgatagaagaggatctgcctcatcctgaaaacggctgccaatcccttaagctgctcgccggaacaaaggggttcacggaagaaaaatgcatcgtattcttccctgaaaatgtgaaaacaaaagagaaaatcacatcacagacattcgcgattttctactttaataagttttatcacatttaccatgaggacacgctcaaaagagcgagggccatttttgaacatgcgcctttcaagtcggctcagctttcccccgaccgcacatatgaagcaagggtgttgtggggctaccttcacgactattttcatcattgcggaaaaaaaccttttcatctccatattcaggcgaaaatgaattttttcgcaggcattttagaagaagtcaaggtcgattgccaagcaatcctgaccttgtgggagcggcaatatgacggctgggaggaaattatcgaatttgttttgtacgagcggctgctgcgctatccgagccagcataatgcaacgcggaattttgattccgggacaggctattttctgttcagctggatgattgaaaacggccgttccattcaaaaaggagaagagaagcgcgtgtcgcttgaccttccacgctgcatggacgatttaagaaagcttgtggccgaaattgaacagctggaagaaatcgaggatgacacggcatacaaagaggccgcggagcgctatgtcagacaatacctgcctccgggacgggaaggcgagcgattcagcgtcccggaacagtatttcattgacgagatcaataagaaaatcgaaaccgcccgtcttcgatttgaacgggagagactggaagcgtga

SEQ ID NO: 4741 - DNA, 567 bp, Bacillus licheniformis
atgatctcgactaaagtgcacaaagagcaagccgtgatgattgtccatacgctcggtcccaaaggcacgaactgtgaaaaagccggcctgctatggctcaaaaataaaggggtccgcggggaagtcaggctttatgaaacgttggaagaagcgctgctccatgttaaatcgacagaaaattcagtcctcttaggctgcgccgtttacccgtttttgcatcaaatcgtatttgagaatctagcggacttaaagattatagacagttttgtgatgcctacatacaacatggtgtttgccgcaaaacagcacacgatggcatcggatattcaaatcgtcgcttcacaccctgctccggctcatctggcaaagctgttcagcagtcaagtccaatttgtcaccagcaatgctcaagcggccctggcctgcgcttcaaacgcggctgacggctgcatcacgacgattaaagcagccgatgaacaccgtttgaaagtcattaaagattttggggaagtaccgatgtgctttacaatccacgggcttaaatcaatcgaaggaggaagccgatga

SEQ ID NO: 4742 - DNA, 1278 bp, Bacillus licheniformis
ttgacgaaacgaaacaaaaacttggccatcatttgtcaaaataagcacctgccatttatttttgaagaagctgagcgtttaggattgaaggtcacgttcttttacaattcggccgaagatttcccgggcaatcttccggctgtggaacgctgtgtgccgctgccgttgtttgaagatgaagaagcggcgatggatgtcgtcaggcagacatttgtcgaatttccgtttgacggcatgatgacactgtttgaaccggctttgcctttcacggcaaaagctgctgaagctttgaatctgccggggcttcctttcacaacaatggaaaactgccgcaataaaaataaaacccgcagcatacttcagcaaaacggattgaatacgccggtttttcacgagttccatacgctcgctgacctggaaaacaggaaactgtcgtatccattagtcgtcaagccggtcaacggcttctcaagccagggcgtcgtccgtgttgatgatcggaaggagcttgaggaggccgtccggaaagtcgaggccgtcaaccaaagggacctcaatcgattcgtgcacggcaaaacgggcatcgtagccgagcaatttatcgatgggccggaattcgcgattgaaacgctgtcgattcaaggaaacgtacatgttctttcgattggatacaaagggaacagcaaagggccgttttttgaagaaggggtctatattgctccggctcaattgaaagaagagacgcgccttgcgatcgtcaaggaagtgacgggcgctgtttcagcgctgggcattcaccaggggccggctcatacagagctgaggctggacaaggatggaacaccttatgttatcgaggtgggcgccagaatcggcggttcaggggtttcccattacatcgtcaaagagagcacaggcatcaactttatgcagcttgtcttgcaaaatgcattaaagccgctggagagcagcgagtttgaaggcgagatcaggcctgtaaggacagccggcaattatatcattcctgtacagggctccggcacttttgaaaaaatcgacggactggaagaagtcaaacagaggcaggaggttaagcgggtgtttcaatttatgagaagaggcgcaaagatcctcccgtacccgcacttttccggttatccggggtttatattaacaagccatcattcttatgaagaatgtgaagctttctaccgggagctggatgatgagcttcatatcatttatcaaaataatttgacgggtacaataggaggttaa

SEQ ID NO: 4743 - DNA, 939 bp, Bacillus licheniformis
atgctgacaaacgttttaaagtatcgggttcatattttatttatcgtgttatgtttgatcggcgggacgacatgggcttttcaaaaagccgggctgagtgacagccttccattttggtccgccggcatgcggttcatgatcgcaagcattttgatcgcggcgtttctgttggcacggaggcagtttgttctgtcaaaggaactgctagtgctgtcgtttttgaacggcatcatgtatttttccgttccattcggatctgtttattgggcctctctttatttgccgagcgggttggtgtctatattagcggcaagcatttcagtctttgccctgatgatcaaccgcctcgtcaaagggacaccggcgacgaaactgcagaaatgggggatatgcctggctttgctcggcattacaatcgtgtttggcaaccaactgctgatcaaagtcgatgttattgaaattgtcgcaatgattgtgattttgtgtgcgatgtttggctcggcttttattcaaatcaaagtacagcagagaattcgttcgcttccgatcttaagctttaactccctttcaatgctgagcggcggagcggtattgctcatcagcagcctcatctttgaaagcgggacaagaacgttttccggtgtgagtctttatgcgctgctttatttagcggttgtcggctcgattttgggtttttggatcaacatttatctgcttaaaaaatggcacatctcaaaagcgacttcccacttgttcatctcccctgtcattgcgctctatatcggatttctgtttctggatgaaaaactgaatgcgaatatttatttaggaacgctgtttgtcatattcggtgtgatgttcatcaacttaaaaaaagaagagaggatcgcgaaaattgacgaaacgaaacaaaaacttggccatcatttgtcaaaataa

SEQ ID NO: 4744 - DNA, 879 bp, Bacillus licheniformis
gtggctttcgtttccatgaaagaacttcttcaagaagcaaaggaacatcattatgcaatcggtcaatttaatattaatggccttcaatggacaaaagcgattctagaggcagcggaagaagaacggtcacctgtcatcgcagccgcttcagatcggctcatcgattatttgggcggatttaaaacggtttccgcaatggttgcggctttgattgaggaaatgtcgatctccgttcccgtcgtgcttcaccttgaccatggcaaaagtccggagcgctgcaagcaagcgatagacgcgggttttagctcagtcatgatcgacggctcgcattcaccaatcgatgaaaatatcgccatgacaaaagaggtcgtgtcatatgccggggtccgcaatgtttcggttgaagcagaggttggcaccgtagggggcatggaagacgggcttatcggcggagtgcagtatgccgacatcggtgaatgcgagcggattgtcaaagaaaccggtatcgatgctttggcagccgcgctcggctccgttcatggaaaatatcaaggcgagcctaatttgggatttaaggaaatggaagaaatctcacgggtaacggacattccgctcgttctccatggagcttcgggcatcccggctgatcaaatcgcaagaacgatccgtctgggccatgcgaaaatcaacattaataccgaatgcatggtggcctggactgagaaaacgcgcagcatatttaaagacaatcccgatttatatgaaccccgcgcctatatgacgccagggatcagcgcagtcaaagaaacggttaaacataagatgagagaattcggtacatccggaaaagcggtatgcacccaaaagatagaaatataa

SEQ ID NO: 4745 - DNA, 837 bp, Bacillus licheniformis
atgaagctatgctttaatgaagcaacgacgttggaaaattcaaaccttgcaaaagacctcgaatactgtgagaagcacggatacgattatatcgaaatccggacgatggataagctgcctgagtacttaaaagaccatgctctctcagagttagccgagtattttcaaactcatcatattaagccgctggccttgaatgcccttgtctttttcaacaaccgcgatgaaaaagggcaccgtgaaatcatcgaagaatttaaaggcatgatggaaacgtgcaaaatgcttggtgtgaaatacgtggtcgcggtaccgcttgtcaccgaacaaaaaatcttaaaagaagatattaaagcaagctccgtcgaagtgctgacagagctgtcagacatcgctgagccgtacggcgtaaagatcgctgtcgagtttgtcggtcacccggagtgtacggtcaatacgttcagccaggcctatgacatcgtcatgaccgtgaaccgcgataatgtcggccttgtttttgacagcttccatttccatgcaatgggctcaagtcttgaggatttaaaaaaggcggacggcaagaaaatcttcatttatcatatcgatgacacggaagactttccaatcggatttttaagagatgaagaccgtgtttggccgggacagggagccatcgacttggatgcccacttatcaactttgaaagacatcggtttttcggatgtcgtatcagttgaattgttcagacctgaatactataagctgagcgcggaagaaacgattcgaacggccaaagaaacaacagttgaagttgtttcaaaatacttcaagatttaa

SEQ ID NO: 4746 - DNA, 867 bp, Bacillus licheniformis
atgaaattagcattggatccatcgatgtatcgtgatgatttgactttggaagaaacggtctataaaacggcggagcttggctacgaatatatcgaactatcgccgcgcgaagatttttgtccattctataaatatccgaaagtcgattcagctaaaatcaaacaattaaagcggcttttaagagataccggtgttaagctttcatcgctccttccgctttaccactgggcaggtcctgatgaagatcgccgtcaggccgccgtgcgcaattggaaaagggcaatcgaaattgcggtcgagcttgaagtcgatttgatgaacagcgaattcagcggttcaaaatacgatcctttaacaagtgaagaaaaatttatcaaatccatggatgagcttctgccaatctttgaaaaagaaggcattaaactcaatcttcaagcccatccatacgattttatcgaaacgcacaaaggcgcgttggatatgatccgcgcgcttgacaaggattggattaatcttgtctactcgactgcgcatacattcttttatgatgacggcaaaggcgacatcgagacaatgtttgacgaagccggcgaccgcctcacacatgttttattcgcagatacgtataatcataaagcggctcatggccttcgctacatcgtcaatccgcctgacgcaaaagtaacggttcaccagcatttggacattggtcaaggcgaggtcgattttgatacgatcttcagaaagctgagagagatgaagttcgacggaattgcgacgaacgccgtttttgcttgggtcgatgaaagagcggatgaatcaagcagattcatgcttgaaaaattgaaacaagaattattaggctaa

SEQ ID NO: 4747 - DNA, 1035 bp, Bacillus licheniformis
atgaaactacgcattggtgttattggtacaggagcaatcggaaaagaacacatcaaccgcatcacaaataaattagccggcggcgaaattgtcgcggttaccgatgtgaaccaggaggcagctcagcaagttgtaacggactacagcctgaacgccaaggtctatccggatgacgacagtctaatcgcagccgaaaatgtagacgcagtcttagtaacaagctggggaccggcacatgaatcaagcgttttgaaagcgattaaagcaaacaaattcgtattttgcgaaaagcctctggcgacgactgcggaaggatgcatgcggatcgtcaatgaagaagtcaaagcgggcaaacgtctcgttcaagtcggctttatgcgccgctatgacagcggttacgtacagctgaaagaagcgatcgacaatcgggttatcggcgagcccctcatgatccactgtgcgcaccgcaacccggttgtaggcgacaactatacaacagatatggctgtcgtcgatacgcttgtccatgaaatagacgccctgcactggctgattaatgatgactacgaatccgttcaggtcatttatccgaaaaaatcgaaaaacgcgcttcctcatttgcgtgatccgcaaatcgtcatcatcgaaacaaaaggcggagtcgtgatcaatgcggaaatctatgtcaactgcaaatacggctacgatatccagtgtgaaatcgtcggcgaggacggaatcgtgaagcttcctgaaccaccaagcatctctctcagaaaagacggcaaattctcgacggatatcctcatggattggcagcgccgctttgtagacgcttacgatgtagaaattcaagatttcattgactcgatccaacagaaaggcgaggtcagcgggccgactgcgtgggacggctatatcgccgccgtgacgacggacgcctgtgtgaaagctcaggaatccggacagaaagaacctgtggcgcttcaggagaagccggaattctatcaaacgttcacaactgttaaaaaataa

SEQ ID NO: 4748 - DNA, 1305 bp, Bacillus licheniformis
ttgagcaatggaagtgcagcagtctcaccattcaataaacgaaccgtcgcagcagctttggcaaattacattgatgcaggctccattgtcgcaggatcggcaggattatctttatgggtcagttacctgaagctttctgatacacagatcggactgctcggcgcatttagcgccaacgccatttcggcagcaatcggagcgctgctcggaggctttttggccgacaaaattggccgaaaggctgtctatacgaacagtatgctggtttatgcactgggcatttgtttagttttattcggcaccagcttcccctttttgttaagcggttacattattatcggtttatcggtaggagctgatattacggcttcctggacgatcatcgcagagaacgcacctaagaaaaacagggcgcgtcattgcggggttgcacaggtcgcatgggctgcgggagcggttgtggttctgctgctgtcggtcctgctcggtgatttaggcttattgggcaataaaatcgtgtttgggcatttgctcgttatcgcactgattacttatgttctgcggaaaaggctgccggaatccgatgcctggcaggatcaatccgaaatggctcaagccgtcaggaagccgaagacgtcttatctcgatttgcttcagcctaagtatttgaaaagcattttattcttaatgggcgtgtacttggtttggaatctggctgcaggtgtcatggggttttttatgccttacatttatcagcaggtcggcgatgtatcagcgaccatggcaaatattttgcagatggggctgtttattttcaccgggcttggcgtcgcttttatcttcatgccgtttgcagacaaatacaggaagacagtgtttgggatctccgcatttgcggcggtgatcggctggtcattgtttctgcttccggcagagggcatgccgattctcatcctctttatcgtgatgatcggcataaacaacggggcggggcaacaggccaactatcaattatgggcgagtgaaattttcccgacggaatatcgcgcatctgcacaaggattgatgttcttccttgttcgtatctcaatcggggcttggagccttttcgttccaatgatcatctcgaattttggaattgcatttatggcggccattctccttggatgtgtaacggccagcatgctcatcgggctcttttttgcaccgaatacatccggtaagtcgcttgaacaaattcaggaagagctgtatgggactcctccggctcaagctgggcaagtgcaaacaagaaaaattatgtaa

SEQ ID NO: 4749 - DNA, 903 bp, Bacillus licheniformis
atgggcaagacacaaattctatggggcatcgcccccataggatggcggaacgatgatattccggaaatcggcgcgggaaacacacttcagcatttgttgagcgacattgttgttgcgggctttcaaggcacggaagtgggcggcttttttccggaaccggccattctcaataaagagctcgagctgaggaatctaaggattgccggcaagtggttcagcagctatatcattcgggacggcattgaagaagcagccaaggaatttgcggctcactgccagtacttaaaagacgtccatgccgatgtggcggtcgtatcagaacagacgtacagtgtgcagggcttggataaaaacgtgtttaaagaaaagccttatttcaccgatgaagaatggcagcggctatttgaaggtttaaatcacctcggggaaatcgccggccgttacggactgaagcttgtctaccatcaccacctcggcacaggcgtgcagacagaggaagaggtggaccggctcatggcgggaactgacccggcacttgtgcaccttctgtacgatacggggcatgcctacatttcagatggaaattatatgaacattttagagaagcatattgaccgtattaggcacgttcattttaaagacgcgcgccttaagatcatggagaaatgcaagcgggaaggaaattcgttccaacaggcgtttctgcaagggatgttcacagttccaggcgacggctgcatcgactttagagaagtatatcaaacgcttttaaagcacggctattccggctggatcgtagtggaagccgagcaggatcccgatgttgccaacccgcttgaatacgcattgatcgccagaaagtacatcgatcgtcacttgttgaatgtcccagcaaccaattaa

SEQ ID NO: 4750 - DNA, 1914 bp, Bacillus licheniformis
gtgggcaagaaaatacgtttaaccacagcacaagcgttaattaagttcttaaatcagcagtacatccatgtagatggagaagaaactccgtttgtcgagggaatctttacgatttttggccatgggaacgtcgttggaatcggccaggcgcttgaacaggatgccggccacttaaaggtgtttcaaggcaaaaatgagcagggaatggcgcatgcagcaatggcttacagcaagcaaatgcagagaaggaagatctatgccgtgtcgacatcagtcggaccgggagcagctaaccttgtggcagccgcaggtactgcgcttgcgaacaacattccagtcctcttgattccagccgatacatttgccacgagacagcctgatcctgttcttcagcaagtagagcaggaatacagtgcggcgattacgacgaacgatgcattgaagcctgtttcgaggtattgggaccgtattacgcgccctgaacagttgatgagcagtctgattcgcgcttttgaagtaatgacagaccctgcaaaagctggtcctgcaacgatttgcatttctcaagatgttgaaggcgaggcctatgatttcgatgaaagcttttttgaaaaacgcgttcactatgttgatcgcaaagagccgagcgagcgtgaactgaagggagcggcagaactgatcaagtcgagcaaaaaaccgctcatcttggtcggcggcggagcgaaatattccggcgcgcgcgacgaattgatcgccatgtctgaagcttacaatattccgctggtagaaacccaggccggtaaatccacagtagaagccgattttgccaacaatttgggcggaatgggaatcaccggtacgctggcggcaaacaaagcggctcgcggggcagacctgatcatcggaattggcacgcgctataccgattttgcgacatcatcaaaaaccgcttttgactttgacaacgcaaaatttttaaacattaatgtcagcagaatgcaggcttataaactggatgctttccaagtcgttgccgatgcaaaagtaacgctcggcaaactgcacggcttattggaaggctataagagcgagttcggttcaaccatcaaggagctgaaagacgaatggcttgctgaacgcgaccgcttaagcaaggtaacatttaagcgcgaaaacttcactcctgaaattaaagatcacttttctcaagacatactcaacgaatatgcggatgtgctgcaaaccgaactgccgcaaacaacggcattgctcgccatcaatgaaacagttgatccggacagcgtcgtcatttgttcagcaggctctttgccgggagatctgcagcggctgtggcattcaaacgtaccgaatacgtaccacctggaatacggctattcctgcatgggatatgaagtatcgggaacgctcggcttgaaattggcgcatcctgatagagaagtttattcactggtcggagacggaagcttcctgatgctccactcagagctcattacagcaatccaatataataaaaaaattaacgtgctgctctttgacaactcaggattcggctgcatcaacaatctgcaaatggaccatggaagcggcagctactactgtgaattcagaacagcagacaatcagattctcaatgtcgattatgcgaaagtggccgaaggctatggagcgaaaacctacaaagcgaacacgattgaagaattaaaagcggcgctggaagatgccaaaaaacaagatgtctcaacattgattgaaatgaaggtgctgccgaaaacgatgacggacggctatgacagctggtggcacgtaggtgttgcagaggtttccgaacaggaaagcgtgcaaaaggcgtataaagcaaaagaaaaaatgctggaatctgcaaagcagtattaa

SEQ ID NO: 4751 - DNA, 978 bp, Bacillus licheniformis
atgaagtatacgtttaatgaagagaaagaatttgacattgtagcgatcggccgcgcatgcatcgatttaaacgcagtcgaatacaacaggccgatggagcagacgatgacattttcaaaatatgtcggcggctccccggctaatattgcaatcggcagttccaaattaggcttgaagaccggatttatcgggaagattccggatgaccagcacggcagattcatcgaaacctatatgagaaatacaggtgtcgatacgtcacaaatggcggttgataaagacggacataaagctgggcttgctttcacagaaattttaagccctgaagaatgcagcattttaatgtacagggatgatgttgcagatctttaccttgccccttctgaagtgaacgaagactatattgccaaatcgaagatgcttcttgtgtcaggtacggcgctggctaaaagcccttcccgcgaagcggtgctgaaagccgtacagctggcgaaaaagcatcaagtgaaagtggtctttgagcttgactatcgtccatatacgtggacatctgcggaggaaacggccgtctactatacgcttgttgccgaacaatcagacattgtcatcgggacgcgtgatgagtttgatgtaatggaaaataagagcggcggcagcaatgaagaatctgttcagcatttatttgcacattccgcagatcttgtcgttatcaagcacggtgtcgaaggttcatatgcatacagcaaatccggggacgtcttccgggcgaaagcgtacaaaacgaaggtcttgaaaacgtttggagcgggcgattcatacgcctccgccttcctctacggactcgtttcaggcaaagatattgaaaccgcgctgaaatacggaagcgcttccgcctcgattgttgtttcaaagcacagctcatctgaagcaatgccgacagtcgccgagattgaagagcttattgcggctcagtcttaa

SEQ ID NO: 4752 - DNA, 816 bp, Bacillus licheniformis
atgagtcatttgttgcgcaagccgcaggcgaatgagctgtcacaaggcgtgaagcttgtacacgaagtgaaaaaatcgaattccgatctaagttatgtcgagtttaaagtccttgatcttgcaccgggatccagctatgaagaatcgctgagcaaacaagaatgctgcatcgtcgcgcttaccggaaagattaccgcaaccgatcatgaacagacatttgaaaatatcggcacgagagaaagcgttttcgaaagaaagccgaccgacagcgtatatgtgtcaaatgaccgcaagttcggcattaccgctgttacagaggcaagagttgccctgtgctattcaccttctgaaaaccagcttccgacgaaactgatcaaagctgaagacaacggtattgagaaccggggaaaattcagcaataaacgaaccgtccataacatacttccggattcagatccttcagcgaacagtcttttagtcgtcgaagtctacactgaaagcggaaactggtccagctatccgccgcacaagcatgaccaagacaacctgcctgaagagtcctttttagaagaaacatactaccatgaacttgatccgcagcaaggcttcgtatttcagcgcgtatacacggatgacggttccatcgacgagacgatgactgttgaaaatggaaacgttgtcatcgtgccggccggataccatcctgtcggggtgcctgacggatacacatcctattatttaaacgtgatggcagggccgacgcgtaaatggaagtttcataacgaccctgaccatgaatggattttggaacgctaa

SEQ ID NO: 4753 - DNA, 1464 bp, Bacillus licheniformis
atggcagaaatcagaaagttaagaaactatattaatggagaatgggttgaaagcaaaaccgacaaatatgaagatgtagtcaatccagcgacgaaagaagtgctgtgccaagtgccgatttcgacgcgagaggatatagaatacgcagcgcaaacagcggctgaagcgtttaaaacatggtcaaaagtggctgttccgcgccgggcaagaattctatttaactttcagcagcttttaactcagcataaagaggagcttgcccacctcatcacgattgaaaacggaaaaaacacgaaagaagcgttgggtgaagttggacgcggcatcgagaatgtcgagtttgcagctggagcgccttcactgatgatgggagattcacttgctacaattgcaaccgatgttgaagcggcgaactaccggtacccgatcggagtcgtcggcggaattgcaccatttaacttcccgatgatggtaccatgctggatgttcccaatggccattgcgttaggaaacacatttattctgaagccttccgaacggacgccgcttttgacggaaaagctagttgaactgtttgaaaaagccggacttccaaaaggggtcttcaatgtggtatacggcgcacatgatgtagtaaacggcattctcgaacacccggaaattaaagcgatttcattcgtcggttcaaaaccggtcggagaatatgtctataaaaaaggaagcgaaaatctgaaacgcgttcaatcgctgacaggcgctaaaaaccacaccatcgttctgaacgatgccaaccttgaagatacggtaacaaatattatcggcgctgctttcggatctgccggcgaacgctgcatggcatgcgcagtagtaacggttgaagaaggaattgcagatgagttcatggaaaaattggttcagaaagcatctgaagtcaaaatcggaaacggacttgacgacggtgtattcctcgggcctgtcattcgcgaagacaacaagaaacgcacactcggctatatacaaaaaggaattgaagagggtgcgagacttgtctgcgacggacgcgaaaatgttacagatgaaggctatttcgtcggcccgacaatctttgacaatgtcacaactgatatgacgatctggaaggacgaaatttttgctcctgtactatcggtcatccgtgtgaagaacttgaaagaagcggttgagatcgccaaccagtccgaatttgcaaacggcgcatgcttgttcacatcgaattcgaatgcgatccgctatttccgtgaaaacattgatgcgggaatgctcggcatcaacctgggtgtaccggctccgatggcattcttcccgttctccggatggaagtcttcgttctttggtacattgcatgccaacggaaaagacagcgtcgatttctatacgcgcaaaaaggtcgtcactgcaagatatccggcgcctgacttcaattaa

SEQ ID NO: 4754 - DNA, 129 bp, Bacillus licheniformis
ttgaatattaaacatctcctggtacagatggggcaggtttcaaccattatgtatgaatgccgaacagctcttcattgcacaacggattttcgcaaaaaacaggaattaaacgcttacaaaagaaattaa

SEQ ID NO: 4755 - DNA, 765 bp, Bacillus licheniformis
atgaagttaatgcggattaaagaaatggaagattatattttgaccaatggcaccgtttcgcttgatgaactatgccaggtctttaatgtttcaaaaaacacggtcagacgcgacattaacaagctgaccgagaaaggagttataaaaaaagtctacggcggcgtaacagcgatcgaaaaaacggccttgatcccttttgaaaacagaaccattcaaaacaaggatgccaagacaaaaatcgcgcgctatgcttcacgctttattgaagaccatgacctgatttttattgattccggcacaacgacccgatccatattggaaactcttgatccaaataaaaatgtaaccgttttaacgaacagcctcgacattatcaacgctgctgcagcgatgcaaaatataaacttgatcatcatcggcagcaactacaaacggaaaacgcagtccttcgtcggcatggatgatccgggaacgctggataaatataatattaataaagctttcatgtcggcaaccggcgcaacacttacccatggactgacaaactccgatctgcttgaatatgaaattaaaaagaaaatatccgaaaaagcaaaacaagtatatttgctggccgaccattccaaattcgggaagtcgaccctgctgacgtacgcgccgtttgacagattgcacgcgatcgtcacatctcaggcgcttgatgaggaatatcacgtgtactgtaaagatcgcaaaattgaaatccatttggcaaaacatgtatag

SEQ ID NO: 4756 - DNA, 936 bp, Bacillus licheniformis
atgaaaaaagttaaagttggcaaatcagacttgcacgtatttccgattggtttgggaaccaatgctgtcggaggacataacctttatccgaatctcaatgaagaaacgggaaaagaattggtgcgggaagcaataagaaacggcgtcacttttttagataccgcctacatatacggcatcggccgttccgaggaattaatcggcgaagtccttaaagaattcaaccgcgaagatgtcgtgattgcaacaaaagccgcccataagaaagaaggagacgattttgtctttgacaactctcccgcatttttgaaaaagtccgtcgaagaaagcctgaagcggctgcaaactgactacatcgaccttttctatatccattttcctgatgaaaatacgccgaaagacgaagcggttcaggcgctccatgaactgaagcaggaaggcaaaatcagagcaatcggtgtatccaacttttctcttgagcagctgaaagaagcgaacaaagacggattggtggatgtgctccaaggcgaatacaacctgctgaacagggaagctgagacgacattcttcccgtatacacaggagcataacatctcatttgttccttacttcccgctcgtctccggattgctcgccggaaaatacagcgaagatacaacgttcccggaaggcgacctgagaagagaaatggaaaacttccaaggcgaacgcttcaaagaaaacattagaaaagtgaaccagcttgcgccgatcgcggaaaaacataatgtcgacatcgcccatatcgtcttggcctggtacttggcgcggcctgaaatcgacgtgttgatcccgggcgccaaacgcgctgatcagctgatcgacaacctcaaaacggcagaagtcaatctgtctcaagaggacattgatttcatcgaccggctgtttgcccgctaa

SEQ ID NO: 4757 - DNA, 894 bp, Bacillus licheniformis
atgaaaagactagtccgcagcatcttccttataacggccgcaatcgctgcttttggttttggattcagcgggcatgcggaggcggcaagccattcccagccgcagctcaatccgaacaagctactaaatgtcgcgcaccgaggcgcatcggggcatgctcccgagcacacgcttttggcttataagcttggacaaaaaatgaaaggcgattacatagaaatcgatcttcaaatgacaaaagacggccacttggtcgccatgcacgatgagacattggatcgtacgactaatggtacgggttttgtcaaagactatacgctgaaagaaatcaaagagcttgatgcaggctcctggtttaacgaagcatatcctgagcgggcaaaaccggagtacgccgggctgaaagtgcccacccttgaagaaatcatccaaacattcgggagaagcgcgcgctactatatcgaaacaaaatcaccggaagactatgatcatatggaagaaaagctcctggacatcctgaagcaatacaaattgaccggagcagacattcattcaagcaaagtcatcattcaatcttttagtcctgaaagcttaaaaatcattcataacgctaatccaaacattccgctagtgcaattattatggtacgacaaacctgctgccattactgacgccgaattaaaacaatatcaatcttacagcgtcggactcggcatgaactttgaccgcattggccgggcatacgtgcaaaagattcgacgcaccggcatgctggtccatccttatactgtgaataaaaaagaagatatgaagcggctgctcgattggggagcgaccggaatgttcaccaactttccggaccggctgcgcgatgttttgcgcgaaaagaagtaa

SEQ ID NO: 4758 - DNA, 1359 bp, Bacillus licheniformis
atgttaaaactgtttaagccagcaccgccgattgagcggctgccggaagatcaaattgattcggaatataagaaattcagactgcaagtttttctcggcatcttcatcggttatgcggcatactatttaattcgcaaaaatttctcgcttgccatgccttatttgatcgaagagggcttttcaaagtcggcgctcggctttgccttgtccgctctatccatctcttacgggctgagcaagttcgtgatggccacgatatcggaccggagcaatccgaggatgttcctgcccgccggtttgatcctttccgctgtcatcagcctcttgatggggtttgttccttttttcacctcatcgatcgccattatgtttatcatgctgttcttaaacggctggttccagggcatgggatggccgccgtcagggcgtgtccttgtccactggttcagcgtcagcgaaaggggaaataaaaccgccatatggaatgtcgcccacaatgtcggcgggggactgatggcgccgattgccgttgccggcgtcgccatcttctcaggcataacgggatctgctacaggctatgaaggtgtgtttattttgccggccttggtcgccatcgccgttgccgtcatttcttactggctgatccgggatacgccgcagtctgtcggacttcctccaatcgaggaataccgcaacgattattcaagcaaatcgaagaaaacctttgaaaaggaattatcaacgaaagaaatccttttcaaacatgtattaaataataaatgggtgtgggcgatcgcacttgccaacattttcgtgtacttcgtccgctacggcgttctggattgggctccaacctatttaagcgaagaaaaaggctttgacatgagcaaatcaagcgtcgcttattttctgtatgaatgggcggggattccggggacattgctgtgcggctggatctctgacaaatggtttaaaggacgccgcggaccggcaggctttgtctttatggcaggtgttttgatcgcggtgcttgtgtactggttcaacccagccggcaatccgatgatcgacatggcatcattgatcgcgatcggattcctcatttacggtcccgtcatgctgatcggccttcaagcgcttgactttgttcctaaaaaagcggccggcacggctgcaggattgaccggtctgttcggttacctgggcggaaccttgacggcgaatgcgctgatgggtgttatcgtcgatgcatccggctggaatgcgggctttacgcttttaaccgcttcatgtgcaatcgcagcactcatatttgcgatgacttggaatgtgcggggacaggaagttgtgaagcattaa

SEQ ID NO: 4759 - DNA, 1881 bp, Bacillus licheniformis
atggctaagagagaattcaaagcagaatccaagcgattgctggacatcatgatcaactcgatttattcccaaaaggaagtctttttaagggagctgatatccaatgcgagcgatgccatcgataaaatctactacaaagcgctgacagatgattcactgacatttaacaaagacgattactacataaaaatctccgcagataaagaaaacagaacgctgaccattgcggacaccggaatcggcatgacgaaagaagagcttgaagagcatcttggaacgattgccaagagcggctcgcttgcgtttaaacaagaaaacgaattaaaagacgggcacgatattatcggccagttcggcgtcggtttctacgccgcttttatggttgcggacaccgtcaccgtcattacaaaagcccatggcagcgatgaagcgcatcaatgggaatcagccggagccgacggctatacaatcgaaccggctgcgaaagaatcagccggaaccgatgtcattctgaagctgaaagagaatacagacgatgaaaactatgatgaatacctggatgttcatcgcttaaaagcgatcatcaaaacatactctgatttcatccgctacccgatcaagatggatgtcgcggtcaacaagccgaaagaaggcgccgaaaatgaatttgaagaagtccaggaagaacagacggtcaacagcatggtgccgatttggagaaaaaacaaaagcgaactgaaagatgaagattatgaggcgttttataaggaaaagcattacggttttgacaagcctctcgcgcacatccatacaagcgtagacggcgcggtgagataccatgcgattttattcattcctgaaaatattccgttcaactactacacgaaggaattcgagaagggtctggaactgtattcgaacggtgtgctgatcatggaaaagtgtccggatctgctgcctgaccatttcagctttgtcaaaggaatggttgattcagaagatttatcgctcaacatttcgagggagatgctccagcatgacaggcagctgaagctgattgccaaaaacatcagcaaaaaaatcaagaatgagctgaagagcttgctgaaaaatgacagagaaaaatacgagtctttttatcaatcgtttggcagacagcttaaattcggggtatacaatgattttggagcccataaagatctgttgaaagacctgctgcttttctattcatcaaaagagaaaaagctggtcacccttgaggaatatgtgtccagaatgcctgaagatcaaaaatacatttattatgcatcaggcgactcgtatgaccgaatagaaaagcttcctcaaaccgagctggtttcggaaaaagggtatgaaatcctttatttcaccgaggatatcgatgagttcgccatcaaaatgctggcgaattatcaagagaaagaattcaagtcggtatcaagcggcgacctcggaatcgaaaacgatgacgagcaaaaccaatctgacggggatgacagccaatacaaagacctgtttgaagagatgaaaaagactctggatggaaaagtgaaaagcgtgagggcgtcaaaacggctgaagactcactccgtatgccttgccgctgacggagaagtcaccatcgagatggagaaaatcttaaacgcaatgcctgacaatcagcatgtaaaggctgataaagtattggaaatcaatacaaaccacgaagtcttcaaaacattgcagaatgcttttgacaacgacaaagataaattcaaactgtacaccggcctcctgtacaaccaggcgctgctgatagaaggcttgccaattgaagaccccgtcgaatttacgaacgatatatgcaaagtaatggcataa

SEQ ID NO: 4760 - DNA, 1536 bp, Bacillus licheniformis
atgagtattgttcatgtaacgaatttgacccatatatatggagaccgcatgatctttcaagacgccgggttccgcctgctgaaaggggaacatgccggtcttgtcggtgcaaacggagccggaaagtcgacattgctgcgcattttgacgggcagccttctgcccgatcatggaaacattgaatggcagccaaacattcgggtcggctttcttgaacagcatgccaagctgacggaaggcacaaccattcttcagtacatggagaaagcgtacggccggctgtttgaaatcgaaaaggaaatgaatgggcttgccgaaaaaatggccgatgccggagacaaccttgaagccgtcctgaaaagatacggagagcttcaggctgagctggaagcttcaggattttaccaaatcggaacgaaaattgaggatgccgcacaaggcctcggcttggcggaaatcgggcttgaccaggatgtcacggctttaagcggcgggcagcgtacaaagctgctgcttgccaaactgctgcttgaagagcctgatgtactgctgttggatgagccgaccaactatttggatgccgctcacattgagtggctgactggctacttgaaaaactatgagcacgcatttcttgtcatctctcatgacgaacgcttcttaaatgaaatcacgacggttacattccatctggagcatcatgtgatcaaacgttattccggcaactatcaatattttctgaaggagtatgcgcaaatcagggcacaggctgaagccgcatatgcaaaacagaacagggaaatcaaaaagttagaggcgtttatcgaccggaacagagtccgaaaggcgaaacaggccaaaagcagggagaaagcattacgcaaaatcaagcgaatcgaaaaaccgacagattcttatgtcccaagctttgcatttaaaacggggcgaaacccggcgatgactgtactcaaaacggaaaatcttgaggccggctacacagttccattatttaagcctctttccctgaccgtaagacggggcgataaaatcgcgattattggagaaaacggcgccggaaaatcgacgcttatcaaaacgctgctcggcgacctcaagcctctgagcggcatcgtcacagcaggacagcatttacaggcggcctatttcaggcaggaaagcccagcttctcatgatacaccgcttgaaaaattgcgggcgttctatcctgatctaccggaaaaagacatcaggcagacgctcgcggtatccggcttgacgccaaagcatatcagccagcccctttttacgctcagcggcggtgaacaggcaaaggtccggctggcggagctgatgctttcaaacagcaacctgcttgttcttgatgaaccgacaaaccatcttgacgcatcggcaaagcatgcgttaaagcaagcgctctgcgactataagggaacgattttgctcgtatcccatgaaccggctttttatgaagactgggtgactcatatctggcagattgaagcatggcgccgttaa

SEQ ID NO: 4761 - DNA, 813 bp, Bacillus licheniformis
atgtacaaactaatcgcgatagatatggatggaacattgttgaatgatcttcatgaagtaacagaggaagtacggaatgccctgcatgccgcgaaaaaacaaggcgtaaaaatcgttctctgcacgggccgtcccctcggcggtgtaagccgctacctggaagaactgaatttaaatgaagacggcgattatgtcatcgcctataacggagcgctcgttcaaaatacgcatactcaggaagttgtgtcagaactgacactgggctatgatgatgtgaaatcgttatatgagctcagccaaaagcttgatactccgatgcacttttttgattcggcttatttgtatacgccaaaccgggaaatcagcccgtataccgtttacgaatcatacgtcaccaaagtgccgctccggttccggacgatcgaagaaatcccgcaagatcttctggcgccaaaggcgatgtacattgatgagccggaaaagctggaccggacgatcgccgcaataccggaagacgtcaaggaacgctatacaatggtgaaaagttcgccgttcttttatgaaattcttcaccctgcggcaagtaaaggaaatgctgttcagcagcttgccgacatattaggcatcgcgcaggaagaagtgatgtgtattggagacaacggaaacgacatgtccatgatcgaatgggcgggttgcggagtcgccatggggaatgcgatccctgaggtaaaagcttcggccgattacgaaacgcgtacgaataatgaaaacggcgttgcccacgccattcgtgagcttgtattgtccaaataa

SEQ ID NO: 4762 - DNA, 1050 bp, Bacillus licheniformis
atgccgcgccaggttaccagcatagccatccccgcggttttggacattagtgagggcgtgcttggccggttggatgagatattgagaaaacatcagtttgacaaggcgatcatgttttttgacgatttttcctatcagcagtatgagcattcactgaaaaccgcatttcaacatgttaaagttgaagccgttctgctgccgtccaatctggacatacaggagcttttgaagcgggcattttcgatcgggaattgcgatgtcattattgccatgggcggcgggtatgttgtggactgcggaaaatacatcgccttttccaagcggaccccgttcatcagcattccgacgtcggcatccaatgacgggtttgcgagcagcaattgctcgcttcaggtcgaaggaaaaaaaacaaccgttccggcaagggttccctacggaatcatagctgatttgagcattattcaaaaagcgccggattgctttattttggcggggatcggagatttgatgtccaatattacggccctttatgattgggagtttgaggagcggcacggggtcggcgatgtaaatgcgtttgcgtcgatgctcagcaagaaagcggtcaacagctttgtccgtacgccgatgcaggatattaaacagccgatcttcttaaaagagcttgtcagttctttgacaatgggcggcatcgctacggaaatcagcggaaacagcgcgccgatcagcggttctgagcacctgatttcccacgccttggacaaaatttcgaaaaaaccgcagatgcacggcattcaagtcggggtagccacctacatcatggcccatgtacaggatcaccgggctgagcggattgaaaaggtgtttacgagaacgggctttttccaatatgtcaaaacgctgaatctgaacaaagatgagtttcgcgaggcgatcaatttgtcgcacactgtcaagcccaaccgctatacgtacttgcatgaagccggctatcgcgaaaaagcgcttcgcattcttgatgaagatccgattctgcaagaaatattttaa

SEQ ID NO: 4763 - DNA, 651 bp, Bacillus licheniformis
atgaagaaatgggcatttgtatcagactttgatgggacgatttccaaacaggatttttactggatggtcattgataaatattttcccgaaggccgtgaattgttcaagaagtggaagtccggagaattaaaagatatcgaatttttgggaaccgtttttgcttcgattaatcaaagcgaacaaaaaatcattgatgacatccattccataccgattgatgaatatgtgcctgacttcattcagcatgtccagaaaagcggcggcgacttctacattttaagcgccggcacggattattacattcattatattttaaagaaatacgggattacagacgttgaggtctattcaaataaaggcttttttaaagaagacaatgttcatatggacattgatgagaatcattggcattactctgagcgctatgggattgataaatcaaaggtcattcaaaagctgaaagaagagtatgagacggtttattttgcaggcgacagtgaaccggattcgcacccggctaaatttgcggatgttacgtttgcaaaggatgcgctccaggatttgctgcgtcagcagggggtgccatttgtagccgttgaaacatttgaagacattgaacaatatcttaaagaaaaagggcggatcgtctaa

SEQ ID NO: 4764 - DNA, 462 bp, Bacillus licheniformis
atggcagaaacgaacccggtgatcaaaaaattgcagttcaaggataatggacagcctgtactgattgtgaatccgcctgaggcatacagcggcgtcatcgctgaatttcaaggccctgttcatcatcacgccgaatcggaccaatatgattttgttcaggtattcgcagcgaccaacgcaaagctgcaggctttagccaaggaggctgaacgtcatttggcggaagacggtctgttttggctttgctacccgaaaaaatcatcgaaagtctacaaaggatcggactgcagccgcgatacagtagccggactgcttgcagaccagggctatgaaccggttcgccaaattgcaattgatgaagactggtctgcgctcagatttcgcaaggcggaaaacatcaaaacgatgaagcggaaatttgccgtaacagagaaaggtaagcagcgtacagatcaagaatga

SEQ ID NO: 4765 - DNA, 960 bp, Bacillus licheniformis
gtgaaaaagaacttattgataatcggtttagttatgctgttgtgtatagtggtcagcgcctgcggaagcggcaatgcgtcaaacggtagcaaagaaaaagcggctgaagaaacgacaagaacatatcaatcaacgcgtggaagcgtgaagattccaacacatccaaagcgcatcgtgacagacttttatgccggtgaactgttcacggtcggcgccaatgtcgtcggctccggctcgtggtctttctccaatccatttttaaaggaccgtatgaaagatgtaacggatttaggcgacccgattaatgtggaaaaagtcatgaagctgaagcctgatttaattgtcgtgatgaacgatgataattacgacaaactgtccaaaatcgcaccgactgttgtgattccttataacacggcgaaaaatgttcaggaaactgttaagatgttcggcgacattgcaggagctaaagaagaagctgaacaattccttgccgatttcgaccggaaatcgaaagcagcgaggaaaaaaatcgctcaagtcgtcgacaaaaatgctactttcggtatttatgaaaacacagaaaaaggccaattctgggtgttcaatgacaacggcggccgcggaggccaagccgtgtacaacgcgctcggcttaaaggcgcctgaaaagattcaaaaagacatcttcaaaaaaggcgaaatcaaagaactttccttggaagtcgtacctgaatatgcagcagactacatgttcgtgacagactataacccgaacggcgacagcaaaacgctggacaagctgaagcagtcttccatttggaaaaaccttgacgccgtcaaaaacaaccgtgtctttatcaacgactttgacacgttctatccgtacgatccgatctctgtcagcaaacaggttgatttgattacggagatgctggtgaagcgcgaaaaggagaataagtaa

SEQ ID NO: 4766 - DNA, 402 bp, Bacillus licheniformis
atgaatgaaaataaaaaggctgaacaggagagaaaaattggatttgaagggtttgtgctccttctttcactgatttttattttcatttttatcacgacagcatacgaaataccgagcaatctgttgctgatcattctatttttcatcggcagcggctactattctattaggctcgtgagcaaaggtctgttgagaaaaaagaggggactcggctttaaagctgcgttttctgcctttgtcgtttggatggcattatcttttttgtttcatgacatttcatatccatttagtttgaaagggttattatttcaaatcatgatgttttttcttttctacattcctttctatttgatctttcaatttgcttttaggttttcaagcattcaagaaagaaaacaataa

SEQ ID NO: 4767 - DNA, 123 bp, Bacillus licheniformis
atgttaacaataatcatccataaaaacaatgatttaacacgcatgccgctgcttcagcccatcactcctgtttcacgtgaaacaaaaaatgcatcgaaaaaatatatggaatcaagtgtgtga

SEQ ID NO: 4768 - DNA, 369 bp, Bacillus licheniformis
atgggaattgaaaaggttggacaaatcggggtgccggttcaagacttggagcgggctgcggcattttatcaggatgtattgggcctgtcccttttatttcagacagatcgcatggctttctttgagtgcggcgaagtgcggcttcttctcagccttccggaaaaagacgaatttgctcatgcaggctccgtcatttattttcaagttgaagatttgccggctgtatatgatgaaattgcaacaaaaggcgtctcttttccaatagagccgcatgtggtggcgaaaatcgagcaaacggaaacctgggtggccttctttgaagataccgaaggaaataccctagctttgatgagtgaggtgaacatataa

SEQ ID NO: 4769 - DNA, 159 bp, Bacillus licheniformis
atgctgtttaatattacgatcggagcgcttatctttagttatgcggcatggacgcttataaaatttgtcaaacgaagccggaaaggaaaatgcgccgcctgtgaattaaatcgcacctgtcaatcggcttgtgatgatgtaaaaacgaaaaacagctga

SEQ ID NO: 4770 - DNA, 2013 bp, Bacillus licheniformis
atgaacagccggcagattgcccttttcggaaacccgaatacggggaagacgtcattgtttaatgcgctgacaggctcctatgagtatgtcggaaactggagcggggtgactgttgagaaaaaggtggggctgctccgtcataaacaaggaatgatagtcgatctccccggtgtttatacattgagtccgctgtcccgcgatgaaggggttgtcacagacttcctgctcaatgattcattttcagatatattgaatattgtcgatgcatcacagttaaagcggaacttgcacttaaccgtgcagctcctggaatttgggcatccgcttacgatcggtttaaatatgatcgatgtcgcaggacagcgcggcgtcttcattgatcatcaaaaaatgtctgatgcgctaggtgttccggtaattcctgtgattgcccgcagcggcaaaggatgtgatgaactgagcaggcatttgctttttgaaaaggaaaagagggcggagccgctcgtcatcaattacggaagcgcagtggaagaagcgattggccggatcgaatcgatcatacccgaactccccggcgttttaaagcgctggatggcccttcaatatttggaaggcaactcgaaaatgaaagaacagctggaggacgcggccgacagcgaaagattaaaggaaatttacgaggagaccgaaaaacgccttcatcaggagcattccgtaagatcgctgcatcagcatatttacaatgagagatcgcgatggattgaccgcatcttgtcaacttctgtgcaatatcagtcagagcgaaaactgacgctgactgaacgcgtggatcagatcgtaacgcatcaggtgcttggcatcccgatttttttgttgttcatgtatctcatgttcatgctgacgtttgattggtttggcgttccattgtctgatgcactggacggtttcatcgggggaccgctgacggaatggacggcctcggcgctgtcggcaatgggagccagcccgtttatcgaggcgcttattctcgatgggattattgccggtgtcggcggtgtgctcgtgttcgtcccgcagatctttatcctgtttttcttcatttcggtgcttgaagattcaggatatatggcgcgtgtggccatggtgatggaccgcctgatggaggcgatcggtttaaacggcaaagcctttattccgctgattatcggcttcggctgcaatgttcccggcgtcatggctgcgcggactgtagagcagcctaaggaaagactcttgacgattatgctgacgccatttatgtcctgttcggcaaggctgccggtttatgctctgtttgcaggggcttttttcgcggcccaccaggctttcgtcgtcctttccttgtatgtgctgggcatcgccgcagcgctggtgctggcgaagtttttatcctcatccaagctcaaagaagaaaagtcgttcttcgtgattgaactgccgccgtaccgtttgcctcaagcgcgtacattgtggcgggcaacatgggagaagggcaaaggcttcgtccgcaaagccggcacttacatttttggcgggtctgtcctcatttggcttctgtcgtatacgggacccggcggaacggacgttgcgatggatgacagttttttagcgatgatcgggggagtgctcgcaccgctattgctgccgctgggattcggcacatggcaggcagcggcatcactattaaccggttttctcgcgaaggaagttgtcgttgcttcgatgagcatcatctattttgtacccgaagcccagctgcaaggcatgatggctgaacaatttacaccgttggccgcttacggatttatggctttcgtgcttttatacgtaccatgcctcgcgacagtagcggtgattaaaaaagaaacaaactcgaaaaagtggatgttcttgtccattgtttacggactggccattgcatatgcgatcgcgttcctgatttatcagggcggacgactgcttgggttatcatag

SEQ ID NO: 4771 - DNA, 228 bp, Bacillus licheniformis
atggttttagccgaattaaaacaaaaagagagagcaagaatcatagatttttcagacgtgaatgaacttgttcagctcagactcatacagctcggaatgaaagaagatgatgaaatttgcgtgaagcgcaaattgccgtttggcggtccgttcatgttcgagtcaggcgggcagtgtctcggcatacggcttggagaagcaaaaaagatcaggattgaaaagctatga

SEQ ID NO: 4772 - DNA, 1089 bp, Bacillus licheniformis
ttgcaagtaaaagaaatttttgtcattcgctgcatctcctgtttaagcgttgttttgcttcatgcgatatcaatggtgctcatggtgcgggcggacatgctcggagatgcggttttccgggttgttgaatctttcagaacgctcctgatgttcagtacgccggcgtttattttcatttccgaatttttgctcgcgcatgcctatcctggtggtgttccggaagggtttttaaaaaagcggtttaaaacaattttcatcccttttctatttatcgctgttttggatgcttttatgaccgcaggtctgatgatgcagcaatttcatgcatcggtcattattaaaaaactgttggcgaatatattcttggggaatttcatcggttacttcattctcgtcatttttcaattttacttgctgcacatgtgcttccattcatttttgcaaaaggcttcgcctaaatgggtgctttcgatttcttttgcggtcacagcggcttatttgagctatttcacgttcattcaacctccggtcgttcaggaggaggcgccgtttcctttttcgtgggtgccgtttcccggctggctcttttacttttgtttggcctattattgcggcaagaattacgagcgctttttggcattgctggaacggtacaggcatgcggtgtatgcggcggctgctgtgaccggatgtttcattgtagcggtttcctacttcggccaagacatcgcggtgacgtcaaagcgtccggatatcctgctttattcgacaagcatcattttcttatgcttccacctgttttcaaaactgaagtcggtaccgaagctgattatgatgatcagcaactattctttttctatttatttactgcacgcttttatcctgattttcgggttggtcatcttaaccgcccttgacagcatcggtacggtatcggctgttttgcttttgtttttcatttctacaggcgctgcggttttcatatcctgggccgtcaataaattgaagtacggctatatgtttgtcggaaaaatttatgtgccgaaaaagaggcgaatggagcaaaaagtgcgccatcatgcaggttaa

SEQ ID NO: 4773 - DNA, 1887 bp, Bacillus licheniformis
atgacctttcgtcagttcgcgtttaacaatgtcattcgcaacaaaaggctgtatgccgcttattttctcagcagcatgtttacggtgatggtttttttcgcatttgcgatttttgctttccacccggtgatgaccagtgattctttgacttccggcatcgggcagcatgcatcctttggcctgctggtcgccggcggcattatttttgtcttctcttttttctttgtgctgtactcgatgagttcatttcttcaatcgagaaaaaaggaattcggcgttttaatgattcaagggatgtcgatgcgccaaattcgcatgatggtatttcttgaaaatatgctgattggattttttgcgacaatcggcgggattgtgctcgggctcgtcttcgccaaattgatactgctcactgcggaaaatgtcctgattattgataacaagctcgatttttacttcccgttgatggcgatgattgtgacgttaatttcttttaacggtctgttcttatttatctcttttcttgtgtcgtttgtgctcaggagcgagaagctgattgttctgttaaaagggaacaaaatctccaaaggggagccgaaagcatctgccttgcttacgctggttgctgctgtgctgcttgccggaggctattacaccgctttgattgtcaaagaaggaggcgttcttgtggcgatggtgccggtgacgattgttgtcattatcggcacatatctgctgtttacgcagctgagtgtttatgtgatccgcaggctcaaaaaacgggaaaccctgttttggcggaaaacgaatatgattttgttttctgatctgtcttacaggatgaaagacaatgcgcggacgttttttatggtggccattatctctactgtcgcattcagcgccattgggacgctgtacggtttccaaactctggtgacaaacggaattaaagagatgaacccgcatacgttctcatataagccgccggaaacaaacaaacacatcgaaaaagacgtggctttcatcaatgacacactggatgaaagaaatatcaaaacagacaaagcttcagctgtccttcaatatttcgatgtcggcggcaatgacatgctgattgtgaaagaatctgactataacaagtttgccgatctcgtcggagccgaccacgtcaagcttgaagacggaaaagcggcggctgccgagtatgaggtcaagatcggcttagagggagatgatgaccagcagctcccttcgtcaatcccttttgcaaatggaaaacaactgaaggctgatcaaacgatccgttcaaaagcgttatctgaacccagctattatattgtgacagacaaagatttcgcacagctgaaaaaaccgaaaagcgaaaaccggttctatgcatggcaggcaaaggaagctgacggcatggctttagtgaaagccggggaggctttgcaaaagaaactggattacatgtatttcggggctgtagattatgaggtatataatataagcaaagggtatggcccgatattatttgtcggactgtttatcggaatcgtcttcttcgtttcagcaggaagcttcctctatttccggttgtacactgatttggacgatgataagcagaaattcaaatcgattgccaaaatgggcttaacagaccgcgaactgcataaagtgctgaacaggcagatcggcatcttgttcttcgcgcctatcgctgttgcccttgtccatggagctgtggcgctgaccgctttatcgcatgcctttcagtacaacctcttcaaggaatctgcaatggtgctcggcgtgttcttcgccatccaggtcatatattacttcatcgtccgcttctactatacaaaacagataaaagcggcgatttaa

SEQ ID NO: 4774 - DNA, 765 bp, Bacillus licheniformis
atgcttcaggtcaaacaagccagtaagatttacgaaggaaaaattgcgtaccgcgcgttaacagatattaacctaacaattgataaaggtgaattcgtcgggatcatggggccgtcgggaagcggaaaaacgaccctattaaatatgattgcaacgatcgatgagccgacgacgggcgaaatattgatcagcggccaaaacccgcatgttctcaaaaaagaaaaattggctaaatttcgccgcagagagctgggatttgtgtttcaggactttaatcttctgccgacattaaccgttgaagaaaatatcgtacttcctttgacgcttgacggcgaaaaggtcaaggaaatgaagcggagggcaaacgaattggccgaaaagctcgggattacccagatcatgaaaaagcgcacatatgagatatcgggcggtcaggcccagcgcgccgctgtagcgagagcgatgattcattcgccgaagcttctgcttgccgatgagccgacaggcaaccttgattcaaagtcatccaaagatgtgatggaaatgcttgagtcgatcaaccgcaatgaaaaagcgaccatgatgcttgtcacgcatgaccctcaggcggcaagctattgcaaccgggtcgtctttattaaggacggaaagctgtattcggagatcaaccgcggcgataaccgccaagcgtttttccaaaagattctcgatacgctgtccttgttgggaggggatgcaaatgacctttcgtcagttcgcgtttaa

SEQ ID NO: 4775 - DNA, 1008 bp, Bacillus licheniformis
atgaagctttttttcaaagagcactatttgttgattgccgtgcaggcgctgcagtttatcacaatgctgtcagtgtactggcttgatgggtatcagcacatcagaccggctttttatgccgtttttctcggctttttctttcttggcttctatcttttctaccattactatacgcgccggaagttctacaaacggatgacgagcgggctggagtcattggatgacaccttcaggcaatcgaatcagccccaatcccctttgtcggaagcgcttgaacagctgctgaaaagccagtacaagcaataccgccaagaattaaagaagctggagcttggccaaaaagagcatttgactttcatggatcaatgggtgcaccaaatgaagacgccgttgtcggtcatcgaactgacggctcaaaatttggatgaaccggaatcatccagcatccgcgaggagaccgagcggatgaaaacgggcctcaatacgattctctatatggccagactgcggacgatcgaacaggattttcgtataaaaccggtcgcattggcggatatcgttcacgaggtcaatcgcgaaaacaagcgcttttacattcgcagtcaagtttatcctaagttcaaagaaatcaaaaaaggcatcaccgtcgaaacagatgaaaagtggctgtttttcatcatttcccagtttgtcaacaatgcggtcaaatattcggcggggaaaagcaatacagtcattatttctgtatacgaaaatgattcggaagcggtattggaagtggcagatttcggcgccggcatcccggatacagatcaaaagcgggttttcgacccgtttttcacaggagaaaacggacgccgtttcagagaatcgaccggaatgggtctttacttggcaaaatcggcggctgaccagctcggccaccggatcgaacttgattcacaagaagggaaaggcacgacaattcggctgattttcacggctacgcaaaaccttacatcgatgtaa

SEQ ID NO: 4776 - DNA, 708 bp, Bacillus licheniformis
atgcaaaaagtgatgattgtagaagacgacccgaaaattgcagatttgttaaaatcgcatattgtcaaatacggatacaacgttcatgtagtgaaagactttgaccgtgtcatggatgagttcagaagcacggcgcctgatcttgttctgcttgatattaacctgccgagctttgacggctactactggtgccggcaaatccgccaggaatcgatttgccccgtcttgtttatttctgcgcggacaggtgaaatggatcaggtgatggcattggaaaacggcggagatgactttatcaccaagccgtttcacgccgagatcgtcatggcaaaaatacgcagccagcttcgcagggcttacggcgaatacgcggcgaaggcggaggaacggctgctggaaaaagaagggctgcggctgtatccggaaagacttgaactgacatttgccggtcaaacggctgctttgacgaaaaaagaagcggatattattgaaagcttaatggaacgccatccgagaatttcaggccgcgaagatttgctggccaagctgtgggatgatcaggcatatgtggatgaaaacacgcttaatgtcaacattacgcgcgtcagaaaaaagtttcaggagctcggtattgaagatgcagtggaaacagtgcggggcgcgggctatcgcttgaatgtatcctgggtgaaggcgggagaggaatga

SEQ ID NO: 4777 - DNA, 372 bp, Bacillus licheniformis
atgaagacacgggcgggcggcctgattgccgcggttctgatcgccgttgccggcgtttttatcctgcagaaagcgacaggaggccttgtgccgctggccgatgattatatacaaggccagggaaagcctgaggcttattatctcaaagctgaggatcatgcagaaaagccggataacggaaagtacaactacacattaaccggctatgacgcgagcggacacaaacagcagattgaggcagaggcagacgaaaaactgcatcccggcgctttcatcaaagtattggcgtacggaacgaaagccaaaagcttgactgaagtacacgaagaagaaatccccgagggcgctttggctgccatgaaaaccaattaa

SEQ ID NO: 4778 - DNA, 1685 bp, Bacillus licheniformis
atgaaagtgaaaacaaaactgctgggaatcatatcaattctagtcgtttcaatcctcggaatcggaatctcctctgtttttatgatttcttctacggtgaaaaagaatgaagaacttaaggacaagatggaatttcaaaaagagattaagcatattcaataccgtctgaccggcttgtcgaatgacgagagagcccttattatgaccggagacgatgaatacagtgaaggaatgaaggacaaggccgacgatgttttaaagagtcttgaccgggccggaaaactgatccgggaaaaatcatacaaagcgaacgtcgaagaaattaaagaaaacttcaaggcttattgggatttaaatcaacaagtcatgcagacttacgcttcaagccttaaaaaagcggaatcgatccatttcggagaggaaagaacattaagaaaagatgtcctcgatccgtctgtcaatcagctggtcgaaagcctggaacaagaggtggatgatctgaaagcagagatcagagccaatgggacgatgagcgaatgggtcatcatcgctgtcacaggagtatcagcgatattgggaattgttttgagtctgctgctcttgaagtctattctggtaccgttgagaagcctgaatcagcagcttgaggacacgcccacggcgaggcggatttaacgaaaaaagtgatcgtcaaaaataaagacgagttcggccagcttgccaattctttcaatgcttttgtccagtcgctgacgcaaattgtgaagcagatcagcagctcgtctgagcaagtcgccgcatcctctgaacagttgtccgcaagcgcggaggaatcgaaatcgacttccgaactgatttccgaagagatgcaggcgattgccgacagcaacatgacgcaaagcgaaatgacagaaaagagttcagaagcaattcatgaattgctggaccgtttatcatccgttgcctccaatacaggcagcatagcggatctgtcgtcttcgatgagagacaaagccgaaatcggctccgagtccgttcataaaatgctcgaacaaatgaacttcattgataagtcagtcgactcggccggcagcggcctgcaggcgctcgtgtccagcacggcggaaatcagcaacatttcttcgctcatcaccgatatttcggagcagacgaatttgctggcgctgaacgcggcaattgaagcagcaagagcgggagagcaaggaaaagggtttgccgtcgtggcggaagaggtccggaaattggcggacgaaacgaataagtcagcgaaccacattcaatcattggtcacaacgatccaaaatgaatcggtagaaacggtaaataatattaaagtcgttcaagaaaatgtcagctccggtatagctttgtcgcaggagacgaccggtaatttcaacgaaattttaaacttggtggaacaggttgcttctcaaatccaagaagtcgcggcttctactcagcagctgacatcaggtgtcgaaatggttcaaaacaccattcaaacattggcttccggatcacaggaaacgtcagccagcacaaaagcggttgcttcctcaacccaggagcagctggcttcaatggaagaaatctcatatgcagcggaatcgctgtcccaattggctgaagaacttcaaaccattatcaatcgatttaaatattaa

SEQ ID NO: 4779 - DNA, 1425 bp, Bacillus licheniformis
atggatatcttagaaatactaggcaagattaataaggtactatgggggccgcccagtttaattttattatttgggacaggcttatttttaacgattgttttaaaaggactgcaatttcgccgcctgatctatgcgtttaagatcgggtttggcaaagaagacagcaaagacgcggctgccgaaggggatgtgagccattttaaggctttgatgacagcgctcgccgctacgatcggaaacggaaatatcgcaggtgtcgcgacggcattgacactcggcggaccgggttcgatcttttggatgtgggttgtcgggctgttggggatggcaacgaaatacgcggaagccttgctggctgttaaattccgcgtaaaaaatgaaaaaggggaatattcaagcgggccgatgtattatatcgaacacggactcggccgcaaatttaaaggactcgccatcgcctttgcgctgtttggagcttttgccgctttggggataggcaacagtgtccaatccaatacgatcgctgatattacgaagaacagcttcggcatcgaaaactgggtgacagggctgattctcgtcattctcgtcagcgtcattatcttcggcggcatccagcggatcagcaccgttgccagcttctttgtgccgatcatggcttttctttacatgggcggggcgatcttgattctgattttgaattatgacaagattattccggcttttgcgctgattttttattatgctttccaccctgtagcggcagccggcggcttccttggaattgccgtatctgaagcggttcggaacggggtatcccgcggtattttctcaaacgaagcaggccttgggacggcggcgctaatcgccggaaatgcgcgcgcagaccatccggtaaaacaggcgctcgtcgcaatgaccgggacatttatcgtgacgatcgtggtgtgtacaatgaccggtttaacccttatcattaccggtttctgggacccgtccggcggcttgatatcaggcgtggcccataatgccagcctggaaggcggggcattgacaagcgcagcttttgcttcagtactcggcgcggcaggcgaatacattgtgtctctgtcggtcattttctttggcttctctacaattgtcggctggtatgtttacggagaaaagtgcttcgaatatttggcaggcgccaaaggaattgcgggctacaggctggtctacatcctcgcctgcggcatcgggacggttgccaacctcgtcaccgtctgggcgtttgccgatatggcgaatgcgctgatgatgattccaaacctgatcgccatcctgctgctttggaaagtcatcaaagcagagacaaatgattattttcaccacttctatgaacataccaaatcggcgggcccgccaagtaaaccaattcattaa

SEQ ID NO: 4780 - DNA, 1131 bp, Bacillus licheniformis
atgatcattggaattcctaaagaaattaaaaacaacgagaaccgtgtagccattactccggccggagtagtcgcgctaaaaaaaagcggtcatcaagttttaattgaacagggagccgggcttggaagcggattcgaggacgccgactacaaagcagccggggcggacattttggctgaagcgaaagatgtgtggggaaaagcggatatggtcatgaaagtgaaagagccgatcagctctgaatacggctatttccgaaaaggacttgttttatttacttatctgcacttagcggctgaacctaagcttgcgaaagcgcttgtggacagcggcgtcacagccatcgcttacgaaacggtcgaagtgaaccggacgcttccgctcttgactccaatgagtgaagtcgccggacgcatggcttcgcagatcggcgcgcaatttcttgagaaatcaaaaggcggcaaaggcatcctgttatcgggcgtacccggtgtaaaacgcggcaaagtcacgatcatcggcggcggagtggttggtacgaacgctgccaaaatcgctgtcggacttggcgctgacgtcactttgatcgacttgagcgctgagcgcctccgtcagctcgatgaccagttcggcaaagacattcaaacgcttatgtccaatccgctcaacattgcggaagccgtaaaagactcagaccttgtcatcggcgccgtcttaattcctggtgcaaaagcgccgaagcttgtcacagaagagatgatcaagtcgatgtcgccaggttcagttgttgtagacgtggcgattgaccagggcggcattatcgaaacggttgataaaatcactacgcatgacgatccgacttacacgaagcacggcgttgtccactatgccgtcgccaatatgccgggagccgttccccgtacatcaacgatcggcttaacaaacgtcaccatgccttacgccttgcaaatcgcaaataaaggcgttgaacaagcagtcgccgaaaatcaggcgctcgctctcggcgtcaacgttgcaaacggaagcatcacctacaaggccgtcgcgcgcgaccttggatatgaatatgtatctgtagaagatgcatttcaaacggtaaccgctggttaa

SEQ ID NO: 4781 - DNA, 1278 bp, Bacillus licheniformis
ttgatgaagaacgtgctggctgtttttgtggtgctgatatttgttttgggcgcatttggaacaagcggtccggcggaagccgccagagattcagggacggcaaaaagcgacctttatgttgaaaaggtttcagggcttcgcaaggattttataaaaggggttgatgtttcgagcatcatcgctttggaagagagcggcgtcgccttttacaatgaatccggaaagaaacaggatatattcaaaacgctgaaggaagcaggcgtcaattatgtccgggtgcgcatatggaatgatccctatgatgccaacggcaacggctacggagggggcaataatgatctggaaaaagcgattcagatcggaaaacgggccactgccaacggaatgaagctgctggcggatttccactattccgatttctgggcggacccggcgaaacagaaagcgccgaaagcatgggcgaacctaaactttgaagataaaaagacggcgctttatcaatatacaaaacaaagccttaaagcgatgaaagcagcgggcatcgacatcggcatggtgcaggtcggtaacgaaacaaacgggggccttgccggtgaaacggattgggcgaagatgagccaattattcaacgccgggagtcaagcggtgcgagagacggattcgaatatcctagtcgccttgcattttaccaatccggagacgtcaggaaggtacgcttggattgccgagacgcttcatcggcatcatgtagactacgatgtgtttgcaagctcgtattatccgttttggcatggcacgctgaagaatttaacatccgtcctgacatctgtcgcagatacgtacggcaaaaaagtcatggttgctgagacatcttatacgtatacggctgaagacggagacggacacggaaatacagctcccaaaaacggccaaacgctgaattatccggtcaccgttcaagggcaggcgaacgcggtccgtgatgtgattcaagcggtcagcgacgtaggtgaagccggaatcggcgttttctattgggaaccggcatggattccggtaggaccggctcaccggctcgagaaaaataaagcgctttgggagacatacggatcaggctgggctacaagctatgctgctgaatatgacccggaagacgcaggaaagtggtttggcggcagcgccgtagacaatcaggcattgtttgattttaaaggacgtccattgccgtcgcttcatgtgtttcaatatgttgatacgggaacaccattcaaaaattga

SEQ ID NO: 4782 - DNA, 2055 bp, Bacillus licheniformis
atgccaaaaatttatacgacccaagcaagatacatgcttcacgggggagactacaatccggatcagtggcttgaccgtccggatattcttgcagatgacatcaagctgatgaagcttgcccatacgaatacattttcagtggggattttttcatggagcgcccttgagccggaggaaggcgtctatacgtttgaatggctggatgatatttttgagagcattcaccggaacggcggccggattatattggcgacaccgagcggcgcccgtcctgcttggctgtcgcaaaagtatccggaagtgctgcgcgtgaatgctgaacgcgtcaaacagctgcacggcggaaggcacaatcattgcttcacttcatacgtataccgtgaaaaaacgaaagagatcaaccgcatgctggctgaaaggtacggcagccagcatgcccttttgatgtggcatgtttccaacgaatacggaggagaatgccattgtgatcaatgtcagcacgccttcagagactggctgaaaaagaagtacaaccatgatattaaatctttgaatgacgcatggtggacgcctttttggagccacaccttcaacgattggtcacagattgaatcgccgtctccgatcggggaaaatgcggtgcacggcttgaatttagactggcgacgcttcgtcactgaccagacgatctctttttttcaaaatgaaatcgttccgttaaaggaaatcacgccgaatattccgattacgaccaattttatggcggacacgcatgatttaattccgtttcaagggctggactacagcaagtttgccaagcacctggacgtgatcagctgggacgcgtaccccgcctggcacaacgattgggaaagcacagcagatttggccatgaaagttggctttatcaatgatttgtaccgcagcctgaaacagcagccgtttctcttaatggaatcgacgccaagcgctgtcaattggcacgattttaataaagcgaaacggccgggcatgcacctcctgtcttctgtgcagatgatcgcacacggatctgacagcatcctctattttcaatggcggaaatcccgcggctcatcggaaaaatttcatggtgcggttgtcggccatgacaattgttccgagaaccgcgtgtttaaagaagtggcaaaagtcgggcaaacccttgaagcgctgtctgaagtcaccggaacgatccggcctgcggatgtcgcgattctctacgattgggaaaaccattgggccctccaagatgcacaaggattcgggatgaaaaccaagcggtatccccaaaccctgcacgagcactaccgcgcgttttgggagcgtgatattccagtcgacgtgattacgaaggaacaggatttttcatcgtaccggctgctgatcgttccgatgctttacttagcaagcgaagaaacaatcgcgcgcttaaaggcatttgctgccaacgggggcacattggtgatgacctatattagcggaatcgtcaacgaatctgatctgacctatttaggcggatggccaaaagatctgcaagagatgtttggcatggagcctgttgaaaccgatacactctatccgggcgataaaaatgcggtccgttatcaaaaccggtcgtatgagctgaaagattacgcgaccgtgctgaagctcagtacggcagatcccgagggattctatgaggacgacttttatgcggacacgacggctgtgacgagccatccatacaaacaggggaaaacgtattatatcggtgcgcgtttaagcagccaatttcatcgggatttttatggaacattgattaaagagcttgcgattcaaccggctcttgacgtgaaacatcagcctggcgtctccgttcaagtcagacaggatgaggaaaatgactatattttcatcatgaatttcacggaaaaacgtcagcccgtcgtgttggcgtcggcagttaaagatatgctgaccggagaaacgctggccggcgaagtcacattggaaaaatatgaggccagaatagcggtaaaagcaaaagaatag

SEQ ID NO: 4783 - DNA, 840 bp, Bacillus licheniformis
atgaagaaaagaagattctttcggctccttctgacctattctctgttggcttttatgacagccgttatcatataccctctgctttggacggtgggggccagctttaatcccggcaacagtttggtcagcacttctatcattccggcaaatccgacattggatcactataaagaattattcgccggcaaagagagcctccaatacgggcaatggtatataaactcgctgaaaatcagcatctttacgatgatcggatcggtcatcagcgtttcttttacagcttatgctttttcacggtttcgttttaaaggaaggaaaaacgctttagttttattcttgctgctgcaaatgattcctcaattttcggctttggttgcgctcttcgttttagcgcagatgcttggaatgatgaacagccattggctgctgattttgctgtacatcggcgggctcataccgatgaacacgtatttgatgaaagggtatatggactccattcccatcgatttggatgagagcgctaagattgacggcgcaagcaatacaaggattttcctgcagattattatgccgctatccaaaccgatgatcgcggtcgttgccatgaacggattcaccgggccgctcggggatttcgttttgtcttcgacgatattgcggacaccggagtcgtatacattgccgatcggtttatacaatttagtcaatgaggtgatgggagccagctatacgacgtttgccgccggcgctattttgatcagcataccggtagccgtcatctttatcatgctgcaaaagaactttgtgtcaggattgacggcaggcggaacgaaaggatag

SEQ ID NO: 4784 - DNA, 1257 bp, Bacillus licheniformis
gtgcagcatcgcaaaaaagctttactattatcaattattcccggtctgggccaattctacaataaacaatggataaagggtctgttattccttcttttaggcgtctcgttctttgcggtttttggcgatttgctgaatatggggctgtggggcctgtttacgcttggaaccgaagtgccgcgcgacaactcgatttttctattggcagaaggcattattgctgtgattgtcacctgttttgggctggctgtctattacgccaatttgcgggacgcctaccaaaacggaaagaggcgcgatgaacaaaaggagctcagttcactcaaggaacaatatcataatttaatagctcagggatatccgtatctcatcagcgggccatcgctgttcatcctggtttttgccgttgtttttccgattttgttcagctttgcattagcttttacaaactataacctctaccattctccgcctgcccgccttgtcgattgggtaggaattaaaacgttttccgaaattttcaccgttgatatttggcggtcgacctttttggatgttttagcttggaccattgtttggacgcttgtcgcttccacgctccaagtcgggttgggaattttgttggcggttgtcgtcaatcagaaggaagtccgctttaaaaaaattttccggacgattcttgtcttgccttgggccgtgcccggttttgttaccattctcgtgtttgccggcctttttaatgacagcttcggtgctttcaatcatcaaatcctcgccgcattcggcatcgatccgattccttggatgacgaatgccaattggacgaagctggcgcttattcttatgcagggctggctcggatttccgtatgtgttcattgtaacaaccggtgttctgcagtcgattccggatgacctttatgaagcggcgacgattgacggagcgtctgcgttttcgaaattcaggcatattacactgccgctgattttaatcgcgatggcgccgattatcattacgcaattcacttttaattttaataacttcaatattatttatctattcaatggaggcggtccggctgttcccgggtcaacagcgggaggaaccgacatcctggtgtcctggatttacaaattgacgatgcagtcgagccagtactctttagccgccgcattgacgatcctgctgtcggtctttgtcatctcaattgcactgtggcagttcagacggacaaattctttcaaagagggggcttaa

SEQ ID NO: 4785 - DNA, 1269 bp, Bacillus licheniformis
atgatgaatatgaaaaaatatgttggaatcagcagtgtcattgctctcagtttgtctttaactgcctgcgggcctaaagagagcagcaatggagcatcagactcgaagcaaaaggaactcgtggtctgggaagataaagagaaaagcgaaggcattaaagatgccgtcgcccaatttgaaaaagagcacggcgtatctgtcaaagtcgttgaaaagccttacgcaaagcagatcgaagacttgcggatggatggaccggcgggaacgggtccggatgtgttaacgatgcccggagaccaaatcgggacagcggtaacggaaggtttgatcaaggaattaaaggtggacaaagagatccaatcgatctatacggaacctgccatgagatcgcaggtgacaaacggcaaggtctacggcctgccgaaagcggtcgaaacgacgatgctctactataataaagatttaatttctgaaaaagaactgccgaaaacgctggatgaatggtatgagtattccaaaaaaacggctgacggcaaaaaattcggcttcctggcgctgtttgaccagatttattatgcacagagcgtcatgggagggtacggcggctacatttttaaaagcgatgccgacggcacttatgatccggccgacctaggcttgaacaacaaaggtgcagtcgaaggcgccgagtacattcagaagttttaccaagaggggctgttccctgccggaattattggggagcagggcatcaatgtgctggaatcgctgtttacggaaggaaaagcagcagcgatcatttcaggcccgtggaacctggaaccgttcaaaaaagcgggtatcaattacggggttgccaagctgcctaaactgtccaacggcaagcatatgagttcttttgtcggcgtgaagagctacaatgtaagcgcttattcgaagaatgccgatctagccgaacaattagtcgtcttcctcgccaataaagaaaactcaaagaagagatatgagatcacaaaagaagttcccgcagtcaaagaactggcggatgatcctgccgtcacaaaaagcgaagcggctcaagccgttgccgagcaatctcagtactcagagttgacaccgaatattcctgagatgaatgaagtatggacgccggcggatgcggctctgcaaacaattgcaaccggaaaagccgaaccgaaaaaagcgcttgatcaagccgcggaaacgatacaaggacagatcaaagcgaagcacagcggcagcaaataa

SEQ ID NO: 4786 - DNA, 126 bp, Bacillus licheniformis
gtgaaagcgctttacaaaaacaatatagcatgtcttaggaaaagtgtaaacaattattttacttattccagtaaaatgttttacgaaaaaagcgcggcttgtgaacagcagcccgcgcttttttaa

SEQ ID NO: 4787 - DNA, 993 bp, Bacillus licheniformis
gtggcgacgataaaagatgttgcagaaaaggcggggtattccatctcaacggtttcccgcgtattgaataacgacgaaagcctttccgtacccgatgagacgcgggagaaaatatttgaagtggcggaaagcctgaactaccgcaagaaaacgatcaggacactggtaaaaaacatcgcgtttctgtactggctgacggataaggaagagctcgaagacgtgtattttaaaacgatgaggctggaaatcgagaagctcgcaaagcaattcaacgtcgaactggcaacgtataaaatttcgggaggcattgacgccattcccgaaaacatagaaggattcattgccgtcggctcgttttcagatgatgaattaatccgattaagacagatgacgcctcacggtgtatttatcgattcgacgcctgatccgaatcactttgattcagtgaggccggacttaaagcagatgacgaggaaaacggtagattttctcattgagaaagggcatgaaaagatcggctttatcggaggtacgtaccacaaccccaatacagatgaagacgaaatggacgtaagggaacgaacgtttcgcgaatatatgaaggaaaaagggctcttggaggaaagctttattttttgccggaggggtttttcggtggaaaacggctaccatctgatggacaaagcagttgaaacattgggagaaaagctgccgacggccttttttacagcggcggatccgattgccgtaggctgccttcaggccttaaatgaaaaagggatcgccatcccgggcagagtcagcatcatcagcatcaacaacatcagtgtagcgaaatacgtatctcccccgctgacgacattccatatcgatattaaagagctttgcaaaaacgctattgaattgcttttggaacaaatacttcaaaaaagaaaagctttaaaaacgctatatatcggtgccgaactggtggtcaggaaaagcaccaattaa

SEQ ID NO: 4788 - DNA, 1170 bp, Bacillus licheniformis
atgaatactgcagccgctttatcaaacgactttcgttctatttttaagacagaaaagacaccgcgaaccttttttgctccgggaaggatcaacttaatcggcgaacacacggattataatggagggcatgttttccccgcctcgatttcatttggcacctatgcccttggcgtgaagcgcgatgatcaaatgatccgcttctattcaaagaacttccctgacgaaggaataattgaatgcagcttgagcgatttagcctttgaccagtccgacggctgggccaattatccgaagggaatgttccttttgacgaaagcggcaggccatcaaatcgttcacggcgccgatattttgtattacggaaatattccgcagggagcgggcctctcttcttccgcatcgattgagcttgcgacaggcgttttgttaaaagggctttatgatttgcagacagacacgatctccatggtgaagctcggacaaaaagtcgaaaacgaatacattggcgtggggagcggcattatggatcaattcgcgatcggcatggggaaaaaggatcacgcgattttgctagactgccgtacacttgattacacatacgctcccttcgtgttgaaagaacacgatgtgatcatcatcaatacaaacaaacagcggacgctggccgggtctaaatataatgaaaggcgcgcccaatgtgaagaggcgctcggcgatctgcaacaggagttgtcgatcgcaagcctgggcgaattgacgatggaaggatttgaagcccatcagcacctcatcagaaatgaaatcaatcaaaaacgcgccaaacatgctgtctacgaaaatgcccggacgctgaaggcgcttgaaaaacttcgcgaaggcgacctcgccggatttggcaagctgatgaatgaatcccatttgtcattaagggatgattatgaagtgacggggctggagcttgatgccattgtccaggcggcctgggaacaagacggtgtccttggcgcccgcatgaccggcgccgggttcggcggctgtgcgattgcgattgtagaaaaagaccggacagacagctttaaagaacgcgtgaatgccgtctaccgcgaaacggttggctatgatgccgctttttatactgcggcaataggcgacggcgccaaagaaatatag

SEQ ID NO: 4789 - DNA, 1002 bp, Bacillus licheniformis
atgagcgtgttggttttgggcggtgccggctatatcggttcacacgccgtgtaccaattaatagacagaggcgaaaacgtcgttgtcgttgacaacctcgagaccggccaaagacaggcagtacatcctgatgcgatcttttatgaaggggatgtgcgcgatcgcgatttcctccgcacggttttcgaaaaggaacgtattgaagaagtgatccattttgccgccagttcacttgtcggcgaatcgatgaaagatccgctcaaatattacgacaacaatgtatccggaacacaggttttgcttcaggcgatgctcgagcacgatgtaaaaaaaatcgtattctcctcgacggcggccgtctacggagagcctgaatcggtgccgattacagaagacatgccgacaatgccgacaagcacctacggggaaacgaaactgatcatggaaaagctcatgaagcggactgaagaagcccatgggatcagctttgtgtctctcaggtacttcaatgttgcaggggcaagggagacgggagaaatcggagaagaccaccgtccggaaacacacctagtccccctcatcctgcagaccgctctcggccaaagaccgcatataacgattttcggcgatgactatgatacgcccgacggcacatgcatccgcgactatgttcatgttgaagacctcattgacgctcatctgtcggcattagactatttaagaaaaggcggcaaaagcgatatattcaatctcggcagcagcgaaggattttcggtgaaagaaatgattgatgcggccagaaaggcaaccgggaaagacattaccgccgagatcggcaagcgcagagccggcgacccgagcatcctgattgccggctctcacaaggcaaagcaagttctgggctggaggccttcgcgcacatctgtagcaaagattattgaagatgcatggaagtggcattcctcgcatccaaacggttacaggaaggaagtgtcaacatga

SEQ ID NO: 4790 - DNA, 1488 bp, Bacillus licheniformis
atgattgaacaagacatagccggactcattcaaaaagcgcttgaagcagggttaatcgaaccggctgacgtgaactacgcgcgcaaccaagtgatgaatctgctgggcttggaatcgtttcctgaggaagccactgctgcttccggcgactccatcccagaccttttggaaaaactcgcagcctatgcagtcgaacacggcgtgataaccgacgatctagacgcgaaagacatgctggcggcaaatgtgatgaactgctttgttgcaagaccttctgtcatcaatgcagtgttccagcagaaatacgaacaatcgccgctggcagccaccgaatatttttatcagctcagcaaaaacagcaactatatccagacgaagcgaattgaaaaaaatatttcgtatcagatggatacgccttacggcacaatggatattacgatcaatttgtcaaagccggaaaaagaccctgaacaaatcaaacgggaacgcgccgctgcaaaacaatcgcgcagctatccgatgtgcctgctgtgcaaagaaaacgaggggtatgcgggacgaatcgggtatcctgcccgggcaaaccacaggattattaaagtcccgctcgccggagaaaactggtattttcaatattctccatattcttactataacgaacacagcattttattttctgagcagcatcggccgatgaaaattgataagcttgcctttcacaggctgcttgcttttactgagctgtttccgcattattttatcggatcgaatgccgatttgccgatcgtcggcgggtctattttaagccatgaccattatcaggccggacgatatgagtttgcgatgacgcgcgcggaaggcgcgttctcctttcaaatcaaacagcatccggccatcgaagcttccgttttaaaatggccgatgtccgtcatccgcttgaaaggaactgcgatcaacagccttgttgaagcggcggaccatatttttcagacttggaaaaactactcggatcaacaagcggatatctcggcttttacagatggcacgccacataacacgattacgcctatcgcaagaaacgtgagcggcgtttatgaaatcgaccttgtgctcagaaacaaccggacatctgccgagcacccatacggcatattccatccgcatgctgacgttcaccatattaagaaagagaatatcggcttaatcgaagtgatgggcctggccgtccttcctccccgcttaaagaccgaattggcggcagtgaaagaattcctgctcggtcagtcagatgccgttgaagcgcatcaccgggaatgggccgaacagctcaaaaccgaatacggagagatgtccgaaccggagcaggctgaatcaattgtacgaaaagaacttggcaagaaatttgtcaaagcccttgaggacgccggagtattcaaagaccgcaaagctttcatgcgctttatccgcacagtcaatcatcaggggtaa

SEQ ID NO: 4791 - DNA, 1173 bp, Bacillus licheniformis
atgcagcgcggtacatttcaattaatgaaatcggtgaacaaatcgatcattcttaataaaatcagaacttcagagccgatttcgagagccgagatcgccaaggaaacaaagatcacccctcccacggtctcaagcattgtcaaagagctgatcgaacaagggctcgtgaaagaaagcacgctcggccattcgagcggcggaaggaagccgaccatgctccacatcaacacaggtgcctattatgtcattggcattgatgccgggcctgagacggtggagtgcatcttaaccgatttagccggagggatactgcagcggacatccagcctgctgaaaaaaccgctgacaaacgagaggttcatggaagttttaaaagaaagtgtctatgccattttgggacgtgccgatgtcgagcaagaaaagatcatcgggatcggcattgcaatgcacggtgtggtcgatgctgaaacgggaatgtcgcgcatcgcaccgattttaaacttaaccaatatccccatcaaagatgtgctggaacaagaattcaacttaaccgtaagagttgaaaacgatgcccgggcgatggcgcttggcgaatcgtggttcggcggccgcgatgacgcagggagcatggctgccgtgaatatcggccgcggcgtcggtgcggggatcgtcatcaacggaaaactgtaccatggagctgaagggatcgcgggtgaactgggccatatgatcattgatatcaatggagaaaagtgcgagtgcggcaaccgcggctgcctgcagacgattgtgagcggaaaagcaattgccgaacgggggaaaaagcggttgaaagaaagcactgacagcctgacagccaaagatttgtttgaaatggccgagaacggctgccaaacatgtatcgaactttttcaggaaaccggtgtgatcatcggaatcgggctgaccaatttcattcatcttgtcaatccgggcaaaatcgtgctgggaggaggagtgatgaagggcgggaggttcatattgccggcgatacgagaaacgatacagcagaaagctttaacagccgaagcgaggcagacagaagtgacgataacgaagctcggcgatgaagcgacgctttacggagccgtttcattgctgctggcggagctgtttgatccggtgctaaaataa

SEQ ID NO: 4792 - DNA, 126 bp, Bacillus licheniformis
ttgccacagaaatggtcaaaacataaagggcacctgctccctttacttttttgcttcaggggggctttcaaagcgcttctgcaaaacaaatggtttctaaatggaaaaatttttcaaaaaatttaa

SEQ ID NO: 4793 - DNA, 732 bp, Bacillus licheniformis
atgagcgaatctaaaggccttttatatccggagaagtggctttctagagcttcaactggtgttcgcgtcgcatgcgagctgagaatgcgcattatttccggtttaattgaaagcggtaccattttatctgaaaataaattggctgcggaattctcggtgagccggtctcccatccgcgaggctttaaaaatactggcatcggaaaaaatcatccgtttggaacggatgggggccgttgtcatcggtttaaccgaaaaagaaataggagaaatttatgatgtgcgcctggtgatggaaacattcgtattcgaacggcttggacaggccaatgtcgacgaactggtaacagacctcagcaaaatattggagatgatgaaagtctccatcaaatacaaagatgccgacgagttctcatttcaagacgtcttatttcacgaaacgattgtccgctccatcaatcattcttacattttgatgatatggaacaatctcaaacctgtgatggaaagctttattcttttatccatgcgggcccgcttaaaagaaaaatacgaagactttgaacgaattctcgataaccatgaactttatattcaagcgatcaaaacgaaagacagggatctgatgcttaaatccctacatcaaaatttcgatgacgtacaaggtaaagttgaagatctatggctgtcgcaacaaatgctggcgaaaggagccgaacaacaaaatgactag

SEQ ID NO: 4794 - DNA, 1542 bp, Bacillus licheniformis
atgactagttatatgttaggcatagatatcggtacgacaagcacgaaagcggttttattcagtgaaaaaggggacgtgatccaaaaggaaagcatcggctacccgcttcacacgccggacatctcgaccgctgaacaaaacccggatgagatctttcaggccgtcatccagtcaacggcgaaaatcatgcagcagcatcccgacaaacagccgtcattcatttcattcagcagtgcgatgcacagcgtgattgcgatggacgaaaacgacaagccgctcacctcctgcatcacttgggcagataacagaagcgaaggctgggctcataaaatcaaagaagaaatgaacgggcacaatatctacaaacggacgggaacgccgattcacccgatgacgccgctaagcaaaatcacgtggattgtgaacgaacatcctgaaaccgctgccaaagcgaaaaaatatatcggaatcaaagaatatattttcaaaaaactatttgatcaatatgtcgttgatcactcattagcttcggcgatgggaatgatgaatctcaaaaccttggcctgggacgaggaagcacttgcgattgccggcatcacgcccgaccacttatcaaagctcgttccgacaacagcaatttttcataattgcaatccggaactggcggcgatgatgggaatcgatccgcaaacgccgtttgtcatcggcgcaagcgacggcgtgctgtccaacctcggcgtcaacgcgattaaaaaaggcgaaatcgccgtcaccatcgggacaagcggcgcgattcgcacgattatcgatgagccgcaaaccgatgaaaaaggcagaatcttttgctatgccttaactgaaaaccattgggttatcggcgggccagtcaacaacggcgggatcgtccttcgctggatcagagatgaatttgcttcatcagaaatcgaaaccgcaaaacgcctcggcattgatccatatgatgtcttgaccaaaattgccgaacgcgtcagaccgggtgccgacggactgctgttccatccatacctcgcaggcgaacgggcgccgctctggaatccggatgtgcgcggttcattcttcggcctcaccatgtcccataaaaaagaacacatgatccgcgcggcattggaaggggttatttacaatctgtacaccgtcttcctggcgttgacagaatgcatggacggtccagttgcccgaattcaggcgaccggaggcttcgcaaggtctgatgtgtggaggcaaatgatggccgatattttcgaatcggaagtcgtcgtgccggaaagctatgaaagctcttgtcttggagcctgcattttgggactgtacgcgacgggaaaaatcgattcgttcgatgtcgtctccgacatggtcggaagcacgcacagacacgcgccgaaagaagaatcggccaaagaatacagaaaattaatgccgatctttatcaacttatctcgagcactggaaaacgagtatacacaaattgcaaattatcaaagaagcttaaccagcaaaaaatag

SEQ ID NO: 4795 - DNA, 1347 bp, Bacillus licheniformis
atgccattattaatcgtagcaatcgggattgtcgcattattgcttttgattatggggttaaaactgaatacgtttgtttccttgattatcgtatcgttcggtgttgcattggcacttggaatgccgtttgacgacatcgtcaaaacgattgaacaaggccttggcggaacgctcggccatatcgcattgatcttcgggctcggcgccatgctgggcaagctgatcgcggattcagggggcgctcagcgcattgcgaagaccctcgtcaacaaattcggggagaaaaacatccaatgggcggtcgtcatcgcctcctttatcatcggggttgctttattcttcgaagtcggattggttttattgattccaattgtattcgcaatttcaagagaattgaagatttctattttatacctcggaattccgatgacggcggccttatccgtcacacacggcttcctgcctccgcatccgggaccgacggctatcgcgggagaactcggcgccaatatcggggaagtgctgctctacggtatcattgttgcaattccaaccgttcttttggccggacctttatttacgaaactggcgaaaaaaatcgtaccgcaatcatttgagaaaatgggcagcatcgcttcactcggtgaacagaaaacgttcaagcttgaagagacgccagcctttggcatcagcgtcttcacagctatgcttccagtcattatcatgtcgatttcgactattattactctcattcaagaaacaatgggacttgcagacaacagcttcctggcagcgattcgtttaatcgggaatgcctcgacttcgatggtcatctccctgttggtcgcgatttatacgatgggtatcgccagaaagatcccgatcaaacaagtgatggattcctgttcaaccgccattactcaaatcggaatgatgctcttgatcatcgggggcggcggcgcattcaaacaagtcttgatcaacggcggagtaggcgactatgtagctgaattattcaaaggaacggccatgtcgccgatcttgctcgcctgggtcatcgccgcgattctgcgcatctctttaggttccgcgacagttgctgcattaagcacgaccggactcgttcttccgatgctcggacaaagcgatgtcaatcttgcactggttgtgcttgcaacaggggccggaagtgtaatcgcttcccatgtcaacgacgcgggcttctggatgttcaaagagtatttcggcctgagcatgaaagaaacattcgccacctggacactgcttgaaacaattatcgcggtggccggattaggatttactttattgttaagtctatttgtataa

SEQ ID NO: 4796 - DNA, 1404 bp, Bacillus licheniformis
atgtgcaatacaatcggtgtcataggtttgggggtcatggggagcaatatcgccctgaacatggcaagcaaaggcgaacaagtcgccgtctataactacacaagggatttaaccgatcaactcgtccaaaaaacgggaggccaaacagtcaagccatactatgagcttgaagatttcgtacagtctttagaaaagccgcgaaaaatctttcttatggtcacagcaggcaaaccggtcgattctgtcatcgactcgctcgtccctctgcttgaagaaggggacgtcatcatggacggcggcaactcccactatgaagatacagaacgacgatatgacagtttgaaagcgaaaggaatcggctacttgggaatcggcatttccggcggcgaaatcggcgctttaaaaggcccatccattatgccaggcggagaccgggacgtctacgaaaaagccgctccgattctcacaaaaatcgccgcccaagtggatggagatccatgctgtgtctacatcggtccgaaaggcgcgggtcattttgtcaaaatggtgcacaacggcatcgaatacgcagacatgcagctcatcgccgaagcatatacgtttttaagagaaaagcttcttttgccgatagatgaaatcgctgacattttcgacacgtggaatcaaggagagctgaacagctatttaatcgaaatcacggcggagatcctgcggaaaaaggatgagaagacgggcgctccactcatcgacgtcatcctcgacaaaaccggccaaaaaggcacgggcaaatggacgagcctgcaggccgtcgacaacggcattccatcatcaattatcacggaatccctgtttgcccgttacctgtcatcattaaaagacgaacggacagctgcggaaaaagtattggccggacctgcaacagaagaacggcgcctggatcaaaacgtgtggatcgaccgcgtcagacaggcattatatatgggcaaaatctgcgcctatgcacaaggcttcgctcaatacaaaatgacatctgacctgaacggatggaacctgccgttaaaggacatcgccctcatcttccgcggcggctgcatcatccgcgcacaatttttaaatctcatcagcgaggcgttcgacaaacagccggacctgtccaacctgctggtcgcacctgacttcgctgaaaaactaaaagaataccagtccggcttgcggaaggtcgtctgcgaaggcatcagctcaggcatctcattcccgtgcctaagcactgccctttcctattacgacggctaccgcacaggccgctcaaacgcaaacctcctgcaggcccagcgcgattatttcggcgctcacacgtatgagcggacggatatggaaggcgtgtttcatacggactggtattaa

SEQ ID NO: 4797 - DNA, 120 bp, Bacillus licheniformis
gtgcattcttatttcactcaaatggattttcatactttgttcaacatttcacaaacttacatttcaaattcgtgctatgataaattcagcaacagaaaaggaggactgatgccaaaataa

SEQ ID NO: 4798 - DNA, 2604 bp, Bacillus licheniformis
atggcaatcgaagaaaaggacatgaaacaaaagcaaaatgccacaaacatgattgatcagctagtcgaaaaaggcctaaaggcattggaagaattccgcagctttgatcaggagcagattgatgagatcgtcaaacagatggcgcttgccggccttgatcagcacatgcctctcgccaaacttgccgtcgaagaaacgaagcgcggcgtttatgaagataaaatcattaaaaacatgtttgccacagagtatgtctaccatcatatcaaatacgataaaacagtgggcatcatcaatgaaaacgaacacgacggagtcattgaaatcgcggagcctgtcggtgtcatcgccggcgtgacgccggtgaccaaccctacttccaccaccatgttcaagtccctgatagcgatcaaaacaagaaatccaatcgtgtttgctttccatccatccgcccaaaaatgcagccgtgaagctgcgagaatccttcgggatgcagccatcagggcaggagcacccgacaactgcatccaatggatcgaaacgccttctctggatgcaactcaagccttaatgacccacccgaacgtttccctgatcctcgcaacaggaggcgcaggcatggtgaaatccgcttacagctccggaaaaccggcccttggcgtcggacctggaaacgttccatgctacatcgagaagtctgccaacctgaagcaagccgtcaatgatctgatcttatccaaaacatttgacaacggcatgatttgcgcatcagagcaggccgtcatcatagacaaaggcatctactcagacgtcaaagccgaaatgacaagaaacaactgctatttcttaaataaaaccgaaaaatcaaaggtcgagaaattggtcatcaatgaaaatacttgcgcggtaaacgctgatatcgtcggcatgccggcattcaaaattgctgaaatggccggtatcaaagtgccgcaagatacaaaaatcctcatcgccgaattagaaggtgtaggtccggatgacccgctgtccagagaaaaactgagccctgttttagcgtgctacaaagtcagcgggcttgaagaaggattaaaacgcgccgaagagatgctggcgttcgggggaaccggccactcggcggtgattcatacgaacgatcaagaagccgttaaagaattcggcttaaggatgaaggccggccggatcattgtcaatgcaccgtcgtcacaaggagcgatcggcgacatttacaacgcctatatgccttctttaacgctcggctgcggcacatatggcgggaactccgtctcgtcaaacgtaggggccgttcatttaatcaacacgaaaaaagtggcgaaaaggaatgtcaatatgcagtggtttaaagtgcctccaaaaatctattttgaaaaacacgcaacccaatatttagcgaaaatgcctgacatctcaaaagcgtttattgtgaccgatccgggaatggtgaaactcggatatgtagaccgcgcccttcactacttaagaaggcgcccggattacgttcattgcgaaattttttctgatgtcgagcctgatccttcaatcgaaacggtgatgaacggcgtcgacatgatggccaaattccagccggatgtcatcatcgccctcggcggaggttcggcaatggatgccgcaaaaggaatgtggatgttctacgagcaccctgatgctgaattctttggcttaaagcaaaaatttctggacatccgcaagcgcatcgtcaaatacccgaaactgggaggaaaagcaaaattcgtcgcaatcccgacgacatcaggcacaggttctgaagtcacttcattctctgtcattacagacaaagaaacgaatacaaagtacccgctggccgattatgaattaacaccggatgtcgcgatcattgacccgcaatttgtcatgaccgtgccgaaacatatcacggccgacacaggaatggacgtattgacacacgcaattgaatcatacgtatcgtgcatggccaacgactatactgacggcttggccatgaaggccatccagctgatcttcgaatatctgccaagagcatacaaaaacggcagcgacgagctggcccgcgaaaaagtgcataatgcatcaacgattgccggaatggcattttccaatgccttcctcggcatcaaccacagcttagcccataagcttggcgccgagtttcagatcgctcatggacgggcaaacgccatccttctgccgcacgtgatccgctataatgcagcgaagccgaaaaagttcacggcatttcctaaatacagccacttcatagccgaccagcgctacgcggagattgccagaacgctcggcctgcctgcaaaaacaactgcagaaggcgttgaaagcctcatccaggagatcatctcgcttgccaaagagcttaaaattccgatgagcattaaacaaaacggcgtggatgccgccgcattcgaaagcaaagtagatctcatggccgagcgcgcctttgaagatcagtgcacgacagccaatcctaagctgccgctcgtttcagagctggctgagatttaccgttccgcatataaaggagtttag

SEQ ID NO: 4799 - DNA, 564 bp, Bacillus licheniformis
atgtctctaatcggaaaagaagtacaaccattcgcagcaaaagcttacaaaaacggtgagtttatcgatgttacacacgaagatctgaaaggccaatggagcattttctgcttctatccagcggatttctcatttgtttgcccgactgagcttgaagaccttcaaaaccactacgaagctctaaaagaactaggtgtcgaagtatactctgtttctacagatactcacttcgtacataaaggatggcatgacagctctgagaaaatcggcaaaatcacttacgcgatgatcggcgacccatctcaaacgatctcccgcaactttgaagtgctgaacgaagaagaaggtcttgctgaccgcggaacattcatcatcgatccggacggcgtcatccaagctgttgaaatcaacgcaggcggtatcggccgtgatgcgagcatcctgatcaacaaagtaaaagcggctcaatacgtccgccaaaacccaggcgaagtttgcccggctaaatgggaagaaggttctgaaacactgacaccaagccttgacctagtaggcaaaatctaa

SEQ ID NO: 4800 - DNA, 1530 bp, Bacillus licheniformis
ttggtacttgaagcaaatatcaaagcacaattaaaccaatacatgcagatgattgaaaatgacatcgtccttaaagtcagtgcaggcgatgacagtgtctctaaggatatgctggctcttgtagaagagctggcttccatgtcatcaaaaatcactgttgaaaaggcgcagctcgacagaacgccaagcttcagcgtcaatcgtgccggagaagatacaggcgtgacattcgccggggttccgctcggtcacgaattcacatctttggtgctggcactcttgcaagtaagcggcagaccgccgaaagtcgatcaaaaaatcatcgatcaaatcaagaacatcagcggcgagtaccgcttcgaatcttatatcagcctcacatgccacaactgcccggatgttgtgcaggcattgaacatgatgagcgtgctcaacccgaacatctctcacacaatgatcgacggtgcggcatacaagtcagaagtcgaaagcaaaaacattatggctgtgccgactgtatacttgaacggcgaatcctttggaagcggccgaatgacgcttgaagaaattcttgcgaagatgggcagcggcacagatgcgtctgagctttctgataaagaaccgttcgatgtactcgttgtcggaggcgggcctgccggcgccagcgcagcaatctatgcggcgcgcaaaggcatccgtacgggaatcgttgccgaacgcttcggcggccaagtccttgacacgatgagcatcgagaacttcatcagcgtgaagcgcaccgaagggcctaagcttgcggcaagccttgaagaacacgtgaaggattatgatatcgacgtcatgaacctgcaacgagcaaaaggcctcgagaaaaaagaccttttccatctagaactcgaaaacggcgctgttctgaagagcaaaaccgtcattctttcaactggcgcacgctggcgcaatatcggcgtacccggcgaacaagagttcaaaaacaaaggtgtcgcatactgccctcactgtgacggaccattgtttgaaggcaaagacgtcgccgtcatcggcggcggcaactccggcatcgaagcggcgattgaccttgcaggcatcgtcaaccatgtgactgttcttgagtttgcgccggagctgaaagcagacaaagttctgcaaaaacgtctctacagcctccccaacgtgactgtcgtgaaaaacgcccaaacaaaagaaatcacgggcgatgaaaacgtaaacggcattacttacgtagaccgtgaaacaggagaagaaaaacacgtcgagctccaaggcgtcttcgtccaaatcggtcttgtgccgaacacggaatggctgcctgaaaccgtcgaacgcaaccgcatcggcgaaatcgcagtcgacaaacgcggcgaaacaaccatccctggattgttcgctgccggcgactgcacagacagcccgtacaaccaaatcatcatttccatgggatccggagcaaacgctgctttaggcgcgtttgactacctgattcggaattaa

SEQ ID NO: 4801 - DNA, 628 bp, Bacillus licheniformis
atgtatttttcggcaaagaaaaaaataagaggctggaaaagactgaaacgaagaatagaatggtggaaatcagacaatattcaattgaatatggaatatttaagagatcatcatagagattacgttaaattatggatatcccctttttacgggcttcaaacagtgactcctccattatggtataaacgcttgcttttggaggcgatgatcgatgtctatcatgaatggcataagcaattgaaagctgaaaatgaagatttctacttgaaaatttggttgtatgagcctgattttatccgttcacaaattgtggctgcttaaagaagcgattgatttttacagtggttctttcgacaagcaagaagaaaaagaagcgttctctttgaaaatatacgaacctttagaacatgagctgaatgcatttgaatgggaacctcatattcataccgtgtattaccggctatctgatctggaggaggacctcgaactaggattgagaagcagcggcgatgtgctgcgcataaaagaaatgtcctattcaaaagataatgacggaaaagatgagtggtataaagtgagcgcaggaactgtatgggttggttcattaaaagaggggccgcagaaataa

SEQ ID NO: 4802 - DNA, 1014 bp, Bacillus licheniformis
gtgtttaaaaaaccaaaagttttcatagcagcggttatcttagctctcagcagctttgcggggacggctgcatatgcgcaatcaggctactttaatacgtataccgattatgtttccatgtctaagtcggggtatttcacggcgatgcaggggatgtgcgtcgaccgcaataacaatgtgatctacgctgcaaaattgaataacacgaatcacacgacgcagttattctctgtgaaaatgagcggtacggcaagcaatagaaccgttgcacttcttaaaaattcggataccaatactacgagctatgatttagggcacgccaatgacttggctgtcaaagcatctgcgggcgataaaagcgtcagcgtttatgtggcgccgatgtctgacggcactaagtatgccaataaaatcgtgaagctcagcgtcgatacaacgaaaaatacttataaagtggctaaaacatatgtgctgaattatcaaggttcgaatttgtcgattggcggtatcacatactcggttgggacggataaatttatcgtaagatcgggaaaaaggttctttattgggacattcaatgatacaaccggaaaattcgactatgaagcaacgtttaaattaaactattcgaaagctgttgtgaatcatcagacaatggatgtttcgcatttcattcagcaaggaatttccttttaccaggggacattgtatgtgccgcttacaaaaccggacagcaatggcaatgcttcaaatgtgagcattatattgacgtaccctttaaatatcaatgaaatgattaaagagcaaaaaacaaacccgattcaggacttttcgaaggaattgtttactcgcagcgatttatctttcagaattaccagcagtgcatacacgctttttgaaatagaggctgtcgattttgatgacgggacgctttactttaatacgaatcgcggaaaaagcggaacgcaaaacgatatgatcgcgacatttaatgattataattattataagtaa

SEQ ID NO: 4803 - DNA, 1644 bp, Bacillus licheniformis
atgaatgaacttgtgtttgaaaagagagaatttactcaagaccatgtgaatgttgtaaaagcaatgcatataaataactatccgattgtttatatcctttataacgagaaaaagaaaccgactgcatatattggacaaacggttcaagctgcacggcgtttgaaaaatcatatagatgatgaaaagcgaaagagtttgaatcgctttattttaatcggccatgagaaatttcatcagtctgcgacatacaatattgaatcaaatttaattaactattttatcgccgataaccgctaccagctgcaaaacgtaagccagaccaggtctagggaaatgcacaattactatcagaaacccttttataatgaaaatatctttcaagtcatttgggagaagctgagaaaagagaaaattgtgaacgattctcttgaaaaccttaggaataaagacatttataagttatctccttataaagagctctcgcctcagcagcttgatattaaaaataagatccttgatttctgtaaagaacgtatacaaaaagaaggaaatcatgtcattgttattgaaggagatgccggcacaggtaaaagtgtcctgttaagctctctgtttaatacgattcaagatttggctaagagtgaagactcttttttgaaagaaacagataattacttgctggtaaatcacagcgaaatgctgaagacttataagagcatcgccaacagcttaccgaatttaaagaaaaagagtttcatgaagccgacaccatttattaatgagaagaccaagacgggagcaacagcggatatcgtattagtagatgaagctcacctgcttctgacaaaggaagattcctataaccatttccgctaccaaaaccagctggatgaaatcattaagcgaagtaaaatcactgtggtgatctttgacccaaaacaagtcttaaagattaaaagttattggaacgaaagattgctcgaggaaatcattaatcagtatgatgcgaaaaccgtaaaactgacagaccaaatgagaatgaacgccaatccagaaacaatcaagtggattgacagctttgttgaaaagaaagttcttccctttccgactgaagactcctccttcgagcttaaaatatttgaagatgctgctgcgtttaaaacagctattgaacgcaaaaacagtgaagacggtctctcccggattgtctcgacctttgattatttacataaaaaagataaaaagacttacatcgttgatgaagaagggattaacatgccctggaacagcacccaagataaagtgacatgggcggaaaatccgaattctattaaagaagtcggctccatttataccgttcaagggtttgatttaaattacgtcggcgtcgttctcggcccttccgtaagctatgatgaagaaaaagacgaactggtaattgatacttccaaatacaaagatacaggggcattcgtgttacgtacagatttgtctccagaacagaatgaacaaattaaagaacaaatcatcctaaattcaataaatgtcctgatgaagcggggcatacaaggcctctatatttatgcgacagatcctaaattaaaaaagagactactcgagttagaaaggggaaaatggtcatga

SEQ ID NO: 4804 - DNA, 312 bp, Bacillus licheniformis
atgaacgatatccaaagcctgatcaacgcaatcaacgaattcagagatgaacgaaactggaggcaataccataacccaaaagacctcgccatctcaatttccatcgaagcagcagagctgctcgaagacttccaatggatcagcagtgaagaagcactcaaagcaaataaagaaaacatccgtgaagaaatcgcagatgttttgatctactcattcatgctgtgcaacgatcttggactggatgtgaaagagattgtggaagagaagattgtgaagaatgggaggaagtatccggttaatcataatggttga

SEQ ID NO: 4805 - DNA, 897 bp, Bacillus licheniformis
atgagcaatgttgtaagcttaacgaatgtgacaaagacattccgccaaaaaacggcggttgatcagatagatttttcaattaaaaaaggagaaattgtagccattctagggccaaacggagccgggaaaacaacaacgatttcaatgatattggggctgttaaaaccgacggcaggcaacatcacattattcgattccatgccgcatgaaaaacgggtgcgtgaaaaaatcggcacgatgctccaggaagtcagcgtcatgcctggtttgcgtgcaggtgaaatcatcgaactcatccggagctactatccaaagcctctatcctttcaaaagcttagaacgttgacaggtttgacagacaaggatttaaaaacacaggcagaaaagttgtccggcgggcaaaagcggcgtctaggctttgccttggcgcttgccggcgatccagaactgatgatctttgacgaacccacggtcggcatggatatcacttcaagaaaccgcttttggcaaacggttcaatcgctcgcagagcaaggaaaaacgatcattttttctacacactacttacaggaagcagatgatgccgcgcaacgaatcttgctgtttaaagacggcaagatagtagctgatggaacgccgctccaaataaaatcaagaatatcgaagcattcggtttcatttatagttgatccggaacagtcactcgagaagctgtatcagcacccagaaaccgaacagatttttcgtaaaaacaaccgggtttacatcgacacggccaatacggacaaaatactggaactcattttctcagaaaagatcggcgcttatgatattcaaattgagcgcggaaatctcgaagaggcatttcgccagctgacaagcaaaggagacgagtaa

SEQ ID NO: 4806 - DNA, 738 bp, Bacillus licheniformis
atgaatgtatttcagatgcagtgcagaatggaaatcaaaagaatgcttcgaaaccgctattttgtcttttggtcattggccatgccgattgctttttattatatttttacaaatgtcgtcaatacgaatgctccagaccctgcggcatggaatgcgcattatttaatgtcgatgacaacattcagcgtcatgggctcttcgatcatgacgctcggcatccgcatggttcaagaacgcacccaaggctggtcgacgttcatacgcgtaacgcctcttcccgaccacatttattttatcgctcaaatgtcggggcaaagcgtcattcatattctttcgatcacagtaatcttcttagccggcgccttgatcaacggcgtttctttatccccattggaatggttcctgtgcggattgtgggccctgcttggctcgctcccgtttctggcgatcgggacattgatcgggatgatgaaaaaagtggatacagcagccggaatcagcaatgtgctgtatatggggctcgccgtatgcggagggatgtggatgccgcttgaaattatgccaaaaatgatgcagaatatcggccattggctgccgtcctatcattatggcagcggcgcctgggaaatcgctcgaggtcaaatgccaaactggaaaaatattctcttcctattagcctattcaatcgttattatgctactatctaaatatataagaagaaaacaagaagcggtgtga

SEQ ID NO: 4807 - DNA, 1140 bp, Bacillus licheniformis
atgaaaaaaaacttcagcatgtttccgaaacggtacggcttttttccttatatctttttaatctatttactgctgcccatttcttatttgacaaatcagacctcgggaatcaaacagctgatcggttttggactcgtgctgcttttcttggtgacgtaccgccagcttttttttattccgccgcaaaaaaaattatttacttattggctggccatccagctttcaatcattttaatctacactgtattttatgatatcaacttagtatttttaggctttttttcagcgaactttatcggctattaccgggaaaaaaagacgttccggtgcggccttgccagcctggttgttgtattggtcgccccttttatctatcatctgctgaatgatcgttcactgcaaaaccagctcttttattttctgccttttctcgtgattatgctcatttcaccatacggcatccgctccatgaaccgccgcatggaactggaacaaaagcttgatgaagcaaatcagcatattaaggaactggtcaagcgcgaggagcgtgtacgaattgcccgcgatctgcacgatacacttggccatactctttcactgctcacattaaaaagccagcttgtccagcgcaccatcgccagcgcccccgaacgggcgcgaacagaagcaagagaaatggaaaccacatcaagagcagccttaaaacaagtccgggaactcgtgtctgatatgaaaacggcaactattgcagaagagctcatccacatccagcaaatcctgcgggctgcggacatcacattcgagtacatgggaggttccgatttttcaaatatccctcctgtcacacaaaacatagtcagcatgtgtatacgcgaagccgccacaaatatcgtcaaacacagccgcgccacccattgcaccatttccatctctcaaacagatgataaaataagcattaccatcaaagacgacggaatggggatggatcagcaaacaccatttggtaacggcttgcgcggaatgaaggaaagacttgcattaatcgacggcgctctcgacgtttcaacccatgacggcacagttttaagcatcgccgttccaaatgtaaagaaagctgaaggaaaggaagcaatccaatga

SEQ ID NO: 4808 - DNA, 603 bp, Bacillus licheniformis
atgattcgtttatttattgccgaagaccaaagaatgctgttaagcgcgctgggatccttgcttgatcttgaagaagacatggaagtgatcggccaggcgacaaacggcgaagaagcgctcaccgctattctgaagctagaaccggacgtctgcctcatagatatcgaaatgccggtcaaaagcggactggaagtggccgaagagctcgcaaagcaaggcgcaaaaacgaaaatcatcatcctaacgacgtttgcgcgtcccggctacttcgaacgcgccgtcaaaagcaatgtccacggctacctgctcaaggacggggaaatcgacgatctcgcagacgccatccgaaaatgcacggaaggcaaaagaacctttagtccggaacttaccttcaacgctgtccgcgaaacaaacccgctcaccgaacgcgaacaggacatcttgcgactggcatatatcggaaagacgacaaaagaaatttctgaggagcttttcttgtcgtcagggaccgtccggaattatatttctgagattatgcagaagctggatgcgaaaaaccggatggaagcggcaaggattgcggaggggaaaggatggatttga

SEQ ID NO: 4809 - DNA, 1974 bp, Bacillus licheniformis
gtgtataaacgtattatagtggctgtcgcgggcgcgttgtttgctctgcttgcgctactggcggcgattatcaccgacctatatgatcgagactttcctcaggcgattggtgccgagagcaggttaaaccttgatttcagcgaatcggggctttctattactgaagcgtttgcgaagctggagaagctcgatgcacgctggaatcttgggctggtcaaggttgcgccagaccttgcaagcgacggcgatggccaggtctacgtagcacttaacgatagagatctgcccgacgaatttacttggtttggcggcgatggtgcaggcaagattgtcggtaaggaccggcttgaaacctcctaccccgatgggttctatctcgtgaccggtgaaaaggctcacttgagcgagtttgaggacacgctgaaaagtgaaggcgtgaaggtcggtcgcggggatgcgtccatttttaaaagccttgaattcgttgtgcgagaaagaggatttgctgccgctgtacttgcagcatttgcgctgattgcggcgcttgcattgttctggttgtcgttaagagcgcgtgggcgtgctcttcgggttctgggcgggtgcccgacctcgcggattcaggttcaggacctggccgggttcgggggggcgctgctggtttcggcggtggctgtagcactggttgcgtcttgctacgtaggtttgtttcatggctggatatatgtcggtaccttcctcaaggcgctgttcagtctgcaggtcgctgttattaccgtatccctgttggctacgctgatcatgtcagcttccgcatggcctagcgctaccatgatcgccaccagacaacctgctgttaaaagcttgcgttcagctgccatcgtgatccaggcgttaacgttcctcctggtggtagctgcggctggacctgcttggtccgcatacaaacattcctcagctatagctgctgaaatggctcagtggaagaaactcgcagatcaagttgcgattgtgtttgcgacagacgttgacgagatgaaccacatggagccgcagattggtaaactggtaaaggatgcggaatcgcttgataaggtagctttttcctacacatatactcaagaaatgccaatgccagccgattttggagagtactcggccatctcttacgtgaaccagcgttggcttgatatggtgaccatggatgcaccacagcctgctgttacaaaggtgccttatcatagcattccaaaagggcttgtcaaaatgattcgagaagaggccgagcttttgtcgaggaaagagctttccgatgagcagttcggtaagttcaagttcttgcggccgatcgacggattccggttgccggtagcccaaggaggaggaggggaaagacttcactttgcggacgatgtcctagttgttgtcgtgccctcgctctacgatacttataacgattctgctttgacttccatggtctcaggtagcaacatcgtattcactggtgtaactgctacgcaggaattgttagggaaacacggccttgacgtgaaggcactgcgtgatcgagatatcaacggtgaactgaaagttgtctatgttgccgaagaggggattctccgcgcgcagttcgcagcgtacgttgtatggttgttgaatcttgcgctgattgcattagttattgctttcactgtcgctgctgcgattagtgcattgataaccgcgctgctgcaggcgaagcgtgactttccgctgcgggtggcaggccagtcatgggtacggattctccggagccgtgtagccaaagaaatgcttgttggggtcggccttgtgggcgttgttgttttgctccaaaggcctgatgagataggggctgtactagtggccgcggtgtatgggttgcttgttgtgccgctgagtcatctgtttgctgtacgttggtgttttgatagagccagcaaacggcgaatttga

SEQ ID NO: 4810 - DNA, 357 bp, Bacillus licheniformis
atgaaatcaaccacgaagatcattatcggtgtcgtcataggattattgcttgcagttggaacaattgcattcctaaacggatggatcacagtgtcaagagacactcatccgccgtgcgatcagctgccgaacgtaacagaggccaatgcagcgctttccagacatcaagacctcgtcgaggagattaaagctttgggtgatgacattacggtcgaagtaggaaagccgtgtcctgatgacgagaaccaagggctggtcatggttagctatggttcaagatccgagcatgacgcaatctccgacctgctcagccgccgtgacgggtttggggtcccagtgcacctggtgaagcgctaa

SEQ ID NO: 4811 - DNA, 696 bp, Bacillus licheniformis
atgttgattgaagcacagggcatttcagtagcaattggtgggcggaccgtgcttgatggtgagaccgttcagtgcccgccaggggtcatgacagccctcgttggtccaagcggatgtggaaagactacacttttgcactgcctcgggctattgctcccggttaatcagggacgcatcttgatagacggacacgatgtcacaagctacggtactgcggcgcggcggcggttttggcgtgatcatgcggcgttcattcttcaggattacggcattatggatgaggagtcggtggcattcaatgtcaccatgcaggcgagcatccttgggcggcgtgtcacgggaaaccaagagcggttggcgcaggtgctcgagcagacgggtctccagggtcgagaaggcgagttggctagccaccttagtgggggcgagaagcagcgactcgcactggctcgtgccatctacaaggacgctgcattcttgtttgtcgatgagccgaccgcctcgcttgactcaaccaatcggcgaaaggttatcgatctgtttgcggacttcgctgcgcgtggccgcacggttattgtgtctacgcacgactctgagatgatcaacgcgtgtggtgctcggcataaggtcggttccagcagttcgtcaaaaccattgtcgaccaacgatcccggcaacttaggaggtaactcatga

SEQ ID NO: 4812 - DNA, 144 bp, Bacillus licheniformis
ttgaggggcgcggcattttatgcgccccgagtatttattcttaaaatttttaaattaatgtatctatataaaaaggagatgctttcggtgtactgccaaagcatctccacaaaagatagtgcatatctgcaggaaaaaacataa

SEQ ID NO: 4813 - DNA, 381 bp, Bacillus licheniformis
atgaaaaatcatttgtatgagaaaaaaaagaggaaacctttgactcggacaattaaagcgacgctcgccgtgttgacaatgtccatcgctttggtgggaggcgctacggtgccttcatttgcatgggtgaatccgggttatcactaccagtacccatcggaaggtggtacatggaggtatggattcgtaaacgccgggctccgttctgagtacaaccacccgacaaaggtccacggctcgacagtgcaaaagctcatcgatggaaaagtggataaaacgaatagaagtattgatacggctgcgggccgctactctaatgcctatgtcggagccataaactcacctggtcttaagggtcgttactactatcgcaccaactaa

SEQ ID NO: 4814 - DNA, 120 bp, Bacillus licheniformis
atgctgactcctgaagatcatttgatccggttagccagtgagaacgtggaccgtgtggctctatcattcagaaatactccgaatgtggaggaactcgcacaatccgcctatgctgtttaa

SEQ ID NO: 4815 - DNA, 159 bp, Bacillus licheniformis
atggtggaagaagtcaaagaagcggatgtcaaagatgaaggactgctctctcttttcccgaagacgatccgccgcaaaattcaatatcgtagaaatcggcttgcaaaagccaacgcggcattacaagaactggaagaacgcacacctgaagaaaaatag

SEQ ID NO: 4816 - DNA, 87 bp, Bacillus licheniformis
gtgaaacgccaaacaactactgcggatgccaaacactatagtcctgaaaacatcctgccaaagaaacaaatcaaacaagatacctaa

SEQ ID NO: 4817 - DNA, 480 bp, Bacillus licheniformis
gtgaatatatcaatcgtagcaatcggaaaactaaaagaaaaatatttaaaacaaggaatcgatgaatacgtaaaacggctttcggcatacgcaaaagtcgacatcatcgaacttccggacgaaaaagcaccggaaaacctaagcgaccaggacatgaaaatcgtcaaagacaaagaaggcgaacgaattctctccaaaatcagcccagacgcccacgtcatcgccctggcgatcgaaggaaaaatgaaaagttcggaagaattagccgataatatggatagactcgccacatatggaaagagcaaggtaaccttcgtcatcggcggctcgctcggcttaagcgacgccgtcctgaagcgcgcagatgagaagctgtcgttttcacggatgacatttccgcatcagctgatgaggctgattttgctcgagcaggtttatcgggcttttaggattaatcgaggggagccttatcataaatga

SEQ ID NO: 4818 - DNA, 159 bp, Bacillus licheniformis
atgaagtcttgcgaagagcatattgaaacggtcattgacatgtatgtggatgaggaagaattggccccggaaatcagaaaaatcgaacatacacacagtttatccacaacctgtgaattgtgtgataagcctgcagtatatatagtggggaacgaatga

SEQ ID NO: 4819 - DNA, 540 bp, Bacillus licheniformis
atgacaaggataaaaagacctggaagaacagttttaaggaaagaagagtgtttcagcatgagtaaggaattagaggaatttccgaaaataaaacccttatatgcggtgttattaacgatcataacgtccggcatatacatcccgtattggtttctctcaagaagaaagaatttagaacgatgccaaattaagctcccgtatgtcgccattaaagtgacgctgctgttaagcgtcttttcaattttggagcctttttggactttttattcaatcacatttcaaagtgaagacctgctgccatacagcaacagcattttgcttctcccgctgcgccccggacacagctttctcccgcagctctcattcctccttttttggacggtaaatttatatagtgcatttaaggttagaaaagcgtttattgggctgtcggaaaagcaggttaacgggttttggactttcattcttaacgtttcatatttgcagtatattacaaatcagcattctttagttgttcaggaaaaaagagaagcagtataa

SEQ ID NO: 4820 - DNA, 522 bp, Bacillus licheniformis
ttgatgttgaaatcgaaaattaaaattgacttgaacaaaccgagaaaaaagccggaaatccgtttgacgccaatgacggaagaggactttaagatataccagacctattccatccagcattacgccatggagaaagtaaaagcgggcacatggacagtggcggaagcgatggagaaagcagaagagcagtttgcggcccttttgccaaacggtattgaaacgatcaaccattatctatggtcaatcatgaacgacagcgggaacgccgcaggctgggtttggatctacgctgatccgcaccaccctcaaaaggaagcgtttatttacgatttcgggctttatgaagcgtaccgcggccagggaatcggccagcaggctttagccgtcttagaagaggaggcaaagcaattaggagtcaaaaagctgtccctgcatgtattcgcccataataaaaaagcgaagcgactatatgaaaaaatgaatttcgagacgacagatttgcatatgagcaagagactgtaa

SEQ ID NO: 4821 - DNA, 471 bp, Bacillus licheniformis
atgaacgacaatgtgcaggctgcgttgaaaacgctgtctaatgtaaagagcagaagtatcttgtccgtttttgtgctatgtctgatcacactgggggtttacataccatactggtttctatccaggaaaaaaagcttcgatttgctgccttatcatgatattccctacaccacgttaaaagctatcatattttatcatttattttctattccaattagaatatcagcaaaaatcgcttttcctgacatgcattacagcctgtatatgctgctcgaccgcgtgattttgattctgtccgcaggtgttttgatatactgcgcactggtggtgactgcttcattaaacaagctttcaggcaaagaacctgcgaatggatcgatttttgccttccttttgaatatcatttacattcagcacagaatcaataaactttccgagccgaaaagcgaatggctgagcaaagcatcatga

SEQ ID NO: 4822 - DNA, 846 bp, Bacillus licheniformis
atgagtcagcatgcacttgtattacaatctgattttggccttgatgacggggcggtaaatgcgatgtacggtgtggcttattcggttgacagttcaattcggatttttgatttgacgcacaacattcccgtttttcacatttgtgaagcttcctatcggctgctgcagtccgtttcttattggcctgaaggcactgtcttcgtgtcggtcgtcgatccaggggtcggctcagaacgccgcagcgtcgcagtcagaacctcttccaatcaatatatcatcacaccagacaacggaacactcacccacatcagccggcaaaatggaattgccgaggcgcgctatcttgatgaagcgcaaaacaggcttccaaaatcaggcgaatcacatacattccatggacgcgacatttacgcctacaccggggcaatactggcagccggcgctctcagcttcgacaggatcggtccggaagtttctatagattccatcgtcaaactgccggtcatggaagcgtacatcgaaaatgattggataaccggaacgatcgatattttagatgtccggtttggaaacctttggacgaatatcagccggacgctcttcaagtcacttgatgttcaatacggagatccagtagaagtcgtcatcaagcatgaagacacaaaagtctatcagcaaacgttggcatttggccggtcgtttgccgatatgcctgtaggcaagccggttgtttatatcaattcattagaccgcttgggcattgccctcaaccaaggatcatttgctaaaacataccatattggcacaggcatcaactggcggatttctcttcgaaaaagtatatag

SEQ ID NO: 4823 - DNA, 108 bp, Bacillus licheniformis
ttggaattcacacccaaaaattcgattattcactcagaaaaaatctcatttcactctccaaaaatcacattttttccttttgacgatcattcgttgggcgcttcataa

SEQ ID NO: 4824 - DNA, 1212 bp, Bacillus licheniformis
gtggagtttaatcatgatgaggaaaaattcgttcgggaaaagccggtgagaagttggagaagctttttgttttcaagcctggtcggcgccgtcatcggcgctcttttaacattgtttgccttgccgtatctctcgcagcagggatggctgccgtataatctgcaagtcatcgaagcgcgcggcggccaaggagcacagcagggcgggacggtccgcaatgtatccgtcaacgtgaataatgaagtcacgcaagtggtctctaaggtttctgattctgttgtcggcgttatcaacatccaaaagacaggtgtatgggatggtgacagcgaagcgggaacaggctcgggcgttatttataaaaaggacggcaacacatcccacattgtgacaaaccaccatgtcattgaaggggcgtcccaaatagaaatcagcctgaatgacggaacacggattccggcaaaactgatcggcagcgataagctgatggatctggccgtcctgcaagtcaacagcaacaaaataaaagcagctgccgaatttggagattctgataaagtgaagacaggcgagcctgtcatcgcgattggaaacccgctcggcctgcagttttcaggctctgttacacaaggaatcatctcaggaaccgaacgcgctgtgccggtcgattccaacggagacggacagccggactggaacgccgaagtactgcagacggatgctgccattaacccgggtaacagcggaggcgggctgtttaatattgatggaaaagtcatcggcattaattcgatgaaaatcgctgaatcagccgtcgaaggcatcggtctgagcattccggccaaccttgccattccggttatcgaagatttggaaacgtacggtgaagtgagacggccgtatctcggaattgagatgaaatcacttggcgatatcgcaagctaccactggcaggaaacgcttaaactgccgaaaaacgtaacatcaggcgtagttgtgatgggtgttcagccggtatctcctgcaggcagagccggtctgaaagagctcgatgtcatcgtcgaatttaacggtgaccgtgtttacgatatcgttgatctgcgtaaaaagctttacaccaaaaacgtcggcgacaaggtaaaaatcaaatacctgcggggcggaaaagaaaagacaacagaagtaaagctgacccgatcccaattaggaagctga

SEQ ID NO: 4825 - DNA, 795 bp, Bacillus licheniformis
atgagcctgcaatttagcgtacttgcgagcgggagtaccggtaatgctttatatttggaaaccgatgaccacgcttttttagttgacgcaggacttagcgggaaggcgatggaagggctgatggcgcaaattgatcgaaagcttgatcagctcgacggcatctttgttacacatgagcacagtgaccatataaaagggcttggcgtgctggcaagaaaatatgagctgcccgtttacgccaatgaaaaaacgtggaaggcgatggaagggcatatcggcaaaatggataacggccaaaagttcgtttttccaatggaaaccgtcaagtcattcggctcccttgatgtcgaatcgttcggggtatcccatgatgccgcagagccgatgttttacgtttttcattacaatggccgaaagctcgctttgattacggatacgggctatgtcagcgacagaatgaaaggcatcatccgctcggcaaacgcttttgtttttgaaagcaatcatgatgtcggcatgctgcaaatgggccgctatccgtggaacatcaagcgccggattctaagcgacgtcggacacgtatccaatgaggacgcggcactcgcaatgaccgatgtaatcggcgatgagacatcgagaatttatttggctcatttaagccaggacaacaacatgaaagagctggcaagaatgtctgtgcagcaaacgctggctgccaaaggatttgcggcaggagaaacgtttgacttatatgataccgatcctaagaaaccgacgcctctcgtagcggtgtaa

SEQ ID NO: 4826 - DNA, 849 bp, Bacillus licheniformis
atggagtggaatagaacaaaaacaatcttcattatcgtcttcctcatccttgatatctttttggcctttcaatactttgataagcgcagcaacaatcagtttccgattttagaaaaatcaacgctgcaggaggatatgaaagcagaccatatttcatacggcaatttgtctaaagagacgtcaaaaggctcctcaatctctgcacaaaagcgagtctttaagcaaagcgagattaaatcgttaaaagggcaaaagccgaaggcgttaatgaataccgcaaaagagaacgctttgacagaaatagaaatggagtttgaaacacccattgcgcttccgaaaacggatatgaagacaaaagcaagggaaatcgtgaatgaagagattatcgacggcaataagtacaagctttggaaggtcgataagtccggaaaacagatcgttttcttccaaacctataatgggaattacatttttcaggaccggcaaaatgatgataacaacgagatgggcgaagtcgttctgtacctgaataataaaaacgaagtcgtgtcttataagcagtcaatgctgcaggatattaaagaagtcaaaacggaaaatctgatctctgcagtcggcgcggttgaagctttgtactacccggattatttgaagaagtacagcaaaattaaatcagccgagcttggctatttcacgcagtatccgctggcaagcgctcaaattttcgtgcccgtttggcggatcgaagtggagcgcaaaacggacgataaaaccattcacgaagaatttatcgtggatgcacgggacggagcgcttcttcaatcacaagagaaaaaggaaaaatcataa

SEQ ID NO: 4827 - DNA, 1365 bp, Bacillus licheniformis
atgaagcgtgaaacaattaaaacgataatactgtcccttttggttttgatcagtcttctttttacttttaatatttggggatttcaggggaattacgaaaaagttgaagactcacaggctcaggtcagcgacaaacagccgattacaaaccagacaaagttgttaaatgaagccgtcaaaccgcagcaaatgttcattcatgagaatggacagcattatttgctgaatgacacgacgctctattctcagctctgggatgacatgggacgatgggaagtcaaatcgttaaaggatatctcggacaaatttgacaggcagcagttcaaaaactggctatacgctaaaaataaagactccaaattggatctcgtcttcagcgacaacattccgatcgatgtgctgcagccgcttttcaaatggtccgccaattcttatgaatacaactcttttgacagaatcgttcttcctttcaatgaaggacggggcatgaagaagatctattttgtatccttcagcaaagagacggttgttgaagcggtgattgaatcggcaaattaccgcaacatcctttcagacattgaaaaagaaaagtcgcagatgcctctttatgaggattttgcaatcaattcgcgcagagatgtcttgcttccggttaatcggctgaagctgtctgaaaaagagtattttacagaaacgatcagcccgacgcgttttaaaaaagctttatttgatgatccgcaaaccgtgcggcaggaaaccaacttaaacagaccggtatatacggatggaacaagccttttggagatctactcgaacaacagacagattaagttccagcaccgcaacctggaaccgagtacttcttatcaaaatggagagctgatcaataaaagcttcaaatatttaaacgacacgggaagctggacggatgattatcaatttttcggtttgaatgaaaatcagcagatcaactttaatctgtttatggatcagctgccggtcgttaacagccaaaaccagcctttcggaacgacatcgattgaacttcgctgggcaaacaacgacatattggactataaacacccgacatatgtcttgggcgcaaacgcaaatccggtcagcaaaaaggataaagaaatcatgagcggagaagaattgattcagttcctgcaagacaatgaagagtatgactttgataagattgagcaaattttccccgcctatgaaatggtctcagtatcagaggaacaagaccctcttgtcaaacttgtgccgacatggtgcattaaaataaacggtacggtaaagccggtatcaaagaaggattcagcggtgaaggagggcatagaaaatggagtggaatag

SEQ ID NO: 4828 - DNA, 1845 bp, Bacillus licheniformis
atgaataaagtaagtttttttcgctcgattcattttaagtttaccttaatatacgttctgctgattatcgtcgccatgcagattatcggcgtctactttgtcaatgagatggagaagtcacttcttaaatcatataatgactctcttgatcagcgggtgaacaacctatcgtattatctggaacaggaaatgacgaaggatagaagcacatcttcctcgtctaccttgaaggaagatgcagagcggattctaaatgatttcagcaaagaaggcgaaattctcgaagtcagtctgattgataaaagctatgaagtcatcgcgacctccaatccttataaccgggaggtggcggggaaaaagacaacagagggcattatcaaaaggacgctgcttgtcggcattccatacgaaaataaatttttcgacccggagcgggacagcaaagtgcggatttcggtcacaccgattaaaaaatcgaatcaagagacaatcggggccatttacgtcgtggcatcgatggataatgtctacaatcaaatccggacgatcaacaccattttagcgtctggaacttttattgcgcttggaatcactgcttttctcgggatttttgtcgcgcgaacgattacacatccgctgtcagatatgagaaaacaggccattgaactggcgaaaggaaatttctcaagaaaagtcaggaagtacggaaacgacgaaatcggccagctggccacaacgtttaattatttaacaagagagctgaaagaagctcagtccatgacagaaggcgaacgaaaaaaactatcttctgttattgcgtatatgacagacggagttatcgcgactaaccgaaatggcgcgattattttgcttaatacgccggcgctggagcttctaaatgtttcacgtgaaacggctcttgaaatgccgatcacttcgctgctcggccttgaagacgaatacacgtttgaagatttggttgaacagcaggattccctgcttcttgaaattgaacaggaagaacggacgtctgtgctccgcgtcaatttctcggtcatccaaaaagaacacggaaagatcgacggattgattgcggtcatttacgatgtcacagaacaagagcagatcgatcaagagcggagagagtttgttgcaaatgtctcccacgagctcagaacgccgctcacaacgatgcgcagctacctagaagcgcttgcggaaggggcatggcaggatccaaacattgcgccgcgcttcttgaatgtgacacagaatgaaacagagcgcatgatcaggcttgtcaacgacctgctgcagctttcaaagtttgatagcaaagattatcaattcaataaagaatggattcattttatccgtttcttctcattgattattgaacgctttgaaatgacgaaagagcagcatgttgagtttatcagcaatctgccggatagagaattgtatgttgaaatcgatccggacaagattacgcaagtgctggataatatcatttcaaatgcattgaaatattcccctgaaggaggccatatcacgttctctgttgatgtaaatgaagaagaagagcttctttatgtcagtgtcaaagacgaaggtgtcggcattccgagaaaagacgtggagaagatcttcgagcggttctaccgtgtagataaagccagaacaagaagactcggcggtacgggactcggtcttgcgatcgcaaaagaaatggtacaagcccatggcggcgacatctgggccgacagcatcgaaggaaaaggaacaacgatcacatttaccctgccgtataaagaagaacaagaggatgattgggatgaagcgtga

SEQ ID NO: 4829 - DNA, 708 bp, Bacillus licheniformis
atggaaaaaaagatactagttgtagatgatgaaaagccgattgctgatattttagagtttaatctgaaaaaagagggctatgaagtccattgcgcatacgacggcaatgaagcgcttcagatggttgaggatctcaaccctgatatgattctgctcgacatcatgcttccgaataaagacggtgtggaagtgtgccgtgaagtccgcaaaaaatatgatatgcccatcattatgctgacagcaaaggattcggaaatcgataaagtcatcggccttgaactgggcgctgacgattatgtgacaaaaccgttcagcacccgcgaactgctggcgcgtgtcaaagcgaacctgagaagacagaacacagcggctcctgccgaagaagaatcgtcttcaaacgaaattcaaatcggatcgctcgtcatttttccggatgcctatgtcgtttcaaaacgcgacgagacaatcgagctgacacatcgggaattcgaactgctgcattaccttgcaaaacatatcgggcaagtcatgacgcgtgaacatcttctgcaaaccgtgtggggatacgactactttggggatgtccggacagttgacgttacggttagacgccttcgcgaaaaaatcgaggataatccgagtcacccaagctggatcgttacaaggcgcggtgtcggctactatttgagaaatccggaacaggactaa

SEQ ID NO: 4830 - DNA, 138 bp, Bacillus licheniformis
ttggatacagccagcggatggctgtctatgttttatatcaaagtacactgcatgtcatcattaaaaaaacactttctagaaatcgaaatagatttcttatacattataacgtttatgaagcaaaagttaaaaaaatag

SEQ ID NO: 4831 - DNA, 411 bp, Bacillus licheniformis
atggaacgtgtcgatgttgtatattcattcgcggaagagaacaacattctgatggtgaaaaacaagaaaaatcaatcatggacattgccgggcggcaaggtggaagctggagaatcgctgacggaagccgcggcgagagaaatgaaggaagaaactggctatggaattcagcctcttgatattttagccgtaaatgaagcggtgatcagcagcgagcatgtatatttcatcgtctttagagcacggatcaccgaccgtccggatgccatcacgtttgacgagaacattgttgaagccaagtgggtgccgcttcatgaagctgaccggctgttgtctgtattccatccgaatggaatcatgcactggctgaaccgcgaaggggcggagtatcatcacgaagggaaaaaataa

SEQ ID NO: 4832 - DNA, 1293 bp, Bacillus licheniformis
atgtcttcagtagttgttgtaggtacgcagtggggtgacgaaggaaaaggcaaaatcaccgatttcctttccgaaaatgcagaggtaatcgcacggtaccaaggcggaaataacgcaggacatacgattaaattcaacggggtaacgtacaaactgcatttgattccatccggtattttttataaggataaaacgtgtgtgatcggcaacggaatggttgttgatccgaaagcattggtaacggagctggcttatcttcatgagcggaacgtcagcacggacaacttgagaatctccaacagggcccatgtcattctgccgtatcacttaaagcttgatgcggtcgaagaagagcggaaaggggccaataaaatcggcacgacgaaaaaaggaatcggcccggcttatatggataaagccgctcgcgtcggaatccggatcgccgatctgttggacagggacgttttcgaagaaaagctcgcccgcaatttggaagaaaaaaaccgtctgctagaaaaaatgtatgatgcggaaggatttaaaatagaagacattttagacgaatactatgagtacggccagcagatcaaacaatatgtctgcgatacgtccgtcgtcttaaacgacgcacttgatgacggccgccgcgtcttattcgaaggggcgcaaggagttatgcttgatatcgaccaagggacatatccgtttgtcacgtcttcaaaccctgtcgccggcggcgtgacgatcggctcaggtgtaggaccgacaaaaatccagcacgtcgttggtgtgtcgaaagcttacacaacgcgtgtcggagacggtccgttcccaacagagctgaacaatgagatcggagaccaaatccgtgaggtcggccgcgaatacggaacaactacaggtcggccgcgccgcgtcggctggtttgacagcgtggttgtccgccatgcccgccgcgtcagcggaattaccgacctttcattaaattcaattgacgtattgaccggtattgaaacattgaaaatctgtgtcgcttacaaataccgcggcgagatcctggaagagttcccggcaagcttaaaagcgctcgctgaatgtgagcctgtctatgaagaaatgccgggttggaccgaagatatcacgggcgcgaaaagcttgagcgacctgcctgaaaatgcccgccattaccttgagcgagtttctcagctgacaggcattccgctttccattttctcagtcggtcctgaccgctctcaaacaaatgtggtgagaagcgtttatcgtccgaactaa

SEQ ID NO: 4833 - DNA, 141 bp, Bacillus licheniformis
ttgaatatttgcgttgtcggttttttatgtatctttgtccaagaaaaacggttttttttagatttgacttacagactgtctattaaaaagaaaatatatgaaattcgctttataataacgaacaaaaatgttcaacgttaa

SEQ ID NO: 4834 - DNA, 267 bp, Bacillus licheniformis
atggagacggtattaatttttgcatcagttttatcgccgatcattttggctttggtcgaattggtgaagaagacggtcaaaatgccgaaaaatttgattccgctcgtttcactcttgataggtttgctgatcggtgccgcagcatatccttttacagaccttgaactggtgctccgtttatggtcaggaggactggccggattaacagcgacgggtttatttgaaatcggtaaaaaccgcaatgcaagaaaaaagaaaaatccctga

SEQ ID NO: 4835 - DNA, 1365 bp, Bacillus licheniformis
atgacagatcttctgaatgacaggctgccgccgcaaaatatcgaagccgaacaggccgtgttaggtgctgtttttttagaaccatcagctttaactttggcgtcagaagtcttgattccagatgatttttacagaatgtcgcaccaaaaaatatttaacgccatgcttgttcttggagaccgcggcgagcctgtagacctggtgacggtgacatcagagcttgcgaacacggaccttttggaagaggttggcggcatttcttatttgacggatattgcaaattctgtgccgactgcggctaatatagagtattatgcaaaaatcgtggaagaaaaatcgattctccgccgcttgatccgtacggcaacgacgattgcccaagacggatatacaagggaggatgaagtcgaagacctcttaagcgaagcagaaaaaacgattatggaagtcgcccagcgcaaaaactccggggcctttcaaaatattaaagatgttctcgttcaaacctacgataatattgaacagctccacaacagaaaaggggacatcaccgggattccgacaggttttaccgagcttgacaggatgacggcgggctttcaaagaaacgatttgatcatcgtagccgcccgtccgtcagtcggcaaaaccgcttttgccttaaacatcgcccaaaacgtggcgacgaaaaccgatgaaagcgtcgcgatcttcagccttgagatgggcgccgagcagctggtcatgcggatgctctgtgcggaaggcaacatcaacgcccagaatctccggaccggaaacctgacggaagaggattggggcaagctgacaatggcgatgggaagcttatcaaacagcggaattttcatcgatgacacaccgggaatccgcgtcagcgaaatccgttccaagtgcagacgtttaaagcaggagaacggcctcggcatgattttgatcgactacctgcagctgatccaaggaagcggcagatcaagtgacaaccgccagcaggaagtatcggaaatatcccgtgcgctgaaagcgctggcgagggagcttgaagttccggtcatcgccctttcacagctttcccggggcgtcgaacagcgccaggataagcgtccgatgatgtcggacatccgggaatcgggaagtatcgagcaggacgccgatatcgttgcgttcctgtaccgtgatgattactatgacaaagaatctgagaataaaaacatcattgaaatcattattgcaaaacaaaggaacggcccggtcgggaccgtctcactcgcttttgtaaaagaatataataagttcgtcaacctggaacgccggtttgatgacgcgggtgttgcgcctggtgcataa

SEQ ID NO: 4836 - DNA, 198 bp, Bacillus licheniformis
atgaaggtttatacggtatcaccaaatgccgagacagacgggtggtttttgaaactggaagatacggcgcctgttgagctttatgatacaaggacagaggccgtggaaaaaggagaagagatggcgaaagagaaccgtcctgcgaagcttgtcatctatgaccggcaggacaacaaagaagacgaacggtcttattaa

SEQ ID NO: 4837 - DNA, 219 bp, Bacillus licheniformis
ttgaaatcgacgatatcggagctgaaaaagaaattgtatgaacagcagatcagagcaaaagggctttacacatttgaagagtacaaagatatgcgcaatgtgctgcaaacgctgcggatgaaatttgcggcctatgaagaatgggatttgtaccaacatgcgaccgatttgatggtcagcattctcttgaaaaacagttggaacagccgggtggattaa

SEQ ID NO: 4838 - DNA, 138 bp, Bacillus licheniformis
atgaaacctttacaaatttctgccgaaacggcgcaaaaactttcggaaaccttaaatcttcctcttgaacaaatcatgcatttgccgcagcatatcctgcttgcgaaaattgccgaaattcagaagaaagatcaatag

SEQ ID NO: 4839 - DNA, 1206 bp, Bacillus licheniformis
atgcattacattgacgctcgacgcgcccgtttgaacaatatctttttgattgcaggaatcatatttatcgcttttaatttaagaccggctattacagctgtcgggccattgatcagttcgatccgctcggatatggatttgacgaacggcatggccggcttcttgacgacgctgccgctgttatcgttcgccgtcctgtccccggtcgcccctaagctcggacagaagcttggcaatgagagaaccctctgggtcggattggtcatcttattgatcggaattttgctgcgctcttacggagaatctattacattatttgcaggaaccgcattgatcggagtcggcatcgcaatctgcaatgtgctgctgcccagcctgatcaaacataaatttcctgacaaagcgggaattatgacaagtttctatacaacagccatgtcgatttttgcggcgctcgcatcagggatcagcattccgttgtcgcacggcttagcgtggggatggagcgcgtcgctcatggtttgggcgggcctcgcgtttgttgcgattttgatctgggttccccagctccgctatcatgatacgggaaaccgcacggtcagcttaaaggcagacggccaaacggtctggcgctcgaaaattgcctggcaggtcacattctttatgggcatacagtcgtttttgttttactgcacgatcgcctggctgcctgaaattctccgctcgcacgggatgagcatgtcgcttgccggctggatgctgtcgctgatgcagtttgccagcctcccgtcgacatttttgactccggttctcgccgggcggtttcaaaaccagaaaagcatcgtgctcgccctcggcatcctatacttggcggggatgtcagggctattgtacggaggcagtacagcgatgctgacgctatgggtcattttaatcggaattggacaagggtccagcatcagtttagccttgactttaatcgggctgagaagcgaaaatgccgatcaagccgcggcattatcagggatgtcgcaatccgccggatatttgctggcagcgattggtccaagctttgtcggttttctttacgatcacatgcactcatggaacggaccgattttactgttcatcggcgcgctggtcgctttgatcggtgcaggactcggtgcgggaagaaatcaatatatctatgctaaagcagcataa

SEQ ID NO: 4840 - DNA, 1206 bp, Bacillus licheniformis
gtgaaaaccaaaccatctcaacgctatatttttaaacatcttcatatttacagtgaaaatggaatgatagaagacggttttcttctgacgaatggagaaaaaatcgaggcttacggaccaatggctgatattccagcttccgcacaaacggcagaacagctgacatttccggagaacttcaaagtgctgccgggcatgatcgatgtccacattcacggggcaaacggcgcagatgtcatggacggaacagccgaggctttgcaaacaatggctgaagccctgccgaaagaaggaacgacaagcttccttgcgacgacgatgacccaagataaagccacgatcgagcatgcgctggcaaacgttcaccggtatagggaagccggcggacggcccggaacagccgaagtattaggcgttcacttagagggcccttttatttcagaaaagcggtgcggcgcccagccgccggatgacattatagcgccggatctttcgttatttaaagaatggcagcgcatctcagggaataacattaaattagtcacacttgcgccagagctggaagggtctttggaactaatttcctttttgaaggaaacaggggtcatcgcatccgcaggccattccgacgccggactcaaagagatggaagccgcgattaaggccggcctctcccatgtcacccatttgttcaacggcatgcgggggctgcaccaccgcgagccggggactgccggtagcgctcttctgcatgatgaactgaaggctgaagtcattgccgacggcatccatgttcaccctgccgtcttcaagctggcatttcagcaaaaacagaaagaaggcatcattttaattacggatgccatgcgcgcaaaatgcttgaaaaatggaacctatacattaggcggacaggaggtgttcgtaaaaggcgaaaaagccgtattacgggatggtacgcttgccggcagcatcttgaagatgaaccaggctgcactgaacatgatggattttacgggatgttcactcgaagatatcgtctacatgacagcagtcaatcctgccagacagcttcatatttatgaccggaaaggcagcatacggagcgggaaagatgccgatttgatcattttaaatgaaaaaaatgaagttgtgatgacgctttgcaaaggcgtgattgctttcagcaaaagggaggtttcaccatga

SEQ ID NO: 4841 - DNA, 747 bp, Bacillus licheniformis
atgaagatcattgaagctaaagattatcaggacatgagccaaacagccgcccgattcatcatcgagcaagtgaatcgcttatctgcacctgttctcggccttgcaaccggaggaacgcctctcggcacatatcaggttttaagggaagatcatgcgcgtaataaaacgacttacaagcacgtctatactgttaacttagacgagtatgtcggcgtttccccggatcatgaaaacagctatacattctatatgaaaaaacagcttttcgatcacattgacatcccgctcagccacacccatcttccgaacgggatggcttgtgacctggatgccgaatgcagccgctatgaagcgctgatcgagcggcttggaggcattgatcttcaagtgctcggcctcggcttgaacggccatatcggatttaacgagccgggcaccccattttcatcgaaaacgcatacggttgaactgacacaatcaacgaaagaagccaatgcccgctattttgattcctatgacgccgtcccgtcgcaagcaataacgatgggcatttccacgatcatgaaaagcaagcagatcctgctgctcgtttcaggagagaaaaaagccggcatcttggcgaagctgctcactgaagaaccaaatgaagacacccccgcttccgtcttaaaaacgcaccaagacgtcgtcatcatagcggacagcgatgctttatcaatcgtgaaagaaaggggtatggccttttga

SEQ ID NO: 4842 - DNA, 732 bp, Bacillus licheniformis
ttgatcaaaaaagattcccacattccgatttactatcagattgagaccgaaattaaaaagcttgccgaaacaaaagatttgaaacccggcgacctcattccttctgaaagagagttcgcagaaaaatatgaggtgagcaggatgaccgttcgacaggcggttaacaatctcggcaatgaaggcattctcgtccggcagcggggaaaagggacatttattgccgagccaaaaattgagcagcctctcaaaggattgacaagcttttccgaggacatgaaatcaaggggcatgaggcccggcacgaaaatgctcggcttcggcgtcatcccgtgcgaccagagcacagcgcgcaaactggagatacgtgaaggggcttccgtctatgaagtcaaacggatccgcctcgccgatgacatcccgatggcttatgaaatctcctatttgcccgccgacttcattaacggcctgaccgaagacattatgagcgcatctttgtacgactatgtcgaaaatacgctctcccttacgatcgaccgggccgcgcaaacactagaaccggcgattgcctctcaggcagagagcgagcctctcgacatagaggaaggcgcaccagtcctgctcattgaacgcttgagctatttggacgacggcagaccgtttgaagtggtcaaatccgtttacagaggcgaccgctataaattcgtcattgatatgaagaggaaagaccaatga

SEQ ID NO: 4843 - DNA, 897 bp, Bacillus licheniformis
atgaggaagacagaggatacgaacgacaaaagcacagcacttgatgaaatgaatgctttagatatcgtcaccttgatgaatgaggaggatcacacagtccctcgcgccattacgccctgccttcccctgatcgctgaagcggcggagacgattgtcagccgttttgagcaaggcggaagagtgtttaccgcaggcgccggcacaagcggcagaatcgcagttcttgatgccgcggaactgccgccgaccttctctattgacgagagccgttggaccggcctgatcgccggcggatatgacgcaatgtggatgcctcttgaagaaaatgaagatgaccgtgaaaaaatcgtcgctgacctgaaagcgcaatcattctcgaaagatgacgtcttaatcggagtcactgcgagcggttcgaccccttatgtcctcggcgctttatcctatgccaaacagatcggagccgcttctgtttcgatcagctgcaacgcggatacagaagcgggcaaattaagcgatatcgcgattgaggttcaaacaggaccggaaattatccgcggttcaacgcggctgaaagcaggaaccgctcagaaaatgatcttgaacatgctgtcaacagcggcaatggtgaggcttggccgcgtctatcaaaacgagatggtgaatatgaggctgctcaatcaaaaattagccgggcgcgctgtcaccattctgatgaataccaccgggttatcggaggatgaggctctgcaagctttaaaagaaagcggcaatgacatcaaggcagcgatctttatgacgttgacaaacggaacgcttgaagatgcccgccgctgtttatcccatgaaaatggacatttgaaaaaagcgattcaatatcatcgaaaggggttttaa

SEQ ID NO: 4844 - DNA, 1374 bp, Bacillus licheniformis
atgttgggatttcttcaaaatatcggccgcgcgctcatgctgccgattgccgttcttcctgctgcgggcctcctgctcgcactgggacgggaagacctgttaaacattccgtttatcgctgcttcaggacaatcaattcttgaccaacttccgatcatctttgcgataggcgttgcgatcggattgtcaaaggatggccacggggccgccgctctgtccggagccatcggttattttgtcctgacaggcggcttagcagccatcaataaggacctgaacatgggagttctcggcgggattattgcaggcgttgtcgccgccgtcatgtataaccgctttaaagatgcaaagctgcctgactggctcggtttcttcggcggaaaacgcagtgttccgattatgacagccttctgttccatcattcttgcaggcattttcggcttcgtctggatttatgcacagcaggcaattgacgccattggaggatggatcattcatgcgggggcattaggggtcgggatattcggtcttttaaacaggctgcttttgccgctcggccttcatcacatcttaaacaacatggtctggatggtctttggagaatttgcaggcaaaacgggtgacatgaaccggttctttgccggagatccaagcgccggcgcctttatgacagggttcttcccgatcatgatgttcggtcttcctgcggcgtgtctggcgatgattgccgctgcgaaaaagcatcgccgcaaagcaacggccgggttgctgatcggattggcgttcacatcatttttaaccggaatcacagagccgattgagttcacattcatgttcctgtcgccacttctcttcggtattcatgccttgttaaccgcaagcgccatgaccgtgaccaatatgctcggcatccatcacggctttaccttttcagccgggacgatcgactatctcttaaactttggaatcgccacaaagccgctgctcttgctgccgcttggtcttgtttacggcattatttatttcatcatcttttatttcttgataacgaagctcaatttgaaaacgcctggacgagaagatgacgatgagcaggaaaacaccgctgtcagccctgacacaggatcgtctaaatacgaaacccttgcggacaaatacatcgaagcgcttggcggaaaagaaaacatcgagacgctgaacaactgcgtgacccgcctccgcctcaaggtccgcgatgcttccaagctggatgaaagcgcgatgaaatccatgggagcgaagggattcgtcaagctcaatcagcacgaggtgcaggtgatcatcggtacagacgtcgaattcttggcgaatgaaatgagaaaacgtacggaataa

SEQ ID NO: 4845 - DNA, 450 bp, Bacillus licheniformis
atgaaggtaattttcttacaggatgttaaaggcaaagggaaaaaaggcgaagtgaaaaatgtagcggatggatacgcgcacaactttttgatcaaaaaagggctggctgttgaagcgacatccgccaatatcagcgcgcttgaaggtcagaagaaaaaagagaagaaagaagcggctgaagaactgaaatctgcgaaagagctgaaaaaacagcttgaggagattacggtggagctttcagccaagtccggagaaggcggccgtttattcggctccgtgacaagcaaacaaattgcagatgcgctgcaaaaaggccatcagttaaaagtcgacaaacgcaaaatcgaattaaacgatgcgattcgctcattgggatatacgaatgttcccgtgaagctccatccggaagtacaagcaacactgaaagttcacgtgaaagagcaatcataa

SEQ ID NO: 4846 - DNA, 1983 bp, Bacillus licheniformis
gtgccaagtttttatgaaaaaccgttatttcgatatcccatatattctttaatcgtcgtcacaatcatttctgtcctcatcaacatttattttaattgggtggcaggggcggccggcgttctgattctgggtgtcattttgtactttttgaagcgggccgactcccaaatcagaaaagagctggacgattatatatcgacgctgtcttatcgtctgaaaaaagtcggagaagaggcgctgcttgaaatgccgatcgggatcatgctgtttaacgatcagtactatatcgagtgggccaatccttttatggcgtcatgctttaatgaaaatacgctcgtcggccggtcgctttatgatacttgtgaatctgtcgtccctttgattaagcaggaagtggacacagaaacgattacgctgaatgagcggaaatttaatgtggtcatcaaacgggaagaaaagctgctttatttctttgatgtcacagagcagacgcagattgaaaaacaatacgaaaatgaaagaacggttcttgcctacatctttctcgataattacgacgatgtgacgcaagggcttgatgaccagaccagaagctcgataaacagtgaagtaacatcgcttttgaaccagtgggcccaagagtacggcattttcttaaaacgggtttcctctgagcggttcatcggcgtattaaacgaacatattttaagcgagctagaagcatcaaagttttcgattcttgatgaagttcgggagaagacatccgttcataccatttccttgacgttaagcatcggaatcggtgcatctgttgcctcgttgaaagagctcggcgatttggcgcaatccagccttgacttggcgctgggacgcggaggagatcaggtggcaatcaagcagccgaacgggaaagtgaagttttacggcggtaagacgaatcctatggaaaaacggacgcgcgtcagagcccgggtcatttcacacgcgctcaaggagattgtctctgaaagcagcaatgtgataatcatgggtcataagtttcccgatatggattcgatcggatcagccatcgggattttgaaggtcgcacaggcaaacggcaaagacggctttgtcgtgatcgactccaatcagatcggttcaagtgttcaaagactgatcggggagattaaaaaatacgaagaactgtggtccaggtttattacgccggaagaggcgcttgagatcgcaaaagacgacacgctgctcgtgatcgttgatacgcataagccttcttttgtcattgaagaaaggctggtcaataaaattgaaaatatcgtcgttatcgatcatcatagaagaggggaagagtttattaaagacccgctgcttgtctatatggagccgtacgcttcatctacagcggagcttgtgacagagctgctcgaataccagccgaagcgcttaaaaatcaacatgatcgaagcaacagctcttttggccgggattattgtcgatacgaagagcttctcgctgcgcaccggctcccgtacgttcgatgcggcgtcttatctgcgcgcaaaaggcgctgacactgtattggtgcaaaagtttttaaaagaaacggccgatcattatattaaaagggcgaagcttatccagcataccgttttttatcaaaacggcatcgccattgcatcgctgccggacgatgaggcggacgaatactttgaccaggttatcattgcacaagccgcggattctcttctgtctatgagcgatgtcgaagcgtcatttgctgtggcgagaagagacgagaacacggtatgtatcagcgcaagatcgctcggcgaagtaaatgttcaaatcattatggaagcgctcgagggcggcggtcatttaaccaatgctgcgacacagctgaccgatatcacggttgaagaaacgctccgccgactgaaagaagcgattgacgagtatttcgaaggaggcattcagaaatga

SEQ ID NO: 4847 - DNA, 930 bp, Bacillus licheniformis
gtgaaacaaacaagagctttagtagaaggcgctatcatggtcagtatttttgccgttttgctgatgatcagcctctatattcctttcatcggaaccattcttttattgacgctgccgctgcctgcaatggttcaaacgatcaggcacggtctaaagccggggatttcggtggggttggtcagtttacccgtttcattgattgccggttccttaggcggactgatgtttgctattccagtaagtgccgcgggcgtgatcatgggcttttactacagaagaaaagagccggcccaagcgattgctgcagcagccgttacatatatggtttcgttcgtcctgctgcttatcatcagcgttcagtttcttggattaaacttaatagagacggccaatcaagcatataatgaaacattcaaaacctttgaatcgagtatcaaacagtttggaaatgataaagaagtggctaagcagattgaattgttaaatgagcaattcaaacaggcgcaatatttatatccgacggccattgtgatattttccggaatcactgcgtttttgaatcatctgctcgcaaagccggtgcttcggcgcatcatacaaataccgtctctgaaaccgttcagggatatgagacttccgcaaagcattatttggatctatttgttgacgattcttctgtcgctggctcccgttgaagagggcagtgtatattactctgttctgttaaatgcgagtctcatcatgggctttgtcttggtcatccaagggttttcatttgtgttttacttttgccatgccaagaaactgccaactgtcctgccggttctttttttaattatcgggttgttttcgcccctgctgtaccttgttcgcatcttaggtataattgatataggctttaacttgagagaaagagtgaaaaaatcgtag

SEQ ID NO: 4848 - DNA, 117 bp, Bacillus licheniformis
atgaatcaaaaagagcagcatagacgactgctcttttctaacgtcgcaatttcattttcaaataaagacgatgagatgagcaggtctcggccttctctcattgtttctttattctaa

SEQ ID NO: 4849 - DNA, 141 bp, Bacillus licheniformis
gtgttggatatgttgaaggacttttttctatttttgagcggagggcttcgcgtgacgcttctggtcgcagttttgattatattgttgctgatcagaaaggcgagaaagaaaaataaagaaaaatcggggtttctcgactga

SEQ ID NO: 4850 - DNA, 477 bp, Bacillus licheniformis
atgacaacaaaaacattggcttggcatgaaacgttggagttgcatgaactaatcgcggcacagtctgtcggattggtgaagatcaagaaaagcatgaagaaaatcagcgaccctcagttaagacagctatacagcgtgtcagcaaaagcattggagcaaaatttaagagagcttcttccctttttgccaaaagctccggcatttcagcgggaggatgaacgggctgacttgtattttgatgcgggtgatctgttggtgctggcgaaaacgaccgttcgaaactatgcgattgcgatcacggaaacgtcgacgcccgagctcaggagagtgcttgttaaacaaatcaatgcggccattaagttgcatgaacaagttttttattttatgtaccaaagaggcttatatcccgcctataacctcgtcgacctgctaaaaggcgacgccatgcatgcgcaaaaagcgatatcgatgagataa

SEQ ID NO: 4851 - DNA, 420 bp, Bacillus licheniformis
gtgtatagacatatactgctggctgctgacggttccaagcattctgaaagagctgccgatcatgcgattcatctggcttccatgtcaaacgaagcggtcgtcgacatgatttatgtattggattatgcgaaagcaaaacatgaagtcctgcatagcgaaaaccgtacagaactcgaacgcgaacggcgcagcaggctgctgtcgatagaaaataaattaaaacaggcggccgttccctatcaaatgacgatgcagcacggggatccgggcccggccattgtatcgtacgccaaccatcatgatgttgatatcgtgattatcggaagcagggggctgaacactttgcaggaaatggtgctcggaagtgtcagccataaagtggcgaaaagagtgaagtgtccggttttaatcgtaaaatag

SEQ ID NO: 4852 - DNA, 1467 bp, Bacillus licheniformis
ttgaatgttaaacaattaaatagcgaatggttttctaatgtacggggggatatcctttcgggtatcgtcgtagcgcttgctctcattcctgaagccatagcgttctccatcattgcgggtgtagacccgatggtaggtttgtacgcatctttttgtatcgccgttgtcatttcctttacgggcggccgtccggcgatgatatcagccgcgaccggggcgatggctcttttgatgggaactttggtcagagatcacgggcttgattatttatttgctgctacgattttaacgggaatcatccaattaatatttggggtgctgaagattgcgcgctttatgaaatttattccgcggtcggttatggtaggtttcgtaaatgcgctggccattttaatcttaatggcgcaggttcctcattttgttggagtttcgaatatgacgtatgttgtggccggtattacgttgttgattatctatgttcttccccgctttacaaaagccgttccatctgcacttgttgccattattgcgatgactgtatttgccattttcggtcattttgatctgcgcactgtcggtgatttgggagaaatgaagcaatcattgcctgcctttatgattcccaatattcctttcaattttgagacattggccattatttttccaacagcctttgcgctttccatcgttggcttgcttgagtcattattaacctcttctattgttgatgatatgacggatacggaaagcgacaaaaacagggaaagccgcggacagggcatcgccaacattgtcgccggttttttcggaggcatggcgggatgcgcgatgatcggccagtctgtgatcaatgtaaaatcaggaggaagaggccgcttgtccacctttgttgccggtgtcttcttaatgtttttaatcatggtgctgggcgactgggtcgtacaaattccgatggcagctttggctggcgtgatgattatggtatcgatcgggacgtttgactggtcttcgtttagcatgttaagaaaggtgccgctgacggattccattgtcatgattgtaaccgtcgttaccgttatggccacccacgatttatcaaaaggggttttcgccggcgtgattttaagcgcaatcttcttcgtagcgaaaatctccaaactaaaaattgaagaaaagtcagaagaaaacgcggtcaagtacatcatcaaaggacaagttttctttgcatcggttcaagatttcgtaaactcctttaaaacgggagagcaaacgaaaaaggtcattcttgatttttctgaggcccatatatgggatgattccgctgtggcggctatcgaaaaagtcgttttgaaaatgaaagagcaaggaatagatgttgacttgattggattaaatgaatccagctggaagctggtcgaaaaattagcaacctatgatcaacctcatcgttcagtgtcaaatcactaa

SEQ ID NO: 4853 - DNA, 1302 bp, Bacillus licheniformis
atggcgcaagagctggaaaaacggccggggcatacaagatggtatatttcttctttattaagcagcatgatcattttaaattactttgaccgtgttgccatttcagtcgcagctcctgcgatacaggattcctttcaattgacggcaacccaattaggcatcgtcttttccatctatacctactcatacacgctgatgcagattccggtggggagtctcttggataagtacggcgttgcctgggtgacaagggtcggaatgaccttgtggagttttctaaccattatattggcttttttacagggaaaactgcttctttatattgtcagatttttaatcgggctgacgagtgcttcagcttttcctgccgcatccaaagcaacggccttatggtttccgcctaatgagcgcggccttgccaattccttgtttgactcggcagccaagttcgcgaatgtcatcggcgcgcctctcgtagcctttttagttacgacattcgactggcgagccgcttttttaacgatcggaatcattaatgtactgttcaccgtatttttctggttgtattatgaacagcccgatcggcacaaacgaatctcaaaggaagagctccattatattcaaaagcataatgccgtatcagaggaagatatctcggaacggacgcttattgctttaaaagcgatgctgacaaaccgtaaagtatgggggctgatgatcggatttacgggttacggctatacattcaacctgctcttaacctggctgccgaccttctttaaagaaacatacggaatggacattatgtcctcagggctgtttacagcggttccctggctgatatcgacggtttccggaatcgttgtgggcggatggctcgtcgattttttaattcaaaaggggcattcgaatacaaaggtataccagaccattatcgtaatcggcatgagccttggatttgcctttctgggagctgttttcacgcacaacatcacgattgcgatcatttgcatttccgtcggcttagccggaatatctgcgaccgcgcctatcggctggtcgatatcagccgatattgcaccggttggttccatctctctgctcagttcaatggtcaatttggcaaataacttattcggagggattatcgcggtttcattaacgggctatctggtcgatgtgaccggttcatttacgctcagctttttagtagccggatttgtattactgctcgggctcgtgttctacctcgcagtcctcggcgatataaagcgaattcgtattggcaagcagaaaacctga

SEQ ID NO: 4854 - DNA, 114 bp, Bacillus licheniformis
atgctgaaggaaacgacccggcttttgataaataaaaaaagaacaagaccgcattgggtcttgttccttttatcggcttactcgcctgctacgtatggaagtaaagccatttga

SEQ ID NO: 4855 - DNA, 239 bp, Bacillus licheniformis
atggcaggaggacgcagaggcggtcgtgcgaaacgccgtaaagtgtgttatttcacttccaacggcattacgcacatcgactacaaagatgtagatcttcttagaaaatttatctctgagcgcggtaaaatcttaccacgccgtgtaacaggaacaagcgcgaaataccaacgtaaattgactgttgcaatcaaacgcgctcgtcaaatggctttacttccatacgtagcaggcgagta

SEQ ID NO: 4856 - DNA, 513 bp, Bacillus licheniformis
atgcttaaccgagttgttttagtcggcagactgacaaaggacccagagcttcgttatactcctagcggtgcagctgttgccacctttacgcttgctgtcaatcgtacgtttacgaatcagcagggtgaacgtgaagctgatttcatcaactgtgttgtctggagaagacaagccgaaaacgttgcaaatttccttaaaaaaggaagtcttgcgggtgtagatggacgtttgcaaacgcgcagctatgaaaatcagcagggacagcgtgtatacgtcacggaagttcaagctgaaagtgttcaatttctggagcctaaaggcggcggttctggttccggcggttacagcggaggccagggaggccaacactttggcggcggacaaaatgaaccggctccattcggcggcagtcaaaacaatcagaatcgcaatcaaggcaacagcttcaatgacgatccattcgcaaatgatggaaagccgattgacatctctgatgacgacttgccattttaa

SEQ ID NO: 4857 - DNA, 288 bp, Bacillus licheniformis
atgagaaagtacgaaatcatgtacatcatccgcccagacgttgatgaagagtctaaaaaggctgttgttgagcgttttaacaacattttaacaactaacggtgcggagatcactgaaacaaaagattgggggaaacgccgtcttgcatacgaaatcaacgatttccgcgacggattctaccaaatcttaaacgttcaagctggagctgaagcagttcaagaatttgaccgtttagctaaaatcagtgacgacatcattcgccacatcgtggttaaagaagaagaataa

SEQ ID NO: 4858 - DNA, 1101 bp, Bacillus licheniformis
atggctttaacagctgggattgttggtttgcctaacgttgggaaatcaaccttatttaatgcaattactcaggccggggcagaatcggccaactacccgttttgtacgattgatccaaacgtcgggatcgtagaggtgcctgatgagcgtctgcaaaagctgacagaactcgtcaatccgaagaaaaccgttcctaccgcatttgaattcaccgatatcgcaggcattgtaaaaggagcatcaaaaggagaagggctcggaaacaagttcctgtcccacatccgccaagtagatgcgatctgccatgttgtccgctgttttgccgatgacaatatcacacacgtgtccgggaaagtagatccgatttcggatatcgagacgattaaccttgagctgatactggctgaccttgaaaccgtggaaaagcggatcgggcgggtcggaaagatggccaagcaaaaagataaagaagccgtgtttgaatttgagattttgacaaagttaaaagaggcgtttgaacaggaaaagccggcccgctctgtcgagttctccgaagagcagcaaaaggtgttgaagcagcttcatctgctgacgacaaaacctgtcttatatgtagctaatgtcagcgaagatgaagtggctgatccttcaggtaacgagtacgttcagaaggtccgggaatttgcagctgctgaaaatgcggaagtcatcgtcgtctgcgcaaagattgagtccgaaattgcagagcttgaaggcgaagagaaggcgatgttccttgaagaactcggcattgaagaatccggtctcgatcagctgattaaagcgtcctactccctcctcggacttgctacttattttacagcgggagaacaggaagtcagagcttggacatttaaaaaaggaatgaaagcccctgaatgtgcgggcatcatccatacggactttgaacgcggatttatccgtgcggaaacggtcgcctacgacgatctgcttgaagcgggaagcatgaccgcagcaaaagaggccggaaaagtccgccttgaagggaaagaatacattgttaaagacggcgatgtcattcatttccgtttcaatgtataa

SEQ ID NO: 4859 - DNA, 114 bp, Bacillus licheniformis
atgattacaataaaagacaagctgacaaaacttgcttttcaatcatacaaactagatgaaaattcatttttcattgagacagaaaaaaagcataaggaggtccgccaagattaa

SEQ ID NO: 4860 - DNA, 207 bp, Bacillus licheniformis
ttggccgataaagaatttggcctgaatgacgtggtcgaaatgaaaaagccgcatccctgcgggacaaaccgctggaagatcattcggatgggaatggatatccggatcaagtgcgagggctgttcacacagcgtcatgatcccgcgcaaagagtttcaaagaaagctgaaaaagatattagttaagcatgaggagtccgaaagttaa

SEQ ID NO: 4861 - DNA, 1014 bp, Bacillus licheniformis
gtgtggagagccgggatgaagtggatgcttcttattttaggaagcttaataggtgcgggatatgcatccggccaggaaatatggcagttttttggtgatgaaagcggactggctatcctgttgtttacgatcatgttcagcctgtcaacctatattgtgatgaagatcagctatgaacaaaaatcagagcattttctgcctgtgctcgaaacattaatcggtccgatgctggctaaagtatacgatgtgctgatcatcctgtatttgtttacgacgacgattgtgatgattgcaggaggcggggtaacgctgcaaatctttcatatcccgttttggactggcgtcatcttgttttgtttatgcacagggttgttgtttttgtgggggctcaatggcatattgtccgttaatagctacttaatcccgattttggtggcggggctgctgtatgcgctgatttcttttcaaacagctcatcatcagccgtggctgctcaacttgactcatcaatacaactggcctgccggcatcgcattcacttccctgaacatattatctgttgtcgctgtattatctgcggtcggcaaagagatgaagggggtcggagaagcaaagattgccagcatattaagcggcctggtgtttggggctatttcatacatgtacaatgagacccttgtagagcttgccggtgaactggcccattatgaaattcctttattcgcggttttggagggcgcgccttttccgatttttatttttatgacggctgtactttgcgtcgcaatctatacgacgacgatctcgagcattctcggtctgtccagccgttttctgtcctttgtgaactggccgagatgggtgatcgtcatcctgcttctctcgatcatggctccttttacgtcaatcggattttcaaatttaatcgcttttttatatccaatttacggattattgaatttatatttattggtaaatattttactatatccgattttgagtaaatggaaataa

SEQ ID NO: 4862 - DNA, 123 bp, Bacillus licheniformis
atggttgtttacagtatatccagctgtctctttttttatgctttggatgagtcgatttggtcagccggaaaaaatactttactaagagaggatacgatattctattttgttatattaatataa

SEQ ID NO: 4863 - DNA, 618 bp, Bacillus licheniformis
atgaatcgaaaaggcggaattttttctcaagaaccaatgaatgaatatatttctcatacggatccgctagctgttaaacaaatagagaaagtcctttccgtctatttaaaggaagccggagaccggcccatcgtgatcgtttgcatcggtacagaccgctcgaccggagattcgctcggtcccctcgtaggaatgaaactctccgcaaagcagctgacacgttttcatgtctatggaacgcttgccgacccggttcacgccgtgaacttaaatgaaaagcttgatcatattcatcagcagcatcaaaatccttttatgatcgcgatcgacgcctgtcttggacgaaccaaaagcgtggggtctttccaaatcggcaaagggcctttgaagccgggagcaggcgttcagaaaagtttgccggaagtcggccacgtgcatattaacggaattgtcaatgtcagcggttttatggagtattttgtcctgcaaaatacaaggctcaatcttgtcatgagcatggcaaatgtgcttgcggacgggctgtcgcatctggaaaagaccggatcgcagcggcgccatgtgtcaccaattgaaagaatgaccggaagaatgtcataa

SEQ ID NO: 4864 - DNA, 849 bp, Bacillus licheniformis
atgcctaaaggtctcggaaaagggattaatgcattgttttcaaatgttgatttatccgaagaaacggttgaggaaatcaagctgcaagacttgcggcccaacccttatcagccaagaaaaacgtttgatgaccaatcgttaaaagatttgaaggagtccattttgcagcacggtgttttgcagcccatcatcgtcagaaagtcaattaaaggctatgacattgtggccggagaacgccgtttccgggctgctgaaaaggccggattggaaaccattcctgcgattgtgcgcgagctgtcggaatccctgatgatggagattgccctattggaaaatcttcaacgagaagacctgtctccgctagaagaagcaaaagcctatgaatctttgctcaaacatctcgatatgacccaggaacagctggcgaaaaggcttggaaaaagcaggcctcacatcgccaaccacttgcggctgctgacacttcctgaagacgttcaaaagttaatcgacaacggtacgttatcgatgggccatggccgaacattgcttggattgaaaaacaagaaaaagcttgagccgcttgttcaaaaggtcgtgtccgaacagttgaacgtccgccagttggaaaagttaattcaacagttgaacgctgatgttccacgtgaaacaaagaagccgaaacaagtcaaagatgcagtgatcaaggaacgggaatcgtatttgcgaaactattttggaacaccggtgaccattaaaaagcaaaagaaaaaaggcaggatcgaaatcgaattctactcaaatgaagacttggagtgtattctcgaattattggctcaagaagacgcataa

SEQ ID NO: 4865 - DNA, 762 bp, Bacillus licheniformis
gtggggaaaattattgcgatcacaaaccaaaaaggtggcgttggtaaaacgacaacctctgttaacctgggagcttgcttagcttacatcgggaaaagggttttgttagtcgacatagacccgcaaggaaacgcaacaagcggtatcggcgttgaaaaggctgatgttgatcaatgtgtgtacgatatattagtagatgatgcagatgtgaaagatgtcatcaaaacaacatccgtagaaaacttggatgtcattcctgcaacgatccagcttgcgggggcggaaattgaacttgttccgaccatctcccgagaagtccggctgaaaagggctttggaatcggtcaaacaaaactatgatttcatgattattgactgcccgccgtcattagggctgcttacaatcaatgcgcttacggcttccgattccgtcgtgattccggtccagtgcgagtattatgcgctggaagggctgagccagctgctcaactctgtccggctcgtgcaaaaacatttaaatacggatctgatgatcgacggcgtattgctgacaatgcttgatgcaagaacgaatttaggcatacaggtcatcgaagaagtgaaaaagtacttccgcgataaagtatacaaaacggttatcccccggaatgtccggctcagtgaagcgccgagtcatggaaagccgatcattttatatgatccccgttccagaggagcggaagtctatttagaattagcaaaggaagtggctgcgaatgcctaa

SEQ ID NO: 4866 - DNA, 444 bp, Bacillus licheniformis
atggaaacgagatttctaatggaaaaagtaaatcctgagggatacagaggaatgctggagcttgaaaaagcgcaggcttcttctggcattgaccccattttaaaggaactgatcaaaatccgggcttcacagctgaacggatgtgctttctgcttaaatatgcatacgaaggatgcaagacagaacggggaaacggaacagcggatatatgcgctcaatgcgtggcgggaagcgccttttttcacggaaaaagagcgggctgtattggcgctgactgaagccgttacgcgaatcggcgagcacgggttgccggatgaaatatacaacgaagtcaggacccattttacagaagctgaaacagccgaactgatcatggcagctgtcacaataaatgcctggaacaggattgccatcgccacccggaaaatgcccgcagcagattga

SEQ ID NO: 4867 - DNA, 858 bp, Bacillus licheniformis
atggaatattatcgacaatatcattcattgcttttttcgattgcttaccgtatgctcgggtcttttcaagatgcagaggacatcatccaagaattgttcgcagaccttcaggaaaaagatatcggtcaaattgaccatattcaagcatatttaacgaaatcaatcacaaaccgctgcataaatgaactgcagtctgcccgcaagaagcgggaggtatatatcggggaatggcttccggaaccgcaggtggcgctttcagctcaaatcccggctgagtacgttgaagagaaagaaaaggtatcctatgcttttctggtagttatgagccgattaaatcctgtagaaagagccgttttgatgtttagagaagtatttggatatcattacaaggaaatttcgtccattatcgggaagtcggaagcgaactgtcgtcaaatccacagccggctgaaacagaaattaaacgaggatatttcggtattttcacagccggttgaagaacagcaattggcccagctgtttatcgaatcagcgaaaacaggtaattttgaggagttttccaagaaattgattgaagatgccgtattgtatacagatggcggcggaaaagtgcgcagcgctttgagaccgatctatggaaagagccgcatttatgcgttttttacgggagttgtttcaaagggaagcttttccggccgctttatgccagtcgatatcaacgaccaaaagggcgttttgatcatgaaaaacaaccgcccggcttacgcggtttgctttgcttggaatccggaaggcgattccgtcaaaaatgtgtttatcgtgtcaaatcccgataaactgaagcacattaaaatataa

SEQ ID NO: 4868 - DNA, 852 bp, Bacillus licheniformis
atgaagcattcattctctcgtctcttcggacttggcgacaaggaagaagaagcagagattgctgaacatgatacgaataaagaagaaattcaagagattccagtaggcgatataattcctaaccgttttcagccgcgcaccattttctcagaagaaaaaattaaagaattagctgcaaccattcatacacacggcattatccagccgattgtcgtcagaaaaacagagcgggaaggccaatatgaactcatagccggagagcggcgctggcgggcggttcaaacgctcgattgggagaaggttcccgctattattaaggatttttcagatacagagaccgcttctgtcgctcttatcgaaaaccttcagagggaagaattatcttcgattgaagaggcgcatgcttatgcaaggcttttagagcttcacgatttgacgcaggaagcccttgcacaaaggcttggaaagggccagtcaacaatcgccaataagctcagactgttaaagcttccggaagaggtgcaggaagcgatcttgaaaaaagaaatttcagagcgccacgcaagagcgctcataccgttgaaacagcccgaccttcaggtcaagctgctgcatgaagtcattgaaaagagtttaaatgtaaaacaaaccgaagaccgtgtcgtcaaaatgcttgagcaggataaacgcaagcctaaaccaaagagaaaagcgtacagcagggacgcgagaatcgcgatgaatacgattcgccagtccttatcaatggtggaagacagcggcgtcaaactgaatacggaagaagaggaatttgaagaatatattcagtttacgattcgaataccgaaataa

SEQ ID NO: 4869 - DNA, 720 bp, Bacillus licheniformis
atgaacattgagcaatttacagccggtttggagaagaaaggcatttccctttcctccttccagctggagcaatttgagacttattacgaatggcttgttgaatggaacgaaaaaatgaatttaacctcgattaccgagaaaaaagaagtgtacttaaagcatttttacgattccatcgccgcctctttttatgttgatttcaaaaagatgaacactctctgtgatgttggagcgggtgccggatttccaagccttccgattaaaatctgctttcctcaccttcacgtcacaatcgttgactcactgaacaaacggattcactttttgaatcagctgtcagccgctttgaagctggaaaacacagctttttaccatgaccgcgcggaaacattcggaagatcgaaagaccacagagaaagctatgacgttgtgacggcacgcgctgtcgcccgcctttcggttctcagcgagctctgccttccgcttgtgaaaaaagacggtttattcgtagcattaaaagccgcttcggctgatgaagaaattgaaacgggcaaaaaagccatcaaaacgcttggaggcaaaattgaaaccgtacattcttttcagctgccaatagaagaaagcgaaagaaacatcattgtcatcaaaaaacaatcgcagacaccgaagaaatttccaagaaagcctggaacacctaataaatctcctattgaaggttaa

SEQ ID NO: 4870 - DNA, 1887 bp, Bacillus licheniformis
atgggctatgaagcaggccaatatgacgtcgttgtcgtcggcgccggacacgccggtgttgaagcggcgctggcgtcagccagacaaggcgcaaaaacgcttgtcttaacgattaaccttgatatggttgctttcatgccatgtaacccgtctgtcggcggacctgcaaaaggaatcgtcgtccgcgaaattgacgcgctcggcggggaaatggctaaaaatattgataaaacgcatatccaaatgaggcttttaaatacaggaaaaggacctgccgttcgggcgcttcgggctcaggctgataaattccaatatcagcatgaaatgaaaaagacacttgagaatgaaccgaatttgaccatgctgcaaggaatggtcgaacgccttcttattgaagacggggaatgccggggcgttataacccagacaggggcggagtaccgttctaagaccgttgttctgacgacggggacatttttgagagggaaaatcattcttggcgatctgtcatactccagcggaccgaacaaccagcagccgtccatcaagctgtctgaacatcttgaagagctcggctttgacctcgtccgttttaaaacagggacgccgccgcgggtcaacagtcattcaattgactacagcaaaacggaaatccagcccggtgatgaagtgccgcgggccttttcgtatgagacggtggaatatattacagaccagcttccatgctggctcacatatacaagtccggaaacgcacgaaatcattgacaacaatttgcatcgttcaccgatgtactccggcatgatcaaaggaacgggaccgagatattgcccgtctattgaagacaaggtcgtccgctttaacgacaagccgagacaccaaatctttcttgagcctgaagggcgcaacacccaggaagtctatgtccagggattgtcgacaagccttccagaagatgtgcagcgaaaaatgctttcaactattcccggccttgagaatgtgcaaatgatgcgggcggggtatgcgattgaatatgatgcgatcgtaccgacacagctgtggccgacattggaaacgaaaaaaattccgggactcttcacagccggacagattaacggaacatcaggctatgaagaagcggccggacagggaattatggccggtatcaatgcgggccggaaagcgctcggcaaagaagaggtcattctcagccgctcagacgcttatatcggcgtattgatcgacgaccttgtgacaaaaggaacaaacgaaccataccgcctgctgacttcgcgtgcagagtacaggctgctcctgcgtcacgacaatgcagacttgcgcctgaccgagatcggctatcagatcggcttgatttctgaagaaagatatcaaaagtttcaagagaaaaaagcggccattgaagcagagaaaaaacgccttcattctgttattatcaaaccgacaaaggaaaatcaggaatatatccgttcactgggcggcagcgagctcaaagacggcattcgcgcgaccgacctgatgaagcggcctgaaatgaattatgaaaccgtcactgctcttgcgccgcctgaacaaaaagtcgccggcgacgttgccgaacaggtggaaattcaaattaagtatgaaggatatattgaaaagtccttgcagcaggtcgaaaaactaaagaaaatggaaaataaaaagattcctgacagaatcgactatgacgcgatcaaaggcattgcaacggaagcgcgccaaaaattgaaagaggtcagaccgctgtctgtcgcacaggcctcacggatttccggcgtcaatcctgctgatatttccatactgctcgtttatttagagcagggacggattgccaaggttgcggaatag

SEQ ID NO: 4871 - DNA, 1380 bp, Bacillus licheniformis
atggataccatcgctgcgatttcaacgccgatgggagaaggggcgattgcgatcgtccggatgagcggccctgaggctcttgcgatcgccgataaagtgtataaaggacctcgcggaaaaaggctgagttccgtcgattcacatacgattaactacggtcatatcgttgatccggaaacggaaaaagtcgtggaagaagtcatggtttcggtactgaaagcgccgaaaacttttacgcgggaagatattgtagaaatcaactgccacggcggacttgtgactgtcaaccaggtgcttcagctcgttttgagagagggagcgcgtctggcggaaccgggagaatttacgaaaagagcctttttgaacggaagaatcgatctttcccaggctgaagctgtcatggatctcatcagggccaaaacagaccgggcaatgaatgtggccatgaatcagatggaaggaaggctgtcttcactgatcaaacggttgagggccgagattcttgaaacattggcccacgttgaagtgaatattgactatccggaatacgatgacgttgaagaaatgacgcacaagatgctgattgaaaaagcgacaaaggtcaaaaaggaaatcgaggcgctgctgacgacttcagagcagggtaaaatattaagagaaggcatctcgacagttatcatcgggcggcccaatgtcggcaagtcctcgcttttaaacagtctcgtccacgagacaaaagcgatcgtaacggatattccgggcacgacgcgggatgtcattgaagaatatgtgaatgtcagaggcgtgccgctgcgtctcgtcgatacagccgggatccgcgagaccgaagacatcgtcgagcgaatcggcgttgaacgttcaagacaggtattaaaagaagcagatttgattttgcttgtcctcaattacagcgagtccctttcagatgaagacatcaagctctttgaagcaacgaagggaatggacatcatcgtcattgtcaataagaccgatcttgagcaaaagcttgatcttgatcgggttcgggaattggctgggaatcagcctgtcgtgacgacttccttattaaaagaggaagggattgatgagctggaggaagccattcaatcgctgtttttcacaggcgcgatcgagagcggcgacttgacatatgtcagcaatacaaggcatatttcactgctgcatgaggcgaagcgcgccatcactgacgcattggagggcatcgaaaacgatgtgccgatcgatatggttcaaattgatttaacaagatgctgggaagttcttggggagatcattggcgatgctgtacacgaaagtctgatcgaccagctcttctctcaattttgcttaggaaaataa

SEQ ID NO: 4872 - DNA, 156 bp, Bacillus licheniformis
atgaaaaccgaagttcccaaaattggggcttcggtttttttgccgttgaaaatcgatgaaatgcagcaaaatcagtttaagttctattttttcaggcgtaagctgttgatgaaaatgaaatttaattgttattcacatgtggataagttaaagtaa

SEQ ID NO: 4873 - DNA, 624 bp, Bacillus licheniformis
gtgaaggaactgactgctactggacgtaccgtcgatgaagcagtgcaatccgggcttgaacagctgggccttcatgcagatgatgtcgaagtcgacgtagttgatgaaggaaaaaagggattattcggcattttcggtcatcggtctgcagtcgtgaacattcgggaaaaaatagacccggttaaagaagcaaaacaatatttggaaaatgtaatttcgaatatgggaatacaagcccaggtgacggcagaagaggagtctaaacgagtggtttttcagttgaaaggagacaaaacagctcttttaattggaaaaaggggacaaactttaaatgcccttgaaacgctgacgcagctcgtgctcaatcgtcattccgacagatatatccaagcggtggttgacgccgaaggataccgcgcaaagcggaaggaaacacttgctcagctggcattgaagcttgctgaccaggcggccaggcagaaaaaagacattcacctggagccgatgccttccagtgagcgcaaggtcatccatgatacgcttgcgggctactcgcagcatatcgaaacttactctaccggtgaagaccataaccggcaccttgtcatctcatataaaaaataa

SEQ ID NO: 4874 - DNA, 795 bp, Bacillus licheniformis
ttgaagaggcgaattttattattgttcagtatgatcggcgttatcgtgcttttagctggatgtacggaaatcaaccagccgatcactgcagaaagcgaagggttttggaacacgtatatcgtatacccgttgtcacagctgatcacgtatgtagcaaatttaacgaatgaaaacttcggactagcgattatcatcgtcacgatcttaatcagacttttaattttgccgctgatgatcaagcagacgaagagttcgaaagcgatgcaggctctccagcctgaaatgcaaaaacttcgtgaaaaatacagttctaaagatcaaaaaacgcagcagaagcttcaacaggaaacgatggctctcatgcagaagcacggggttaacccgcttgccggatgtttcccgatcttaattcaaatgccgattttaatcggattctatcatgccattatgagaacgcgggaaatcgcagaacacagctttttatggtttgaccttggggagcgtgatccgtatttcattttgccgattctcgccggtgtgttcacattcattcagcaaaagctgatgatggcgggaacagcgcagcaaaatccgcagatggcgatgatgctttggctgatgccgatcatgatcgttgtatttgcgatcagtttcccggcggctctttccctgtactgggtagtcggtaacttattcatgattgctcaaaccttctttatcaaagggcctgatctaaaggctgagagacaggaagcggcagccggaggaaaaaaatccggaggtaagaaaaagtga

SEQ ID NO: 4875 - DNA, 360 bp, Bacillus licheniformis
atgaaaaagcgaaatcgattaaagaaaaatgaagattttcaaaaagtatttaaaaagggaaaatcgatggcaaaccggcaatatgttttatatgtgcttcaccagcctgaagcgaaagagtttcgggtgggactgtcggtcagcaagaaaatcggaaacgcagtcgtgcgcaaccgggtaaagcggctgattcgccaggtcatccaggaagagcggaatctattaaaacaagaaaatgactacattatcatcgcaagaaagcctgcagctgaattatcatatgaagagacgaaaaaaagtttgcagcatcttttcagaaagtcgtttgtctaccggaaaaaaccgaatcagccatcatag

SEQ ID NO: 4876 - DNA, 134 bp, Bacillus licheniformis
atgaaaagaacatttcaaccaaataaccgtaagcgcagcaaagttcatggctttcgcagccgtatgagttctaaaaatggacgtcttgtattagcacgtcgtcgccgcaaaggaagaaaagtattatcagctta

SEQ ID NO: 4877 - protein, 446 aa, Bacillus licheniformis
MKNISDLWNQALGQIEKKLSKPSFETWMKSTKAHSLQGDTLIITAPNEFARDWLESRYLHLIADTIYDLTGEELSIKFVIPQNQNEEDFMPKSPIKKMSKEEPADFPQNMLNPKYTFDTFVIGSGNRFAHAASLAVAEAPAKAYNPLFIYGGVGLGKTHLMHAIGHYVIDHNPSAKVVYLSSEKFTNEFINSIRDNKAVDFRNRYRNVDVLLIDDIQFLAGKEQTQEEFFHTFNTLHEETKQIVISSDRPPKEIPTLEDRLRSRFEWGLITDITPPDLETRIAILRKKAKAEGLDIPNEVMLYIANQIDSNIRELEGALIRVVAYSSLINKDINADLAAEALKDIIPSSKPKVITIKDIQRIVGQQFNIKLEDFKAKKRTKSVAFPRQIAMYLSREMTDSSLPKIGEEFGGRDHTTVIHAHEKISKLLNDDEQLQQQIKEIKEQLR

SEQ ID NO: 4878 - protein, 378 aa, Bacillus licheniformis
MKFTIQKDRLVESVQDVLKAVSSRTTIPILTGIKIVASDEGVSLTGSDSDISIESFIPKEDGDLEIVTIEQPGSIVLQARFFSEIVKKLPMSTVEIEVQNQYLTIIRSGKAEFNLNGLDASEYPLLPQIEEHHAFQIPTDLLKNLIRQTVFAVSTSETRPILTGVNWNVTGGELICTATDSHRLALRKAKLDINEDSSYNVVIPGKSLTELSKILDDHQELVDIVITETQVLFKTKNVLFFSRLLDGNYPDTNRLIPQESKTNLIVNTKEFLQAIDRASLLAREGRNNVVKLSAAANESIEISSNSPEIGKVVETVNAEQIEGEDLKISFSPKYMLDALKVLEGEDIHVSFTGAMRPFLIRTPNDDSIVQLILPVRTY

SEQ ID NO: 4879 - protein, 71 aa, Bacillus licheniformis
MTKTVAIDTEMITLGQFLKLADVIQSGGMAKWFLSEYEVLVNDEPDNRRGRKLYVGDVVTIEGFGSFQVVG

SEQ ID NO: 4880 - protein, 370 aa, Bacillus licheniformis
LYIQNLTLSSYRNYERLDLQFENKVNVIIGENAQGKTNLMEAIYVLAMAKSHRTSNDKELIRWDEDYAKIEGRVIKKNGSVPIQLVISKKGKKGKVNHIEQQKLSQYVGAVNTIMFAPEDLNLVKGSPQVRRRFLDMEIGQVSPVYLHDLSLYQKILSQRNHFLKQLQTRKQTDQTMLDVLTEQLTEFAAKVVMKRLQFVDQLEKWAQPIHSGISRGLEELTLKYHTSLHVSDSPDLSKMINSYQETFSKLRDKEIERGVSLSGPHRDDVLFYVNGRDVQTYGSQGQQRTTALSLKLAEIDLIQEEIGEYPILLLDDVLSELDDYRQSHLLHTIQGRVQTFVTTTSVDGIDHKTLNEAEIFRVENGTLSD

SEQ ID NO: 4881 - protein, 80 aa, Bacillus licheniformis
LYIHLGDDFVVSTREIVAIFDYKAKTSPIVEEFLSKQKQRIVSSNSTPKSIVVTLQSIYFSPLASGTLKKRAQSKPEIDS

SEQ ID NO: 4882 - protein, 639 aa, Bacillus licheniformis
VAMEQQNNYDENQIQVLEGLEAVRKRPGMYIGSTSGKGLHHLVWEIVDNSIDEALAGYCTEINVAIEKDNSITVKDNGRGIPVGIHEKMGRPAVEVIMTVLHAGGKFDGSGYKVSGGLHGVGASVVNALSTELDVTVYRDGKIHYQEFERGVPKADLKVIGDTEVTGTTTHFKPDPEIFTETTEYDYDTLATRVRELAFLTKGVKITIEDKREGKERKNEYCYEGGIKSYVEHLNRSREVIHEEPVYIEGSKDGITVEVALQYNDSYTSNIYSFANNIHTYEGGTHEAGFKTGLTRVINDYARRNGVFKESDPNLSGEDVREGLTAIISIKHPDPQFEGQTKTKLGNSEARTITDALFSEALEKFLLENPDSAKKIVEKGVMAARARMAAKKARELTRRKSALEVSNLPGKLADCSSKDPTISELYIVEGDSAGGSAKQGRDRHFQAILPLRGKILNVEKARLDKILSNNEVRSMITALGTGIGEDFNLEKARYHKVVIMTDADVDGAHIRTLLLTFFYRYMRQIIEQGYVYIAQPPLYKVQQGKRVEYAYNDQQLEEILKELPQNPKPGLQRYKGLGEMNATQLWETTMDPETRTLLQVTLKDAIDADETFEMLMGDKVEPRRNFIEENARYVKNLDI

SEQ ID NO: 4883 - protein, 822 aa, Bacillus licheniformis
MSEQHKPQVQEVNISQEMRTSFLDYAMSVIVSRALPDVRDGLKPVHRRILYAMNDLGMTSDKPYKKSARIVGEVIGKYHPHGDSAVYEAMVRMAQDFNYRYMLVQGHGNFGSVDGDSAAAMRYTEARMSKISMEILRDINKDTIDYQDNYDGSEKEPVVMPARFPNLLVNGAAGIAVGMATNIPPHQLGEVIDGVLAVSKNPDITLPELMEIIPGPDFPTAGLILGRSGIRKAYETGRGSITLRAKAQIEETSSGKPVIIITEIPYQVNKARLIEKIADLVRDKKIDGITDLRDESDRNGMRIVIELRRDANANVLLNNLYKQTALQTSFGINLLALVDGQPKVLSLKQCLEHYLDHQKVVIRRRTAFELRKAEARAHILEGLRVALDHLDEVISLIRNSQTAEIAKNGLIEKFSLTEKQAQAILDMRLQRLTGLEREKIEEEYQSLVELIAELKAILADEEKVLEIIREELTEVKERFNDERRTEIVTSGLETIEDEDLITRENIVVTLTHNGYIKRLPSSTYRSQKRGGKGIQGMGTNEDDFVEHLISTSTHDTILFFSNKGKVYRAKGYEIPEFGRTAKGIPIINLLEVEKGEWINAIIPVGEFDDESYLFFTTKHGISKRTPLSQFANIRNNGLIALSLRDEDELIAVRLTDGNKQIIIGTKNGLLIRFPETDVRQMGRTAAGVKGINLTDDDVVVGMEILEEDSHVLIVTEKGYGKLTPASEYRVQSRGGKGLKTCKITENNGSLVTVKATTGEEDLMIITASGVIIRMDIKDISTTGRVTQGVRLIRLGEQEHVATVALVEKDEENDSEEQEADES

SEQ ID NO: 4884 - protein, 325 aa, Bacillus licheniformis
MQDKGWKDLKLFYSVETAQHFLEMVYKNQGMEDAKKNSYKNGERFIFFLKHAEGFYKQAKIATLEIKPILLFYGMAQLLKACLLTTDPSYPSHTSVLAHGVTTRKRKKQNYRFYEDEVKIQRNGLCMHVIRSLFQLSGLEDERFNMKQLLARIPEINKVLAFQRKPNPIVKAAVEDRLIWLPSETPDAYNMSSKRFIEHVEYHLNWSFCREEKEGIIFSAAQKECRPSTSTTLLYDLEHGAYYFPAERDRFLKLPEILVHYLVAYNLSMIARYETEWWYDLLLQSASDDYVIIQQFLHIVESKFPYYIAELLIRKKENNKKDQLI

SEQ ID NO: 4885 - protein, 488 aa, Bacillus licheniformis
MWESKFSKEGLTFDDVLLVPAKSEVLPRDVDLSVELTPSLKLNVPIISAGMDTVTEAQMAIAMARQGGLGIIHKNMSIEQQAEQVDKVKRSERGVITNPFFLTPEHQVFDAEHLMGKYRISGVPIVDNEEDQKLVGIITNRDLRFISDYSMKISDVMTKEELVTAPVGTTLDEAEKILQKYKIEKLPLLDDQGVLKGLITIKDIEKVIEFPNSAKDVHGRLLVGAAVGVTGDTMTRVRKLVEANVDVIVVDTAHGHSQGVLDTVKKIRDTYPELNIIAGNVATAEGTKALIEAGANVVKVGIGPGSICTTRVVAGVGVPQVTAIYDCATEARKHGAAIIADGGIKYSGDIVKALAAGGHAVMLGSLLAGTSESPGETEIYQGRRFKVYRGMGSVAAMEKGSKDRYFQEENKKFVPEGIEGRTPYKGPVADTVYQLVGGLKSGMGYCGTKDLHALREDAQFIRMTGAGLRESHPHDVQITKESPNYTIS

SEQ ID NO: 4886 - protein, 436 aa, Bacillus licheniformis
LKSKRLKQLIMLIVAFAVTVGAFSPMSTAKAANDPINVDAKAAILVEASSGKILYSKNADQRLPVASMAKMMTEYLLLEAIHEGKVKWDQKYTPDDYVYEISQDRSLSNVPLRKDGSYTVKELYQATAIYSANAAAIALSEIVAGSESKFVELMNKKAKELGMKDFKFVNATGLENKDLHGKHPSGTNANEENEVSARDMALLADHLVSDYPEILDTASIAKTKFRKGTDDEMDMPNWNFMLKGLVQQYEGVDGLKTGSTDSAGSCFTATAERNGMRVISVVLNAKGDLHTARFKETKKMLDYAFENFTMKEFYAKGAQVKGNETVTVDKGKETEVGIVTEKAFSMPVKNGEEKNYKAKVTLNKDELTAPVKKGEKVGTLTASYKGEEKDYGFLGSDVSGVNLVTKEDDEKANWFILTMRSIGGFLPVYGTALLKW

SEQ ID NO: 4887 - protein, 294 aa, Bacillus licheniformis
MAQTGTDRVKRGMAEMQKGGVIMDVVNAEQAKIAEEAGAVAVMALERVPADIRAAGGVARMADPTIVEEVMNAVSIPVMAKARIGHIVEARVLEALGVDYIDESEVLTPADEEFHLNKNEFTVPFVCGCRDLGEATRRIAEGASMLRTKGEPGTGNIVEAVRHMRKVNAQVRKVVGMSDDELMTEAKNLGAPYELLKEIKAEGRLPVVNFAAGGVATPADAALMMQLGADGVFVGSGIFKSDNPAKFAKAIVEATTHFTDYKLIAELSKELGTAMKGIEISNLLPEQRMQERGW

SEQ ID NO: 4888 - protein, 196 aa, Bacillus licheniformis
MLTIGVLGLQGAVREHIRSIEACGAAGKVIKWPEELKEIDGLILPGGESTTMRRLIDTYQFMKPLQEFAASGKPVFGTCAGLIILAKNIAGTNDAHLGVLDVTVERNSFGRQVDSFEADLTVKGLEGPFTGVFIRAPHILEAGADVEVLSEHNGRIVAAKQGNLLGCSFHPELTDDHRMTKLFVEMVEKHKREAVV

SEQ ID NO: 4889 - protein, 425 aa, Bacillus licheniformis
MLDVKLLRANFEEIKQKLAHRGEDLSDFDQFEELDTKRRELIVKVEELKGKRNEVSQQVAALKREKKDADHLIKEMREVGEDIKKLDEELRTVESSLDKIMLSIPNIPHESVPVGETEDDNVEVRKWGELPEFSFEPKPHWDIADQLDILDFERAGKVTGSRFVFYKGLGARLERALYNFMLDLHVDEYGYTEVIPPYMVNRASMTGTGQLPKFEEDAFKIREEDYFLIPTAEVPITNLHRDEILSADELPINYAAFSACFRSEAGSAGRDTRGLIRQHQFNKVELVKFVKPEDSYEELEKLTNQAEKVLQLLELPYRVMSMCTGDLGFTAAKKYDIEVWIPSQNTYREISSCSNFEAFQARRANIRFRREAKGKPEHVHTLNGSGLAVGRTVAALLENYQQEDGSVIIPKALRPYMGNRDVIQP

SEQ ID NO: 4890 - protein, 376 aa, Bacillus licheniformis
MKIVIAPDSFKESMTSLEAARSIEKGFKEILPDAEYVNIPVADGGEGTVQALVDATGGDIVYQTVTGPLGKPVKAAYGLLGDGKTAVIEMAEASGLHLVPPEQRNPLLTTTRGTGELILDAAEKGVSQIIIGLGGSATNDGGAGMASSLGVKFLNRAGEEIENGSGALAEIAKIDVSGLDPKLKHIQFEAACDVDNPLTGPRGASAVFGPQKGANSEMTAHLDQNLKHYAAAVKAELGCEIDSLPGAGAAGGLGAGLCAFLKAELKSGVDIVLDTLSFSERIKGADLVITGEGKIDGQTVSGKTPAGVAKRACSENIPVIAFAGSLGEGCELVYDIGISALFSIVPGISSLENALADGSSNLTRCARNVAAVWSLE

SEQ ID NO: 4891 - protein, 422 aa, Bacillus licheniformis
MDIQINAIGALCALVISIFLILKKVPPAYGMMIGALAGGLIGGADLIETTDLMIAGAKNMIPAVLRILAAGVLAGVLIQSGSAAVIAETIVNQIGEKRALLALTLATAILTTVGVFVDVAVITVAPIALAIARRTFISKAAILLAMIGGGKAGNIMSPNPNAIAASDAFHVPLTSVMAAGIIPAIFGLGATYLLAKRLSNKGTKVAANEIETQTAQQLPAFWAAVSGPVVSILLLALRPAAGITIDPIIALPAGGLVTAIASGQAGKLRDFAASGLSKMSGVAVMLLGTGTLAGIIANSKLNSLITDTLVGLGLPSFLLAPISGMLMSMATASTTAGTAVASSVFGPTLLDLGVAGLAGAAMIHAGATVLDHLPHGSFFHTTGGSVFMAMKERLKLIPYESVIGLILTIISTLIFGIFQFFI

SEQ ID NO: 4892 - protein, 372 aa, Bacillus licheniformis
MNYLSKELAEEIVERTMSIIRHNINMMDENGVIIASGDRSRIGDEHAGAKDALAAEKVISITPEEYSALTGTKPGVNLPIVFHDEIIGVIGITGPPSEVSRYGELVKMAAELTVEQAFLTKQLTWDQRLREETVIQMIQGTDLASLDFFERAERLNIPLDGQRTCLVFELPSADMKPAFIKKLEKHLTAKDLYANISLKEVAVILAGAPTKSRSDLFSAWNGWLSQWKTVRGALGEQADQLQQLPFSYQSAKQTLKIAENNCSLYDYREFAIPVLLSKIEHPDQEIHFQNIWHRLSQADQKGELTHTLLCYIEENGEIGETSSRLFIHRNTLNYRLRKIELATGCNPKRFDDLFKLYTAITLFSPFCANEQF

SEQ ID NO: 4893 - protein, 93 aa, Bacillus licheniformis
LWKHFISRLPQDYTLNRPIETGKLQKAEELLGVSFPDELVSLLKMTNGINDTFGDHLIWPADRIIEENLDMRCTDCFKPFDCLLFIAGAGNGD

SEQ ID NO: 4894 - protein, 213 aa, Bacillus licheniformis
MSVYDIPKDAIITVAGTVGVGKSTLTKELAKRLGFKTSLEEVVNNPYLEAFYQDFERWSFHLQIFFLAERFKEQKYIYESGGGFVQDRSIYEDTGIFAKMHADKGTMSKVDYKTYTSLFEAMVMTPYFPRPDVLVYLEGDLETILDRIQKRGREMELLTDRSYWEEMYTRYENWISGFNACPVVRVNIDEYDLFNNSASLDPIIEKISEAIQR

SEQ ID NO: 4895 - protein, 207 aa, Bacillus licheniformis
MNTAPFIAVEGPIGAGKTTLASMLSEKLSLSLVKEIVEENPFLDKFYDEKDEWSFQLEMFFLCNRYKQLEETEKKYLHHHMPVVSDYHIYKNLIFAERTLEGKKLEKYRKIYQLLTEDLPKPNVIIYIRASLPTLLERIKKRGRPFEQEMDKQYLEQLINDYEAAIKQFKESDPPIPVIEINGDQEDFVISEAVFNRIADQVKEYIE

SEQ ID NO: 4896 - protein, 427 aa, Bacillus licheniformis
VKRGDTLYQIANRYRTTVNEIVATNEIPNPNRLVVGQTIVIPIAGEFYEVRQGDTLASIGARFNISPAELARINRIQVSAVLPVGLLLYIPPRPRRNIETNAYIEPRGESVSPTLQQAAREASPYLTYLGAFSFQAKRDGTLEEPPLNNLKEIADRHRTTMMMIVTNLENEAFSDELGRIILTDQNVKNRLLDNIVAAARRYGFKDIHFDFEYLRPEDREAYNQFLRDARARFRQEGWLISTALAPKTRADQPGQWYEAHDYRAHGEIVDFVVLMTYEWGYSGGPPMAVSPIGPVRDVIEYALTEMPASKIVMGQNLYGYDWTLPYTPGGPLARAISPQRAIEIASENNAAIQYDETAQAPNFRYTDNAGKQHEVWFEDARSIQAKFDLIRELNLRGISYWKLGLSFPQNWLLIADQFNVVKETFPS

SEQ ID NO: 4897 - protein, 180 aa, Bacillus licheniformis
LSNSALIIVDIINDFQFDMGDVLSKKTRNITEHLLALKEHAAKMKWPIIYINDHFGIWQADIAAIIKKCKNGRSEYIIDRLAPNDSDYFLIKPKHSAFYGTALETLLHELHVDHLIITGIAGNICVLFTANDAYMREYEITIPRDCIASNNEKDNKYALTMMENVLFANITTAKAITSET

SEQ ID NO: 4898 - protein, 160 aa, Bacillus licheniformis
MTQDEFYMKEAVNEARKAEEKGEVPIGAVLVLDGEIIARAHNLRETEQRSVAHAEMLVIEEACRKLGTWRLERAVLYVTLEPCPMCAGAAVLSRIDKVVFGASDPKGGCAGTLMNLLQEERFNHQAEVVSGVMEEECGRMLSDFFRKLRAKKKAEKQSEL

SEQ ID NO: 4899 - protein, 566 aa, Bacillus licheniformis
VSYQALYRVFRPQLFEDVVGQEHITKTLQNALLQKKFSHAYLFSGPRGTGKTSAAKLFAKAVNCERAPVSEPCNECSACKGITNGSISDVIEIDAASNNGVDEIRDIRDKVKFAPSAVTYKVYIIDEVHMLSIGAFNALLKTLEEPPEHCIFILATTEPHKIPLTIISRCQRFDFKRITSQAIVGRMKKIVEAEQFKVQDGALDIIASAADGGMRDALSLLDQAVSFSGEELTVDDALLITGAVSQHYIGKLASTLHEKNVSGALETLNELLQQGKDPAKLIEDMIFYFRDMLLYQTAPDLEGVLEKVKVDEEFQTLSRQIPASDLYEMIDILNKSHQEMKWTNHPRIFFEVAVVKLCQGPKAGASAAAQPEVDNLVNKVRQLEQEIERLKTQGVQVSSAPAQAKEASRPQKSIKSAYKAPVGRIHEILKDATRPDLEKLKGCWGQLLAQLKQQNKVSHAALLNDSEPVAASSKAFVLAFKYEIHCKMVAEDNNGVRTNLEQILDGMLGGRIDIVGVPEAQWGKIREEFLQDHQPEDSEANEPKEEDPLVAEAKKLFGAELIEIKE

SEQ ID NO: 4900 - protein, 45 aa, Bacillus licheniformis
MRGGMGNMQKMMKQMQKNAKGYAKGTGGAGRKSTRRYCRRWNGDR

SEQ ID NO: 4901 - protein, 198 aa, Bacillus licheniformis
MQYPEPISKLIDSFMKLPGIGPKTAVRLAFFVLSMKEDVVLDFAKALVNAKRNLTYCSVCGHITDQDPCYICEDTRRDKSVICVVQDPKDVIAMEKMKEYNGLYHVLHGAISPMDGIGPEDIKIPELLKRLQDDQVTEVILATNPNIEGEATAMYISRLLKPSGIKLSRIAHGLPVGGDLEYADEVTLSKALEGRREM

SEQ ID NO: 4902 - protein, 74 aa, Bacillus licheniformis
MGFLRKKKLRKEFDNKLVEQLIHQKEEWNRQKRLIENSLEPSPEVLYELKVAEAKYFFYLREAKKRNLRIGSWK

SEQ ID NO: 4903 - protein, 88 aa, Bacillus licheniformis
MGSVIFIGAIVALVALLFFSKASFKPLRLIGRIAVRFVVGALFLFCVNLFGESVGIHVPINIVTTGVSGLLGVPGVAALIVIKQFIAI

SEQ ID NO: 4904 - protein, 63 aa, Bacillus licheniformis
MSKSNHGETCIICEENKTEGIHLYTKFLCSDCEKKIVSTSTSDPEYSDYVKKLKSLRTPPLYS

SEQ ID NO: 4905 - protein, 211 aa, Bacillus licheniformis
MKPILHFMIRATAASALSVLLWFTSFFAFNQTFLLSSAYAAGAWIAVYLGGKWYGTYLFLKENQLTRREYAYIKQNLREAKLKIARLRKALFAVKNIQTIKQNLEILRIVRKIYSITKNEPKRFYQVERFYYQSLDSIVELTEKHAFLASQPKRNANLEVSLSETRMMIDKLAKQLEDDLYDLLKTDIDHLEFELDVAKHSMKKADGGKLK

SEQ ID NO: 4906 - protein, 397 aa, Bacillus licheniformis
MSEYKPSLHKTGAQLEFDDLLSDPFGQGEAPVSGVEEKLRGQQVNLVDTLSEEKRRQAFQLAEQIDPKNHNSITLYGTQAQSKLLNFSHEMLEHVQKKDVGEIGQVLSDLMKKLEQVSPDELKTEKRNFFSRLFGRVSHSVQEVLSRYQKTGAQIDRISVKLEHSKSALINDNKMLERLYEKNKEYYEALNVYIAAGQLKLEELNHKTIPELKEKSKTEHHHMAVQEVNDMIQFEDRLEKRVYDLTLSRQITLQSAPQIRLIQHTNQVLAEKIQSSIMTAIPLWKNQVAIALTLLRQRRAVEAQKQVSATTNELLLKNAEMLKANTIETAKENERGFIDIETLKQVQDNLIGTLEETLKIQEEGRSKRLQAEEEIRAMEDGLKAKLLDMKENQNRRS

SEQ ID NO: 4907 - protein, 480 aa, Bacillus licheniformis
MKTPLYTALVNHAEGHHYSFHVPGHHNGDVFFDEAKTFFETILKVDLTELTGLDDLHEPSGVIKEAQDLVSRLYGAEESFFLVNGSTVGNLAMILAVCQPGDTILVQRNCHKSVFHAIELSGAHPVFLTPEIDEAMAVPTHILYETVEDAISQYPHAKGIVLTYPNYYGHAVDLKPIIEKAHQHDISVLVDEAHGAHFVLGHPFPQSSLKAGADAVVQSAHKTLPAMTMGSYLHLNSGRINRDRLAYYLSVLQSSSPSYPIMASLDIARAYAEDILKTNRTADIEKELINMREVFSQINGADIVEPADARIRQDPLKLCIRSAYGHSGFELKSIFEANGIHPELADERQVLLILPLEGKNMPAPELISTISKDMKDTAVRNDLPAGIGIPSEKVTALPYRKSKLSAFKKESVPFTEAAGRISAESVTPYPPGIPLIMAGERITKETISRLTRLVDLNVHIQGSNQLKQKQLTVYIEEEKS

SEQ ID NO: 4908 - protein, 212 aa, Bacillus licheniformis
MNGLFITFEGPEGAGKTTILQAAADQLTKNGHSVLATREPGGIEISERIREVILNPSHTAMDPKTEALLYAAARRQHLVEKVKPALEEGKIVLCDRFIDSSLAYQGYARGLGIDEVFSVNQFAIGSLMPNVTIYFDIDPEEGIKRIDLNDAREKNRLDLEKLHFHQLVQKGYEEVMNRFPGRFRIVDASQSVELVLKRVNNIIEEALKENQL

SEQ ID NO: 4909 - protein, 109 aa, Bacillus licheniformis
MKLIIAVVQDQDSNRLLKALTDHNFRVTKLASTGGFLKSGNTTFMLGVDDIRVDKALSLIKENGSKRDQLIAPVSPMGGNADSYVPYPVEVEVGGATVFVLPIEQFHQF

SEQ ID NO: 4910 - protein, 146 aa, Bacillus licheniformis
MKISQELRTMIEKQQTPPARGENVSASFKEKMNIQSGKLRVEQLTMLLTDIEAFGKRLSKSRNFKDLARFKGLIKRFVKETVENGLTVENSRSFDLYGNSRTLSIVKELDEKLVQLTEDLMDQEKSSIELLERIGEIKGLLINLYT

SEQ ID NO: 4911 - protein, 329 aa, Bacillus licheniformis
MATTWTEMQKLQPRVMKLLQNSIERNRLAHAYLFEGRKGTGKLDAATLLAKSFFCLEDGAEPCESCRNCQRIESGNHPDVHVVHPDGLSIKKGQIQALQEEFSKTGLESHKKLYIISHADQMTVNAANSLLKFLEEPSSDTIAVLLTEQPQKLLDTIISRCQVLSFQSLQPESIEKELVKQEVSPNIAALLSNMTNNLSEALELSRNDQFAESRAKVIKLYEVLHQRKGHAFFYIQDQWMPFFKEKDHQEMGLDMLLFIYRDVLSIQLGHEDKILFQDLFQSLKQHALQTTQQRVTNQILAVLEAKKRLYSNVNAQGLMEHLVLMLQEG

SEQ ID NO: 4912 - protein, 275 aa, Bacillus licheniformis
LYNVIGVRFKKAGKIYYFDPNGFQIDKDSCVIVETVRGVEYGQVVIANKKVDENDVVLPLRKVIRVADERDRLIVEENQEAALSAFDVCQKKVNEHGLEMKLVDVEFTFDRNKVIFYFTADGRVDFRELVKDLASIFKTRIELRQIGVRDEAKMLGGIGPCGRMLCCSTFLGDFEPVSIKMAKDQNLSLNPTKISGLCGRLMCCLKYENDEYETAKEQLPDIGEVIATSSGPAKVVGLNILERILQVELTDCDKVVEYTWDELLQEGVVSAQTTD

SEQ ID NO: 4913 - protein, 120 aa, Bacillus licheniformis
LDKKELFDTVISLEEQIGSLYRQLGDLKQHIGEMIEENNHLQLENEHLRKRLEETDQRLKSVKSDEKEIKAEKTGHADIGEGHDNLARLYQEGFHICNIHYGSVRKEGDCLFCLSFLNKK

SEQ ID NO: 4914 - protein, 247 aa, Bacillus licheniformis
MIQLKDDERLDYLLAEDMKIVQSPTVFAFSLDAVLLSKFAYVPIQKGNIIDLCTGNGIVPLLLSTRTKAAITGVEIQERLYDMALRSVEYNNLQKQIHLIRDDLKNMPQVLGYNKADVVTCNPPYFKTPKKTEQNLNEHLAIARHEIYCTLEDVIRVSSKLLKQGGKLALVHRPGRLLEIFELMKAFQIEPKRVQFVYPKKSKEANTILVEGIKDGRPDLKILPPLFVYDEQDQYTHEIRKILYGDE

SEQ ID NO: 4915 - protein, 97 aa, Bacillus licheniformis
METNSHYFYVLSCRDGSFYAGYTNNIEKRLKTHNDGKGAKYTRARLPVKLHYAECFSTKREAMQAEYYFKKLSRKNKERYIEEKRREGVDYQPAKEF

SEQ ID NO: 4916 - protein, 292 aa, Bacillus licheniformis
LIINRQKSFDQKSDMGMLYLVPTPIGNLEDMTFRAVSVLKEADIIAAEDTRQTKKLCHVYEIETQLVSYHEHNKESSGHKILEWLKEGKNVALVSDAGMPTISDPGAEIVRDFIEMGGYVVPLPGANAALTALIASGIAPQPFFFFGFLDRSKRERKKQLEALKNRQETMIFYESPHRLKETLAAIREVFGNRQIALTRELTKKFEEFIRGSIEEALTWSEQEQVRGEFCLVIEGSREETIEEAVWWEHLSEKEHVEHYISEGYPSKEAIKKTAVDRGVPKRKIYDAYHIQN

SEQ ID NO: 4917 - protein, 94 aa, Bacillus licheniformis
MKSTGIVRKVDELGRVVIPIELRRTLGIAEKDALEIYVDDEKIILKKYKPNMTCQVTGEVSDDNLKLAGGKLVLSPEGAEQIINEIQAQLQSQK

SEQ ID NO: 4918 - protein, 662 aa, Bacillus licheniformis
MPQEKNTFYITTPIYYPSGKLHIGHAYTTVAGDAMARYKRLRGFDVRYLTGTDEHGQKIQQTAEKENITPQELVDRAAEDIQQLWKKLDISNDDFIRTTEERHKKVIEKVFQKLLDNGDIYLDEYEGWYSIPDETFYTETQLVDVERNEKGEVIGGKSPDSGHPVELIKEESYFFRMGKYADRLLAFYEENPEFIQPESRKNEMINNFIKPGLEDLAVSRTTFDWGIKVPGNPKHVIYVWIDALFNYITALGFNTENDENYQKYWPADVHLVGKEIVRFHTIYWPIMLMALDLPLPKKVFAHGWLLMKDGKMSKSKGNVVDPVTLIDRYGLDALRYYLLREVPFGSDGVFTPEGFVERINYDLANDLGNLLNRTVAMVNKYFDGRIQSYEGPVTAFDEPLSSFSQKTIEAYEQAIENMEFSVALSSLWQFVSRTNKYIDETAPWVLAKDKDKEKELQSVMYHLAESLRITAVLLQPFLTQTPEKIFAQLGVTDASLKTWDSIQSFGQLKSVTVQKGEPLFPRLEAEDEVAYIKSKMQGTAPKEEPKQEEKAPERLPEITIDDFMSTELRVAEVIHAEPVKKADRLLKLQLDLGFEKRQVVSGIAKHYKPEELVGRKVICVTNLKPVKLRGELSQGMILAGEDNGVLSLAEVDSSLANGTRIK

SEQ ID NO: 4919 - protein, 255 aa, Bacillus licheniformis
MLFDTHAHLNAEQFNEDLEEVIARAKEEKVEHIVVVGFDRPTIKRAMELIEEYDFIYAAIGWHPVDAIDMTDEDLAWIKDLSAHEKVVAIGEMGLDYHWDKSPKDVQKEVFRKQIALAKEVGLPIVIHNRDATEDVVSILREEGAEEVGGIMHCYTGSAEIAQECIDMNFYLSFGGPVTFKNAKKPKQVVKQIPNDRLLIETDCPYLTPHPYRGKRNEPSYVKLVAEQIAELKGMTYEEIAAVTTENAKKLFGIS

SEQ ID NO: 4920 - protein, 398 aa, Bacillus licheniformis
MKKLFSVKLSKSRWILIAAGLLVAGSGTAYGAHELAKQQVTISINGKKQDVRTNAKTVGELLKSLDIETRKEDHISPAEDTKLTANMNVEYVAAKPVHFTVDGQEKEIWTTAGTVGKLLKDLNLELAEHDQIDPSVDKEITKDMKLTLQRAFKVTVKDAGKDKDLWTTSTTVADFLKHHKISIKGDDEVKPALDKKLTKDQAIHITRIKKVTDVVEENIPFEVRKKEDDSLEKGKEKVVQDGKHGKLKKHYAVVMKNGKEVSRELIKEETAAESKAKIIAVGTKQAAVAKVSANVSRGNQSSGKEFYVSSTAYTASCNGCSGHTATGVNLKNNPGAKVIAVDPSVIPLGSKVHVEGYGYAVAADTGSAIKGRKIDVFFPNKSTAYRWGNKRVKIKVLN

SEQ ID NO: 4921 - protein, 186 aa, Bacillus licheniformis
MKIKEIIVVEGRDDTAKIKSAVDADTIETNGSAIGEDVIKRIRLAQETRGVIILTDPDFPGEKIRKTIAEKVPGCKHAFLPKHLAKPKNKRGIGVEHASLEAIRECLMTVQEEMEATEPEIEARDLIEAGLIGGPLAKQRRERLGEILNIGYTNGKQLQKRLQMFQIKKSDYLSALDAVLREEEHE

SEQ ID NO: 4922 - protein, 292 aa, Bacillus licheniformis
MNKDIATPIRTKEILNKYGFSFKKSLGQNFLIDTNILDRIVDHAGVTERTGVIEIGPGIGALTEQLAKRAKKVTAFEIDQRLLPILEDTLSPYDNVTVIHQDVLKADVRAVMDEQFQDCDEVMVVANLPYYVTTPIIMKLLEENLPLKGIVVMLQKEVADRMAAKPSSKEYGSLSIAVQFYTEAKTVMNVPKTVFVPQPNVDSAVIRLTLRKEPAVAVQDAAFFFQVVKASFAQRRKTLFNNLVNNLPNGKENKSKIERALQDSHIDGKRRGESLSIEEFAVLSDRLREVLL

SEQ ID NO: 4923 - protein, 293 aa, Bacillus licheniformis
MQFKIGDMVVRKSYRRDILFRIIRIDQSANGEPVAVLHGDEVRLIADAHLGDLEIVREAERQMRKREEETRMKESLDLLRQDYKLLHDKHEYRATNQYNNQQQYFHMPGRVLHLDGDSAYLKKCLALYEKIGVPVYGIHCYEKKMSSVIEELIDEYRPDLLVITGHDAYSKQKGDINNLDAYRHSKDFIETVQKARRKIPHLDQLVIFAGACQSHFESLIRAGANFASSPSRVNIHALDPVYIVAKISFTPFMDRINVWEVLRNTLTREKGLGGIETRGVLRIGMPYKTKAND

SEQ ID NO: 4924 - protein, 86 aa, Bacillus licheniformis
MAKTLSDIKRSLDGHLGKRLTLKANGGRRKTIERSGILAETYPSVFVIQLDQDENSFERVSYSYADILTETVELRFSDDKTSSVAL

SEQ ID NO: 4925 - protein, 41 aa, Bacillus licheniformis
MFAAFCFAFFYPKFFGEVLHKSSKANTCHLFYDESDGWYDT

SEQ ID NO: 4926 - protein, 61 aa, Bacillus licheniformis
MGRRRSIMSEEFKNELAKDLGFYDTVKTEGWGGIRARDAGNMVKRAIELAEQHMAQNQQNH

SEQ ID NO: 4927 - protein, 289 aa, Bacillus licheniformis
LRILEKAPAKINLSLDVRRKRPDGYHEVEMVMTTIDLADRVELTELAEDKVTVSSHNRFVPDDQRNLAYQAAMLMKERYGIKKGVSIFITKVIPVAAGLAGGSSDAAAVFRGLNRLWDLKLSMNELAELGAEIGSDVSFCVHGGTALATGRGEKIRHIETPPHCWVVLAKPTIGVSTAEVYKQLKVDEIEHPDVQGMIAAIEEKNFQKMCDKLGNVLESVTLNMHPEVAMIKNQMKRFGADAMLMSGSGPTVFGLVQYESKVQRIYNGLRGFCDQVYAVRMIGEQNELD

SEQ ID NO: 4928 - protein, 277 aa, Bacillus licheniformis
MKFRRSGRLVDLTNYLLTHPHVLVPLTFFSERYQSAKSSISEDLTIIKQTFEQQGIGTLQTVPGAAGGVKYIPKVKRDEAEEFVKSLGESLIDSERILPGGYLYLTDILGKPSVLTKAGKIFASAFSDREIDVVMTVATKGIPLAYAVASYLDVPTVVVRKDNKVTEGSTVSINYVSGSSNRIQTMSLAKRSLQTGSHVLIIDDFMKAGGTINGMINLLDEFNAHVAGIGVLVEAQGVKERLVDEYMSLLTLSEIDMKEKKVEIQNGNFQRFFAEDE

SEQ ID NO: 4929 - protein, 125 aa, Bacillus licheniformis
MTKVVQTKEAPAAIGPYSQGIVVNNMFYSSGQIPLTPSGEMVTGDITEQTHQVFRNLKAVLKEAGASLETVVKATVFLADMNQFTEVNEVYGQYFDTHKPARSCVEVARLPKDALVEIEVIALVK

SEQ ID NO: 4930 - protein, 38 aa, Bacillus licheniformis
MVLVSKSSFLFGKFVNSVFFYPNITKIFLIMQENKKSR

SEQ ID NO: 4931 - protein, 97 aa, Bacillus licheniformis
VEVTDVRLRRVNTDGRMRAIASITLDHEFVVHDIRVIDGNNGLFVAMPSKRTPDGEFRDIAHPINSSTRGKIQDAVLNEYHRLGDVEEIEYEEAGAS

SEQ ID NO: 4932 - protein, 456 aa, Bacillus licheniformis
MDKRFAVVLAAGQGTRMKSKLYKVLHPVCGKPMVEHVVDEARKLSLEKLVTIVGHGAEDVKKQLGEKSEYALQAEQLGTAHAVKQAKSILGSEKGTTIVICGDTPLLTAETMEAMLTEHQKKAAKVTILTAVAEDPTGYGRIIRNENGDVAKIVEHKDATEEERLVKEINTGTYCFDNEALFQTIEQVSNDNVQGEYYLPDVIEILKNQGETVAAYQTGNFQETLGVNDRVALSQAEIYMKQRINKRHMQNGVSLIDPDNTYISPEAVIGRDTVIYPGTVIKGRVVIGEDAVIGQNSELENSTVGSRTVIKQSVIVDSEVGDDVTIGPFAHIRPDSKIGNEVRIGNFVEVKKSEFGDRSKASHLSYIGDAEIGTDVNLGCGSITVNYDGKHKFKTKIENGAFIGCNSNLVAPVTIGEGAYVAAGSTITDDVPGRALSIARARQVNKEDYAENIHKK

SEQ ID NO: 4933 - protein, 316 aa, Bacillus licheniformis
MSKYEDDNLKIFSLNSNPGLAKEIADIVGVELGKSSVKRFSDGEVQINIEESIRGCDCYVIQSTSAPVNEHIMELLIMVDALKRASAKTINIVMPYYGYARQDRKARSREPITAKLVANLLETAGATRVIALDLHAPQIQGFFDIPIDHLMGVPILGNYFEEKNFKDIVIVSPDHGGVTRARKLADRLKAPIAIIDKRRPKPNVAEVMNIIGHIEGKTAILIDDIIDTAGTITLAANALVESGAEEVYACCTHPVLSGPAIERIDNSKIKELVVTNSIELPEEKKIAKFKQLSVAPLLAEAIIRVHEKQSVSFLFD

SEQ ID NO: 4934 - protein, 208 aa, Bacillus licheniformis
MAILKAEERTDSRRSSLRRIRQSGYVPGVIYGRNLENKSVALDSIELLKILRAEGKNTIINLDINGDQHSVMVTELQTDPLKDSIVHADFKVVDMEAEMEATVPVNLTGEAEGIKQGGVLQQPLYELSVTAKPKNIPQTIEVDISSLEVNDVLTVGDIPTKGDYSYNHEPDEVVASILPPQKQEETEAESAAQDVEEPEKGTEEEKEE

SEQ ID NO: 4935 - protein, 188 aa, Bacillus licheniformis
MLVFAGLGNPGKTYENTRHNVGFMTIDELSKEWNIPLDKTKFNGQYGIGFVSGKKVLLVKPLTYMNLSGECLRPLLDYYEIPVDNLKVIYDDLDLPTGRIRLRTKGSAGGHNGIKSTIQHLGTSEFNRIRIGIGRPVNGMKVVDYVLGAFTDEEEPAIKEAVRQSAKACEASLEKPFLEVMNEFNAKV

SEQ ID NO: 4936 - protein, 76 aa, Bacillus licheniformis
MALHYYCRHCGVKVGSLDHSYVNSEQLGFNHLTNDERNDMISYMDNGDLHVKTICEDCQEALERNPDYHQYHSFIQ

SEQ ID NO: 4937 - protein, 1177 aa, Bacillus licheniformis
LNNIQSYITKSDDFKSIVNGLNEGLKEQLLAGLSGSARSLFTAALTKETRRPVFLITHNLYQAQKITDDLTGLIKDQPVLLYPVNELISSEIAVASPELRSQRLDVLNRLASGETPIVVAPAAAVRRMLPPVEVWQNSQIHIETGRDIDTEQLLQKLVQMGYERTDMVAAPGEFSIRGGIIDVYSLTEENPVRIELFDTEVDSIRIFNTDDQRSLETRDEVTIGPAKELIVRDEDRQRALEQIDQGLANSLKKLKLDKQKEILDQNIAEDKERLKEGHIGQEMVKYLSYFYEKPASLLDYFPKNTLLILDEISRIHEMEDQLQKEEAEWITSLLEEGKILHDTSMSFPFHSLISKQSRPILYYSLFLRHVQHTSPQNIVNVSSKQMQSFHGQMNVLKNEIERFKKSKYTTVFLGDSKERVEKLASVLSDYDIEAAQADQDAALAQGQIYIMEGGLQSGFELPMIKLAVITEEELFKKRVKKQARKQKLTNAERIKSYSELQIGDYVVHVNHGIGKYLGIETLEINGIHKDYLNIHYQGSDKLYVPVDQIDQVQKYVGSEGKEPKLYKLGGSEWKRVKKKVESSVQDIADDLIKLYAEREASKGYAFSPDHEMQREFEAAFPYQETEDQLRSIHEIKRDMEKERPMDRLLCGDVGYGKTEVAIRAAFKAIADGKQVAILVPTTILAQQHYETILERFQDYPINIGLLSRFRTRKEANETIKGLKNGTVDIVIGTHRLLSKDVVYKDLGLLIIDEEQRFGVTHKEKIKRIKANVDVLTLTATPIPRTLHMSMLGVRDLSVIETPPENRFPVQTYVVEYNGALVREAIERELARGGQVYFLYNRVEDIERKAEEISMLVPDAKVTYAHGKMTENELESVMLNFLEGESDVLVSTTIIETGVDIPNVNTLIVFDADKMGLSQLYQLRGRVGRSNRVAYAYFTYRKDKVLTEVAEKRLQAIKEFTELGSGFKIAMRDLTIRGAGNLLGAQQHGFIDSVGFDLYSQMLKEAIEARKGDAPQAEKFEPEIDLELDAYIPQTYVTDGKQKIDMYKRFRAISTIEEKSELQDEMIDRFGEYPKEVEYLFAIAEAKVYAIKERVELIKQDKDAVRLTIDEKASAEIDGQKLFELGSKYGRQIGLGMEGKKLKISIQVKNRKPEEWLETLLDILKGLQNVKKQTIASS

SEQ ID NO: 4938 - protein, 178 aa, Bacillus licheniformis
MKATGIVRRIDDLGRVVIPKEIRRTLRIREGDPLEIFVDRDGEVILKKYSPISELGDFAKEYADALYDSMGHSVLICDRDVYIAVSGGSKKDYLNKSISDMVEKAMDQRTSVLDGDAKTIQLIDGIDEEVASYTVGPIVANGDPIGAVVIFSKDQSIGEVEHKAVETAAGFLARQMEQ

SEQ ID NO: 4939 - protein, 530 aa, Bacillus licheniformis
MGFLKGQRQLLWQGAFVLSLAGILSKILSAVYRVPFQNIVGDVGFYIFQQVYPMIGISVMLATSGFPVIISKLLNDYGSANRAKILRVSMLFLSAVGLGFFLLLFAGAGAIAGFMGDLDLAGVIRAVSFSYLLLPFVSLLRGYFQGSERMLPTALSQIGEQTLRVGAILVLTWWLVKSGFSLYDAGAGAAFGSLVGGLAAFFILAVFWAKREKKATAVRIEAGTGDILKQLCLYSVTICTAGLMLILIQLVDALHLYSLLAGQGMDELQAKHTKGVYDRGQPLLQLGTVFAASIATALVPSLTKAKKKGETAVLEEKIRYSLKMSFVIGTGAAAGLICILEPVNVMLFKNSDGTAALQIFSASILFASLAMTMTAVLQGLGNTCLPAVFVCCGILVKAVLNELLIPGFGISGAAFATMMSFAAVAGLNFFQLKRKGWIKLSEYRIAGVLLSAVIMSAALAVWLFAFEAAIPHKSRWISAAESLSAVFVGGVVFLSGIFTLRVFSEKELELVPFGSKLLTLKRERGGRHGR

SEQ ID NO: 4940 - protein, 489 aa, Bacillus licheniformis
MGGKITVVGLGAGDMNQLTLGVYKRLTQAEVLYVRTKDHPLIEDLKKEIAEIHFFDEVYEKHDQFEDVYEEIVERLFEEAKQGDVLYAVPGHPFVAEKTVQLLLERRGAHQADVVVEGGHSFIDATLNALQIDPIDGFQFVDAVRFSADEVELRHHLIICQVYDQMTASEVKLTLMEKLPDDYEVVIVTAAGSSMQDIRTVPLYELDRSVGINNLTSVYVPPVKDEEILHQEFSMFRSVIRKLRGPDGCPWDRKQTHESLKKYLIEECYEVLEAIDEEDPDHLVEELGDVMLQVLLHAQIGEDDGLFTIDDVIRGITAKMIRRHPHVFGEVSVRDEADVMVNWEEIKKQEKQADDKSLLDDIPKPLPALSKANKLQKKAAKTGFDWSNVQDIWDKVQEEMKEFSSEISEAEQHSKKMKEEFGDLLFALVNIGRFYKIEPEEALAMTNAKFYRRFTYIEQSAKRMGKDLESMTLEEMDELWNEAKGIERS

SEQ ID NO: 4941 - protein, 87 aa, Bacillus licheniformis
MRLDKFLKVSRLIKRRTLAKEVADQGRISINGQQAKASSVVKAGDELAVRFGQKLVTVKVNELKDTTKKEEAADMYTVLKEEKLGGE

SEQ ID NO: 4942 - protein, 102 aa, Bacillus licheniformis
MNVYYDQHNPSGGASGPEHNVTMKGRKLLDISGVKQVESFDNEEFLLETVMGMLAVRGENLQMKNLDVEKGVVSIKGRVLDLVYLDEQQGEKAKGFFSKLFK

SEQ ID NO: 4943 - protein, 208 aa, Bacillus licheniformis
MTLTTQFYTMLAMAGMGAWLGASLDTYTRFVVRSKTARWLLFLHDFLFWVVQGLLFFYVLLSVNEGEFRIYIFLAVMLGFAAYQSLFKQVYIKLLEWMISFFIFISRLGSKMMRMMVFRPVVWTFKAILAIILFTMRNIYVLFRFFAVCLYKILKFAGYPIYFILYQCCRLLPAPVRGLLRRFLQKGAGFFEKGKELFITIKAKLLKK

SEQ ID NO: 4944 - protein, 125 aa, Bacillus licheniformis
MNDPTRRNISQIQNEYKEQMERKQQQLKRKRRGLYRRLMVFGAVVLLSAIVIVSSLWSQTSDISAKQEKKAELLKQLEQLEAKKSDLKDEIVKLKDEDYVAELARKDYYLSKDGEIIFKFEDKSK

SEQ ID NO: 4945 - protein, 132 aa, Bacillus licheniformis
MSIEVGSKLQGKVTGITNFGAFVELPGGSTGLVHISEVADNYVKDINDHLKVGDQVEVKVINVEKDGKIGLSIKKAVDRPQSSRPARPKNDFRSKETFEQKMNKFLKDSEDRLSSLKRNTESKRGGRGARRG

SEQ ID NO: 4946 - protein, 829 aa, Bacillus licheniformis
MEKAERRVNSPIAGPAVQKLYSWFGSMTKLMMQHLYSLFFYKGLIYMVIGFLLGRAFILSEVIPFALPFFGAMLLIKKDKAFLACLALLAGALSISPQHSLFVLAALFAFAICTKMTSLIIKDRVRTLPVVVFLAMAVTRCGFVYAEYGTVSGYHYIMAFVEAGLSFILTLIFLQSLPIVTSKRQKQSLKIEEIICFMILIASVLTGLTGVSFQGMQAELILARYVVLAFAFIGGASIGCTVGVVTGLILSLSNIGNLYQMSLLAFSGLLGGLLKEGKKFGAAVGLLIGSLLISLYGEGSAELVPTLYESLIAIGLFLLTPQSITKKVAKYIPGTTEHAQEQQQYARKIRDVTAQKVDQFSNVFHALSESFATFYHSAPDDEGKEKEIDLFLSTVTEHSCQSCYKKNKCWVQNFDKTYDLMKRVMQETEEKQYFKNRKLKKEFHQHCSKSKQVEALIEDELTHFRANQTLKQKVHDSRRLVAEQLLGVSQVMADFSREIKREREKHFIQEEQIRDALQHFGIEIQQVEIYSLEQGNIDIEMSIPYCNGHGECEKIIAPMLSDILEEQIIVKAEQCAGHPNGYCHVAFGSAKSYRVVTGAAHAAKGGGLVSGDSYNMMELGTGKYAAAISDGMGNGARAHFESNETIKLLEKILKSGIDEKVAIKTINSILSLRTTDEIYSTLDLSVIDLQDASCKFLKIGSTPSFIKRGDQIIKVQASNLPIGIITEFDVDVVSEQLKAGDLLIMMSDGIFEGPRHVENHDLWMKRKLKSLKTEEPQEIADLIMEEVIRTRSGLIEDDMTVIVIKLDHNTPKWASIPAPAFFQKNQEIS

SEQ ID NO: 4947 - protein, 245 aa, Bacillus licheniformis
MKKGHLNQILLLTDGCSNRGEDPQAMAAFAKEQGITVNVIGIMDEHEMDQEAMKEVEGIALAGGGVHQLVYTSQLSQTVQMVTKKAMTQTIQGVVNSELKQILGKHTEMDELPPDKRGEVMEVVDELGETVHLHVLVLVDTSASMNPKLPTVKEALIDLSISLNSRIGENEFAMLIFPGKKQEVELVLDWTPKFESLSSIFSKLSAGGITPTGPAIREAIQHFNKIGSRRRMLEDDEKRFDEFGG

SEQ ID NO: 4948 - protein, 344 aa, Bacillus licheniformis
MKNASTSLAASLKPGAAVVGKWNNHSYKIIRQLGKGANGVVYLADSRKGRVALKVSDDSLSITSEVNVLKSFSKAQAKAMGPSFFDVDDMMVTGTGKKLSFYVMEYIEGPLLLRYVNEKGEEWTPVLISQLLSSLSAIHREGWVFGDLKPENLIVTGPPPQIRCIDVGGTTKEGRAIKEYTEFFDRGYWEFGTRKAEPSYDLFSVAMIMVNCAVKKEFKKTARPQEQLMSVIDGHPFLKRYKPVLASALKGSYRTADEMKGDLLEIGRPPRMQSSRQSRTARSSSASAPSQGLRHKQGTPQQQRLRSGRRKQRNPSKSGGVFETLLIVVSVLALYFAYIVLFFI

SEQ ID NO: 4949 - protein, 476 aa, Bacillus licheniformis
VKSIEDFMKKYELSFDGVTLIAGVSGGPDSMALLHALHHTVPASATLIAAHVDHMFRGEESERDMRFVQDYCEAEGIQCEAVQIDVLAFAAENNLNKQAAARECRYAFFQELMKRHRAEYLVLGHHGDDQVETMLMKMAKGTVGIGLAGIQPKRRFDSGWLLRPFLRLSKDDLLAYCKENRIPFRTDPSNSEDDYTRNRFRHHVLPFLKKESEDVHKRFQSVSEFLTEDELYLQALTKDKMNTVITSKSSSGVEISIERLLALPMPLQRRGVHLILNYLYENVPSAFSAHHIQVFLDWISQDGPSGSLDFPNGLKVAKSYHTCLFTFQRLQCENVSYHYEISGAGEEELILPGGSSLHVSGPGSTRKLQGNDVFATSPKQVQFPLYVRTRQNGDRVKLKGMNGSKKVKDIFIDEKVPLSKRDSWPIVTDAVGNIIWIPGLKKTIFEELDVTNNDRIVLQYRQHEKCRGLAKNETGY

SEQ ID NO: 4950 - protein, 179 aa, Bacillus licheniformis
MKQDIENILISEEEIQKKVKELGATLTEEYSGKFPLAIGVLKGAMPFMADLLKHIDTYLEMDFMDVSSYGSSTVSSGEVKIIKDLDTSVEGRDILIIEDIIDSGLTLSYLVELFRYRKAKSIKIVTLLDKPSGRKADIKADYVGFEVPDAFVVGYGLDYAERYRNLPYIGVLKPAVYES

SEQ ID NO: 4951 - protein, 639 aa, Bacillus licheniformis
MNRVFRNTIFYLLILLVVIGVVSYFQTANPKTENMTYSDFVSNLENGKVENVSIQPVRGVYEVRGQLTTYEKDQYFLTHVPEGKGADQIIDQVKKTKIQIEPAQEANGWMTFFTTIIPFVIIFILFFFLLNQAQGGGSRVMNFGKSKAKLYTEEKKRVKFKDVAGADEEKQELVEVVDFLKDPRKFAELGARIPKGVLLVGPPGTGKTLLAKACAGEAGVPFFSISGSDFVEMFVGVGASRVRDLFENAKKNAPCLIFIDEIDAVGRQRGAGLGGGHDEREQTLNQLLVEMDGFSANEGIIIIAATNRADILDPALLRPGRFDRQITVDRPDVKGREAVLQVHARNKPLDESVNLKAIAMRTPGFSGADLENLLNEAALVAARQDKKKIDMRDIDEATDRVIAGPAKKSRVISKKERNIVAYHEAGHTVIGLVLDEADMVHKVTIVPRGQAGGYAVMLPKEDRYFQTKPELLDKIVGLLGGRVAEEIIFGEVSTGAHNDFQRATGIARRMVTEFGMSEKLGPLQFGQSQGGQVFLGRDFNNDQNYSDAIAYEIDKEIQRFIKECYERAKTILTENRDKLELIAQTLLEVETLDAEQIKHLSEHGRLPDRTYSDDQEKTDDVKVNINKRDDEEKNEDEKE

SEQ ID NO: 4952 - protein, 62 aa, Bacillus licheniformis
MKKSNDAFSSLQENCQALLLAVFFFLWLKKSALENLSPHRFDSFTNRIGIVYCMMVECFMSK

SEQ ID NO: 4953 - protein, 258 aa, Bacillus licheniformis
MLLVIDVGNTNTVLGIYHEGELEYHWRIETSRHKTEDEFGMLLRSLFDYVGLMFDQIEGIIISSVVPPIMFSLERMCIKYFQIEPQIVGPGMKTGLNIKYDNPKEVGADRIVNAVAAIHLYGSPLIVVDFGTATTYCYINERKEYMGGAIAPGITISTEALYSRAAKLPRIEIARPDHIVGKSTVSAMQSGILYGYVGQVEGIVKRMKWQSKKNPKVIATGGLASLIADESDCIDIVDPFLTLKGLELIYERNRVESV

SEQ ID NO: 4954 - protein, 289 aa, Bacillus licheniformis
MDYLVKAIAYDGKVRAYAANTTETIHEAQRRHNTWPTASAALGRTMTAAVMLGAMLKGEDKLTVKIEGGGPIGAIVADGNAKGDVRGYVSNPHVHFDLNEHGKLDVRRAVGTSGTLSVVKDLGLRDLFTGQVEIVSGEIGEDFTYYLVSSEQVPSSVGVGVLVNPDNTILAAGGFILQLLPGTDDETITKLETNLSQVEPISKLIQKGLTPEEVLAAVLGEEPEVLETVPVRFTCNCSKERFARGIIGLGKDEIQQMIDEDGQAEAQCHFCNETYLFTKEELEALRDEI

SEQ ID NO: 4955 - protein, 296 aa, Bacillus licheniformis
LKSRTLWPIILGAIFVNCIVIAYVLTKAQTASSSSAQEVIAHIGKNGITREEWLSEMEERYGKSTLEDMINDRVVTQMAEKNKIKVSDDDIEREFLLIKAVYNSFYEDENTTEKEWKEQIKHNILLEELLTKDIVISDSELKSFYNKNKDLYKFDDSYRLKHIVVKDKDEAEQVLKELKEGSSFEAAAAEHSTDRYTAPYGGDLGFVNDQHENVPAEYLEKAEQLKENQWVDEPIKTSQGYAIIQLKEKLPGQAFTYSEVKNQIRRQIAMDQLGDKASVKTLWKDAKVSWFYDDKK

SEQ ID NO: 4956 - protein, 307 aa, Bacillus licheniformis
MVRVANSVYDLIGNTPVVKLNRLVDEDSAEVYVKLEYMNPGSSVKDRIALAMIEDAEEKGLLKEGDTLIEPTSGNTGIGLAMVAAAKGIKAILVMPDTMSSERRNLLRAYGAELVLTPGAEGMKGAIKKAEELAEEHGYFMPQQFNNPANAEVHRRTTGKEIAEQFGDGLDAFIAGIGTGGTITGAGEVLKEKNPSIKIFAVEPTDSPVLSGGKPGPHKIQGIGAGFVPKILNTEIYDEIITVKNEEAFEFARKAAREEGILGGISSGAAICAALQVAKKLGKGKKVLAVLPSNGERYLSTPLYQFE

SEQ ID NO: 4957 - protein, 62 aa, Bacillus licheniformis
LNRLQLKQEAADDVGGLLFVMERSPFKSSVSLSEHAQGLFSVLEMKFSFPRKKICITIRTLD

SEQ ID NO: 4958 - protein, 476 aa, Bacillus licheniformis
MRQRRPVARAFPFSNQQFLQQYESLSKGKEYHVLLESARGGEYSIAGLDPVAIAKGKDGITTIQYKGDVIFKEGDPFLQFSQWFETLKTETVADFPDFQGGAVGFLSYDYARYIEKFKILSIDDLQTPDLFFLVFDDIAVYDHEQQQLWVITHTDEETPAAAEEKLDRLEQMWKTEHPKAAGGHQPNDNKGPAFAASFTEAGFSQAVEKVKQYIASGDVFQVNLSVRQSERLSAPPYEVYKMLREINPSPYMAYLETPDFQIICGSPELLIKKKGTRLETRPIAGTRSRGADEAEDEALANELIMNEKERAEHVMLVDLERNDLGRVSKYGSVRVDEFMVIEKYSHVMHIVSNVCGELRDECDAVDVIHAVFPGGTITGAPKVRTMEIIEELEPTRRGLYTGSIGWFGYNQDMHFNIVIRTIYVKAGQAFMQSGAGIVIDSNPRHEYKESIKKALAMKKALQLSEEEKKEQRRAEI

SEQ ID NO: 4959 - protein, 194 aa, Bacillus licheniformis
MILMIDNYDSFTYNLVQYLGELGEELVVKRNDEITLQEIEDMSPDFLMISPGPCSPDEAGISLEAIRHFAGKIPIFGVCLGHQSIAQVFGGDVVRAERLMHGKTSEISHDGLTVFKGLEHPLTATRYHSLIVKPDTLPDCFETSAWTEEGEIMAIRHKELPVEGVQFHPESIMTAYGKEMLKNFIETYRKKVNA

SEQ ID NO: 4960 - protein, 286 aa, Bacillus licheniformis
MIIYLNGQYVKEEEARLSPFDHGFLYGVGVFETFRLYEGKPFLLDWHMDRLNNALEQLKIELELTKSEVLVILDRLLQLNQPQNLDARVRLNISAGPGGPGLFPDSYKNPGVMVMMNPFQPASVPAEKEGVILQVCRNTPEGPFRLKSHHFLNNLYGKRELGHGAAKEGIFLTEGGAVAEGIISNVFWRKGSCVYTPSLDTGILGGVTRRYVIERLADMGIEVIEGVYPLEELLFADEAWMTNSVQEIVPFRRIGSTEFPGKDGNLSKRLQEAYTNDRKAAKEYLS

SEQ ID NO: 4961 - protein, 285 aa, Bacillus licheniformis
MALQTAVRSKQLIAKQYTLSYEDKTLIMGILNVTPDSFSDGGKYNSIDRAVIHAKQMIEDGAHILDIGGESTRPGAEKVSLDEELSRVIPVIEKLVQEIDVPISVDTYKAQVADEAIKAGAAIINDVWGAKADPDMARVAAAHNVPIILMHNREERNYKDLIPDMLSDLMECVSIAKSAGVQDHHIVLDPGIGFAKTYHDNLAVMNQLEKFSEPGYPVLLGTSRKKFIGRVLDLPPEERAEGTGATVCLGIQKGCDIVRVHDVKQISRMAKMMDAMIDKGGVYHR

SEQ ID NO: 4962 - protein, 127 aa, Bacillus licheniformis
LIKEAFIIDKVHVEGMEFYGYHGVFKEENKLGQRFRVDLTAFLDLSEAGKTDNIEATINYAELYKLCKEVVEGEPVNLVETLAETIAAQVLENFEAVQECTVKVVKPDPPIPGHYKSVAIEMTRKRK

SEQ ID NO: 4963 - protein, 166 aa, Bacillus licheniformis
MNNTAYIALGSNIGRREEYLKKAVSLLHQHPSVEVTDISSIYETDPVGYTDQDLFLNMAAAVKTSLSPFELLDLTQRIEKELGRKRDIRWGPRTADLDILLYNRENIETEQLIVPHPRMHERLFVLIPLLEIYPDLEGAVNHAKNQEGVRVWKQKSGVDEFVHIES

SEQ ID NO: 4964 - protein, 333 aa, Bacillus licheniformis
MFKIGDIELKNRVVLAPMAGVCNSAFRLTVKEFGAGLVCAEMVSDKAILYNNAKTMGMLYIDEREKPLSLQIFGGEKETLVEAAKFVDQNTTADIIDINMGCPVPKITKCDAGAKWLLDPNKIYEMVSAVVEAVDKPVTVKMRMGWDEDHIFAVENARAVERAGGKAVALHGRTRVQMYEGTANWDIIKEVKQSVSIPVIGNGDVKTPQDAKRMLDETGVDGVMIGRAALGNPWMIYRTVHYLETGELKDEPKVREKISVCKLHLDRLIGLKGENVAVREMRKHAAWYLKGIRGNAKVRNEINHCETRDELVQLLDAFTIEAEAKELQDAKVG

SEQ ID NO: 4965 - protein, 499 aa, Bacillus licheniformis
MSHEEHNHEELNDQLQVRRDKMNQLRESGKDPFGQRFDRTHQSTDLIESYNEFSKEELEEKAIEVTIAGRMMTKRGKGKAGFAHIQDLKGQIQIYVRKDSVGEEQYEWFKSSDLGDIVGVTGVMFKTNVGELSVKATSFDLLTKALRPLPDKYHGLKDIEQRYRQRYLDLIVNPESKNTFITRSKIIQSMRRYLDDHGYLEVETPTMHAIPGGASARPFITHHNALDMPLYMRIAIELHLKRLIVGGLEKVYEIGRVFRNEGVSTRHNPEFTMIELYEAYADYKDIMRLTENLIAHIAQEVLGTTTVQYGDYEVDLKPEWKRLHMVDAVKEATGVDFWKEVSVEEARAYAKEHGIEISEGMSVGHIINEFFEQKVEETLIQPTFIYGHPVEISPLAKKNPEDPRFTDRFELFIVGREHANAFTELNDPIDQKERFEAQLKEREEGNDEAHMMDEDFVEALEYGMPPTGGLGIGIDRLIMLLTNSPSIRDVLLFPQMRHR

SEQ ID NO: 4966 - protein, 43 aa, Bacillus licheniformis
VVYYYSLPQNGGERKKRTSKKVLDLISEIEYNIKVALTMIFEN

SEQ ID NO: 4967 - protein, 154 aa, Bacillus licheniformis
VGKNISDIIEQYLKQILEQNGKEILEIKRSEIADKFQCVPSQINYVINTRFTSERGYIVESKRGGGGYIRIIKIKMNDKIDLINNIMNQIYTRLSQAASDDIILRLLENGVITESEAKLMVSVMDRSVLYIDLPERDELRARMMKAMLTSLKFK

SEQ ID NO: 4968 - protein, 184 aa, Bacillus licheniformis
VICQECKERPATFHFTKVINGEKKEMHICEQCAKENSESYSMNESGGFSIHNLLSGLLNFDSSFTNSSEAQLFQQPDQVLRCKKCNMTFPEFRKTGRFGCSECYKTFHSYITPVLRKVHSGNTVHAGKIPKRIGGNLHVRRQIEALKKELKELIQQEEFEKAANIRDQIRSLEQNLNANKEEED

SEQ ID NO: 4969 - protein, 363 aa, Bacillus licheniformis
MSLQHFIQNALSNWMRQEGPESDIVLSSRIRLARNLDKVRFPTLFSNEEASAIIALFEEQFTGYEVPGIGKFELVKMDQVQPLEKRVLVEKHLISPHLTEASFGACLLSENEEVSIMLNEEDHIRIQCLFPGFQLSEALKAANQVDDWIEDRIDYAFSEQRGYLTSCPTNVGTGLRASVMMHLPALVLTRQINRIIPAINQLGLVVRGIYGEGSEALGNIFQISNQITLGKSEHDIVEDLNSVVAQLIEQERSARKALYQTSQIELEDRVYRSYGVLSNCRMIESKETARCLSDVRLGIDLGIIKGLSSNILNELMILTQPGFLQQYSGGALRPNERDIRRAALIRERLKLENNGNRQEDETI

SEQ ID NO: 4970 - protein, 810 aa, Bacillus licheniformis
MMFGRFTERAQKVLALAQEEALRLGHNNIGTEHILLGLVREGEGIAAKALQALGLSPDKIQKEVESLIGRGQEMSQSIHYTPRAKKVTELAMDEARKLGHSYVGTEHILLGLIREGEGVAARVLNNLGVSLNKARQQVLQLLGSNESGGVASGANSSANTPTLDSLARDLTAIAKEDSLDPVIGRSKEIQRVIEVLSRRTKNNPVLIGEPGVGKTAIAEGLAQQIINNEVPEILRDKRVMTLDMGTVVAGTKYRGEFEDRLKKVMDEIRQAGNIILFIDELHTLIGAGGAEGAIDASNILKPSLARGELQCIGATTLDEYRKYIEKDAALERRFQPIQVDQPSPEESIQILKGLRDRYEAHHRVSITDEAIEAAVKLSDRYISDRFLPDKAIDLIDEAGSKVRLRSFTTPPNLKELEQKLDEVRKEKDAAVQSQEFEKAASLRDTEQRLREQVEETKKTWKEKQGQENSEVTVDDIAMVVSSWTGVPVSKIAQTETDKLLNMESILHSRVIGQDEAVVAVAKAVRRARAGLKDPKRPIGSFIFLGPTGVGKTELARALAESIFGDEEAMIRIDMSEYMEKHSTSRLVGSPPGYVGYDEGGQLTEKVRRKPYSVVLLDEIEKAHPDVFNILLQVLEDGRLTDSKGRTVDFRNTILIMTSNVGASELRRNKYVGFNVQDETQNYKDMKDKVMGELKRAFRPEFINRIDEIIVFHSLEKKHLKDIVSLMSDQLTKRLKEQDLSIELTEAAKEKIADEGVDLEYGARPLRRAIQKHVEDRLSEELLKGHIQKGQHIVLDVEDGEFVVKTEAKTN

SEQ ID NO: 4971 - protein, 459 aa, Bacillus licheniformis
MAKTKTKFICHSCGYESAKWMGKCPGCGAWNTMVEETIKKPAANRRTAFSHSVQTVQKPSPLTSIETTEEPRIKTKLGEFNRVLGNGIVKGSLVLIGGDPGIGKSTLLLQVSAQLADSKENVLYISGEESVKQTKLRADRLGINSPTLHVLSETDMEYITSSIEEMNPSFVVVDSIQTVYQSDITSAPGSVSQVRECTAELMRIAKTKGIPIFIVGHVTKEGSIAGPRLLEHMVDTVLYFEGERHHTFRILRAVKNRFGSTNEMGIFEMREEGLTEVLNPSEIFLEERSAGAAGSSVVASMEGTRPVLVEIQALISPTSFGNPRRMATGIDHNRVSLLMAVLEKRVGLLLQNQDAYLKVAGGVKLDEPAIDLAVAVSIASSFRDTPPHPTDCFIGEVGLTGEVRRVSRIEQRVQEAAKLGFKRMIIPSANVEGWTKPKGIEVVGVENVAEALRASLGGS

SEQ ID NO: 4972 - protein, 358 aa, Bacillus licheniformis
MDKDKKGAKQDLSEILQFVAPGTPLREGIENVLRAKTGGLIVVGFNDKVKEVVDGGFHINSSFSPAHLYELAKMDGAIILSDSGQKILYANTQLMPEATIPSSETGMRHRTAERVAKQTGCLIIAISERRNVITLYQENMKYILKDIGFILTKANQAIQTLEKYKLILDHAISNLNALEFEELVTFGDVISVLHRYEMVLRIKNEINMYIKELGTEGHLIRLQVSELITDMEQEAALFVKDYVKEKIKDPFVLLKQLQDMSSFELLDDAILLKLLGYSATTNMEEYVFPRGYRLLHKIPRLPMPIVENVVEAFGHLKLIIEADVKDLDEVEGIGAVRAQKIKKGLKRLQEKHYTDRQL

SEQ ID NO: 4973 - protein, 40 aa, Bacillus licheniformis
VIKICNLWVYYSYFLFSLFHVETAAFIKIKTIILKEVKVC

SEQ ID NO: 4974 - protein, 362 aa, Bacillus licheniformis
MLKRIVQAFFAILGGVIGIFLIPELFVLLNVQDIPLVTNPYASACLGAIIFFLLGIWCADHVINWVKQIEDSLIKAPVSDLLFGSLGLIFGLMLAYLIVNVIPLKDIPYQLISTVIPIVLAAFLGYLGFRVGFKKKDEMLTLFTSRKKKGSAEEERPEEDKKLKILDTSVIIDGRIADICQTGFLEGVIVIPQFVLEELQHIADSSDVLKRNRGRRGLDILNRIQKELDIKVEIYEGDFEDIQEVDSKLVKLAKLTSGVVVTNDFNLNKVCELQKVAVLNINDLANAVKPVVLPGEEMKVQVIKDGKEHNQGVAYLDDGTMIVVEEGRNYIGKHIDVLVTSVLQTAAGRMIFAKPKLLEKAL

SEQ ID NO: 4975 - protein, 231 aa, Bacillus licheniformis
MNYEVVIPAAGQGKRMNAGKNKLFIEAKGIPVIIHTLKVFENHDACKRIILVINEQEFGEFNTLLKTYHFKTPIEMVPGGRERQQSVFAGIKAAGKEETVLVHDGARPFIKREYIEQLVEKAKETGAAIVAVPVKDTIKRVQDGEIAGTIERSSLWAAQTPQAFRLSILMNAHLEAEAKGFLGTDDASLVEEAGGTVAIIQGDYQNIKLTTPDDLLVAEAILEAEKRNEHV

SEQ ID NO: 4976 - protein, 158 aa, Bacillus licheniformis
MFRIGQGFDVHQLVEGRPLIIGGITIPYEKGLLGHSDADVLLHTIADACLGAVGEGDIGKHFPDTDPEFKDADSFKLLRHVWMIVKEKGYTLGNLDCTIIAQKPKMAPYIEDMRARIAEGLEAEISQINVKATTTEKLGFTGRAEGIAAQASVLLQKV

SEQ ID NO: 4977 - protein, 485 aa, Bacillus licheniformis
MGNEVRVRYAPSPTGHLHIGNARTALFNYLFARSQGGKFIIRIEDTDRKRNIEGGEQSQLNYLKWLGIDWDESVDVGGEYGPYRQSERNDIYKTYYEELLEKGLAYKCYCTEEELEKEREEQAARGEMPRYSGKCRNLTKEEQEKLEAEGRQPSIRFKVPQGEVIRFDDIVKGEISFETDGIGDFVIVKKDGTPTYNFAVAVDDYLMKMTHVLRGEDHISNTPKQIMIYNALGWDIPAFGHMTLIVNESRKKLSKRDESIIQFIEQYEELGYLPEALFNFITLLGWSPVGEEELFTKEQFIEIFDVNRLSKSPAVFDTHKLKWVNNQYVKKLDLDQVIELTVPHLQKAGKVSEELSGSEQEWVRKLISLYQEQLSYGAEIVELTELFFKDDIQYNREARTVLEEEQVPEVLRVFAEKLEQLDSFTADEIKASIKAVQKETGHKGKKLFMPIRVATTGQTHGPELPQSIELLGKDTVLKRLHNIIQ

SEQ ID NO: 4978 - protein, 47 aa, Bacillus licheniformis
LRKQLCCFLNRVEPRVKKRLCHQTEAFFIWFDNRDKGSGERGESCVL

SEQ ID NO: 4979 - protein, 216 aa, Bacillus licheniformis
VFFKMLKEDVDVVFDQDPAARSYIEVILTYSGLHAIWAHRIAHALYKRKRFFIARAISQIARFFTGIEIHPGAKIGRRFFIDHGMGVVIGETCEIGNNVTVFQGVTLGGTGKEKGKRHPTIEDDALISTGAKVLGSITVGRGAKIGAGSVVLHDVPECSTVVGIPGRVVVQNGKKIRRDLNHQDLPDPVADRFRELENEIRQLKQELRRKEREDEL

SEQ ID NO: 4980 - protein, 467 aa, Bacillus licheniformis
VTLTLYNTLTRKKEPFVPLEEGKVKMYVCGPTVYNYIHIGNARPPIVFDTVRKYLEYKGYEVQYVSNFTDVDDKLIKAANELGEEVPVIAERFIKAYFEDVGSLGCTKADCHPRVTENMDEIIDFIQTLIDKGYAYEADGDVYYKTRSFEGYGKLSHQSVDELRSGARIQVGEKKEDALDFTLWKAAKDNEISWDSPWGKGRPGWHIECSAMARKYLGDSIDIHAGGQDLAFPHHENEIAQSEALTGKPFAKYWLHNGYINIDNEKMSKSLGNFVLVHDIIKEHDPQVLRFFMLSVHYRHPINYSVELLENTKNAFGRLKTAYSNLQHRLKSSTNLTEGDSEWLEKIEEQRKAFQTAMDDDFNTANAISVLFDLAKHANYYLQEKNTAEHVIQAFIQLFDEICSVLGFSLKEQELLDKDIEELIEKRNEARRNRDFATSDQIRDQLKSMNIILEDTPQGTRWKRGES

SEQ ID NO: 4981 - protein, 138 aa, Bacillus licheniformis
MNLETIKDAKQLNGLALAYMGDAVLEVYVRHHLLKQGMTRPNDLHRQSRRYVSAKSQASMLFALEEQEFFTEEEQAVLRRGRNAKSGTVPKNTDVQTYRYSTAFEAVIGYLFLENREDRLNELIKAALEKRDGREEVK

SEQ ID NO: 4982 - protein, 249 aa, Bacillus licheniformis
MSQQHDYVIGKNAVIEILKSGRELYKLWMAENTVKGQAQQVVDLAAKKGVTIHYVPRKKLDQMVSGQHQGVVAQVAAYEYAELDDLFQKAEDRNEQPFILVLDEIEDPHNLGSIMRTADAVGAHGIVIPKRRAVGLTTTVAKASTGAIEHIPVVKVTNLSRTLEEMKGRGIWVVGTDASGQQDYRSLDGNMPLALVIGSEGKGMGRLVKEKCDFLIRLPMAGKVTSLNASVAAGLLMYEVYRKRSPLGE

SEQ ID NO: 4983 - protein, 170 aa, Bacillus licheniformis
MDILLVDGYNMIGAWPQLKDLKENSFEEARDLLIQKMAEYQSYTGFRVIVVFDAHLVKGIEKKKVNHRVEVIFTRENETADERIEKLVSDLNSIQTQIHVATSDYTEQWAIFGQGALRKSARELLREVEAIERQIENRVKQITSERPAGKIPLSEDVLRIFEKWRRGDLD

SEQ ID NO: 4984 - protein, 223 aa, Bacillus licheniformis
VNLQNNQGKFSKEQFSKERFCQLEDEQVIEMVHVGDSDALDYLITKYRNFVRAKARSYFLIGADREDIVQEGMIGLYKSIRDFREDKLTSFKAFAELCITRQIITAIKTATRQKHIPLNSYVSLDKPIYDEESDRTLLDVISGAKVMNPEELIINQEEFDDIELKMGELLSDLERKVLALYLDGRSYQEISEELNRHVKSIDNALQRVKRKLEKYLELREISL

SEQ ID NO: 4985 - protein, 49 aa, Bacillus licheniformis
MKKKVTLACKNCGNRNYTTMKSSAALAERLEVKKYCNNCNSHTVHLETK

SEQ ID NO: 4986 - protein, 59 aa, Bacillus licheniformis
MGIIKFLKNVGKEMKKVTWPKGKELTRYTITVITTVIFFAIFFALIDSGITQLIRLIVE

SEQ ID NO: 4987 - protein, 177 aa, Bacillus licheniformis
MEKKWYVVHTYSGYENKVKANLEKRVESMGMQDKIFRVVVPEEEETDIKNGKKKVVKKKVFPGYVLVELVMTDDSWYVVRNTPGVTGFVGSAGSGSKPTALLPGEAEKILKRMGLEERKTEIDFELKETVKVIDGPFADFTGTIEEIDHDKNKVKVFVNMFGRETPVELEFTQVDKL

SEQ ID NO: 4988 - protein, 141 aa, Bacillus licheniformis
VAKKVVKVVKLQIPAGKANPAPPVGPALGQAGVNIMGFCKEFNARTSDQAGLIIPVEISVYEDRSFTFITKTPPAAVLLKKAAGIESGSGEPNRNKVATVKRDKVREIAETKMPDLNAADVEAAMRMVEGTARSMGIVIED

SEQ ID NO: 4989 - protein, 232 aa, Bacillus licheniformis
MAKKGKKYVEAAKLVDRTKAYDVNEAIELVKKTNTAKFDATVEAAFRLGVDPRKNDQQIRGAVVLPNGTGKTQRVLVFAKGEKAKEAEAAGADYVGDADYINKIQQGWFDFDVIVATPDMMGEVGKIGRVLGPKGLMPNPKTGTVTFEVEKAVNEIKAGKVEYRVDKAGNIHVPIGKVSFEEGKLVENFATMYDTILKAKPAAAKGVYVKNVSVTSTMGPGIKVDPSTFNVK

SEQ ID NO: 4990 - protein, 166 aa, Bacillus licheniformis
MSSAIETKKVVVEEITSKLKESKSTIIVDYRGLNVAEVTELRKQLREANVEFKVYKNTMTRRAVEQAELDGLNDFLTGPNAIAFSTEDVVAPAKVLNEFAKKHEALEIKAGVIEGKVSTVEEVKALAELPSREGLLSMLLSVLQAPVRNLALATKAVAEQKEEQGA

SEQ ID NO: 4991 - protein, 123 aa, Bacillus licheniformis
MALNIEEIIASVKEATVLELNDLVKAIEEEFGVTAAAPVAVAGGAAAGGAAEEKTEFDLVLAGAGDQKIKVIKVVREITGLGLKEAKELVDNTPKPLKEGIAKEEAEELKAKLEEVGASVEVK

SEQ ID NO: 4992 - protein, 201 aa, Bacillus licheniformis
MTDHYYSEKPSAKSSRSMWAFRLRNRTFTFISDSGVFSKREVDFGSRLLIEAFREPDAEGDFLDVGCGYGPIGLSLAADFEDRMVHMIDVNERAVELSKENALNNQIDNIKIYQSDLFANVEPAKKFASIITNPPIRAGKKTVHAIFEKSAEHLRPSGELWVVIQKKQGGPSAFEKLKELFADVEVVQKKKGYYIIKAKKV

SEQ ID NO: 4993 - protein, 1193 aa, Bacillus licheniformis
LTGQLVQYGRHRQRRSYARISEVLELPNLIEIQTSSYQWFLDEGLREMFQDISPIEDFTGNLSLEFIDYSLGEPKYPVEESKERDVTYSAPLRVKVRLINKETGEVKDQDVFMGDFPIMTDTGTFIINGAERVIVSQLVRSPSVYFSGKVDKNGKKGFTATVIPNRGAWLEYETDAKDVVYVRIDRTRKLPVTVLLRALGFGSDQEIIDLIGENEYLRNTLDKDNTENTDKALLEIYERLRPGEPPTVENAKSLLDSRFFDPKRYDLASVGRYKINKKLHIKNRLFNQRLAETLVDPETGEILAEKGAILDRRTLDKVLPYLENGIGFKKLYPNGGVVEDEVTLQSIKIYAPTDQEGEQTINVIGNAYIEEGVKNITPSDIIASISYFFNLLHGVGDTDDIDHLGNRRLRSVGELLQNQFRIGLSRMERVVRERMSIQDTNTITPQQLINIRPVIASIKEFFGSSQLSQFMDQTNPLAELTHKRRLSALGPGGLTRERAGMEVRDVHYSHYGRMCPIETPEGPNIGLINSLSSFAKVNRFGFIETPYRRVDPETGKVTPRIDYLTADEEDNYVVAQANARLNDDGSFVDDSIVARFRGENTVVPKDRVDYMDVSPKQVVSAATACIPFLENDDSNRALMGANMQRQAVPLMQPESPIVGTGMEYVSAKDSGAAVICRHPGIVERVEAKNIWVRRYEEVDGQKVKGNLDKYSLLKFVRSNQGTCYNQRPIVSVGDEVEKGEILADGPSMEKGELALGRNVMVGFMTWDGYNYEDAIIMSERLVKDDVYTSIHIEEYESEARDTKLGPEEITRDIPNVGEDALRNLDERGIIRVGAEVKDGDLLVGKVTPKGVTELTAEERLLHAIFGEKAREVRDTSLRVPHGGGGIILDVKVFNREDGDELPPGVNQLVRVYIVQKRKISEGDKMAGRHGNKGVISKILPEEDMPYLPDGTPIDIMLNPLGVPSRMNIGQVLELHLGMAARRLGLHVASPVFDGAREEDVWETLEEAGMSRDAKTVLYDGRTGEPFDNRVSVGIMYMIKLAHMVDDKLHARSTGPYSLVTQQPLGGKAQFGGQRFGEMEVWALEAYGAAYTLQEILTVKSDDVVGRVKTYEAIVKGDNVPEPGVPESFKVLIKELQSLGMDVKILSSDEEEIEMRDLEDDEDAKQNEGLSLPNDEESEELVSADAERDVVTKE

SEQ ID NO: 4994 - protein, 1199 aa, Bacillus licheniformis
LLDVNNFEYMNIGLASPDKIRSWSYGEVKKPETINYRTLKPEKDGLFCERIFGPQKDWECHCGKYKRVRYKGVVCDRCGVEVTRAKVRRERMGHIELAAPVSHIWYFKGIPSRMGLVLDMSPRALEEVIYFASYVVTDPANTPLEKKQLLSEKEYRAYLDKYGNKFQASMGAEAIHKLLQDIDLDKEVDMLKEELKTSQGQRRTRAIKRLEVLEAFRNSGNKPSWMILDVLPVIPPELRPMVQLDGGRFATSDLNDLYRRVINRNNRLKRLLDLGAPSIIVQNEKRMLQEAVDALIDNGRRGRPVTGPGNRPLKSLSHMLKGKQGRFRQNLLGKRVDYSGRSVIVVGPNLKMYQCGLPKEMALELFKPFVMKELVEKGLAHNIKSAKRKIERVQPEVWDVLESVIKEHPVLLNRAPTLHRLGIQAFEPTLVEGRAIRLHPLVCTAYNADFDGDQMAVHVPLSAEAQAEARILMLAAQNILNPKDGKPVVTPSQDMVLGNYYLTLERPGAVGEGMIFKDTDEALLAYQNGYVHLHTRVAVAVNSLKNETFTEEQRSKLLITTVGKLIFNEILPPSFPYMNEPTKSNIEEKTPDRFFLDYGADVKEAIKNQEINPPFKKGILGKIIAEIFKRFHITETSKMLDRMKNLGFKYSTKAGITVGVSDIVVLDDKQEILEEAQGKVDNVMKQFRRGLITEEERYERVISIWSAAKDTIQGKLMKSLDEINPIYMMSDSGARGNASNFTQLAGMRGLMANPAGRIIELPIKSSFREGLTVLEYFISTHGARKGLADTALKTADSGYLTRRLVDVAQDVIIRETDCGTDRGILAKAITEGTEVIERLEERLVGRFARKPVKHPETGEVLVNENELIDEDKAIEIVEAGIEEVWIRSAFTCNTSHGVCKRCYGRNLATGTDVEVGEAVGIIAAQSIGEPGTQLTMRTFHTGGVAGDDITQGLPRIQELFEARNPKGQATISEIDGVVAEINEVRDKQQEIVVQGEVESRSYTAPYNARLKVTEGEKISRGQVLTEGSVDPKELLKVTDITTVQEYLLHEVQKVYRMQGVEIGDKHVEVMVRQMLRKVRVIDAGDTEVLPGTLLDIHQFTEANKKVLLEGKRPATGRPVLLGITKASLETDSFLSAASFQETTRVLTDAAIKGKRDELLGLKENVIIGKLVPAGTGMLNYRKVKPVLQVQSSDEMVPAE

SEQ ID NO: 4995 - protein, 82 aa, Bacillus licheniformis
MSYDKVSQAQSIIIGTKQTVKALKRNSVKEVVVAKDADPCLTSGVINLANEQGVPVSMAESMKKLGKACGIEVGAAAVAIIQ

SEQ ID NO: 4996 - protein, 138 aa, Bacillus licheniformis
MPTINQLVRKGRVSKVETSKSPALNKGYNSFKKEHTNVSSPQKRGVCTRVGTMTPKKPNSALRKYARVRLTNGIEVTAYIPGIGHNLQEHSVVLIRGGRVKDLPGVRYHIVRGALDTAGVENRAQGRSKYGTKRPKKK

SEQ ID NO: 4997 - protein, 156 aa, Bacillus licheniformis
MPRKGPVAKRDVLPDPLYNSKLVTRLINKMMIDGKKGKAQTILYKSFDIIKERTGNDAMEVFEQALKNIMPVLEVKARRVGGANYQVPVEVRPERRTTLGLRWLVNYARLRGEKTMEERLANEILDAANNTGAAVKKREDTHKMAEANKAFAHYRW

SEQ ID NO: 4998 - protein, 692 aa, Bacillus licheniformis
MAREFSLEKTRNIGIMAHIDAGKTTTTERILFYTGRIHKIGETHEGASQMDWMEQEQERGITITSAATTAQWKGYRVNIIDTPGHVDFTVEVERSLRVLDGAVAVLDAQSGVEPQTETVWRQATTYGVPRIVFVNKMDKTGADFLYSVGTLRDRLEANAHAIQLPIGAEDNFEGIIDLVENVAYYYEDDLGTRSEAREIPAEYKDKAEELRASLIEAVAELDEELMMKYLEGEEITVDELKAAIRKGTCNVEFYPVLCGSAFKNKGVQLVLDAVLDYLPAPTDVPAIKGTLPDSDEEVTRESSDDAPFSALAFKVMTDPYVGKLTFFRVYSGTLDSGSYVRNSTKGKRERVGRILQMHANSREEISTVYAGDIAAAVGLKDTTTGDTLCDEKNLVILESMEFPEPVIHVAIEPKSKADQDKMSTALAKLAEEDPTFRAHTDPETGQTIIGGMGELHLDIIVDRMKREFKVEANVGAPQVAYRETFRASAQVEGKFVRQSGGRGQFGHVWIEFSPNEEGKGFEFENAIVGGVVPREYIPAVQAGLEDALQNGVVAGYPVIDIKAKLFDGSYHDVDSNEMAFKIAASMALKNAASKCNPVILEPISKVEVVIPEEYMGDIMGDITSRRGRVEGMEGRGNAQVVRAMVPLSEMFGYATALRSNTQGRGTFTMVFDHYEEVPKSIADEIIKKNQGE

SEQ ID NO: 4999 - protein, 396 aa, Bacillus licheniformis
MAKEKFDRSKSHANIGTIGHVDHGKTTLTAAITTVLHKKSGKGTAMAYDQIDGAPEERERGITISTAHVEYETDNRHYAHVDCPGHADYVKNMITGAAQMDGAILVVSAADGPMPQTREHILLSRNVGVPYIVVFLNKCDMVDDEELLELVEMEVRDLLSEYEFPGDDVPVIKGSALKALEGDAQYEEKIFELMAAVDEYIPTPERETDKPFMMPVEDVFSITGRGTVATGRVERGQVKVGDEVEIIGLQEENKKTTVTGVEMFRKLLDYAEAGDNIGALLRGVSREEIQRGQVLAQPGTITPHKKFKAEVYVLSKEEGGRHTPFFSNYRPQFYFRTTDVTGIIQLPEGVEMVMPGDNIEMTVELISTIAIEDGTRFSIREGGRTVGSGVVSSIIE

SEQ ID NO: 5000 - protein, 44 aa, Bacillus licheniformis
MHYYTKFIGMLQGNIEYYRLLHTFFIIQIQAVLIKDLQAENKSL

SEQ ID NO: 5001 - protein, 102 aa, Bacillus licheniformis
MAKQKIRIRLKAYDHRILDQSAEKIVETAKRSGASVSGPIPLPTEKSVYTILRAVHKYKDSREQFEMRTHKRLIDIVNPTPQTVDALMRLDLPSGVDIEIKL

SEQ ID NO: 5002 - protein, 209 aa, Bacillus licheniformis
MTKGILGRKIGMTQVFAENGDLIPVTVIEAAPNVVLQKKTSENDGYEAIQIGFDDKREKLANKPEKGHVAKAETAPKRFVKELRGVDMDAYEVGQEVKVDIFSNGEIVDVTGTSKGKGFQGAIKRHGQSRGPMSHGSRYHRRPGSMGPVDPNRVFKGKLLPGRMGGEQITVQNLEIVKVDAERNLLLVKGNVPGAKKSLVTVKSAVKSK

SEQ ID NO: 5003 - protein, 207 aa, Bacillus licheniformis
MPKVALYNQNGSTAGDIELNDSVFGIEPNESVVFDAILMQRASLRQGTHKVKNRSEVRGGGRKPWRQKGTGRARQGSIRSPQWRGGGIVFGPTPRSYAYKLPKKVRRLAIKSALSSKVNDNNLIVLEDLNLDAVKTKEMAAILKGLSIEKKALIVTADANETVELSARNLPGVTVVEANGINVLDVVGHEKLVMTKAAVEKVEEVLA

SEQ ID NO: 5004 - protein, 95 aa, Bacillus licheniformis
MKDPRDVLKRPVITERSADLMTEKKYTFEVDVKANKTEVKDAVEQIFGVKVEKVNIMNYKGKFKRVGRYSGMTNKRRKAIVKLTEDSKEIEIFEA

SEQ ID NO: 5005 - protein, 277 aa, Bacillus licheniformis
MAIKKYKPTSNGRRGMTSSDFAEITTDQPEKSLLAPLHKKGGRNNQGKLTVRHQGGGHKRQYRIIDFKRDKDGIPGRVATVEYDPNRSANIALINYVDGEKRYILAPKGLQVGTEIMSGPEADIKVGNALPLINIPVGTVVHNIELKPGKGGQLVRSAGTSAQVLGKEGKYVLVRLNSGEVRMILSACRATIGQVGNEQHELINIGKAGRSRWKGVRPTVRGSVMNPNDHPHGGGEGRAPIGRKSPMSPWGKPTLGFKTRKKKNKSDKFIVRRRKNK

SEQ ID NO: 5006 - protein, 92 aa, Bacillus licheniformis
MARSLKKGPFVDDHLMTKIEKLNEADKKQVVKTWSRRSTIFPQFIGHTIAVYDGRKHVPVYISEDMVGHKLGEFAPTRTYKGHASDDKKTRR

SEQ ID NO: 5007 - protein, 114 aa, Bacillus licheniformis
MQQAKAVARTVRIAPRKARLVMDLIRGKQVGEAVSILNHTPKAASPIIEKVLKSAIANAEHNYEMDANNLVVTQAYVNEGPTLKRFRPRAMGRASQINKRTSHITIVVSEKKEG

SEQ ID NO: 5008 - protein, 218 aa, Bacillus licheniformis
VGQKVNPVGLRIGVIRDWESKWYAGKDYADFLHEDLKIREFINQRLSDASVSKVEIERAANRVNITIHTAKPGMVIGKGGSEVEALRKALNSLTGKRVHINILEIKRADLDAQLVADNIARQLENRISFRRAQKQQIQRTMRAGAQGIKTMVSGRLGGADIARSEYYSEGTVPLHTLRADIDYATSEADTTYGKLGVKVWIYRGEVLPTKKKTEEGGK

SEQ ID NO: 5009 - protein, 144 aa, Bacillus licheniformis
MLMPKRVKYRREHRGKMRGRAKGGTEVHFGEYGIQAQESSWITNRQIEAARIAMTRYMKRGGKVWIKIFPSKPYTAKPLEVRMGSGKGAPEGWVAVVKPGKVLFEISGVSEEVAREALRLASHKLPIKTKFVKREEIGGESNES

SEQ ID NO: 5010 - protein, 21 aa, Bacillus licheniformis
MKANEIRDLTTAEIEQKSKVS

SEQ ID NO: 5011 - protein, 87 aa, Bacillus licheniformis
MSERNQRKVYQGRVVSDKMDKTITVVVETYKKHSLYGKRVKYSKKFKAHDENNQAKIGDIVKIMETRPLSATKRFRLVEVVEEAVII

SEQ ID NO: 5012 - protein, 122 aa, Bacillus licheniformis
MIQQETRLKVADNSGAREVLTIKVLGGSGRKTANIGDVIVCTVKQATPGGVVKKGDVVRAVVVRSKSGARRNDGSYIKFDENACVIIRDDKSPRGTRIFGPVARELRDNNFMKIVSLAPEVL

SEQ ID NO: 5013 - protein, 103 aa, Bacillus licheniformis
MHVKKGDKVMVISGKDKGKQGVILAAFPKKDRVIVEGVNMVKKHSKPTQANPQGGILNQEAPIHVSNVMPLDPKTGEVTRVGYKVENGKKVRIAKKSGQVLDN

SEQ ID NO: 5014 - protein, 179 aa, Bacillus licheniformis
MNRLKEKYNKEITPALMKKFEYKSVMQVPKIEKIVINMGVGDAVQNAKAIDSAVEELTFIAGQKPVVTRAKKSIAGFRLREGMPIGAKVTLRGERMYDFLDKLISVSLPRVRDFRGISKKSFDGRGNYTLGIKEQLIFPEIDYDKVTKVRGMDIVIVTTANTDEEARELLTQLGMPFQK

SEQ ID NO: 5015 - protein, 61 aa, Bacillus licheniformis
VAKKSMIAKQKRTPKFKVQEYTRCERCGRPHSVIRKFKLCRICFRELAYKGQIPGVKKASW

SEQ ID NO: 5016 - protein, 132 aa, Bacillus licheniformis
MVMTDPIADMLTRIRNANMVRHEKLEIPASKLKREIAEILKREGFIRDVEFIEDNKQGIIRVFLKYGQNNERVITGLKRISKPGLRVYAKSNEVPRVLNGLGIAILSTSQGVLTDKEARAKQAGGEVLAYVW

SEQ ID NO: 5017 - protein, 178 aa, Bacillus licheniformis
MSRVGKKLLEIPSGVTVTLNDNTVTVKGPKGELTRTFHPDMKIKIEDNVLTVERPSDNKEHRALHGTTRSIIGNMVEGVSKGFERGLELVGVGYRASKSGNKLVLNVGYSHPVEIVPENGIEIEVPSQTKVVVKGTDKERVGATAANIRAVRSPEPYKGKGIRYEGEMVRRKEGKSAK

SEQ ID NO: 5018 - protein, 120 aa, Bacillus licheniformis
MITKTSKNAARLKRHARVRAKLSGTPERPRLNVFRSNKHIYAQVIDDVNGVTLVSASTLDKDFNAENGSDTAAAAKVGELVAKRASEKGITNVVFDRGGYLYHGRVKALADAAREAGLEF

SEQ ID NO: 5019 - protein, 166 aa, Bacillus licheniformis
MRRIDPSKLELEERLVTVNRVAKVVKGGRRFRFAALVVVGDKNGHVGFGTGKAQEVPEAIRKAVEDAKKNLIEVPMVGTTIPHEIIGRFGAGNILLKPASEGTGVIAGGPVRAVLELAGVSDILSKSLGSNTPINMIRATVQGLSELKRAEDVAKLRGKSVEELLG

SEQ ID NO: 5020 - protein, 59 aa, Bacillus licheniformis
MAKLEITLKRSVIGRPEDQRITVRTLGLKKTNQTVVHEDNAAIRGMINKVSHLVSVKEL

SEQ ID NO: 5021 - protein, 146 aa, Bacillus licheniformis
MKLHELKPAEGSRKTRNRVGRGIGSGNGKTAGKGHKGQNARSGGGVRPGFEGGQMPLFQRLPKRGFTNINRKEFAVVNLDKLNSFAEGTEVTPELLLETGVISKFKSGVKILGDGKLEKKLTVKANKFSASAKQAIEAAGGTAEVI

SEQ ID NO: 5022 - protein, 431 aa, Bacillus licheniformis
LFKTISNFMRVKDIRNKIIFTLLMLIVFRLGSFIPVPHVNTEVLKAQDQMSVFGILNTFGGGALFNFSILAMGIMPYITASIIIQLLQMDVVPKFTEWSKQGEVGRRKLAQFTRYFTIVLGFIQALGMSYGFNNMAGGALITDPGVGTYLLIAIVLTAGTAFLMWLGEQITSHGVGNGISIIIFAGIVAGIPQTINQIYAQQFVDAGDQLFLQIIKVVVILVAILAIVVGVIFIQQAVRKISIQYAKGSGRSPVPGGQSTHLPLKVNPAGVIPVIFAVAFITTPRTVATFFGSNDVTNWIQKTFDYTHPVGMGVYAALIIAFTYFYAFVQVNPEQMADNLKKQGGYIPGVRPGKMTQDRITSILYRLTFVGSIFLAVIAILPVLFVNIAGLPSSAQIGGTSLLIVIGVALETMKQLESQLVKRNYRGFMKH

SEQ ID NO: 5023 - protein, 217 aa, Bacillus licheniformis
MNLVLMGLPGAGKGTQAERIVEDFGIPHISTGDMFRAAMKEETDLGLEAKSYIDKGELVPDEVTIGIVRERLGKNDCDGGFLLDGFPRTVAQAEALEEILKGLGKSIDHVINIQVDKDALMERLTGRRICKNCGATYHLVFNPPAKENVCDKCGGELYQREDDNEATVSTRLEVNMKQTQPLLDFYEDKGYLVNIDGQKHINEVYADIKELLGGRDK

SEQ ID NO: 5024 - protein, 248 aa, Bacillus licheniformis
MIICKTPREIEIMREAGRIVALTHQELKKHIKPGISTKELDQIAERFITKQGAIPSFKGYNGFRGSICVSVNEELVHGIPGKRVLRDGDIISIDIGAKLNGYHGDSAWTYPVGTISDDDQKLLDVTEESLYRGLKEAKPGERLSNISHAIQTYVESEQFSVVREYVGHGVGQDLHEDPQIPHYGPPNKGPRLKPGMVLAIEPMVNAGTRYVKTLADNWTVVTVDGKKCAHFEHTIAITDAGFEILTKA

SEQ ID NO: 5025 - protein, 109 aa, Bacillus licheniformis
MYRKTPEIGQFVRMTRGREMNQYAVVIDIVDHHHVLVADGEKRKFHSPKKKNINHLTFYDCVSPEVQNSINETGRVTNGKLRFSLLKFVREQVTDLKKGEHLNGERRCN

SEQ ID NO: 5026 - protein, 72 aa, Bacillus licheniformis
MAKDDVIEVEGTVVETLPNAMFKVELENGHTVLAHVSGKIRMHFIRILPGDKVTVELSPYDLTRGRITYRYK

SEQ ID NO: 5027 - protein, 37 aa, Bacillus licheniformis
MKVRPSVKPICEKCKVIRRKGKVMVICENPKHKQKQG

SEQ ID NO: 5028 - protein, 121 aa, Bacillus licheniformis
MARIAGVDIPRDKRVVISLTYIFGIGRTTAQQILKEAGVSEDTRVRDLTEEELGKIRDVIDKLKVEGDLRREVSLNIKRLIEIGSYRGIRHRRGLPVRGQNTKNNARTRKGPRRTVANKKK

SEQ ID NO: 5029 - protein, 131 aa, Bacillus licheniformis
MAAARKTNTRKRRVKKNIESGIAHIRSTFNNTIVTITDVHGNALSWSSAGALGFKGSKKSTPFAAQMAAETAAKGSIEHGLKTLEVTVKGPGSGREAAIRALQAAGLEVTAIRDVTPVPHNGCRPPKRRRV

SEQ ID NO: 5030 - protein, 314 aa, Bacillus licheniformis
MIEIEKPKIETVEISDDAKYGKFVVEPLERGYGTTLGNSLRRILLSSLPGAAVTSIQIDGVLHEFSTIEGVVEDVTTIILNIKKLALKIYSEEEKTLEIDVQGEGVVTAADITHDSDVEILNPDLHIATLGQNASFRVRLTAQRGRGYTPADANKRDDQPIGVIPIDSIFTPVSRVSYQVENTRVGQITNYDKLTLDVWTDGSTGPKEAIALGSKILTEHLNIFVGLTDEAQHAEIMVEKEEDQKEKVLEMTIEELDLSVRSYNCLKRAGINTVQELANKTEEDMMKVRNLGRKSLEEVKAKLEELGLGLRKDD

SEQ ID NO: 5031 - protein, 120 aa, Bacillus licheniformis
MSYRKLGRTSAQRKAMLRDLTTDLIINERIETTEARAKELRSVVEKMITLGKRGDLHARRQAAAYIRNEVADAEKNQDALQKLFSDVAPRYEERQGGYTRIMKLGPRRGDGAPMAIIELV

SEQ ID NO: 5032 - protein, 281 aa, Bacillus licheniformis
MNQERLIAAEDITFRYQKDADRPALDHVSFHVSKGEWLAIVGHNGSGKSTLARALNGLILPDEGSIKVGGIKLMEETVWDVRKKVGMVFQNPDNQFVGTTVRDDVAFGLENSGVPREDMVERVDWAVQQVNMQEFLDQEPHHLSGGQKQRVAIAGVLAARPDIMILDEATSMLDPMGREEVLDTVRRLKDQGMVTVISITHDLNEAAKADRIIVMNSGRKFAEGTPQEVFRLNQDLFKIGLDLPFSFQLTQMLKESGLALKGDHLTQEGLVNELWTLKSKM

SEQ ID NO: 5033 - protein, 276 aa, Bacillus licheniformis
MKTPFERLAIYDVNAVIKEGSYVAVIGHTGSGKSTLLQHLNGLLKPTKGQIRLGEDVLEAGKKNKHLKALRKKVGIVFQFPEHQLFEETILKDIAFGPINFGMSREKAEEKAREMLKLVGLGAELSDRSPFELSGGQMRRVAIAGVLAMEPEVLVLDEPTAGLDPRGRKEIMDMFYSLHKQRNLTTILVTHSMEDAAAYADELIVMHKGTVKAKGTPRELFSRKDDIAALGLDLPETIKFQKRLEETLGITFKAPILTIEEAASEVKALFQEENAL

SEQ ID NO: 5034 - protein, 265 aa, Bacillus licheniformis
MMDNIIIGKYVPGKSVIHRLDPRTKLLTIFLFVFIVFFANNTETYALLGLFTVAAAALSGVPVRFLIKGMKPVFWIVLFTFLLHIFMTREGPVLADLGLFKIYEQGLVQGIFISLRFVYLIMITTILTLTTTPIEVTDGLEHLLGPFKKLKLPVHELALMMSISLRFIPTLIEETDKIMKAQMARGVDFANGPVKERVKAIVPLLVPLFVSAFKRAEELATAMEARGYRGGEGRTKYRQLTWKWKDTSVLLILAVLGVLLILLRT

SEQ ID NO: 5035 - protein, 247 aa, Bacillus licheniformis
MRMKCTISYDGHLFYGYQVQPGQRTVQDELEKALQTLHKAKERIPVVSSGRTDSGVHAVGQTIHFDSPLSIPEAKWPYALNALLPDDISVRKAEAVNDQFHARFSAKRKEYRYMIYRGRHPDVFKRYYAYHVPYDLDMEKVKEASRYLVGTHDFTSFCATKTEVKDKVRTVHELEWSDTGDGLQMRIVGSGFLYNMVRIIAGTLLDVGTGKFSPGDIEKMILAKNRDAAGRTAPAHGLYLWRVIYDN

SEQ ID NO: 5036 - protein, 145 aa, Bacillus licheniformis
MRTTPMANASNIERKWLVVDAAGKTLGRLSTEVASILRGKHKPTYTPHVDTGDHVIIINAEKIELTGKKLTDKIYYRHTQHPGGLKSRTALEMRTNYPEKMLELAIKGMLPKGSLGRQMFKKLNVYRGSEHPHQAQKPEVYELRG

SEQ ID NO: 5037 - protein, 130 aa, Bacillus licheniformis
LAQVQYYGTGRRKSSVARVRLVPGEGRIIVNNREISEHIPSAALIEDIKQPLTLTETAGTYDVLVNVHGGGFSGQAGAIRHGIARALLEADPEYRSTLKRAGLLTRDARMKERKKYGLKGARRAPQFSKR

SEQ ID NO: 5038 - protein, 379 aa, Bacillus licheniformis
MASFQQYKTKSGYKWLFKMGVGIDPKTGDRKTTTRRGFKTKKEAVAAAAEFQKEIDNNALIRNDITFEDVFKEWWAVHSKTIKRSTRYSKLSKFNKHILPLFGKLKIKDITKAYCQKAINRIAQEINSAQDVKIQANLVFKYALRMDYISTNPMAYVVIPKKEENFLSDEEEKRNFWEKDEIKIFLDKAHSQLKQQDYVMFYVLIFTGMRKGELLALEWKDVDIKERTINIKQTLFFEDGKEVIQTAKKYHSKRIIKIDEQTAQILKKWRTQQKEMLLSNGITTEAKYVLIRDDMRPLRLAYPNDILNRIIAKNKLHRITIHGFRHSHASILFEAGASLKEVQARLGHKEIQTTMNIYTHVTKTAKEKTAETFKKYMEL

SEQ ID NO: 5039 - protein, 159 aa, Bacillus licheniformis
LVYTKSHLEDWIENLYRSISIITPEQIDFERIAELLGISVYFKPIPSCSFKYNDVYTIILDSRKTRFEQWDDFAHELCHLYRHEGDKKTMPKFWSDYQERQANYFSYHFCIPTFMLHGMKIPQNHFSDAHLIAKMFKVTEPFAKVRLNMYFNKIHLIVS

SEQ ID NO: 5040 - protein, 115 aa, Bacillus licheniformis
MKRTTEFVLGLMGGIFGFIGAFLALIVGGLDASFNSSGTSDIIGLGWGAIFLSILGIIASVIVRKKAKLGGILLIISGIGGLICIFLFYLLPAILLIISGVMGLARRDKTTTTAV

SEQ ID NO: 5041 - protein, 173 aa, Bacillus licheniformis
LKKFLVLFLSLGLALALAACGSTDDVSTGADNSKDKKTEEKKDDGSKKVDASSQKTDALGMKVNLGDVKIMKDKVNVGLNIENTTDKVLNFYPDQGNAVVGDMQLSANMFLTDGEVGGEVQGGVKQDGVLEFAVPEGKELDINNIKEIKLNFGDVTTEDFMNNKAVSFTVPVK

SEQ ID NO: 5042 - protein, 88 aa, Bacillus licheniformis
MENKEFELILKEIQAINNRLTDLEKNVATKDDIKALSEKIDSQHAENINSDNLLLDEITSLKEGVIFVNRKVADAEFEIHTLKTRKQQ

SEQ ID NO: 5043 - protein, 121 aa, Bacillus licheniformis
MALGARIRALREKENLTQKALAAKLNIPHQNLSNYERGFRQPDYETLIKIADFFEVTTDYLLRGVDPKVQDKIFEDEAKRILNDPKTFIAARDGEVTQEILDAALEIITEQLKEGRKKKSD

SEQ ID NO: 5044 - protein, 78 aa, Bacillus licheniformis
VNEKLRAIRQSKGITQKFVAKSLGIHTATYNGYELGRRKIHVELLKDIAEVLDEPIQNFFENKIYESKNYYDKKSHTA

SEQ ID NO: 5045 - protein, 108 aa, Bacillus licheniformis
LANLGISLDNLPNETVFEIVKALCEKAYQQGVEDGVKKYSYPPILKNTHLQEIFQIKSAAVTRLTGIDSFPKLKTIQARYPRDLVFEWIKQNSTWVEENTSYFQKGVS

SEQ ID NO: 5046 - protein, 44 aa, Bacillus licheniformis
MSATSKIYKRQHGISVMEKLCVENGIRVYEKKGNEIKPKFYRVK

SEQ ID NO: 5047 - protein, 257 aa, Bacillus licheniformis
MNQLQIFSNKEFGSLPIVYIENKVYFGATETATTLGYANPHDAISKHCKKEGVAFHEVLSNGGPQRKKFINEGNLYRLISRSKLPSAEKFESWVFDEVIPTIRKTGGYVANDDLFIQTYLPQADEQTKQLFKVTLHTMKEQSKQIETMKPKALFADAVEASESSVLVGELAKILKQNGIEIGQNKLFKWLRENGYLIRKKGESFNLPTQRSMDMGLFEIKKSTIVNGDGSIRTTRTPKVTGKGQIYFVNKFIKSQSA

SEQ ID NO: 5048 - protein, 172 aa, Bacillus licheniformis
MPEIVSKSLAHLLETKNMTNGQLALDLNVSESMVSKMKNGTRKMPWDVAETSLKKFDQPFYAMGIMNKFSDGCSPPVFTGESVEQHRLAFEEIMVTQATEAIQTLNEVSFVKNPKLISLEERERIKVVIKELLDVEAWAKNLAALLAKEYNISLKECYKKATITWKAKGWLE

SEQ ID NO: 5049 - protein, 45 aa, Bacillus licheniformis
MLHYLHRRATAFEVREWCARIRDHPELHLSWDQYVKKSMKGDFSK

SEQ ID NO: 5050 - protein, 34 aa, Bacillus licheniformis
MNIEHPIITEINRYGYPKDYLRYEEEEENEDDEA

SEQ ID NO: 5051 - protein, 193 aa, Bacillus licheniformis
MAEIEEIKKDLMDAMPQEEEGPEIFEVHDLETATEAQRRVAYFKRKQAEIDEVADKQIERLKMQIERLEHWQEEAKKEYVEREDFYKHRLERYMREEVRKMQENGKKPKKTIKLPYGTIKLVKQQPEYQRNENDLLEYAESKGFVRVKKDVDWAAIKNKAKVFGDKLIDADGELIPGVTVVDREDKFTVEVNE

SEQ ID NO: 5052 - protein, 210 aa, Bacillus licheniformis
MNIYQKLVEVRKAVPYLKKSNQGHQYNYTGSSQVVGAIREKIDELGLLLIPAIVDKKVTAEKNGNRITYFTELDIEYTWVNAEKPDETIKTTFYAQGIDIGGEKGVGKALTYAEKYFLLKQFNVPTDQDDPDAFQQKVESSKPPEMITQEQKDEIQSLAQSYVELRGQGNVKTVLTALNVMDINKIQKGEADKCIFQLKRWVTKAQKESA

SEQ ID NO: 5053 - protein, 150 aa, Bacillus licheniformis
MSWILTRFKKVKRINVFSSLKDGLRRHRKNLLKTSRKAAHHDEQNSPQMGADVAETAAENREYRGRRAGGHPVRLVCVHGLYHHFTLKGEAFHVGSTSKIGRIMEHREKPQGIDRGRKGRIKHLLGCKFKPLSKGGAPKKPIFTCDYDKG

SEQ ID NO: 5054 - protein, 45 aa, Bacillus licheniformis
MNKIARKWARMSRKQQQRTENIAAVVLAAILFGWYVFMGFIIISL

SEQ ID NO: 5055 - protein, 70 aa, Bacillus licheniformis
LAELWNIEKNHRALTEEERAELNICLDANLNLCRKVAHLKNQSLLATMTKDNDWQFEICSQLEEIYTVFH

SEQ ID NO: 5056 - protein, 59 aa, Bacillus licheniformis
MQPIRRNIYGFPLIIAGGERYEHSMEQRTVNDGIQKTYGRKHGIKEHVLVVNQKITPYV

SEQ ID NO: 5057 - protein, 331 aa, Bacillus licheniformis
LNGLLLDEYPLIVIPSLAKEIGLNEAIVLQQVHYWLKSSGKKRDGRKWIYNTYDEWLEQFPFWSKNTLIRTVEKLEKSGILITGNYNKAKYDKTKWYSIDYDRLPKMGRGSTQNEYSDYPKWVDRSTQNGYTNTRDYTETTTETNNKPDKSEKQDISKTDAFQNELESVGLKSINLSSLEEIEKLTELTIQKETLPAGIKKSILVQYLDCLRLTRTTGKISANVIMTHLEKMSKYSVDQLHYAMWTHVEKYNDRQEKYTLGILRNTDDHKARQGLMKLMNQGGTRKGEQFRRYPKAVGEIESRTSEEVERLEALARAKGLSGKIRDTHCDF

SEQ ID NO: 5058 - protein, 302 aa, Bacillus licheniformis
VNSLEDTLKQLEKSNPGLAKRLKDSKRLQEQRAYPERYETLTVISEENCIYKQCDGSGLIWIKDHQENREFMKECPCKAVKLLEKKLMGARLPEEFKDVTLNSFEIDVYENDESKERAANAKRISKNYVLKFEQMREQGKGLYFYSHEKGSGKTRLAASIMKAITKMHDKPDNPLKIIYSSTADLIGEIKKTFEADSKVKSSDIIEAAKTADLAILDDIGVEKATDWVEETFTRILDYRLQNKKPTIFTSNLAIDELDLKYPGGRISSRVEKLAFPVKMPDEKVRSKIAKQENEELLQLLYE

SEQ ID NO: 5059 - protein, 67 aa, Bacillus licheniformis
VKPKTITINDDLSFTGTMEKGKIRVIVVDGNNGTAYETDAPEHGKTIIQTINGKCKRVDYEIGHKLD

SEQ ID NO: 5060 - protein, 54 aa, Bacillus licheniformis
MCSLCNGQKVVRVENSSMVAFHACPNCKIEKQDLTDTIQQLNAIIQKRQQEKSA

SEQ ID NO: 5061 - protein, 104 aa, Bacillus licheniformis
VTRLNVGDWVKFISKSVITSNGLIIEQEIKGYIDAIDGNRAKIRGNDGKTYVGEKIEDLTLCKDAPEYTQESLRTMINIALDTKDRNWFEELTSELKRIQEVEG

SEQ ID NO: 5062 - protein, 60 aa, Bacillus licheniformis
MSEKYAVYDTFTGAVEFYEKEETALKDYNQASKDISEFLDREDLPEYVYLFQIVKREEIK

SEQ ID NO: 5063 - protein, 69 aa, Bacillus licheniformis
MRIIKKEVNSQYGGLFKKVFIRKMVKENDRELIQETSTTYIVGIPVRSVTETRPPSLKDAFKQAWGSAK

SEQ ID NO: 5064 - protein, 112 aa, Bacillus licheniformis
MREIKFQAWDLDAEQMYNWESIRQHFHEHLDHPRVKVRQYTGLKDINGREIYEEDITRDDDGFLWKIYWEDGSFWAKGGEFNLREQLIELAPDFCEIIGDVYRNPELLEAAE

SEQ ID NO: 5065 - protein, 140 aa, Bacillus licheniformis
MITLNIPVEPMGAVRMTGRGKFVNKNAQRYLAYKDFIKLHAQKQMKGQQLYTGPTVVKVLFSMPIPKSWSKKKQQEAISTVHIKKPDIDNLVKGVFDALNKTAWHDDNQVFMVIGAKVYGKEPGIEVQIMGLAEWENLSA

SEQ ID NO: 5066 - protein, 68 aa, Bacillus licheniformis
MGKFKRLIIRYKNQYGRTVGHDTLWRGLDSLIELKRRYGFLNEDLEHVKIDGRVCDLQEVRAELEKHG

SEQ ID NO: 5067 - protein, 79 aa, Bacillus licheniformis
VKKISNVWTVVFKENGCEPLAYTYTSEKDAIQAKTMIENSNGQELINEKEQIVGRISLEWCYLINGKLIEPKENAKDAE

SEQ ID NO: 5068 - protein, 153 aa, Bacillus licheniformis
MLNRTVLVGRLTRDPELRYTQSGQAVASFTLAVNRTFTNQQGEREADFINCVAWRKTGENIANHLKKGSMAGVDGRLQTRSYDDQSGRRVFVTEVNVESVQFLDPKGGGQADSRQQGGAGRNQSSGQQGNSFPDDPFANEGKPIDISDEDLPF

SEQ ID NO: 5069 - protein, 58 aa, Bacillus licheniformis
MTRRVVQWSATNYDQEELQVIQVFEEGLSKQDVKREVPFSRWHGVLYKTERGNGYDFK

SEQ ID NO: 5070 - protein, 56 aa, Bacillus licheniformis
MTSNKNPRLPGEVTVWKMTEEQRLAYIEKHPIVASDQHLKYWDWDGGKRGERHVHS

SEQ ID NO: 5071 - protein, 172 aa, Bacillus licheniformis
MCILDEIGFTPEQYFELKDKRMTDEEIAWDELDVAPWHLKQWKKKHGVRNEKIRHGKKFTREEWEEKRKEGLTEPEIADYFGYKTFSIYLRYKRSLGIPPMTKKIERTPELLAEIKKYLDQGLLIKEITEKISVKMSSAMVGRIIREEGLHDEKPDNKKRIRENRKTARKGA

SEQ ID NO: 5072 - protein, 75 aa, Bacillus licheniformis
MRNPIIKSVFEKIEKQQEKGLEKYGTEVKTDLYSLRGWLQHAQEEVIDLAVYLEAAIQKFDELEKKFDELEREKA

SEQ ID NO: 5073 - protein, 51 aa, Bacillus licheniformis
MIIAFKIILLLIIILSFLGAVGERENKNLRDNMTAICITSIIGSLVAFIMI

SEQ ID NO: 5074 - protein, 105 aa, Bacillus licheniformis
VKSLNVIKGCLIALGGVFMIGYQWVYRPTLGESAAIIVFTLGLVFATEIRNWFYSLILVLISAFAVVLYGYMYLENFKQLLVMLLVSLPMVSAIFLHVAEHDAEK

SEQ ID NO: 5075 - protein, 145 aa, Bacillus licheniformis
MKKLFKTIVTLSLLISGTLLFSQSAAAVWSPWQKEAFGHTARIFTDDTNYYSGAKTVDWRAEKKGSGTLYYTAGVYKKRSGGGLTDTNLVQRGYFKNSTPLKSFSVNEIRKRTGKGSYVIQLDCYTDAKKNNYVGTFESKTFYIK

SEQ ID NO: 5076 - protein, 151 aa, Bacillus licheniformis
MNRKEIESILKDYRWMMNSIQVLRESLEDAGEGLTAKYGIEASLPKAQGTTSDPVYNETIRRSKRFKKIEIYEQKVQKLQERISRISDERENEVLHWLLEGKSYRWIAQHMQLSFSHIRNIRESIIDKLADESNCTNCTKGTDLNSLKSVG

SEQ ID NO: 5077 - protein, 76 aa, Bacillus licheniformis
MGKVTRVYPGPNNGLIRWIEENFGEIDGYAATFKMKDGTTMTIYDALTPVEAVGMAEIGKNVIQEAINEDEFVSRP

SEQ ID NO: 5078 - protein, 147 aa, Bacillus licheniformis
VSQSVRFYDKTNDEFVTVTKDNPLPVTGAGGGETQSVDVNNWPTTQKVSGSVGVNNHPKWQAVGAMVQGQVATGEEKMIDLSAAGVTFIEIQASPDNTVPLKVGDVSGFTAFWVKPGEMQKFYYGKIYVSHSADAAQEFAYQAVKYG

SEQ ID NO: 5079 - protein, 180 aa, Bacillus licheniformis
VSKLTPKQELFIQEYMKDLNATQAAKRAGYSEKTAYRTGADLLKKPQILARIEEMKAERAKRNQIDADWVLQNFIKVAQMSMKAEPVMTFDYESKEMVETGEYQFDSAGANKALENIGKHIGFFDNKHKLTEAQIEKIKAETELTKERIKLLKGGKGDTALIANVAELFKAMNKGESDGN

SEQ ID NO: 5080 - protein, 430 aa, Bacillus licheniformis
MEIKFSPKQQEIITRPFDHTLEANEGTPRSGKTTAGHFRYALYLSLTPDQNHLIVAYNQEQAYRLFIDGDGTGLKHQFGNLAKVKHDDLGDHLEVQTPSGIKKIYYKGGGKVDSVKAITGMSLGSVVFCEINLLHMDMIQECFRRTFAAKMRYHLADLNPPAPNHPVIKDVFEVQNTRWTHWTIDDNPILTPERKQEIYNTLVKNPYLLKRDWEGKRVNPQGVIYGMLDLEQHTTKTLTGKPFQMFFSADGGQSDATSVSCNIVTMIDNKKANRKEYRLNRVAHYYHSGAETGQVKAMSVYAKEIKDFVRYCTEKYQMFYADFFVDPACKSLREELHLLGIDTTRADNNAKDIKGTSKGIEVGIERAQNVLSEGLFFLVDDDKFDHYHFIKETGLYCRDDNGKPIDENNHAMDEFRYSVNHFYKTYVIGG

SEQ ID NO: 5081 - protein, 146 aa, Bacillus licheniformis
MKEIKIRSAEFLGTDSKIEYKNELIDVCRRIVEHLSGNEEKHDAKIKDLTADTIEAGTIKPPSNKPDAFQTLRKQAEEWREQQQKRHEEEMRELDNLIECIKFIKRQTSNPTEDKEADFEYFARLYLDGIIDMGYFKKQVFEIFEK

SEQ ID NO: 5082 - protein, 503 aa, Bacillus licheniformis
MFKGLVAKIKGVLQKMGIINEIQSITDLEGIPATDAFYTYIENVWLPLYQGELMNYKDEPFHEIEYTTIGGGKTTRRMKSLNMPKTASEEMARLIFNERCKINISDDATAANIQNVLADNNFYKMFQDHLEYMFALGGMVMKVYPQTDRLGQKKVKISFVTADCFIPLSYSNGRIEEGVFLSTFKKGDNYYTLLEWNRWDGPKFVVRNELFQSSDESTLGTRVPLSTIYDNLQREVVYSKLTRPTFIYTKPNIANNIDLQSPLGISLFANAIDDLLILDTIYDSFLREFRLGKKRIIVPSTAISYVIDPITGERHRYFDANDEAYVAMSFKDVDNQKIVDTSVELRVDEHAKALQTQLDVVSMKLGFSAGTFTFDGQGLKTATEVVSENSKTYKSKNSHETIIEESLKELVTTICEVAETHKIFTPAKDYVVTIDFDDSIVEDRDSDSNFWLKLQNNGNIPKWYALQYILKIPPEEAKELIKETQEEQADEMPDIDTQFGGGA

SEQ ID NO: 5083 - protein, 374 aa, Bacillus licheniformis
MARLTTERMEQITWPIVQLYSAIQTEILESVAIRLGHHKELLDQNITEWYNMKIQQIGGLTKQNIEIISKKSGLAPPLVKKILKEAGFEGIDQNEKVLQDALKQGAAIIAAAPVAQDPSIWAILDAFERQALDSFNLINTSMLTGAQQVYIDILTKTQADVLTGLKTPQEALRTTISKWADKGIPVLRKRDGKKEYAEAYVNRIIRTTTNNVTNEMQDMQDARFDSYGIDLVEISSHIGARPKCAPYQGRIFSRSGKDKKYKSLSSTSIGEPDGLFGINCGHFQYPFVPGISVQRYYPVDAQKNAEAYKNSQRQRSLENNIRKAKRELAMCEKAGDETGVKQARAKILKRQKRMREFIEETGRTRRREREQILY

SEQ ID NO: 5084 - protein, 54 aa, Bacillus licheniformis
LKLVIHFLLNLLLGVFYFYIAKPVSSFEVMIVSLVFINGFAWGVNAAIKEKGRK

SEQ ID NO: 5085 - protein, 50 aa, Bacillus licheniformis
MFISRKKYEKTQQELDQLKSDVEDLKKVVRDLLLSQTKRPETKKEPTYLG

SEQ ID NO: 5086 - protein, 135 aa, Bacillus licheniformis
MKLSEIVEQLKGCGFECEAGPLENNVPFVALEKFANGKAGKISDGYHTFDELYHHRMILFSVICNQNKKEAWKSWKHDDGSMFDNYFIVGIHTPQGHYTYHYHKDHWDLFDVKELELAPKWDGHKPEDITRLLTL

SEQ ID NO: 5087 - protein, 209 aa, Bacillus licheniformis
MDKFLRLDLQHFAEGGEDGAGATNNPDPAANPGGNQQQEPQQQEPTQQQQEKLLPQSDVNNLIAKETKKAQEKLLKQLGIEDFKSAKEGLSKFKEWQESQKTEAEKMADSLKDYETKYNTALSENESLKAQIAAMGAGVQADAVQDVVTLAKPLVSDEVDMNAAIEKVLEKYPHFKGEAGEEDDTAFYTVGDHKKQTKTDSFASALFGK

SEQ ID NO: 5088 - protein, 295 aa, Bacillus licheniformis
MANAINYAQKYTQELDQVFQQSMLTTELETPSVNWLDAKTFHVPSISLTGYKNHSRNGGFNRGDVTTTNEPYTLSFDRDVEFFVDVMDVDESNQAASAANITRTFITEHAAPEIDAYRFSKLATKSIDKNLATAEDLTKDTVYPAIKRDILKVRKYGPANLVCYISSQTMDALEQCQDFNRQIQVQNQGTAIETRVTSIDGVRLVEVWDSNRFHTSFDFTTGFQSATGSFALNWIIVYKGSIVAKVKQSSIYLFAPGQHTQGDGYLYQNRLYHDLFVLKNKADGVVTSHVTTAQA

SEQ ID NO: 5089 - protein, 50 aa, Bacillus licheniformis
MAILRKENVILREDDTGKIEELKFQGYEEIKEEDLKPKKAAKKQEKAEKE

SEQ ID NO: 5090 - protein, 138 aa, Bacillus licheniformis
MPYITPDYYKNVYKGAQAPSDTDLERYIERASDVIDEVTEYKLYGGKFEALPDGFVKDLVRKATAAQVEFYVIKGGDAAVNAGEASGMNSVSVGSFSYSGGGSSNSSASSRDAGRISPATLSILNETGLLYRGVFVRG

SEQ ID NO: 5091 - protein, 115 aa, Bacillus licheniformis
MRSNVQVDIGNIPDRVEEFNREAQFLLSSEVLKDSNYYAPMDTGALISSSERSSDFENGRLIWDTPYARRLYYNPQYKFSKDKNPNARGLWFEAAKAAFLPRWIMTLERLKRRSI

SEQ ID NO: 5092 - protein, 136 aa, Bacillus licheniformis
VDFLKQMKKYIETNIPIFKTSLSVGALTDGEITGNDIAILPIPATSPNKNLDSGQNYVFPFQILVRHEKGSLSYSTCQIIADYLNSLSNGAVTSADGSFVFVTCDLYVTPNFVERTKWGDIYTAMFRAELDILRSE

SEQ ID NO: 5093 - protein, 150 aa, Bacillus licheniformis
MAQNEGFLIQSKHKFHIDTTPDAAEPTYVRLARGLSSFEPGGNEDTDQTPYLDGGGLKSTTVMGGQITLTFEGHRYYGDPAQDYIFSKVAKLDERETRFKWEEPDGTLTEGSVTIASIEGPSGEAGSKGEISVEIHFNGTPTITEPTVTP

SEQ ID NO: 5094 - protein, 63 aa, Bacillus licheniformis
MHAYRNRAGYTFNGKCYGCKFGRRITNECDFNPDTTISIKEQICSFFFLKNYKGAFTNGSYQN

SEQ ID NO: 5095 - protein, 128 aa, Bacillus licheniformis
MAVIKIELDKPVQEFELGGKVFEVRYDDESLKSYEKVYLKMKKAYEDYEKINDLAATEKQLQEAEKKMTALVKELIELYFGKGSFDHVYEASGKSILNVQKVAAFVIKNLNEKATRDLEDKAANYLKK

SEQ ID NO: 5096 - protein, 217 aa, Bacillus licheniformis
MKLTDRFEPDVIIFKGKKINLTLSFDIVLRAFELLEDDDFTKPEKWVLLARMFAENEEDLNEMDFDDITLFVDAVFNNFINESEDKEEEQAPPDGEATEAPADEAIFDFVEDAEYIYSAFLFDYNIDLLEQQGKMHWRKFKALFKGLSSKSRFKEIIEIRTAEVPKATKDNKDEIAKIKRLKRAFALKKNQKSAEAAVAALDAKLDAYSKRIKSGGR

SEQ ID NO: 5097 - protein, 848 aa, Bacillus licheniformis
MSDGRVVIDSIFETRQSDRGIRNLQRSLDGLNTNRYNERLRLMSAEMKAAFRESRAALIPFKRQLLETEFNFFKLSRSMGTYTGTNKQFMAAVHQLGLEHKKATEEMMKNNNLMKASFIQSVGTMLARSGQSEKIAANFSRMGNPLYTVNNGLLRVTSNLERMARQGNAAVLALKMLGPNANMKELNDMTRMINQGLMRYTSVAIAAAATSVMFYGSIHKAAMENKTYAESFNRMISTLQKAFQPLVDVFAAVMPYVYNFITKIGELIIKFNEAHPVLSKVIAGFTLLLPALTLLLSPLSIGIGLINGWRAAFSAVWMIIGPLVTGLGAMMGTVILVAAAIAGVSAALYLLWTKTDWFKKAVITAWNNIKTATQTAWNWIMNNVISPVMTAIQTFIQEKMAMIQQFWNENGSQIMQAAQNVWNVISTVIQTAMSVIGTIMQTLWPVIKELVIGTWQAIQNVINGAINIIMGIVKTFSALFTGDWKGVWEGAKQIISGALELIWGWVQLFGIGRLLKFFGGLGAKLLSPIKSMWNSISNVFSSTLGKIWGWVTSKFKGIVSSITSSMNSARNLINRVWNTIKSFFSSILSGIWNTVKSKFQGVVSAVTNSMNSTRNKINSVWNAIKGFFANILGGIWNTVKSKFQGIVNSVGSKMGAAQNKIKSIWNKVMSFFKGINLFSIGRDIINGLIKGIGSMANAVWNKAKSIADGVTNKIKSALRIASPSKVMIQFGKWTGEGLEIGMDKSVKGILKASEKIASAAIPDLPDTQTVTSNIFKAPSMQTPQSDMSGIMMAIQNLANAVLNQPVEVDIPVIQTSMNINSRQFATATNKDMTKAQRRQDFRDKRRYK

SEQ ID NO: 5098 - protein, 244 aa, Bacillus licheniformis
MSLTFNGITKHFVHATVETQRPIWAPVERELIEIPGRPGAFFRNTKVKPRIIPVGIIIKGVADLQKAKEEVAEWLITDKPAPLILPDEPDRTYYAMIDGEGQLSEIFKFGKGTVNFVCPDPYKYGAEQSFSIGEAADPVGHVQSNGTAPTYPIIECTFTQAADKYEVQLLNDDLSVKAFVLLNFDFIAGDKLVLDFANRAATLNGEDKKTAYHITSDFFKIPPKKDTPISATQPSTLKFTDKYL

SEQ ID NO: 5099 - protein, 877 aa, Bacillus licheniformis
MADLWILDKNDSLLTILSSDADNACVFWDAIFREELNKSSTFQFTCDATHKDSKHVAKLNQVVFKDNDGFFRLFKIREIDRTNGENQAGKIAQCEPAELELLEKIIDDIRPYNTTQLDALERALVGTRWKANVTASNGINSTNFYHISVYDAITDIINTWGGELKFTVTFDTKTNKIVERVVNIVQRRGADNGTRFEVGYNIEEIHETEMAYPVSALWGWGGSVEDENGNDSRFIDFADVVWSKANGDPVDKPKGQKWVEYPPAKEKFGLQTPDGVINVEGKWQDENIKDPVELLQKTYHHLVNEASQIQTNYSFEVALTNETVELGDTCLALDRTIPDPIEFFGRVIALEYDVSDQTFPATVEMGQFLSVYEPDTRLDQIEDKIREIEQGRDIVVDDGSFPDTKPPTPKNVVTKGLFEKVAIDWYYETFSYIAAYEVYGSQVKDFTPDTVNFSNRLWRGKAGGWIHEAAVDQVWYYRIRSVNTRGTPSDFTAQFSAATTRIGTNHIEDQSITNAKIKDLSADKITAGTINGITIRGSLIQGARFEASNQNEDFQSWLENGTFYQYTRDDATDIYNKLTITAGMVEQETGEFFMEGWDSNAVHTKINIGNGKIEVRGIPGENGYASPPLIDMFSERDFQDNPNMEFEDNEVSRFRLGYLLGTDFKDIYSTTAGEHNALDRLDDDQYNTFGPVSGSSNGTVYLSRVDGPKSLFRYKPFGFDVVAEGGVRLKADKMLFDAASQLILPPKTKIKGGDGTYTPYPAVFGSIKKKLTDIHGGLQHCLGVLLDELTLTMPMNGGAYGYTSFDYPLVGDGSYNKIENCFAVFAQAYGAYSNAVTVGIEKQSSSGFTIYIRGTGATSNIEARSMTVRLAIFYEVV

SEQ ID NO: 5100 - protein, 119 aa, Bacillus licheniformis
MIQRKDVPAAWYFEGMEVTETDTGIEISACVLKHRDDIYPFEEVSFDLIPDDKVKVAYDLYVVLDQETNKMDYMLVRTYIEPDGYYPGYNGDKRLIHTLLTIEVDTTGNRSGTIRNYHE

SEQ ID NO: 5101 - protein, 48 aa, Bacillus licheniformis
MKLEPIEQNIEAKKRAGQKTKEEMLREQLVYTQRLANDLIMKLEGTQS

SEQ ID NO: 5102 - protein, 56 aa, Bacillus licheniformis
MFEGKSRYYGHFYYCWLNGSVTTKELYIHVENGMITEEERVEIMKNPRGDAFPDEV

SEQ ID NO: 5103 - protein, 73 aa, Bacillus licheniformis
MKVEEMTREQLQADREIFIYQTKAFNDELQKANYDLTRYKAMYTLKAKEVEDLTLQLKELQQQLNQKQPKAAK

SEQ ID NO: 5104 - protein, 65 aa, Bacillus licheniformis
MRQNTDTLYASFAGGSTGILAYLFGGLDHLLTAFIIIMTVDYLTGVAASLGRIKAFHPKRRLADS

SEQ ID NO: 5105 - protein, 59 aa, Bacillus licheniformis
LPPCPASNHTFAINDQILSYFWGFFVFVFHLLETIDKEFWNRDAQASKVFNEGNTLHTN

SEQ ID NO: 5106 - protein, 294 aa, Bacillus licheniformis
MAKVWLDAGHGGKDSGAAANGMKEKDLVLKMVKYAKSYLENHYKGVQVKLTRSTDVFYELSERADMANKWGADVFVSFHINAGGGTGFETFRYPGTAGKTLDLQKALHNEILATMKAYGQIADRGLKQANLAVVRETRMPAVLTENLFIDRKEDAERLKDSGFLKAVGEAHARGIAKYLGLSGGSSKQPATTAPKKEAPKKESAKKPAVKKYTLPTGIYKYKSPMMKGTAVRQIQEALAALYFYPDKEAKNNGIDGYYGPKTANAVKRFQLMHGLSADGIYGPKTRAKLNDLLN

SEQ ID NO: 5107 - protein, 152 aa, Bacillus licheniformis
VKGLFQYNWEVRHAWFKWCLSQPQEELVKKRSGGMGSIKKNLFHIVDVEVSWIYAILEKPDIQPDYSHYQTIQQIARFSDLHRSEIESVIFNYSSAFEHLPVKAAWSDEVCTQGDILRHLIAHEIHHIGQISVWARESGSAPVSASYIGRKI

SEQ ID NO: 5108 - protein, 147 aa, Bacillus licheniformis
MGTVVSFNNEKQKKQINLEKQLLRELSLEKMLNSAEECFAPLFHFFSKHTDILYDGCIDFAIEAYLLGAEYGKFGYHGEPVHRAMIRSEKEEKQLLHELYEYAVSWSEAFNVQAAYEPLYYACEYFIQSWWKEGFSQRERRFKLRLR

SEQ ID NO: 5109 - protein, 237 aa, Bacillus licheniformis
MKKKIKWLGFLLGFVVLLCLFQYQFNNDDSWRSWNLPLSGKIIYIDPGHGGADGGASSGELLEKDVALEVSLRIRDYLQEQGALVMLTREDDHDLAPEETRGLSRRKAEDLRKRVDMINNSEADLYLSIHLNAIPSARWSGAQSFYYGQYEENERAAKFIQDELRHNLENTTRKAKRIHGIYLMQNVKKPGALVEIGFLSNPEEAKQLAKPKYQDKIAASVYKGVLRYFTEDRAPPE

SEQ ID NO: 5110 - protein, 353 aa, Bacillus licheniformis
MLREDDVKKIVGDLDEPFLHKPLRELDAVKEIKIKPEKRHVSVKVALAKTGSAEQMQLQQEIVIRLKEAGAETVGLRFEELPEEVVMSYQESAKGQDQSLLNSEKQPVFLAVASGKGGVGKSTVSVNLAVSLARIGKKVGLIDADIYGFSVPDMMGITVRPTIEGEKVVPVERFGVKVISMGFFVEDNAPVIWRGPMLGKMLNNFFHEVEWGDVDYIILDLPPGTGDVALDVHSMLPSCKEVIVSTPHPTAAFVAARAGAMALKTDHEIVGIVENMAYYESVKTGEKEYVFGKGGGEKLAEELGVPILGKIPLKQPDWDDSEFAPSVYDESHPTGAIYLDIAKKIDESIGAKA

SEQ ID NO: 5111 - protein, 193 aa, Bacillus licheniformis
MFKTAMLSISCFLFLSVTACAPTDQAAEMDYDQTKKMVVDILKTDDGKKAIQEILNDDKLNETLVMDEKTVKETVEKTMTSKKGAEFWKKVFEDPKFAEGFAKTLQNEHEKVLKKLMKDPEYQKMLMQVMQDPEMAKKYGELVRSQEFRSHLQEVISDTLTSPLYRKQFEEELKKAAAESMKEEMKGGEEKQS

SEQ ID NO: 5112 - protein, 48 aa, Bacillus licheniformis
MYKFLKDIHIKGKTSFRKELKHVQDRNAIDKLFSVSICNSLCSHGPSS

SEQ ID NO: 5113 - protein, 199 aa, Bacillus licheniformis
MKSRNLVRFFFSVLGVGALTTSIVGFAIEWGRYKELFLSFEVLEILSVLFWFIGVGMIFSVIAQMGFVIFLTIHRFALEIFRSHSLWNSIQLFLIIFVAFDLVYLRFLFFEKDGGSIIPYIWLPLFILAVGIAAAYAKQKQSSKKTFVSALFLMFVFTVMEWFPALRVNEEDWLYLMLLPLLACNAFQLLMLPKFQARA

SEQ ID NO: 5114 - protein, 254 aa, Bacillus licheniformis
VNHFYVWHIKRIKQLIIIMIAAFATASFFYVQNLLPLPVFSTEGGAKAVYRGDSDTNEVALTFNISWGDQKAMPILDTLKANGIKDATFFLSASWAERHPDVVERIRKDGHQIGSMGYAYKNYSQMKKSEIKKDLAKARHSFQKLGLDDLTLLRPPTGQFNKDVLDVAKQYGYTVVHYSINSDDWTNPGVQKIVQNVNGTVNAGDIVLFHASDSAKQTKEALPEIVHHLRSKGLKNVTVSELIANTDAKSSEVK

SEQ ID NO: 5115 - protein, 304 aa, Bacillus licheniformis
MLIRFAMKEFLSEKEYENLSKKTISAYQMLFDDFLRWCEEQGFSRVQDLNTRAIKNYLTLCKTEKGNNPTSLNTKRRQFRAWFNFLVQEEIIESNPTDPIKRAKEDIHIKTFTDDEVKEILSHLRRTKRREDTLFAVRNYTIFLTLIGTGLRASELTNLKWNDVDLINRSFKVFGKARKEQLVPLSETLVKELSFWKEYCLNQFKELSPWVFVNQKNNQFTVNGLKCWFKRLAQLMDFPETRCSAHSCRHYFAKKWIQSGGDISTLSKVLRHTSIKTTEKYLQFWGNEVADDYDKYNPLREMSL

SEQ ID NO: 5116 - protein, 41 aa, Bacillus licheniformis
MSWEKICDELMEYGLSLGFTEEEIREIFEENKELLDWIQKK

SEQ ID NO: 5117 - protein, 258 aa, Bacillus licheniformis
MQSLRDYETFETVSEMDEYISKVLAHFELKKTERELLWLLAGHSVKFIGVSFLKLDSMASALGVSKRTVQRALKVLGELGIINRVRTLRPVRGGFGASITQICPVELSTRSESETPEETKEEEPFQKKETFSFKAFKKDLKTLRQPKKKIEVDYTFLEAFGVPAHFIDIVKPFVSPEEAYSIWGKAQVLAKRYAPDVTEIIEPVVRAFKASVTAYKFNRIKKSFGSYLWGAIQGALSVEQRRVNAGRGLLSWNWLEEA

SEQ ID NO: 5118 - protein, 80 aa, Bacillus licheniformis
MSENKTSIFDRYSHEILDIENKLNDLKNNRIYEITGAKMDGYLATNAEQLREKIHKLLLQIDRDAPSFYEKLSEALDNKK

SEQ ID NO: 5119 - protein, 101 aa, Bacillus licheniformis
VPKLITVERAEREIKRLQHYINLVDTYPEDTLEKWIIKEYAYTNSIVKVVQNANEKGLTHQDEPLTKEYVTSVISGKGNDELHRLLRSGYNARIKHNKTKY

SEQ ID NO: 5120 - protein, 110 aa, Bacillus licheniformis
MEEYSGGNSKTKKIRGGGLLHTHSNIFTRNIFKNSLGSNLQKQTPQRPAQENTIHTNTTKEPTSERQITEQNKGGESLKIHLKIYFKNFFQMLIYQGFEEFSSGVGSGVY

SEQ ID NO: 5121 - protein, 54 aa, Bacillus licheniformis
LKLKTLGAQGLKIFLFFLKIILLSVLMGFTLKSSSLYSFHTLFTIKRNYPWEQK

SEQ ID NO: 5122 - protein, 95 aa, Bacillus licheniformis
MKIVKETKKTRQLEIYSETGELVQRVCRTCQLVKLPEDFPKYTQGYLRPDCHECHKKKQRKYISETADQRTVYKQRERARKVGAPDNYTLEDFLE

SEQ ID NO: 5123 - protein, 37 aa, Bacillus licheniformis
MKTFRYLAEANNMTMAQYIEFLEGMEELAERAKTFRG

SEQ ID NO: 5124 - protein, 76 aa, Bacillus licheniformis
VSVQFYVDIEKILERKNMTLGELAKKTGIQKASLSRMKKTKKVTFSTLNRIANSLGETDWEGLVSAEFKSSGKIIR

SEQ ID NO: 5125 - protein, 219 aa, Bacillus licheniformis
MKLIDILTKNVKNAESTEKVVQKAQNEMNAIQAEISEKNKQKQQLQQAMNVIFASLVIDPDDKNALTQKKKADNKISELDKELEKLTEKAKKAQEALTQAQKDNNTSKGEVFKQEYIQGVTLGSFKLKLEHLPERMNRKFPSYSYKNWVDWSKAYGLPVQSVVTPAGVRLEERRENVPFLKEQQREAEAIGIRKAEELIAKVEKAIEEILAEEGIELNK

SEQ ID NO: 5126 - protein, 55 aa, Bacillus licheniformis
MLRKGADIELLKLKMEFINSKRNRELDWFLRLQERKLEEVSETLRQVGERNNGLR

SEQ ID NO: 5127 - protein, 273 aa, Bacillus licheniformis
MDYAKTTIEEGIRAGGQFKTPQRVKQDEAYKKKLKQMENYNQEHFTAFHDKECLLVFNTLTLELAGVLLNMFAYMEQGESGQLKLEGKRMGVKELSKILRKSERTVKGYLNELEALGYIEADKDGKRKVYSVDTRLANRGRRVVKGYFTKLYIVRLRDALKVMTIQEAGLLFFMIPHMNTRAFVLCSNPYETDIEKIELWTREQLAEGAGLSLVQVKRLVSSLMKKQVLLSVTTHRTAIVLSPELISRQTTKISTYEIAQILRNEVNGSEVSW

SEQ ID NO: 5128 - protein, 72 aa, Bacillus licheniformis
VSTLENIKNNYKALVMEYEEASQFYLRTGLTRLLAHALQNLEQFERAFVECYSLEELGELQIELNAQGLAIV

SEQ ID NO: 5129 - protein, 134 aa, Bacillus licheniformis
MAKENKANLEDLVKKVRKGESLSKEEIELLHSILRKAKEEKEAKKDEKESLSEVIERTMKIALAEQTLEQAKKNYFKNLPLSEKTKILQGKVDKLETFYEKKTPKLKAEAKRLKKEREEREFYENYFKKYGYEL

SEQ ID NO: 5130 - protein, 213 aa, Bacillus licheniformis
LAKRGRPKKASLPEELKRKIEALENETDEVKIKEMKKLMKKEPDICGALQGNGTVCVKAPYIRKDGSTSGRCITHGGGDTRAKTPEGRARQLANLHPKARLIHGMYSKNIEFTKEETEFYNETIEYFVENYPEDVDPINMSLLHRFAINHIKATRLESMNFLKESRSNNSFEKLMQSFAQDLGLNKRYKDSKEHKNNPSNGDIALLFMDDNEN

SEQ ID NO: 5131 - protein, 143 aa, Bacillus licheniformis
MAKNFVEHHIQEGAFHTFKVEAGQVVKIGQVVEVTPNGGVQVAGAGSTKVLGVVYSGTVGVDGKNVGYSGDNNEVATVVALKPLVYLEANETINAGDMVEAGTNGTIVVHNEGATYLANEGHQKIGLALQNGNAGERILIALG

SEQ ID NO: 5132 - protein, 91 aa, Bacillus licheniformis
MFDYYEFDSKLIVRLKRSYDIDSLGVKTAIEELLKETNAVQAVVSNHERTIHKTFENEDKIDFESMMISAPPLGGHSRKSRAINSQEIGNK

SEQ ID NO: 5133 - protein, 412 aa, Bacillus licheniformis
VTNKKRDPESVKLANLILEKYQPETVEDMQNALKDIFGPMFESMLKGEMNHHLGYESNNKEEKKTTNRRNGYGKKAIKTSSGEVNIQVPRDRDGTFEPQLVPKRKKDVSAIEDKVLSMYARGMSQRDISSTIEDIYGFSVSHEMISDMTDQVLVDLEEWQSRPLSPCYAFLFVDCMFTTIRNQYETKKYAVYTILGYTMEGKKDILGLWLNETESKHKWMQIFDEIKSRGVEDVFFLSMDGVSGLEEGARAIFPDIIVQRCVVHLIRNSIKYVPSKEYKPFTAALKKVYGAPSLKACHSAFEAFQTQWSTYPGAVDVWVRNFNHVEQLFDYGSTIRKVMYTTNAVESIHSSFRKVTKKGAFPNENALFKLLYLRIQELENKWEGGFVKNWSMVMNQLLVHEHLKDRVLKYLE

SEQ ID NO: 5134 - protein, 146 aa, Bacillus licheniformis
MTDTVSKEQRRKNMQAIKSRSKLEDKVTKELWHRGIRFRKNVKKLYGSPDIVIQKYKIVIFIDSCFWHACEKHGNIPKSNTEYWEKKLERNKKRDKEVNKYYEEKDWNIKRIWEHEIKEDFNETINRIVTFIEVVKHEPKRKRSGQ

SEQ ID NO: 5135 - protein, 381 aa, Bacillus licheniformis
MFYTNQPAINCTTYKQMLRSTGSLSNLFSESDSPYLVSRNVENAFCEAFGAENLGRSDCSADASLNRVGIGIKTFLHGNGHTLQKVAEFNKDSDLYRGKSPKELINTVASLRNERIEFTKRTYGIDSMIYHCVTRKPGKILIFEEPMDLVEISSITNVKVSNNRNTITFEDGLHEYSFNVTKSTLYKRFITDKPIEEINVEILENPYHELAKLFGFEIPKIPAPTVNPFENLEHVILPLFSDRGSKRHVPEKSGLNQWNALGRPRNPNEIYIPIPKWIHNVFPTFFPARDKPFQLRLPDKSLLSAKVCQDNSKALMSNPNSALGEWLLRQVMNLEEKELLTYEMLERLNIDSVIVYKHSEQHYSIDFCEMGSYDEFENENK

SEQ ID NO: 5136 - protein, 78 aa, Bacillus licheniformis
MIPFLGNRIQNAREARRLLPSQIAEKVGVTRSTWSLYESENRTPSLDTFKRIAETLNVSADYLLGLKEEMTSIKEEEK

SEQ ID NO: 5137 - protein, 337 aa, Bacillus licheniformis
LTYRVGSMFAGIGGTCLGFIQAGARIVWANEIDKNACITYRNYFGDAYLQEGDINLIDKNSIPELDILIGGFPCQAFSIAGYRKGFEDERGNVFFQILEVLEAQRNVYGHLPQAIMLENVKNLFTHDRGNTYRVIKEALEAFGYTVKAEVLNSMEYGNVPQNRERIYIVGFQDESQAERFSFPDPIPLTNQLNDVIDRTRRVDKRYYYDETSQYYDMLREAMDSTDTTYQIRRIYVRENRSNVCPTLTANMGTGGHNVPIVLDFENNIRKLTPEECLLLQGFPADYHFPEGMANTHKYKQAGNSVTVPVIRRIATNIISVLNIGMNINQEHEYAIAE

SEQ ID NO: 5138 - protein, 108 aa, Bacillus licheniformis
MMENLTINTIGNYFVAGIDGIELIVKVIPTGFEAKLSRNGKEVKSNEVFCFKEELREKVHENIVEELVNELEFADKDLDRITQELDDQLNNFLEEVVLEGEKTHRYVN

SEQ ID NO: 5139 - protein, 39 aa, Bacillus licheniformis
LNEWLAFLIFLVNLLNSDVGKKLYKKLKKLLMKIYHVLK

SEQ ID NO: 5140 - protein, 61 aa, Bacillus licheniformis
MSKSTMSLVKVWKSGNSFNVHINELGIMLVVNKDKQPKSYEKIEHWLSRDDENFITPTFEE

SEQ ID NO: 5141 - protein, 71 aa, Bacillus licheniformis
MKNTVIRFALEEYLKQKNVSQKKLCEETGLRESTLSSMKRSDKVNIVHLATIMEYFNDPEISNFLKVEYEE

SEQ ID NO: 5142 - protein, 50 aa, Bacillus licheniformis
LVEHFHGKEEVSGSSPLGSLSEYVDMTRFLLLWGKLFLFCDILLLDLLNV

SEQ ID NO: 5143 - protein, 389 aa, Bacillus licheniformis
MARTYRTRIKKRKKQKTKRRLIIFSFLVVFGLIYLALPSGMRDHQENQLQASEKKAQPEAKKKPTQNETKKSKIVTKNDNAQLDQYLKSIGFSGTALIVEDGKVVTSKGYLYANREEMVPNTPDTVFYVGSSQKAIIATAILQLEEKGLLSVNDPVSKYLPNFPNGSKITLYHFLTHTSGIRGHKEGRGYISPEDLIKDIEKRGVKYPTGKWDYRDSNYSVLAYIVSMVSGEPVDQYIKKHIFKPAGMKHAGFYKTFAKESNPSTGYKLNLQKKLYTPDMPDLSQLYGAGDIYMTAYDMYLFDKALYERKIISNESFMKMFTPNKATYGMGFYVSPGSYSSHGVMPGYNILNSFSLTGSRYVILFSNIQNNIKSFGSVNNRIFSILNGF

SEQ ID NO: 5144 - protein, 73 aa, Bacillus licheniformis
MNKLLYRSMEDGIPVEIIYMKKSGFSKRAILVKEIKNGYVKAFCFQKQQIRMFKIESILSVFPYKKRNSAHYA

SEQ ID NO: 5145 - protein, 325 aa, Bacillus licheniformis
MLQTINKTLGKIMPLLTPLSVVSGVLLADYLNGLASLVPWIFAFMTFAGSLGANFQSLKTAVAHPLPMFLALFVLHIFMPVLAWSTGHLVFSGDSLTITGLTLGVVIPTGITSMIWAAMYKGNIGLTLSIILVDTILSPFIVPFSLSILAGAHVEMDVIGMMKGLVGMIVIPSLLGMLVNQFSTPERTARLSANCAPFSKVGLAAVVAINSSVVAPYLKNVDLKFLTIAVTVFLVAFTGYLTAWLIGRLMKRPQEEIVALIFTGGMRNISAGAVLATSFFPPQVAVPVVVGMLFQQILAALFGHLLARSELKKAHHLDKKTSLPS

SEQ ID NO: 5146 - protein, 137 aa, Bacillus licheniformis
MKTNRVSVMIWTLISAFLFCSMIVAASLSPLAHSGPHANEFGTLGMWAAIGTVLLFYMLPLAVYMAGFDAMKFVMAVLCGIGLIITLTMSPVFVLIGAIGGNASALLGVAGLCVLLAIVNVIWLVVAFRRTSASASF

SEQ ID NO: 5147 - protein, 289 aa, Bacillus licheniformis
MDFYLVDVFAETKYTGNQLAVFKAEKNLSSDEMQKIAREINFSETTFILGKQGNGGYDVRIFTPEKEIPFAGHPTLGTAFIIKNEIETEPSSNVILNVTAGAIPVTFEKGADQIIWMKQNPPVFNRTFDKEMMAGVIGIDTSDMDSNFPIQEVSTGLPAVIVPLNSLNAVKKCKINKDRFEAFMKETEASLLVFTTETYHEQNHINARVFCDCFSVPEDPATGSAIGGLAGYLLHHGYFNQHYLSIRAEQGFEINRPSLLHLEAQITENSTEIHVGGNVHLIAKGSWQI

SEQ ID NO: 5148 - protein, 409 aa, Bacillus licheniformis
MGKKAIWLLAGMFVFSTLTAAAAFPDKEKKAKVSPGIEVLMNKKSILKGKRVGLITNPTGVNSTLTSSIDLLHQAPGIELTALYGPEHGVRGDAQAGDKVDSYIDEKTGLPVYSLYGDTRKPTPEMLKNVDVLLFDIQDVGTRFYTYIYTMAYAMEAAKENDIPFIVLDRPNPQNGLKVEGPVLDPDYSSFVGMYPVPLSHGMTAGELAKLFNDEFNIGADLTVIKMKGWKRQMFFEDTGLPFVLPSPNMPTPDTSIVYPGTGLIEGTNMSEGRGTTKPFELIGAPYMKSTELAEKLNGLKLPGVRFRAASFNPTFSKHQNKLCHGVELYVTNRSAFKPVNTGIAIIKTVHDLYPDDFEFLPSGNFNRLIGNGWVKTMIEQGASIDEIAKKYEAEQKRFMNIRKKYLLY

SEQ ID NO: 5149 - protein, 643 aa, Bacillus licheniformis
MKRFLQCALIALLLSSLALQPAAREAEAKQRPEQNIKQMVSSMSLEEKIGQMLMPDFRNWKKKGESSAKGLTEMNDEVAGIIEKYRLGGVILFAENVTGTEQTVRLTDGLQQASPDIPLFITIDQEGGIVTRLESGTNLAGNMAVGASRSSKNAFRSGKIIGKELSSLGINVNFSPVLDVNNNPDNPVIGVRSFSSKPELTSKLGIQMMKGLQDEQMIATAKHFPGHGDTAVDSHYGLPLVPHNEKRLRSVELAPFQKAIDAGIDMIMTAHVQFPAFDDTTYKSKKDGEDIMVPATLSKKVMTDLLRKDLSFKGVVVTDALNMKAISDNFGQEEAVVMAVKAGVDIALMPAQVTSLETEKNLARVFEALLTAVKNGDIPMEQIDQSVERILQLKIDRGIIDHTGSEPLQKKIKYALKTVGSSKHMKYEKKMARDSVTILKNDKSTLPFKPKKGDTVLILAPYEEQTAAIAKTISKIRKNIKVVEYRFAEKTFEEEIQKKIDEADYVITGSYVIKNDPVVNDGVIDDSIQDSSKWATAFPRAAMKYAQANGKKFVLMSLRNPYDTANFEEAEAVIAVYGFKGYANGRFRQPNIPAGVEAIFGKAKPKGTLPVDIPSVTRPGETLYPYGYGLNIKNGKPLHKGGS

SEQ ID NO: 5150 - protein, 448 aa, Bacillus licheniformis
MIRAAASLLLLTCFFPLPSTAQTAIGNETKQRLTYPVLTKAKTPEEAGFSSKKLKAVDRLIEQDVKAGFPGAALILIKDGKIIKKEVYGYKQKYNGLIALKHPKKMKANTMFDLASNTKMYAVNFALQHLVSTGKLDLNKNISQYLPDFKDHPEDDVKGKNRLRVIDLLHHNAGFPASWNYYDPKSAGHLYSQSRSKTLEYLVKTPLAYEPGTKQIYSDIDYMLLGLIIEKITNERLDTFVENRFYRPLGLRHTLFNPLQKGFKRSHFAATERLGNTRDGTISFPNIRTYTLQGEVHDEKAFYSMEGVSGHAGLFSTVDDAAVLLQVMLNGGGYGRQHLFSSSVISQFTEPSKTNPTYGLGWRLNGNTDMEWMFGKHASSKAYGHTGWTGTVTIIDPVYQIGIVLLTNKKHSPVINPKENPNQFEGDEFATGKYGSVITAVYEALHHQ

SEQ ID NO: 5151 - protein, 39 aa, Bacillus licheniformis
MAVCAVDGSGKKHVSSNRDAAALIINFFSLLHSFLLKIA

SEQ ID NO: 5152 - protein, 455 aa, Bacillus licheniformis
MSDEKKYAGLARLILQHIGGPSNVADHTHCMTRLRITPVNSQKTDIDSIKALEGVIGVVEEETLQIILGTGVVQHVSDEFGKLLKSAEHVDLKESAAKHKAEISKKNATPFKLFLRRIASIFIPLIPALVASGLITGITKAVIQAGWLAETSQTAIILTVIGSGLFTYLGILVGINTAKEFGGSPALGGLAGILIINPAVGEISLFGEALLPGRGGLIGILFAAAFIAFLEKRVRRLVPHSLDIIITPTVSLLITGIVTYVVFMPVGGLISDAITSGLLAILDLGGIIAGFVLGATFLPLVVTGLHQGLTPVHMELINSIGDDPLLPILAMGGAGQVGAAFAIYFKTKKAKLKRAIAGGLPSGLLGIGEPLIFGVTLPLGRPFLTACLGAGVGGAFQAYFKIATVSIGVSGLPLSFLVHTHQVLLYILGLFISYAAGFVLTYSFGFKDDMAVEFD

SEQ ID NO: 5153 - protein, 282 aa, Bacillus licheniformis
MAAGGLEIIQNMLHKLPQSERKLAEYILKNPHEIVNGTIQEVSSSAKTSGAAAIRLCKSLGLKGFQDLKMRVAGDLMKPSDQGYRDIEPQEPLHSIVQKTTSNSIQAIRDTFENIDHEELQKAIQILINAETVHFCGIGASGIVARDAQQKFLRINKKATAFSDMHLVATLIANAGENDVLFAISHSGETQEIANAVRLAKKHGIKTIGLTRLGQSAVASLSDIALYTSCSNEAPFRSAATSSRLTQLYMIDLLFLGMAAERYEDIIQYIDQTKAAIRMMGI

SEQ ID NO: 5154 - protein, 304 aa, Bacillus licheniformis
MENSHLGSLTTERRNERSKRIHQAETIDMLKIMNDEDKTVAEAVQEVLPDVKTAVDYAVGSLKKGGRIIYIGAGTSGRLGVLDAAECPPTFSISPESVIGIIAGGEKALYNAVEGAEDHEAFGRRDLEAVNLSNNDTVIGIAASGRTPYVLGALKYAKKTGAKAISLTCNENSAISQAADHSIEVVVGPEVIAGSTRMKAATAHKMILNMISTAAMIKMGKVYENLMVDVKVSNDKLKERAIRIIQTVTGMPKETAAQALEMSNNQVKTAIIMLKTNEDAAAAEKLLEKSEGDIEKALSIYEKS

SEQ ID NO: 5155 - protein, 105 aa, Bacillus licheniformis
MCKRGDRIMILVSSCLAGVECRYNGSHSYVEKINKLVEEKKAVMACPELLGGFQTPREPAEIIGGTGEDVLDGKAVIKTQSGNDVTDPIYKRGISNIGDGKANQG

SEQ ID NO: 5156 - protein, 304 aa, Bacillus licheniformis
MLKQQISMIGVPMDLGQLRRGVDMGPSAIRCAGVNERLECLCQDIEDLGDMTIGQREDEKEGGEPASEELRNLKAITKASVKLAETVDNIVASGAFPLVLGGDHSIAIGTLAGLAKHYQNLGVIWYDAHADLNTKETSPSGNIHGMPLAISLGIGREGLTAIYGKEAKIKAENIVIIGARSLDDGEKELIRDKGIKVYTMHEIDRLGMTRVMEETIDYLRGRTDGVHLSLDLDALDPNDAPGVGTPVAGGISYRESHLAMEMLEESKLITSAEFVEVNPILDEKNRTAEAAVALMGSLFGEKLL

SEQ ID NO: 5157 - protein, 187 aa, Bacillus licheniformis
METMIKKRIKQVKKGDRNAFADIVDIYKDKIYQLCYRMLGNAHEAEDIAQEAFIRAYVNIDSFDINRKFSTWLYRIATNLTIDRIRKKKPDYYLDAEVAGTEGLTMYSQVAADVALPEDEVVSLELHSTIQEKILRLPDKYRTVIVLKYIDELSLIEISEILNIPVGTVKTRIHRGREALRKQLRDL

SEQ ID NO: 5158 - protein, 206 aa, Bacillus licheniformis
MSCPEHIVQLMHKYLDGDILPEDETRLKEHLQSCEGCKKHLHEMEKSIALVQSTSHLTAPANFTANVLANLPKEKRTASINRWLKAHPFLVAAALFAILMGGSFFSSWKNDHDFSVSSQPNLVVKNNTVIVPEGEVVKGDVTVKNGKLIIEGKVDGDVTIVNGEKYTASAGQVTGQIHEINEVFDWIWYKIKSTGKSVFGVKESKE

SEQ ID NO: 5159 - protein, 273 aa, Bacillus licheniformis
MAFEDIPFLQYLGDAVDILLVWYVIYKLMMVIRGTKAVQLLKGIVVIVLVRLASQYLGLSTLQWLVDQAITWGFLAIIIIFQPELRRALEQLGRGRFFSRSGTPEEEQQQKTIDAITKAIKYMAKRRIGALLTIERETGMGDYIETGIPLNAKVSSELLINIFIPNTPLHDGAVIMKNDEVAAAACYLPLSESPFISKELGTRHRAAVGISEVTDSLTVVVSEETGGISVAKNGDLHRDLSEEALKNMLEAEFKKNSRETSSNRWYWRAKKNG

SEQ ID NO: 5160 - protein, 438 aa, Bacillus licheniformis
MDKFLNNPWAVKVVALLFAFLLYFAVHSAQAPTPKKPGESFFPTSTTDEATLTDIPVKSFYDDENYVVTGVPQTVNVTIKGPTGTVKKVRQVKDFEIYADMQNLKTGRHKVELKARNVADGLTLTINPSVTTVTIEEKTTKEFPVEVDFYNKNKMKDGYTPELPIINPKNVSVTGSKAVIDRIQNIKATINLEGVDQTVEKEAKLTVYDKDGNVLPVEVSPSVVKITVPVTSPSKKIPVKVDRKGSLPDGISISSLDISPGEVTVYGPQNVLDSLEFVEADEIDLSKIKDDTELEAGIKVPDGAKKVSPEKVKIQVKVDKEEEKKLKNVSIKTAGLNDSRDLEFLDPKSGKLDITAKGSTAAIEKLQPSDVELYVNVADLDDGEHNIKLEVNGPQNITWSLPRQSIRVKISSQTTQNEKNNGQDEEEENHSEKDSQPS

SEQ ID NO: 5161 - protein, 448 aa, Bacillus licheniformis
MGKYFGTDGVRGVANSELTPELAFKVGRFGGYVLTKDKERPKVLIGRDTRISGHMLEGALVAGLLSIGAEVMRLGVISTPGVAYLTKAMDAEAGVMISASHNPVQDNGIKFFGGDGFKLSDEQELEIERLMDQPEDHLPRPVGADLGMVNDYFEGGQKYLQFLKQSADEDFTGIHVALDCAHGATSSLATHLFADLDADVSTMGTSPNGLNINDGVGSTHPEALAEFVKEKGADVGMAFDGDGDRLIAVDEKGNIVDGDQIMYICAKYLKSEGRLTDNTVVSTVMSNLGFYKALEAEGIKSVQTAVGDRYVVEAMKKGGFTLGGEQSGHLIFLDYNTTGDGLLSAIMLMNTIKMTGKPLSELAAEMQKFPQLLLNVKVTDKHKVTENEKVKAVIEEVEKEMNGDGRILVRPSGTEPLVRVMAEAKTKELCEKYVGRIADVVKAEMGAE

SEQ ID NO: 5162 - protein, 40 aa, Bacillus licheniformis
LTRMEVYRIFGGCLPADLKDHSRKDFLKPKRRLFEQREIA

SEQ ID NO: 5163 - protein, 600 aa, Bacillus licheniformis
MCGIVGYIGQLDAKEILLKGLEKLEYRGYDSAGIAVANEDGVHVFKEKGRIADLRAAVDANVKSQAGIGHTRWATHGEPSRLNAHPHQSASGRFTLVHNGVIENYVQLTREYLHDVTLKSDTDTEVVVQVIEQFVNNGLDTEEAFRQTLMLLKGSYAIALFDHENKETIYVAKNKSPLLVGLGDNFNVVASDAMAMLQVTNEYVELMDKEMVIVTDKKVVIKNLDGELMSRASYIAELDASDIEKGTYPHYMLKEIDEQPLVMRKIIQTYQDENGKLSIPGDISNAVAEADRVYIIACGTSYHAGLVGKQFIETWAKVPAEVHVASEFSYNMPLLSEKPLFIFISQSGETADSRAVLVQVKKLGHKALTLTNVPGSTLSREADYTLLLNAGPEIAVASTKAYTAQIAVLAILAAVTAESRGKELGFDLVKELGIIGNAMEALCAQKDEMEMIAREYLTVTRNAFFIGRGLDYFVCLEGSLKLKEISYIQAEGFAGGELKHGTIALIEDGTPVIALATQEHVNLSIRGNVKEVTARGANPCVISLKGLEEADDRFVLPEVHPELAPLVSVIPLQLIAYYAALHRGCDVDKPRNLAKSVTVE

SEQ ID NO: 5164 - protein, 107 aa, Bacillus licheniformis
MNNETYIEVNRTSQLMNKMRKFTVLIDGVEAGKIKDGGRLRIDLEPGEHEIQVKIDWCVSQALRFTLDEGEVLKFRCGSPVRGWKMFFGLFYVLADPEKYSFIELEE

SEQ ID NO: 5165 - protein, 202 aa, Bacillus licheniformis
MFNLILKDIILQKKTLAASFLVLCVYLMLDISPIWVGVVFSIVISMYAFSIDEKSSIHMLLNSLPYTRKEIVSSKYIVVVLFTSMVAAAIFIVHFIIHREFTIWKDILLMVAIVMTAASFMLPFCYKFKSNYLVIASIAAFGLYMLTINFFVQNLNDQIREFIHMLLTLQNTFLYLIVAISIITLYGCSWLLSIRIYRNKVF

SEQ ID NO: 5166 - protein, 293 aa, Bacillus licheniformis
MDNVIELRHVHKSFDGFQLKDFSMNVKKGFITGFIGGNGVGKSTTIKLIMNLLQPDSGTITVFGMNYKEHEKEIKQRIGFVFDSNIFYEHLTLAEMKDIVKRSYVNWDEQVFNDYVNTFNLPLTKKIKTFSKGMIMKASLTVALSHHAELIIMDEPTSGLDPIFRRELLEILHQLMQDGDKTIFFSTHITTDLDKIADYITFIDKGEHIFTKDFYEIEEQYAIVKGGMELLDRETEQEFIAVRKSTHGFEALTANKSRTEKIFGDMALIEKPTLEDIMFYTKKGAKEHVQLNS

SEQ ID NO: 5167 - protein, 125 aa, Bacillus licheniformis
MKIIISNSSKQPIYEQIYTQIKDQILANELKPGQPLPSMRQLAKDMNVSLITSKRAYEELEKNGFIYSVVGKGSFVSDQNDEIMKEGKMKAIEEQLSAAIKNSKDIGVTLTELKDLLTILYQEEE

SEQ ID NO: 5168 - protein, 103 aa, Bacillus licheniformis
MIGMEPIEIFKALSNESRLQILQWLKEPDRHFKPHEGIDMNTIGVCVSQITDKLKMTQSTASQYLAILLRAGLIKAERIGKYTYYKRDEEAIGKLADFLKTEI

SEQ ID NO: 5169 - protein, 390 aa, Bacillus licheniformis
MFSTWKIYLLAIISFLVGTSEYIISGILDQIAHTLGITLAAAGQLITIFSLVYAVFTPVLMALTASMDRRKLMMYALGLFVIGNILAFTLPGYGWFVAARVVMALGAGMVVVTALTIAAKIAPAGKQGSAIATVVMGFTASLIIGVPLGRMTAEALGWKSVFGGIALLGFIAMIVLFLTLPHTEGDKPVPLLQQLSLLKKRKVAMGLSVTFFWLGGYSVAYTYLSPYLLTVSGISGNLLSGVLLIFGIASLVGSKFGGYSTDKWGVPFTLVGGMALHIIALILLSLVTHSYVGVLLILILWSFAAWSTGPTQQYHLATLEPELSGVLLGINQSMMQFAMAAGAGIGGIFVEKVSLASITWFGALGVMIAIVVVLTTFSSRKAAHVREISS

SEQ ID NO: 5170 - protein, 171 aa, Bacillus licheniformis
MNFQLEEAIEILERTPQTLSQLLTGLSNPWISCDEGEDTWNAFDVVGHLIEGEKNNWLPRIKMIVTKGATETFPPFDRFSQLNQNDGKTIEQLLNEFAEIRRANLKTLRQILDPETDFEQTGMHPEFGIVKLREQISTWVAHDLTHLSQIARVLAKRYQMMSDLGKLICGF

SEQ ID NO: 5171 - protein, 578 aa, Bacillus licheniformis
MKTENNNSMKPFFSMILTSGVPRLALSAGLTASLVTTLVGLSIPLLTREMVDGFSANSINLALAGILALVFIVQAVCDGFSTYFLSYAGQKVVASLRERMWFKLLRLPVRYFDEKTSGETVSRVVNDTGIVESLISDHFPQFVSGIITIVGSVVILLIMDWKMTLLMLISVPITTFIMIPLGMKMQRISKTMQDETASFTGHVQQTLSEIRLMKASNAEHTEKMKGLSGISKLFQYGLKEARIFALVSPFMHLVIMIVIVAIIGYGGIRVSEGTMSAGSLIAFLLYLFQIIFPITSFTMFFTQLQKAKGATERIIEIMHSEEEEGQEGLEMDISNLPIHVENVTFTYAGGEPVLRGVSFDVDPGQMIAFVGPSGGGKTTMFGLLERFYEPDSGAINIGETPISKLSMKSWRSQIGYVSQDSPMMSGTIRENLCYGLDHADSIDDQELWKVAEMAYADTFIKQFPEQLDTEVGERGVKLSGGQRQRIAIARAFLRDPKILMMDEATASLDSQSEAIVQQALARLMEGRTTFVIAHRLSTIVNADQIMFIEKGEITGRGRHHELIASHALYREFAERQLT

SEQ ID NO: 5172 - protein, 214 aa, Bacillus licheniformis
MTINIKVYSDYVCPFCFLGKDQLEKAIEGKDVEVEWLPFELRPRPSEQLDPLNDPAKLAMWDGAIKPRIEAWGVNMKLPNVSPHPYTDLAHEGYHFAKEHGKGKAYNDRVYKAFFQEEQDIGDIDVLTSLAKEAGLDEHAFKEALSARTYQDVQRKALQHAYEEAGITVVPTFIIGNERIAGAAAKEVFEQAIEKESRQKPVDGLQCDLDGNNC

SEQ ID NO: 5173 - protein, 42 aa, Bacillus licheniformis
MSDLKNPLIGFFFIKERRGKTVDTSSFYCSRSGASETKQKKV

SEQ ID NO: 5174 - protein, 102 aa, Bacillus licheniformis
MVKTKLSKPFVYEATGCLHRPGNDIRALFSYINSNIPEGEDIEVYSCWDGEEDKEKDDRLDFFIDIENLQLGKHVKLDKKKYIDEIAGLFYFEERQLVKIRK

SEQ ID NO: 5175 - protein, 174 aa, Bacillus licheniformis
MSDHKAVHIVQAKAEGKTLVMERSFEAPRELVFKAFSGSVHLESWWGPKGWQTANSRFEFQPDGVWLYCMECRDQNQGEFYGRKSCGKAVFQEIAAPEKIVYTDMFTDEEGNVVPGMPEILNEVYFQERDVGTKLITRSHFSSPKELQQLLDKGMVEGFSSQLERLEDYLKAIR

SEQ ID NO: 5176 - protein, 289 aa, Bacillus licheniformis
MRTEQEIIDLVLKVAREDSRVRAVGMNGSRTNPNVPKDPFRDYDIVYVVTDMQSFLDEPGWVDVFGERIIMQTPEAMELFPNELGNRFSYLMLFTDGSRIDLILVPLEEKLEYSREDGLTVILLDKDQDLPVIPPPTDREYWVQKPSPQCFADCCNEFWWTSTYVAKGLWRQEILYALDHLNLVRAMLLKMLEWKVGFETGFSLSIGKNAKFLDRYVDQNTWERLLETYPPADYKRVWNSLFKMWELFEETAAAVAEHLNEQYLFAEAEKVRQYLRRVQQLKPDAKEID

SEQ ID NO: 5177 - protein, 315 aa, Bacillus licheniformis
MFSIKKMLQNHYGIDSVNISPEQGGWTALAYQVTDGEAAFFLKVYDKNRASTAKWAALIDDYIPVLGWLGDHTALNGRLPVPLLTTAGEYKYEDDDAVYMLYEYIAGETIGDQPLGKGCVEKLAGIIAELHRYDETIPVKTEGIKEKYDISFLDEMTQWLDHLPCELATLIQPYSGAIRDMMESALSLADDLKCSGRRLALCHTDVHGWNLMKTGGELILIDWEGLKLAPVEADLMFFANQPYAQEFLRVYCETHKGFEIDQNALRFYQIRRRLEDIWEFTEQLAFDIQTEKEKAETMSLLKNELEAIKDSKTGY

SEQ ID NO: 5178 - protein, 239 aa, Bacillus licheniformis
VKNYRTLFFDVDDTLLDFGAAEKSALRMLFEEQQIRLTAEIEANYKRINQGLWRVFEKGEMDRDQVVNTRFSLLFKEYGLEADGVLLEKKYRSFLEEGHQLIDGAFELIKSLRDQYDLYIVTNGVSKTQYKRLQASGLYPMFKGIFVSEDTGFQKPMKEYFDYVFERIPHFSVDQGLIIGDSLTADIEGGRLAGLDTCWMNPGMIANDTGIVPTYQIQKLDELYYILNIEKESAAGHCL

SEQ ID NO: 5179 - protein, 456 aa, Bacillus licheniformis
VANKELKRGLGARHIQMIALGGTIGVGLFMGSSSTIKWTGPSVLLAYAICGIFIFFIMRAMGEMLYVEPSTGSFATFGHQYIHPLAGYMTAWSNWVQWVIVGMSEIIAVGEYMKYWFPDLPAWIPGIIAMAILGGANLVSVKSFGEFEFWFAMIKIVTIVLMIAAGFGIIFFGFGNGGQAIGFSNLWSHGGFFTGGFSGFFFALSLVIAAYQGVELIGITAGEAKDPQNTLRHAIQSIIWRILIFYIGAIFVIVTVYPWDELNAIGSPFVSTFAKVGITAAAGIINFVVMTAAMSGCNSGIFSAGRMLYTLGVNGQAPKFFTKISRNGVPLYGTIAVLIGLAIGVVLNYIAPPNIFVYVYSASVLPGMIPWFVILLSHIGFRKAKGAEIDKHPFKMPFAPVTNYLTIGFLLMVLVGMWFNNDTRVSLIVGVIFLAVVAASYYVFGIGKRASADGNK

SEQ ID NO: 5180 - protein, 50 aa, Bacillus licheniformis
VPQLMGINNEIFKALGAVEMLLAALSGAMIKNQLLVLFFISLAVFQYGRQ

SEQ ID NO: 5181 - protein, 39 aa, Bacillus licheniformis
MGGNPPAPESLWGPFQTTGPKDVVFQVKPSHTVKAYEKV

SEQ ID NO: 5182 - protein, 432 aa, Bacillus licheniformis
VLAILGFFMMLVFMVLIMTKRLSVLTALVLTPIVFALIAGFGFSDVGDMMISGIQQVAPTAVMIMFAILYFGIMIDTGLFDPMVTKILKMVKGDPLKIVVGTAVLTMLVALDGDGSTTYMITTSAMLPLYLLLGIRPIILAGIAGVGMGIMNTIPWGGATPRAASALGVDPAELTGPMIPVIVSGMLCMIGVAYMLGKAERKRLGVIELKHPAGANETAAAAEDEWKRPKLWWFNLLLTLSLIGLLISGKVSLTVLFIIAFCIALIVNYPNLDHQRQRISAHSSNVMAIGSMIFAAGVFTGILTGTKMVDEMAISLASMIPEQMGGFIPMIVALTSGIFTFLMPNDAYFYGVLPILSETAVAYGVNKVEIARASIIGQPIHMLSPLVPSTHLLVGLVGVSIDDHQKFAIMWAVLAVIVMTGCALLIGSISIY

SEQ ID NO: 5183 - protein, 39 aa, Bacillus licheniformis
MYLKMVKKKQNDFKKLKIHKNQIIYFRKFFSYDDKKGKA

SEQ ID NO: 5184 - protein, 319 aa, Bacillus licheniformis
MKNFAIIMICLLILMSGDERQSSAPRPPGGPVEIVVPAEPSGGWDLTAQAIQSVLKQKQVIKSEVKIVYKPGSGGDKGWKYINSSDTYTIGMTSSLMLSNYILGQSKLKTDDFTPLAILAKEWQTIALPKGSEIKSGKDLLNEIKKNPGKVKIGFSPGLGNDDQLSFVRAADMYGVDPFNIQYLQYESSEELIQALIRHEIDAASMTLSEAKTYERSGSITLGAVTSDKRLPAYPHVPTWREQGIPFVFSHWRGVLGPKNMTKEEISYWDQVFKKITSSPEWKQKINEQEWESYYLNSKETQRFLEEQSAFYQNIMAGD

SEQ ID NO: 5185 - protein, 226 aa, Bacillus licheniformis
LIDIVIAEDDFRVAQIHERLIEQLDGFNIIGKAANAKETMEILEVRKADLLLLDIYMPDEMGTTLIPVIRNRVPEVDIMIITAATETCHLQESLRAGIVHYLIKPVTAEKFKQVLLQYKKKRQTLLSQPQVSQSMIDQIFGDFSSGSRQAEDLPTGINSITLQKIRDVLRDAAKGMTAEELGEKMGASRTTARRYAEYLVSKEEARAELEYGIIGRPERKYYLADE

SEQ ID NO: 5186 - protein, 536 aa, Bacillus licheniformis
VVKKRVNFSLQTKIMGLIAALLILVIGLLTVTFAVQQTKEGRKQSEQLAVQTAKTISYMPPVKELFQKKRGHKGEAQEVIEQMKEQTGAYTIYVLNEKGEIKIASEKRGQTKLTRSRKILFGGSHISETKNDGRMVIRGSAPIIQEQSGYSKVIGSVSVDFLLNETEQRIKENVRKLSFMAVLVLLIGFAGAAALAKSIRKDTLGLEPQEIASLYRERNAMLRAIKEGIIATNREGVVTMMNVSAAEMLRLPEPVVNRPIDDILPGAGIMSVLQQRQMLLNQEVCVNDQVFILNTKMMLQNGQTYGIVVSFRQKTELKRLIDTLTEVQKYSEDLRAQTHEFSNKLYVILGLLELGEYEAAIDLIKEEYAIQNEQHDILFKNIHSQQVQAILLGKMGKASEKKVKLSIDENSTLEPLPEHIGMSHLITIIGNLIDNAFEAVAEQNVRLVSFFITDIGRDIVIEVADTGCGVAPDKMKAIFERGYSSKGMKRGYGLANVKESVRELGGWIEVANQKGGGAVFTVFIPKEKQTREGESI

SEQ ID NO: 5187 - protein, 298 aa, Bacillus licheniformis
MNLHALRLFYSVAETGSVTQAAKQLSISQPAVTSQIKKLEREIDCTLFVPKGRGILLTQSGAELAKQAKRLFSLEKEIESYVEQLREGSIGKLRIASTFLPANYLLPRWLSRFKQQFPKTEVEITTTNFQKACEQLINYEADIGLIGGTTEFGPFLKGTLLLEDDMLFVVNQKHKFASKHVALEEIVKEPFVFREEGSFSREKLISLCNLHNAGKPNMGVQINGLNETIRTVMEGYGATFVSALEVNEYIARGDIAKVHVDKAVIKNPISLCVRTEDHLSPSALNFIQMIDSTDEYPL

SEQ ID NO: 5188 - protein, 390 aa, Bacillus licheniformis
MSTLILNKTAYSKSPYDVWLKGLDEPVAMLTSTDRADECRNYDVIEAFDDYPVNGCIEMRALELNETYHFKTIIASSEFDMLRAGKLRSLLGIKGQSYKSALLFRNKILIKEQVRKAGVKVPDFKKIDSAADLYTFVQTFGFPVVVKPIYGSGSVDTTVLRNRQDVWNVLAKGLPDHLEVESFIEGDMYHIDGLILDEEIVLSWPSRYINGCLAFQDHQFLGSLQLELKNPLTWRLTDFVQKALAALPVPNTTTFHAEVFHTPDDELVFCEVASRTGGAMVREATVQTFGFDINEVCVKAQCGLEFHIPEVDNNPDRLSGWLLIPPKDGVLKEIKPAPAADWIAKQNIRSSRRQVPRLVFQCRRNCKLFNYRTHRSRIERPYQPACNVVP

SEQ ID NO: 5189 - protein, 408 aa, Bacillus licheniformis
MFAQFKAFSRLHPLIRFLLIGTLVTKAAKSMTTPFLALYLHMKTGADFGTIGLVIGLGYFSSTVGGVVGGALSDKIGRKKVMLSSIFIWSFVFILFGLVHDFMWFLLLNILSGLCHSCFEPVSKALMAELSEREMRFRIFSLRYLAINVGAAVGPLLGAYFGLAKTGTPFIITGLVYFGYAILLSLMMIRLTTVKETKIAPEKVQAGSVLKTLKQDKALRLYIAGGILFLFSYSQMESTLLQYLNNDFANGVKIFSTLITLNAVTVILLQVPLTRLFERYKSLTTISIGTVFCILGNIGFSIANGWIVFMLSMFVLTIGEILCFPSMNVLLDELAPDHMKGAYYGMQNLYNIGEFLGPWLGGMMLALYGGKAVFLIAACSVFLALGAYHVGRRKFLSAQHYGVSPFSY

SEQ ID NO: 5190 - protein, 82 aa, Bacillus licheniformis
MDTTLGYLRESLSNHLEHGIGQNIYRKIVSGRYANEEEFVEHLEEREMEFLNQVLEHEMKYALNEQDHKRTRELNEVYELLF

SEQ ID NO: 5191 - protein, 63 aa, Bacillus licheniformis
MGAIERNGYTFEPEYSVTRQNGAIHVYRRGRFVEEIPFEFHGEFPEHDLIEELVNHYCYENKI

SEQ ID NO: 5192 - protein, 49 aa, Bacillus licheniformis
MHELSYLWPLFCCRSKKLQADYRYKNPKIKAARSAASSSLIFYFHNNND

SEQ ID NO: 5193 - protein, 88 aa, Bacillus licheniformis
MKQKNLISGLAVVAGVTAYMLKDETNRQKLKSYLQNVKEKIPYFSEKHNVDSFPVEKAGHPSPHDIEDNKMVSEGSMYPVQYYDEKKK

SEQ ID NO: 5194 - protein, 681 aa, Bacillus licheniformis
MPTNRLINEKSPYLLQHAHNPVDWYPWGEEAFEKAKRENKPVLVSIGYSTCHWCHVMAHESFEDEEVAKLLNEKFVSIKVDREERPDVDSIYMTICQMMTGQGGWPLNVFLTPDQKPFYAGTYFPKTSRFNRPGFVEVVKQLSDTFAKNREHVEDIAEKAANNLRIKAKSDAGDSLGEDILRRTYQQLINSFDAAYGGFGSAPKFPIPHMLTFLLRYHQYSGEENALYSVMKTLDSMANGGIYDHVGYGFARYSTDDEWLVPHFEKMLYDNALLLIAYTEAYQITKNERYKQISEQIITFVRREMTDEKGAFYSALDADTEGVEGKYYVWSKEEVLETLGDELGELYCAVYNITQEGNFEGHNIPNLIYTRLEDIKDEFALTDEELQNKLEEARTKLFEKRQERTYPHVDDKVLTSWNALMIAGLAKAAKVYNAPEYLEMARAAAEFIENKLIQDGRIMVRYRDGEVKNKGFIDDYAFLLWAYIELYEASLDLTDLRKAKKLEADMKGLFWDEEHGGFYFTGSDAEALIVRDKEVYDGALPSGNGVLAVQLSRLGRLTGDLSLHDQAAKMFAAFHGDVSAYPSGHTNFLQGLLSQVMPQKEIVVLGKRNDPDRQKIVSALQQAFQPNYAVLAAESPDDFKGIADFAAEYKAVDNKTTVYICENFACRQPTTNIDEALDQLV

SEQ ID NO: 5195 - protein, 427 aa, Bacillus licheniformis
VAGYSERTVESYIDSPDRLKRLYKRVLFIVSLSQIFGGAGLAAGITVGALLAKQMLGTDAFSGVPSALFTLGSAGAAFGVGRLSQRYGRRTGLTAGFMVGGIGAIGVVAAAVINSIILLFVSLLIYGAGTATNLQARYAGTDLADKKQRAKAISVTMVMTTFGAVAGPNLVDVMGKFASIIGVPPLAGPFILSAAAFILAGLVLYILLRPDPLEIAKKIETYRQENKLADESKSAGASDNQKGITIGAAVMVLTQIVMVAIMTMTPVHMQHHGHSLGDVGIVIGFHIGSMYLPSLVTGILVDKIGRTAISIASGVTLLLAGAVAALAPSDSLVLLIVALSLLGLGWNFGLISGTAQIIDSTEPSTRAKVQGTLDVLIALAGASGGALSGMVVAHSSYALLSLAGGLLSLALIPAVIWPRRKTNTQKG

SEQ ID NO: 5196 - protein, 257 aa, Bacillus licheniformis
MRKNAATEEAIQRWNRFADSYAANHTEQGDIHKEVFLNPVIFSLIETVKNQKVLDAGCGEGYLSRTLAAREAVVTAVDYSTRMLEIAKERTPDGLHIHYRHGNCEDLHFLDEQSFDIIISNMVIQDLANDEKAFQEMHRLLKDGGCFIFSILHPCFVTPESGWERTKDGQKLHWNVDRYFYEGAYEQPLGGEEKMFLFHRTLTSYINTIIKAGFQLEAVEEPRPSKEMLKKYPSFEEDLRCPDFIVFKLRKPGGDVR

SEQ ID NO: 5197 - protein, 290 aa, Bacillus licheniformis
MKMLVTGATGKLGSKIVEKLLETVPADQLAVSVRNPEKAEALRARGVDVRHGDFDRPETLESAFRGIDRLLIISADGDNETRIRQHGNAVAAAERAGVRFIAYTSIANARESKNFLAPTHKATEEAILQTGIPYSFLRNNWYLENEMSSIQGVLAGAPWVTSAENGKVGWALQQDYADAAAAVLSGEGHENTVYELSGKLLTQEEIASALGEVLGKEVPVQHVDDAAYRDIMKNAGVPDFLIPMVVDIQKGIREGTLEVESDDFEKVLGRPLTPIKEGLAQIVARISEAK

SEQ ID NO: 5198 - protein, 46 aa, Bacillus licheniformis
MSRNPNRGYYRGSLQVNTHCKFMRCHQLSVFLLKQPHMPVFLFLHH

SEQ ID NO: 5199 - protein, 168 aa, Bacillus licheniformis
MQNRADGSKINIQKTKGERVWNAFGYFFYLGSIILLAAVWGSLPEKVPAHYNALGEVDRWGSKWELFILPEIGLIILLFMQFLEKHPEIHNHPKRLNETNAEHFYLLSRKLINRLKNACLIIFSLILIESVSIALDWGSGFGGWFLPIVLLGTVMLVAIGLIQQRKIK

SEQ ID NO: 5200 - protein, 544 aa, Bacillus licheniformis
LEIDVQKLLFEFIGGLGIFLLGIKFMGEGLQKSAGDKLRDILDRFTSNPLMGVLAGMIVTVLIQSSSGTTVITVGLVSAGFMTLRQAIGVIMGANIGTTATAFIIGFDVGAYALPIIAIGSFLLFFLKSKKFQNIGQILFGFGALFYGLELMSSGMKPLRTVEAFHDLTVSMSANPILGVLVGTLFTVLVQSSSATIGILQGLFADSLIDLNGALPVLFGDNIGTTITAVLASLGASVAAKRAAAVHVLFNLIGTAIFLILLKPFTALILMLQSSLGLDPKMVIAFAHGIFNTSNTLIQLPFVGILALIVTKLIPGKDSVVDYKATHLDPLFIQQSPSIALGQAKEEVLRMGEFAVKGLEETKEFFNTKQAKHAQSAFQIEDAINNLDRKITDYLIELSATTLSEQESEEHHMLMDTVRDIERIGDHFENLVELGEYQQSNRVKISEAAMADLTEMLDLTISTVKESITALGENNEDAARRVVEKENQIDKMERKLRKKHILRLNDGLCSGQAGVIFVDITSNLERIGDHAVNIAEAVLGEEKH

SEQ ID NO: 5201 - protein, 86 aa, Bacillus licheniformis
MHKYRRRNTTAFTVMSYFTFFAGVFLFGIGLYNADNLQLNEKGYYIAVMILVAVGAILTQKVTRDNAEDNEIIAEQERRQNLSSGE

SEQ ID NO: 5202 - protein, 151 aa, Bacillus licheniformis
MQTDKQLFEETKQTAETLLLSKAENDEELMAYLEKQDLSTLNRLKVYFSGPTLKISHVIKASLASSIFASIVTTVCSGQANSILPDVSKGYFPALLSILLIMSSIWVFGTITKSQRNKEQNFLHFRKKTNHTKIIGMIDFVLENKYKSISN

SEQ ID NO: 5203 - protein, 148 aa, Bacillus licheniformis
MRNEKQLFQKAEHTAKLLESHKSDEELLTYLANQESVTLNQLKIYFSNPSFTLTYLIKGIFFSSMTAVIMAAFLSGQISSLNHGLSRLFSFFFMFYLIFSFLWIVKMLISSRKGPMQTILHFQKRAEYSRITGMIDFILDERFKKEFN

SEQ ID NO: 5204 - protein, 155 aa, Bacillus licheniformis
LNTDKQVFIETQKTAKTLKTYRDKSDEELLAFLAKQDSLTLNQLKVYYSDPSFALHYFISAAFFSIILASFITAILSGQADSIFPFISGISIIILAVIFTGCLFWVLRQLVILKKKPIQFITHFSKKAEFARIVKMIDYVLQQKYKKALKNIPNQ

SEQ ID NO: 5205 - protein, 139 aa, Bacillus licheniformis
LREETKCALIIDESLPLGLIANTAAILGAALGKNKPDLIGETVTDGSGIDHLGIVKIPIPILKGNAELLHQLSQKLLTDEFNDILTVDFTDVAQSIHTYEAYIEAFQSTAASDYRYFGIGICGDKKKVARLTGSLGLLR

SEQ ID NO: 5206 - protein, 302 aa, Bacillus licheniformis
MKTRRETAGHLAAVITIIIWGTTFVSTKVLLEDFPPVDILFYRFLIGLIVLIMVHPHVLTFRSWRQEALFAGAGLCGVTLYFLLENIALTLTYASNAGMIVAVIPMITAVLAHFLLSGEKLEPRFFIGFAAAFTGLALIFFNGQMMLKLNPLGDILAAASAFVWAAYAILMKKISTFGYHTIQCTQRIFLYGLLFMVPALFLFDFRFDASPFYSPVNWLNILFLGAGASALCFVTWNWSVGVLGAVKTSAYIYMVPVITIAASVIILQEKLTWVAFCGGALTLAGVYISETKPKPQLKEEQI

SEQ ID NO: 5207 - protein, 278 aa, Bacillus licheniformis
MRNETRTLFLGPDLNVEAYRFKGIIQKFPNHFHEYFVIGFIEKGQRYLLCKGEEYIINQGDLVLFNPYDTHSCEQIDGKALDYRCINVMPDVMRGFVKEITGADSLPYFTENVLFRHELNASLKELHIQILQKEKALKKEELFLNLLEELIRTYSDVTFLENAPEPSDEVKAVCSYLESHYQENITLEHLSRLTGWSKYHLLRSFTKQKGISPYSYLETVRINHAKKLLEEGVKPIDAAFQTGFSDQSHMTKFFKRQVGLTPKQYMKIFEYDRQEIKG

SEQ ID NO: 5208 - protein, 137 aa, Bacillus licheniformis
VKKKWIASIAFTMMLGIGITIYCLFFEHSKLSELTSDGEWELSYSKERGDQYWNGYVSKKTSEDAELKRVVFFVNGKETVDYEKDEQEEGGTHSDIVNVVWLGDAPEKSEQFEAVVERNQNGEYHKERIKLTAKNGL

SEQ ID NO: 5209 - protein, 155 aa, Bacillus licheniformis
MDKEYITELISSKLRLIRAESGYTQEKMANVLGMSKKTLVQIEKGRSAAGWAHVVAVCALFRNSEVLQAVLGDEPLEVVETVAHRSIDRPKGKTLGGKVWWRDIEKKGEFRLQQNLISHHYRILDSYDDLWFSTFEKQDAVARLDELLNEQDGVE

SEQ ID NO: 5210 - protein, 165 aa, Bacillus licheniformis
MKHVGGILILSEDLQLLSCNRAALHWLNILRGWESIGSEAVPRPVRAVCTRAAAETTAPAKTVISIPGHSCLSIKASRLDGFGPSGQIAVSFEPASPAETIPLIAEAYSLSDREKDIAYRVIRGLSTKAIGDELHISAYTVQDHLKSFFFEDGRRKPEGADVEAA

SEQ ID NO: 5211 - protein, 351 aa, Bacillus licheniformis
MQPEDIVRSGPNQYVCREGIVKELPSFANAFERPVIISGVKSFKAFTRYTTPPADWKVVQHTGCSSLNKIKKAAEEAESADVIIGIGGGTVLDTAKAAADLLNIEVMTIPTIPGTCAASTPLSVIYDDEGNFSGVQYHKRSSYLTLVDPLLLLSSPVAYVKSGIGDTLAKWYEAEAIIRNTADSLSIMVQTGLRQSVYIRDILLTESLKAIESLEKGESSPAFTNVLEAVIALAGTVGGYAGRYGRMAGAHAIHNGLTFIPETHRVLHGQKVAYGILVQLALEGRTDEIAELIPFYEGLGFPRRLSDLGILENIEAAKRIIAAHAVRPDESLCLMGSFHEADVIAAIESLE

SEQ ID NO: 5212 - protein, 568 aa, Bacillus licheniformis
VKSPRWNNITIGGKYGIIFFVMLTAFLTSVLITYGLLKDTRQTVQDTKSKNETAVQSAKLMSLYQNKYLHIPEYIINAQDEKLTDYMKYSQEFADTAKKLKKELHSDEQLDMFDQIIENNHSLDEYFFSEIVPNVQQINTEKFLTLQKKANKLKEETMTLGESLKENAVKTNVESIGQAQSNMTKTIYILGVSILISAIVSAGLLIIVSRQIKKSLKRVVAASEEIAKGHLNFEALDYKGKDEIGQLSQAVNHMGGSLREMIVEVSGIAAEVDKQCLTFTSVSADVREGSEQIAVTVEELANGATNQANEAANISEQTQELTGQIQHAHESGETLARFSKEVLHVSVDGDKQMAQSLEQMNVINHVMEASVEKVSVLEEQTQSIHKLVEMITGMAEQTNLLALNASIEAARAGDAGKGFAVVAGEVKRLAEEVKSSVGSITEIVTAIQTETSSMAGDLKTGFSEVHKGKNQIETSGRYFSEIKNKVTDMAGRVSDISEALSHFRRSSEEINGSVEHIAAISEESAAGSEEISASVHEQSGSIEKMDESARLLGEMVERMNVMIKRFKL

SEQ ID NO: 5213 - protein, 353 aa, Bacillus licheniformis
LSIYVKRGLLALALFSLLTAVAGCSFNSAEKSANREEKVKLIADSDKLYVGFAIDTLKEERWYKDKEAFEKEVKNLGGEVKTLAANGNKEVQIQQAELLISEGVDVLVVVPADADAAAEIVKKAHSAGVKVISYDRLIRNADVDYYVSFDNEKVGELQAEAIVKKAKKGNFVYIGGSSLDNNAVLFRNGAMKVLEPLKRQGKVKLVLDEYTKDWLPEEAKKNMKKALNKTRDIDAVIAANDGTAGGVIEALQEAGLAGKIPVSGQDAEIQGVRRIVNGTQTMTVYKPIPALAKKSAEMAVQAAKGEAIQTDTTVENGKAKVPAILLEPYAVTKGNINETVIKDGHLSKKDINK

SEQ ID NO: 5214 - protein, 255 aa, Bacillus licheniformis
MKKSISSLMIGLLAVVLGACSSNHDDQQSQASDQAKTAQSGQQDQEKQIKAMQKKLDQQKVDDTKTVAVVNDEKITGKDYNSVLSTAQMQYQQTGQDPTSKDAAQQIKKQAIDSLIGQALITQEADKKGYKASEKEIEKQLDESKKQYKNEQDFEEAVKKAGLNMNTLKSDIADSIKTEKYIDKELPTDQVTDKEIKDYYDQFAAQQKDSGQKNTPAFDDVKQQIQDMLKQQKRQEKLGQQVEKLKKSADVKVEI

SEQ ID NO: 5215 - protein, 254 aa, Bacillus licheniformis
MFEDERLNRLIYLYTPLYAEDFPIILFWIPKSGCTTLNRWFFFQNGLLEDVNRRCAGEVHHYRNAIYTQKPNYVKDLLTDLREGKKDTYKVVRNPFRRAVSSFLAAICSPNFICLFNSDINTGLSFTQFLHHLKDLGTDINAIDRHLGPQYIEGEEEFVTNYIYLEQFSAQIREIENKYKLLKSPLSQLSQSPHHLSDIMIKKGKFADTVLTMSTFDWAFPTFESFYNDETKELVHDIFAKDFEVYGFDSKHIK

SEQ ID NO: 5216 - protein, 295 aa, Bacillus licheniformis
MQIRMTEYQVPDPESGPYGITVCANGRIWFTEQKGNRIGMLTESGDITEYTIPTESAGASIITSGIDGELWFTEYKAGKIGKITPQGKITEYALPPGAAPFGIAAGCDDAMWYTDMAGHQIGRLSSSGEITEYKLPKPGAFPSFITRGADGALWFTQNQSGSIGRITADGDISEYPLPQEQSGPVGITAGPDGALWFTEINANQIGRITVSGKISEYQLPTAHARPHAIAAGGDGALWFTEWGAGQIGRITVDGDITEYPIPTADSEPHGIAAGSAHSIWFAEECGRIGKISIQN

SEQ ID NO: 5217 - protein, 126 aa, Bacillus licheniformis
MEHVKALAIKGIMTIVILYLVLGLGFSFSFENTLFITIVLGAVSYLLGDLFILPKTNNITATLADLGVAFLVVWLMALAMGTAANTAALAAFFAAVAMAIGEYIFHFYLMNKGLGSPNRRMETRTE

SEQ ID NO: 5218 - protein, 484 aa, Bacillus licheniformis
MEQSNTNRQNFQRKMQTRHLIMLSLGGVIGTGLFLSSGYTISQAGPAGTILAYLAGALIVYLVMLCLGELSVAMPVTGSFHMYASRFIGPGTGFTVAWLYWLTWAVALGSEFTAAGLLMQRWFPDTSVWMWSAVFAALIFALNAVSVRFFAESEFWFSSIKVLAIILFIILGGAAIFGIIPIQNADAAPLLSNFAGEGGLFPNGFLPIFMAMLSVNFAFSGTELIGIAAGESAEPEKNIPKAIKTTLWRLVLFFIGTIFVLSCLIPVKEAGVIKSPFVVVFDRIGVPYAADIMNFVILTALLSAANSGLYACSRMLWSLSKEKTLHPVFQKLTSRGIPLNALIFSMLGGILSLLSSVFAPDSVYIVLVSISGFAVVAVWMSIAASQFMFRRRFLAEGNTADDLKYRTPLYPAVPIAAFLLCLASCIGIAFDPNQRIALFCGVPFMALCYTIYYATNRKNSWNPSEPVKNASLHVSFSEYEEKKN

SEQ ID NO: 5219 - protein, 315 aa, Bacillus licheniformis
MTNPIRTSLQQFSVIILDGAMATELERYGCDLNDSLWSAKILIENPELIKQVHLDYFRAGADCAITASYQSTVEGFTKRGLSEQEALHLIRESVRLAAEARDEFWAAPENREGRPKPFVAASVGPYGAFLADGSEYQGNYGVTEDELADFHRRRMGALIEAGADILACETIPCLSEAKAIVHLLKEFPDTHAWISFSAKDGRHISDGTKAGECAKWLDQHDQVAAVGVNCTRLEHVSSLIGGIKKHTAKPIIVYPNSGEQYDPETKTWHGAACKTSFGESARSWYNQGAQLIGGCCRTTPEDIKAVAAWARKLEV

SEQ ID NO: 5220 - protein, 246 aa, Bacillus licheniformis
MKKLIINADDFGYSRGVNYGIIDAYKLGILTSATFMTNMPGARHAARLARESPGLGIGVHLVLTCGRPLLSDHRTIVDSKGSFRNLAFYQGAFTIDADEVYREWKTQIETCINMGLEPDHLDSHHHINAYPGISDVFLSLAKEYRLPVRRNMESAIITEKGVKTTDSFSPVLEAALKGEEAVTELFEKHNTVEVMTHPAYLDKELLTNSSYTYPRVDELEFLTDPDVVIRLNKLADVQLVSFRNLT

SEQ ID NO: 5221 - protein, 457 aa, Bacillus licheniformis
MKHILQLLGKSLLIPITVLPIAGLLLRLSAEDMLDIPLFQASGVILNNMDVLIAIGIAMGFARSKDKGIPALTGYLAITVLKEGIGILNPALDMSVFGGVLAGLMAAFIYNQFQHARLPSMFSFFGGEKFPITMIVLVTIPVAGFFSVVWPYAEAAIDAFSQSLVGLGAFGVFVFGFLNRFLLPFGLHHVMNTYIYFGLGRYETASGEAVTGEITRFLNGDPTAGYFLGGFFITMMFGIPAIALAIAHAARTRKKETKALMSSGAATSLITGITEPVEFTFLFTSPLLYFLHSVYTGLAGAVLCLLGIRHGFSWGAGAIDYLLNLNLSDGGLLIIPVGVAFFALYYVTFYFVIIKRNVPVIGREQETPEGDRLQQSMAAGILKYIGGRENVVTCENCITRLRLKLKDTSLADEAQLKRLGAHGVIIIDRHHIQIVIGTDAGTVKKDLQNLIDESAPD

SEQ ID NO: 5222 - protein, 258 aa, Bacillus licheniformis
MKKDEYYSIGVFSEMTGTSIRTLHYYDEIGLLKPEKETGTGRRLYTDRDAKDLQKIICFKFLGYSLEQIRAFMKDACFDAGLIEALQEQKRVLEERKEHIETGLKAIDRTIGLLEEEEEIDSSVFMSLLNSIQTEKEQREWLEQQVSKSFADDVFGKSEEEMAKLDQEYVRLSKEAKRLMGKPVDDPEVQDMADRYMKTSLEFVGEGVLSALGQMETIESRQLAEKFPSPFTKEEEEWLQRVFEYYMIHNDFCPESGG

SEQ ID NO: 5223 - protein, 240 aa, Bacillus licheniformis
METVKEILVVYGRIITILPLLLVVTLFMGKRSIGEMPVFDFLIIITLGAVVGADIADPKIEHLHTAAAVAAIALLQRLASNLMIKYRTLGRLITFEPTIVIKNGTFIVGNLKRIKYSVDNILQMLREKDVFNVSDVEMAFVEANGNLTVYKKPNKMEITAEDMGIQKSSGEFSYPVIVDGKVYTSVLQQLNVTESWLKNQLKKKGLERMDEIFFASVNQNHELHVSLDNQTTKIEPELLH

SEQ ID NO: 5224 - protein, 236 aa, Bacillus licheniformis
MKLSSKLILGLTVSSLAGKFLEKLLIQDNVSPNITASFNQEADIPDIDASSYIHHFASVIGSVVIGRNVFIGPFSSIRGDVGLKIFISHDCNIQDGVVLHGLKNYEYNSPVTEHSVFKDRESYSIYIGEKVSLAPQCQIYGPVRIDKNVFVGMQSLVFDAYIQEDTVIEPGAKIIGVTIPPKRFVSAGRVISNQEDANRLPEITDSYPYHDLNSKMTSVNLELAKGYKKEERQWKL

SEQ ID NO: 5225 - protein, 78 aa, Bacillus licheniformis
MTCLLYSGSLPKKREYYLIKARRRSETKKEDMEETTANKAMEYVSLINWCGNFGKTDENGIARFNKHTETIALRIYFK

SEQ ID NO: 5226 - protein, 132 aa, Bacillus licheniformis
MNMKRSLIGRLALTFAAMAAGLASRKTADMLPDIVNVYLGDALWALMIFFGAGFLFKNAKTASAALIALVFCFLIECSQLYHAPWIDNIRAAPLGGLILGYGFLWSDLLAYVLGVSAGAAGEMLFRKRKRQP

SEQ ID NO: 5227 - protein, 476 aa, Bacillus licheniformis
MQQFLQEVIGVTNDFLWSKLLIIMLLASGLFFTFKSKFFQVRLLKDMFRVLKEGTPDKNGISPFQAFCISMAARVGTGNITGIAIAIALGGPGAIFWMWIIAIIGSASSFVESTLAQIYKIKDKDGFRGGPAYYMEKGLKKRWMGAVFAVLITLSFGIVFNAVQSNTITVAFENSFGTDRLTLGIIITIVFGIITFGGIKRIAKLSEYIVVCLAVLYIGVAVFVMLMNITKLPDVISLIIGHAFGLEQAAGGAIGAALMNGIKRGLFSNEAGMGSAPNAAAAATTSHPVKQGLVQALGVFTSTLVICSSTAFIILFSDAYKEPGLSGIELTQASLSTHIGAWASGFLAIMVFLFSFSTLIGNYYYGETNIEFLHTNKAWLFIYRICVLAMVIFGSVSKVQLVWDLADLFMGLMVIVNLIAIFLLSKVAFAALKDYVKQRKAGKDPVFYKDVIKNHEGIECWEHSGTEQKSERKNAI

SEQ ID NO: 5228 - protein, 327 aa, Bacillus licheniformis
MNEVLEERYDARFWQSRLEDLVEHYRPFSSSGRNAEYIPALGKIDSNQLGICVIGSDQTMIKAGNSDVSFTLQSISKVISFIAACLTKGISYVLDRVDVEPTGDAFNSIIRLEMHKPGKPFNPMINAGALTVSSILPGESALGKMESLHDVIEKMIGKRLEINEEVFRSEWQTAHRNRALAHYLKETGFLEADVEETLEVYLKQCSMEGSTEDIALIGMILANDGYHPFRREHVIPKDVARLTKALMLTCGMYNASGKFAAFVGIPAKSGVSGGIMCAVPASVKREQPFQHGCGIGIYGPAIDDYGNSMTGGMLLKHIAREWDLSIF

SEQ ID NO: 5229 - protein, 38 aa, Bacillus licheniformis
MAAEGKGVKACAAQVVLKPVLSWEKGVWIAQGSELRKI

SEQ ID NO: 5230 - protein, 442 aa, Bacillus licheniformis
MMGGNRGSVMTKAARLVKKDGYILMVMMLTVPLAGELKFYPLNETFRVSFGVPTFFFLLLLLRNVPAVLSGFLTGAAVVGFRVLLDGFGPGQIDWLSSFYYHYPTFFFYFTYAFLFYLAKVKRFQFRPLYIGFLGFGIELIADGAELAVQYMMFESTVTPGKIRDMMAIAFSHSFIVLSFFNVMKLYETQSREKQIREQNEHMLMIVSNLYEETVHLKKTLKNTEEITNESYQLYRLLNRQSDNNSSVRQISQKVLRLAGEIHEVKKDNQRIFAGLSKLISKESFRDYMAAEDLVRLVTGINRKYAESLEKDIDFHYSIDGEHPKYHVYTVLSVINNIMANAVEAIQKQGSIRLSLYRRGDDMLECRVEDDGPGIPEKVGDVVFEPGYTSKYDEFGTPSTGIGLSYVKETVEELGGSIRFRNDASGVVFTIRLPVQQLIQKG

SEQ ID NO: 5231 - protein, 311 aa, Bacillus licheniformis
VRFFIADDDRAVRSILKQIIEDEDLGEVAGEAEDGCDLEGHVLNLQQIDILFVDLLMPLRDGIETVRHLHGVFSGKIIMISQVESKEMIGEAYSLGIEYYIHKPINRIEILNVIQKVKERIELERSIHDIQSSLNRLVSLGGGGKNGFREKSIQETGEFLLSELGIVGESGSQDLIAILQYLFDDEQTSLYEKDFPPLKQIFHQIAVQKLGPAASPAEINREVKASEQRIRRAVSHSLNHFASLGLTDFSNPRFESYASRFFDFTVISKKMKELQKDSAAVLPSARVNTKKFIQVFFLEAKRLSESAGKRG

SEQ ID NO: 5232 - protein, 178 aa, Bacillus licheniformis
METLYTERLTLRKMELEDADVLCQYWSDPEVTKYMNIAPFTDVSQARDMIQMINDLSLEGQANRFSIIAKETGEVIGTCGFNMIDQENGRAEIGYDLGRNHWGKGFASEAVKKLIDYGFTSLNLNRIEAKVEPENTPSIKLLNPLSFQKEGLLREYEKAKGRLIDVYMFSLLKREYAG

SEQ ID NO: 5233 - protein, 599 aa, Bacillus licheniformis
MSSSFFIPFLVSQILLSLFFSLIILIKKLLKAQITVGTHYHLSVISLLALIAPFLPFHYLKSNHFDWILNLGGASSTLSHTRSTDKTAEAIGQHANWVQDFSMSIEQSSFKMIDSAFFAVWILGIAVMLIATLYSNRKIGKIKKSLQMVNNKELLTLFRTCKEEIRFHQKVILGCSPLIKSPITFGVVRPYIILPKDISMFSADEMKCLLLHELYHCKRKDMLINYFLCLSKIVYWFNPLVWYLSKEAKTEMEISCDFAVLKTLDKKLHLKYGEVILKFTSLKQRTSSLVAASEFSSSYKHIKRRIVTVVNFKAASPLLKVKSALVFALVLGIILAGTPSVSILAMQRDTHFLSGANVEYEDDSTFFDGFSGGFVLFDSNRKKYTIYNRKESTARFAPASTYKVFSALLALESGIITKNNSQMTWDGTQYPYKEWNQDQDLFSAMSSSATWYFQKLDRQIGEDHLRRYLKSIHYGNEDFSGPANYWLDGSLQISPLEQVNMLKKFYDNEFDFKQSNIQTVKDSIRLEESNGRILSGKTGTSVINGELHAGWFVGYVETAENTFFFAVHIQGEKRAAGSTAAEIALSILDKKGIYPSASR

SEQ ID NO: 5234 - protein, 128 aa, Bacillus licheniformis
MKKIPQISDAELEVMKVIWKHSSINTHEVIKELSKTSTWSPKTIQTMLLRLIKKGALNHHKEGRVFVYTPNIDENDYIEVKSHSFLNRFYNGTLNSMVLNFLENDQLSGEEINELYQILEEHKNIKKE

SEQ ID NO: 5235 - protein, 40 aa, Bacillus licheniformis
MNADRMMTSFKPVTNEWLGASSSSDGIKKGKKHFMSLQLN

SEQ ID NO: 5236 - protein, 39 aa, Bacillus licheniformis
LLPHPASATQEKSNTAATFFSFKVLNHNFIKIVSLRMNI

SEQ ID NO: 5237 - protein, 307 aa, Bacillus licheniformis
MKLWFSTLKLKKVAAVLLFSCVALAGCGSNHSNASHSAEKDEKTEMKDDFAKLEEQFDAKLGIFALDTGTNRTVTYRPDERFAFASTIKALTVGVLLQQKSIEDLNQRITYTRDDLVNYNPITEKHVDTGMTLKELADASLRYSDNTAQNLILKQIGGPESLKKELRKIGDEVTNPERFEPELNEVNPGETQDTSTARALATSLQAFALEDKLPSEKRELLIDWMKRNTTGDALIRAGVPEGWEVADKTGAGSYGTRNDIAIIWPPKGDPVVLAVLSSRDKKDAKYDDKLIAEATKVVVKALNMESK

SEQ ID NO: 5238 - protein, 44 aa, Bacillus licheniformis
LSQINPIAYDFDKNPVVSRRPILPFFFTLSLKRENKKAHTIARQ

SEQ ID NO: 5239 - protein, 583 aa, Bacillus licheniformis
MTHEGPLEEWMKKLSEESLKDNTFDRRRFIQGAGKIAGLSLGLAIAQSMGAMEVNAAPRFSEYPFTLGVASGDPLSDSVVLWTRLAPDPLNGGGMPNEAVSVKWELAEDERFRRVVKRGTEKATPHLAHSVHAEVSGLKPNHVYYYRFKCGNQLSPVGKTKTLPAPGADVAKFTFAFASCQQYEHGYYTAYQHMAKEKLDLVFHLGDYIYEYGPNEYVSKTGNVRTHSGPEIMSLLDYRNRHAQYRSDANLKAAHAAFPWVVTWDDHEVENNYANVIPEKGQSVEAFIKRRAAAYQAYYEHMPLRRQSLPNGPDMQLYRNFSYGNLADISVLDTRQYRDDQANGDGNKPPSDESNDPKRTLLGAEQEAWLFDNLSRSEAHWNIIAQQIFFAQWNFGTSAAPIYSMDSWDGYPAQRKRVIDFIKSQKLNNIVVLTGDVHASWANNLLVDFDNPKSDIFGVEFVGTSITSGGNGADKRADTDKILSNNPHIKFFNDYRGYVRCTVTPEEWRTDYRVVPYVTEPGAAVSTRASYVYHKDYTGLKRTASNIVPGGVKKSNEVEEDRFLAHTRAHQKQVKQKEKKVTQ

SEQ ID NO: 5240 - protein, 70 aa, Bacillus licheniformis
MLSNIGIPGLILVLVIALIIFGPSKLPEIGRAFGKTLTEFKSATKSLVSADDNEIGQGSDAKKQSDPSAR

SEQ ID NO: 5241 - protein, 244 aa, Bacillus licheniformis
VKKRETHLIAHLEELRQRIIKTLLTFILFLINGFLFVQDIYDWLIRDLDEKLAVLGPGDILWVYMMIAGVLAIAATIPVAAFQTWRFVAPALTDHERRTALFYIPGLFIFFILGIVFGYFVLFPLVLQFLIGLSAGHFQTMFTAEHYFRFMMNLTLPFGFLFEMPLIVMFLTSLGILNPAKLSKMRKISYFALIVVSVVITPPDFISDVLVIVPLLVLYELSISLSAFIYRKKTAAQQGAEAQG

SEQ ID NO: 5242 - protein, 40 aa, Bacillus licheniformis
LPEMKKSENNDIDNLFICLTIKQKDEWRDLLKQRHRISTE

SEQ ID NO: 5243 - protein, 308 aa, Bacillus licheniformis
MSQLRKAPEGILGFPVAPFNREGKLEEEALYENIRFLLDEGLEAVFIACGSGEFQSLSTKEYEQMVEIAVSAADGKVPVYTGVGGNLSTALEWARISEEKGADGYLILPPYLIHGEQEGLYQYTKTIIESTDLNAIIYQRDNAVLTLEQIQRLTDLEQLVGLKDGIGDMALNISLSYTIGDRLGWLNGMPMAEVTMPAYAPIGFTSYSSAISNYIPHISRMFYEALLNGNDRLVKEIYEQVIIPINEIRKLRKGYAVSLIKAGMEIMGLHVKNTARPPIVPVEKEHCRQLENILKNAMARYPKTTAAL

SEQ ID NO: 5244 - protein, 488 aa, Bacillus licheniformis
MSVAAESKTYFNFINGRWVKAESGGMEQSLNPADTRDIVGLVQKSSIEDVDRAVEAAKQAKKAWRKLSGAERGQFLYKAADIMEQRLDEIAECATREMGKTLPEAKGETARGIAILRYYAGEGLRKTGDVIPSTDSSAFMYTDRVPLGVVGVISPWNFPVAIPIWKMAPALIYGNTVVIKPATETAVTCLKVISCFEEAGIPSGVVNAVTGPGSSAGQRLAEHPDVNGITFTGSNQTGKIIGRTAFERGAKYQLEMGGKNPVIVADDADLDIAVEAVISGAFRSTGQKCTATSRVIVLNGVYDRFKEKLLQQTKEITIGDSLKEDVWMGPIANKQQLDNCLSYIAKGKQEGADLIFGGERLADGKYENGYYIRPAIFDNVTSGMTIAQEEIFGPVIALIKADTLEEALETANDVKFGLSASIFTQNIRRMLSFTDEIEAGLIRVNAESAGVELQAPFGGVKQSSSHSREQGEAAKEFFTAVKTVFVKP

SEQ ID NO: 5245 - protein, 458 aa, Bacillus licheniformis
MKKNRAASPDTAGKRSSVRWFVVSMLFLVTSINYADRATLSIVGDSVQHELGLSSVAMGYVFSAFGWAYVVGQIPGGWLLDRFGSKIVIAASIFFWSLFTLLQGALGFFAAGTAVILLFALRFLVGLSEAPSFPGNGRVVASWFPSSERGTASAIFNSAQYFALVIFSPLMGWLAHSFSWHTVFVIMGALGIAMSFIWLKTIYEPKKHPRINAAELAYIEEGGALVSMDEGKNAEKKEKESQWPYIKQLLRSRMLLGVYIAQYCITTLTYFFLTWFPVYLVQARGMSILEAGFVASLPAICGFLGGLLGGFVSDFLLKKGCSITVARKTPIILGMLMSCSMIICNYADSSWLVVSIMSLAFFGKGFGALGWAVVSDTSPKECAGLSGGIFNTFGNIASITTPIIIGYIVNATGSFNGALVFVGANAIAAVLSYLFLVGPIKRIELQKEKDPADTTLSM

SEQ ID NO: 5246 - protein, 455 aa, Bacillus licheniformis
MNTNIHQHVKEEKASQTPSIADMRVIPVAGRDSMLLNLSGAHGPFFTRNIVILKDSSGALGVGEVPGGERIRQTLEQAKPLVIDQPLGAVQSILQSVRRRFKDRDAGGRGVQTFDQRTTIHAVTALEAALLDLLGKFLGVPVAALLGEGQQRDKVKMLGYLFYIGDRKRTTLPYISEQEANDDWFHLRREEALTPEAIVRLAEAARERYGFHDFKLKGGVLSGEEEIEAASALAKRFPKARITLDPNGAWSLEEAIALCKGKRDVLAYAEDPCGAEAGYSGREIMAEFRRATGIPTATNMIATDWRQMGHAIQLHAVDIPLADPHFWTMQGSVRVAQMCHEWGLIWGSHSNNHFDVSLAMFTHVAAAAPGDITAIDTHWIWQDGQRLTKQPFSIADGYVQVPDQPGLGIEIDMERVEKANELYEKMTAGERNDAAAMQFLIENWRFDPKRPCLVR

SEQ ID NO: 5247 - protein, 237 aa, Bacillus licheniformis
VEEDMETLQVESVNRKTLAKQVVERIVHLLSSGQLKPGDKLPTEIELMEKLNVSRPVLREALISLETLGIIKRKTRDGTYFNDKIGIQPFSVMLALAVDNLPAIIEARMALELGLVTIAAEKINDSQLERLQETIDIIANSTDNHYGEADKEFHRIIALSANNPVLEGMIQSLLITHAKIDSQIPYRERDRTVEYHTNILKALQQRDPYQAYHHMYEHLKFVRDKILNGLRDEKNNH

SEQ ID NO: 5248 - protein, 508 aa, Bacillus licheniformis
MLVNQTETPLYIKVNEKDNAAIIANAGGLPQGTVFPCGLKLQERIPQGHKVALTDITQGGAVIRYGEIIGYAVKPIEKGGWISESHIMLPEAPPLDELPIANKVPKPAPLLEGYTFEGYRNEDGSVGTRNVLGIMTSVQCVAGVLDYAVKRIKEELLPKYPNVDGVAALNHQYGCGVAINAPEAKIPIRTIQNIARHPNFGGEAMVIGLGCEKLLPTKIEPEGDAENILSLQERQGFQQMIQSIMEMAEERLKRLNERKRMTCPASDLVIGLQCGGSDAFSGVTANPASGYAADLLVRAGATVLFSEVTEVRDAVHLLTPRAVNEEVGRALIREMAWYDRYLERGESDRSANPSPGNKKGGLANVVEKSLGSIAKSGSSPISAVLAPGERAVQKGLIFAATPASDFVCGTLQLASGMHLQVFTTGRGTPYGLEMAPVLKVATRQSLSEDWHDLIDVNAGRIATGEASIEEVGWEIFRTILDVASGRKTWAEHWGLSNDLCLFNPAPVT

SEQ ID NO: 5249 - protein, 28 aa, Bacillus licheniformis
LLIEDDHSISEMVDHYLTKEGFEVVLGF

SEQ ID NO: 5250 - protein, 311 aa, Bacillus licheniformis
MTMLWIGILIILASLNIVQYKMKRQRDRNLKYITEKLSVMLNEHEADQILLGTADKVLRALLVQINLFVEEHQHITARFAKTEQSMKRMLTNMSHDLKTPLTVVLGYIEAIQNDSDMAEEERERLLEKLYQKTGEIIQLMNSFFDLAKLESEDKQILLTKIHINEICRKNILQHYDAVQAKGFKAVIDIPDTPVYAHGNEEALDRILQNLLSNAIQYGADGKLIGLSLTYDETWIVITVWDRGKGISEYDQQRVFERLYTLEESRNKAFQGSGLGLTITKRLIEKMGGNISLQSKPHERTVFSITLKRMTY

SEQ ID NO: 5251 - protein, 307 aa, Bacillus licheniformis
LTYIVQTSGLTKTFKGQEVVSNVSMHIRKGEIYGFLGPNGAGKTTIMKMLTSLVKPTSGEINILGHKLTNRSYEILGKIGSMIEYPIFYENLTAKENLNLHCEYMGYHNKAKIQEVLDMVNLKNIDSKPVKTFSLGMKQRLGIARAILTKPYLLILDEPINGLDPIGIKEIRNLFQVLSKEYGMTLLISSHILNEVEQIADTIGVIRDGRLVEEVSMESVRGRNTEYIELVTPNQLHACFVLEHELQIANFKILNDKTIRIYDAEASQTAISKALILNDVEIESMNKKHTSLEDYFLSLINGNAVNA

SEQ ID NO: 5252 - protein, 227 aa, Bacillus licheniformis
LLNLMRIEMKKLKLGWYIRGAVFANFIIFGFLWMVTCTEGKETFQTIDETFLLIGTFVRAVFIVFGAVLISKLVISEFKNKTILVMFTYPINRKKLLAAKLLIAGGLTFVTILISNACVAVGFFLLNSIYGIIPGELTASIASQQALKMIVFAFGAAGTSLVPIFFGMRKYSTAATIISSVVIIMPISSTGPGFSISSIVYIPLSLAAVGLFFSFLAVRRIEKIDVF

SEQ ID NO: 5253 - protein, 58 aa, Bacillus licheniformis
MLNLIKLEFKKTKLGWYYKGAVIANLCILGLLCLIGSEEKTSLKQKCRWLMPHPCCYL

SEQ ID NO: 5254 - protein, 359 aa, Bacillus licheniformis
MEFEIRYISFYVIQVDGKDEQANKQYKHFQTLDTEEFENSELKDFLDGELKKIVKRKAERHPKSEQVPTKIGRFITEPGHELDSNPNYNLFHKTKLAETKEEFNELSEQFVRTYLDTSAVRGGVFLVATAVPRKYFDDTFVFVMKCDFEPKVATIADESSLIRKVEMAITTKNMKSIQYPHMPEEGMTEESEVKIHQASHARYFEDFLKFVEYGESMPEIMKSQVMNMVQEHVYEAFEDKSEELQQFEHDLEIWEASEKREIQERLDTHQVIEASAQIVEHMPEAELKMKLGETEIKGLLAEFGDSIHLAKVNGRYVALIEAETISFEKGSSPVEFYKPEGLHEVIERIRNKIDREDEK

SEQ ID NO: 5255 - protein, 394 aa, Bacillus licheniformis
MRLNSQYIRTQLMVQNILKRNAADTTLKNVSSDITAVAKKASSQAGRASKESLSKLNYSKDSIVNHAGAFRRAYEAANDRTVTDTGKETKINAQNPYVSESDIRKKILDEKYSKINAMNKTKPDPLGYIKDKYKNPNSPYFRNDLSAAERQAAYDNETEWLFKGKAQSYNMQDAAFRNVTFNGEVETENEKVYQRSQVNKQLQALLDQYHIAIPADAALTFTITPIDYQVKVSGTDDEQLIHQIEQILQSGENSKQLFLHIMKSLSSDSAQYSKEAHQKYQTVREIYEVTGYHLKDLEVVDGRYVTPSGRDLLEVYKEELEKDPVLKKTAHLAIAHYGAELDRLAEAEYDSVPDFILSIDYSNGSLRDTGQKKSYGTGDTAWLRELKRRTGVND

SEQ ID NO: 5256 - protein, 34 aa, Bacillus licheniformis
MANKLKASFRNAIFKGKKRRWNPRLSLYYCIRAP

SEQ ID NO: 5257 - protein, 303 aa, Bacillus licheniformis
MTTVNEQIEHTLKLAEKHGLRLKRKHAEINESGMDFQVVFAEDEAGKSWVLRKPRRDDVIERAVYEGKVLKLLQNRLPAAVPDWRIHTPELIAYPELPGVPAAVIDMDIKNYVWNMEHEPPAEAFTRSLAKTLALLHGIDHKDAEEAGMHVMNPDDVRQTKAEHMERIKSELGVSAELWERWQKWLSDDSYWPEHTVFIHGDLHPPHILIDQHQSITGLLDWTEAKIADPAKDFLLYQTILGEAETARLISYYEEEGGRVWPRMKEHIKEMQAAYGIEIGMFALQTKQEEHLKMALDALGVTQ

SEQ ID NO: 5258 - protein, 139 aa, Bacillus licheniformis
MNHHRIEANLLDHAFTKYLRSSKKLDEETIPKSITSGKGFILRIIYRHGTCTIKEILQEVALSPSATTTALNHLEKEGLVIRSRNNDDRRTVWIELSQEGTRIAAQMVENRQALIDKLFGKLSEEEKKAFFAVIEKVMM

SEQ ID NO: 5259 - protein, 503 aa, Bacillus licheniformis
LSTLQQLINHHMETSDGLEALSGGDRTFTFKAYHQRVNQLAHYLLEEGVQKGDHIAVLCKNNHHFPVILLASLKIGATVVPLSWQLTSYELKGILNNCRPKVMFYDLEFADILTPLREQLQFCLMIEAGAGMNTTEQFESLFKNRPLKVEAEQVTEHDLALMLFTSGTTGNPKGCMVNHGSLAAYLTEVNVKSKQLKGTRFLASHPLYHMSSLNHVFQAAFEGIALYFLWDPEPFEILQEIEKKRIHMMMAFPSVYTYMLEEMKRHPFDLSSVKMLVSGGTKVPARLIKEYNDHGIMMVQGYGSTEAWTVSVWRPDMGWDKVTSAGKPIPQVSIKIEDPDTHEELPTGEVGEVVVKSPYVFEGYYQNPSATQKVLKDGWFYMGDSGKLDEDGFLYITGRYKDVIVYGGDNIYPDQVEEIIDQVPGVVESAVIGVPDEMYGEVPRAYVVKNESAGLKKEDIIAYCKERLSDYKIPEIVFIDSLPKNRLGKIVKKDLRELAVKGQ

SEQ ID NO: 5260 - protein, 404 aa, Bacillus licheniformis
LKSKWSAMVVIAGLLLLAGCGALKEADPPRGRSAQKTEASFSEAEQRFALALFQDMIKEEGSRKNIFLSPYSIQQALLMTANGAAGDSRKELLSTLHLSQADMASINGISKSVNRSLETLPHGEFSSANSIWTKRELKESFQDAIKGLGDAYQLQIDPNRATEEINSWVKKKTKDRIDQIVDKVSSNTIAYIINAVYFKESWKHPFDPHMTAEQPFYSADGSAKKHPMMTQTNRFPYLENEHFQAVKLPFQDEGLSLAVFLPKKAANLEQLLTGMTHDQWRALQKGWTMKQVELKLPRFSFQTDYMLNEPLKRFGMKTVFSSANFSNMFTGHGAAQINKVRHKTFIKVDEAGTEASAATAVEIIESAPVPEVTMTADHPFYFAIVDEASGMILFLGSVAEPKDD

SEQ ID NO: 5261 - protein, 275 aa, Bacillus licheniformis
MKKSLFLFVFSLFLMAIPAFSASANVYEDEYEPNNSFAEAYDVGLWKYKTISATIHSESDKDYYKFYATKGEQLAIHLKNIPANTDYDLYLFKDAYGYPAVGSSERMGNQNEIIRLDVPETGRYIAVVMSKDGSYDGWGFYRLEFIDRMKSGAYTANLSPSSISSPGQGVVSPVAAVNLANASAIPEGATVKSVSAEGTIYPSLGHTYREVLNKEEGVWHTSVSGGTLFPDLKPELALPVKTTWNVRYYSLAWSSSTWRSPQLKINYQYDSTYGW

SEQ ID NO: 5262 - protein, 275 aa, Bacillus licheniformis
MNIRDRVKLSLYSEQLMKPAAANVPAKTKGSKRMPASQTDTLSISKQAESAQKNAPSLRSQMNGVQFEIYNLYVDRQRLNSHIERALRESGISLSESEHLTLHVDGHNRITVEGIEDEQKRTRIEAVLNDSDKRFGARLLGHAELIGEQNGTPLDKQAYEKWHVNEFLKTVAGLSLADVSLDERGELEGGNEKLTRVIESAKDPKSDLEKSFQNILKKLKNVLAKGPDTIPDRSASFGYAGGTLIDLNVSKGFSAGQLNEWLDDPFLREVLLNNF

SEQ ID NO: 5263 - protein, 250 aa, Bacillus licheniformis
MKMKVKEVADLVGISVRTLHHYDEIGLLAPSETTEAGYRLYSDDDLEKLQQILFFRELDFPLKKIKSILENPSFDKNEALQLHRKALLEKRSRLDQMIATIDKTIQFAKGEINMTNEEKFAGFDFSQNPYEEEARERWGDEAVDRSKAYIESMSEGERKKMEQQYDAIYRKIAALREGAPDSEEAQAAIKEWYDFLNNNTGHSYSLEAFKGLGQMYVADKRFTKNIDQYGAGLAKFMCDAMTVFADRNQE

SEQ ID NO: 5264 - protein, 59 aa, Bacillus licheniformis
LNTYLTGILFVLSGILLLNLAVLSGINGVLWGLVLGGSIIFNLIGVVLLMRYINEKRHT

SEQ ID NO: 5265 - protein, 108 aa, Bacillus licheniformis
MKKTAENYLPLTQATYYILLSLTQPLHGYGIMQRVESMSEGEVKLGPGTLYGALSKLEKQGLIKKEGETGDNRRKQYILTNEGWAVVELEFKRLSKLVAISQSIFQKE

SEQ ID NO: 5266 - protein, 171 aa, Bacillus licheniformis
MSKKRKRKFRFFLAWQDRKEEDWLNEMAKQGWMLKSFFLFIYTFEKTKPSNTVYRLDYKTTSNLDQEEYIHIYEDAGWKHVTQFLNWHYFAADPSQVQTNVIYTDRESEAEKYNGLLKVLYAALASVFLSSGLPILIIGIPGYFYWIAAFNLFVLCLLIVCILKVRKKTRI

SEQ ID NO: 5267 - protein, 53 aa, Bacillus licheniformis
MVIATDDLETTCPNCNGSGREEPEPCPKCSGKGVILTAQGSTLLHFIKKHLNE

SEQ ID NO: 5268 - protein, 314 aa, Bacillus licheniformis
LSRAEKSTAEQSGHIQHGVRKAAGVVFMVFGTMCFASKSIFVKWAYEQGAKPEAVLLYRQLFAAPLFWLIFIVYRSKLPAKPEKAEIFKACAAGLLCFFLSPLLDFIGLHGVSATVERMIVMSYPMFVLIITAFVNKKMVSGKTFAAILLVNAGLFLAVGGWDVQALEANLSGAFLILLSAVAYAAYLVVAGGLVRQIGGIRMNAYGMSAASLAMAGYALLRSLREQPGIVLSYPPAMYGFFMIIAAVTTVIPFLFMLEGMKRIGAERVAVISMIGPVLTIFGGVLFLNERLTPVQWLGCLLVHLTVSLLEYRK

SEQ ID NO: 5269 - protein, 130 aa, Bacillus licheniformis
LQYARFWVRAGAWLIDCVLAVGLHFSSAWIFGDGSHEVAAAALLVYVLYPLLMPLTKLQGTIGKAIFRIRIVSDDTGRRIKLWQAFVRYIVSWVHIFFGLLYLTVVFSGTKQAVHDFAARTYVMKTSDTE

SEQ ID NO: 5270 - protein, 355 aa, Bacillus licheniformis
VGKVKRNMPCPCGSGLKYKKCCGKAEGAFPAVAVQELKQIQKDVMEFAFTEHKDTIDQFLNQYSFLSDLDQSAQKICVFNLGVWGVFARPLADGGLTIFEDFLQKKGSSILRSQTKEAVQSWKDLSPALLRVKHITDGGIRFEDAVTNEELTVRMNVKREGPFVGEYVLGFPIKIGSHTEFFLQFTIYPAKMADALKDRLSEALNRFTEEGGTKEQLMREDFHHVLMHLCRQEESTPSEQVSEDIEWANEMEKETALVFEKGMLDEGHSEPFVSWAVGLWKSYCAKKAPVIKKTEAFAAALEYFINTISKSEKSISQAKLAKKYGVSASTVSNRFKDIEAVLQDELDHHLELMPS

SEQ ID NO: 5271 - protein, 238 aa, Bacillus licheniformis
MSTILLETRHLQKKFGRSQAVSDVSLSVEKNSIYGLLGPNGAGKSTTLKLLTGILNPTAGDILFEGRQWKRSVLKDIGSLIESPPLYDNLTAYENAKVHAALLGLPDARITEVLKTVDMHHTGKKKAGQFSMGMRQRLGIAIALLNRPKLLILDEPTNGLDPIGIQELRELIRSFPEQGMTVILSSHILSEVEQIADHIGIISGGYLGYQGKINKGDDLERLFMDVVKSTREKEGGEK

SEQ ID NO: 5272 - protein, 252 aa, Bacillus licheniformis
VIGYYVKAENLKFKRTFSRKMIFIVPLINICFAFLMNPGFFVAGTYNWWSVILMPVMIALLCAQSHQKEKKASNYNGIFSSPVDLHQIWYAKISVIALYSLASQAVFLGFMVGMQFVIPQFSSIHLTVIAANLLLWLTTLWEIPVCLWIARKYGFISAVLFNMLGTIILGIMSASSPFWWLNPWSWPIRVMCPTIGIHPNGVPLENGDPLTSWAVVPPAVVLSVLLFAILARLTRRSFSPAVDRKSIKREAV

SEQ ID NO: 5273 - protein, 256 aa, Bacillus licheniformis
LLLFFRCLAADFQKTKRTSFIWLHLSVPVICAGVFLLYFYNRQPDPYQLYRTYFEAIAIALPLLIGIVCGMTASLEEQAGRFQVLLGGTAPKLTAYLSKVTLLLIMNIFAVFLAIGLYLLGLRALFHVPNLPSSLFLEAGAWLAAGSVTLYFIYFLISCTFGMGASILAGGAGLLMTALMNTGLGDVIWKYNPWAWGIRLTGYKGIDRFVQIDPSLRSVLDGEIKQGAFIMVFAIIAVFALSIIWFIRWEGRKAFE

SEQ ID NO: 5274 - protein, 220 aa, Bacillus licheniformis
VAKILAVDDEKDILVLIQNILRRDQHQVHTLSQVNTESLDVFSGYDLILLDVMMPGMDGFELCEKIRPLVDCPILFLTAKTEEEAIVKGLLTGGDDYISKPFGVLELSARVNAHLRRERREKYETKRVISGFLFHFDSKEVFIHDQKLNLTKNEFKICELLAQHKGRTFTREEIYDHVYGLEGNALYSTITEFIRTIRKKCKEHNRDPIKTVWGVGYRWE

SEQ ID NO: 5275 - protein, 456 aa, Bacillus licheniformis
MGIIRKKKTLRRELIKYMLTLSFSLIAITALYVLVNMIGMNAGLFYPANYNEIEAEKLKPRLQSAEQITEDMIPDTMLYAILDKKSKQKTAGNMKETNLSIVRKKIESRPYVSFSQKGYMIIERKDEYCVLEYPLRAEFRSPLLRRFLPNYELTSICIIVLLLITVVFTVTTRFANRLKEHFQTLNTIAEQIKKQNLNFTPEFSNIKEFDHVISSLMDMRNALQASLRAQWHLEKTKKEQIGALAHDIKIPVTIIKGNAELLSLSPQNQEQSEYIRYILDAGQKIEQYIDQLIHLSKTEEALHTEYREGAVKTLVESVLHETEAYIGNKSIDIVLKEQNLEGKKAVFDKQLLHRALMNIMTNAADHTPEGGRIDFEAVCTADQLIFTITDSGKGFSQDGLQKAAELFYMEDKARTSNGHYGMGLTFALRVVKLHQGDLAIKNSEAGGGQVQVTIPL

SEQ ID NO: 5276 - protein, 294 aa, Bacillus licheniformis
MDFKTLKTFHKIVACGSFNRAAEELNYAQSTVTMQIKKLEEDLGIRLLERGKTFRLTEAGRLFFEESRHIVKDIDHLQHHMADLLLGEAGNIRLGAVEPIASCELPQILGRFLADYPKIRVSVDIANSSALGERLVQGSLDLAVCSTPAMGTDLYFEPLYAEELVVLLPEGHPAGNNERIHLKDIREHRLLITANNCTYRKKVEIAFQELPGSQMNTMEIGSMTALKNYVAAGLGVALIPKSIVSPPPPGTIVRFIDDDPISVTFGILCKTAAFPLKQADAKLYQYLKQELGEP

SEQ ID NO: 5277 - protein, 131 aa, Bacillus licheniformis
MPFVRMDLLKGRSKEELRRISRSVHQAMTEAIDVPEDDYFQVITQHDEEEFFFDPSYMNIKRTKDLIYIHITMKERPIEKKLALYQRIAERLQKNAGIRQEDVMIIAAENVKENWSFGNGTAQLASVERER

SEQ ID NO: 5278 - protein, 246 aa, Bacillus licheniformis
MEMKNKTALVTGGGTGIGRAVSLALANRGAAVVVNYSRSKAEAEETVGMIESQGGRALAVKADVSKISEVQDMFDRAVGEFGTVDLLVNNASITRHIELDDLEGASEEVWDELYAVNVKGMFNCARAAAPFMKRNKQGAIVNVGSIAGLTGSGSSLPYAVSKAAVHGLTKSLAHALAPDIRVSCVAPGAVSTRWWEGNEEKMKRLSQKLPLERIAEPEDIALLICALLEQETVTGQILTADCGQTL

SEQ ID NO: 5279 - protein, 243 aa, Bacillus licheniformis
MRRLQSLEAIEKVKNGDYHVLRDAEWLKYLVLTEEQNINLERISSLENMPQNPVFLYVEQTLSILEKADIPELEKEIIEEVLIWSEAAKCGQPHKRKEWREKGFQLAIHNIGSAQIYADRRQAYMPERQDIEELIHILIVTHGLVGRYIRGETRYRQFTPLIDWIETSELQHIDIRRVLYVLNKCIIEAVSPALWDSIERDVNRVIGQICTGEIKTGRLRKGSENCGDKRSIPVKTAAGTSGF

SEQ ID NO: 5280 - protein, 358 aa, Bacillus licheniformis
MRSKKFFLMMLLMIVAVVSTACGGSKSASGEKEDTKKADNAEVKILSSEYTLPDDSSTNLHENELILKINVSVKNTGKEPLMVDKSQFSLYEGDSKMSDVSVYDERNKRLRSSTLNSDKEVDGNIYYIVEKGKKFQLEYTPDMYGENKADPVKFEIDGGSDDLLKTAKKLEDPAKALLAYTDVTIFGKDNNNFDKLVDENKREVVTDYLEGAQKSIVRSLGYYDEEDVDKKKLNKLISAIQNAYQEKSQVKAVTKSISGDEATVEATVTPIDNTDVQKKVKKRLEDYVKDSGKDFMSRDELINPAIDIMSEEIKKAEATSSEKTVEVKLEKSKNDKWKIDADNYKTEQYFSSFLKSNN

SEQ ID NO: 5281 - protein, 466 aa, Bacillus licheniformis
MSNGTPQKTKLHFPHTYALIFFIIILAALASYFIPSGEFKRVEEDGQTVIVQGSYKQTDAGPVGFFEMFKAIPEGMIQSADIIFYIFLIGGAFGIIHQTGMIRAGVHVLVQRLKKRGFLLIPVTMFVFSIGGATIGLSEETIIFIPIGIAVARALGYDSMTGLAMISLGAAAGFTGGMLNPFTVGIAQTIAEVPVFSAFGYRLAVYAAMLGFSIFYVMRYAQQVKAHPNTGLMYGSETEINEETAAGHADLSFTGRHGLVLLITALGFGINMFGVFQWGWFLSELSAGFLIIGFAAGLAGGRGINNTFHSFVDGMKQVVYGALIVGFARAIVIVLENGHIIDTIINSLASAISSLPNEISAIGMFAVQIAINTFIPSGSGQAATTMPLMAPLADLLGFERQIAVFAYQYGDGITNSIIPTSGVLMASLSIAGVPYERWVKFVWKLIAGWIIIGAAAIVIAMIIGIK

SEQ ID NO: 5282 - protein, 391 aa, Bacillus licheniformis
MKKQIEKEIENIREELLHISQYIGNHPELGHEEFKASKILSEELKKHGFQVELGTCGLATAFTAEFDSGRPGPSIGFMAEYDALPDLGHACGHNLIGTMAVGAAIGVSKVIASCGGKVYVYGTPAEETKGGKVTMAEQGVFDHLDAAMMVHPYCRHEKSGTSLAMDAIQFEFFGKASHAAGAPHEGINALDAVIQTFNGINALRQHILPDARIHGIIPEGGKAANVVPDYAVAQFYVRGTERAYVNELLDKVKNCAKAAALATGARLESSFYELSYDDLKTNETLSDAFTQNMIELGVDPDSIHEKADGGGSVDMGNVSQIAPSIHPYVQICDEPYACHTPEFREAAMSSRGFEGLMLGAKSMAFTAYDVLINEELLKKIKEEFNLLKALA

SEQ ID NO: 5283 - protein, 150 aa, Bacillus licheniformis
MNIRRLHPEHEPPLDLLLTADPSEKLVNDYLKRGQCYTAEIDRRIAGVYVLLPTRPETAELVNIAVKEDLQGKGIGRQLVMHAIETAKAQGFKTIEIGTGNSSIGQLALYQKCGFRITGIDRNFFLRHYEKPIYENGMRCIDMIRLSLDL

SEQ ID NO: 5284 - protein, 499 aa, Bacillus licheniformis
MNISDYVKHDAVALSKLIKHGEVTVNELIDAAFSRLEEVNPELNAVIRTRKEQVKIESKQLDIRHQPFAGVPILLKDISQALKGEPLTAGAKLLSSYKPKRDSNFVAKLRGAGFLFLGQTNTPEYGLKNISEPELYGPSRNPWNTDYSPGGSSGGSAAAVAAGIVPLAGASDGGGSIRIPASFTGLFGLKPTRGRTPVGPGAGRQWQGASIDFVLSRTVRDSAALLDILQTIQPEAAFQTPLFPGQYEEDMKKGLERPLKIAFSVESPVGTPVSDEAKQAVRRTVRWLEAQGHHVEEQTNGVDGIRLMENYYLMNSGEISAMILGMEKTLGRAITVQDVEIVTWVLNEAGKKVSAAEFTASLASWDRAAAQMAAFHETYDLYVTPATAYPAPKVGELTHTEKEAEALLKVSELEKIEQQSLIYQMFLKSLTYTPFTQLANLTGQPAMSVPVHLTNEGLPLGVQVTAPKGKEHWLLRTAHLLEQSDLWIGMKGNPMLGSL

SEQ ID NO: 5285 - protein, 611 aa, Bacillus licheniformis
LEKVAEKRPKRCEVPEELTWNLTDLFSSYEAWEDALVKIEEDLASIGSFKGRLHEGAGVLLDCLSLREILLKRLVRAAAYTHLRKSEDLTNPVNQADASRMAALQAKINAGLSFIQSEILEFPENQVETYIKNEKGLEPFSKMLTEIMELKPYKLAPETEEALAVLGEIHDAPYKIFGMAKLADMQFSPIQDRNGNTLANSFALYEGKYMFSPDTHIRRTAFDSFTNTLQTYKNTIAAIYETEVKKQVSMSRLRGYESVTHMLLQPQSVTLEMYRNQLDVIKNELAPHMRKYAALKKRVLDLDEMRFCDLQAPLDHDFSPKTTYEQAGRMILDALQVMGPEYTEVMETALTERWVDLADNIGKSTGAFCSSPYGAHPFILMTWTDTMRDAFTLAHELGHAGHFYFANREQRIMNVRPSLYFIEAPSTMNEMLLAQHLFSKTNDPKMKRWVINQLMGTYYHNFVTHLLEGEYQRRVYELAEQGHALTASVLSEQTSAVLSEFWGSGVKVDEGASLTWMRQPHYYMGLYPYTYSAGLTASTIVSQQIKEEGRPAVDRWLNVLKAGGTMKPLDLLKHAGVDMSTDQPIRRAVTYVGTLVDELEKLYDKKEDRPD

SEQ ID NO: 5286 - protein, 89 aa, Bacillus licheniformis
MFGFIWSLIIGGILGWLAGLIIRRDVPGGIIGNIIAGFIGSWLGSMILGRWGPVVGGFNIIPALIGAIILIFIVSLVMRSMGGRNRNAQ

SEQ ID NO: 5287 - protein, 571 aa, Bacillus licheniformis
MKQSLKALKGFRAFAEEKMKEWNVPGAAVAVIKEDEIIMAEGFGFRDKERKLKVNPETVFAIGSASKAFTTAAMAVLADEGKMEWDKPVREYLPEFKMHDPVATERMTPRDLACHRSGLPRHEMMWYNSSFSREELFRRIRYLEPNQDFRSKWQYQNLMYMTAGYLAGRIAGTTWEDLVHERLFKPLHMTSSSFSVEDMQKLSDFAFPYQENNGTVEKIPFRNIDAIGPAGSINSNAVDMANWLLLQLGSEKFNGVLSDGSLHELHTPCISCDSIIKAKELPVCSYGLGWFVEPYRGRHMIHHGGNIDGFSSLVAFMPYEKIGIVILTNMNGSFLPNVLAYNIFDRLLGLEEIDWSGRLKGEAEKIMKAALGVDRTADLNKIEGTNPSHALKDYTGVYEHPGYGELKIELKDCVLQALFNSFVMPLKHYHYNIFEMKMPLTEMAMLASFDTDIHGHISRLSIPFEMAEGAREIEFVRKPDQQLYDPEFLASLTGKYALEDGTDVVVSLRNNRTLWVSLPGQPDYELEPYRELTFQIKNLPGFSVRFEAGDSGQVTGLRFIQPNGEFPAVRK

SEQ ID NO: 5288 - protein, 440 aa, Bacillus licheniformis
MTTADERKVIEQQFKQRMDEEELLNCMRCGFCLPSCPTYIESGFQESHSPRGRIALMKAVVDGTIEPDEDVERSLELCLGCRACEPVCPSGVNYGRLLEEARDIIQQNKKHAFPVKVLRRAVFKGLFPHPNRIRALTGMLGLYQRSGMQNVIRKSGLLRLLPDHLAKMEAVLPKVPNMKQLKKRPHLLPAIGERKKRAAFFSGCLMDTLFLDTNMATIELLRLAGCEIIIPEQQTCCGALHGHSSEKSEAILLAKRNIQAFEDSNADFIITNAGGCGAFLKEYDHLLKDDSEWRERAASFTGKLKDFSSVLLELNFDQQSLELPEQIVTYQDSCHLRNVMKTSAEPRRLIRSIKGIEFKEMKNAESCCGSAGIYNIVESEMSMKILDTKMEAAAATRAATIVTANPGCLLQMKLGIERAGLTDRVRAVHLADLLLEAVQK

SEQ ID NO: 5289 - protein, 470 aa, Bacillus licheniformis
MISSQVRSKLIEIVGSANYDDSNAGRLVYSYDATPQFQSMPDAVIAPRSKEEVSRIVKICNTHRIPIVPRGSGTNLCAGTCPTEGGIVLLFKHMNQILEIDEENLTITVQPGVITLDLIHAAEEKGLFYPPDPSSMKISTIGGNINENSGGLRGLKYGVTRDYVMALEIVLANGDIIRTGGKLAKDVAGYDLTRLFVGSEGTLGVITEATLKLIPAPETKKTVLALYQDIDSAAQTVSNIIAHKIIPTTLEFLDQPTIQVIEDFAKIGLPVHAKAVLLIEQDGTEDAVRRDIAVIEEICKKGNAVSVQTAQTEAEAENLREARRTALSALARLKPTTILEDATVPRSEIAEMVKAINSIAEKHQISICTFGHAGDGNLHPTCTTDVRNSEEMKRVEQAFEDIFKKAVELGGTITGEHGVGEMKAPYLELKLGNAGIAAMKAVKQALDPNNIMNPGKIFAKDSRKRVVVTR

SEQ ID NO: 5290 - protein, 49 aa, Bacillus licheniformis
MYDHILYQLLYKIKRFQKIILLNFKYKKEPVFKGNEVLCGKHQVARLIA

SEQ ID NO: 5291 - protein, 100 aa, Bacillus licheniformis
MKIALVCSAGMSTSILVKKMREEAENRSLKAEINAYAEADLPSDLDEIDVILIGPQVRYLKGQMTERAKPYHTPVAVIDQMAYGMMDGAKVLNQAISLAT

SEQ ID NO: 5292 - protein, 110 aa, Bacillus licheniformis
MADTLQLEQVSFEIILHAGNARSSAMEALQLVKHHECETGYQKIQEAESELNQAHQAQTRLLQKEAQGAGLSPNLLLIHAQDHLMTAITVKDLAKEMIDLYQELGKGREK

SEQ ID NO: 5293 - protein, 428 aa, Bacillus licheniformis
MKQNKMMAFIESNIMPIAGRIGSQRHLIAIRDGFIAIMPLIIIGSLAILVNNFPIPAFQNFMTGLFGEGWTAVGGAIWNGSFALLSLLAVAAVSFKLAESYHTDGLSAALIGVGAFAVLTPTTEDFGFSMTWLGAQGLFVGLIVALLSTEVFRLFSKNEKLKIKMPEGVPDGVTKSLNALLPAAVILSTAGLCNALIVHFSGQSIHELVFSTIQEPLQGLSNTVGSALIFTFLNHLLWFFGLHGTNILGPIMESVYLPLIQENQHLFSQGMSAFEVPYIVTKPFFDSYVFMGGSGTTLALLAAILIAVKSKHYKTIGKVSLAPGLFNINEPVLFGLPIVLNPIMFIPFILIPLILTITSYIALASGLVPKTVAILPWTTPPIVSGYLVTGGSVRGVFLQIFNLVLATLLYLPFIKAAQRSALHQTENE

SEQ ID NO: 5294 - protein, 444 aa, Bacillus licheniformis
MALKVVVIGGGSSYTPEIIEGIIKRHHQFPVNEIVLVDIEEGKEKLRIVSELAKRMIRHAGVPIELSHTIDRAKALKGADFVTVQIRVGGLKARALDEKIPLSHGLIGQETNGAGGMFKALRTIPFMLDIARDIHEICPEAWLINFTNPAGIVTEALLKHGPHQKVVGVCNIPYNMKNSIAEIFGVDVNLVMIEFAGINHFVFGKRVWIDGIDRTEETIELLLNDHFGYSPSNIAALPWNLQFLRSLRMLPSPYHQYYYQHEDALAKDIEAYNNKGTRAETVMEVERQLFERYKDAKIHEKPKELESRGGAYYSESACSLMNSLYHHSMDIQTVNTLNKGSIPDLPDDAVIEVNSVITKSGPIPLTVGKLPDAISGPIILMKKFEQLVIEAAVTGDYDTAYLAMITNPLVSSDHKAQKVLDEMLEAHKRYLPQFFEEVRAHETK

SEQ ID NO: 5295 - protein, 242 aa, Bacillus licheniformis
MAKQPQLHSQIKQDIVDKIESGYYPPGSLLPTESEFCKIYDVSRTTLRTALNHLLMEGAIYRKQGKGTFVAKGKVKQILSSSSLRYAEQLKAQGFKPKIKVVDLQKIKPSEKLQTRLGIDAEQMVYQVKRIRYADDEEIQFETAYIRTDLVPEVTEEMANISLYQCISRQGNNIKRTEEQIKIVISDEEIAHHLNITQGTPCFQISTQTFLASEEVVEYSMAYFRGDRVEFFIERDYGQRGK

SEQ ID NO: 5296 - protein, 244 aa, Bacillus licheniformis
VKSLIINADDFGFSRGVNLGIIEAFQHGVLTSTTLMVNMQEADHAVELARQNPELGVGIHLTLTAGRPILGGLHTITDEEGNFRKLLYYQGFFDIDLEEVYREWKAQIEKALSCGLNPTHIDSHHHIHTYGNLPEVFVEVAKEYDLPCRKVNHDHPSLWKGVRSNDAFELKVDRLKDLSSFFNDYQDAAVIEVMCHPAYVDKCLLEKSSFHYPRAYELSLLTEPSLKAALQHCPDIRLTSYAGL

SEQ ID NO: 5297 - protein, 49 aa, Bacillus licheniformis
MKEKTKNFLLLLINTIFISFTSNFLASYETRTLFFLTAFFAGFIFFLVI

SEQ ID NO: 5298 - protein, 598 aa, Bacillus licheniformis
MKIVLINKSKKFFVFSFIFVMMLSLSFVNGEVAKADSGKNYKIIGYYPSWGAYGRDFQVWDMDVSKVSNINYAFADICWEGRHGNPDPTGPNPQTWSCQDENGVIDAPNGTIVMGDPWIDAQKANPGDVWDEPIRGNFKQLLKLKKSHPHLKTFISVGGWTWSNRFSDVAADPAARENFAASAVEFLRKYGFDGVDLDWEYPVSGGLPGNSTRPEDKRNYTLLLQEVRKKLDAAEAKDGKEYLLTIASGASPDYVSNTELDKIAQTVDWINIMTYDFNGGWQSISAHNAPLFYDPKAKEAGVPNAETYNIENTVKRYKEAGVKGDKLVLGTPFYGRGWSGCEPGGHGEYQKCGPAKEGTWEKGVFDFSDLERNYVNQNGYKRYWNDQAKVPFLYNPENGNFITYDDEQSFGHKTDFIKANGLSGAMFWDFSGDSNRTLLNKLAADLDFAPDGGNPEPPSSAPVNVRVTGKTATSVSLAWDAPSSGANIAEYVVSFENRSISVKETSAEIGGLKPGTAYSFTVSAKDADGKLHAGPTVEVTTNSDQACSYDEWKETSAYTGGERVAFNGKVYEAKWWTKGDRPDQSGEWGVWRLIGGCE

SEQ ID NO: 5299 - protein, 693 aa, Bacillus licheniformis
MKKAASSFLSCMLLLALFIPNRQISAETSSERPDCRPEGLWDSGVEHVPYCDVYDKDGREKLANQLDRRIIGYFTSWRTGKGNQDRYLVSDIPWKYLSHINYAFAHIGEDHRISVGEEADENNPSIGMTWPEHPDVKMDQTLPYKGHFNLIHQYKDRYPDVKVLAAVGGWAETGGYVDKDGKRIPSGGFYSMTTNGDGSVNHKGIHTFAESVVAFLRKYEIDGIDIDYEYPTSMQDAGNPADWNIANPRRKGLNKSFEALMKTLREKLDQASAEDGKYYMLTIAAPSSAYLLRGMETFKPLRYVDYVNIMSYDLHGAWNEFVGPNASLFDNGEDAELKQSNIYTTPEYEGIGYLNTDWAYHYFRGAVESGRINIGVPYYTRGWKNVTGGANGLWGRAKSADCPQGLRQCGDGATGIDNIWHDKDEQGNEIGAGANPMWHAKNLEKGIAGSYLERYGLSKADLTGVYKRHYDAGLAAPWLWNPEKKVFLSTEDEESIKTKADYVIDKGIGGVMFWDLSGDYDWYPERNGSKGEYGIGNTLTRTMYHKFSDTTPYDNRLSTSPLPDESLDAEVELTNFPLGDQNYPIHPVMKLINNSDVTITGGSFIEFDAPTSTSPRFRSWSGDHVEVISKGHTGPNIGGLTGDFHRIRVTLSSWKTIKPGEEAEFQLVYYLPISGPSNFTISIDGKKYRLKGN

SEQ ID NO: 5300 - protein, 316 aa, Bacillus licheniformis
LVSKKSVKRGLITGLIGISIYSLGMHPAQAAPSPHTPVSSDPSYKAETSVTYDPHIKSDQYGLYSKAFTGTGKVNETKEKAEKKSPAKAPYSIKSVIGSDDRTRVTNTTAYPYRAIVHISSSIGSCTGWMIGPKTVATAGHCIYDTSSGSFAGTATVSPGRNGTSYPYGSVKSTRYFIPSGWRSGNTNYDYGAIELSEPIGNTVGYFGYSYTTSSLVGTTVTISGYPGDKTAGTQWQHSGPIAISETYKLQYAMDTYGGQSGSPVFEQSSSRTNCSGPCSLAVHTNGVYGGSSYNRGTRITKEVFDNLTNWKNSAQ

SEQ ID NO: 5301 - protein, 257 aa, Bacillus licheniformis
LYSDLKGKTAIVTGSSKGIGKAVAERFGKEKMNVVVNYHSDPGGAREAVDNIQAAGGNALAIEADVSSEEDVKKLINSAVEHFGSLDVMVNNSGFNGAGAFPHELELDEWQKVIDVNLTGAFLCAREALKYMADRRMKGSILNISSVHQQIPRPKNVHYSASKGGMKLLTETLALDYADKGIRVNAIAPGTIATESNEDLEGSRKSEQLKKIPMNEFGEPEQVASAAAWLVSQEAAYVTGATLFVDGGMTLYPSQLE

SEQ ID NO: 5302 - protein, 272 aa, Bacillus licheniformis
MQNNIVHIAFGESAGGSINMMLKQSGGTHEKSLIVLPELFSIGPLQKLEAKEGRVNRYEWLKTYLNDRFHESGKRYSRFEVAVSALSGIPEQASVFIWTGDHAHEQTGLRFVHHILRQMNLAVFHLNTTKFFPHTRSSGELNDENLRFIYEQGDQAAVTAAEGRRLAEEWTALSQQTSVLRVWEDGRIKSVKEDFFDSFIIEKLAQLQKNRSANTFINCLSLIGEVIGHLEENIGDEFIEYRILELIRKGIFEMKGTTKGMRYFNVRLKNVM

SEQ ID NO: 5303 - protein, 465 aa, Bacillus licheniformis
LVREQLKQKAQSISKVPPHYQLMIEDYGEKYEKERRVFFAWQDIEEPERDISVELDHQGRLISLTKEYEPVVEEALPDERLLQIALQFTEQHYPNAPYEFVFHEKKVTEQFVRFTYVQTVLDLPLPQTGFYVRVAKNGEVIEFRYNGGTSSFSIPKQIADKQSVTADYLEHVQFELVVEKIRNELYEGGDDLPHLIYEADLPFFSYPADITEKRQMKPAADDEEEEDTLPLPVLPEADRHADIDDMIGFTPSMRKIRETDLGESIGTVWRLGDDPEPRDRSIAGYFETWNQNTLKIVKDKNSGKLKGIASFIKSEGPPVLSGEDCLKRALQFLYRLYPDADRLFRMHPAENDGDRSNAFFQFDLQYKGVPLRLGSANISINRTTGRVVGYHGPEIEPETLIDLSPSPSISEEEAKAVFAAAFDVKLQWERDYSREKDDFYRLVYRPVYPYFIDAHDGKAFMSKNI

SEQ ID NO: 5304 - protein, 283 aa, Bacillus licheniformis
LSVLKSPEWVYKRLMEKTDQTVIVDVRFHLTKPDEGRKAYTKGHVPGAVFIDLKEDLSRNPEEHGGRHPLQDPDLLAAKLGKIGIDRQTDVVVYDDSGGMFAARFWWQLHYLGHDSVYIMDGGLSNWIKAGYEVNAEDPRPSEREFKPALRENELLDAKEVLKRIGREGSILIDARDPSRYTGETEPLDHRAGHIPGAKNFFWKGNLTEGGLWKSKEQLRQHYAALDPGSEIVVYCGSGVSACPNVLGLKEAGFENVKLYAGSWSDWISYPDHPISTGAEDDI

SEQ ID NO: 5305 - protein, 142 aa, Bacillus licheniformis
MAVVQASSKDISLLARLLRAEAEGEGVQGMLMVGNVGINRIRANCSDFVGLRTIPQMIHQPHAFEAVTHGYFYQRARESERRLARRAVNGERLWPAKFSLWYFRPAGACPAQWYNQPHVGRFKSHCFYEPTAEECENIYNTF

SEQ ID NO: 5306 - protein, 329 aa, Bacillus licheniformis
MQLSILDQVPISKGSDAHSALKHSAELAELADQWGYKRYWFAEHHSTRGLASTAPEIMIAHIAAKTANIRVGSGGVLLPQYSPFKVAENFRQLEALYPGRIDLGIGRSPGGTTKTRLALTDGVHKSLHEFPRQLQDLVSFLTDSVPSGHDYFGIKASPLTESPPEVWLFGLGENSAKLAGSMGAGYVFGHFISPARGKNAFQSYRESFRPSPFFKRPQSLAAVFVVCAESDEKAEELCLSQDLWLLRVEKGLDSLVPSIEEAKSAAYTAADKKKLAQNRSRMVIGSPQTVKRKLLELSERYQTDEFMILTNVYRFEDKKQSYERLAELF

SEQ ID NO: 5307 - protein, 30 aa, Bacillus licheniformis
MKKQEYIKERGVESEEKGLCFWFSVDSRNS

SEQ ID NO: 5308 - protein, 452 aa, Bacillus licheniformis
VKKKVYAFGLASILGTASLFTPFMNNTASAETSQQKQEIQQKRSEVNSGIESKRKEIAKLQDEQKKLEGKIQELDKKALETSNKIEDKEKENKKTKKEVEALKKEIKETEKRIEERSKVIKNRVRSLQENGGSQNYLNVLLGAQSFGDFITRATAVSTIVDADKDLLDEQEKDKNKLEKAMSDLNTKLDEIQKTLADLKTLKSDLDKQLKEQANLSKQLQTKQAAAESELSDLKKEAGSLTKEEAALEQKLKEERAEAAAAAKAKEESATAEKSDSGSSSSSNSGSVSKSDGSSNSGSSSSKKSSSPSRNYSSGSVVSSNGNAIEAAISTGSSIVGRSPYKWGGGRSQADIDNRRFDCSSFVRWAYASAGVELGFGATTSTLVGKGRAVSASEMKRGDLVFFDTYKTNGHVGIYLGNGTFLNDNSSRGVSVDSMSNPYWKKAFNGVVRRVVE

SEQ ID NO: 5309 - protein, 270 aa, Bacillus licheniformis
MNLSLYKQMLRTNMKGIMSYGVGSAFYILLILGIYPSIAGNAEDIEKMIKSMPEGFLNAFGFENGLGNLEDFISGEYYGLIFIVILSIFSVMLSTKLLAKRVDQGSMAYILSAPTTRGKVAFTQAAVLTTGLLIIMAVTTAAGLAGYHLMLGGDYDFNVSRFLVLNLLGFLLFFAVGGISFLFSAISNDEKRALGLSGGITFLFFSFDLLGKLSEKTEWLRSLSVFSLFRPGDIVNGSTDIAQVSLVLAAVGFAAFALSILIFKKRDLPL

SEQ ID NO: 5310 - protein, 295 aa, Bacillus licheniformis
MLTVERLTKKFSNGKGIFDLSFHVQKGEVFGFLGPNGAGKSTTIRHIMGFMKPDQGDIKVNGMDVLKQQGDIQRHIGYLPGEIAFIEGMTGKQFLDFMADMHGLKDTAKRNDLIERLQFDVHTPIRKMSKGMKQKVGIVAAFMHSPEVIILDEPTSGLDPLMQKVFIEIVLEEKAKGTTFLMSSHSFPEIERTCDRAAIIKDGIIIAVKDIHELQSMQRKVFEVTFENTGDIPAFMNSSLQIESRTDNRVKVAVLGNHDQFIKETAKYHIRHIDASSQSLEEIFMNYYNRKGTAQ

SEQ ID NO: 5311 - protein, 195 aa, Bacillus licheniformis
MNGFEKRALLIKEKIKKTALDMLKTWEPKRIRITDIAKEANVSQVTIYNYFGSKEALLKEVFKDYIDQSISEFEEYMNKDISVKEKIELMILQKRAANNQKFALTVIKEVMIEDSEIMDYVKQQYDEKIIPLMLQMIEEGHRTGEISSKITAESFLIFMNMIIEHSKTLGKAFEKNRKFTEEMLHIFFYGLCGRP

SEQ ID NO: 5312 - protein, 631 aa, Bacillus licheniformis
MKHSFFFFMFIAFFLVTGFSEAGKSFSIERADIRATVKENGDLSVEEVYRYDFKGSFEGATRSFSEETASRLKNFKAYLLPDHRRKGGQAIPLKTKKEDGTYFAYSASKDETKNVMFRYVIEDAAQKFEDTSILIHSFYQKANTDFGRVKIEVRLPDSVKARDIHAFLREKGNGKITKVNDSSVTYETGLYRAGTGSELRIYFPQSALKEAVRHPSYQTKDELLKEERDEAKRYAERDERIAGAERMILIFSGIVGFMVIMAVMLSFLKKRRRAMLSFEELESFDPVLVAFLYKKGRFTDRDLLAGLLSLYQRGLVTMQKVQAEERFLDDPKAPDDTYEFEFSGSKADLPKPDQLLIEKLFEQTGSDTYMFRLDSLSGPTEEECKHKEQLGKYERKRIILQNVVQKWTESVRQAPEFRELFQENRWLRMLSLSLLSVHTGLLLFILYADVVHQAGFMAACVIFGFALSAGIVLAKSKLYTILFLAGLFLASVFTDSVHTILYYGICVGLSILLIAFIPAVKESRYASICRRSILSWRNHLRKEDLFSGRSLSQNEKTMIFAIVLEVEDESAVWLNQSANRLDYASPVLGMAAAGCLHYPFYSWQLPDSQQHAGAYDAGGSGAGGGDGAGAF

SEQ ID NO: 5313 - protein, 160 aa, Bacillus licheniformis
MGKTIINKPFTAAPEDEVVVFVIGMRVNKWHAVHKWWPVFTAMPPMIKELYQNKNLGFLAMESFINFRTICLIQYWRSFEDLTAYAKGDKHMAAWRRFYQKTAASGAVGIYHETYSVPKGRYEAFYHNMPVFGLAKAYGHQPVTRGTKTAEQRMRGTEII

SEQ ID NO: 5314 - protein, 187 aa, Bacillus licheniformis
MTKRNHTTYALLGLITAGYRTGYEMKRMIDQSLNHFWKISYGQIYPALRQLTEAGWAAASPALSDKKQDRKEYMITAEGQKALQSWLEEPINDIASEKNEFLLKLFFSKEESREKTALKVKEYQQKLEERLEAYKAIEQSILSCSSHSKDREYWLFTLDYGKRTTSAGIEWCEATINRLNGKEGTNG

SEQ ID NO: 5315 - protein, 200 aa, Bacillus licheniformis
LAISLEKGQRIDLTKGKAGLSKILVGLGWDPVASGSGGFFGKLFGGGTPNIDCDASVLMLENGRVTENKNVIYFGNLRSRCGSIEHTGDNLTGEGSGDDEQIIVDLQKVPSHIHKLVFVVNIYDCVKRSQHFGMIENAFIRIVNMNDRSEMVKYNLRDDYSGRTSLIAGEIYRDGAEWKFTAVGEGTNDTSITEIVKRYA

SEQ ID NO: 5316 - protein, 193 aa, Bacillus licheniformis
MAISLAKGQKIDLTKTNPGLSKVVVGLGWDVNQYDGGADFDLDASVFLLNAEGKCSSEKDFIFYNQTEGAGGAVIHTGDNRTGEGEGDDEQVKINLNAVPADIQKISFVITIHEAEARRQNFGQVSNAYVRVINEDSNEELIRYDLGEDFSIETALITGELYRHGGEWKFSAIGSGYQGGLARIATDFGLQVG

SEQ ID NO: 5317 - protein, 192 aa, Bacillus licheniformis
MAIQLSKGQRIDLTKTNPGLTKALIGLGWDTNKYTGGADFDLDASAFLVDQNDRCINDHDFVFYNNLEHPSGAVIHTGDNRTGEGEGDDEQIIVDFSKIPAHVEKIGITVTIHEAESRSQNFGQVSNAFVRLVDESTNEELLRFDLGEDFSIETAVVVCELYRHGGDWKFNAIGSGFSGGLASLCRNYGLQV

SEQ ID NO: 5318 - protein, 257 aa, Bacillus licheniformis
VDLFHHIMSIYASFFDWEMWVEVLTDPVSWGLIGSLVVLEGLLSADNALVLAVMVKHLPEKQRKKALTYGLIGAYFFRFLFIGLGMILIKFWWIKLLGAAYLAWLVIKHFFIGEGDDEANAIKKDSWMVRVFGVFWATVISVELMDLAFSVDSILAAFAVSEKVWVLLIGGMLGILMMRTVAKFFLTLIDKVPELETTAFVLIGIIALKMAASVWHIEMPHSVFFIILIIAFAATFIIHYMNKQKAVKEQTAASKEE

SEQ ID NO: 5319 - protein, 393 aa, Bacillus licheniformis
VQYFDFLSASQKEDVFFKLPGTVTKDSPKRILEYALGAALYVPGNRKDIADVIINNKYPELCSVVFCLEDSIGDCEVLQAENNLVSQADMIYQAQKLQNINSDVLPLMFIRVREPEQMLELGNKLGRALHLFAGFVFPKFSMLNAEHYLDTLTKLSQESGIVLYGMPIFETPDLLAMETRAKALQELKSTLGFYQDIILNIRIGATDLCGLYGLRRKPETPIYDILVISDFIKDIVNYFGLQFVISGPVWEYFGDASRTVPPFAPNWAEAGESSLVINRYMDGLINETLLDLANGIHGKSVIHPSQIKAVQSLHVISMEDYLDALSIVESADGTRGVVKSSFSNKMIEIKPYLSWAKKILLKAEIYGVYHENRSYTDILRASKPFSNLGSFGS

SEQ ID NO: 5320 - protein, 73 aa, Bacillus licheniformis
MMKIVDLTSSEILSSQQACEEWGIDSSTLRKRAHDFPAGTIRKFGTTYAVTRAGMCAVFGRKSDTDSEERGDG

SEQ ID NO: 5321 - protein, 534 aa, Bacillus licheniformis
MNQEINIQNALVNDDEWKQIIKKPLPERTPYEKNSHLTISRLAGRILGTPHDETDYYIYLHELYASGDVHVLSETLDKTISPERFQAIQRIHMVNQKEKGLSVNRFAAFLDGEQLIPKHPDPAMHRHLRKALIEVLQLFQSFHEKGLNDPDFRRVLLDLVKWMVNHLEKWLKGADCETAMPKVVWYGDTTKSQRYFLYYLMLVGCDVLLFHPEGKDEFRQLDPEQKLSFVFTYPDTSALEPFPTEKPQRKATVAYRSAKELDTVLHNEDSLMYKPWQFREHTPASVTLKTTYDELFLIAKERAFIRPNFQASKSTVNIPNLFAMVMGVSSNEKEYWDRLQTLTEYKESHTIRRFPFTKEETSNYQFHYSDALDQTGMIDPGRLMESNIWRYKHLREGVQRGIAQAVSRMCKSPKMLALNNEKTADVQLYLFTQAVQLPAALLNMIQTFDYSQTVPKLILYHTEQTGTLTRSDAAALLLLNEIGIDIIIYNPPGHKCIDHYIDRQHFDTHWLDEMSFNQEFKEPSIVRKFINKIF

SEQ ID NO: 5322 - protein, 364 aa, Bacillus licheniformis
MANPNETSIVNISKEEEITVEKAEDIRAKLRQDPDVQALARQIDVKNQVELLEFGKEPALEISKFSDRILSMMRTNSVTDSGAMLTQLGKIMDRFDKNDFEEQKGLLSKLFKRGNSMIEKIFKKYQTLGGEIEKINVEISKYKDEMTKSTVTLDEMYESNLKYYVELEKYVVAGQMKIEELQRLIPEYEAKAASGNQMAQMELDTLRNGIQALEERVYDLDMARMVAIQTAPQIRLLQRGNTKLIGKINSAFIITIPIFKNGIIQAVTAKRQKLVADSMSELDRRTNEMLKRNAENISSQSVEIARMSGRPSIDIETIEQSWNTIVKGMQETKQIEDENKRLREEGAKRILELQDNMKKAALNG

SEQ ID NO: 5323 - protein, 233 aa, Bacillus licheniformis
MAALWLAFGSGFLSFISPCCLPLYPSFISYITGISVGDLKNRHAKHIKQSVMIHAAAFLAGFSVIFYILGFSASSVGLLFLQYHNLIRMLGGIFFVVMGLFLLGVFRPAFMMKERRFSIRKGKIGLLNSMLVGMIFAAGWTPCIGPIFGTIAYANFQNPDFGSAFMMITAYSLGFAIPFLLMAFFIGNIRPLMKYSNMLMKIGGALMIVIGILLYTDNMIWINIWYSNLTNLF

SEQ ID NO: 5324 - protein, 228 aa, Bacillus licheniformis
MEWKNPWNKKQLVCLFLIAFAAVPIFIEYLLKNALDLLLGEGMLSAMLMSIAMAAVFILSLYYIALKPDRLSWREIGISRFAPAYLIQIAGWTVFLIVMTFAVMEILIWFGTGYENTKTKTITADPSWLSIAMSFASACIVSPIYEELFYRGFLYRWFRAEFGVVWALVASSALFMIAHIPTYNTLAVNFGTGLVFAWTYEKTRSIIPAMIIHSLFNAILLFFTILLT

SEQ ID NO: 5325 - protein, 246 aa, Bacillus licheniformis
MVKEELTTGRVAKMMGISVRTLRYYDQIGLLKPGSTLPNGRRQYSKEDLLELEKIMILKSAQFSLEHIKTLMNQLDTISIIEMHKRRLNSEIEQLTKSLEHTNTLLNMYQIEGSLSWEDLLKLVRQPRHKPWKESFSEEEAEILAERLPKAESDDFITKQWLSIIKRIKLCLKQEVPPESEWGKQIAEDIICLSDHSFKGHEDLADRFWEVRKSEEPNGLYPLDSGIMEFAERAIESAFHDSGGSG

SEQ ID NO: 5326 - protein, 401 aa, Bacillus licheniformis
LKLADLRKSGHAPSLLSSFLYFDVSFMIWVLLGALGVYVTADFDLSPSQVGLIVAIPTLAGSFFRIALGILTDRFGPKKTAVGGMLVTMIPLLWGWQFGSSVAELYIIGILLGVAGASFSASLPMASRWYPPHLQGLAMGIAGAGNSGTLLATLFGPRLAEQVGWNGVMGLALIPLTLVLFSYFLMAKEPPNQPAPKPLKDYFAVFKERDTWYFCLLYSVTFGGFVGLSNFLSYFFASQYAVPAVRAGEFVTLVVASGSCLRPVGGLIADKIGGVRLLQFLFIGVALCMFSVSMLPSLGVVTAALFIGMGCLGMGNGAIFQLVPQRFQQEIGMVTGIVGAAGGIGGFFLPNILGTLKQITGTYSSGFLTFTVIAFLALGLLLFAQAGWKKQWKAEEKSIRI

SEQ ID NO: 5327 - protein, 319 aa, Bacillus licheniformis
MRNQKVNRTVLIGAGFVGSSYAFTLINQGITDELVIIDLNKDKAMGDVMDLNHGKAFAPHPVKTWYGTYDDCKEADIVCVCAGANQKPGETRLDLVEKNLKIFKGIIGEVMASGFDGIFLVATNPVDILTYATWKFSGLPKERVIGSGTTLDTARFRYLLSEYFGVAAHNAHGYIIGEHGDTELPVWSHANIGGVPVSDLLKRNEKYKAEDLDELFDNVKNAAYHIIEKKGATYYGVAMSLARITKAIYRNEEAILTVSAHLDGEFGENDVYIGVPAVVGRCGAREIVELDLNEKEKQQFKHSAGVLKAILKPHFELQA

SEQ ID NO: 5328 - protein, 540 aa, Bacillus licheniformis
MWQQIYDPFGNLFISAFAAILPILFFLLALTVLKMKGIIASFLTLAVSFIVAVFFFHMPAAKAVSAVLLGIANGLWPIGYIVLMAVWLYKISVKTGKFKVIRASIAGISSDQRLQLLLIGFSFNAFLEGAAGFGVPIAISAVLLVELGFKPLKAASLCLIANAASGAFGAIGIPVITGAQMGGLTPVELSRTLALMLPVIAFFVPFLLVFILDGFKGIRETLPALLVLSGSYTAVQTLTMISLGPELADILAALISMGALALFLKKWQPRHIYRETGNEHVPAEKYRAADIMNAWSPFYILTAVIAVWSLPGFKGLFQEGGFLKQTTILFNMPFLHREVLKTPPISPEQAPLDAVMKLDFISATGTAILIAVIITIVLSRNISFRGGLSSLKETVKELWLPVLTICFVMGFANLANYAGLSSTIGLALAKAGDIFPFVSPVLGWIGVFITGSVVSNNALFGHLQAVTGAQIGTSSALLLAANTAGGVMAKLISPQSIAIATAAVKETGQESKLFSQTVKYSLVLLFIICIWTFALSKLGI

SEQ ID NO: 5329 - protein, 213 aa, Bacillus licheniformis
MLNIFLSYVFLGLSLAAPVGPVNAAQIDRGMKGGFFHAWLFGLGAVTADVLYMALIYFGVAQFLTAPFLKTFLWLFGFFVLTYTGIESLVKAKEVSLMRGAGEKGSYRKSFLSGLVISLSNPLSIMFWLGIYGSILAKTVEAYKSYQLLICSSGILIGLFLWDLAMSFLAGTFRTFLSPRMIQGTTWLAGISLIVFGCYFGYQGILELLQAGR

SEQ ID NO: 5330 - protein, 444 aa, Bacillus licheniformis
MKRQAKKGDLKWWQLSMIGVGCTIGTGFFLGSSIAIKKSGFSVLAAFLLAALGTFLVFQQLAKLTADHPVEGSFCSYAREAFGNWAGFSNGWVYWSSEMLIIGSQLTAISLFTRHWFNEIPLWVFASIYAILGLIVIFTGRSSFEKTENILAVLKTAAILMFIIIAVLALCGLLPGKTPEVQFPDRVHELFPFGFMGLWTGLIYTFYAYGGIEVMGLMAIHLKDPKDSSKSGSLMLITLAVVYVVSIGLAMLLVPRGTFTEQNSPFITSLKDFHLDLIMDIFNGIFIIAGFSTLTASLFAVTTLMGTMAKNGDAPACFAKKEKAKVSWPALGLTVLVLAASIVLSLILPKQLYEHMTTAASLMLLYNWMFILLSSKKLTKPKMKGNVQIVTALVLILFAVSGTLFEKNSRPGFFVSLLFLAVIAAVTMLMKKKWADQEEKNGQT

SEQ ID NO: 5331 - protein, 272 aa, Bacillus licheniformis
MTLQEKIMQELNVKPSIEPKQEIEKRVGFLKSYLKKTGAKGFVLGISGGQDSTLAGRLAQLAVEELREEGIQAEFIAVRLPYGVQQDEDDAQLALKFIQPDKSFAFDIASTVGSFAAQYQSVTGEALADFHKGNVKARVRMITQYAIGGQNQLLVIGTDHAAEAVTGFFTKYGDGGADLLPLTGLTKRQGRSLLEELGAPERLYTKSPTADLLDEKPQQSDETELGLTYDNIDDYLEGKAVSSEVAEAIEKRYKASEHKRQVPASMFDDWWK

SEQ ID NO: 5332 - protein, 177 aa, Bacillus licheniformis
MNAAIRDKNIVLIGFMGVGKTTIGQLVSKKLGRDFIDIDHEIEKDFQMTIPEMFQQKGEAFFRQTEKEYIFQMCEHTMGNIVSLGGGAFQQEEIRKKCLEHCFVIFLDLRWENWKQRMDLLIENRPVLHNRTIEEMKQLFNERKSIYAFHHLKVETDNRSAEETADYIVEMLKLGQS

SEQ ID NO: 5333 - protein, 256 aa, Bacillus licheniformis
MKQRIEEELKNIEATYGVKILYAVESGSRAWGFPSQDSDYDVRFIYVHQKDWYLSIDAKRDVIELPIDDSLDISGWELTKALRLFRKSNPPLLEWLSSGTVYYEAYSLAEKMRRLKSRAFSPVSCMYHYLNMASGNFRDYLTREEVKIKKYFYVLRPILACQWIESRRTVPPIEFQVLLDELTEDGPLKTEIHQLLERKKKGEEFNLEPQNPILHEFIERELERLQTVAKAYKTDHEDLTQELDRLFRETLDEVWA

SEQ ID NO: 5334 - protein, 305 aa, Bacillus licheniformis
MEVITRDFFLFLSKSSILNRLARNWGSSVATGKIIGGKDFEASIPIIKGLNEQGLTVTVDHLGEFVNSREVARERTQECIRAIQLIAQEQLNSHVSLKMTSLGLDIDLDLVRDNMNSILECAEQHQVMVTIDMEDEVRCQKTLDLFKEFRQKYEYVSTVLQAYLYRTEQDLEELNSLNPFFRLVKGAYKESPKVAFPDKKDVDENYKKLIKKQLLSGHYTAIATHDDKMIDFAKEIANEHQIGKDRFEFQMLYGMRSKTQLELVKEGYNMRVYLPYGDDWYGYFMRRLAERPANIAFAFKGMTKK

SEQ ID NO: 5335 - protein, 516 aa, Bacillus licheniformis
MTTPYKHEPFTNFGIEENRKAFEKALETVNNEWLGQSYPLVIDGERYETENKIVSINPANKEEVVGTVSKATQDHAEKAIQAAAKAFETWRYTDPEERAAVLFRAAAKVRRKKHEFSALLVKEAGKPWNEADADTAEAIDFMEYYARQMIELAKGKPVNSREGERNQYVYTPTGVTVVIPPWNFLFAIMAGTTVAPIVTGNTVVLKPASAAPVIAAKFVEVLEESGLPKGVVNFVPGSGAEVGDYLVDHPKTSIITFTGSREVGTRIFERAAKVQPGQTHLKQVIAEMGGKDTVVVDEDCDIELAAQSIFTSAFGFAGQKCSAGSRAVVHEKVYDEVLKRVIEITESKKVGEPDSADVYMGPVIDQASFNKIMDYIEIGKEEGRLVSGGKGDDSKGYFIEPTIFADLDPKARLMQEEIFGPVVAFSKVSSFDEALEVANNTEYGLTGAVITKNSDHINRAKQEFHVGNLYFNRNCTGAIVGYHPFGGFKMSGTDSKAGGPDYLALHMQAKTISEMF

SEQ ID NO: 5336 - protein, 482 aa, Bacillus licheniformis
LIISIVIYMVGMLYIGYYAYKRTANLSDYMLGGRTLGPAVTALSAGASDMSGWLLMGLPGAMFATGLSGSWIVIGLVLGAWANWIFVAPRLRSYTEVAGNSITIPAFLENRFHDKSKILRIFSGVVIITFFTFYVSSGMVSGGVLFNSIFNLDYHAGLWIISGVVVAYTLFGGFLAVSWTDFVQGIIMFVALILVPIVTVIQTGGPGEAFSEIQSIDPNLLNIFKGTSVLGIISLFSWGLGYFGQPHIIVRFMAISSIKETKKARWIGMGWMIFSSAGALLTGLLGIAYYSKNGLHLDDPETIFIQLGNILFHPLITGFLISAILAAVMSTISSQLLVTSSSLTEDLYKTLFKRSASDKELVFFGRLSVLAVSIVGLCLAWTKNNTILGLVSYAWAGFGASFGPVVILSLFWKRMTKWGALAGMVAGALTVNIWAEAGLSDVLYEMIPGFAASLLFVFVVSLLTSKPEQQVLDEFEQYKQTL

SEQ ID NO: 5337 - protein, 414 aa, Bacillus licheniformis
MEELLEQVVSLSNINEIIDFISGELKKPVILESADFFLLAYNSYYINHFDAANQQTIFSKKCPLPIFEKFVEEGIIDQLKTIPTPFRVKQIEEIGLNQRVVVSAKHKDEIMGYIWVQEIEDNLSDEELDFLYQASFHVGKIIYKKKRLKQEKEEQAEELYKKAINDQFQTEKELKAAADKANVVLPAVFTVMVLQVVDGEDELLEDLKETIRSYLNLKDNISHVLEDHSNIAIIVGSVSRKRSALAAASELINRLLTHLRSQMLPLILIGVGNEYSSLLSLGKSYREALQVTKAAEITGSQEHIPYEYQKLGLFKYLDQIAAKNDHLQYVNPDLQLLKEKDKESHTEFLRTLEIYLVNNCKVKPSAEQLFIHQNTLNYRIKQILEMTSIDLNDFNTRCQLFIDLMLMKKAGYKS

SEQ ID NO: 5338 - protein, 281 aa, Bacillus licheniformis
MFRTFILMLFTFFFFHLHASGNLTKYINMKYAYLSYIAIILLAILTAVQFYIYMKSSDEKGCNHECGCGHDHDHEKDKPFLQRMFIYFVFFFPLCTGLFLPAATLDSNIVKSKGFSFKAIEQPEHYAQTQYLRPDTSIYYGQDGYDELMNKALKKYKEKQHITLKDDDFLKGMETIYHYPGEFLDRTLEFDGFAFKGEAISDKQLFVLRFGIIHCIADSGVYGMLVEFPENMDIKDDQWLHVKGTLSSEYYQPFKSTIPVLKVKDWSAIKEPKDPYVYRTY

SEQ ID NO: 5339 - protein, 295 aa, Bacillus licheniformis
VASQSFLQLNSIFISILIEAIPFVLIGVFISGLIQMFVTEEMMAKIIPKNRFLAVLSGTFAGVLFPACECGIVPIARRLLLKGVPLHAVVAFMLTAPIINPIVLFSTFIAFGNKWDVVFYRGGLAIAVSLIAGLIISYQFKGNQLIENGTHGHHHHVHESQSFLQKLGGTLRHAVDEFFSVGKYLIIGAFVAAAMQTYIKTSTLLAIGQNDVSSSLVMMGLSFVLSLCSEVDAFIASSFSSTFSLGSLIAFLVFGAMVDIKNLLMMLGIFKKRFVFVLIAYIAVIVLAGSLLVKG

SEQ ID NO: 5340 - protein, 318 aa, Bacillus licheniformis
MQQPYDMPLEQLYQYKPERTAPADFKEFWKGSLEELANEKAGPQLEPHEYPADGVKVYWLTYRSIGGARIKGWYAVPDRQGPHPAIVKYHGYNASYDGDIHDIVNWALHGYAAFGMLVRGQNSSEDTEISHHGHVPGWMTKGILDPKTYYYRGVYLDAVRAVEVVSGFAEVDEKRIGVIGASQGGGLAVAVSALSDIPKAAVSEYPYLSNFQRAIDTAIDQPYLEINSFFRRNTSPDIEQAAMHTLSYFDVMNLAQLVKATVLMSIGLVDTITPPSTVFAAYNHLETDKEIKVYRYFGHEYIPPFQTEKLAFLRKHLK

SEQ ID NO: 5341 - protein, 140 aa, Bacillus licheniformis
VNTEQTIEVMNQNWTDIYYHLHMKHDDQLSHQAVRMLQHIEKNRFVTIGHLARLLDVSHNTASEHVKRLIQKGLVQKNRDSSDERKVYVTLTPEGEEAVKRHTRLNPKKLQKVLEQLNEEEVEMVKTAFSLLSREAKSCF

SEQ ID NO: 5342 - protein, 113 aa, Bacillus licheniformis
MFLIVKIGVSAILIAIITEIARKSPEMGGMIAALPLVSLLSLFWLSVQGESLKHLSQFAKGVLWGFPATAVLLLIVVLSLKASFPVIISVVFGICGWGGCLMLQKALIHAIFG

SEQ ID NO: 5343 - protein, 186 aa, Bacillus licheniformis
VPAGRHIVYIITQTFMFDPKAECDCKWNRDADYVAPYYFELISHAPYPDRLPAHPAYIEPVNCQIYSGSASQTGLIYLSDKAGNPVEKSGREGLYISLVNQEAHRLKGYLYYFQNGEYQEFMISQTKAQAFSYELAPETVQTYPINLKILGSNYFRFLSTSIPPDGAYRDAPFPARMIYYSRLYTW

SEQ ID NO: 5344 - protein, 53 aa, Bacillus licheniformis
MSARGHMLEPDVDFLGRMSGNDEWKGLRGPVISFKEDGYMNSVFLIRMVAVDV

SEQ ID NO: 5345 - protein, 227 aa, Bacillus licheniformis
LGSIQWEYIFNAELAAKSFPYVMQGIWNTLFISFASMFAGLILGFFIALGRMSGLALLRWPARIYISFMRGVPILVILFILYFGFPYIGIQFTALAAALIGFSINSAAYIAEIIRSALSSVDRGQWDAAKSVGFSYWQTMRHVIVPQSVRIALPPLANVMLDLVKASSLAAMITVPELFQQAKIVGGREFDYMTMYILVALIYWAICSGIALLQDFLEKRTEVYIKK

SEQ ID NO: 5346 - protein, 291 aa, Bacillus licheniformis
VNKLHTYKRITLLITVLALALITAACSTAQNKAENKKTAWDEIKEKGKIVVATSGTLYPTSYHDTDSGKDKLTGYEVEVIREAAERLDLDVEFKEMGFDGMLTAVGSGQVDAAANDITMTDDRKEKFLFSTPYKYSFGTAIVRKKDLSGIHTLEDLKGKKAAGAATTVYMDIARKYGAEEVIYDNATNDQFLKDVANGRTDVILNDYYLQKLALSAMPDLDLTIHPDLKYYPHQQGMIMKKGNTELKKQFDKTIDEMLKDGTIKKISKKFFGGADVSKKQDIDYIDVDVNK

SEQ ID NO: 5347 - protein, 44 aa, Bacillus licheniformis
LMIKIFFIFLILLMFQFANTFMIPSFTLKSKAGCTINHFIFSQY

SEQ ID NO: 5348 - protein, 183 aa, Bacillus licheniformis
MKNILIINGHEAYPHARGQLNHTIFTAMADKLSEKYEVKKTVVADGYQIPEEHEKFKWADAVIYQTPVYWFSVPALFKKYIDEIYEYGLFYQGSEDYGRGGLFTDKKYMFSTTWNAPKDVFSKAGTFFEGKSLDEALFHLHKMQEFVGMKPLKTFSVHDVISNPQVDQYLADLDAHLKEVFSI

SEQ ID NO: 5349 - protein, 173 aa, Bacillus licheniformis
MFLKKLTLLREGVPSYAKYPFSIPAIQHLKELTFQKNVTFFVGENGSGKSTLLEAIADKCEFNTAGGGRNNTYEVYGSGSALGDYIRLSWLPKVTNGFFLRAESFYHFATHIDEVDITGFRSYGGRSLHEQSHGESFLSLFKHRFKEKGIYLLDEPEAALSPARQAGILENHS

SEQ ID NO: 5350 - protein, 478 aa, Bacillus licheniformis
MIHQRLRPFPDHFLWGSASAAYQIEGAWNEDGKGLSVWDVFTKIPGKTFKGSNGDIAVDHYHRFKEDVALMAEMGLKAYRFSVSWPRIFPQGRGEANEAGLRFYDDLINELLAHDIEPVLTLYHWDLPQALMDEYGGFESRRIIEDFNAYCVTLYKRYGGRVKYWVSLNEQNYNFNHGFITAMHPPGVKDRKRFYEANHIAFLANAKAIDSFRRYVPDGKIGPSFAYSPAYPLSSRPDDILAFENAEEFTNYWWLDMYCRGTYPDIPLKYLKEKGWAPTIEDGDMELLAKGKPDFVGVNYYQTITYEMNPLDGVSEGKMNTTGQKGSNQETGMPGLYKTKRNPHLETSNWDWAIDPIGLRIGLRRISSRYGLPLFITENGLGEFDKVENDGTIHDDYRIAYLRAHLEQCRQALNDGVDLIGYCSWSFTDLLSWLNGYQKRYGFVYINRDEENVKDLKRIKKDSFYWYQNVIQTNGEEL

SEQ ID NO: 5351 - protein, 132 aa, Bacillus licheniformis
LIKKWEAQEMTMSYHQFTVYQKGGKPPVMDWTDEDIKRGYTTGEHAVSFEALENTASSVEVRLNVQKQVLSFNRRVTVPFEVLYDGVEIASVLSKKLTCDIPQGAYQLTCYTIMPDHSGTAQITYLLDFKQD

SEQ ID NO: 5352 - protein, 148 aa, Bacillus licheniformis
MDKIKSLLITLLAVAVVIIGIVSGDFFTSEHQPSGRQNGSNYDEVLIFPSDRYPETGAHIRKAIKKGHSEICTIDRDGAAERRKDSLKDVPSKSGYDRDEWPMAMCEEGGTGASVEYISPSDNRGAGSWVGNQVSDYPDGTKVLFKIN

SEQ ID NO: 5353 - protein, 46 aa, Bacillus licheniformis
LLRKLLLEGGASQRFTSSQPGDYKTANFFRNDGESFSVFSCSCSFY

SEQ ID NO: 5354 - protein, 4 aa, Bacillus licheniformis
MKAI

SEQ ID NO: 5355 - protein, 246 aa, Bacillus licheniformis
MKVYEAETLISAMKQRSDEYKNLREQLVSLKKALNSVAELDEFQGKGADAIKAFYRDLSGVVDGWLDLTDMQIQFLNGVSSAAENAGLSEDTFVDVQFLEQELANVHIHSQNMVSAQQQELSNILGQIDDLISLQPFSSDEIKQQLDAANQNRKDTIKAVEDLDGLLKREYSASEHIQQMIQTDYSALIDATGKGKNASPLNYNSHIYQNSEVYKMKHRMHQEARSYIANKQKQYETGKAEKAEEL

SEQ ID NO: 5356 - protein, 684 aa, Bacillus licheniformis
LNEEGYRLGIDIGGTFTDLTLLNPADGSMTAVKTPTVPEDPARGIINGLALLKTRGVQPSEIHHFVHGMTIGLNTLLQRKGADIALFVTEGFRDILSLQRLRLPVPYDFRSRMPEPLIPRKNVFPIQERMLYDGSEKLPLHMEDIDEAVGQALRKGLKGIVVSFLHSYRNPLHERQAAERIRQIAPELEVATSAELWPQMREYERTVMSVANLYIKPNIHHYFGTLKERLVQEGISAQPFITQSNGGLMDIESAAEAPVKTLFSGPAAGVIGSIRTAEAAGEANIITFDVGGTSADISIVEKGEPTFTQSNQISGFPIAIPSVAMYSIGAGGGSVAWIDSGGLLKVGPESVGSDPGPACYGKGTKAALTDAFLICHYLNPNRFAAGNMKLYRERAEKALLPVAEYLGTDVEQAADKMIQVALANMYTELSNVMEQHGFNPREFSLMAFGGAGPVTANFLAEEIQAKNVLIPPHPGTLSALGALTADFIYDAVCSRQVLLEQIKTAELKVEFMRLQEQAETWLRKQRADMVTEASLLYLLDARYKGQAYEIELPVSPEWLEGESTSEIADSFHLLHGKQYGHSDGKASIELMNMRVRIIGKTPKPPGGKGCQSNLPEAEPVSQRKIIMKGGTYQASVYRRSDLRSGQRIDGPAIVEQDDTTTLILPNWSGKTDHAGNLIIERKES

SEQ ID NO: 5357 - protein, 664 aa, Bacillus licheniformis
MRTDPARLEMMRSYFNAIAAGMGHVIERTSFTTFVKESADFATALATPEGEFFVYPKTIGVTIFLGLSLKRVIEESGPFEPGDIILTNDPYTTDGLATHLPDIHVVKPIFLEGEIISYAWCFVHCSDVGGLVPASISPTATDIHQEGLRIPPARIYKKGRENRDILKVLRANSRVPDLNEGDIHAMVAAVNTAENRLTEMVGKFGKEAVQQGMDDLLEQAAMRAGRVISRIPEGSYSFSDYLDDDMISDVPIRLAVTANVSGGEITLDFSDCDPQVKTAFNLVTNGSKHSFLYQGLINYIISEDPYIPINGDLTRPIQVIAPKGTLVHPEYPAAVGIRHSITMRLYNAVLGALAKALPKAVPAAGAGQSAIVVLSVPDESTGSRKMSVVEPMGGGGGGQHDMDGADGIDHASGFLKNTPIESLEQHIDIHVRRYELIKNTAGAGFHRGGHAIGLEFEAAAPESIVTARGMERMRFHPWGLAGGTAGALGRVRLYPDQPQEKTMSKIDVLKLNKGDVISIHSPGGGGWGNPFRREAESILGEVEAGLLSPEAAYHQYGVAVKENGAGSFIIDLEETAEIRKKKAGEHRKQWDFGIAREEYERCWTEEASSTLARLLRQLPAHQRSHVKHLVHRYFSKEHNGPISKSEVAAAVEKLAGKNNTGMVR

SEQ ID NO: 5358 - protein, 360 aa, Bacillus licheniformis
MKSKISALFILSLAAVLLLSGCGGNGSQESKQSDTVVIGVYGGDWEKHIKPSLESFEKETGLKVKVVAGTDSEWFTKLKASNGRNAPYDLLILQPDTIHRAQSAGLLAPIDQEKVPNVRDLYHSVQKRFTDDGKQYAAGFSMGQLGIVYRKDLVPQEPKRWTDLWNSSYKGHVAISSPAYSAGLQFFVGLINAQGGLESNGKDVDKAFNSLADLKNNITAYPDNPGSIQTLLERGDAWVVPFWDGRAFSLQDAGLDLGFAYPEEGAVAAVASWALMKGSPNQDNAYKLLNHLLSPEVQGDFADRTFYGMANKKVKYSDKLKGKIKVGEDYYRNLKWVDYEVAAKDLGDWTNRWNQVLGGK

SEQ ID NO: 5359 - protein, 372 aa, Bacillus licheniformis
MSAIQIRHVSRHFGNTIALEDVQLEVKEGEFFSLLGPSGCGKSTLLNIIAGFLEPTSGFVYIGGRDVTDLPPYDRHIGMVFQDYALFPHLSVFDNVAYGLKVRKWPRRKIEERVMECLALVRLEAFANRMPHQLSGGQQQRVAIARALAVQPSVLLLDEPLSNLDAKLRKEMQTELRSIQKRVGITTILVTHDQEEALSLSDRIGILGCGRLQQLGTPLDVYRTPANQFVAEFIGQVNLLNARASKIQPSSGGYGYETVDFEVYEGVPLTFEINQELSKKTSVLFMVRPERISVSFEKQKNRLIEMPATITEVSYAGHALRLKAAVFKGEWIIQTPDPQFPRLPKAGDQVYLSLEPGDFVPLDVKEDADEGC

SEQ ID NO: 5360 - protein, 288 aa, Bacillus licheniformis
MRAVEQKRFYWFLLVPVLLFLGVFLVLPLVLLLLLSFRDVDAMMNTLDTYSFSQYVEVFSSDVYLKTIGITIWTALKTTVLCLVMAYPAAYLLVKAPTGRLRALFYILLVSPLLTSVVIRTFSWIVLLSQNGIVNEALISMKMIEKPLPLLWNMNAVIIAYVQVMLPFAVLPLASSLSEVKPDLKFASMSLGAGRLRTFFFVTLPMTVPGLLTGAMIVFSLSAGSYITPLLVGGRMQPLLPLSIYQQVMQVFHLPLAAAMSITLLAVVSVVIGILGIFQKRWEARING

SEQ ID NO: 5361 - protein, 270 aa, Bacillus licheniformis
MGRRLRRMRRGKWIDACVWTAGLLVYFFLALPVFVIILSAFSPDEYPKFPPSGISLRWFAGVFSSSGWMESIWVSFMLLLVVTPLAVILGTVAAYALARLNFPGKQAIQAFVLSPLMIPQIALGVSFLYLLTMIGVNGTFAGLAAGHMLISLPYVVRTVGVSMANVDQKLELASMNLGAGPWHTFFHVILPLIKPGIIAGAVFASVTSFGEISISLFVSSPAVTPVPVRTFSYIDQTFDPSVHAISVIFITVSVIALIIIERTIGLSKTM

SEQ ID NO: 5362 - protein, 37 aa, Bacillus licheniformis
LKQNVKFAELSHSERYLEILPMLHTKKQAEFRLLHGF

SEQ ID NO: 5363 - protein, 87 aa, Bacillus licheniformis
MKLFTYFSVKKTKFSFKVNCEQKMNLYQEKQIKANLRKRRDAKPWPKVLTVLRLTGCRINREFARFYSGGLFSFYFQYNVLLETTNL

SEQ ID NO: 5364 - protein, 3582 aa, Bacillus licheniformis
MGNTFYPLTHAQRRIWYTEKFYPGTSVSNLSGFGKLKSASGIDSGLLTEAIRKFVRTNDTMRFRLMFEGEDEPKQYIAEDEPFQIEYFDASESGGADGVLKWGQAEARRPLPLYDSPLFKFAVVRISEEESWFFAKVHHIISDGISMTILGNRITDIYLKLAKGETDLEPVQSSFTEHIQSELEYENSKRFQKDKAYWNAQYEAIPEPVSLKASDTYQIQLDAARFSKEISPDLYKKIQTYCNEHNISVLSLFLSILHIYMHRVTGQKDVVLGTFMGNRTNAKEKQMLGMFVSTIPMKASIEVHQDFSAFVQERMKDQLKIIRHQKYPYNLLINDLRERQPHVSKLFAVSLEYQVMQWQQKETVSFLTEPIFSGSEVNDISIHVKERWDTGTLAIDFDYREELFTSEEMAVLYERLMTLLEDALLSPQKTIAELEIVPAFEKERLLKRASSQTIAYDKNMTLHGLFEQKAADHPEKTAVVYEGQKLSYRELNEQSSRLAMALRRRGIGPDAPAAIVMERSERVITAMLGVLKAGGAYVPIDPGFPEERIRFMLEDSKAKAVITDSGLTFETAETVQFSEALSESRENGYPSSAAGAGHLAYIIYTSGTTGRPKGVMIEHRQVHHLVRGLQQAVGTYDQDDLKLALLAPFHFDASVQQIFTSLLLGQTLYIVPKKTVSDGRALSDYYRRHQIDVTDGTPAHLQLLAAADDLSGVKLRHMLVGGEALSRVATERLLQLFAETAESVPAVTNVYGPTETCVDASSFTITNRTDLQYDTAYVPIGRPIGNNRFYILDENGALLPDGVEGELYIAGDGVGRGYLNLPDMTRDRFLKDPFVSGGLMYRTGDTARWLPDGTVDFIGRRDDQVKIRGFRIELGEIESVLQGAPAVEKAVVLARHETGGSLEVCAYVVPKQGGKIHIQGLREHLSKHLPDYMIPSCFVELNEIPLTASGKVDRKALLRHEVSVSGTAEYAAPRNECEEKMVGIWQEVLGAEQVGIHDQFFDLGGHSLKAMTMLAKIHKAFGVEVPLQVLFEKPTVAALSGFVSEAEKDGFAVIEPAPESDDYPLSLAQQRIYIVSQLEGAGVGYNMPAAAMLEGTLDSGRLEAAFQKLIDRHEALRTSFTVVDGEPRQTVHQRVQFKIEKVKAEGKQIEQIAKSFVRRFDLAKAPLMRAGLVSLADGRHLLLFDMHHLVSDGVSISIILNELAALYNGEELPELRLHYKDYAFWQRAQAQEGFQKEEAYWKSMFAGELPVLQLMTDEPRPPVQSFEGDRVSAVLPKDLKEKLAVLAEQNGATLYMVMLSAYNMLLAKYSGQEDVIVGTPAAGRRHSDLEGIIGMFVNTLAIRSKVDPGRTFADFLNDVKKTVIDAFEHQDYPFERLAEKFGASRDLSRHPIFDTMFILQNAWEDIPLLGDLHLSIYETNFNIAKFDLTLQAKEEHGELILDLDYSTKLFKKDTAERMLKAYLNLLEDMAADPMLRIGEYSLLTEEETNRQLVAFNPATSDYPREKTIVQLFEEQAAERGGYPALQFEDKVWSYDELNRKANQLARRLRKSGVQAGTTAAILTARSAEMVIGILAVLKAGGAYVPIDPDHPEKRVQHFFKDSGAAVLLTQKAMKPLAEAAEFGGDILFVEDENLYMGDASDLRLPISPEAMANLTYTSGTTGTPKGNMVSHRNILRTVKNANYLEVMESDIVLSISNYVFDAFMFDVFGSLLNGAKLVIAPKDTILDMSRLAHVLEKEKITILMITTALFNLLTDMRPDSLKGLRRVLFGGERASVDHVRRALKTVGRGRLLHMYGPSESTVFTTYHPVNEVPDDAQAIPIGKPVSNTEVLILDSFSNVQPAGVAGELCVGGDGLVRGYFNRPELTAEKFTAHPFKTGEKIYRTGDMARWLADGCLEFIGRIDHQVKIRGQRIELGEIEHHLLTHDMVQEAAVLAVDTGAGDQMICAYFTADQELSSQELRRHAAEGLPGYMIPSVFMQLDELPLTGNGKIDRRALPEPDIAQAAQKEYTAPRSGTEAQLADLWQEVLNVPKIGVHDNFFELGGHSLLGMTLIARIQQEMNVDLQLKDLFQAPTIESLAQAAAKSEKKSAVYIEAAPDRETYPVSSAQKRLYVLQQIEGAEKSYNMPAVLQLEGKLDLKRLESAAQMLIKRHEAFRTTFEIRNGEPVQRIWEAAELTIDVIDADEQEAEKLIKEFIRPFDLTKAPLFRMSIIRVTEEKHLLLVDMHHIISDGASVSVLIDEMTRLYAGEALEPLRIQYKDYAVWQQHLLTERHKMQEEYWLKELDGELPVLTLPTDYPRPSVQTFEGSRISFSLKPELVQQLRRLAKETESTLYMVLAASYSTFLSKLSGQSEVIFGSPAAGRPHADLSRIIGMFVNTLAIRTRPEGDKPFSAFLEEVKETTLGAFEHQDYPFEELIEKLNIQRDMSRNPLFDAVFSMQNADLKDLSMEGVTLKPYDFAHQTAKFDLTLTAAEEDGLLVFEMEYNTALFKRESIKRWSGYWVNLLEAVAETPDASLSDLSLLDEAEKRRIVQKWNETKLAVPQDKTVHELFEAQVLRTPDRGAAVYNGVQWTYKELNARANRLARLLIEKGAGPEQRVGIMVKPSLEMAAGVLAILKAGAAYVPIDPGYPAERIGYVLKDSGAELLLTQTNLAVPEEFSGETLLLDSMLSEEITNDDEVNPQAGTQPNNLAYLIYTSGTTGQPKGVMVEHQSLVNLCYWHNDAFAVTEQDKSAKYAGFGFDASVWEMFPYWIAGAELHIIDEAIRMDITRLNEYFEENGITITFLPTQLCEQFMELDNQSLRVLLTGGDKLKRIEKRNYTLVNNYGPTENTVVATSTAIDPDEGMLSIGKPIANTRAYVLGQNNEVQPVGVAGELCIAGRGLARGYLNKPEETAKRFTEGPFVPGERMYRTGDAVKWLEDGRLEYIGRIDQQVKIRGFRIELSEIEVQLARLSEVQEAVVTDIEDAYGNKALCGYVVADEQLDTESLARKLGQTLPDYMVPAYWVQLDELPVTANGKVDRRALPQPDVEAQTAEYKAPRTETEQLLADIWQDVLGIDRIGVTDNFFALGGDSIKGIQMASRLQQHGWKLEMKDLFQHPTIGELSSYVQAADAKPIDQGPVEGEVTLTPIQRWFFERKFTNEHHWNQSVMLHALSGFDPEAAGKALTKLIEHHDALRMVYQRNGDGIVQYNRGLEETAVRPEVIRFNESGAELEAAVLKESNRIQSSINLTEGPLLKAAIFETDQGDHLLIVIHHLVVDGISWRILLEDFAAGYAQAEKGEPIILQEKTHSFAEYAARLKEYARSKAFAKEIGYWQEVEKAETASLPKDDEAEDKRMHHTKTAEFSLSKEETEQLMTKVHEAYNTEMNDILLTALGLALKEWTGQEDFIICLEGHGREDIMEGLNISRTVGWFTSQFPALIQLRHSEDIGYQIKQIKEELRHIPNKGIGYGIYRYLTEEGKKAQPIKHDISFNYLGQFAEMADSGLFTRSALSSGDPLSPETEKPNALDIVGYIENGILTMSIAYHSLEYKESTVAAVAESFKTYLLQLIDHCLERDGGELTPSDLGDDELTLEELDKLMEIF

SEQ ID NO: 5365 - protein, 3588 aa, Bacillus licheniformis
MGKEKIQKVYPLTPMQEGMLYHAMLDPESSSYFTQLELVIDGEFDLGIFEKSVNQLVRSYDILRTVFVHQQLQKPRQVVLAERQAIVEFEDLADLDEGRQKTRIDQYKQDVQAAGFNLAKDMLFKTAVFRLDRKKHHLVWSNHHIVMDGWSMGILMKRLFQNYEAFRANRTVTLDQGKPYADYIKWLGRQDKDEAASYWEHRLSGLESPSVIPGGKTQPDSGSYRNEEFTFVWDKDMVDALLKTANRYHVTAPNLFQAIWGAVLAKYNRTDDVVFGTVVSGRPSEIDGIEHMAGLFINTIPVRLKIDKNASFAELFKQAQQHAIDAERYDYVPLYEIQKQSALAGRLISHLVAFENYPLDKELENGTIHERLGFSIKAAGAFEQTNYDFNLIVYPGAEWTIKLKYNGAAFDAAFIEQAAGHLTRLAEEAIANPESKAVSASMLSKQEQQTLLAFNQTKTGYPKEKTIPELFEEQVEASPDKTAVAADGRSLTYRRLNEKANQLARKLKAKGLMHGNAAAILMERSLEAAVSMLAVLKAGGVYVPIDPEYPEERIRFLLEDSGAKIVLTKDSPQISLEGYEVLAANAVDAEKEDTANLVHANKPEDLAYYIYTSGSTGKPKGVMVEHRNIVRLVKNAGYIPLKSDVKMAQTGAVSFDASTFEVFGALLNGGTLYPVPKETLLDGKRFRVLLEETGITTMWLTSPLFNQLAQQDPGMFATLSDLIIGGDALVPGIVNRVKRESPELSLWNGYGPTENTTFSTCFFIDQAYERTIPIGKPIGNSTAYIVDEHGALQPIGVPGELCVGGDGVARGYLNQPELTDEKFVGDPFAEGKRMYRTGDLAKWLPDGNIEFLGRIDHQVKVRGFRIELGEVEAALARLEGISEAAAVIRENNTGETEICAYYTAVGARPPAQLRTELSRSLPEYMIPAHLIELDSMPLTANGKVDKRQLPAPIAEETDRFEAPKNETEKILAAIWEEILGIKQPGIDDNFFSIGGHSLKAMMLTAKIQEQLQKEVPIKVLFEKPTIRELAEFLQGETKEKTAPIAPAPSRANYPVSSAQRRMYILNQLEEASTSYNVPAVLLLEGELDKERLEDAFRALISRHETLRTSFELIDGEIVQTIHQDAVFHLTESVADEAEAEAAIRGFIRPFQLNKAPLVRAELVKLEEKRHLLMIDMHHIITDGSSTGILIRDLASFYHGEEAPAPKLHYKDFAVWQNGPEHQEKLKEQEQYWLDIFKGELPVLDLPYDFPRPSKRSFEGDRVVFGINRKLTADVQKLLSEADATLYMFLLAAFNILLSKYASQEDLIVGSPVAGRTHPDLHNIPGMFVNTLALRNRPEGEKTFKEFLQEVKETSLQGFAKQDYPLEELIEKLPLLRDTSRNPLFSVFFNMQNMEIPTLKLGDLQISSYSVRHRTAKFDLSLEAVEHDGEIGLSFDYAVSLFKEETIRRWSGHFLNVIKTICENPGIKLRDIELLSDKERGLLLEEVRRSRAERLEERPFHVRFEEKAAEMPDQPAVVCGETILTYRGLDERANQIANVLRSEGIGKDDVVGIMLDRSAEVAAAILGVMKSGGAFLPIDPEMPTSRIQYMLEDSKARWLLTEHSHQAALADWYNGRLIDVRNDTLMASKKRPHLIHDGASLAYIIYTSGTTGQPKGVQLEHRNLANYVSWFISEARLSASDKTMLLSSYAFDLGYTSLFPVLLAGGELHIVPKETYTEPETFIHYIGEQGITYIKLTPSLFHTVVQPQSFALAKGLQSLRLIVLGGEKINPKDVERFHSRYPDTRFINHYGPTETTIGAIAKPVEPGMIRQFAERPTIGRPISGAGALVLDASRRLVPAGAAGELYITGSGLARGYVNNRELTAAKFIENPYTPGTFMYRTGDLVRRLPNGEIEFLGRTDDQVKIRGYRIELKEIEEAFIGLEHIERAVVLSFTADSGLDELCAYIQAKRQLPVSELRERLSERLPSYMIPSYFVTVDKMPLAANGKVDRSALPEPQGLSGQSDSYRAPSTEFEKALCGIWEEVLGVRPVGLDDNFFDLGGHSLKGMMLTAEIQSKLGKKVPLKTLFDCPTAGLLARSIEADGQAEQSGIQPAEKRDWYPVSSAQQRMYALHHIEKNGTGYNMPSVLMLEGVLDTDRLRRAFADLVNRHESLRTAFVEIDGRTVQIVHEKADIDLKVIHIHEEDAEAQINRFIRPFDLSTAPLIRAELLSISSARHLLLIDTHHIIADGVSRSLFVKEIAQLYKGASLPEPKLHYKDYAVWQQQPDQQENIRKQEDFWLRQFKETVPELSLPLDFPRPPVQSFAGDRVHFKVSKGTALKIRRLMAKTNTTLNIVMLAVFNLFLSRLAGQKDIVVGSAAAGRTNADLKDVPGMFVNSLALKNHVPDQASFSGFLEEVKNNSLAALDHQDYPFEELIAKLDLPRDMSRNPLFNVMLTTEDPDKETLDLDGLIIKPYETSHAAAKFDLTLGAFEKDDEIGLQFEYATDLFKKQTIERWSGYLLNLLEAIAENPDASLSDLSLLDEADKRRILYEWNETVLDVPQNKTVHELFEAQVLRTPDRGAAVYNGVQWTYKELNARANRLARLLIEKGAGPEQRVGIMVKPSLEMAAGVLAILKAGAAYVPIDPGYPAERIGYVLKDSGAELLLTQSGLTMPDAFTGEVIDLNREASILAGELYPEDDINPSAEAQSDNLAYLIYTSGTTGQPKGVMVEHQSLVNLCYWHNDAFTVTEQDKSAKYAGFGFDASVWEMFPYWIAGAELHIIDEAIRMDITRLNEYFEENGITITFLPTQLCEQFMELDNQSLRVLLTGGDKLKRIEKRNYTLVNNYGPTENTVVATSTAIDPDEGMLSIGKPIANTRAYVLGQNNEVQPVGVAGELCIAGRGLARGYLNKPEETAKRFTEGPFVPGERMYRTGDAVKWLEDGRLEYIGRIDQQVKIRGFRIELSEIEVQLARLSEVQEAVVTDIEDAYGNKALCGYVVADEQLDTESLARKLGQTLPDYMVPAYWVQLDELPVTANGKVDRRALPQPDVEAQTAEYKAPRTETEQLLADIWQDVLGIDRIGVTDNFFALGGDSIKGIQMASRLQQHGWKLEMKDLFQHPTIGELSSYVQAADAKPIDQGPVEGEVTLTPIQRWFFERKFTNEHHWNQSVMLHAPSGFDPELVEQTLAALTEHHDALRMVYQKNNGRLIQYNRGPDDRSFAFRVVDLRYVTDIETEIAAQANRLQASLDLENGPLVKAEQYQTAEGDHLLIVIHHLVIDGVSWRILLEDFASGYSQAAQQHDVVFPDKTNSFKDWAEALEAYAQTERFLKTADYWRRLEQERICELPKDRAAAERKAENTSAVKFELSEAETRLLLTKVHEPYGTDINDILLSALSLTIREWTNGSNICINMEGHGREEIIPGMNISRTTGWFTAQYPVVLKSQAAAGLPETIKNVKETLRRIPDKGIGYGILRYLTDRKKAGAIFSIKPDISFNYLGQIDREVQTGFFGPSPYDMGRQVSERSEALYALSFSGIISKEKFILSCSFNTEEYDRQTIQELMDRFKAFLTALIDHCTAKEEREFTPSDFSAGDLEMEEMGDLFDVLEENLK

SEQ ID NO: 5366 - protein, 56 aa, Bacillus licheniformis
MDRQNKAGFSLPKNATGIPFHPLSNGCMPSIILKRTERATTCRLFSCWKAYLIRIA

SEQ ID NO: 5367 - protein, 1282 aa, Bacillus licheniformis
LSQFKKEHVQDIYYLSPMQEGMLFHTLLHPGQGFYIEQISMQVKGSFQKDVLEKSMNVIIGRYDIFRTVFVHEKMKRPVQVVLKERSFQAEEIDLSGLSEAEQNERIEDYKRKDKEKGFNLSKDIPMRTAVFKKGQDRYEWVWSYHHILLDGWCFGIVVQELFEVYNALRENRPYSLGPVRPYKEYIKWLESQDKQKSLVYWEHHLAGFEGQTTFSEQRKNPEQAGNQPEELLFTLPKEDTEAFTQLAKAHHTTLSTALQAVWSVLLSRYQRSRNLIFGTVVSGRPADIQGVEHMVGLFINVVPKRATFGPQTTFTELVADLQKQALEAEPHQYVPLYEIQSHIAAPNLIDHIIVFENYPLQEANKQQKEKNLGFTMDEISVFEKSNYDLNLLASPGEEMMLKLAYNRNIFEPSFILRLKEQLLTAIREVIRDPEQPLDDICVVSKKEKERLLHEFNGQVQRKQIGLTIPQWFEQYAEALPEKPAVSAAGRTLTYRELNEKANKVAHLLRKKNVGRGEPVALLFRRSPEMVIAILAVLKAGGAYLPIDPEYPEARIQYMLEDSGAVCMLTQEELAGRAASLSFHKHTILIDDPAVSAESGRNLEIAAEPDDLAYIMYTSGTTGKPKGNLTTHANITRVVKETNYISLSEKDTLLSLSNYAFDGFTFDLYGALLNGAKLVVADQATILHIGKLTEAIQKENITVMFVTTALFNLLVDAGTGWMKGIRKVLFGGERSSVSHVKKAFAAMGPDRIIHVYGPTETTVFATFYPVNRMEDSAVSIPIGKPINETNAYILTENNRLQPIGAVGELCLSGTGVSRGYLNRPELTAEKFAPHPFNSGETMYRTGDLARWLPDGNIDFIGRIDDQVKIRGHRIELGEIEEQLMRCQGVKEAVVTARKSGNGDAALTAYVVPVQGTEVANEEVRRQLARRLPAYMVPAAYIMLEELPLTANGKVNRRLLPEADGRPNSTERRAPRNATEEKLAVIWSEVLGRQQIGIDENFFEIGGHSLKAMAVASRMLKDLAIDVPVNVLFEMPTIEGLAAYIDQGGHVDEVKKTVFNQASTRHLFAFPPVLGYGIMYGKLAEQMPEYRIHAFDFIESDDRAVRYAEAISDLQPEGPLTLIGYSAGCGLAFEVAQALEKNGRKVEKLLMIDSYMKNDVSDLEGRSIEADTAALMEANKDNEYMKIKTVADGIAKKMTAYYSYFVNLVHQGTVSSEIHLIKSEHAKPLPAWLSLWKEGTESSYDEYQGAGRHDEMLADGFVKSNADLIRQILGERAAVIGGA

SEQ ID NO: 5368 - protein, 246 aa, Bacillus licheniformis
MNEIIKQFGAPASGMQLICFPFAGGYSASFRPLHEHLKTDFDMLAIEPPGHGTNRMALVDNLEKLADLYIAALKPRLSSQFVLFGHSMGGMVVYRLAQKLEQEGIFAAAAVISAIQPPHIQRQKVSHQKDDAFLDHLIQLGGIPKELAEHREMMNFFLPSFRADYRALETFCHTDHTPLRSPVHILNGDRDEKCMRDALGWKKWANTIDFHYFKGGHMYLLSETEQVAAKLKTIAAASRSTAVPTM

SEQ ID NO: 5369 - protein, 303 aa, Bacillus licheniformis
LNKSAYAAALLYAFIIGFSFFFVKLALTAASPVDILAHRFTVAFLAALIPLLLGWVKIAISIKDALKVLPLALFYPVMFFAFQVFGLVYTSSSEAGIIQAAIPIFTMIFAAYFLNERFTKRQFFFTVLSAAGVACIFMMKSAGTGSSDLRGAALILLSALSSAGYSVLARKMTRTFSSLELTYVTTGAGFLFFNGIAGISHMSDGTLSGFFAPFTDPVFVLSVLYLGVLSSFATSFLSNYALSKIEAAKISMFNHLATLVTILAGIIWLGESLEWFHFAGTGMIIAGIIGATMVRRENRLKKS

SEQ ID NO: 5370 - protein, 449 aa, Bacillus licheniformis
MHKYVALMNELEDMIEDKSFQEGDRLPSIRALAIRFKVSKSTVIRALNELERRHLIYSVPKSGYYVVKKTNQRPNSGKAVIDFAASAPDPDVFPYIDFQHCINKAIDTYKNDLFIYGTPKGLPSLIQAVQKELANSQVFAKEEHIFITSGVQQALALLASMPFPNRKRKVLIEQPSYHLLIKYLEVHGIPAVGIERTAEGIDMDELERIFQTEDIKFFYTMPRFHNPLGTSYTEREKTAIVKLAEKYDVYIAEDDFLGDLENDKKADPLHYYDVSSHVIYLKSFSKIIFPGLRVGAAVLPDSLTIVFNRYKQLLDIDSSMLSQAALEIYLKSGMFEKHKQKIRSSYQKRSCLLHDLLKECSASLGDVFEFHPPAQPAIHTHIELDRTIPAYRLIKSLQKRDVLLEPVNAHYMPAFPKRNLLKINTSNVKEEDIRSGIERLRQAVETAYF

SEQ ID NO: 5371 - protein, 226 aa, Bacillus licheniformis
MKIYAVYMDQLPEAGQFNRMMAMVSEEKRKKVGRYRYPEDASRTLIGEVLARHIISETFHLPNEQIRFTEGRYGKPAAEGLNDFHFNISHSGKWIVCGAGAQPIGVDVEKIKPINFDIAKRFFSPSEHDDLMEKDESERLSYFYHLWTMKESFIKQAGKGLSLPLDSFSVKLNEQGRASVETPPGYPPCYIQAYEIDPGYKMAVCSAAPEFPGRIVMKSCAELSML

SEQ ID NO: 5372 - protein, 261 aa, Bacillus licheniformis
MIDGTLIKDTCFGRELLIYLPPSYGSGENRYPVLYVHDLGDLFDPAYSNSLRSIEKLFSSQEVPELLLVGVAPKDRESEYTPFPKRHLLPNKREYGGKGNEYAAFLANRLKPHIDRHYRTNPSREQTGIIGKSFGGLISVYTAFLASETFGKIGSLSGSFWFEGITEFMKNNRFENKHLRIYMDVGSTEGTDRDNLQKEMIPRTKEAFSLLTESAASEKELKFVIDEGGSHRLERFAKRFPEAVKWLFGSCHNSARNGRSF

SEQ ID NO: 5373 - protein, 14 aa, Bacillus licheniformis
MDILNRLAEKHRLY

SEQ ID NO: 5374 - protein, 220 aa, Bacillus licheniformis
LKRELVLRWLFYFVGLIVLSFGVSLTIEGKVLGIGPWDAFHYGLYMLLGLTVGQWAIIVGAVIVGLTSLFTKAWPKIGAVLNMLLIGIFIDFFTYILPDPETYISSTVVFVIGVIFIGYGVGIYVSADLGAGPRDSLMLLISEKTGWNVQWVRNGMELTILLIGWLLGGPIGIGTVLTAILTGLILRFSLPQSKQLLKAAMAGRRIRAAKPVHMSLKKNG

SEQ ID NO: 5375 - protein, 176 aa, Bacillus licheniformis
MKKLYISAVLGLLFVFVGGTKIHAQEPQNNNGVLDENKFIDETVYSYTQPISIQDGEVTTQAKKYIKTVSVNRSYKSLLNIVVARHYSDTTFTYGSGKLYKSPRALSNDWWTLPPNFKSGSSKSWDWYNTGKGATGRSNLQVRYTWGVPTPWGPVGSNYSSRIKVSFKSNGSWYTN

SEQ ID NO: 5376 - protein, 309 aa, Bacillus licheniformis
MGTIGINFKNIQHQYRTKDVLRGVSFHADPSSITFLAGENGAGKTTLIKVALGLISPKAGNALFDGQSVGEIREKISCVFDEPPVYPNESGLDNLKFLSGIHSLDRKWSQEVCAMLKLDEGLLKQKAKALSLGQRHRLAVAAALLRKPKYLFLDEPSIGLDPPSWQLVQIALKQMTARGCAILITGQNYDAIENLADNIAILQSGKIIFSGPIVKLVQAFPVYVRIVTDDHREIAVQFPEAEPDSSGIYRIVCESGEQARAVIDQVRRSTLNFQELSTEKASMGKMVTDIYKDGFQSEKRGLTYESVQN

SEQ ID NO: 5377 - protein, 299 aa, Bacillus licheniformis
MNPFKIETNQLKNSMLVRVCIALLFCCFIWGLLTLYQSAEGEERRQEKIHQSVIDEVKKNGAEEELENGGLEIEKNDDIARSMYIGLHPSVTPNLFLLILANIGPIVFIIIGSHLVGSEYHQGTVKMKAAHIGWRKAVSGKLCALLSLVIVMVIAALLLGLAGGWLAWTFATAHSDLAASLEVNAAVSYPVLILFLMIGLTFYSVLGMTVTLLTKSRLAGVLISLAIPYAEQMLSLPFLPLTAYQSLMVHHFIYVDGSIIGQPYLTEPMGEPGAWAVLVCWLFVVIAVQQFAAKKQQIL

SEQ ID NO: 5378 - protein, 57 aa, Bacillus licheniformis
LIFLVRLICLAFLACLALLFYAPFLAMPVWIALIIALIVCLYLAFIEEMKEWRRRKH

SEQ ID NO: 5379 - protein, 553 aa, Bacillus licheniformis
MQQRNTPDVQRWFPSEDGNEAKRNEFLSLIEQLIEGVDNLKNPDQVNLGGEKNREGFFYEKLVAESRIPHEGAPMKEVNEELLKLLHGHPYHTKYFFTNILPMASIPGILGMLTAFMVNGNNLWDVYGPAGAEAEVKVTAMMSKLAGYDAETSGGYTTWGGQGAVYSGLRIAIAKMAPSSLKEGVPGNFYAFCSEAAHYSLYKSMEAAGLGSDHLIKVKTNLDHSMDTEDLREKLRQVCEAGGIPVYIVATTGTTDAIGIDDVSAVRRAAEETAKSFGLPVPHIHADSALGGFFAFFNEYDLNENALSFSPGVLSMIKPIQEKMRHLHAADSLCFDFQKLGQTPYVTSLFLVKDRNDLKRIDLDPDETPYVGHRGYGDYHTGYTLECSRMASSISMYSALMAFGYEGYQKLLAQFLEVNLHFREQLSRQIPEADIVNPDNCGMSTLFRIYPEGAPRFEDEISGACTIEELERNNALTEKLFEKLGTKRDKMFFGDTKKHLLVKSCEGVELPLCVSKFFVISPYTMPEHVPGIIDYLKETIEEVFREHGSLMTN

SEQ ID NO: 5380 - protein, 574 aa, Bacillus licheniformis
MKTLKKKLTEHISVKIMIGVALVLLITIASFSAVFTFISKDLSEQLKQQFQNRLYTDIHLAENQIKRLDGNPLEIDSADGPLYKQTKMAVDSLKKKNKLENIYILSNEGGKERILVLSDTPDDFGTDYSFSPEMKEALTTNKETVSDVYEDEYGIHQSIFLPLENGSGEKVGILGIDLDASVIPETAAKAKWYTIAISAFVLLLGMVMAYFLGSYIAKPIRQLMKASEKIADGDLSADISVKSRDEAGKLAESFKRMSENLQQLIGHISASSEEVSKTSLQLKNVSAESSESAAQVAESMNSMSEGINEVVSSVSDCHTSAAEIDQQLTHVTEKVNEMKNVAEGVSKDSKTGQELVEETLRQTQTIKNVMEESKQAASEMQNHTEEIEKVIGMISSIAEQTNLLALNASIEAARVGEEGQGFAVVAGEVRKLSERSADAALSVSQLVAGTQESSRLVMERIQEGNEAVDKGQILINGTYENFSGIFKGISQFAERTDQLLQSLLKVEKSYQTISSAMEQISAVTEEQAAGSEEVAAAAEQQSAGMQEIASAIQQLSALSEELNQAASKFKLAAE

SEQ ID NO: 5381 - protein, 247 aa, Bacillus licheniformis
MLAIKGLNKSFGENEILKKIDLNIEKGKVIAILGPSGSGKTTLLRCLNALEIPNRGILSFDDFTIDFSKKNKPADLLRLRRKSGMVFQAYHLFPHRTVLENVMEGPVKVQKRNKEEVKKEAVQLLQKVGLEDKMDLYPFQLSGGQQQRVGIARALAIKPELMLFDEPTSALDPELVGEVLKVMKDLANEGWTMVVVTHEIKFAQDVADEVVFIDGGVIVEQGPPEQIFSAPKEERTKQFLNRILNPV

SEQ ID NO: 5382 - protein, 234 aa, Bacillus licheniformis
MFLSNIQAAAIGQAIPWDLVRESFWPIFLRGIYYSIPLAILSFIFGMIIALITALARMSKSRILRAVFGIYVSAIRGTPLLVQLFIIFYLFPAFQVTIDPFPSAIIAFSLNVGAYASEIIRASILSVPKGQWEAAYSIGMTQKTALTRVILPQAVRVSIPPLSNTFISLVKDTSLASQILVAELFRKAQEIGAGNLDQILIIYMEAAFIYWIICFVLALVQQQIERRLDRYVAK

SEQ ID NO: 5383 - protein, 268 aa, Bacillus licheniformis
MKKAIFAVLLTLLITVMAACGASGDNSKDKNAAGDSLWSSIKDKGVLTVGTEGTYEPFTFHDKKTDKLTGYDVEVMQEVAKRLNLKAEFKETQWDSMFAGLNSKRFDVVANQVGKKDREDQYDFSDSYTTSQAVVVTKADNNDVKSEGDVKGKKAAQSLTSNYNDLAKNAGAEIEGVEGMAQAFQLIQQGRVDLTYNDKLAVLNYLKTSGNKNLKIAFETGEPQTTHFAFRKGSGELVDKVNSALKDMKEDGTLAKIAKKWFGEDVSK

SEQ ID NO: 5384 - protein, 470 aa, Bacillus licheniformis
LLKDYDFLKLIFQGIIDEIDIGLHVVDENGTSVVYNKKMSQIEGMDVGDVLGKNVLDVFTFASQHDSTLLQALHHGKTNKNVKQTYFNNKGQEITTVNHTFPIMENGNTKGAVEIAKDVTKLERLIRENMNKTESTKYTFDSLIGVSPAFKEVIEHAKRATRTSSSILIVGDTGTGKELFAQSIHNGSQRSTGPFISQNCAALPESLVEGLLFGTVKGAFTGAVDRPGLFEQADGGTLLLDEINSLDFRLQAKLLRAIQEKTIRRIGASKDTPIDVRIIATMNEDPVDAVSGQRLRKDLYYRLSVVTLFIPPLKDRKEDIMPLTQHFIDKYNALFQMEVKGFEEEVRRFLLSYDWPGNVRELEHLIEGAMNLMSYEDKIELTHLPLQYRTKPAAKEQLPQQGYDLFAPLPSASAAPLKEQIENAEKYYIQKTVKKCNYNVSQAARVLGISRQSLQYRLKKWKIRFDQESE

SEQ ID NO: 5385 - protein, 400 aa, Bacillus licheniformis
MTVLSKSEKIMKQTAHFGANNYHPLPIVISEAEGAWVKDPEGNRYMDMLSAYSAVNQGHRHPKIIQALKDQADKITLTSRAFHNDQLGPFYEKVASLTGKDMVLPMNTGAEAVESAVKAARRWAYDVKGVPDNQAEIIACEGNFHGRTMLAVSLSSEEEYKRGFGPMLPGIKLIPYGDLEALKQAITPNTAAFLIEPIQGEAGIVIPPEGFLKQAAEVCKERNVLFIADEIQSGLARTGKMFASDWEDVTPDMYILGKALGGGVFPISCIAANRDVLGVFNPGSHGSTFGGNPLACAVSIAALEVLEDERLAERSLELGEYFKEKLSQIDNPKIKEVRGRGLFIGVELTEAARPYCERLKEEGLLCKETHETVIRFAPPLVISHEDLDWAIEKITRVLSK

SEQ ID NO: 5386 - protein, 473 aa, Bacillus licheniformis
LNHENREQYTLKRTMKSRHLFMISLGGVIGTGFFLGTGYTINEAGPIGAILSYLAGGMIMYFTMLCLGELAVAMPVSGSFQTYATKFIGPATGFAVGWIYWLGWSVTVALEFLSAGQLMKRWFPDVGVWIWCLIFGLLLFSLNALSAKAFGESEFWLSGIKIIVILLFIILGGGAMFGLIDLKDGQAAPFFSNLIGDGIFPNGFGAIFITMITVNFAFQGTELIGIAAGESENPEKTVPRSIKQTVWRTLVFFGLSVFVLAGLIPWEKAGVVESPFVVVFEQIGIPYAADLMNFVILIALLSVANSGLYASTRMLYSLAKEGMAAQALSRVNKRGIPMNALWITLGFAGLSLISSVVAAETLYIWLLSLAGLSAQVGWITITVSQLLFRRRYVKEGGKVEDLKFKTPLYPYLPLTGFILNSAVLVSLAFDSEQRMALYCGILFMSACYFVYHVFVKKRQALDRQEAMIYQNKR

SEQ ID NO: 5387 - protein, 297 aa, Bacillus licheniformis
MNKQVSLIGMPMDLGQARRGVDMGPSAIRYAHIVERLNELGYDIDDLGDVPINRDQPKGDEGLKNLVSVLEGNRKLADIVDNVVEQRRFPLVLGGDHSIAIGTLAGVAKHYQQLGVIWYDAHGDLNTLETSPSGNIHGMPLAVSLGVGHEKLVNLHGYAPKIKPEHVVIIGARSLDEGERKYIRETGMKVYTMHEIDRLGMTKVMEETIEYLSANCDGIHLSLDLDGLDPSDAPGVGTPVVGGISYRESHLAMEMLYDADIITSAEFVEVNPILDHKNKTGEAAVELIESLLGKKLL

SEQ ID NO: 5388 - protein, 290 aa, Bacillus licheniformis
MDIRQLKYFVTIAREGKITTAAKRLHIAQPPLSRQLKQMEEELGVVLFDRNKKKNLTLTYEGEVFLKRAKEILHKLEDSILEVRELREEVNGTLAVGSTIYCAALLLSKVSKIRDMYPNLMFNIWEGEPSRLSELLESRQIDAAVTTTPIHSKNTESKSLPEVPCKLVLPGNQSYGLKGEAGMKEIAGLPLILLRPSHGKGIYDEVVHHFQSSGLEPRVFCECHDSTTLLSLVTSGFGATILPLSMLPAHFARHVQTLEIQNNPFILQPSVVWRAGSFLPKPVREFLALF

SEQ ID NO: 5389 - protein, 189 aa, Bacillus licheniformis
MNIIVGITGATGAVFGVRMLEWLKKTDAETHLVISPWAAATILHETGYTMKDVEKLASFTYSHKDQAARISSGSFQTDGMIVAPCSMKTLAGIRTGMADNLLTRSADVMLKERKKLVLLTRETPLNQIHLENMLELTKMGAVILPPMPAFYNHPQNLTEMVDHIVFRTLDQFGIHLSEAKRWEGMKQEK

SEQ ID NO: 5390 - protein, 473 aa, Bacillus licheniformis
MAYQDFRDFLNTLKKEGQLLEVQEEVKPEPDLGAAARAANNLGDKSPALLFNNIYGYNNAQIALNVIGSWPNHALMLGLPKDTPVKEQFFEFARRYNQFPVKVQREETAPFHENEITEDINLFDILPLFRINQGDGGFYLDKACVISRDVEDPDHFGKQNVGMYRLQVKGKDRLGIQPVPQHDIAIHLRQAEERGENLPVTIALGCEPVIATAASTPLLYDQSEYEMAGALQGEPYKIVKSKLSNLDIPWGAEVVLEGEILAGEREYEGPFGEFTGHYSGGRSMPIIKIKRVCHRNNPIFEHLYLGMPWTEVDYMVGINTCVPLYQQLKEAYPNEIVAVNAMYTHGLIAIVSTKSRYGGFAKAVGMRALTTPHGLGYCKMVILVDEDVDPFNLPQVMWAISTKMHPKHDAVIIPDLSVLALDPGSEPAGITHKMILDATTPAAPETRGHYSQPLDSPIGTKEWEAKLMNLLNQ

SEQ ID NO: 5391 - protein, 75 aa, Bacillus licheniformis
MHTCPRCELKKAETVSKSPVEGAWEVYQCQHCFFTWRSSEPETITNPEKYNPAFKIDPAEVETAVQVPAIPDRKI

SEQ ID NO: 5392 - protein, 151 aa, Bacillus licheniformis
MAQLSNELFQLLNGEKLAGKRHEAMMLQTVTEDGWPHTAMISAGEILALNKTDIRLALWQGTTTTANIARTGRALFVACWKGKAHYVRLSLKKLPELRDAKHPRARFAGTVEAAREDIAKYADIISGVQIKLKDEAAVLRRWEETLGELRK

SEQ ID NO: 5393 - protein, 148 aa, Bacillus licheniformis
MSNFLQKPRNKAILSVYLFFVCGSVLSAVLNPKMSIGEKLFILCFNIFSATLFAFLIYLLLNKLMKDEDRKHPADPEKNGINQVIWKKYKKPLILFVYFGSLFAVCAAILPMPIYTVAEKLVILSIAIIFITICCILAYKVTNKMLQK

SEQ ID NO: 5394 - protein, 113 aa, Bacillus licheniformis
MSPETFVEYTEYLIAGMLAAHFAYSLCFLIIASHMIIEYEKMIFLKPEKRSHKITNTFVFLLVGTGYFVYKRLLRYNWFLRKLYFALYLVGRGILSIIIFYIFSFLVHLIFSV

SEQ ID NO: 5395 - protein, 50 aa, Bacillus licheniformis
VFSMSELSLAWKSGMFAILFAVISGNFFAVYQTANQMLNRSCLERMPDEE

SEQ ID NO: 5396 - protein, 37 aa, Bacillus licheniformis
VNKEIETNIKPMTASLSFQLIAGLTRAAKMMIVAYRE

SEQ ID NO: 5397 - protein, 226 aa, Bacillus licheniformis
LLRLKETVVYKDLPYNIQSHLKAPVSRETKWGMACFIVLVLDILCILPVLASKVEFFTFAVLPVAILINVWMILINTRNMTEYLHHLQYVRFMGVSFSGMSYCQLITAQKMMFSAIGFHLPLISLSLFIYAASIFLVIRYYLAVFPDPKRGKRETAAPTGMLLAAVPAAGYMISHAVLRVSESAVYLLMSIVYLLMACLFSIMGVKFIHKYFFIKANQDIIRQHRI

SEQ ID NO: 5398 - protein, 85 aa, Bacillus licheniformis
MKNEKNFLYKKINEAMIIFTILFPVVGIFFVIMTIWGLLEQAPSEIPLFVSVISLFFFVLPLLLHIFRKKVWLKKHMENYKNSEG

SEQ ID NO: 5399 - protein, 37 aa, Bacillus licheniformis
LMGVFCIGNVWLCVFSYLVYLLETIIRETEIRESIPM

SEQ ID NO: 5400 - protein, 267 aa, Bacillus licheniformis
MKHLITCTSEELALLVGLCDYPGVAKGILESSLGKKSKKEWDAILEATVNQLILKQYWNEEKSSKDENPLSEEMQKFIVSYVNSEQMIRCSNLDNKNTLMLHHFENETWLFHMIDRDIIHEFAYVDEQEIAQLMKDYYHFSTDEEHIPLKFRLSDKCFDWLSNKDMTEKVRKKSSFSPEEEHSFNQLIADLEANQWSLNNISHFYIPSLNDGPFLQNIVFFIPSARGVWVAQYDEHNEKPVHISLRTLEQWNELLKGLEYTVSFQNT

SEQ ID NO: 5401 - protein, 541 aa, Bacillus licheniformis
LKTLDVQAFQTGLDKTLTELKNQTDEISKVKQSIKGLTSLDDALKGAGGEAIRSFYEECHTTFLLFYESFISDYKGLLEKTKSALHSLEPNQNGFISQSFLENELHDGVSQAESLTGRLTSKANQTMATVSHIVDLPDLDDSAVNENAKKAQRQISETLEKLHTFDREQTNALKAAREDLDTMKQYIQQLEKMYTGPKIEISEYKSGSILKPQNDSTISQAPGGLQNDLQNPGETPMEKMLGRLEEKAAETLTNPDTQDKEKTNIAHEILSYFETVGEPLDVGDKALLGYHAANATASIAWTRKLKIYYQGGKPTKWQRFKGEYKFQVMSHRSWTSQGDHSSKVARTIKNISDSNPSNPLLKKAQKFVASYDSPSMMFKHAVGFPKNQHSFIDGKEFRKRAALRTKAGAVDIMESTAKAKGFTALERGVPIVGTAVTFASNLTEYTDPENSDKSFAEKTGRFAAGVGTDIFAVSTGVEIGATIGSVGGPVGVIVGGAIGGVAGAIASSSYGDAIKDAGEKVAGSIEKGIKNSFESVKSWFK

SEQ ID NO: 5402 - protein, 92 aa, Bacillus licheniformis
MGQEIKVKTGEVKQALSKLKHSAQAVKPNVPTDISGKNNLDVVKKIESMNKDLKSLTKAYASALAKQIAQTEQAVNAIKDADKKLSSSIKAK

SEQ ID NO: 5403 - protein, 127 aa, Bacillus licheniformis
MIWEKTVLYGLQGTLLIKKQQLEQLKNCQTELEADKKEFDDSKDSIKKPELSPTTWQGSLADSFKNVRSDMKTAYNDICGKQLNEVFKQLKEKISSLNDDIDSLGKDISSLKKKIEKLEKEEREARR

SEQ ID NO: 5404 - protein, 330 aa, Bacillus licheniformis
MKKLLVVYAVMLCLFFLYVYDYSRGDKAGSAEESRRPAAAGSLSEKYVMVTFQSGIEYWKSGLKGFEDAAQLFNVSVEYRGAAHYDVHEQTTVLEQVIAKKPAGIAVSAINPKALNPVIDKAHEQGIPIVLFDSDAPLSKASTYIGTNNMEAGAVAARRMAEFLNGKGETAVITQPQQYNHQERTKGFEQTIKQKYPNMKVAAVLDGKGDELTSKKEAAKILEENPSIKGIFTTEANGASGVARAVKEAGLEGEVCIIGFDKDKKTLDGIKNGSISATMSQDTWQMGYWSLHMLFFSNHHLKHERPLPAAIDTGITIITKENVAAYYAND

SEQ ID NO: 5405 - protein, 589 aa, Bacillus licheniformis
MRMIKRLINNAPIRHKLISLLLLISMLPTIGLGILSGWAVENIIEKQVIDQTLQLIGEVNKTAEVYVSHMQNLTYLISMNEEMEAFFSHKKEDGEADYKRRTFLQGLTSLYSEAAGILVVNDKGEMISNEMYERTPTDLTKEPWYQAALDNEGIFKMIGKPVNRNIRSHVHYREDEVVSAVRAVIDPETQHVKGVVLIDLKLRVLAEATKNIRLGKTGYLMIMDENGGNIYSPETSNLFLPKKWFRQERSGYFSKRIKGEEYQFIYETSSFTNWTTVGVFKAGEPVFEVKEIHLYVLLFLLTAAFLGMSASYYLSHSMSRPILKLNAVMKTAESGNFSTLYQEEREDEIGLLGKSFNRLMFRIRELMSVTERQERQKREAELRALHAQINPHFLYNTLDTINWMARKKGAEEVSDLVQALSKLFRISLSKGKDIIPLSDEFEHVENYLKIQKARYRDKLNYSIEMTGLCDDRLILKLVLQPIVENAIYHGIKEKKGPGHIAIKGMEEDGSLIIKIEDDGAGMDEETLKQITDQFKHRDDTAGYGMINVHERIALTFGEPYGITVESRKGAGTAVTIRLPILAKGGTSLE

SEQ ID NO: 5406 - protein, 400 aa, Bacillus licheniformis
LSECWRVLIADDEPWIREGIRDAVSWERYQMSVSAEAENGEEAFELALKHGIDLLIVDLNMPIVNGIALMKKLRGALPQCRFVIVTGYDQFAYAQEAIRLNVDDYLLKPVDPAHLEQVLKKISVSLAAEKKKLSEQKLAEQHIQQNLGLLKEHVFRSWIENRADEEDVYRQLECLRLPARNPETLGVIAAGHVWNKPSEADNLKEKVERFFINERDKAVFFDGDRLIAACLWRSVTEAEQRALAEMIKAELQASAAVCFAKLAENGRSAAQCYQHCRQQVSKAFNISPVVIRAKEYMQKHFTEREFSLKQMADALQVSSVYLSRMMKKELGVTFVQLLTEMRMDQAVHLLETTPLSIHDIAEQTGYDTQHYFSTVFKKTMGVSPNQYRRMSGIERTGGKL

SEQ ID NO: 5407 - protein, 359 aa, Bacillus licheniformis
MKKCWLLITAMLFCLIVTACSGNQASGGGDKGYVGISMPTKSSERWVYDGKYMVKEFEKLGYKTDLQYAEDVVENQVSQIENMITKGVNVLVIASIDGEALTDVLEKANKQDIKVISYDRLLMNSKHVDYYATFDNHKVGELQGKYIEEKLGLKDKKGPFNIELFAGSPDDNNAHFFFDGAMSVLKPYIDSGKLKVLSGQTSFEQGATLRWDGATAQSRMDNLLSAHYTKAKLDAVLSPYDGISIGIISSLKGAGYGSDKKPLPVITGQDAELASVNSIIKGEQTSTIFKDTRELAKKAVEMASSVLKGEKAEVNDTKTYDNGEKVVPSYLLEPVVVDKENYKKVLVDGGYYKESELGK

SEQ ID NO: 5408 - protein, 522 aa, Bacillus licheniformis
MSDCILEMRGITKEFPGVKALDNVHLRVKAGEIHALCGENGAGKSTLMKVLSGVYPYGAYTGDILYKGEVCQFKNIKQSEEAGIVIIHQELALVPQLSIAENLFLGNEQASRGVINWRKTKLETLELMKKVGLQESPDTLVSQIGVGKQQLVEIAKALAKKVQLLILDEPTAALNEADSENLLQLLLELKKQGISSIMISHKLNEVTKVADSITVLRDGQTIETLDVQSGQLTENRIIRGMVGRELQNRYPDRSAEIGDVIFEVKDWTVHHPLQQDRKVVNMAALSVKRGEIAGIAGLMGSGRTELAMSIFGRSYGKNISGTIEKDGRELYINHPEDAIKNGIVYVTEDRKGNGLILKDSIKENITLSKLDKVSSRLVMDERREQHEAEDFRRKLNIKTPDISQRTGNLSGGNQQKVMLSKWIFAEPDVLILDEPTRGIDVGAKYEIYGVINQLAEAGKAVIMISSELPELLGMCDRIYTMCEGEITAEFSKEEADQEKLMKYMTIRMKRGGEAYADTGANG

SEQ ID NO: 5409 - protein, 403 aa, Bacillus licheniformis
MQTPVQTDKDRAQPGYFQLFRDMYKQNIRKYSMVIALVFIMLLFQILTDGILLRPLNITNLILQNSYILILAIGMMLVIITGHIDLSVGSVAAFVGAVSAMMIIENDMPLFAAVVLSLLLGAAIGAWQGFWIAYVKIPAFIVTLAGMLLFRGLTMIVLEGKSIAPFPVSFQKMASGFIPDWLNGGTFHLTTIVAGAGVSILYLVYQLQQRNMQKKFQFDLQGKGLFTVKVFFIIAIINLFTYILATYEGIPLILITLFVLIAGYTFVMKKTVIGRRIYAIGGNEKAAELSGIKTKRLTFMVFVNMGVLAALSGLIFAARLNAATPKAGNLFELDAIAACFIGGASAYGGIGTIGGAIIGGLVMGVMNNGMSLLGLGIDWQQAIKGLVLLIAVAFDIYNKNKTS

SEQ ID NO: 5410 - protein, 422 aa, Bacillus licheniformis
MKRKIHYAWIIVFVTFLTLLAVQGVRLSFGAFIQPWEEEFSMDRGTISLISMLSFIVYGVSQPVIGRLVDRFGPRIILSLSTLLVGLSIFFTYLVTSPWQLFILYGIIVSLGVGGASNVASTVIVTNWFNEKRGLAFGIMEAGFGAGQMLLVPGSLMMIHWFNWKVTVIVLGLFLAVIVFPIVILLLRNHPSEKNVQPIGGAQGGEIKEEPDAQPKKIPYKAVFLKRTFWFLVLPFFICGFTTTGLMDTHLIPFSHDHGFSTEVTSAAVSLLAGFNIIGILISGVVADRWSSRKILCFLYAVRALSLVILLSSHNSMLLLCFAVLFGLVDFATVAPTQMLATQYFRQYSVGFILGWLFLSHQIGSALGAYLPGVWYSQTGNYNLSFYLSIVILAVASILNILLPEPKKINPTLNQEGRSVQQ

SEQ ID NO: 5411 - protein, 305 aa, Bacillus licheniformis
MTEINHSITLKFRKFNRFYTNVLGFLNEHIYDSPFSLTETRILFEIHNTADCTAKLIQDTLGLDRGYVSRILKRFEKENMVYKKRSEEDSRNHYIYLTSFGESIYKKLEAKANQQIENMLKHIDGRHQEKLTEAMNTIECILSEHLPPEKSAVSIRDYYISDDIKLMIEKQRAFYAETHGWDDSFLDYLHETFDAEIEKIWIAESAGRFAGCVGLVKHPGRTVQLRWFLVDAAFRHQGVGTRLLEHLIDYCKENQYERIFLWTVSTMAEARPLYEKFGFRLTEVKDETLLWGQRLREERWDAELG

SEQ ID NO: 5412 - protein, 44 aa, Bacillus licheniformis
MKLKMLMIDYILQIKKDKFNHTGKFIHQAGKKEENRVYNLTTCF

SEQ ID NO: 5413 - protein, 690 aa, Bacillus licheniformis
MVKPYPPISRKVPRLLHGADYNPDQWLKYPDVLKEDIRLMKLSRCNVMSVGIFSWVSLEPEEGRFTFDWLDQVLDTFKENGIYAFLATPSGARPAWMSKKYPEVLRTERNRVRNLHGKRHNHCYTSPVYRRKTAIINGKLAERYAHHPAVIGWHISNEYGGECHCELCQDKFREWLLAKYKTLDRLNDAWWTSFWSHTYIDWDEIESPAPHGEDAVHGLNLDWKRFVTDQTVDFCRHEIAHVRSFNPDLPVTTNFMGTYAGLNYWKFADLLDVISWDSYPAWHNSRQEDSRLGADIAFVHDINRSLKGGRPFMLMESTPSMTNWQDVSKLKRPGMHELSSLQAVAHGSDTVQYFQWRKSRGSSEKFHGAVVDHEGSEHTRVFQEVKKLGEKLEKLEDVAGTTVEPEAAIIFDWENRWALEDAQGPRNIGKHYERTAKSFYEPFWREGVPVDVIHMEADFSRYKLLVAPMLYMLKEGTAERIEQFVQNGGTFVATYWSGIVDENDLTFLGGFPGGLRKTLGIWSEEIDALHDGQKNTIVMDEENRLGLSGSYEASELCDLIHLEGAEALAAYEDDFYAGRPALTVNLFGDGKAYYIASRNEAAFQEAFISRLIEECGIAKVLDTELPKGVTAQLRTDGRHDYIFVMNFTAESRSVSLPEETYTDVLKGTQKKGALKLPPYGTSILRRSHKA

SEQ ID NO: 5414 - protein, 381 aa, Bacillus licheniformis
MNFYKTLALSTLAASLLSPSWSILPRAEASAYKDFSVTADAETEPVDTPDDAADDPAIWVHPKQPEKSRLITTNKKSGLIVYDLNGKQLAAYPFGKLNNVDLRYNFPLDGKKIDIAGASNRSDGKNTVEIYAFDGEKNKLKNIVNPQKPIQTDIEEVYGFSLYHSQKTGKFYAMVTGKNVEFEQYELFDNGKGQVEGKKVRSFKMSSQTEGLAADDEYGKMYIAEEDAAIWSFSAEPNGGDKGKIVDRAGGTHLTADIEGLTIYYGEDGEGYLIASSQGDNRYAIYDRRGKNDYVTDFSIDDGKEIDGTSDTDGIDVIGFGLGKKYPYGIFVAQDGENTENGQPANQNFKIVSWEKIADALDDKPDIDDQVNPRKLKKRAK

SEQ ID NO: 5415 - protein, 496 aa, Bacillus licheniformis
MSNHQKETFQNIPQKGFFGHPRGLFTLFFTEFWERFSYYGMRAILIYYLYTEVTKGGLGFDQTTANSIMAVYGSLVYMSGIIGGWIADRLLGTANTVFYGGVLIMFGHILLSFPGSVPAFFISMFLIIIGTGLLKPNVSSVVGDLYSPEDTRRDSGFSIFYMGINLGGFLAPIIVGTVGQTYNYHLGFSLAAIGMLFGLLTYLATRKKNLGSAGRTVPNPLTPAERKMVFGRIGIGVLVIAAIFGYSIFMGWMTIKLFTMIVSCLGILIPLIYFIVMFKSSKTTSDERSRLTAYIPLFVASMMFWAIQEQGANILATYADKRTHLEFLGVQLHSSWFQSLNPLFIVVLAPVFAWIWMRLGNRQPSTPTKFSLGLILAGLSFVVMIFPAYINGTESLANPMWLVLSFLIVVLGELCLSPVGLSATTKLAPAAFSAQTMSLWFLSNASAQAINAQIVRFYSVDTEIAYFGIIGGVSILLGIILMLLSPKIQKFMKGVN

SEQ ID NO: 5416 - protein, 32 aa, Bacillus licheniformis
LKDFLIKFYLFMYKRILLDWHIYKANRFTKGG

SEQ ID NO: 5417 - protein, 585 aa, Bacillus licheniformis
VQQQPDEMRMTVVDATKFGAVGDGKTDSTNAINECLAWTKSMGYNTVWIPNGTYMIDGTKNGDPRAPFRGAGINVPGNIEILMDAEAVIKVKPNSSWGYAAFYIGGTSDIKISGGSIIGERDEHTYTPAPRPTHEWGFGICIEGASNVVIENVRIADFTGDGIIISNGGEGYRPSERIQVTNCDIRRSRRNNLSITGCDNVLVEGCEIADAGTGNGTAPCFGIDIEGYSEGSIVYEEPVNVIIRNNVLKGNVNHAVSNFNGTSVIIEGNVADGTISYGYGTGTTIANNIIKKNPEFTGQSTGINGLGVGALEERSDAVIKGNLISGFTTGIDIRGKSVFAAGNKIRDFVNAGILAYQASQVFIEGNYIENDVPEQRSGTAFSITQSDNVTCSGNQIANVVLAVRSTGNDVQIKHNVIKQFSRGIWISQGNAVIEGNFISPNGFQTVPESYAVSVTNTASAVIQQNTITRFRNFPIYSSTNQHTKIIGNYIEDSPLIVTVFLTRGTHEVIGNTITLSRPSLPAVLIYLDQSSDSAILNNTLRSNTAARVTAIQTNTSRQTLIIGNTIVKGMIHSHQTDTVNGNIEV

SEQ ID NO: 5418 - protein, 72 aa, Bacillus licheniformis
LKIIGIGLLLFASLEAFAVILDVFQGMTLQRAVVNTLTFVILEVGEWIIILLFLVIIFLEASESFRQKRKRT

SEQ ID NO: 5419 - protein, 547 aa, Bacillus licheniformis
MPFFFKGRHQKDNKQESLLSGDKNPETVKVSGFVRPLLAENLSMIKEMTGNSSDIVIRKLKTGAGEKIEIAVVYVGGITDEKAIHDFLLESIMNSEELAEKEYGREVLETIAGDAVALGGVEKEKRLDKVLESLMAGNTIILAEETAEAVITTTKGGEKRSIKEPENQQAFRGSREGFIEALDTNISLVRRIIKNPNLWVEKTTMGSVTKTDVAIMYINGICDPKTVKEVKKRMESIEIDSILESGYIEQFIEDTVFTTFPTVYHTERPDMVAGNLLEGRIAIFVDGTPFVLLVPAVFIQFFQSVEDYYSRFDIATFIRFLRVLIFFISLIAPAVYVGATTFHKEMIPTELLVVIAAQREIVPFPAVVEAMIMEISFEILREAGIRLPKAIGSAVSIVGAIVIGQAAVQAGIVSPAMVIIVAITAISSFATPSFSMGISARLVRFFFILAAATTGFYGIILGLIIMFVHLCSLRSFGVPYMTPLAPFILKNWGDAIVRLPWWTHEKRPELIGNDNKVRQGEYQKPEPPDSGDMKTKQEDGDPNETNR

SEQ ID NO: 5420 - protein, 407 aa, Bacillus licheniformis
MKRIVKIVLLLAAIVLLQGCWDKRELTDLLLITAIGIDKGKDTDYELSYQIVNPINVTGGLQGGQGGDRPPISSYSVTGNNLTEMSRHASAKMSREIYYSHTNLVVVDEKLAKEEGLIKILDVLDRDTDFRTTATIIISRGQKAKTFIRTLTPIDKIPSNKVNKTLQFTEEHLGEHMKTSVQDVIKCLTSKAKHPIISSFKVTGNKEKGEKMENVQSTSPEAIVEADGLAVIKEGKLVNWLEGKTARGVLWLRNKISRTYLTIPMNHERDAVTFDVIRQKTKIGSHLKNGKPAISVDVAMEGDIGETTVPIHLDDPKVLSDIERKVAKELKNELQNTIDIVKRNKTDVLQFGDVVYRTHPEVWKKMEGEWSNRYFPDTDVDITVNAYVRRTGLRNNPNILNHHEGRS

SEQ ID NO: 5421 - protein, 368 aa, Bacillus licheniformis
MEKAKISAAQLFVLIVLFELSSSLLIFPGQSAEQDAWIAILFGTVGGLALFMMHHFFYQVNPDASPYETLMNIFGKPVGWSMTFIYIVYYCYIAARVLRDFGEMLLTSAYPNTPIIFANGLLIAVCIFTVRKGIEVLARSGELLFGIMFWLAVTGLILIVSSGLIKPKELLPILGNGPGPMFHAVFTQTLYFPFGEIIAFTLILPYLKEKKLAKKAGLLGIAISGLILAFNVALNISVLGVDLNMRSRFPLLSTIQTIQVAEFLDRLDVFFMLVLVIGGFFKMSIFMYAVTEGVTVLFKLKNPSKVVHVIGIIILILSVSIASNISEHVKEGIEFVPLYVHLPMQVILPAFICIVTYVKMKKNKKKAM

SEQ ID NO: 5422 - protein, 242 aa, Bacillus licheniformis
MLYTVKEVARLANITIKTLYHYHKIGLLCPAEVTDAGYRLYGVKELERLQHILFYRELEFPLKAIKQILDGKADRLTILSEQKRLFTARLDRIKQLISTIDLSIQQAGKGEAMDQSSMFKGFSSSREWEDALAEQNRYLKEAYDVDLLKGEPVIAEEMNEKAEEAARFMNGMAEALRDGVKHDHEQVKTAIKRHLKFLGITPDDFQSQTRFFIEDDFHRGMLENQQTGLSYYLAAAAEAFAS

SEQ ID NO: 5423 - protein, 227 aa, Bacillus licheniformis
MGSILEFQNVGYWYKNQDQPLFEDISIQFSQGLLYTIVGTSGSGKTTFLSLAGGLDAPKEGNILYKGENISKIGLTSFRNQYVSIVFQSYNLLPYMTALQNITSAMEITGSQVKNKEQYALEMLEKVGIGEKQARQKVLTLSGGQQQRVSIIRAFCCDTDLIVADEPTGNLDEDTSKDIVRLFQNLAHQENKCVIMVTHDEQIAKVSDVNITLSRGGFTVKKRISAG

SEQ ID NO: 5424 - protein, 479 aa, Bacillus licheniformis
MNFFKRAFWSMKAKKGKTLLQLFVFTMICVLVLTGITIQSAAVKSSELAREQLGGSVTLKVDREKMMKEQQDSGDRKRFESTPVSLKSAEKLASLYHVKSYNFISSTSALADNFDPIESGDEDSTDSNSDQPAGSGGNEQGGRQMMQADVSIEGVTSTALVDEFADGTSKITEGRALTKDDVNEKVAVIEETLAEENELKVGDTIKVKASSDEDATINLKIVGIYKTTSSGDNQAQNFAFLNPYNKIYTPYTAASALKGDDYQNAIDEAVYNMDDASNIDAFIAAAKKTGIDLDTFTLDANDQLYQQMVGPIENVASFSKNVVYLVTVAGAVILGLIVMMSIRERKYEMGVLMAIGEKRRKLIGQFLTEILMIAVLAIGISALTGSLIAKQIGNQLLSQQIEQTSASQSAGGMMGPGGGGFFGQSTAQVSAIDQLDIQVSFGNLMALGGIGLLIAMFATLLPSISVLRLHPKTILTKQE

SEQ ID NO: 5425 - protein, 172 aa, Bacillus licheniformis
MKILMIEDNLSVCTMTEMFFAKEGFETEFVHDGLEGYNRFKSGDWDLLIIDIMLPSIDGVTICKKVREESTVPIIMLTAKDTESDQVLGFELGADDYVTKPFSPLALVARIKAVSRRYQNAGRQDSADSDTLETEHFKINKKTREVFLDGVQIQNLTPKEFDLLYYLVQSPK

SEQ ID NO: 5426 - protein, 475 aa, Bacillus licheniformis
MKIKYLYQLLASHISILVLAFLITGALFSHFAKDFAYESKVDELSSYGYRIMGEMEMRPKGAPAIMKPFEEILRSRKISFFLFNEKKEILMTPADLRPRKLLLSDEEWKELKDGKAVVVKTDFNRFNEEVSVVALPNIVNNEFQGGILLTAPISGTEEMISDMNRFMLFTAAGVILVAILLSWLTSKFHVARIQKLRDATKKVAAGDYDIHIENRNKDEIGDLGDDFNIMARKLKSSSEEIDRLEKRRRQFITDVSHELKTPLTTISGLVEGMNSQTIPEDQQDKCMKLITEETKRLIRLVNENLDYEKIRSNQITLQKLHYPLIEVFEIIKEQLALQAEERQNQLILDVEDHVMVNADYDRLIQILVNITKNSIQFTMNGTVWLRGREDYKETVIEVEDTGIGIDENDIENIWDRFYKADLSRTNTPYGEYGLGLSIVRQLVSLHNGTVEIESEKNKGTKFIIRLPLTARDDDE

SEQ ID NO: 5427 - protein, 299 aa, Bacillus licheniformis
MNLLRNIKIRSKLFVIIIISALALSIVGIQGVGGLSKLSKGSEMIYQDQLIPNQLFARLKANNLDLDTYKFELMVTKDNDRNDTLQKNIKEKNEENNTLMEKIDQLKLMDNVSEKYESFKSEYKKLQDISSEMLSLAVKNENDKAYDVYLKEMDPQRETVNQLIEDIQTLNADNAKTIYQRDSKEAGSIITLLIIVIAASLVLSISIGLLMTRLITKPIKDIQALFAETEQGDFTVKGTYQSKDELGLLTASFNKMVAGVRSIIETVGETSHQVASSSQELSASADESTKAQRRSRSLR

SEQ ID NO: 5428 - protein, 56 aa, Bacillus licheniformis
MVFSHQFIYFTYRLSKRFCESIYGRYFKGRGYFLTTKKPHKKGVFLNENFCEKFLV

SEQ ID NO: 5429 - protein, 453 aa, Bacillus licheniformis
MKVVKFGGSSLASGAQLEKVFQIVTSDPERRAVVVSAPGKRHPEDTKVTDLLIECAQQYLLSKEATGLVEAIVGRYADIALELGLADDVINRIRADLLQLLEGDKTNPERFIDAIKASGEDNNAKLVAAYFRHRGVEAHYVSPKDAGLFVTSEPGNAQVLPESYDNLFQLRQQKGIIIFPGFFGFSQEGEVMTFSRSGSDITGSILANGLKAELYENFTDVDAVYSVNPAIVSNPKEIRELTYREMRELSYAGFSVFHDEALIPAFRARIPVQIKNTNNPDAEGTRVVATRDNTNGPVVGIAGDSGFCSIYISKYLMNREIGFGRRVLQILEDEELTYEHIPSGIDDITIILRQNQMDQAAEKRMIKRIKEELDADEVAIEHNIALIMVVGEAMRHNVGTTARASKALSEAGVNIEMINQGSSEVSMMFGVKEAQEKQAVRALYQEFFAKVLV

SEQ ID NO: 5430 - protein, 317 aa, Bacillus licheniformis
MKLRYLLLMLIILSFSSIFIGVKELSPLDLFRFNEDEIQTLYISRIPRLISIVLAGMSLSICGLIMQQLTRNKFVSPTTAGTMDWARLGVIIAIVLFSSAGIVVKILFAFVFALFGSFLFVKILDRIKFKDAIFIPLVGMMLGSVVSAIYTFMAYQYNIIQNVNAWFEGNFSLVMKGRYEFLFLSIPLVIIAYLFANKFTLAGMGESFSINLGLKYKRVVNIGLIIVSIISSVVILTIGTLPFLGLIIPNIVSIYRGDHLKNSLPHTAVLGAVFVLFCDIAGRLVIYPYEISVGLMVGIIGSGVFLYLLLRRKAYAS

SEQ ID NO: 5431 - protein, 314 aa, Bacillus licheniformis
MRHKQKMLVLIVIAAVCIGLFLFYGLPSVWEYALPRRFAKVFAIIIVGTAIAYSSMIFQMITNNRILTPSILGLDSLYVLLQTGIIFFFGAAKLADLGKNGNFLLSTGLMVCFSFVLFFLMFRRGGRHIFLLLLVGIVFGTLFRSLSSFMQMLIDPNEFQVVQNKMFASFNNLNTDILVLASLVILAILVYAWRFNPYFDVISLGRDQAVNLGIDYDRTVKKMLIVVAVLVSVSTALVGPITFLGLLVVNVAREVFKTYKHSVLIPGAVLFSIIALVGGQFIVEKLFGLTVTLVVIIDFIGGIYFIYLLLKERK

SEQ ID NO: 5432 - protein, 252 aa, Bacillus licheniformis
MIEVRDIMKQFGEQTVVHPTTLTIQKGMITSFIGPNGAGKSTLLSIISRLIGMDAGKVLIDGKEIGAYKSNDLAKKISILKQSNQINIRLTVRELVSFGRFPYSQGRLSKEDWAYVDEAIDYMKLRDIEHKHLDQLSGGQCQRAFIAMVIAQDTDYILLDEPLNNLDMKHSVEIMKLLKDLVENRGKTIVIVIHDINFASVYSDRIAALKNGRIVKEGPAEDIIQTPVLKDIYDMDIPIQQIGDQKICVYFK

SEQ ID NO: 5433 - protein, 315 aa, Bacillus licheniformis
LKKLSLLIMALITVLVVAACGNKAADTDAKSSSKKETVTIKHNSDTTDVPKNPKKVVVFNFGMLDTLDELGLSDRVVGLPKQTLPSYLKKYKDSKFESVGGLKEPDFEKIAELEPDLIIIEGRQSEQYDEFKKIAPTIDIELDQKNYMNSFKENTENIGKIFGKEDAVKEALAKIDEKVEKANKLAKEKGGKGLVVLTSDKQISAYGSGSRFGLIHDVLGVEPVDKNIEVSLHGQSVSSEYISEKNPDYLFVIDRSAAIGEKGTAKEVIENEIVKSTKAYKNGHITYLDPGYWYLSGGGLESVSEMVKEVENGLK

SEQ ID NO: 5434 - protein, 474 aa, Bacillus licheniformis
MSTGTEQQTYNRNIIVGLLIAGAFIAILNQTLLVTALPHIMADLNIDATKAQWLTTAFMLTNGILIPITAAFLIEKFSSRALVIAAMSIFAAGTVVGAVAPNFPVLLAARIIQAAGAGIMMPLMQTIFLTIFPVEKRGAAMGMVGLVIAFAPAIGPTLSGWIVDSFTWRYLFYIILPIALIDLVLVILLMKNVTKLRETSVDIISIILSSLGFGGLLYGFSNAGSEGWGSNTVLISFAVGAVALFFFISRQLKIKRPILEFRVFQSWTFTITTLLGMIVFALMIGTETILPLYTQNVRDVTAFDSGLMLLPGAIAMGIMSPIIGRIFDKIGGKGLAIIGFAVLLLTSIPFADLQMDTSLTFIIVIYTLRMMGTSMIMMPLTTAGINALPAHLIPHGTAMNNTMRQIGGSIGTAVLISVMSNSAKNAATSHPLNALIHGMNSAFIVAAVLALIGFILSFTLKKKPQADKQGQPAR

SEQ ID NO: 5435 - protein, 295 aa, Bacillus licheniformis
MNEKKAAVLRAAKKLFAQKGYHNVAMQAIAEECKMSKASIYKLFQSKEDLLLALIKFRKHEMLNKSAVINTETSLTPKERFAKKIALEITEFRENRQFINFISNEGSSPDTAVFKKHLKETKSMIISWHKDSIIQAYGEEVEPFIWDIVIIFHGLMREFLFLVGTGKAQPDVKTIPPFIMSVLDLFIEKKLNEDQKSSLNEDIIASYSNFSSCWAPPKKEELLEDLLQKLKTKISSLSQDDFAVTELLSAADLLSEELFSKEPRTYLIKALLDYLGKIEAIQYDVSQIQTISIKE

SEQ ID NO: 5436 - protein, 280 aa, Bacillus licheniformis
MKSFAKYQTFLDLHHQSDPFVLPNAWDAASAKAFQNCGFKAVGTTSAGIAMSLGYPDGEHLPFETLLSVLKTITDAVDIPVSADLEAGYGQTPETVAENAKKAAAAGVVGINIEDGTKEPCRPLCDETLMEEKITAVKKLNLPVLINARTDVYWLNADAPGSRLQAAVRRQIGYSQAGADCIFIPGADDAGTIAGLRKGISGPINVLAGSHTPSLQILSELGIERISCGSAPFRAALSLVKKIGEDIIRRGAFNRMTDGVLSYGEAADWISLHRDPKQNR

SEQ ID NO: 5437 - protein, 245 aa, Bacillus licheniformis
MNEVLKTLKDHRSIRSYTDEPVSPEQLDDIIQAVQAAPNSINGQQVTVITVQDEERKKKIAELAGGQVWIEQAPVFLLFCADFNRAKIALEKNGETLAITDGMESVLVGAVDAGIALGTATAAAESMGLGTVPIGAVRGRAEELIKLLNIPEYVFPVAGLVVGHPADRSAKKPRLPEQAVRHSETYQPDLKPLIDAYDEEISEYMTKRTNGQETRNWSQGISAYYNKVYYPHIREMLEKQGFKLE

SEQ ID NO: 5438 - protein, 95 aa, Bacillus licheniformis
MIVLQAYMKVKPEKRDAFLESVQPLLKHSRAEAGNAQYQLFEDTEHANTFVMLEQWKDQDALDAHNQTEHFQAFVQAAGDLLSEPLNVVKTHTTD

SEQ ID NO: 5439 - protein, 98 aa, Bacillus licheniformis
MKTNEMKLTAVLQALSDPYRLEIVKALADTAEKTCGTCTNLNIAKSTLSHHFKVLREAGLLKVRIEGKHHYYSLCKRELEEQFPGLIEAVLKVEKERW

SEQ ID NO: 5440 - protein, 476 aa, Bacillus licheniformis
MITIPIDRSKGAEYIYHQIYQRIKEEIFSRNLLPGKKLPSKRELAETLNVSINSVNAAYQQLLAEGYLYSRERKGFFVEQIETFHASRHPGPLQLEKELVEEPESKDGWISFSHMSVDTAHFPFKTWLRCEQKAVSSHVDELGEMTHPQGVYEVRQTIARFIALTRGVKCLPEQIVISAGTQSLIHTLQDLLPASAVYAMEEPGYSRIYRLLKNEGKEVATIQLDHKGMRISEIHRLNPDVLFVTPSHQFPTGIIMPVSRRIQLLNWVSDGANRYIVEDDYDSEFKYGSDTIPALQSLDRSEKVIYIGTFSKSLLPGLRISYMVLPQKLLKRYRKRHHFSIQSSSVLTQLALQELIESGEYQKHIKKMNQIYEKKRTRLIGSLVKHFNGRVKIKGESAGLHFVADFETDRSEEEVLLRAKERRVEVYGMSRFTLKKEQTKHEGTVSLVLGFAKIAADQIDEGTAKLYEAVCGDEKL

SEQ ID NO: 5441 - protein, 437 aa, Bacillus licheniformis
MSRNTKAFTTEDWQAKRDQFVARGVSNGNRHLAAKGEGAVLYDIDGRRFIDFAGAIGTLNVGHSHPKVVEAVKRQSEQLIHPGFNVMMYPAYLELAEKLCRLAPGAHEKKAIFLNSGAEAVENAVKIARKYTKRQAVVSFTRGFHGRTNMTMSMTSKVKPYKFGFGPFAPEVYQAPFPYYYRKPEGMTDESYDDMVIQAFDDFFVSSVAPETVACVVMEPVQGEGGFIIPSKRFVQHVAAFCQKHGIVFVADEIQTGFARTGKYFAIEHFDVVPDLVTVSKSLAAGVPLSGVIGRAEMLDAADPGELGGTYAGSPLGCVAALAVLDIIESEQLNKRSEEIGKAIEERALEWKMKYPQIGEVRRLGAMAAIEIVRDEKTREPDKAAAAKIAKYANEHGLLLLTAGITGNIIRFLSPLVITDELLEEGFGIIEEALEQL

SEQ ID NO: 5442 - protein, 463 aa, Bacillus licheniformis
MGKQQMKKTMSQTDVLFLAIGAMLGWGWVVLSGDWISTAGFLGSTIAFIIGGILVILIGLTYAELSSAIPETGGGLIFVYRAFGRKTAFVAAWGVLFGYVSVITFEAVALPTVIDYVLPVEHQGFLWSLSGWDVYVTWVLIGSGGAVVLTALNYFGVKPAAIFQSVFTIAIIATGFLLLGGALVNGDFEHVQPLFKDGFSGMMSVLVMIPFLFVGFDVIPQVAAEINAPKKIIGKILIISIISAVVFYLLIVFGVTMGLSESELATTSLATADAMVNLLGNQLFGTVLVLGGVAGIITSWNAFIIGASRILFAMSEKGMVPKWFGFIHPKYKTPTNAILFLGALAFFAPLLGRPALVWIVNAGGTGIIVGYLIVSIAFMKLRKTEPDLHRPYKINKWKTTGISAILLSVIFLAFYLPGMPAALTWPYEWLILAGWTLIGFLLYNSSSKRKGEEIQHDQHARSI

SEQ ID NO: 5443 - protein, 464 aa, Bacillus licheniformis
MTSMLEVYNPATGEKIKSVPQQSAKEVEEAVVRSHEAFQKWSKTSAAERAGLLKKWFDLIVEQKDELAKLITLENGKPYAEAQGEVLYSAGYIEWYAEEAKRIYGRTVPASVTNKRIIVTRQGVGPVAAITPWNFPAAMITRKAGPALAAGCTFIIKPAPDTPLTALELVRLGHEAGIPKDVLQCVIGDGQEIGSIFTSHPLIRKITFTGSTPVGKHLMKNSAETVKHVSMELGGHAPLIVDEDANIDLAVKQTMLSKYRNAGQTCVCANRLIVHESVKDEFAEKLRAEVAKLKVGNGLEEGVSIGPIINKNGFQKIVDQINDAVNKGAKVLIGAEYESDDEKSCYFVHPTVLTDVDPSMTIMHEETFGPVAPITSFKTLDEAVKLANDTPYGLAAYFFTENYRRGIYLSENLDYGILGWNDGGPSTVQAPFGGMKESGIGREGGLEGIEPYLETKYLSIGLDE

SEQ ID NO: 5444 - protein, 350 aa, Bacillus licheniformis
MKVSVLFVLLAAILWGTTGTTQAFAPKEAAPLVFGAVRMAVGGITLLLFAAFRGQLKRSGWPVKTLIIAALSMAFYQPFFFSAVSLSGIAVGTVVAIGSAPIIAGCLEWLVFKKVPQTKWWIATAAAIAGVALLFIPSASSGGSFLGILLALGAGLSFAVYTLTSKKLLQKQKPEAVTGTVFFLSAVLLAPLLFLYDLGWISSVQGMAVSLYIGVIATGAAYLLFTTGLAKVPASTAVTLSLAEPLTASLLGTVLVRESLPLVSWAGIALLLLGIFYISYQPKKDKINAEQMKDVKKTRPGDIRAGFHVVLLFIQTDGQIFCFQIRLDAFQSAFASDTAFLHAAERRLNG

SEQ ID NO: 5445 - protein, 74 aa, Bacillus licheniformis
MPPTAILTAPNTRGAASFGANAWVVPVVPHKIAASKTNRTDTFILTISPYSIIQNFFYCKISLRIFESPLRKFP

SEQ ID NO: 5446 - protein, 163 aa, Bacillus licheniformis
MKKRTVLFFLLIWLAGCASAQEAEEQTKWVNSEQKAIENGIRYESITKDDIIDKIDLNGEQVVVFRFGDSEGEGIGLAHIKRENGNYQWYRDLNYAIVKSDHPKTENAEASAPFTTPKGRKYTLYTGDADRLNGTFETDDGLHLEPVVDQKTGMYYQIVQDSD

SEQ ID NO: 5447 - protein, 214 aa, Bacillus licheniformis
MLKKTLWMGAILASFLLFSVPVSAHVTVKPTESAAGSWETYTVKVPVEKDNATIKVVLSMPDGVEFQQYEPVPGWKTSTETGKNEKVTRVTWEAENGGIQPGEFQQFTFTAKNPDKEQKAAWNAYQYYKDGTIVEWTGDDDADTPHAITSIVDAAKLGHETVDAHGASTKQNAAAENEDSQGGQGIQTASLILSILAVLLGGAALLLTVRKKKS

SEQ ID NO: 5448 - protein, 545 aa, Bacillus licheniformis
MKRATLWAVLAVLCTILLPKAAFAHAYIVQSTPAENQELKKAPEEIKIEFNEAIQNGFHSITVRNSSGERVDSGKTEIDPQNAKIMTVKLKPKLKDDIYSAEWRAVSADGHPVSGTIPFSIGNIQGGLPKDQQNQASGLPAADIVIERVLLYTGFSLFMGAALFQLVWHRPENGWPGDKKRRLKRITNVALLLTGAAIIIQLPLQTKTNAGVSWIGAFQPSLLKETLLNTTGGTLWLINIAIIALLVFSSNRKGLKSAILSLFLFAGLLFVKSLDGHAASTSAGYMTIAMNFIHLNAASIWTGGLAMFVLFFGKDWLKPDKSLIWETIRRFSPWALASAGLLIFSGLFNSFFIVHTLDNLFGTAYGKALLVKSALVLLMIGLGAFHYFRFRKAPKQQGGRSMKAEWAVGLLILLTTAVFTNIPSPPAPLPQPFSETKQLTEGNTLSLRISPNMPGSNTFEVTVRNRKGDVVKDIQKIELTVEKTGLFGDDKESTFSLSKNKDGVFQTKNLNLSEDGIWKIRVHGLTASFEEIRTVFNAKINKKEF

SEQ ID NO: 5449 - protein, 190 aa, Bacillus licheniformis
MLPIKRREQILAWIKEEESLRISEISKRLNVSEMTVYRDIKPLVENGQVIKTAGGITLNKPKQQLGQLCVVCGKGAGSRLAVQIVKNDSQIEQFCCAHCAMLRYEKVKDDVSQIICRDFLLDTTISAKAAVFLLDTDLHLNCCEPHALPFASEAEARKFKKGFGGQLLSFDDAALLVQKTMKNSCCSLKT

SEQ ID NO: 5450 - protein, 57 aa, Bacillus licheniformis
LKEKKQAERDKKCDEMLNFNIAAKAVESSSMGTGQTVLFLKFFVRKCNRFARFSDAM

SEQ ID NO: 5451 - protein, 764 aa, Bacillus licheniformis
MGKQRLVLIGNGMAGVRTAEEILLHGGSRFEIVIIGSEPHPGYNRILLSSVLQGETDWNDVMTKSRSWYEENGITLYTGETAVAIDTVNQTVATDQNREIAYDKLIIATGSSPFILPVHGADKEGVYGFRTIDDCRAFINASKRFKKAAVIGGGILGLEAARGLANLGMKVDVVHHSSSIMQTQLDPPASAMLQKELERQGIHFLLEKDTEAILGTSRAEGVRFKDGTKISADLIVMAAGVRPNIELAKASGISTNRAIIVSDYMETNVPNVYSVGECAEHNGTVYGLVKPLYEQGKVLAKHICGLECSGYQGSVQSAALKMSGIDVFSAGKITEDDSTTAIKLLDEAAGVYKKAVFQGDKMAGVILYGDTSGSQRLLESIIKQRDITVVKKELFQSEEDSSVASMAVRETICQCNAVSKGMIMEAIQTHGLKTAEEVKRCTKASGSCGGCRPLVEELLLHTAEQDNHISAAEQPMCACTSFTEDEVVNEIQMRNLSSVHEVISALGWKNSSGCRICVPALHYYLKMIRPDIAYEEHEEETDAIIPQMYGGRTNAEELKRIAGVIEKYQIQEVYMTHHQRLKLAGIKPEHIERVKEELGMPYCPPQQQRIAAVKTCPCGSPQIQTLAADLEKAAESLLIPAKVSIGVSGCLDDCVYASVHDIGLLKVNGGWEIYAGGQGGQHASPGELLSVADSAEEAGELMKGLLQYYRETANYLEKIGHWIERAGIIHIREVLFDNGLRGQLIERLEKEKRLAQQETIKGLM

SEQ ID NO: 5452 - protein, 719 aa, Bacillus licheniformis
MTERLLKYFRTKQKEVQSEKTYDTQCPFCSMQCKMQLIEQTIVTRKKYTAVGKDNPTTKGRLCMKGMNAHQHAFHSERITHPLIKKNGEFVRVSWEEALQYIKEQVTAIQHEDGRDALSVYGSASITNEEAYLLGKFARVALKTKHIDYNGRLCMSAAATAANQTFGMDRGLTNALSEIPHARVIILAGTNIAECQPTIMPYFEEAKQNGAYIIVIDPRETATAKIADLHLKIKPGTDAALANGMLKIIIEEQLTDGAFIRDRAEGFEEVKRHVASLSLEDISAKTGIQIEQIKKAAVKFAREETGMLFTARGVEQQTDGTAAARNLLNILISTGKIGKFACGYGAVTGQGNGQGAREHGQKADQLPGYRSIENEADRAYIADVWGIKAEDLPGKGVSAYEMMKKVHKGEITGMFLMCSNPVVSSPNAGFVKSALGKLKFFAAVDLFLSETAILADVVLPASSYLEDEGTMTNLEGRVTLREASKPCPGEARHDWQIICDIAKALGKGRYFSYRSAEDVFNELRKASRGGIADYSGITYERLRKEGGILWPCPEEGHPGTQRLFESSFSHPDKKARMCVVPNEPKVKKDVPTEEYPLILTTGRVMSHYLTGVQTRRSAALKARHFESFMEIHPKTAEKYNIGDRVLVRVESKRGSIIVRSKWSEAIRPDTVFVPMHWADSQNVNDLIAETLDPSCSMPGFKVCSVKIRPSVDNFVNKLS

SEQ ID NO: 5453 - protein, 806 aa, Bacillus licheniformis
VKKKQLVLVGNGMAGVRAIEEILKISNEEFQITIFGSEPHPNYNRILLSKVLQGDTDVKDITLNDWDWYEENGIQLYTGEEVVKVDPESKTVITDTGRVQPYDELILATGSLPFILPLPGADKEGVTAFRDIKDTDIMLEASKTYKKAAVIGGGLLGLEAARGLLNLGMDVTVVHLAPYLMERQLDAAAGRLLQKELEKQGMKFLLEKQTEEIYGETRVEGLKFKDGSTLEADLVVMAVGIKPNVQLGKDCGLPVNRGIVVNDYMETEVPNIYAVGECAEHRGIAYGLVAPLYEQAKVLAKKICGVETAPYEGSVLSTQLKVSGVEVFSAGDFNEDDGEDKKALKVFDEQDGIYKKIVLRGNQVIGAVLFGDSSEGNRLFSMIQKGADISDTSKISILQPLNQEEGMSLTAAMSDDEIVCGCNGVSKGMIIQAIKEQGCTSTDEIKACTGASRSCGGCKPLVAEILQHTLGSEFDASAQKEAICGCTDLSRDELVAEIREKGLTHTKEVMNVLGWKTAEGCSKCRPALNYYLGMINPKEYEDERESRFVNERMHANIQKDGTYSVVPRMYGGVTNSNDLRRIADVVDKYEIPLVKMTGGQRIDLIGVKKEDLPKVWADLDMPSGFAYGKTLRTVKTCVGEQFCRFGTQDSMALGIDLEKKFEGLYTPHKIKMAVSACPRNCAESGIKDIGVVGIDGGWEIYVGGNGGTHLRAGDLLMKVKTAEEVIEITGAYLQYYRETANYLERTSAWIERVGLSHVQSVLNDKEKRKELNDRINQALSVHKDPWKDFLEDGKTTRQLFENVVTS

SEQ ID NO: 5454 - protein, 106 aa, Bacillus licheniformis
MVNKNLTKVFVSKIGDLPNQLGKTVFIKDKEIAVFKLSNGSVRAIENRCPHKGGVLAEGMVSGEFVFCPMHDWKISLEDGKVQEPDTGCVQTYETVVEGEDLYIVY

SEQ ID NO: 5455 - protein, 486 aa, Bacillus licheniformis
MGNGKVYFVGAGPGDSGLITLKGRTLIEAADVILYDRLVNSRLLEHAKASCEFVYCGKLPDRHYMRQSEINALLIEKGLKGLKVVRLKGGDPSVFGRVGEEAAAVSEHGIPYEMVPGITSGIAAPLYAGLPVTHRDFASSFAVVTAHDKSGKPEMNWEGLAKGVQTLVFYMGIKNLGYICEQLMKHGKSPLVPAMAIQWGTWGRQRSVKGTLQNIREKITEHQIKNPAIIVIGDIVSFRQNSWFEEKPLIGLNIMAVKSCEEEQIPVEALREQGAEVVEWPKWKSAETVPDDALLGRIACFDSLLFTSSASLRRFFSRLAALKIDVREMRGRLYASDQHVKAALEERGFEAFLQTEMPVSGSCLLIGSREAVQNYPHSGCEVLITHDRVIDSRFTSIIKREIDEFPIDIVLFSNRTCVELFVNEAETVGLHPEKTAARLQAFCLTEEAGERAAAVGFQRVHAVNDRDRLPDVIKEINRTAEFVCQS

SEQ ID NO: 5456 - protein, 37 aa, Bacillus licheniformis
MSSKRSTEQPNLSVRAEKSRGNPAFLACGTASEQHLF

SEQ ID NO: 5457 - protein, 226 aa, Bacillus licheniformis
VKFSIQRAVSYHDQVHHYLKDMIIKGGYQPGERIYESKIAKELQVSRSPVREAIRTLEQEGLLLIDDKSKITVYEPTIKDLEEIYQCRQALESLAVSLATRLASNETLELISETLSEAHKHQKSQGPESANALLRLNTQFHDAIIEASENERLQKQLLDLRSLTFFYRSKNLEKPERTLEIINQHEEILRHMQDRNDAKAAESMRKHIEADLCYLKEVLFRSSAAR

SEQ ID NO: 5458 - protein, 546 aa, Bacillus licheniformis
MKSSVVSAWDMLWRSHREAKRLLLFAMPVRAGKDAGLKINSEQTMKEEKPPSYKTPQKIGLLLGPALFFAVLLFFFPEGLSYEGRMVLATTLWVAVWWITEAVPIPAASLLPIVLLPLTGALEGAAVTSSYGDPIVFLFLGGFLIALAMERWNLHKRIALNIISVVGTSTSRIVLGFMAATGFLSMWVSNTAAVMMMLPIGTAIIHQVSAVIKSERKDLAAEEAKFSKALIFSIGYAGTIGGLGTLIGTPPNIILAANIKKLYGVEVSFGGWMAFAVPVVVILLVAVWLYLTKVAHPIKMKELPGGKELILEEKRKLGKMSFEETMVLLVFGFAAFMWVTRTFLWDDKIPGIDDTMIAIFAASLLFLIPSLNKGGRVLDWSVSKDLPWGILLLFGGGLALATGFKETGLAEWIGGRLTVLDGFNFVVIVIISTALVLFLTEITSNTATATMILPVLASLALALNVHPYALMVPAAMAANCAFMLPVGTPPNAIIFASGKLKISEMVRTGFVINIFTLILIVGAVFYILPHLWGVDLTVFPDNLKSN

SEQ ID NO: 5459 - protein, 51 aa, Bacillus licheniformis
MNNPVLPHRYPFLFIDCVVESEPGKWVKGYKFITENDWFITENQKEMPFSS

SEQ ID NO: 5460 - protein, 155 aa, Bacillus licheniformis
LIEIKPVAFVENLRTFPKDDHWGDVISEIKLAEGIHPDALKGIEEFSHLDIIFYFHQVKEEHIQYKARRPRNNKNYPETGIFAQRGKNRPNRLGATVVTLLEKSGSKLVVKGLDAIDGTPVIDIKPVMKEFLPKGQIIQPKWSEDLMKVYWHAAD

SEQ ID NO: 5461 - protein, 683 aa, Bacillus licheniformis
MINEKRPAQLLQYLLRVREATMHQLIDHFQLSKRQICYDLDKINHWLTGKQLPEIEYKRKNRLAVPETLLELRFSEACSDIGRSFIFTQEERIKALYMFLFVRREPISSAHLTQLLQVSKNTVMNDVKKANEALTPFLVAIKYTRQRGYHLIGSEFDKRVPVMHHLSSFLQKPYGKEILHYILKISGSRDHKQQEFKRAVELVSKEYGLQLVEERLNEFIYFLMMYSIRVAEGKIVRFHQEEGELLKQSPLKNAAVRLVNELRIPVHETELCYILIQLLGLSFGQQPAHDPLYQLCEKLVFEFESRACITFPRRREVAESLYRHLKPAYFRMKYRIPIHNPLLSKIKKEHKELFTIVQKLMRHLEALLNKPVPEEEIGFITIHFGALLEQPVQSGSSKKTAVVVCPSGVSSSLMVRRQLESLFSEIVVEKAMSLQEFTPDVFDHYDAVFSTVELKTKKRYYMVRPLMTPAEKSRLVNEVYQEMFGVKQRELLTDEFLHILKKHASIIDEKGLRESLKNIAFVQKVTETRGKRPVLKDLLTDETIQMAEQIKGWEEAIQTAAKPLLDKEVILKEYTDAMIDNVKTMGPYMIIGPEIAIPHARPEKGVQKVGMSLLKLKEPVYFLDDEQYPVRLLFCIAAVDHTTHLKALSQLTRLLSNKENQDSLKETESLEHIKRLIEAYSSN

SEQ ID NO: 5462 - protein, 93 aa, Bacillus licheniformis
MKILAVCGSGLGSSFMLEMNIKDILQEMGLMEIEVDHSDLSSASPDQADLFIVAKDIAEGAAHLRDIVVLESIIDMDELKTKLVKTLQEKGVL

SEQ ID NO: 5463 - protein, 63 aa, Bacillus licheniformis
MGERALKLMMDVLSQPAVLIAAISLIGLLLQKKPANEIVKGDDQIVFRLYRDFSRGGHPCWLA

SEQ ID NO: 5464 - protein, 280 aa, Bacillus licheniformis
MSVREIDMERFRDQIRLLTLKQLHHLGFGHYGGSLSIADVLAVLYGKVMKIDPANPSWEDRDFFILSKGHGGPALYAALHLSGYFEEDVLYTLNQNGTALPSHPDRNLTPGVDMTTGSLGQGISAAAGVALSHKLSGRANRTFVIVGDGELNEGQCWEAIQFAAHHKLRNLYVFVDDNKQQLDGPTKEIIDPLDFVSKFRAFGFYSERVNGHEPEAIYRAVKRGEAQRERPVAVILDTVKGKGIPYFEKMENSHHIRANEEQNRMIERIILTLEEKEVRA

SEQ ID NO: 5465 - protein, 316 aa, Bacillus licheniformis
MNEAANVELDAVEMRQAYSSAVYELAQENTDIVALEADLMSSISMDKVKRRIPEQVINCGVMEANMIGIAAGLSLTGRIPFVHTFAQFATRRCFDQLFVSGAYAKTNIKILGSDSGITAEHNGGTHMAFEDLGLARLIPNAFVYEASDAAMLKFLIKKAAAEYGIHYIRTIRKKAVRLYDEHETFTDGKAKVLKDGSDAALFASGIMVAEALQAAELLKEKGIDAAVIDMYCIKPIDQETVVRYAQKTNAIVTAENHNVIGGLGSAVAEVLSEHYPAPLKRIGVHEAFGQVGTIDYLKKSYRLTAEHIALAAEQLV

SEQ ID NO: 5466 - protein, 251 aa, Bacillus licheniformis
VSVSQRNRIDVKLVALDMDGTLLNDEQTISDENRKAIKEAEEKGVYVVLSTGRTLMTCRELAESLELSSFLITANGSEIWDSSFNLVERQLLHPDHVQMMWDLRNLHNTDFWAASVDKVWRGEFPEDIQAYEWLKFGFDIPDDDVRNRVLEELKKNKELEVTNSSPTNIEVNAIGINKAAALAKVCERLGFTMEHVMAVGDSLNDIAMIKEAGLGVAMGNAQEIVKETADWITDSNIEHGVAKAIRHWVLS

SEQ ID NO: 5467 - protein, 39 aa, Bacillus licheniformis
LGIVLAEKRADLRLFFLCKIKNIHGLKQAEKPCEIRFFS

SEQ ID NO: 5468 - protein, 253 aa, Bacillus licheniformis
MNQVDLNCDLGESFGAYKIGLDEEILEFVTSANIACGFHAGDPGVMRKTVKMAAEKGVKIGAHPGLPDLAGFGRRNMAITPEEAYDLVVYQIGALSGFLKAEGVTMQHVKPHGALYNMAAQSRELSDAIARAVYQTDPELILFGLAGSELVLAGERAGLKTAHEVFADRTYQEDGTLTSRRQNDALIQDDDEAVGQVIRMVKEGKVRSLQGTDVILKADTVCIHGDGAHALQFAKKIRRELRAADIKVQAFST

SEQ ID NO: 5469 - protein, 403 aa, Bacillus licheniformis
LKQNKKTKAPAGNWTLLLGAAFLMATSAIGPGFLTQTTVFTQSLAASFGFVILVSIILDIFAQTNVWRIIAVSEKRGQEIANLVLPGLGYFIAFLVVLGGLAFNIGNIGGAGLGMQVLFGISPQMGAIISAVIAILIFVIKEAGKAMDRFTLIAGFVMILLTVYVAVTTGPPVGEAITKTVMPDNIDYLAIITLVGGTVGGYITFAGGHRLLDAGVKGKDAIPEVTKSSVSGILITSVMRIALFLAVLGVVSKGMQINPDNPPASVFQHAAGNVGYKIFGLVMWSAAITSVIGAAYTSVSFFKTFSPKIEKNSRGIIIVFIIVSTLCFVTIGKPVNLLVLAGALNGLILPIALGSLLIGAHKKNVIGDYRHPIWLTIPGILVVIVMAIMGGYTLINEIPKLWG

SEQ ID NO: 5470 - protein, 262 aa, Bacillus licheniformis
LHVNEMRPDEVRALIRKGEITGPTAGMAGGFTQANLVILKKELAFEFLLFCQRNQKPCPILDVTDPGSPVPSITAPDADIRTDFPKYRVYKRGELADEVTDISSLWEDDMVGFLIGCSFTFEQALMNNGIPVRHIEEKRNVPMYQTNIPCVPAGRFQGPMVVSMRPVPEEQAVRAVQVTSRLPAVHGGPVHIGSPEAIGITDIAKPDFGDAVTIKKGEVPVFWACGVTPQAVAMHARPELMITHSPGHMLVTDVRDEQFGVL

SEQ ID NO: 5471 - protein, 244 aa, Bacillus licheniformis
LKNLSNATMSPLGDSAVIIQLGEGISEQTHRVVSALTKRIENDPFPGFIECVPAFTSVTVFYQPFEVYRKMESGKAVDSPYEKVKALLDHHLQELTMEEETDQRTVEIPVCYGGRFGPDLEEVADINGLTAQEVIDIHTSGEYLVYMIGFAPGFPYLGGMSEKIAAPRRSSPRTSIPAGSVGIAGMQTGVYPLSTPGGWQLIGNTPLELFKPYEQPPSLLRAGDIVKFVSVTEEEYHALKEGKS

SEQ ID NO: 5472 - protein, 337 aa, Bacillus licheniformis
LSIEVLKPGLMTTVQDLGRTGFQKYGVLVSGAMDADSLRIANLLAGNSQNEAALEVTLMGPGPSLRFQKPALIAVTGADFSLMVNDEEVPLWRPVFIKEGSVLTFGMCKRGSRAYMAVAGGIDVPPVMESKSTYVRAGLGGFQGRALQKGDVLSLGSPTPLSEALHRKLADEGKERGFAAPKWAVDRKYFLPLKKNPVIRVIKGDQFACFTSSSQERFFAGPFRVTAKSDRMGYRLQGEALELTQPLEMISEAVSFGTIQVPPDGNPIVLLADRQTAGGYPRIAHIASADFSQVTQMMPGEQVQFQLVSLQEAERVYIERETKISELSARLKLEYML

SEQ ID NO: 5473 - protein, 249 aa, Bacillus licheniformis
MEHKNKTVVKAMTLLNLFLTRERLSLGDMIELTGMPKTSVYRMVCSLEEMGFLDRDENGMYSLGLLFLQYGHLVSERLDIRKIALPIMEELRDDVDEAVHLIVRQGNEAMYIEKIEGTQTVRLYTAIGRRSPLYAGACARSILTFLPEEERDAYIEQTELVPIASGTIRDKAELIRIVDESYRSGCTVSHSELEDYTSAIAAPIFNHKREVAAGISIAGFEARFQKDRLPYLTERVKKAALDISRKLGF

SEQ ID NO: 5474 - protein, 212 aa, Bacillus licheniformis
MTLQYTALGDSLTVGVGAGLFEPGFVQRYKRKMEEDLNEEVSLIVFAKSGLETSEILAMLNEPFIMEQVKKADVITITGCGNDLLQSLEIYEKEKDEHVFLEASSHCQKNYSGMLEKIREIKGEKDTRYLVRLLNLYNPFPSIELADKWISGFNRHLKQLESAPQIKVIDTYAVFKGREKEYLSIDRVHPSSRGYEAMSEKLRAAGYGRLEG

SEQ ID NO: 5475 - protein, 474 aa, Bacillus licheniformis
MEDRQNQDFKVKIQRFGSYLSGMIMPNIGAFIAWGIITALFIPTGWMPNEALASLVDPMIKFLLPLLIGYTGGKMVYDHRGGVVGATAAIGVIVGADIPMFLGAMIMGPLGGYLMKLTDRLFKDKVRSGFEMLINNFTAGILGFILAVLGFLAIGPVVLGLNKTLAAGVEVIVNANLLPLASIFVEPAKVLFLNNAINHGILSPIGIEQAAQTGKSILFLLEANPGPGLGILLAYMIFGRGTSKQTAPGAAVIHFLGGIHEIYFPYILMKPLLILAAIAGGASGVLTFSIFNAGLAAVPSPGSIIAVLAMTPKGNHIGVILGVLVAAVVSFIVASLILKTSKAGEEDLTAAAEKMQQMKGKKSQAVSALTSADEAEESAAPYENVSKIIFACDAGMGSSAMGASILKNKVKKAELDIDVSNTSINNLPEDADIVITHKDLTERAKAKLPSARHISVENFLNSPKYDELINQLKK

SEQ ID NO: 5476 - protein, 379 aa, Bacillus licheniformis
MIALHFGAGNIGRGFIGALLCKSGYDVVFADVNDAVINELNDKGRYTVEMADAGRKQETIGPVRAINSATQLDELYDLIAKADLVTTAVGPAVLKLIAEPIAEGLKRRMKINKQPLNIIACENMIGGSAHLREEIFARLTETERAAISDSVGFPNSAVDRIVPIQHHDDPLKVTVEPFFEWAVDQTEFAGKVPDIEGVTYVADLAPFIERKLFTVNTGHAMAAYAGYKKGLKTIKDAIHHLEVRQTVAGALEETGRYLVQTYDFTQEEHRAYMTKIIGRFENECLSDDVTRVARSPLRKLGRDDRLVGPARKLCDLGFEPVRLAEGIALALQFDCADDPEAVQLQSMIAEKGYAGVLRDVCGLEEDHSLFKLVISHLKA

SEQ ID NO: 5477 - protein, 117 aa, Bacillus licheniformis
MYMTAREQKLMKYLLHQNRYVKVNEIAGYIEVSTRTVHRELKAVKSVLDKYRLQLDKQPGKGLKLVGAYRDKQRLLEDLSRDSHVEYSADERKLLILCAMLERESRSSFIQLPMTCR

SEQ ID NO: 5478 - protein, 289 aa, Bacillus licheniformis
MDLRNQQTNGQPAQTQDRQPGIESVMNPRPIYEDENYKGTDKLKGKVALITGGDSGIGRAVAVAYAKEGADISIVYLNEHEDAQETKARVEKEGVKCLLLPGDVRDEAFCNDAVEQTVKELGRLDILVNNAAEQHPKDSIKEISSEQLEKTFKTNFFSYFYFTKKAIDYLEPGSAIINTTSINPYRGNPQLIDYTATKGAINAFTRSMSQALVKDGIRVNAVAPGPIWTPLIPSTFSGEEVAKFGTDTPMGRPGQPVDHVGCYVLLASDDSSYMTGQTLHVNGGDFITT

SEQ ID NO: 5479 - protein, 223 aa, Bacillus licheniformis
VKVTKEDVIEYYEKAGIVLNDDDKENIQIMDYGLNKLDKLGLQLFVYVNTDRYCAKELVLFPEQTCPEHRHPPVDKQKGKEETFRCRYGKVYLYVEGEKTEAPAVMPPDEDIEHFTVWHEIQLTPGEQFTIPPDTKHWFKAGSEGAVVTEFLQQAPMITMCSQIREFSEWESISFAFFRSLHHIKADEVPSVMIGKIKLNTVHTKCFDRFLCRRSKPPNVRPV

SEQ ID NO: 5480 - protein, 127 aa, Bacillus licheniformis
VNIFISFDAEADMGYIALTERRAGSVSATDDIGDTALSADFDRHQRIIGVEFPGDEAPEIARLGTLTGRKYKLEPAYLNGTHVRRFRPTAQEAVKTLCVNGVQFYFADHDGRHFIGFDVMERAKKSE

SEQ ID NO: 5481 - protein, 140 aa, Bacillus licheniformis
MEQQQLKNKVLDILDHHKIGSLATVESGKPHSRYMTFFHDGLTLYTPTSDETHKAEEIDNNPNVHVLLGYNGEGLGDAYLEITGTAKLNHSKDLKDKIWDERLEQWFDGKDDPNLTVLEIEPSEIRLMNEGESTPVTLDM

SEQ ID NO: 5482 - protein, 37 aa, Bacillus licheniformis
MIIETASAFAGAVFDLPKRFRFKNSLTYRLEEGKWTF

SEQ ID NO: 5483 - protein, 269 aa, Bacillus licheniformis
MDFLTSKVLLIFCFLLLIHSIETLAYAARLSGARVGFIASALSLFNVMVIVSRMSNMVQQPVTGKLVDVAGADALSLVGSQFRFLIFGSTVGTIFGMLLLSTFVAVFSRAIVHLAGENGSVLQVFRKAFSKNSFKHAKHYAKRPSLEYVKDFRFRYIPKRLFVLNMVITAIYTIGVLAALYAGVLVPERHTTAVMASGLVNGVATMLLALFVDPKVSVLADDVAKGKRSYTYLKWASITMAASRVAGTIFAQVLFIPASYYIAWMTKWM

SEQ ID NO: 5484 - protein, 313 aa, Bacillus licheniformis
VERVRVRVRKPKRKRRKIIKRLFTLTLLVIIAAAGYTYFEYKKGLSESDGDFKEDGQFEFNGEGSDLDEVNILVLGIDSRGEDHSRSDSMMVIHYNKKQKQPKLISIMRDSYVDIPGYDKQKVNAAYAYGGPELVRKTLKESFDLDINYYAVIDFKGFAKIVDAVAPDGIEVDVPKKMSYGIGMTLQPGKQVLHGERLLGYVRFRHDRESDFGRVRRQQEVFSKLQKEAVSIGNIAQLPKLWGLVDPYIETNIPNGVILSVGKDFLLGSVKETKSFRLPVDGSFTNKDDPKYGAVLDLDLEQNKEELKRFLNE

SEQ ID NO: 5485 - protein, 97 aa, Bacillus licheniformis
MLQTPIGRLRLMGFIEGMSLLILLFIAMPLKYWADYPMAVTIVGSVHGGLFILYLFVLLYATFVLRWSVKWPAAGLVAAFVPFGNFLYDRGLKKYDQ

SEQ ID NO: 5486 - protein, 136 aa, Bacillus licheniformis
MTRINFSDRGETPFQRLLGHSESLMSSWTALAEELSGDGFLSKELKEQVRRVLAQGNGCEYCKAKGKPEIPNQQKTSFAMGFAEVFLAQRERVSDRQFDVLKEVFSEEEITELTAFICFTTAQQYFGALMKLPADA

SEQ ID NO: 5487 - protein, 142 aa, Bacillus licheniformis
MKIDDLDFKIIAELKKDSRLSMRELGRKISLSAPSVTERVRRLESFGVIKKYTLDIDYQKVGLPVSCIIEATVKNGEYERFKAYIERLPNIEFCYRIAGAACYMLKINAESLAKIEAFINETSPYAQTVTHVIFSEIETKES

SEQ ID NO: 5488 - protein, 727 aa, Bacillus licheniformis
VSKTVVLAEKPSVGRDLARVLKCHKKGNGYLEGDRYIVTWALGHLVTLADPEGYGKEYQSWRLEDLPIIPEPLKLVVIKKTGKQFQAVKSQLIRKDVKDIVIATDAGREGELVARWIIEKAKVTKPLKRLWISSVTDKAIKDGFKNLKNGKDFENLYHSAVARAEADWIVGINATRALTTKFNAQLSCGRVQTPTLAMIAKREEDIKNFKPVPYFGLRAAVDGMTLTWQDKKTSQTRTFNASVTSQLAGALQGKPAVIVDLKKTDEKSFAPGLYDLTELQRDAHKRFGFSAKETLSVLQKLYEQHKLVTYPRTDSRFLSNDIVPTLKDRLEGMQVKPYAQHVARILKRGVKANKSFVNDAKVSDHHAIIPTEEPLALGALSEKERKLYDLIAKRFLAVLMPPFEYEETKVFAEIGGETFTAKGKTVQSQGWKAVYDFADEDDDEEEKDQTLPKLAKGDTLSVRSLTETKGETKPPARFNEGTLLSAMENPAAFMQGEEKNLVKTLGETGGLGTVATRADIIEKLFNTFLIEKKGKDIYITSKGKQLLELVPSDLKSPALTAEWEQKLSGIAKGKLKSSAFIKEMKEYAKQTIREIKSSNQKFKHDNITGTHCPDCGKLMLKVNGKRGTMLVCQDRECGHRKTVAKQTNARCPVCHKRMELRGHGEGQTFACVCGHREKLSVFEKRRAKDKNSKASKRDVHSYMKKQNKDEPINNALAEQLKKLKLDQ

SEQ ID NO: 5489 - protein, 50 aa, Bacillus licheniformis
VRDDFPKAESVFIQERLTRISTLISIQNILMFQSDFPGRGYMNFPVFSAQ

SEQ ID NO: 5490 - protein, 37 aa, Bacillus licheniformis
LWQGNFSEVEHSRKTKHDISIFSFALPGLRKELMYNQ

SEQ ID NO: 5491 - protein, 43 aa, Bacillus licheniformis
LSSPSLLFFQYFFAQKSAEAKAPAESDFYSQVISLSLNAYEVS

SEQ ID NO: 5492 - protein, 606 aa, Bacillus licheniformis
MYSAIKRFLIGKPLKSKELREQKITKTKALALLSSDALSSVAYGTEQILIVLAAVSSAALWYSLPIAAGVMILLTALILSYRQIIFSYPHGGGAYVVSRENLGVNPGLVAGGSLLVDYILTVAVSVSAGTDAITSAVPMLHPYHLLIAIVLVLLIMVLNLRGLTESASILAYPVYLFVAALLILIAAGSYKLLTGQIEPAEHAAVGTPVAGLSLFLLLKAFSSGCSALTGVEAISNAIPAFKDPAPKNAANTLAMMGILLAVLFSGITMLAFGYGITPKSEETVVSQIASETFGRSFLYFFIQGTTSMILVLAANTGFSAFPQLAFNLARDKYMPRMFTVRGDRLGYSNGIIFLGIASIVLIVLFNGQTEHLIPLYAVGVFIPFTLSQTGMCLKWMREKPDGWIAKMIINAAGAAISAVVLLILFITKFALVWPIVIFMPIVIWAFYAVKKHYTAVSEQLRITGKPLEPIKGNIVIVPVAGVTSVVEKSVQYAKTLSDQVIAVHVSFDKEEEKKIEKKWEALQNGVRLVTLYSSYRSLIHPLEKFLETVEAKAASYNYSVMVLVPQFIPKKSWHNILHNQSALLLRLRLLWKKDIVVATLPYHFKK

SEQ ID NO: 5493 - protein, 39 aa, Bacillus licheniformis
MSLQAVFLAGTLQNVSAEMEGGMEKTKEDVIWQTKPQEK

SEQ ID NO: 5494 - protein, 573 aa, Bacillus licheniformis
MANKTAGKIAAELLKEWNIDHVYGMPGDSVNEFIDELRHEENSLRFIQVRHEETAALAAAADAKLTGKIGVCLSIAGPGAVHLLNGLYDAKADGAPVLAITGQVSSDEIGRDYFQEIGLERMFEDVALFNQQVHSAEALPDLLNQAIRTAYSQKGVAVLSVSDDLFAEKIKRKPVYTSALYIEGDLEPKKSQLMQCAQLINQAKKPVILAGRGMKSARDELLEFADKAAAPIIVTLPAKGVVPDRHPHMLGNLGHIGTKPAYEAMEESDLLIMLGTSFPYRDYLPEDAPAIQLDNNPAKIGKRYPVTAGLVCDAKKGLFELTKTIERKSNRAFLESCIQHMRKWRYEVEKDEQVATAPLKPQQVIARLEDAVADNAVLSVDVGNVTVWTARHFNMTNQDFLISSWLGTMGCGLPGAISAKLYHPERQVVAVCGDGGFSMSMHDFPTAVKYELPIVVVILNNQNLGMIQYEQQEKGHVNYATALENVDYAKFAEACGGKGFSVTKHEELIPALKSAFHSQKPSIIDVAIEDEPPLPGKISYTQAVNYSKYMIKKLVEKKELDLPPLKKSLKRIF

SEQ ID NO: 5495 - protein, 203 aa, Bacillus licheniformis
VYRLPKTTFSTVFILAAGLLWMSIVPQQAFAHGFIEKPGSRAALCSEAFGFLNLNCGSVMYEPQSLEAKKGFPHSGPADGQIASAGGLFGGILDQQSENRWFKHIMTGGEHTFTWTYTAPHNTSQWHYYITKKGWDPDKPLKRADFELIGAVPHDGSPASRNLSHHIYIPEDRLGYHVILAVWDVADTENAFYQVIDVDLVNK

SEQ ID NO: 5496 - protein, 39 aa, Bacillus licheniformis
MFWRAGVFDRLFSLFAPKPADSQIGFPNRSRKVQALFVH

SEQ ID NO: 5497 - protein, 83 aa, Bacillus licheniformis
MKVFILFYLWIVPLVIGLIFFRVTQRTSFKKRFYPGYIMIVLAAAVFAVCYLIGQPYLGNFFGGTMLFGTLLPFMAAAMKKKK

SEQ ID NO: 5498 - protein, 183 aa, Bacillus licheniformis
MFKLMVRDDLYLKMLEPKDARAVYMQIQQSKDVLRKWLFWVDGTKQLEDTEAFIEESMKQAAANNGFQAGIWHQGQFAGIIGLHYINWINRTTSIGYWLGEPFQGKGMMTDACRALIDTLFSEYDLNRIEIRAAVQNVKSQAIPERLGFTKEGCLRQCEWLHDHFSDHFVYGLLKEEYEARSK

SEQ ID NO: 5499 - protein, 426 aa, Bacillus licheniformis
MVSHDLSKHSQISKEAQDALDGKSKGFKRLLPFLGPAFIAAIAYIDPGNFATNIAAGSKYGYLLLWVILFSNIMALLIQSLSAKLGIATGKNLPEVAREEFPKPVSIGLWIQGELVVIATDLAEFIGAALGLYLLFGIPMLEASIIAAAGSFAILELQRRGVRPLEAAITGMLFIVVIAFAFQTFFAKPDIGSVLEGMFVPRFDGADSILLAAGILGATVMPHAIYLHSALTQRRVVGKTEAEKKKIFRFEFIDILIAMLIAGAINASMLIVAAALFYKNGIFVEDLDVAFSHFSSMVSPLSAVLFGVGLLTAGLSSSSVGTLSGDIIMQGFINFRIPLYLRRFITILPPIAIIASGVNPTTALVLSQVVLSFGIAFALIPLILFTSNKRIMGSLKNAKWITAVSWLIAALIVALNIFLIYDTFSG

SEQ ID NO: 5500 - protein, 86 aa, Bacillus licheniformis
MLGFLVSLIVAIVIGLIGGAIGGHGAPGGIIGSMVIGFIGAWIGHGLFGTWGPDIAGFAIFPAIIGAAILVFILNLIFRGRMGSQA

SEQ ID NO: 5501 - protein, 473 aa, Bacillus licheniformis
MDTKATRIEKDFLGEKEVPVDAYYGVQTMRAVENFPITGYQIDEELIKALAMVKKAAALANMDIKRLYKELGEVIVKAAGEIAEGLWHEHFIVDPIQGGAGTSMNMNTNEVIANRGLELLGKEKGDYFHLSPNTHVNMAQSTNDVFPTAIHLATLNHLKRLLSTMEHMLDAFRKKAAEFDSVIKMGRTHLQDAVPIRLGQEFEAYSRVIERDIQRIRQSQHHLYEVNMGATAVGTGLNADPRYIQNVVAHLSDISGYQLTGADHLVDATQNTDAYTEVSAALKVGMMNMSKIANDLRLMASGPRAGLAEIRLPPRQPGSSIMPGKVNPVMPELMNQIAFQVIGNDNTICLASEAGQLELNVMEPVLVFNLLQSIKIMNNGFRVFTDYCITGIEANEIRLKEFVEKSVGTITAVNPHLGYEAAARIAKEAIATGRSVRELCLLHDVLTEEELDLILDPYEMTHPGIAGASLLEE

SEQ ID NO: 5502 - protein, 37 aa, Bacillus licheniformis
MSLDKTGFLLLDSPMSEDDFPFFKSKLKHGGSRHNTS

SEQ ID NO: 5503 - protein, 55 aa, Bacillus licheniformis
LLLKKGKSSSDMGLSSNKKPVLSNDIRSFACQKNLKERYEETDKWSNNYVYLLLT

SEQ ID NO: 5504 - protein, 394 aa, Bacillus licheniformis
MGHVLMINFPGEGHINPSIGVTKELQRRGESIVYYAVEEYAEKIKKTGAEVRLYPDFREVLSPGKKKEKMDFAEVVYNMSSKVNEIVQFIYREVKSESYDYVIYDHHFLAGKIIAEMLELPSVSLCTTFAMDEQFAKTFTPQGDLESSPYFEKLKGSLGELSERYPVSLDKPFDVFSCPGDITIVFTSRAFQPHAERFGSDYLFVGPSIASRQDPGSFPFAELEGETVIVISMGTIFNQQKELYHMCIEALKDFDGKVVMSVGKSTDPRDLGSIPDHFIVRPYIPQLEVLKQADVFVTHGGMNSTNEGLYFDTPLIVIPMGADQFFVADQVERTGAGIKLDKNELSPAVLQKTIKDMLENRSYKDDAAKIGRSLRNAGGYQKAADAVLELAGRK

SEQ ID NO: 5505 - protein, 148 aa, Bacillus licheniformis
MPWSMEDYPASLKHLDKPVKKKAIEIANAMVDEGYDESRAIPIATSQAKEWADNRSKSELKSYAEKADETKRGDSGSSSRPELAEKCEHVIKHEKGWAVKAEDAKRASEVKDTKAEAVERAKEIAENKGTAVVVHKKDGSVERKIRMN

SEQ ID NO: 5506 - protein, 37 aa, Bacillus licheniformis
MIHLMNPCFLIGIQRVKLYEKGGMAKCHGQWKTILLH

SEQ ID NO: 5507 - protein, 274 aa, Bacillus licheniformis
VRYDKTDLENELKKIEKWEKEQQKAWFWERIGRLPFKVLDKLTPAFIQDKIGLLLDEIGGFIQNGGQYLTSEKHLIRQFQKKLPDETIETIEDIQWAPLEVMDQICENLGKNRANTAAVQGATTGVGGLFTLAVDIPAILGLSLKTLQDIAVSYGYDPKEKTERMFIIKCLQLSAADIVGKRAIIQELSRYHQPSGSRENMISQIQGWREVVYTYRDSFGWKKLFQMVPVAGILFGAISNRSMVNGVAETGMMMYKKRRIMERLAELDATETEG

SEQ ID NO: 5508 - protein, 429 aa, Bacillus licheniformis
MQNQNGKASGLLPLFLFVCLFVGSGLITGDFYSLPIVAAALAASVVSLAKNRKEKLSQKTEWFAKGAGHPDIMIMVMIFILAGAFSSAAKAMGAVESTVNLALSFVPGQFMVAGLFIIAAFISVSMGTSTGTIAALAPIAAGISAEIGVPAAYSVAAVVGGAMFGDNLSFISDTTIAAVRTQKTKMSDKFKTNFLIVLPAAVATVILLMVFSAGGHPGAQAGTYSWVKVLPYLGVLIFALLGFNVMAVIFGGIVLAGVIGISDGSLTLHTYLTAITEGIGGMSELIILSLLIGGMAEMMKRNGGIAFLLQFVSRRIRSKKGAEAGIAGLVSAANLATANNTIAIITAGPLAKDLSDRYGIDNRKSASILDIFSCAVQGLIPYGAQMLSAAQIAKISPISILPYSFYPILIGVCGICAIIFRLPRFTEKA

SEQ ID NO: 5509 - protein, 238 aa, Bacillus licheniformis
MDRKTNLLELTKEVAEKHANFLVSEVNDHCMRIAVLEGEYVWHIHPGSDELFIVLEGELLIDFQDRPTEVLKANDSLLIPKGVIHRTRADVRSVNLCIEKTNAETVPFAEGNVLKLIRCKSAEQKLQAFSEAQAKWAPLQNVSGFIRQWGGWMETEDGPEAVVLALWKSKHDYLNFMAEHHDEIYERTHQKGTFESINITLFEDPAEISETLQNNTPAPVPEWTVMGSGRLRDPHSLS

SEQ ID NO: 5510 - protein, 46 aa, Bacillus licheniformis
MANNNDDNKMSREEAGRKGGEATSRNHDKEFYQENGEKGGRQRRSG

SEQ ID NO: 5511 - protein, 346 aa, Bacillus licheniformis
MAALIKFFQHPGVRRFSVFVVLAGVLYLFRSMMNLILLTFIFTFLMNRLENVIRGFLNRFIKVSQRLIISCLYAALAIALSIGGVVYYPVIVTQIQQLIKQGKYIASHPDSIPFLDMITGMFGDINLTSYLEKGLNFIYTYITDISTFGLQVVMSLVLSMFLLIEKDKVMSLMDKFKTSKIAIFYEEIAYFGKKFTRTFGKVLEAQFIIATINCALTTIALAIMGFPQLFGLAVMVFFLGLVPVAGVVLSLIPLSIIAYSIGGIAYIVSLVLVIMIVHAIEAYFLNPKLMSAKTELPIFFTFIVLIFSEHFIGIWGLIIGIPIFVFLLDILDVTNQEKNRTAGTRK

SEQ ID NO: 5512 - protein, 414 aa, Bacillus licheniformis
MKLATKIIIALLLGAVVGIILNVTSPDLFSKLNTFLFGPLGTIFLNLIKMLVVPIVFFSLTLGVAGLGDPKKLGRIGVKTISFFLITTAIAIIIGLVLALVIKPGTIGTYDTSAAEYSAQKAPSISDTLLNIIPTNPVQAMAEGNMLQIIAFSILVGLGITMLGKKADALLKVVEQGNDLMMYLVNLVMKFAPYGTFGLIAGAIGSQGWDAIKAMGLYMIVVILALFIHTIVTYGAAIALLAKRNPLTFFKDFSEVMLVAFSTSSSNATLPVSMDVAQRKLKVPEPISSFVQPLGATINMDGTAIMQGVATVFIAQVYGNDLSLTQLLMVVLTAVLASIGTAGVPGVGLIMLAMVLQTVGLPVEGIALILGIDRLLDMIRTAVNTTGDAACAVIVTETEKKHGKIEAPHSEVSV

SEQ ID NO: 5513 - protein, 308 aa, Bacillus licheniformis
MTKQPVLHIENVDKIIDGKTILKDIRLTADEGEIIGLLGPNGSGKTTLIKLITGLIKMKSGSIVINGFPIDRQFEKAIQSVGAIVENPEFYPYLTGYENLKHYANMHAGIGRERLEEVISRVGLEDAAEDKVKTYSLGMKQRLGIAQAILHRPKLLILDEPTNGLDPAGMKDFREHLRELAEEEGTAILFATHLLKEVEDLCDRVVILQKGKIKSTVVLNQADEKQEKAMLEVQPHDKALQWLKDQGYEARTEKGLLAVKVEKAQIPALNQQLVANDIDVYSIAPFKQSLEDEYMARTNGIEERNADV

SEQ ID NO: 5514 - protein, 255 aa, Bacillus licheniformis
MFKLIQNEHVKLLKRKVTFVSLALIVVFQFLLALITKRILMGAGAEDHFIGYFSFTPNLNILLQGLSIVVAASIISFEYDKKTIKFLLIRPVRREKILVSKYVTSVLASIWLFIIYYGFSILFGLLFFGVKLDEKAEPLFINTVKMIGTQWFEVWMMVSFAFLCSALFKSSALSIMVSIVVLYGAKMLVTIMAYLEKPLGKFLLFANTDLTQYAGEAKPLFAGMTPLFSLFIVFIHLVFFLGTAWWGFCKRDMKV

SEQ ID NO: 5515 - protein, 112 aa, Bacillus licheniformis
MKKFITALPIVLLLSFSFVSFAFNFDHLVYFRLALGLFSLAGLFLLYKLKNGVRLFMAYLYGSWIVLAGIAAYEEPLFSDFFFGGLTITMGYLTYMLIYLGMKVDRRGGQAV

SEQ ID NO: 5516 - protein, 53 aa, Bacillus licheniformis
VCSIFVKTERQQEWLDKIGKLADEFEKTAAYYDEHANFPQNIFKSCGIQATQR

SEQ ID NO: 5517 - protein, 51 aa, Bacillus licheniformis
MSKRKIKTFHQLVEEYKKEIAKNPKEMEVIYDKIDRRHENRLLAISKAKQT

SEQ ID NO: 5518 - protein, 52 aa, Bacillus licheniformis
MAPQLKKAVEMRKKQLIQRLIQLGIYKKEERHLYELSLSELESEYQSIKKGG

SEQ ID NO: 5519 - protein, 106 aa, Bacillus licheniformis
LKKITTEAQFNELIQSDKEIIVKFYADWCPDCTRMNMFIGDILEAYQENDWYELNKDDLPELADKYQVMGIPSLLIFKNGEKTGHLHSANAKTPEEVNEFLAEHIS

SEQ ID NO: 5520 - protein, 361 aa, Bacillus licheniformis
LKTRLGLVYGGKSAEHNVSLQTALAVTKALDTEKFDIHPIYITEKGEWVRGPQLTEPVSNVKMLQFEQTGQTFSPAVLNRDMFPGEADAKEDSIDVVFPLLHGPNGEDGTIQGMLELLNVPYVGNGVLASSAGMDKVVMKHLFAQAGLDQAKYVSFLKKTWSQSKEECYAQVEGELGYPCFVKPANLGSSVGISKCRSREELDQAFELAFQYDRKIVVEEGVIGREIELGVLGNDEPVCSVAGEIAPKKDFYDYKAKYEDGDTDLIIPASLTEDEYETMRSMAVKAFQAIDGSGLVRADFFLTNEGRVLINEVNTMPGFTPFSMFPLLWKQSGVEYAELIEKLVALAIERHEEKQQIKHTF

SEQ ID NO: 5521 - protein, 456 aa, Bacillus licheniformis
MITRTVKEIAEMSEGVLTNEAFEGRLIKGVSTDSRKLAKGQLFIPLAGERFNGHVFAEQAFQEGVAAVLWNRSEPNPPEGKPVILVDDTLEALQKLAKAYRNQLDVKVVGVTGSNGKTTTKDMIHAVLGTEYKVHKTEGNYNNHIGLPLTILAMPEDTEVAILEMGMSAKGEIDFLTRLARPDIAVITNIGESHLLELGSREGIAEAKLEIVNGLSKEGTLIYVGDEPLLTERLNQPPYDTKTFGEDPAFDYQLEDMTQTEEGTAFRVRGIENGFFIPVLGKHNVKNALAAIAAGDLLNVSRAHIAEGLTKLKVTGMRLELVKTPDGVAIINDAYNASPTSMKAAIELVEQMKGYGKKILVLGDMLELGEGEKAFHEEIGQAVNPDSIDFLFTYGELGAYIAKGALKHFPEHRVLHFNPEEKDSLKKTLKEKANTGDLILVKASRGMRLEDVIKDL

SEQ ID NO: 5522 - protein, 236 aa, Bacillus licheniformis
MIGCLCIHGFTGAPYELEPLASHLKQTADWQVEMITLPGHGEMPVLKGVCFQEWIACAEVELIRLLKTCDTVFLIGFSMGGMIAGYLAGKYPVSRLVLLSAAAQYISPGQLIQDLKNVIKDSLQGKLEDNLLYKRYKQKLTSTPVSSAFQFRKLVKMTKPALKNLRIPVLIVQGECDAIVPVSSAYYLYETIPSEEKELCLLPESKHHVCLEENSSILFQTVEEFLKKTPIESIKK

SEQ ID NO: 5523 - protein, 487 aa, Bacillus licheniformis
LTITFQDFQLSSDLTKAIKRMGFEEATPIQAQTIPLGLANKDVIGQAQTGTGKTAAFGIPLVEKINPESPNIQAIVIAPTRELAIQVSEELYKIGQDKRARVLPIYGGQDIGRQIRALKKNPHIIVGTPGRLLDHINRRTMRLQTVNTVVLDEADEMLNMGFIEDIESILSNVPAEHQTLLFSATMPAPIKRIAERFMTNPEHVKVKAKEMTVSNIQQFYLEVHERKKFDTLTRLLDIQSPELAIVFGRTKRRVDELTEALNLRGYTAEGIHGDLTQAKRMVALRKFKQGAIEVLVATDVAARGLDISGVTHVYNFDVPQDPESYVHRIGRTGRAGKTGMAMTFITPREKDMLRAIEQTTKRKMDRMKAPTLDEAIEGQQQVTVDRIRTIIEENNLNFYMTAAAELLEDHDSVTVVAAAIKMMTKEPDNTPVRLTEEAPLRTKRNKNHHHRSSKRRDGGGYRGKNNRSSYDKKRSSNDRRQKKSYNS

SEQ ID NO: 5524 - protein, 159 aa, Bacillus licheniformis
LRSEPKNQISRDGVKVWRITACITSFVLMLAAAGLIAAGEIFKWPVWIGILSAAVWLGISFVIIIMIPNIRHRVWRYEVHENEIDIQHGIFVVTRVIVPMVRVQHVDTSQGPILRKYNLASVQISTAATTHSIPALDVEEADQLRDSISRLARVTEDDV

SEQ ID NO: 5525 - protein, 493 aa, Bacillus licheniformis
MMSEPRRMHPAAVILNFIKGLVETVKNFIIPFGVVIFLNQSQTVKMIAIAAAVLFFIALVVTSIIKWSKFTYRIEEDELRIEEGLINKKKRYIPIERIQTINTSAGLIQQMFKLVKLQVETASGGTEAEVSLVAITQAEAERIQQALFERKKAAEDTGTDVPVPLEETAEEAEEAEEPVMMYKMTGQELLTAASTSSGIGVIISGVFAFFTQVDDFFDLDWLYDRFAFLNSAGAAVIALAAFVALFIAWLLSIVGMLLKYANFTVVRKEKEIVISRGLIEKQQITIPLQRIQAIKIKESLIRQPFGLAAVTIVSAGGNVLEEDKSAILFPIISKKIINQRLGEFIPDYAPEDDLNRLPKRALRRYILRASWPVLAVVPLSILFPPWGYLSAVLIPFYWIIGYFSYRDAGWKISGSKIIMSSRFIGRTTAVIQRRRMQVFEVSRSYFQRKKQLVSIHTSTKSSVLMEKFSVADVEEKDSDDIIAWYSYEKRVNG

SEQ ID NO: 5526 - protein, 199 aa, Bacillus licheniformis
MFIRTENFQTFIRLYPVTSAILALQLAIWILFLFPFTAVQMWSDLLIGFNWGIANGEWWRFVTPIFIHAGFGHLLFNSMSIFLFAPGLERMLGKLKFLIVYIGAGVIGNIGTYFIEPLEYMHVGASGAIFGLFGVYLYIVLFRKELMGSANSQIIVTILAISVLMTFVNQNINMMAHIFGLLGGLALAPPLLNKRVNGF

SEQ ID NO: 5527 - protein, 335 aa, Bacillus licheniformis
VRKSFVLLLTGLLVILMLSACGQKSQEDVVTGLDKKAKEYTSYKAKAKMTIETGNEPQEYNVEIWHKKPSLYRVYLENPKKDQSQVILRNENGVFVLTPSLNKSFRFHSDWPNNSSQVYLFESLVKDVKNDGEASFSAKDSKYIFETKTNYQHNQMLPTQEIVFHKKTMAPSSVKVMDTDRKPMVKVEFTSFEFDKPLDKDSFDEKKNMTLSQIDVATSADVSDSFAVKTPLDVPQGVKKLEEKEMATEDGKRIVITYGGEKSFTLIQEKARVAKTSTSVSMNGEPVDLGFTVGALTDKSLSWTYDGVDYFISSEDLSQDELLMVAKSMQGQSSK

SEQ ID NO: 5528 - protein, 389 aa, Bacillus licheniformis
MSLKPFYRKTWAEIDLTALKENVRNMKRHIGEHVRLMAVVKANAYGHGDAQVAKAALAEGASILAVALLDEALSLRAQGIEEPILVLGAVPPEYASIAAEKRIIVTGYSVGWLKDVLGFLNEAEAPLEYHLKIDTGMGRLGCKTEEEIKEMMEMTESSDKLNCTGVFTHFATADEKDTDYFNMQLDRFKELISPLPLDRLMVHSSNSAAGLRFREQLFNAVRFGIGMYGLAPSTEIKDELPFRLREVFSLHTELTHVKKIKKGESVSYGATYTAQRDEWIGTVPVGYADGWLRRLAGTEVLIDGKRQKIAGRICMDQFMISLAEEYPVGTKVTLIGKQKDEWISVDEIAQNLQTINYEITCMISSRVPRMFLENGSIMEIRNPILPDQS

SEQ ID NO: 5529 - protein, 93 aa, Bacillus licheniformis
LSESSATTEILIRLPEALVSELDGVVMQDNGSRNELIYQATKMYLRERKNRQIRESMRRGYMEMAKINLNISSEAQFAEYEAENTVERLVSGG

SEQ ID NO: 5530 - protein, 116 aa, Bacillus licheniformis
LIVKRGDVYFADLSPVVGSEQGGVRPVLVIQNNIGNRFSPTAIVAAITAQIQKAKLPTHVEIDAKRYGFERDSVILLEQIRTIDKQRLTDKITHLDDEMMEKVNEALQISLALIDF

SEQ ID NO: 5531 - protein, 275 aa, Bacillus licheniformis
MSNQAVLKFISEHQNVLAGNLADILKDLNSNMTNVKLTEHMYETISNEYIHILMNESGDGNEKSIDTIYQFSSKAVQLGVPLKLLSSGLSAFWKHLYYEMNKDVPEDQQCYDLIWEIDKFIEPINSEILNQYAISWEKTVALQKVALQELSAPLIPVFENITVMPLVGTIDTERAKKIMENLLSGVVKHRSEVVLIDITGVPVVDTMVAHHIMQASEAVRLVGAKCLLVGIRPEIAQTIVNLGIDLTQVITKNTLQKGIQTALEMTDRKIVSLEE

SEQ ID NO: 5532 - protein, 121 aa, Bacillus licheniformis
LRVPNIPILKLYNCLLVSIQVELDDQTALKFQEDLLNKIYETGSNGVVIDLTSVDIIDSFIAKVLGDVITMSKLMGAKVVLTGIQPAVAVTLIELGISLDEIETALDLEKGLETLQRELGE

SEQ ID NO: 5533 - protein, 133 aa, Bacillus licheniformis
MADQSCVKILTEWDIVAARQLGRNVAKELGFGTVDQARITTAISELARNIYLYAGKGRICIEQVQEEGKKGLKIVAEDEGPGIADIKKVMEDGFSTSGGLGAGLPGVKRLMDQFELHSDAENGTDIQAVKWLR

SEQ ID NO: 5534 - protein, 335 aa, Bacillus licheniformis
MDFREVIEQRYRQLLSRYISELTETSLYQGQKFSRKTIEHQVPPEEIISIHRKVLSELYPDLPDHVFHSLDFLIEVMIGYGLAYQEHQTLRGIQQEIKSEIEIAANVQQTLLETTVPKVEALEIGAVSVPAKQMSGDYYHFVRDKESINIAIADVIGKGIPAALCMSMIKYAMDSLPDSGTSPSQVLKNLNRVVEQNVDPSMFITMFYGNYHLQKHLFTFSSAGHEPGFYYSCRENKFYDLNAKGLVLGISSNYDYEQYEQKLDIGDMIVLFSDGVTECRTDSGFLERSDLQNLITVHMEKPAQQMVDNIYEHLLKLQDFQLHDDFTLIVLKRKV

SEQ ID NO: 5535 - protein, 108 aa, Bacillus licheniformis
VNLAVDTNKNDHVIEVKVAGEIDVHTAPTLRDELMPLAEEGKDLKVSLKDVSYMDSTGLGVFVGIYKAVNRTGGSLVLENLSERLIRLFDITGLKDIIDISGKSEGGL

SEQ ID NO: 5536 - protein, 161 aa, Bacillus licheniformis
MKRAADYIEMKSPAKPEYVGIIRLTLSGIASKMGYSYDDIEDLKIAVSEACTNAVQHAYKADNNTGEVSVRFGVFEDRLEIVVADQGDSFDIQDKQKELGPYSPEHTVDQLSEGGLGLYLMETLMDEVHVQIDSGVTVSMTKFLNRERVDDGTTVQNYETN

SEQ ID NO: 5537 - protein, 263 aa, Bacillus licheniformis
MAQPSKTTKLTKTEVDTLIKKYQENQDEDAQLTLVQTYKNLVETLAKKYSKGKSFHEDLCQVGMLGLLGAIKRYDPDVGKSFEAFAIPTIIGEIKRFLRDKTWSVHVPRRIKELGPRIKMAVDHLTTETQRSPRVDEIAEFLDVTEEEVLETMEMGKSYQALSVDHSIEADADGSTVTILDIVGSQEEGYEKVNQKLMLESVLHVLSDREKQIIELTYIQNKSQKETGEMLGISQMHVSRLQRKAVKRLREALAEDPYMELKP

SEQ ID NO: 5538 - protein, 199 aa, Bacillus licheniformis
MIWTESNEHMQALVYQLPKEGKAVCGDSFYFHATDETMVCALADGLGSGALARESSSVISEVVEEHGHEDVESLMERCNQALKHKRGATVSILKVDFRTRTIAYSSVGNIRFILYAPSDKYIHPLPVTGYMSGKPQTYKTFTYTYEKGSRFIIYSDGLEVPALRTYLKQHHTPGDISNQLESYTRMGKDDLTYIIGQLF

SEQ ID NO: 5539 - protein, 720 aa, Bacillus licheniformis
MDTLASIVKQIAKETGLAPKHVESVIQLLEDGNTVPFIARYRKEQTGSMDEVQIQTISERWGYIQHLNQRKDEVIRLIDEQGKLTGQLKLDIEKADKLQEVEDLYRPFKQKRKTKATIAKSKGLEPLADFIISLPRNEDVAAEARKYINEEKEVMSAEEALEGAKNILAERISDEPEYRKWIRQETFKRGTLKSAAKDAEADEKKIYEMYYEYEEPIQKIVPHRVLAVNRGEKEEILRASVEPPADRIQAYLEKRILQQKQTSAQDVLKSAIEDGYKRLIQLSIEREIRKELTEKAEDQAIHIFAENLRKLLLQPPMKGKLVLGVDPAFRTGCKLAVVDETGKMLKIDVIYPHPPVNKKSAAIEKVKRIIEDFQIEVIAIGNGTASRETEQFIADLLKDIDRKVYYLIVNEAGASVYSASELAREEFPDLQVEERSAVSIARRLQDPLAELVKIDPKSVGVGQYQHDVSQKKLNDSLRFVVETVVNQVGVNVNTASAALLQYVAGLSKTVAANIVKKRDEIGKFTSRKELKDIPRLGAKTYEQCIGFLRVPDGDEPLDRTGIHPESYKETRELLKKLGLSTAQIGTKELQDKINELNISEAAEQLGIGEITLKDICAQLTRPERDPRDEVPKPLLKTDVLQLEDLKEGMELQGTVRNVVDFGAFVDIGVKQDGLVHISKLSHSFVKHPLDVVSVGDIVTVWVEDVDAAKGRVSLSMVKDR

SEQ ID NO: 5540 - protein, 185 aa, Bacillus licheniformis
MEDRRSIKTKRAIKEAFLKLLHEKEINKITVSDLSRRADLGRGTFYLHYRDVFDLYEQIENELFDQLGKFYDDYFPSEDPHHLLTFIEKTTEYIYQNAAIFTLLTKPKGNILTINKFKDFFKQKIFEELSMMQQSGNEMACDEMEITFLVSGAVGIFEEWINGGMVQTPAHIAGVVHRILLKIAM

SEQ ID NO: 5541 - protein, 38 aa, Bacillus licheniformis
MNFAGRLISLYFKKVGRKSRLLALSLLFFITSPLYSQK

SEQ ID NO: 5542 - protein, 1039 aa, Bacillus licheniformis
MRTIIKARWIIAALWIAMAAVLFITAPDMGQLTKEKGQIAVPEGYPSSYANKLLEQMSKDGDTNKSVVVVFQDKHLLPNREAALKKAITTLEKDSSLHVSDITSYFNADEDIQKQLLSKDRTTLLVPVTFDANKISAAEFKAKVNEKLKTLKLDYEMTGQPLIDDDVMTSSQEGLKKTEYITVGFILIVLILVFRSAVAPFVPLLAVALSYLVSQSVVAYLVKYADFPLSTFTQIFMVAIMFGIGTDYCILLLSRFKEEIARGKDKIEAILTTYKTAGRTVLFSGIAVLIGFTCIGFAEFQLYKSAVAVAVGVAVLILALLSIVPFFMAVLGKVLFWPVRGNIGHPQSKLWETAGRFAFSKPLISLLIVAAVAVPPILMYKGTLSYNSLDEIGDQYESVSAFNTISDKFGPGESLPVTVVLKTSDALDTNDGLIAIEKISRAIEQTNGVSKVRSATRPVGKGLSDLYVKTQANELNKGLESGNKGLKKIKDGLAEASKSIADQKPQIEASGKGINQLIKGTESIQAGISDVEANMRKLKEGTDQSKQGVAQAKKEIQTAKKQLTAQVDQLNGQIETYKEISKILKAALSQAENAQGITADVQKMIEQTNQNFKNLESEIPEVKENPSYLAIKGSYTELASAIKQGSQKAAVYTKQAANAKKQLEAADAFIAKAQEEQKVYTSKIDALINGLGQIEKGLEETSKGQGQLADSLPKLESGAGEVAEGQKQMKEKVGEFAGQLDQLTKGLNSSVDGLEKISSGLMGAGDYLDQLKNASDQEMSGWFVPKEVLKNKQFQQVFNSYISDDRHITTIDVILEDNPYGNGAIAKVKDIEASVKRALPDTHLRDASFGVGGVSSINADLKQLSDQDFSNTVIYMMIGIFLILVLLFRSIVMPVYLVGSLVLTYFASIGVTEFIFTAFFGYPGLNWAVPFFGFVILMALGVDYSIFLMERFNEYRGTDIKTAMTESMKNMGSVIISAAVILAGTFAAMLPSGVLSLLQIATLVLTGLLLYAFVMLPLFVPVMVRIFGSANWFPFKRKE

SEQ ID NO: 5543 - protein, 153 aa, Bacillus licheniformis
MDEQQLQQLTEQLSLTYFKKPFRHRAYFNSRLKTTGGRYLLNSHNIELNKKYLTEHGQKELEGIIKHELCHYHLHLEGKGYKHRDKDFRTLLKEVGAPRFCTPLEKEKKPQRKVRTYKCEACGQTFLRKRKMDTSRYVCGKCGGKIKEIIKKG

SEQ ID NO: 5544 - protein, 116 aa, Bacillus licheniformis
MISKFFSGIHNAIFSPLRSWAEQSPGNWNILIVVGFLLVYGSGILVYVFYKKLGKDDERTNKIYLKSSSYMLLVIILCDMIFPKDDMWTIFFLYKYALAFLAAGIYLSVQYKKDFS

SEQ ID NO: 5545 - protein, 79 aa, Bacillus licheniformis
VKKDFGDSISNKVYEYRVLARMSQQELAEKVGVSKQTIFVMEKGNYVPTLLLAFRIAEFFNIDVNEIFTYVKGNDQNDK

SEQ ID NO: 5546 - protein, 326 aa, Bacillus licheniformis
MNDQNLKTLRKLVTPYEKSDLQKSIYQIINTLIPFFLLWCLAYKSLSISYFLTLAISIVAAGFLVRTFIIFHDCCHYSFFKNKKANRILGTITGILTLHPFDHWGRDHSIHHATSSNLDKRGTGDIWLLTVEEYKEASTKTKIMYRLYRNPFVMFMIGPIYVFGITNRFNRKGAKRKERMNTYATNLGIAALTALLCWAIGWQNFLLVQAPIFMISGSLGIWMFYIQHTFEDSYFEEDEHWEYVKAAVEGSSFYKLPKVMQWLTGNIGFHHVHHLSPRVPNYKLEEVHNNIEPLQNVPTITLATSLKSLKFRLWDEKAKNLLVLAT

SEQ ID NO: 5547 - protein, 36 aa, Bacillus licheniformis
MNKTIIGIAIISVSCYDKEELFLFGVKDSMNIDFSS

SEQ ID NO: 5548 - protein, 67 aa, Bacillus licheniformis
MEQGTVKWFNAEKGFGFIERENGDDVFVHFSAIQSDGFKSLDEGQKVTFDVEQGPRGAQAANVQKTA

SEQ ID NO: 5549 - protein, 328 aa, Bacillus licheniformis
MNNVSLIYKEFGDPLQKLQLHAGEKLPLQPNEILVKMIASPINPSDLLPIRGAYSHRIKLPAVAGYDGVGIVIDQGKDVSPSLIGKRVLPVRGEGTWQQYVTTKADYAIELPPSISDNDASQLYINPLTAWLICTESLRVQPNEIVLMNGGGTSIAGLFAQISKILGFRLIVMTRNSRKIEKLQKLGAWRAIDASKGSIYEKISDGCDIGVDHAIDSVGGESGELLARALKPEGTFVSYGLLSGIPNDWRKLHDVYHVSPQLFALRLWNERHSVSEYRNRFSEVIKLVESGRMVINAPEKIYDFEDFYDALKHYEQPGLNGKILLNFA

SEQ ID NO: 5550 - protein, 201 aa, Bacillus licheniformis
VKYLFYVIGILILTLGIAFTIQSDLGASPFDALLVGLAVHAGLTVGSWEVIIALLLIGCNSFLKRQRPEVSGLLTAFITGIGIDMWLFLLHFFVTPEQWYSKAVCFGIGLVVTGLGTATYLYTNFASMPIDRLTFIIKELTGTNIFFSRTIIYLVFLTAAVMLKGPIGIGTLLTVCLGGLALHLFMPFAGKVLGRFTDART

SEQ ID NO: 5551 - protein, 150 aa, Bacillus licheniformis
MKDILREIGMIARALDSISNIEFKEHDLTKGQYLYLVRICENPGIIQEKLAEMIKVDRTTAARAIKKLEMKGFIERRDDEHNKKIKKLFPTEKGNEVFPFIKRENDHSNRVALEGFSEGEAEIIFNLLQRVRKNVEKDWEFVKKGNKRNY

SEQ ID NO: 5552 - protein, 142 aa, Bacillus licheniformis
MTVNIKRCTLEDLHKLQEIGYETFNETFKHQNSPENMKAYLDKAFNLKQLEKELSNSSSQFFFVYFNNEIAGYLKVNTDEAQSEKMGDESLEIERIYIKNNFQKHGLGKYLFNKAVEIAKELNKKENLAGRMGKKRKCDCFL

SEQ ID NO: 5553 - protein, 205 aa, Bacillus licheniformis
MYIPKYFKVENADEILDFVQKNSFGTIVTTEQGKPIATHLPLGLNKKGDDYYITGHIAYGNPQVGTLETCKDVLVMFQGPHAYISSSWYGHEDVPTWNYQAVHIYGKASILERDELIEELTIMMEKYEKHRENPILWDNLSPQLLERQLKAIVGFKIKVEDIQAAYKLSQNRNDTDYMNIIDQLQNEGDPDSEQLAAAMKKRLEN

SEQ ID NO: 5554 - protein, 304 aa, Bacillus licheniformis
MAKKTIRLLMPQWQGGNNPNYSFGAELLAWLAPENDQPLIHVPVQPYDGTPLENENGINGRKQLLEQLEAAQHIIHAHKPDRIVMFGGDCLVEQAPFAYLNERYGGDLGLIWIDAHSDLVRYAGYDNGHTLPLGNLLGEGDEEFAKHVKIPLKPENVFIAGLAAPTEEETKVISNELQRQGIAPTEPDTEVIQRLGIRTAGTKKLMTSTEPIKEWIKESNIKYLAIHLDLDVLDPKAFRSLLFANPEAPVNFSPEGTMQMPYLLHLLKELSSETDVVGLGITEHLPWDSIHLKKLLSEIPILTQ

SEQ ID NO: 5555 - protein, 111 aa, Bacillus licheniformis
MSMAEYKGKVKNIQDTPFGYTLSVIGGKWKMVIIYLLAENQPIRFNELKRQIGAITYKTLSSQLKELEADGLVKRKEYPQVPPKVEYSLTDKAESLLPVLEGLCELGLKNQ

SEQ ID NO: 5556 - protein, 290 aa, Bacillus licheniformis
MNKIEKHRKFRAKMIFKVIMVMIGGIIAAYGLETVLIPNSVSDGGVTGLSIVGSQLFDLPLGILIAVLNIPFVWLGYKQIGKSFALLSIIGIASLAAGTSFMHHTPAIIEGDTLLVTVVGGIILGFGMGLALRNGGALDGIDMLAVLLSRKLPFGTSDLILFFNLFVFIFVSAVFGLQGALLSVIAYYIASKVIHVVEEGLSGSKTFQIITSEPELMVETIRDQLGRSATYKEAYGGFSHEKFKEITCVINRLEDTKLKEIINEVDKNAFVTVYDVAEVKGSNFRKPNIH

SEQ ID NO: 5557 - protein, 192 aa, Bacillus licheniformis
MSIIAFLSYVIMTSITPGPSNILMMNEAQRFGFTGSWRFSSGILAGFAVLGILSGAFTISLYNWIPVVEPYFKLAGACYLIYLALQVGFTKNKKQDSTEARSSFISGFIFQLINIKSILFFLTVMSAFVLPFNHSLKSTIYYLALAIVLGWLALLLWSGFGSVFKRVFAKHDRVFRVLMCLLLMYSAVSIFR

SEQ ID NO: 5558 - protein, 293 aa, Bacillus licheniformis
MEIRHLITFQTIVEMGSYTGAASKLGYTQSTITTHIQALEHEIGGALFTYEKRNLKLTQLGRELMPLAEELLSTHNQIKNLQSAHEVKGVLKVAAPESLTISRLGPIIREYSLKYPHVKLKLSNGTCGQNQVDLLSGNVDVALMVYPEIELDKCIRYTLAEEKIVLVGSSEGPEDLEEYQKHFFITNEEDCSYRTMFEKYLLKNDIHYFPTMELWSIEAIKQTVMSGLGFSVLPYITVKDEVESGKLKILPHSQYLDPLYSQMLIKKKKWQLPAVDAFADLVLHSFREPRLIG

SEQ ID NO: 5559 - protein, 73 aa, Bacillus licheniformis
LREFAPKVFQTTGIIGFILAFVQIPIGWFIGFFFSGLFFMMLKSNNEKSGTFNMMAGIACLLYSFYCLFTQVL

SEQ ID NO: 5560 - protein, 324 aa, Bacillus licheniformis
LRKLKLLLAANLISTVGTGITSYLIVWLLIDQLKQSVLYGLLTMATMILVFFASPYLGSLVDRYSRKATFLYLEITGIVVLGVFSVLCNVSAELDITLVVMLIFYHTAYDSIKYPALAALTQEMFKKEDYSKVNSSLEVQGQAALMISSGLAAMMIGKMDAAVILVMNISTFIAASILIYQLPYQRNAEAEEHSNTMKNESYWKNFRSSLQYLCYRKVLFVLLLTSFIPSIVIIVANYLDPVFIYDYLNEGPSVIGIANIVYAIGAMGAGFVAYQISKKWSDMQGVILFMAVFALATIAIFFVPNDIYSGKPLLGAFKCCDQSI

SEQ ID NO: 5561 - protein, 260 aa, Bacillus licheniformis
MKINQIVDLSVSLRGDIPSDPPGFIHEIEYADHKQGAKQMVQSFPGLSSQDLPGGEGWSLEKVKMSTHAGTHIDAPYHYRSVTDDGKRMMTIDEVPLDWFHGPGVKLDFRHLKDGHIVTPEEIEQELHRINHKLAPGDIVLVNTSAGAKYGQSDYLDSGCGMGREATLFLTERGVRLVGTDAWSWDAPFSMTAKRFEQEKDPSIIWEGHYSGSTIPYCQIEKLANLDQLPSTGFYVMAFPVKVEKASAGWARPVAILSGE

SEQ ID NO: 5562 - protein, 460 aa, Bacillus licheniformis
VTEDVTDNDIHEQKLSRGLKNRHIQLIAIGGAIGTGLFLGSGKSIHFAGPSILFAYLITGIICFFIMRSLGELLLSNLEYHSFVDFVRDYLGDMAAFITGWTYWFCWISLAMADLTAVGLYTQYWLPDVPQWLPGLIALIILLIMNLATVKLFGELEFWFALIKVIAILALIAIGLFMIFKGFSTHSGTAAFHNLWSHGGMFPNGLHGFLLSFQMVVFAFVGIELVGLTAGETKDPEKVIPKAINNIPVRVLLFYIGALLVIMSIYPWNVINPNESPFVQVFAAVGIIAAASIINFVVLTSAASASNSAVFSTSRMIYSLAKEHNAPGAMTKLTSRKVPSNALFFSAVVILIGIMLNYIMPEQVFTLITSISTICFIFIWGITVICHLKYRRTRPDLAKRNKFKMPLYPFSNYVVLGFLAFILIVLALAQDTRVSLFVTPVWFIMLIAIYKLRKPKSRQV

SEQ ID NO: 5563 - protein, 43 aa, Bacillus licheniformis
LYHESGRAQQLGVLGPLNDKTIKNKPCTVSSLCSDLSFPGKPV

SEQ ID NO: 5564 - protein, 211 aa, Bacillus licheniformis
MLILIAVYVLYTLFENLILDPQSTSFLSHKSHLRDSFHLPIWLKVMYVHVIAACLAMVSGAVNFSSGLLAKSRKIHRLNGFIYVVSVMVVTLSSGYMAPHSTGGRAVSIAFNMVNMYWPAATVISVIKARRNQFTKHRNWMIRSYLFCFTNLFIHFITFVCRSGFGLPYDISYTIGVYGAIALNVAAAECVIHFTRRKAVDILHTAGFDKV

SEQ ID NO: 5565 - protein, 211 aa, Bacillus licheniformis
MDDRIETKEPMPSLIGLITNPALQFERMKRRPAVALPMFIVFVLSVLSAYLYISKDFPDTYTYFGMIIFLWEFLKTGIYLFVSALILWLIATIGGGKTNFVTMFSLASFVGFAKIIGDVINNTVYRFANVPEGTSFTSLHDVFSAVEPYKSILGVFDIFMVWALVLAAEGLQKAGGASKRASWIAVAVLFILKFLFACFFGLFAALFEDIF

SEQ ID NO: 5566 - protein, 39 aa, Bacillus licheniformis
VMFSFKKTRLSANYFSHSRVYPNVTAVYTYIRKRSSLLQ

SEQ ID NO: 5567 - protein, 165 aa, Bacillus licheniformis
MKKQAARASLVACITDRKEDFYRLAYSYVKNQEDALDIVQESIKKALDSVDSVRNPDTIKSWFYKILVRTAIDFLRKQKKLKVMDDQTIEFLSQGKEDTYRDTDLHEALDELPQPYHTIIVLRFFEDLKLEEIAEITGENLNTIKTRLYRGLKLMRIQLTKEDLS

SEQ ID NO: 5568 - protein, 286 aa, Bacillus licheniformis
MDKKLEQLRKAYQNVPIPKELDQVVETALQHKPKKKRRIVVWPASTLVAAAVLLAAVVNINPGAAQAMSQIPVIGKVVKAITFTEIKQKDGESSIDVKTPALSGLNNRELENGINEKYVKESHQLYREFMKETSRNKKGHLSIYSDYETVTDTKDLISIRRSVERTEASSYTERRYITIDKKNEVLLTLKSLFKDDRYITAISENIKEQMKQQMKDDPDKIYWIGDEEVEPFKRIKADQNFYITENHKLVISFDDYEVAPGYMGAVEFEIPTKAISNLLIGDRYIR

SEQ ID NO: 5569 - protein, 626 aa, Bacillus licheniformis
MRDQTQQHRYIPGLDGLRALSVLAVIAYHLNMSWADGGFIGVDIFFVLSGYLITSIILPAYGNDISLTFRDFWVRRIRRLLPAATLMIFATVIWVALFNRELMHTVRGDAISSLLYVSNWWFIFHDLSYFDSFGSPSPLKNLWSLAIEEQFYFIWPIILLLGIYIFKKRERFAAAVVLCALCSAIWMSILYVPGGDPSRVYYGTDTRAFELLIGCALALVWPMKRLSGNRLPNSLKHALHGTELAAFALLMMCIYFVDEFSPFLYHGGMLIISIIAAILIACVSHPSSFLGFALSVKPLRWIGKRSYGIYLWHYPVIVLSTPVQEIGNPVYWHVAMKVAVTFILAELSYRFIEKPIRKDGFKPFVSRVFLDKITEWKTASVPSKISIGLMFAALLVFAGGLSGLADEKKQPQQAYSKSYEETSASADQPADKSEERQDDKKAQTESGNESKTGNGEESSDTKDEQSAEKEPDRIEKEVLAVGDSVMLDIASSLRRKIPGITIDGQVGRQVREALQLTSTYASFNHPDKAVVIELGTNGYFTDGQLDALLDAFSKADVYLVNTRVPRQWESKVNESLRKHADSRQNVTLVDWHAEALQHPEYFTADGVHLMPKGAEALASLIVKAMK

SEQ ID NO: 5570 - protein, 401 aa, Bacillus licheniformis
MLHNPVGKERLALAFLLGMLAILGPLNIDMYLPSFPEIADDLGAGASLVQLSLTACLIGLTIGQLVIGPVSDAKGRRKPLLISISLFALSSLFCALSPNIATLVLARFLQGFTASAGIVLSRAIVRDVFTGRELSKFFSLLMVITAVAPMVAPMTGGAILLLPFATWHTIFYTLALIGLLLVLVISMKLTETLPPEKRIPSSIGSSLKTMGSLLKDRSFIGYALTVGFIHGGSFAYVSGTPFVYQDIYGVSPQVFSVLFGINGLAIISGSFIIGRFGGIIHERKLLRIAVITAVIATSVLLTMTILKGPLAAIVISIFIYMITIGMTLTSTFTLAMENQGHRAGSASAMLGMLPLLLGSIVSPLVGMNETTAVPMGAIMFITAVIGSFAFFALTRENQGER

SEQ ID NO: 5571 - protein, 525 aa, Bacillus licheniformis
MLKKLFVFISIILGYAGFFFIFLFINNQLSEQNYPEAKQGIINLETWDFQKDGNIALTGEWALYRNQLLSPKDIHAGKGKAPIYSDVPNNVKLTDSGKNVDYGTYRLMIRSKQDNEMFGISTSFINSANRVYFYGKLIGQSGTPSNKANFTAQNKPYTSFFEVRRGDNELIVQFSNFKKTPSWGIEKPIAFGMQQHILHQSKISFLNETSMITAFFITGLYFLGFFLHRRKDKHLFFFSTMCLLFSVIVLLIGRERMIFLLFPSISFSALSVVRATTMVLVSMAVFLYLYFAYKEIVSKKWIIAATAFSVLVLMIDFITWGYTDRLAYILHSVLAVTTLIYITYVFAISAVRKMKGSLYLTIAAISMSAFVILTTVSAYSGKRGFSFNSLYAVPSIIALLAAVLMMAQQFAGAFRENEILSLKLLRMNRLKDEFIAKTSHEFKTPLNSMINICQTLLARKRKRTLEEEKENLQLVIRMGYRLSSLVNDILDLEKMKQGMLQIQAVPVDAHSAKHGNGLLSAVVKK

SEQ ID NO: 5572 - protein, 53 aa, Bacillus licheniformis
MLERTNCFRFIEMFQDPADVLEYPDIRDIDTVFLDIEMPGINGIELAEAIPDE

SEQ ID NO: 5573 - protein, 1926 aa, Bacillus licheniformis
LRSKKYSFSLSKKRGLKSFLVTCLALYLIFSQVVGFTLTAVAAGTSTGGSVFFDSVTIKNSEDQTVDGSKGDEPALKPGDKVTLTYEWSLKNDEEAGAENSFTVEVPKSFEFAQDSEGEVKSADQQIIGSYQVKADSNIFTVTLKSPAEGSAGAKGAIALSAKFAADVKGDTKTVTALFQLGAGKTQQVIIPVNTGSESETAKNDPPSSEDDQSDDQSKSSGGQDQEETKKKAADAENSDSKPAASSRLAAAGSLASGGNQITQNNLTGVTLTDEHGKPYDKSNRADTNSPAKISITWDIPNELGKTINDGDRYEFDLPEAFIMYNDITNQPLSSDGITYGYFSIDTKGHVVMTFNGEVKEDSNVKGTLFVNTQFNAQKIKGSTTQKIPFPVKSDTPEVTVYFKPKVSKTIDKSGTFDKGINPGQVTWTVDLNKKLDQVKNAKLTENFPEGLTYRSVKVYQLDVNIDGSVSQGDEVLSGYTVDADGNVTFDGEIDSAYRLIYVTDIDDSAKPNEGGNAAFTNKATFGGDNLEPASAEASVTAKYGKMIEKSSTGYKSDSQTFSWTILYNYGEKKIDESKASITDSFGSADLHLVSDSLKVIPITFNQNGSEQAGTPLTEGKDYTLSDNGSGFEIKFNQDVTGAYKITYQTEVNSGVIIDKSTTYTNTAVTGTGESKKASGTAVQQNLIKGYSNIDYKKKTVDWTIAINKNNYTMNNWKLDDNFESGGLTLLDGSFRLQDVTNNKTLEEGKDYTLIIKPDHEGFLLELIGDYATTNSQLKITYTTNMNADFSNENVKNTAESTWTDHSSTERKNKEASSFTPNRQTSHNGFKHGLYNAVSKEITWKIGINYNGEPSAANKQTLTVHLKTDDSVPYLIEFKTSLKGQVIKHDPYTNKATYHNAGYSERELTASVSVADGGSLVFKGGKQNGGYVDWSINVNASQSVLEDVKVTDTPDTNQILAEDSFKVYQAKYDEKGAVKDSGGNLVPDDVQLKKGEDYTLDIKTDNATGEQSFVLKFTGDYKKIDRAYVIQYQSLINIAGTSGHVHNKVSISGTNVQEQTQENNSSVFVAVSSGGGSGSGERGSLTILKTGEDGTPLSGADFQLRTKDNEQLLRTGTTDDNGKLTFGNIRYGTYILKEIKAPDGYTISDAYADGVSVEINSSSSSAGALYKVVNEKNKVTLIKQDEQKNPLEGAVFKLEKKSGDGTFTTIRTSIKSNENGKVEINGLPPGDYRLLETKAPEGYLLNTKELGFSVKTNDKNQVPDVDLGALINYKGRAHLTKEDAEGRQLEGAEFKLVDHEGKTIHEKLTSDQDGKTAVSDLAPGRYAFVETKAPEGYVINSKAIEFTISESAKEKPESVDAGKAVNYKGSVYLTKEDAEGRTLKGAEFKIVDHEGKTVHEKLTSDEDGKIAVSGLAPGRYAFVETKAPEGFMLNNDQIEFTIPGSAEGKPEPVDAGAAVNYKGSVHLTKEDAKGHKLEGAVFKIADQNGNTVQEELVSDRNGTVTASGLAPGRYAFVETKAPDGFVLNSGKIEFVIPDAAEGKPAHVDAGKAINYKGSVYLQKEDEDGNGLEGAVFKIIDSEGKTVKDDLISKEGGKIEAGDLAPGSYQFVEKHAPDGYLLSTDPIPFSITGKHEGEPKQVKLTALNKKNSVVLTKVGQDDKSAGLQGAQFDLTDETGKVLKTGLATDADGRITVYGLKPGNYQFVETKAPKHYQLDKTPISFTVKNTDTKQIELTAENQLTPGDVKLTKVDSNNKKAVLKGAEFKLLDADGKPVKAGGNSKKLPAVWTTDQNGQFTAEGLAPGRYQFVETKAPDGYKLDETPIPFEIKKGQTKPVEVIASNEKLKTPAVDKGAPDPNSGDPKTDNKGTPDRNSKGDPKTNDNGHLKDTLPKTGDTDSIIPIMIGILLILSGGAFAFFTRKKQRKA

SEQ ID NO: 5574 - protein, 42 aa, Bacillus licheniformis
MKGDKTKSIPDMTSTATIIFLYMPHSPFFKKAPDRFNDQVLQ

SEQ ID NO: 5575 - protein, 210 aa, Bacillus licheniformis
MYKKMIVAVLVISGILFVLSPFIKESIIINLNKNKNFDLTAEQAEQNNAQKASFDFEAIQPPSILETIKASLDRESKAVIGRITISSVNLKLPILKGTTNQNLLYGATTMRPDQKMGEGNYPLAGHHMKRESLLFGPLLNIEKGDTVKITDFKKDYIYAVTSKQFISEMDTDVIQETKKKEITLITCDKAVRTEGRLAVKGKLIHVAVHR

SEQ ID NO: 5576 - protein, 44 aa, Bacillus licheniformis
LSKIAANPGMKEKYPIRIVSFSFLLFLITFLLLSFHSDLFVIFL

SEQ ID NO: 5577 - protein, 43 aa, Bacillus licheniformis
LGRNFQKLDMKLLGKRNELLLRMFRKPLEINQFSFKQRRGKSI

SEQ ID NO: 5578 - protein, 473 aa, Bacillus licheniformis
MNEQGNQKSFLRTIILVSTFGGLLFGYDTGVINGALPYMSEGDQLNLTAFTEGLVASSLLLGAALGAVFGGRLSDYIGRRKNIIFLAVLFFFSTLGCTLAPDVTVMVISRFLLGVAVGGASVTVPTYLAEMSPSEKRGRMVTQNELMIVSGQLLAFTFNAILGTTMGDSSHVWRYMLAIAAVPAVFLFFGMLRMPESPRWLVSKGKNEAALGVLKRIRKEKRAHSEVAEIEAAVMKESEMKKANYKDLAVPWVRRIVFLGIGIAVVQQITGVNSIMYYGTEILKNAGFETKAALIGNIANGVISVLATFVGIWLLGKVGRRPMLLTGLIGTTSALLLIGIFSNVLQGSAALPYVVLTLTVTFLAFQQGAISPVTWLMLSEIFPLRVRGLGMGVTVFCLWIANFFVGFSFPILLESIGLSSTFYIFVGLGLLSIAFVKKFLPETKGLTLEQLEHNFRNYKSETAQSGASAKISG

SEQ ID NO: 5579 - protein, 327 aa, Bacillus licheniformis
MDEFELIQRITPRSLSHREIEIGIGDDAAVYHTKNNYQEIVAVDTMVDGIHFLSSHSSPADIGYKALAVNISDIAAMGGRPKYYLVSIAVPSGWGATDIEAMYEEMNKLATLYEMDLIGGDTVSANGPLVLTVTAIGEIEKGRSCLRSHAEPGDVVFVTGELGSSAAGLSFILGQTSARDETQSQYFIERHKRPEPRVEAGLICSRYHHVALNDISDGLASELNEIAEASRVSIDIYKELIPVHSDLHILHTKWEEWVLFGGEDFELVGTISNDQWERFSQECSEHDVRVHQIGRVTKQGQAEVFYHDGQDRVLLEKKGYNHFKQDR

SEQ ID NO: 5580 - protein, 158 aa, Bacillus licheniformis
VKTLEWKTTEPEETKNIARLAAKYVQPGDVITLEGDLGAGKTTFTKGFAEGIGIKRVVSSPTFTIIKEYRDGSLPLFHMDVYRMEDETEDLGLDEYFEGDGVCLVEWAHLIEEQLPKERLEVVIKRLGDDKRKLTFTPKGRRYENLCEEISKHDDTCD

SEQ ID NO: 5581 - protein, 229 aa, Bacillus licheniformis
MTILAIDTSNLTLGVALIKDGKVIAEHISHLKKNHSVRAMPAIDELLKECGLKPSDLTQIAVAKGPGSYTGVRIGVTIAKTLAWSLNIPVKTVSSLEVLAANGRFFQGLICPLFDARRGQVYTGLYQYRDGKLHGLEEDQNILLEDWLKKLKAMDQQVLFIGSDTGIHREMIERILDEQAVIADPALQLPRPSELALIGELKEDEPVHSIVPNYIRLAEAEAVWLEKQK

SEQ ID NO: 5582 - protein, 152 aa, Bacillus licheniformis
MNTQMVIRDMNPKDLDQVFEIEKSSFSSPWKKESFHHELFHNMYAHYLVLEVEEQVVGYCGIWIVMDDAQITNIAVSPAYRGRRFGEALLKAAMKLCRMKRAVQLSLEVRVSNHIAQSLYKKLGFEPGGIRKNYYTDNGEDALLMWVRLNES

SEQ ID NO: 5583 - protein, 341 aa, Bacillus licheniformis
MNHKKDLYVLGIETSCDETAAAIVKNGTDIISNVVASQIESHKRFGGVVPEIASRHHVEQITIVLEEAFAQADMTFDDIDAIAVTEGPGLVGALLIGVNAAKALSFARGIPLVGVHHIAGHIYANRLVQDIQFPAIALVVSGGHTELVYMKEHGSFEVIGETLDDAAGEAYDKVARTMGLPYPGGPHIDKLAQKGEANVPLPRAWLEEGSYHFSFSGLKSAVINTLHNASQKGETIAPEDLSASFQESVIDVLVTKTERAAEAYGVKQVLLAGGVAANKGLRAALEKTFSSRPEIELLIPPLSLCTDNAAMIAAAGTVAFEKGIRGKYDMNGQPGLDLTSY

SEQ ID NO: 5584 - protein, 641 aa, Bacillus licheniformis
MMILQVNQLSKSFGADTILTNIKLEVRSRDRIAVVGRNGAGKSTLLKIIAGKLSYEKGDIIKPKDLTMGYLDQHSGLDSKLTLKEELLSVFDFLKKMEKEMRAIEEKMAQAGPDKLESLMKTYDRLQQEFKDKGGYQYEAEVRSVMHGLGFAGFDDSVRVQDLSGGQKTRLALGKMLLTKPDLLILDEPTNHLDIDTLTWLEQYLQSYSGAILIVSHDRYFLDKVVTQVYEITRSQSKKYIGNYSSYLQLKAEQLERETKLYEKQQDEIAKLQDFVDRNLARASTTKRAQSRRKQLERMEIMDKPLGDEKSASFRFEITRQSGNDVLRVEDLTVSYQDQPPLLRSLDFRITRGESVALVGPNGIGKSTLLKALIQKLQPVSGTIATGSHVSIGYYDQEQAELTSSKRVLDELWDDYPEMNEKDIRTCLGNFLFSGEDVLKPVHALSGGEKARLALAKLMLQKANFLILDEPTNHLDLDSKEVLENALIDYPGTILFVSHDRYFINRIATKVLELSRDKAEEYLGDYDYYTEKKAQQLELKELEKQTEERQKAASEKPGAKKSYEEEKELKRKERQRQRRIEDIETRITAIEEQIEKNEELLCNPDVFQDHEKVQEIHSENEQLNEELEQLLSEWETLSTNE

SEQ ID NO: 5585 - protein, 47 aa, Bacillus licheniformis
MIFHLLSAILSVAYHRAVSKQLSEVWKILAKEKDRLKKIVYDHYKES

SEQ ID NO: 5586 - protein, 168 aa, Bacillus licheniformis
MNEFTHFNEQGRAKMVDISEKEASVRTAAAVSSVSMNREVHEKIKNREIGKGDVLAVAQVAGIMAAKQTSAIIPMCHPIALKGVDIAFCWEKKEQKSILHIQSNVKTKGSTGVEMEALTSASVCALTVYDMCKAADKGMVIGPTFLLEKTGGKNGDYKREKADVDMED

SEQ ID NO: 5587 - protein, 215 aa, Bacillus licheniformis
MNMDHSKIPQATAKRLPLYYRFLKNLHASGKQRVSSAELSDAVKVDSATIRRDFSYFGALGKKGYGYNVNYLLSFFRKTLDQDETTNVTLIGVGNLGTAFLHYNFIKNNNTKIAMAFDINEEKIGTEVGGVPVYDLNKLEEHMTDDDIPVAILTVPAQAAQSITDRLVALGIKGILNFTPARLNVPEHIRIHHIDLAVELQSLVYFLKHYSMQEK

SEQ ID NO: 5588 - protein, 59 aa, Bacillus licheniformis
MPTIGPGSFILIVVVALLIFGPKKLPELGRAAGNTLREFKNATKGLADDDSDNKKKEDQ

SEQ ID NO: 5589 - protein, 255 aa, Bacillus licheniformis
MKGKEMSLLEHITELRRRLVITFFFFVLFVAAGFFLAKPLIIYLQQTDEAKLLTLNAFKLTDPLFVYVQFAFIIGAVLTSPLVLYQLWAFISPGLYEKERKVTLSYIPISIILFLGGIAFSYFILFPFVVDFMTRVSDDLNVNQVIGIHEYFQFLLQLTLPFGLLFQMPVVIMFITRLGLVTPMFLAKIRKYAYFVLFVIAALITPPELLSHLMVSVPLLILYEISIVISRISYRQAQKTMIQEENQSFLNDHTK

SEQ ID NO: 5590 - protein, 63 aa, Bacillus licheniformis
MRSPKIWGVIYLLTGVLFTYLAATSPGSMWSFYTILLMLFAAYNISISFKMFALAGRMKRKDQ

SEQ ID NO: 5591 - protein, 244 aa, Bacillus licheniformis
LRKQYWFIILAYVLMQLSAVVGLPLLYFLGVGRGQPKAEAQLTLTGVWSVIAFTLCLVIVLLILRTVPKTTLRNRPKASVAASIGWAVAGVFLALFAQSIAASIEMNLFGVNPESENTQRIMKIITALPLMVFVSSVFGPILEEIIFRKIIFGAIYEKTNFFVAALFSSVLFSVVHLDFSHLLIYTAMGFTFAFLYVRTNRIIVPIFAHVAMNTLVVLLQTFREPIEEYLKNVEKMQMIIGGFL

SEQ ID NO: 5592 - protein, 94 aa, Bacillus licheniformis
LLKPLGDRVVIELVESEEKTASGIVLPDSAKEKPQEGKVVAAGSGRVLESGERVALEVKTGDRIIFSKYAGTEVKYEGTDYLILRESDILAVIG

SEQ ID NO: 5593 - protein, 544 aa, Bacillus licheniformis
MAKDIKFSEEARRSMLRGVDALADAVKVTLGPKGRNVVLEKKFGSPLITNDGVTIAKEIELEDAFENMGAKLVAEVASKTNDVAGDGTTTATVLAQAMIREGLKNVTAGANPVGVRKGIEQAVAVAVESLKEISKPIEGKESIAQVASISAADEEVGSLIAEAMERVGNDGVITIEESKGFTTELEVVEGMQFDRGYASPYMVTDSDKMEAVLENPYILVTDKKITNIQEILPVLEQVVQQGKPLLLIAEDVEGEALATLVVNKLRGTFNAVAVKAPGFGDRRKAMLEDISILTGAEVITEDLGLDLKSTQINQLGRASKVVVTKENTTIVEGAGDTEQIAARVNQIRAQVEETTSEFDKEKLQERLAKLAGGVAVIKVGAATETELKERKLRIEDALNSTRAAVEEGIVSGGGTALVNVYNKVAALEAEGDELTGINIVLRALEEPIRQIAHNAGLEGSVIVERLKNEEIGVGYNAATGEWVNMIDKGIVDPTKVTRSALQNAASVAAMFLTTEAVVADKPEENKGGAGMPDMGGMGGMGGMM

SEQ ID NO: 5594 - protein, 38 aa, Bacillus licheniformis
MRAIIEIHTHITNKMKKETFNKMKCFLQGITSFKTEKM

SEQ ID NO: 5595 - protein, 77 aa, Bacillus licheniformis
MKQEPFKAGGGATSGLALISRVIPVPPTQLASVISGVIGGGLVGFGQMIQDEHEGHGVRIRFTGLGYAAVPTGVFPQ

SEQ ID NO: 5596 - protein, 113 aa, Bacillus licheniformis
MNDVKKLEAYLKLNADGTLTLDPSYTKLDISRSVTNEVQDWIKYLNDLVKQKEAVINSDFSVKILDKDGSVLTLENGNNHKMKVAKKGCGRSGHDLYWWGYNLYFDCNETRTI

SEQ ID NO: 5597 - protein, 64 aa, Bacillus licheniformis
MEFNLTVLFSVFKPLPFLNRAESGETINIEGKIHYINHIRKVFHIVEGDTNFIKFEDAVFREIK

SEQ ID NO: 5598 - protein, 69 aa, Bacillus licheniformis
MVKKIVNGFNSFSLLGTIFFIGSYFTYKFNGVELVGFLYLGIIFLTALIATTVMLIRLKRKGINKDKQA

SEQ ID NO: 5599 - protein, 305 aa, Bacillus licheniformis
MLKIWMTGLLLLAQPAGHSDSLTITQQGKKVAVVNREDFTMPLPGTPMIDDKKYNEFVDRLERKVHKDPVNAVINDQGRIVPGKVGYSLSRKGFKEQFYAYFYGDGPSTIEVPELNVYPKVDSELLSHIRTQRIGQYVTYFNSGNKSRTHNISLAAKAIDNHVVFPNETFSFNKVVGMRTPDKGYMKAPVIVRGELSEGVGGGICQVSSTLFNAVDRAGLEIVQRYSHSRRVPYVPPGRDATVSWGGPDLRFQNKYNQPVLIRAKRHGGTMVVTLYSSVVVNHQLRKVPKAPAQIPKEEHQSGDH

SEQ ID NO: 5600 - protein, 149 aa, Bacillus licheniformis
VTWLFVTFLVIFSLFKILVTCLPSGVVEWLTGKFQVHVKLEESNVQVTFGGKRLEGSDKSRFIQNFNEAVFMERYYIYPGDEPLYVNPKNAGTPFVIETTKGKNAVKLFVYRYDDHIDVVKQYKKKTAAYCLRSDSLQTCGGMKTADLI

SEQ ID NO: 5601 - protein, 30 aa, Bacillus licheniformis
MDSRTARQKERIAAWLFLIGYGAVRLYFIS

SEQ ID NO: 5602 - protein, 111 aa, Bacillus licheniformis
MTIHIQQLESPLNREFVDELINLWNDNTLETADCALDDQDREMIHQQLEQYVQSAYGAVFAVVNEKQEAVGYGLASIKKDLVSDCLSGQIDEVYIAPDYRRNSWGSLLQTV

SEQ ID NO: 5603 - protein, 224 aa, Bacillus licheniformis
MCGRFTLFSEFDEIIDRFEIDQMAIEDYSPSYNIAPSQYILAVINDGSHNRLGRLRWGLIPPWSKDEKIGYKMINARAETLAEKPSFRKPLIRQRCLIPADSFYEWKRTDARTKRPMRIKLKTNRLFSFAGLWEKWQPAGGKPVYTCTIITTTPNDLMKDIHERMPVILDRQAEKEWLNPKNQNLAYLESLLKPYASKEMEAYEVAPLVNSPHHNSPELIKKAP

SEQ ID NO: 5604 - protein, 76 aa, Bacillus licheniformis
MLVLMVKFILLFILCSISFSLFKACVYTAGKKLIDRTAEGSALNWTCSVFIKNGVAMTGDDCFIMAVSAALLAIYI

SEQ ID NO: 5605 - protein, 204 aa, Bacillus licheniformis
MPLQLYEKEQILDACLEVFARHGFAKTSTGMLAEAAGISKALIFHHFKSKKDLYLTVLDYCIEKVKSRLSLDDLASYDDFFEAKEKISMAKLEFFADYPNVYKLTKDAFYSPPSELKKEIAAKYGEQFAVRNRILKQLFAKVPLREGVDREEAFELIMVMMGHFEQKFLAEVTAEDDFDPAWSRRLLEERKRFLDMIRFGIEGE

SEQ ID NO: 5606 - protein, 873 aa, Bacillus licheniformis
MGHYVLGFHEIDRTDLPLVGGKGLNLGELSKMDGIQVPPGFCITTKAYEKMIGENDKVSELIDQLSLLKVKDREQINDLALQIRNGIERAEIAEEIKEAVKSAHSNAGGDAYAVRSSATAEDLPHASFAGQQDTYLNIKGIEAILKHISKCWASLFTERAVIYRIQNGFDHRKVQLSVVVQQMVFPDASGILFTADPITSNRKVTSIDASFALGEALVSGTVSADNYKVREGAIIQKTISEKKTAVYSLESGGTEAREVEAGCRKEQTLTDEQIIRLEKLGRRIEAHFSFPQDIEWCLADGEFFFVQSRPITTLFPLPKQSDDKLRVYMSVGHQQMMTEPIKPLGISFFGLISDYELTCAGGRLFIDLSHDLASFAGRKVVLSTAGKNDPFMHSALVNFLKRKELVKTLPKGKRMFRLGAEGLSWSLPGDALKIYRKNDTGVVKRLMSKAEASIQEAEQRLKNASGETLFAQIEEDQKSLKKVLYDSESMAVIMVGLYAVYWLNRKMEKWLGEKNVADTLSQSVLYNVTSEMGLALLDVSDAARGYPEVQKYLAYANNETFFEDLKQLDGGPAFIGALRAFLEKYGMRCTGEIDITKTRWSERPSILAPIILSNIKNFEPGARTAKFEQGRLEAEKKERDLLSRLQQLKGGRQKAKRTKKMISVLRNFIGYREYPKYALIKRYFIYKEALMKEAAVLQQKKLIQAKEDIYYLSFDELKEAVCTNRLDVKKIEERKAEYRHYEKLTPPRIMTSEGEVITGEALGDHIPAGALAGVPVSSGIIEGRARVILKLEEADIEEGDILVTPFTDPSWTPLFVSIKGLVTEVGGLMTHGAVIAREYGLPAVVGVEHATKEIKDGQKIRINGSEGYVEILE

SEQ ID NO: 5607 - protein, 92 aa, Bacillus licheniformis
MNLFWIGLGLAALGYFIGDGLKNFKNPKGIYSGYPYLIKEDDLHYYLGLSKVETKEMLRKYPDIPKIELNGTTYYPYQQLMDWMLSADLYKN

SEQ ID NO: 5608 - protein, 120 aa, Bacillus licheniformis
MPFILQRIYQENQQTEGRRILIDRVWPRGISKEKANPDCWMKEIAPSPELRKWFGHDPKKFESFKEAYQNEIKQNAEKQKSFRELKKMAADETVILLYGAKDERHNHAVVLYEMLNRQSL

SEQ ID NO: 5609 - protein, 41 aa, Bacillus licheniformis
MRITPSHFMIKRQAGRNNPIEKDNANIPFIRWNVLKNCTIG

SEQ ID NO: 5610 - protein, 254 aa, Bacillus licheniformis
MELSGNTVLITGGASGIGFAFAERFIKAGNTVIVCGRRESKLKEAKEKHPELITRVCDVAVETERLALFEWIKEHHPGVNVLVNNAGIQQRYHILKADVIDNWADYNKEITVNMEAPIHLAMLFSRYFAEKAGKTAIINVSSGLAFTPMAVAPIYSSTKAALHSFTMSLRHQLSEAGVEVIEVAPPAVNTDLGGVGLHDSGAPLDEFADAIFKGLEEGRLEIGYAVSEKALRMSRDEIDESVSQLYSSLKHSIE

SEQ ID NO: 5611 - protein, 490 aa, Bacillus licheniformis
MYDTTVETRFGKLKGRAENGVRIFKGVPYAKPPVGDLRFREPQRMEAWEGELDAFQFGPVCPQPDGVLPESAGVQKSEDCLYLNVYAPEEADGDLPVMVWIHGGAFYLGAGSEPLYDGTQLAKQGKVIVVTINYRLGPFGFLHLSSIDDSYSSNLGLLDQIAALEWVKDNIAFFGGDRHHITVFGESAGSMSIASLLAMPKAKGLFQQAIMESGASATMSDKLAKAAAERFLRILDIDHHHLERLHDVSDQELLEAADQLRTLMGENIFELIFLPALDEKTLPLKPEVAVAKGAAKEINLLIGTNRDEGVLFFPSDSDLLPESKINEILEEYMGKEAAEAASSLYPRSLEGHVDMMTDLIFWHPSVVFASAQSRYASVFMYRFDWHADSEQPPFNKAAHGLEIPFVFGNMDILEQLTGTKAGEEAQLLAEQIQAAWVSFARSGNPSTDDVSWPDYDEDSRKTLIFDQEVAVESDPYSDKRKMLTAPNPQI

SEQ ID NO: 5612 - protein, 425 aa, Bacillus licheniformis
MPGRKKGSLKSTITVAMSNYLEAGSIVAGAGGLSLWVEYLGLDDARVGLLGALSANGFGAAIGAFLGGFLVDRYGRKFIYKYDLLVYMLGVLLIAASFNFPMLLTGYIVTGIAVGAAIPAAWTYIAEEAPDHERAGRVGWGQLAWSVGPALTLLLSVALAPLGLMGSRLIFAQLFVVAVITWILQQQIHESSIWEEQKRKEAEDKAKGVEEKASIKELLTNKANLRAMILLIGIYAFWNLVAGTMGYFMPYIYETVGGLTAAQANLLQAFLWILTVASTYFVFIRLGDKVNRKLLFGIGAAMATAAWVILTFGTMNITELLLFVCLWGISAGFGAQAFYGLWAAELFHTKYRALAQGFMFFIVRIGVGLISLVVPAMITGLGFKTAGAVMIAFLVIHMIIGLRMAPETRGKSLEAIQSERYHQSG

SEQ ID NO: 5613 - protein, 226 aa, Bacillus licheniformis
MSILSRFKDIMASNINALLDKAENTEKMVDQYVRNLNSDLNKVKAETASVMAAEQRAKRELADCRAEIDKLERYAMKALEAGSEADARTFLEKKAVLETKASELETAFQTASSNANQMKKMHDKLVSDIGELEARRAAIKAKWTAAKTQERMNKLGASAANANHSMSAFGRMEEKANRALDEANAMAELNAAPQDDIEDLKAKYDSPSNVDDALAALKAKMAGQKS

SEQ ID NO: 5614 - protein, 341 aa, Bacillus licheniformis
MVISYKCPGCGDDMAFDAESGTLACRSCGRQDKIENIPEELKTARFTEDEATEYHCQNCGAILITEKETTATSCSFCGGAAVIADRLSGSLAPAKVIPFTISKEEAADAFRKWCRKGLLTPKGFMSADRIKSITGMYVPFWMYDLNSKVQVSARCTKVHRYIQGDYIYTETEHYDAFRDINLDYIKVPVDASEKMNDQLMDKLEPYPYDQLKDFKTAYLAGYIAEKYNYDDEELFPRAKSKISGYIESYIDSTLSGYSSVDVKTKHVDTQKVKSLYVLLPVWMVNYNYKQKDYIFAMNGQTGKVVGKPPISSFKEKMWFSGLAVSIFALWKIIAAVMGGGA

SEQ ID NO: 5615 - protein, 255 aa, Bacillus licheniformis
MRSLLRSAMILCMIFLVFIPIASGAAASEQKRFVYDEAGLLTKQEIEKLETLAAKLGAERETDFIIVTTNDTNGRDVKKYAEDFYDEKAPGYQKKHGNAAVLTVDMEHREVYLAGFKKAEEYLNDARLDKIREKITPDISHKHYEAAFEMFMKAAHDDMEKKPWADSIFFKTWFQLLVSAVIAGIAVAIMKYNSGGKVTVSASTYMNGDTSGVIRNNDEYIRTTVTKQRKPSNNKSSGGGTTSGGHSHSGSRGSF

SEQ ID NO: 5616 - protein, 324 aa, Bacillus licheniformis
MVFFRNQFANVVEWDEFRDDMIFYKWNNREIKKGSRLIIRPGQDAVFLNNGKIEGIFQDEGDYDIESEIIPFLSTLKGFKFGFNSGMRAEVLFVNTKEFTVKWGTKNAINIPAAGLPGGMPIRANGTFNFKVNDYVALIDKIAGVKDQYVVEDIKIRITSILDQLLMKWITKEGKDMFNLQANAFDIAKGIKEDLDMEIVGDGMTITGFNIMSFNYPKEVQDMITKNASHGMVGDLNRYQQISMTDGMASGKMTGGGAASDMAGMMMGMNVANQMMNQMNQNQQAQTQTPPSAPQPAAKPNFCPNCGTKTGEANFCPNCGQKLV

SEQ ID NO: 5617 - protein, 351 aa, Bacillus licheniformis
MELGISTFVETTPDIKTGKVISHAERLREVVEEIVLADQVGLDVFGVGEHHRQDYAASSPAVVLAAAASQTKRIRLTSAVTVLSSADPVRVFQDFATLDGISNGRAEIMAGRGSFIESFPLFGYDLDDYDELFEEKLDLLLELQKSERVTWSGKHRPAIHNTGVYPRPVQKPLPVWIGSGGNQESVVRAGLLGLPLVLAIIGGSPQHFAPLVELYYKAAEHAGHDASKLIVASHSHGFIAEDTETAADRFFPSTQQAMNTLARERGWGPYSRSSFDAARSFEGALYVGDPETVAEKIIHLRKNVGITRFLLHVPVGSMPHEDVMKAIELFGTKTAPLVREEVSRWEASERS

SEQ ID NO: 5618 - protein, 275 aa, Bacillus licheniformis
MKENILDVLKNLNFTEYESKAYLALLEESPLTGYAVAKKSGVPRSKIYEVLESLVIRGDIFVSYGNTPQYIPVPAKDLIKNRRMKAEETFEQAEKYFEKFERTANDRENIWNITGRSEILDKVKACISSAGKRILLEIWKEDFPELEPELKRAAKKGVIVTIIAYGDIEADFANVYLHDNSRQITEEYDGRWLVFSVDDSEVVAGIVSHGKDSRAAWTMHVGLVMPITEVMIHDLYLMEIMEKHREVLEESFGENLIHLRRKFSIHPDFKKHYMK

SEQ ID NO: 5619 - protein, 210 aa, Bacillus licheniformis
MDSLLSYISIAAMMVVIPGADTMLVVKNTLRYGPNAGRCNVLGLATGLSFWTLIAVLGLAVVIAKSVILFNTIKYLGAAYLIYLGIKSFFAKKMFSLEEIQAEKNKNENASSRHYKDSFMQGLFSNILNPKTVLVYITIMPQFINLRESVNQQLIILALILTFLAVFWFLILVYLIDFAKKWLRSVKFQKIFQKAAGLVLVGFGVKTGLD

SEQ ID NO: 5620 - protein, 214 aa, Bacillus licheniformis
VDEQKKNQLGVLLKEQLRKRSLSLRELSERTQIDKATISRIINGKRKANLNHLQRFSESFGVSFDELMTAAGYAMEKTQESERPDIHSSVAEIEDVLQTSNVYDRPFTMEELKNKLNECEQYSQTEEGKRTILAEFESKIEKVAGIGPFLTRLHDMYSRFTSGRGTPRELLLMGGALLYFIVSVDVIPDYIFPIGYIDDAAAVHFVFNQLSYKS

SEQ ID NO: 5621 - protein, 385 aa, Bacillus licheniformis
MKRKHINIDISLLLILFCLFIISLLAVYSGSGQYETQDPFYFAKRQVFWYLVGFGVMAGTAYIDYELLERLALRLFVGAVFLLILVHFFGTYKNGSQRWISFGVIEIQPSEFMKIILILLLASILNQFQHKRFSFAESIIPTGKIMMYTVIPFFFILVQPDLGSALVILSIAFTLMLVSGISGRMIVSLSLGFMALVAFLTYLHNHYFEIFSKIIKPHQLDRIYGWLSPHEHASTYGYQLTQALLGIGSGQLSGSGFTQGIQVQGGKIPEAHTDFIFAVIGEEFGFLGAVTLVCLYFLMIYRIIRIALSSNSLFGLYICAGVAGLIVFQVFQNIGMTIGLMPITGLALPFISYGGSALLTNMIALGLVFSVNIRSKHYMFGNDWG

SEQ ID NO: 5622 - protein, 377 aa, Bacillus licheniformis
MILSHLKKLDYVLIAAVLFLSAFGLLMVYSAGYPLGYMKYHDGSYFFMKQLQWLLIGLAFFSAAAIFPYKAYSKLIRFLVKLSFLMLILVLLPGIGMEKNNSQRWIQFGSLMIQPSEAVKLVMVIYFAYVYAKKQKYIADFGKGVMPPLLILAAVFFLILKQPDLGTAVSILLSCGAVLLCAGLRMRHLLLLGTMAGAGIAYFAITAPYRLKRLTSFSDPFQNENGDGYQLINSYLAIDSGGLWGNGLGNSVQKLGFLPEAHTDFIMAVITEELGGIGLAVIIWAYLLIMFRGVRIAVKIDDPFGKLLAVGLTFQIMIQALFNLGAVFGLLPITGIPLPFVSYGGSSLLFMLTTAGILVNLSSHVKRGVKKDVAFLL

SEQ ID NO: 5623 - protein, 56 aa, Bacillus licheniformis
LPHLPVFFSLCIHIKRLFCFIHLEYIMISFIYQYERIYMYKHVPVKFDMRRQDQQS

SEQ ID NO: 5624 - protein, 141 aa, Bacillus licheniformis
MKTRFTPYILMNGRAKEAIDYYRDVLDAEVKFSQTIGEGPADEAANFKEDELDFIAHAVLTIGDAVLMIADIIPELPFQSGNQLSICVTAADVSSAKRLFGKLSERGEVKLELKETYFSPAYGIVTDPFGVAFQIFAARPA

SEQ ID NO: 5625 - protein, 315 aa, Bacillus licheniformis
MSKAKRLNEMIMMVNRKKRFTVGELAREFGVSKRTVLRDLQELSEMGVPLYSETGPHGGYQVLNERILPPIAFSENEAISIFFAIDALKHYISLPFDAQYASIKKKFYLNLSGDIRDAIDSMKDRVAFYTPYEQTDDIPVLKVLLEAAVQQKVLIIEYEANGASSKRSIQPIGIYANQGKWYCPAYCFLRKDYRIFRCDRIKRAELDEHKAPIDLSGLNLKNRFSALSRPRETLELSAELTKKGVERHGSLKWPHLELHVREDGSGVLKGEIAPKDIDFFADYFISFGREAVIQKPSKLIERMKRTLSDMLKQYG

SEQ ID NO: 5626 - protein, 77 aa, Bacillus licheniformis
MKTPVYRSLRFSAFKVPQKTREDACLLHPPVKDTLRNRECLIFAVRRNFYPKKLTADLKVSIITNMILILHFCYKRK

SEQ ID NO: 5627 - protein, 225 aa, Bacillus licheniformis
MKKAMAILGFLVLTASLLFIINKGTSQINASQNRKAAVHTEYYKDISSLSFPVFSDLKEEDAKLANDAVKLHLKNSYKEFQKIVNDAEKKDKDEENVYETSYKVKYNEEGKLSFLIYDYQFSGGAHGMYTVTSYNFDFDKHKQVVLTDVLNNQAKIEKAKNYIFSYINEHPEQFYSDLKKSDIRLDEHTAFYYTSSGISIVFQQYDIAPYAAGNQEIKLPSTLLY

SEQ ID NO: 5628 - protein, 459 aa, Bacillus licheniformis
MSGKPSFRWVKMLIFLTILIGLAGYSYNKVSSNSQEPPQPKKDRGQSGLGVESMVNDSKQERYAIHYPVFHIKEIDEQIKDYVNQELAGFKEDNAKAQAQDEDGPFELNIKYKVVYYTKDTASVVLNQYIEAGGVSGTTSVKTFNADLKQKKLLSLQDLFEENSDFLNRISSIAYQELKNRNPSADMALLKEGTSPQEEHFSRFALLENEVEFYFEKKQTGLEQSVKIKKEWVKDILKDRYQDMKKNRLQAKPDQEPVPLPKQAKINPDEKVIALTFDDGPNPATTNKILNALQKHEGHATFFVLGSRAQYYPETIKRMLKEGNEVGNHSWDHPLLTRLSNEKAYQEINDTQEMIEKISGHLPVHLRPPYGGINDSVRSLSNLKVSLWDVDPEDWKYKNKQKIVNHVMSHAGDGKIVLMHDIYATSADAAEEIIKKLKAKGYQLVTVSQLEEVKKQRGY

SEQ ID NO: 5629 - protein, 512 aa, Bacillus licheniformis
MKQQKRLYARLLTLLFALIFLLPHSAAAAANLNGTLMQYFEWYMPNDGQHWRRLQNDSAYLAEHGITAVWIPPAYKGTSQADVGYGAYDLYDLGEFHQKGTVRTKYGTKGELQSAIKSLHSRDINVYGDVVINHKGGADATEDVTAVEVDPADRNRVISGEHLIKAWTHFHFPGRGSTYSDFKWHWYHFDGTDWDESRKLNRIYKFQGKAWDWEVSNENGNYDYLMYADIDYDHPDVAAEIKRWGTWYANELQLDGFRLDAVKHIKFSFLRDWVNHVREKTGKEMFTVAEYWQNDLGALENYLNKTNFNHSVFDVPLHYQFHAASTQGGGYDMRKLLNGTVVSKHPLKSVTFVDNHDTQPGQSLESTVQTWFKPLAYAFILTRESGYPQVFYGDMYGTKGDSQREIPALKHKIEPILKARKQYAYGAQHDYFDHHDIVGWTREGDSSVANSGLAALITDGPGGAKRMYVGRQNAGETWHDITGNRSEPVVINSEGWGEFHVNGGSVSIYVQR

SEQ ID NO: 5630 - protein, 316 aa, Bacillus licheniformis
MATLSDVAKKANVSKMTVSRVINHPETVTDELKKLVHSAMKELNYIPNYAARALVQNRTQVVKLLILEEMDTTEPYYMNLLTGISRELDRHHYALQLVTRKSLNIGQCDGIIATGLRKADFEGLIKVFEKPVVVFGQNEMGYDFIDVNNEKGTYMATRHVIGLGVRNVVFFGIDLDEPFERSREKGYLQAMEGSLKKAAIFRMENSSKKSEARAREVLASFDAPAAVVCASDRIALGVIRAVQSLGKRIPEDVAVTGYDGVFLDRIASPRLTTVRQPVVEMGEACARILLKKINEDGAPQGNQFFEPELIVRESTL

SEQ ID NO: 5631 - protein, 586 aa, Bacillus licheniformis
MEYAAIHHQPFSSDAYSYNGRTLHIKIRTKKDDAEHVRLVWGDPYEYTGGTWKANELAMAKIAATSTHDYWFAEVAPPFRRLQYGFILTGADDRDTFYGSNGACPFAGKAADIGKHCFKFPFVHEADTFDAPDWVKSTVWYQIFPERFASGREDLSPENALPWGSKDPEAHDFFGGDLQGIMDKLDYLEDLGVGGIYLTPIFAAPSNHKYDTLDYCSIDPHFGDEELFRTLVSRIHERGMKIMLDAVFNHIGSASQEWQDVVKNGETSRYKDWFHIHSFPVKEGSYDTFAFTPEMPKLNTANPEVQAYLLDIALYWIREFDIDGWRLDVANEVDHAFWKKFRQAVTAEKPDIFILGEIWHQADPWLRGDEFHSVMNYPFTEPMIDYFADGSISASQMASRINSHLMSGMKQVNEVMFNLLDSHDTKRILTRCGGDDKKVRSLLAFMFAQTGSPCIYYGTEVGLDGGDDPLCRKCMVWEEEKQNQEMLAFMKRLIALRKQENDVLTYGALEWKLVDDQNDFVSFSRTHEGKELIYFFHQGSEVRRVRLRDLKIASDKRIYDAWTEEALQHDDVVDIQPGGFFILGAV

SEQ ID NO: 5632 - protein, 417 aa, Bacillus licheniformis
MQHLKKGILVLLASVLLFGLAACSSSKETGGSGGKKVLTVSVEEVYKPYVESIKEGFEKENDVTVKIVEKPMFDQLEALPLDGPAGNAPDVMLAAYDRIGGLGQQGHLLEVKPSDTKSFGDKEMQQVTVGGKVYGIPLVIETLVLYYNKDLLKTPPKTFNELEDLTKDKRFAFSSEKGKSTAFLAKWTDFYMSYGLMAGYGGYVFGADGTDSGDIGLNNKGAVEAVEYAEKWFSEYWPKGMQDNTSADDFIQQTFMDGKAAAVIGGPWSASNYKEAGLNYGAAKIPTLPNGKEYAPFAGGKGWVASKYTKEPELAEKWLQYAANDENAYRFYEDTNEVPANLAARKKAGEQKSELTSAVITQYETATPTPNIPEMAEVWTGAESLIFDAAAGKKSAQQSADDAVRVIKENIKEKYVK

SEQ ID NO: 5633 - protein, 435 aa, Bacillus licheniformis
MNKDQTLANRSRKAALLSIIPGAGQIANRQFSKGILFLVITGLFICELAIFGYQALIGLVTLGTVPGEDHSLFLLIEGTLQLILTLVFLMFYIFNLYDARKTAAMKAAGLKIIETAGDMIRNAGDKGFPYLFTLPAYLMMVFVIIFPVLVTLFIAFTNYDFYHIPPNSLIDWVGFKNFMNIFFLGSYRQTFADVLGWTIIWTICATTLQIVLGIVTALIVNQNFIKGKRMFRIIFLLPWAVPAFITIMSFANIFNDSAGAMNVQVIPLLNQLPFVDIPAVAWKTDPFWTKTALIMIQTWLGFPYIYVMVTGVLQAIPGELYEAAKIDGATFIQRFKHITLPMILFATAPVMITQYTFNFNNFSIIYLFNEGGPGSAGAGAGSNDILISWIYKLTTGTSPQYSVAAAVTLLISFIVIGVSLIAFKKSNAFGNEEVM

SEQ ID NO: 5634 - protein, 283 aa, Bacillus licheniformis
MRGLFKNTRFTGMLNKVLTYIFLAFLSIVIIYPLLITASSAFRVGNVAAFTLDFSGAWTLDHFKRLFEETLYLNWYGNTLVIALSVMVFQVTIVTLAGYTYSRYRFAGRKKSLIFFLIIQMVPTMAALTAFYVLAMLIGALDQYWFLTAIYIGGGIPMNTWLMKGYFDTVPREIDEAARIDGAGHLRIFASVVLPLVKPMLAVQALWAFMGPFGDYLLAKFLLRSPESLTIAVGLQTFISNPQQQKVALFAAGAILAALPICILFFFLQKNFVSGLTSGGTKG

SEQ ID NO: 5635 - protein, 293 aa, Bacillus licheniformis
MNDMRNEKLIVRFLKAAASPAGVMRCKHAFSWLEISFLFMFLTACLMAPMTLAFMKMDRFNAGYLIPNVAQEADAAFIKQLKGYQLTNGRLKGEDELYRVEKGRTLLAVDLKDELKTSGENGRIKAEGYQNALIFQSDHLIISDQSGAGFSVRYPAKAGLNDLDAGHLGDFIGAMWFAQYKPLIIMLACSAVFIISLFLTAVLAGGIWISKKSNMTGIRSFKEAAAAAVCGSALPAGAAMAFGMISFDFIAMLLIHSCGSALMVSFIFRHIFKNRHHNENLQSGGNHGKSAAI

SEQ ID NO: 5636 - protein, 760 aa, Bacillus licheniformis
MANQRLFEIDQWKIKTNKFEKEHKRLQESLTSLANGYMGIRGNFEESYSGESLKGTYIAGVWFPDKTRVGWWKNGYPEYFGKVINAMNFIGIDVYVDDEKVDLSQNDIESFELELNMKEGILRRSAVVRVNQKAVKISSERFLSLDVPQLCAIHYEAECLSDEAVITLVPYLDGNVANEDANFEERFWQEEAKGAESHRGHLVTKTIENPFGTPRFTVAASMCNVTEGYVSEHFQTDAMYAENRYCYEVGPGTKASLKKLIIVTTSRDFEEAELLVQGRALLADVLRQGYEEAKRRHTEHWMERWAKADIEIKGDDELQQGIRYNLFQLFSTYYGADSRLNIGPKGFTGEKYGGAAYWDTEAYAVPMYLATAEPEVTKNLLLYRYHHLEAAKRNAAKLGLKGALYPMVTFTGDECHNEWEITFEEIHRNGAICYAIYNYVNYTGDRDYMKEYGIDVLVEISRFWADRVHFSKRNNKYMIHGVTGPNEYENNVNNNWYTNLIASWTLEYTLENLAILPEEKRRRLDVREAEIEKWKDIIERMYYPYSEELNVFIQHDTFLDKELQAADELEPGDRPLYQNWSWDKILRSSFIKQADVLQGIYFFNHRFTMEEKRRNFEFYEPMTVHESSLSPSVHAVLAAELKMEKKALELYKRTARLDLDNYNHDTEEGLHITSMTGSWLAIVQGFAGMRTQDEKLSFAPFLPKEWDGYSFNINYRDRLINVQVEENSVVFSLLKGEPLSMTVYGEQIALNGRYERRMAR

SEQ ID NO: 5637 - protein, 568 aa, Bacillus licheniformis
MSQWWKEAVVYQIYPRSFYDSNGDGFGDLQGVIQKLDYIKSLGADVIWLCPVFDSPQDDNGYDISDYRSIYEKFGTNDDMFQLIDEVHKRGMKIIMDLVVNHTSDEHAWFAESRKSKDNPYRDYYFWKDPKADGSEPNNWGSIFSGPAWTLDERTGQYYLHYFSKKQPDLNWENEAVRREVYDLMTFWMDRGVDGWRMDVIGSISKFVDFPDYETDDSRPYVVGRYHSNGPRLHEFIQEMNREVLSRYDCMTVGEANGSDVEEAKKYTDPSRHELNMIFTFEHMDIDTKQHSPNGKWQMKPFDPIALKKTMTRWQTALMNVGWNTLYFENHDQPRVISRWGNDRELRKQCAKAFATVLHGMKGTPFIYQGEEIGMTNSEMPLEMYDDLEIKNAYRELVIENKTMTEEDFRKAVAKKGRDHARTPMQWDDGKYAGFTDGEPWLAVNPRYQEINVKESLADEDSIFYYYQKLIGLRKQNKVIVYGDYRLLLEEDPRIFAYIREYRGEKLLVAVNLSEEKALFHASPELLEDRWDVLLSNYARERLNISGSIDMEPYEAFMMISRAKDYTS

SEQ ID NO: 5638 - protein, 226 aa, Bacillus licheniformis
MKAVIFDLDGVITDTAEYHYLAWKHTAEQIGIEIDRSFNERLKGINREQSLDKILIHGGAAGKFQEAEKQEIMRRKNQYYQQLIQNLTPHDLLPGISVLFAELKREHISIALASSSRNAPAILQRLGVMDEFQGVVDPAALAHGKPDPEIFLTAAALLGVPPSECAAIEDAEAGIAAIKSAGMFAVGVGDETSLRGADLIVHNTNELTFELLNEGWQRYCCIREGK

SEQ ID NO: 5639 - protein, 40 aa, Bacillus licheniformis
LILILFLVLLPSPIADKAASGGLSFYDSRVAFHFPSLIQQ

SEQ ID NO: 5640 - protein, 342 aa, Bacillus licheniformis
MQQQQFDQLTTAEKREVERQLHLYMDGAEEVIPPEELRAKLAKSILTGEPLKIKLGLDPSAPDVHLGHTVVLNKLRQFQENGHIVQLLIGDFTGKIGDPTGKSAARKQLTDEEVRRNAETYFQQFGKVLDQNKVELHYNSKWLKRLTLEDVIELAGKITVARLMERDDFEERIAMQKPISLHEFFYPLMQGYDSVVLDSDIELGGTDQHFNVLMGRHFQEKYGKEKQVVILMPLLEGLDGIEKMSKSKNNYIGIDEDPHEMFGKTMSLPDSLMKKYIHLATDLEAEEKNVLSRIWKRGPFIRETRRCFSGKPLSTCIMEARRQKRPNSSLRKFFSKTARRTI

SEQ ID NO: 5641 - protein, 168 aa, Bacillus licheniformis
LNRSPHLRQEEHDTLSKLKRMPIESLNLEAISVATNLYRSAQKLRVKMETEVLSSYQLSWTAFSILYDLWVWGRLETRKLAELSGISTATASNVIKTLEKKNFCVKSADPRDRRHVYAEITPEGKAAIEELYPAFHKGETMLIKGMTKEEQNTLIELLRKVNDNLHKP

SEQ ID NO: 5642 - protein, 188 aa, Bacillus licheniformis
MKKKSAPLILIMALSLLLPFAQAEAAGSKGASGVKASSSSANNSALKTRAGSVNQSMRSYMKQSASRRYLNKNSQFNTIQRTLPPDALYKGSIKRTLNQNPAGSAFLNYYFPYWMIFHVGGYTAEQKNILRTAGIKEKALSERKEKRYWLLIEDQNGKKHAVLVSKKQYDSIQKGDRIEVRRKQITKK

SEQ ID NO: 5643 - protein, 130 aa, Bacillus licheniformis
VKKSKLISLSAAAMLLAVPLSGCSSSASDRSQEVADDQSIQKYDLVWFDYVNDSESDKAPLLKAAYVKDGKEKTETFKKYVENVENVEQPYIKIRDQEAFIFRPPYIKYDQEPLEGVVKDKVEQKSSDEQ

SEQ ID NO: 5644 - protein, 126 aa, Bacillus licheniformis
MKKILFSVFVLAGSLLLAFNFAGEASAKTKKVSGYITWYNGVGKIGADGKRLGHWDCATKMGFDCPRKGTKIRAYSKAKPHKVITVYKYDVGRMPGAVLDVSPKAFRALGFPTSKGKVAGHYTYKK

SEQ ID NO: 5645 - protein, 339 aa, Bacillus licheniformis
MKKVSVVLLAAVILAAGAFAAVRYFVPEKAEPAKSGGSDLLVSITDQKLMTAYYENQNKLYEEKMTDYPAMALDRKKRILYYTNTDNSNVKHLIRLDLQSGKKTTLYSGDEYVDGLSLSADGSKLFMRYNLAEERNFHLASFDLKQKAFHVIYPSLKNKDETVSYYQYNKADNQFVMLHYSLKEDYQKTDDANNKGVPPEPTNMNISMAGVKDRQKVRTIAKFINDVAISPDGKTIVFTESADDQKAIYAMDAETKKYKAIISDQQAFSLVDSAQPQFSKDGKKLYFLAEAKDAKLLEDETGSEARVRTIYSYDMDTKKVSKAWEKTNGIINTFTVIDE

SEQ ID NO: 5646 - protein, 330 aa, Bacillus licheniformis
MASAKLQQRLDQYKAIYSELKSDLKWKVTDQRTLMMIASMYVVNKRPFDKERFLKLSEAVKQAAGTFSPLRSAHRYTFAAMFDVRFEEPETHIRPFFTLYEKMTGNGFKKSIFTYLSALILLTKYRDEHDHDSKINRALSIYKGMKDKHVFLTSAGDYPLSVLLAGSDMETGELIDYIEAFYQKLNQAGFRKGNDLQFLSHILSLMPEQDSDQLVARSLRIYDELTKKHKRPKPVHYPEIGLLALLENGEKDIDAITIMAGALNSDKLFRWQKDMNLKTAVNLYMSEKTEDPALLDTGLYQTLEAVIQAQQTAAIAIMTSSAAASQANGS

SEQ ID NO: 5647 - protein, 100 aa, Bacillus licheniformis
MSVPKDAACSMPHDHQRSLHDLCRKYMHYHVVLKMKDGSSVHGILEGVNRQEASVLIPEDVTDERQFYGGYGYPRRRFRRFRRRIFPFVFIAALYPFPYY

SEQ ID NO: 5648 - protein, 85 aa, Bacillus licheniformis
MSSYEEYYDNYDPYSPEREKERQSMKARRSADSNKTDKTNKTDKTAKADKTDKTRSSDDDRFKCRKRKCFSDDDDDRFKCRRMKC

SEQ ID NO: 5649 - protein, 44 aa, Bacillus licheniformis
LNKGFFVSTANIICINHFFTAAPAGACGKHSDGRPDMIEGAECR

SEQ ID NO: 5650 - protein, 182 aa, Bacillus licheniformis
MKNSRKKEILSWVKTLVIAAALVMVCRYFLFTPSTVLGDSMYPTLEDGNMVMVSKISDIQRFDKIIFHAPDSDENYVKRVIGLPGDTIEMKDDVLYINGKAYDEPYLKKNKQKLTLHEHLTDNFTLEKLTGEQKVPEDHLFVMGDNRQNSKDSRFFGFITMDSVVGKVEFRYFPFNEIGGIE

SEQ ID NO: 5651 - protein, 94 aa, Bacillus licheniformis
MFNRQQIDHLLEEKKGELKKKFGSGFIAVFYISILLSICTFFIEYKYFLIVLFAPTIIVMLINPPFSEKKGVFRFIAGLYLLLLALATYFWLRA

SEQ ID NO: 5652 - protein, 40 aa, Bacillus licheniformis
LHKNRTEYKSPTYFVNDLKGCLQLGWEAFLAFAHFGERTV

SEQ ID NO: 5653 - protein, 214 aa, Bacillus licheniformis
MKVFVVGANGQIGRRLTKSLNESSEHQVRAMVRNEEQAQALKQSGTETALANLEGTVESIAEAAEGCDAIVFTAGSGGNTGADKTLLVDLDGAVKTIEAAEKAGIRRFIMVSTLQAHRRENWNEALKPYYVAKHYADRMLEGSELNYTIIRPGGLLNEPGTGRVKAAENLERGTIPREDVADTILAALTEEHTFRRSFDLVSGDQTPAEALKSI

SEQ ID NO: 5654 - protein, 290 aa, Bacillus licheniformis
MNDYERIQNAVQFIEEHLQNDLNITDIAAKSCFSPFHFQRLFQAISGFSVYQYIRNRRLSEAALLLEKTDRSILDIAINFGYGSQEAFSRAFSQYFGITPAKYRKAKVKLDFQSKINFLEYKERMTGDMNIPKPHITHLNDIHMIGYEYRTNLNDEKYFEDIPKFYNDFGRNGYFMQIPQKTDPNMCYGLSCRFQDDGGFSFIIGEAVRETAAGEVPEPLIYTKIPGGKYAVFHVNGSTESVQNTRRYIYGSWLMNTNYERTEGPDFEVTDVCRSVPPNEMKMTIYIPLL

SEQ ID NO: 5655 - protein, 513 aa, Bacillus licheniformis
MKLEKFVDRLPIPQVLQPQSKSKEMTYYEVTMKEFQQQLHRDLPPTRLFGYNGVYPGPTFEVQKHEKVAVKWLNKLPDRHFLPVDHTLHDDGHHEHEVKTVVHLHGGCTPADSDGYPEAWYTKDFHAKGPFFEREVYEYPNEQDATALWYHDHAMAITRLNVYAGLVGLYFIRDREERSLNLPKGEYEIPLLIQDKSFHEDGSLFYPRQPDNPSPDLPDPSIVPAFCGDTILVNGKVWPFAELEPRKYRFRILNASNTRIFELYFDHDITCHQIGTDGGLLQHPVKVNELVIAPAERCDIIVDFSRAEGKTVTLKNRIGCGGQDADPDTDADIMQFRISKPLKQKDTSSLPRILRKRPFYRRHKINALRNLSLGAAVDQYGRPVLLLNNTKWHEPVTETPALGSTEIWSIINAGRAIHPIHLHLVQFMILDHRPFDIERYQENGELVFTGPAVPPAPNEKGLKDTVKVPPGSVTRIIATFAPYSGRYVWHCHILEHEDYDMMRPLEVTDVRHQ

SEQ ID NO: 5656 - protein, 335 aa, Bacillus licheniformis
LQKRIEWIDVSKGVGIILVVLGHTPTPDWLKTFIFAFHMPLFFFLSGLVYHDGNMTFTSFLLKKIKTLLLPYFIFSVLAYLFWVLVERHFTFTGSSDVDPVVPFKGIFYSMPDDYMLTHNPALWFLTCLFIVEILFFIVKRWGKGRLFIVIAVLVSAALGFLNYQYLGIKLPWNIEVALTAIVFYSAGFLLKNNLKEMRDRRMLLLTLLLFIAVGCLQTLNVRVDMRANEYGNMALFYMTSFLGTAGVIFSSFHLEKARLLQFLGKNSLIILVLHYPVIRMLKAVVYYFTQVSLDETYGSLLWSALYTGMTLLVMVPCIFLLNRYPIVLGRKKCN

SEQ ID NO: 5657 - protein, 165 aa, Bacillus licheniformis
MMFASSGSSTQESKSSGSSAKTTAAKTSEEKSNDDAKEKTEFGLNETADLDGTHITVTNVKKSMGNEYFKPKNGNEYVVATLNIENKSDKDISYNPLDFQIQNEDGQITHNTFGPSDDNDLSSGNLTPNGKVSGTITFETKKSKTYKVIYTPEFWNDKKITFNLK

SEQ ID NO: 5658 - protein, 290 aa, Bacillus licheniformis
MERYDELKKGETGAWVSIIAYLVLSAVKLAVGLAFHSEALRADGLNNTTDIIASLAVLIGLRISQKPPDEDHPYGHFRAETIASMIASFIMMVVGLEVLYSSGEMLFNPKETTPDMIAAWTAAGSAVVMFLVFLYNKRLAKKVNSHALYAAAADNKSDAYVSIGTFAGIFASQFNLAWVDTAAAFIIGLIICKTAWGIFKEAAHSLTDGFDIKHISTYKETIRKVPGVGNIKDVKARYLGSAIHVEIIVEVRSDLNIAESHDIADEIERRMQEEHSIVHSHVHIEPSKEK

SEQ ID NO: 5659 - protein, 320 aa, Bacillus licheniformis
MSYEEMLHPVLGKVADNIDKVMVGKKDIAVLSLTAILANGHVLLEDVPGVGKTMMVRTLAKSTGAEFKRIQFTPDLLPSDVTGVSIYNPKTLEFEYRSGPIMGDIILADEINRTSPKTQSALLEAMEEGSVTVDGVTMPLSKPFFVMATQNPVEYEGTYPLPEAQLDRFLFKLRMGYPTVREELQVLDLQENRSPIEEIEPVIEKEELAAFQKEAEKVYVDAAIKEYIVGITQKTRSHSAVYLGVSPRGSIALMKAAQAFAFLYNRDYVIPDDIQYLAPFTLAHRMILRSEAKFEGKRPEAVLQDIMSKTEVPVGRPMSS

SEQ ID NO: 5660 - protein, 403 aa, Bacillus licheniformis
MRERIGLVMYGWKLFILFLLFASTFCYAMFQGGFVSWFLFYSFLPFALYAFLFAFYPLKNLTAERRLSQGQYKAGDQLEAFVVLKRKWPFPIMFMIVEDCLPDSLGKNRGSAEAKQLLFPWFKKEIKMAYTIDSVPRGDHRLAKIRVRTGDPLGLLERECEIQLEASFLVLPSYQEIAYRASGGSYDEHAGRVSELRRKDSTLASGIREYQPGDRFAWVDWKTSARRSQLMTKEFEQTKGDDLLVFMDQSPSEAFEEIVTFTASIIRSAMRSGTNAGLVSIGKERNVFPVRQGEEQLRKLFYYLAIADCNAVQPFHSLIEGELGHSDMRKAVKYIVTSRITIELVQALKKPLSGGRPVICLVKKKGGDLSSEESAAVQHLKARGIEVNVIYGEHFSRGLAEAR

SEQ ID NO: 5661 - protein, 741 aa, Bacillus licheniformis
MLSGGKRNRFGLLLFYVLTFLLLWEWLRPLQYFTDTGHTVFFILFIALVFLLTFFKVPWFIRFPVSLGFVLFALHTIFYEGSVFSPSWIALFFQDLKRNFSYIFSGMWRDMSPLFRTLLFYVLLWLLVYLLHYWVIYQRRILFFFIMTVVYVAVIDTFTPFDASYAIVRIVLIGFLLLGLLYLERIRESEALKSSKSRFAKWFAPLLLMTAAAVCIGAVSPKADPVWPDPVPFLQTAATGDFASSGRSKVGYGTNDEALGGPFSKDDTWVFTWQGNERSYFRVETKSRYTGKGWIEDEKSGASIQLEEDKLDYQWYDESVKTETRKAIVDIDPAYRYDHVLYPIGTTEIKLNNFFVPLRMNLNTEKIKPAGKTGADIQNLESYSVTYKSPVFDVDQLRKVSLESEGKWARSHEKYLQLPTSLPDRVKTLAHDLTKDEDNIYDKAKAIEKYLGSSEFSYETEDVAVPKGDQDYVDQFLFETKIGYCDNFSTAMIVLLRSAGIPARWVKGYTSGEYAGTTADRKRTMYEVTNNNAHSWVEVYFEGQGWVTFEPTKGFLNPEQLVEESSGQQAGAASDKKEDDKKNDEGQRPQDAKEQDNKEKPESQAKRDAKADSHAGSDDADRTLLTGAAVLGLLLAFAAVLYYTRVKWMPHIIINRLKKRRDEAVFFKAYDELLRQLKRQGMQKEEGQTLREFAKTVDERFQSGDMTALTLQYERALYRKEDAAKLWNDSAELWENLIKKR

SEQ ID NO: 5662 - protein, 513 aa, Bacillus licheniformis
MTKLVNEMILVLDFGSQYNQLITRRIREFGVYSELHPHTLTAEEIKKMNPKGIILSGGPNSVYDEGSFRCDEKIFELDIPVLGICYGMQLMTHYLGGKVEAASQREYGKANIHIEGEPDLFKDLPNEQVVWMSHGDLVVEVPEGFTVDATSHHCPNSAMSKKDKKWYGVQFHPEVRHSEYGNDLLKNFVFGVCECVGEWSMENFIEIEMQKIRETVGDKQVLCALSGGVDSSVVAVLIHKAIGDQLTCIFVDHGLLRKGEAEGVMKTFSEGFNMNVIKVDAKDRFLNKLKGVSDPEQKRKIIGNEFIYVFDDEAEKLKGIDFLAQGTLYTDIIESGTATAQTIKSHHNVGGLPEDMQFELIEPLNTLFKDEVRALGTELGIPDEIVWRQPFPGPGLGIRVLGEVTEEKLEIVRESDAILREEIAKADLEKDIWQYFTVLPDIRSVGVMGDARTYDYTIGIRAVTSIDGMTSDWARIPWDVLEKISTRIVNEVKHINRVVYDITSKPPATIEWE

SEQ ID NO: 5663 - protein, 440 aa, Bacillus licheniformis
LKRYFQFEELGTNYRREMIGGLTTFLSMAYILIVNPLTLSLASVENFPDALRMDQSAVFTATAVAAAVGCFIMGLLAKYPIALAPGMGLNAFFAFSVILNMQIPWQTALSGVMVSGLIFIVLSLSGLREKIINSIPYELKMAVGAGIGLFIAFVGLQGSKIVVSNPDTIVSFGNIHSGPVLLTVFGLIITVILMVLRVNGGIFFGMLITAIVGMIFGQIDVPDKIVGAVPSLAPTFGQAFIHLHDIFTVQMLVVILTFLFVDFFDTAGTLVGVASQAGLMKDNKLPRAGRALLADSSATVAGAILGTSTTTAYVESSAGVAAGARSGFAAIVTGVLFLLSLFFSPVLSVITSQVTAPALIIVGVLMVANLNKIDWTKFEIAVPAFFTMIAMPLTYSIATGIAIGFIFYPITMIFKGKAKEIHPIMYGLAVVFILYFIFLK

SEQ ID NO: 5664 - protein, 49 aa, Bacillus licheniformis
LFYIIFVSFVMFFNHISNSSSIQKLYINEKHFYKLHKLCETVKTNLFLS

SEQ ID NO: 5665 - protein, 252 aa, Bacillus licheniformis
MIEEHHKRNEDDIEQEPASRMSRNSRKKAKKSKETNPSAAKVKSVMESVIAALFRYFSFVLDILKSPVRTALDYDRSYFKYSVISMTLLAVFFSLGNFYQLLAGRGRILGFGVSVPFMEVFLVVFIYCMAFMFWMAAASWAVSNFMLRYKASFFDITAKYGSLLVPFIVPAALWMIFAIINFTAATVILSIVIFMGLTFGTFTLIQSIYEKSEKPRFDLMYCVFTVFLLELVFVGATWKLVGGYLLSSLIPV

SEQ ID NO: 5666 - protein, 51 aa, Bacillus licheniformis
MANFLRKAVKTKKGVFNQAARKIRTAGQFERPLVIHAERFGKGTPEAAQIR

SEQ ID NO: 5667 - protein, 184 aa, Bacillus licheniformis
LLHSALLNGVIMVGIILVINIIYVTFLTLRMILTLKGQRYLAAFIGTIEMLVYVVGLGLVLDNLNQIQNVIAYAVGFGIGIIVGTKIEEKLALGYITVNAITKELDLDLPKQLREKGYGVTHWVVGGLEGDRTAMQVLTPRKYELQLYETIKSIDSKAFIISYEPKTIHGGFWVKAVKKRRIKE

SEQ ID NO: 5668 - protein, 65 aa, Bacillus licheniformis
MTKPKKKRFEVTEGETIETVLTKMQEEGYTPVRRMEEPVFKETKENGTIQVVPCGRKIIFEGKLL

SEQ ID NO: 5669 - protein, 162 aa, Bacillus licheniformis
MQPLLGVIMGSTSDWETMKHACGILDELGIPFEKKVVSAHRTPDLMFEYAETARERGLKVIIAGAGGAAHLPGMVAAKTTLPVIGVPVQSKALNGLDSLLSIVQMPGGVPVATVAIGKAGAVNAGLLAAQILSAFDEKYAGRLDERRESIRQTVLESSDQLV

SEQ ID NO: 5670 - protein, 380 aa, Bacillus licheniformis
LYKQTIFPGATIGIIGGGQLGKMMAVAAKQMGYKIAVVDPVPSSPCGQFADLEITAAYNDREAIRKLAEASDVITYEFENIDYDALNWLKEHAYLPQGSELLLLTQNRETEKKAIASAGCKVAPYRIIHDRAELEASVAELGLPAVLKTCRGGYDGKGQYVLKGHAQIGEAAALLQHGTCILESWVPFKMELSVIVTRSVHGETTVFPAAENIHKQNILFQSIVPARADEAIQEQAAALALRLAEKLQLVGTLAVELFLKEDGVLLVNELAPRPHNSGHYTLDLCETSQFEQHIRAVCGLPLGKTDLLKEGMMVNLLGDEVYMAEEDPELLKEAKLYIYGKHEVKPSRKMGHITFLRTPDDEWIGKMTEKWTERDGGRKQ

SEQ ID NO: 5671 - protein, 431 aa, Bacillus licheniformis
MIERYSRPEMAAIWTDENRFQAWLEVEILACEAWAELGVIPKEDVKVLREKASFDINRIFEIEQDTRHDVVAFTRAVSETLGEEKKWVHYGLTSTDVVDTALSYLLKQANDILLKDIERFVDILKEKAKEHKYTVMMGRTHGVHAEPTTFGLKLALWYEEMKRNLERFKQAKEGIEVGKISGAVGTYANIDPFVEQYVCDKLGLKPAPISTQTLQRDRHADYMAALALVATSIEKFAVEIRGLQKSETREVEEFFAKGQKGSSAMPHKRNPIGSENMTGMARVIRGYMLTAYENVPLWHERDISHSSAERIILPDATIALNYMLNRFGNIVKNLTVFPENMKRNMDRTLGLIYSQRVLLALIDTGMAREEAYDTVQPKAMEAWEKQVPFRQLVEAEEKITSRLSPEQINDCFDYNYHLKNVDYIFERLGLA

SEQ ID NO: 5672 - protein, 238 aa, Bacillus licheniformis
VNIVKNELLYEGKAKKIYRTDDDNTLFVEYKNSATAFNGEKKAEIDGKGRLNNEISSLIFTRLHEKGINNHFVERISETEQLIKKVTIIPLEVVVRNVVAGSMSKRLGIPEGTELGQPIIEFYYKDDALGDPLITEDHIRILKAAEPEQVEKIKSITRQVNEELQTIFAACDVRLIDFKLEFGLDKDGEVLLADEISPDTCRLWDQETNEKLDKDVFRRNLGGLTDAYEEIFKRLGGM

SEQ ID NO: 5673 - protein, 84 aa, Bacillus licheniformis
MYKVKVYVSLKESVLDPQGSAVQHALHSMSYKEVQDVRIGKYMELTIEKSDRDLDVLVKEMCEKLLANTVIEDYRYEVEEVVAQ

SEQ ID NO: 5674 - protein, 227 aa, Bacillus licheniformis
VKFAVIVLPGSNCDIDMFHAIKDELGEEAEYVWHTETSLDEYDGVLIPGGFSYGDYLRCGAIARFANIMPAVKKAAEEGKPVLGVCNGFQILQELGLLPGAMRRNKDLKFICRPVELIVQNNETLFTSSYGKGESITIPVAHGEGNFYCDEETLAGLQENNQIAFTYGTDINGSVADIAGVVNEKGNVLGMMPHPERAVDSLLGSADGLKLFQSIVKNWRETHVATA

SEQ ID NO: 5675 - protein, 742 aa, Bacillus licheniformis
MSLLLEPSQEQIKEEKLYQQMGVSDDEFAMIESILGRLPNYTEIGIFSVMWSEHCSYKNSKPILKKFPTKGERVLQGPGEGAGIVDIGDNQAVVFKIESHNHPSAIEPYQGAATGVGGIIRDVFSMGARPIAVLNSLRFGELTSPRVKYLFEEVVAGIAGYGNCIGIPTVGGEVQFDGCYEGNPLVNAMCVGLINHEDIKKGQAKGVGNTVMYVGAKTGRDGIHGATFASEEMSDQSEEKRSAVQVGDPFMEKLLLEACLEVIKSDALVGIQDMGAAGLTSSSAEMASKAGSGIEMNLDLIPQRETGMTPYEMMLSESQERMLLVIERGREQEIIDIFDKYDLEAVAVGHVTDDKMLRLFHNGEMVAELPVDALAEEAPVYHKPSKVPAYYKEFLETDVPAPKVEDAKETLLELLKQPTIASKEWVYDQYDYMVRTNTVVAPGSDAAVLRIRGTKKALAMTTDCNARYLYLDPETGGKIAVAEAARNIVCSGAEPLAVTDNLNFGNPEKPEIFWQIEKAADGISEACNVLSTPVIGGNVSLYNESNGSAIYPTPVIGMVGLIEDTEHITTQHFKAAGDLIYVIGETFPEFAGSELQKLTEGKIYGKAPAIDLEVEQSRQKALLKAIRSGLVQSAHDVSEGGIGVALAESVISSQRLGAHVTLAGEPALLFSETQSRFIVSVKKDHQEAFEKLVKDADLIGEVTSDSVLAVQSQEGQQWIHAQTEELESAWKGAIPCLLKSKA

SEQ ID NO: 5676 - protein, 476 aa, Bacillus licheniformis
MLAEIKGLNEECGVFGIWGHEEAPQITYYGLHSLQHRGQEGAGIVATDGEKMSAHKGQGLITEVFQNGELKKVKGKGAIGHVRYATAGGGGFENVQPFLFHSQNNGSLALAHNGNLVNATQLKQQLENQGSIFQTSSDTEVLAHLIKRSGHFELKDQIKNALSMLKGAYAFLIMTEKEMNVALDPNGLRPLSVAMLGDAYVVASETCAFDVVGATYLRDVEPGEMLIINDEGMKSERFSININRSICSMEYIYFSRPDSNINGINVHSARKNLGKKLAEESGIEADVVTGVPDSSISAAIGYAEATGIPYELGLIKNRYVGRTFIQPSQSLREQGVRMKLSAVRGVVEGKRVVMVDDSIVRGTTSRRIVTMLREAGATEVHVRISSPPIAHPCFYGIDTSTHEELIASSHSVEEIRQEIGADTLSFLSIEGLLSGIGRQYEGENCGQCMACFTGKYPTEIYQDTVLPHVKEIVLTK

SEQ ID NO: 5677 - protein, 346 aa, Bacillus licheniformis
LSESYKNAGVDIEAGYEAVKRMKKHVERTKRIGAMGGLGGFGGMFDLSELPYKQPVLISGTDGVGTKLKLAFAMDKHDTIGIDAVAMCVNDVLAQGAEPLFFLDYLAVGKADPVKIEEIVKGVAEGCVQSGSALVGGETAEMPGLYTEDEYDIAGFSVGAAEKDGIVTGENISEGHLLIGLSSSGLHSNGFSLVRKVLLEDAGLNLDETYAPFERPLGEELLEPTKIYVKPVLEAVKSGKIAGMAHVTGGGFIENLPRMMPDGLGVEIDIGSWPVPPIFPFIQEKGGLKSEEMFNVFNMGIGFVLAVKEEDMTDVIQTLENNGEKAYLIGRVKAGSGVVFGGAGLS

SEQ ID NO: 5678 - protein, 195 aa, Bacillus licheniformis
MKKFAVFASGSGTNFEAIERRMREENWDAEIVLVVCDKPDAKVLERAEKAGIPSFAFQPKSFDNKAAFEQVIVEQLRLHGAEWIVLAGYMRLIGDTLLSAYRNKIINIHPSLLPAFPGIDAVGQAYRAGVKVAGITVHYVDEGMDTGPIIAQRAVELEKSETLASLEEKIHKLEHELYPEVIKELLELNGRGEKE

SEQ ID NO: 5679 - protein, 512 aa, Bacillus licheniformis
MTIKRALISVSDKTNIVPFVKELTELGVEVISTGGTSKLLQENGVDVIGISEVTGFPEIMDGRLKTLHPNIHGGLLAVRGNEKHMAQLNEQGIQPIDLVVVNLYPFKETVSKEDVTFEEAIENIDIGGPGMLRAAAKNHQDVAVIVDPRDYSPVLNDLKENGSVSLEKKRELAAKVFRHTAAYDALIADYLTNVTGEKEPEQFTVTFEKKQSLRYGENPHQEAVFYQSALPVKGSIASAEQLHGKELSYNNIKDADAALQIVREFTEPAAVAVKHMNPCGVGTGNTIEEAFNKAYAADETSIFGGIIALNREVDKATAETLHKIFLEIIIAPAFSQEALDILTSKKNLRLLTLDVNQPVKNEKQLTSVQGGLLIQDLDMHGFDDADITIPTKREPTEQEWADLKLAWKVVKHVKSNAIVLAKDDMTIGVGAGQMNRVGSAKIAIEQAGEKAKGSALGSDAFFPMPDTVEEAAKAGVTAIIQPGGSVRDEDSIKKADEYGIAMVFTGIRHFKH

SEQ ID NO: 5680 - protein, 422 aa, Bacillus licheniformis
VNVLIIGRGGREHTLAWKAAQSPLVGTVYAAPGNDGMAGTAVLVDLDEGNHEGLLAFAKENNIGLTIVGPEVPLIEGLVDAFEEAGLPVFGPSKNAAVIEGSKQFAKDLMKKYQIPTAEYETFTSFENAKAYVEEKGAPIVIKADGLAAGKGVTVAMTAEEAVQCLHDFLEDEKFGEASASVVIEEFLSGEEFSLMAFVKGEKVYPMVIAQDHKRAFDGDKGPNTGGMGAYSPVPQISDAVVEDAVKTILEPAAEAMVKEGRSFTGVLYAGLMLTEKGTKVIEFNARFGDPETQVVLPRLESDLVQVLVDLLADREVELKWKDTAAVTVVLASDGYPESYEKGAPIGTLEPDMEQTVVFHAGTKKSGDQFVTNGGRVANVTAFAETFDAAREAAYQAVDRVRKPGLFYRMDIGSRALKAAQK

SEQ ID NO: 5681 - protein, 199 aa, Bacillus licheniformis
VIEEAAELADSYRGDKRITKSKTNLKKALFELLAEKEWGKISVQDITQRANLNRTTFYQHYQDKYDLLHQHMRDMFEAMKEDIFSPLDIDSSGKKPEAYWYVLRFYHHLQQNSGDFAIIINRRYELNIKELLNDFWNDSFLTGIKKTAAADTDRSVPLDIQRRFVISAFAGTAAWCLENGMPYPPELMAESMIKIIQKN

SEQ ID NO: 5682 - protein, 326 aa, Bacillus licheniformis
MSQTKQQNPIQKALINGKNRQDPYDPFPWYKKMRTESPIHYDEDSKVWSVFRYDDVKRVISDKDFFSNQFPQLGTGNTFAKTMISMDPPKHTRIRSIVNKAFTPRVMKEWEPRIRELTNELLADVRGREEIDLVQDFSYPLPVIVISELLGVPSVYKHHFKEWSDLLVSLPKSDRPEDVNEWKNIRDQGEEELTAFFEKMIEEKRQNLGNDLISLLIKAEQEGDKLSPDELVPFCNLLLMAGNETTTNLVSNAVYSNLETPGVYDELARHPELIPQAVEEAVRFRAPAPMIVRFVKQDTEIRGVSLKKGEGVIAFLASANRDETKI

SEQ ID NO: 5683 - protein, 36 aa, Bacillus licheniformis
VSKLGKWLKRELVKKGLPLAKEKLIPILKEKMKKKR

SEQ ID NO: 5684 - protein, 148 aa, Bacillus licheniformis
MKRILIVLAGIGLLGAGGCGMLDQVNDGLNYTNEAAGYIQKVKTFAEEAPSLAEQAVNDTGAKEKLETQLESIQQAAADFNELTPPDAAAEVHNTIEKHNETLQKSAEDVLKSVEEGKLTVEKLEQSELVQSAQQISDVMGQIEKLTE

SEQ ID NO: 5685 - protein, 138 aa, Bacillus licheniformis
MLPKHSKDQRKQLEVVALSELVPEDQLVRKMEEAMDFSFIYEKVAPLYSSKARPSIDPVVLIKMVLIQYVFGHRSMRETIERVFADLKHKRGLRWTTLRGKKKLSMQAMLVFAAMNLKNWRIGRGKALIASLFIEKTK

SEQ ID NO: 5686 - protein, 76 aa, Bacillus licheniformis
MKQNIGLFDAVFRIACGLTILSAAAAKFTRKPWCRMTLFCMFMGAMKAASGILRFCPMTYVCQTYMKQQGETGEQS

SEQ ID NO: 5687 - protein, 579 aa, Bacillus licheniformis
MSERTLIWKNKHIRSQVDVVSSRLQPTLLLRNASVLNPYVKQWIPANVWIHHDRIVYVGRDLPKTAVKTTIDCEGKYIVPGYIEPHVHPFQIYNPQTLAEYVSQFGTTTFVNDNLFLLLHCGKKKAFSILEELKKQPVHYYWWSRYDLQTEVLNEDQILSIDYRKHWGEHPDVIQGGEMTGWPRLLDGDDLILHCMQCTKRRRKRIEGHFPGASEKTLTKMKLFGADADHEAMTGKEVLKRLELGYHVGLRQSSIRPDLRKILRELHEEGFHHYDHMFYTTDGATPNFYKEGMTNKLIEIAIEEGVPLIDAYNMASFNIAKYYHMEDILGVVAPGRYATLNILNSPDEPNPETVLAKGRLIKSGGINMNAFSVPDWQKGGLVPLNLSYDLTMDDLQFSMPLGLKMRNSVIMEPYTIEIDNSVNQLSFDHDESYLSLFDKYGKWRVNTMLKGFATRIQGFVSSYSTTGDIIAIGKNKEDMLLAFKRMKEIGGGIVLAENGKILHEIPLHLSGGASIETYEKVLEREKALKELLFERGYTFDDPIYTLLFLQSTHLPYIRVTPKGIFDVMKKTVLFPSIMR

SEQ ID NO: 5688 - protein, 329 aa, Bacillus licheniformis
MVNRYVRVLLCFASLLLLASCQSQEQQEKEKNIHPLTGLKADGDIRQRPIAVVVNNHSKARPQSGLSKADIVIEALSEGPITRLLAIYQSDMPEAVGPVRSAREYFIDLALGFDSILVHHGWSPGAKDRLLNGDADHINGMDHDGTLFWRADFREAPHNSYTSYKNVKQAADDKGYAIETRTEPLTFKASPDKPSDALYSIRLDYGTKSVTNRVEYGYDKKVEGYVRKSDGVLTTDLETEEPVVLQNILIAEAEHHMKDAYGRRDIDLRSGGKGLLLQNGEVHRISWKNENGRIIPTADGKTVPFVPGKTWINIVPDLSKVSISKGEGV

SEQ ID NO: 5689 - protein, 103 aa, Bacillus licheniformis
MQIDKLRGRELDQLFQSILSLKDLEECYRFFDDLCTINEIQSLAQRLEVARMLRDGNTYHKIETETGASTATISRVKRCLNYGNDAYIMALDRVKANQSESSS

SEQ ID NO: 5690 - protein, 228 aa, Bacillus licheniformis
MYDITEWKHVFKLDPNKDITDDQLEQLCESGTDAVLIGGSDHVTEDDVLRLMSKVRRFLVPCVLEVSTIDAIVPGFDLYFIPTVLNSRDTDWIAGLHKKAMKEYGELMSPEEIVVEGYCILNQDCKAAALTNADTELDIEDIKAYARVAEHLFRLPVFYLEYSGMLGDSETVKETKAVLQETTLFYGGGIKDAETAVKMAEHADVIVVGNAIYENFEEALKTVQAVKG

SEQ ID NO: 5691 - protein, 739 aa, Bacillus licheniformis
LNYISDQLLSGLNKMQQEAVKTTDGPLLIMAGAGSGKTRVLTHRIAYLMAEKRVAPWNILAITFTNKAAREMKERVESILGPGADDIWISTFHSMCVRILRRDIDRIGINRNFSILDTSDQLSVIKGILKERNIDPKKFDPRSILGSISSAKNELIAPEEYEKTAGGFFEQVVSDVYKDYQKKLRKNQSLDFDDLIMTTIVLFDRVPEVLEYYQRKFQYIHVDEYQDTNRAQYLLVKKMAQRFQNICVVGDSDQSIYRWRGADIANILSFEKDYPNASVILLEQNYRSTKRILNAANEVIQNNSNRKPKNLWTENDEGAKISYFRGDNEFGEGQFVAGKIRELVGSGKRSFSDIAILYRTNAQSRVIEETLMKANINYNIVGGTKFYDRKEIKDILAYLRLVANPDDDISFARIVNVPKRGVGATSVDKIAAYADMNGMSLFEALGQVDFIGLSARAANALDEFRQTIENLTNMQEYLSVTELTEEILEKTEYREMLKAEKSLEAQSRLENIDEFLSVTKNFEQQSEDKSLVAFLTDLALIADIDQLDQKEEETGNQDAVILMTLHAAKGLEFPVVFLMGLEEGVFPHSRSLMEEAEMEEERRLAYVGITRAEEELYLTNARMRTLFGRTNMNPESRFIAEIPEELLDNLNEKKKDLKTPFGRKPERRGPVTRPAASYSKTGGDGVNWAVGDKASHKKWGVGTVVSVKGSGESTELDIAFPSPTGVKRLLAAFAPIEKQ

SEQ ID NO: 5692 - protein, 667 aa, Bacillus licheniformis
MEKEAAKRRVEQLHALINKYNYEYHTLDDPSVPDSEYDKLMKELIALEEEHPDLKTPDSPSQRVGGAVLDAFQKVQHKTPMLSLGNAFNEEDLRDFDRRVRQAVGDVEYNVEFKIDGLAVSLRYENGVFVRGATRGDGTTGEDITENLKTIRNIPLRMKRDLSIEVRGEAFMPKRSFELLNKARIERDEEPFANPRNAAAGSLRQLDPKIAAKRNLDIFVYSIAELDEMGVETQSQGLDFLDELGFKTNHERKKCSTIEEVIEIVEELKTKRADLPYEIDGIVIKVDSLDQQEELGFTAKSPRWAIAYKFPAEEVVTTLLDIELSVGRTGAVTPTAILEPVKVAGTTVQRASLHNEDLIKEKDIRLLDKVVVKKAGDIIPEVVNVLVEQRTGKEKEFNMPKECPECGSELVRIEGEVALRCINPECPAQIREGLIHFVSRNAMNIDGLGERVITQLFREDLVHNVADLYKLTREQLINLERMGEKSTDNLLNSIEKSKKNSLERLLFGLGIRFIGAKAAKTLAMHFETLDKLKKATKEELIEVDEIGDKMADALVTYFEKEEILKLLDELEELGVNTVYKGPKKAAAEASDSYFAGKTIVLTGKLSEMSRNDAKAEIEALGGKITGSVSKKTDLVIAGEAAGSKLAKAEDLNIEVWDEARLISELKK

SEQ ID NO: 5693 - protein, 396 aa, Bacillus licheniformis
LKKILCLAAAAGMLMLSACAPNFGGEEEQEMVQKTDKSKEKAIIPKYNISDSYYKMVLPFKAGKARGLTTERLNTRLDIDEFETGMMRLAQDSFSTDDYLFQEGQYLDEDTVSSWLARKKTGDDLKKAEKDDKNFKNLGLNPALSGSGSTEKQNEESPIYLAHMLEHDYLVRKDKDTIELGGVVIGLALNSVHYYRENVGDPQKEVTISDKKLRQEGEKIAEEVAKRIRNMDDLKNIPLTIMLYKQAPKSSIVPGNFIAKTDVKAGTSEIGGWDKINEEYTFFPSTEGSEKHPDDAELFKRFKNKVDTYFPNYTGVVGTALYKDDQMQDMKINIPMQFYGKSEVIAFTQFLTGEVMDYYGKSGLNVEININSSAGQEAVILKKPGDKEPTVHIYDS

SEQ ID NO: 5694 - protein, 308 aa, Bacillus licheniformis
MWEKFYSKNGLAAKNIAKELMNIKAGEKIPRISDYCHKLSIGRGTVQSALNLLVDMKAIQLEARGHLGTFLVSKDNNLLLEIAGIAPLIGSMPLPYSRKYEGLATGIVEGFESTGKTVNLIYMRGGVNRIEAVRTKRSDFAIVSKMTADHIIVEYPNLKIFKKFGESSYVSSHKIFLAHPDEEIGKDGVRVGVDLESLDQKQLTLAEFENKNAEFVNVNYMQLFDMLLSKQIDAAVWNADDKRMIQTFKAIDFFSPKAKKISKDTTEAVIVIEGDREKEIAEKWNLVNEKQILDTQKSVEKGEKIPRY

SEQ ID NO: 5695 - protein, 121 aa, Bacillus licheniformis
VNQIQLEEKLSILLTSRVITKNAFNTTLNTFVFLSEKLKKEVIKDSEMFWTHMAMALTRIKEGESEEVPANAIINEMYETPYKSAIEEVIDFIHSLAGLELPEGELVYFYLHLHKVIESNK

SEQ ID NO: 5696 - protein, 119 aa, Bacillus licheniformis
MVRIVIGGQLKKQAIEKLVKEIGGNNVEVLVKGDLDAVMAVKNNKADYYIGACETGSGGALAMAIALLGKDKCVTLASPSTIKNKEEIEKEVESGKIAFGFTASTSQNILNILIPYLLK

SEQ ID NO: 5697 - protein, 433 aa, Bacillus licheniformis
MDLSLIQCLVIAAVGALGSILVNRGVAVFNDGLRPIMPEYLEGRMTRGELAATSFALSFGLIIGFGIPLSIGATIIIGHSILLACDIIGIWTPENKIGMATAGVIGAVYSIGIVLGLQFVVDLFGKFPVNFIDSLSLIGQPIIIAFTVFPAVAVGYQHGLKKAAVTAIVTLASFLLFEKFGTFQAAGYEISLSPEGMALLAGMLMMIYYAARIRGGDESTNANLVNIFNERVNRIKKNRWLLALMGGLVSLTSSMLILAVDAMPQALINKELYTEAAIATFARGIGFIPLVFSTAIVTGVYGLAGTTLVFAVGLIFRDIPILAFLLGFLVMYLEVISLSAVSKSMDKLPGVREMGEHIRTSLSDVLGMAILIGSAMAGEKIAPGIGFFWVIGFYLINRIASKPLVELAVGPIAVILLGIVANLLYAVGLWQVG

SEQ ID NO: 5698 - protein, 294 aa, Bacillus licheniformis
MLKDGMTYMHEHTTIDLSKVKNNEDCKLDVFPETVREFKSLYEKGVRNIVDVTNIGMGRNITYVQKVAKETGINIVFSTGFYQDSFYPIHVFRESKEKLAERMIMEIVEGIRGTDANAEVIGEIGTSYNKWTETEQKVFEAVVVAHKQTKKPISTHTSIGTLGHEQVEFFKKHEVDLNRVVIGHVDLSGDADYILKMLREGVYVEFDTIGKENYMPDRVRAEILKKIQDKGYIDKVLLSMDITRKSHLVYKGGVGYSYLIDTFIPLLQTYGITGESIDKMLIKNPRAFMKGESE

SEQ ID NO: 5699 - protein, 380 aa, Bacillus licheniformis
MDTYPLDSLSIEEAMHRQFKLVDVMTRHFRGEELLSLGDLGVVKGINKPRFTKKIEETLADFFGTEKAMLVRGAGTGALRFGFMSFLKPGDEILVHDAPIYPTSKTTLESMGILPIYADFHDSEQIKEAILKHPKLKGVLIQHTRQKIDDHYDLAETIKKIRSIYSDLVIITDDNYAAMKAEKIGAQLKADLSTFSLFKLLGPEGIGVILGRKNLIEKIEKINYSGGSQVQGYEALEALRGLIYAPVMLAIQASVNDQLVHSLNNGAIKGVKKAYLANAQSKVLLVEFVKPIAEKVLHHANELGAAPHPIGAESKYEFAPMFYRVSGTFLSADPSLAKKMIRINPLRSGPETILRILNTSVHRATEDLSVNSSKGDDINE

SEQ ID NO: 5700 - protein, 408 aa, Bacillus licheniformis
MNKRVIIIILDSLGVGYMEDASDYHPSDVGANTFYHILDTVPSLNIPNLEKLGINKILHHPKLKKTDHIASYGVLNLMHQGADSFEGHNEIMGTKPKKTYLAPFAEHLNHVKLALEDQGYKVNIPNSDLPYLLVNDLVVVADNIETDYGQIYNVSAPLDYIPFDEVLKIGRCVRHHVKVNRVIVLGGENVTPEHLQRSVERREDGLIGVNSPKSNVYKQGYQVRHLGFGISPENQLPTLARNRGMEVSLIGKMQDIIYCEGANRFPGVDTEQVMKDIIQEMDRVKKGLIAATVQETDLAGHAQNPVRYANRIEMVDRYLPEILRKMTDQDLLMISADHGNDPTIGHNQHTREKTYLLAYHKKLSPVHIGERKTLSDIAATSADYLGLRNTENGSSFLHLMQKGKEETY

SEQ ID NO: 5701 - protein, 383 aa, Bacillus licheniformis
MFLESTLKYNKKLIEAALSFHQQGIISPNTYVLDLDTVKKNAKVLSEKARKQDIELFFMTKQFGRNPLVAQAIAESGIGKAVAVDPWEAITLSQNGIKIGHVGHLVQIPIHMIPAILELHPDYVTVFSLENAQNINRVAKKMGRKQKVFLRIANKEDYIYKGQEGGFTFEQIVKDIESIEQLEGLEIAGLTSFPCILIQDGLPAVTPNVASMQTVKSFLMERGYKKLEMNMPSATSCATMKLLKENGATQGEPGHALIGTTPIHATKQLAERPAMVYVTEVSHISNHHAYVFGGGFYPRSHMKAALVGTNKDHLKKVQAIEMTPDHIDYYGSLNTVEAKVGDTAIFAFRTQVFVTNAHIAILKNVAEDPELIGVYDSKGNVIE

SEQ ID NO: 5702 - protein, 45 aa, Bacillus licheniformis
MDCLTEKGVAKMLGLFAVQFNTVVSLGHFILWKGEKRENYSCIRL

SEQ ID NO: 5703 - protein, 242 aa, Bacillus licheniformis
VKIIHVSGYEEMSGKSADLMAELIQNSNNPVIGFATGSTPIGLYKCLIKKYRQKEISFRNVTAFNLDEYVGLAKENKNSYHYYMNEKLFKHLDISRRNINIPNGMAEDLEQECLSYDRLVSEKAIDIQILGMGLNGHIGFNEPGTSFKSRTHIVDLDQSTRQANSRFFRSLDEVPTKALTMGIETIMESKRILLLVSGNEKSEALARLLNSTRVSQEFPASILRKHKDVTVMADDAALNKIH

SEQ ID NO: 5704 - protein, 70 aa, Bacillus licheniformis
MSITISKRSTALSELNVIRCKRKLDSKEAAEKKAAFSFMNHQYERSVLEDDGFLSPRIDYPLFSPFQLFE

SEQ ID NO: 5705 - protein, 230 aa, Bacillus licheniformis
MDWHIETETLLKLGIATLIGMVIGLERELKNKPLGLKTCIVIAISSCVLTMISIDAAYHFPRSNRIMMDPLRLPAQIISGIGFIGAGVILRKSNDVISGLTTSAMIWGAAGLGVAIGAGFYKEAFVSLIFILISVEFLPWIVGKIGPNRLQEKEIRVRMSLNDKDKLTDILKEMKAKKIRIHSVRIDDMRDNEFPIMETKIMVHKKRYVTDVYYDIKAIDGVVGVKCDTL

SEQ ID NO: 5706 - protein, 46 aa, Bacillus licheniformis
LKCRGMSWNHSSARSLYSYHYIAGVASKEFRLSKKAAGYRPAAFVT

SEQ ID NO: 5707 - protein, 493 aa, Bacillus licheniformis
VSVEVFISLGIYFAAMLLIGWYSYRKTSNLNDYMLGGRGLGPAVTALSAGASDMSGWMLMGLPGAMYVTGLSSAWLAVGLTIGAYVNYLVVAPRLRTYTEVANDAITIPDFFENRFNDTTRILRLASAIVIMVFFTLYTSAGMVSGGRLFETAFGLDYKIGLFLTAAVVIAYTLFGGFLAVSLTDFVQGLIMFIALVLVPIVAFTQLGGITPTFNVIEEINPSLLDFFKGTTVISIISFLAWGLGYFGQPHIIVRFMAISSVKELKPARRIAMGWMIISVIGALLVGLTGVAYVHETGTALKDPETIFIVFSKVLFHPLITGFLLSALLAAIMSTVSSQLLVTSSAMTEDFYRTFFRRKASDKELVLVGRLSVLLVAVIAILLSLTPNNTILDLVGYAWAGFGSAFGPAILLSLYWKRMNQWGALAGMITGAVTVLIWILTGLQEKTGIYEMIPGFFLSLIVVYAVSMITNKPAKEARDMFEEMEQTHEEEHS

SEQ ID NO: 5708 - protein, 46 aa, Bacillus licheniformis
MKAFTNDIQSKNILNISTCRFTEFFMYNEIKGAKWGEDRGFVDLEG

SEQ ID NO: 5709 - protein, 96 aa, Bacillus licheniformis
MSRISIEEVKHVAHLARLAITDEEAAMFTEQLDSIISFAEELNEVDTENVKPTTHVLQMKNIMREDVPDKGLPVEDVVKNAPDHKDGYIRVPSILD

SEQ ID NO: 5710 - protein, 485 aa, Bacillus licheniformis
MSLFDHKISELKRLIHNKEISISDLVDESYKRIHEVDGKVQAFLQLDEEKARAYAKELDEALDTRDEHGLLFGMPIGIKDNIVTKDLRTTCASKILENFDPIYDATVVERLHEAEAVTIGKLNMDEFAMGSSTENSGFKKTKNPWNLETVPGGSSGGSAAAVAAGEVPFSLGSDTGGSIRQPASFCGVVGLKPTYGRVSRYGLVAFASSLDQIGPITRSVEDNAYLLQAISGVDKMDSTSANVDVPDYLSALTGDIKGLKIAVPKEYLGEGVSEEAKQSVLEALKVLESLGATWEEVSLPHSKYALATYYLLSSSEASANLARFDGIRYGYRTDNADNLIDLYKQTRSEGFGNEVKRRIMLGTFALSSGYYDAYYKKAQKVRTLIKKDFEDVFANYDVIIGPTTPTPAFKIGEKTSDPLTMYANDILTIPVNLAGVPGISVPCGFANGLPLGLQIIGKHFDESTVYRVAHAFEQATDHHKAKPEL

SEQ ID NO: 5711 - protein, 476 aa, Bacillus licheniformis
MNFETVIGLEVHVELKTKSKIFSSSPTPFGAAANTQTSVIDLGYPGVLPVLNKEAVNFAMKAAMALNCEIATETKFDRKNYFYPDNPKAYQISQFDKPIGENGWIEIEVGGKTKRIGITRLHLEEDAGKLTHTGDGYSLVDYNRQGTPLVEIVSEPDIRTPEEAYAYLEKLKSIIQYTGVSDCKMEEGSLRCDANISLRPIGQEEFGTKTELKNLNSFAFVQKGLEHEEKRQAQVLLSGGVIQQETRRYDEASKTTILMRVKEGSDDYRYFPEPDLVELYIDDEWKQRVKDSIPELPDERRKRYIEELGLPAYDAKVLTLTKEMSDFFEAAVEKGADAKLASNWLMGEVSAYLNAQQKELADVELTPEGLAGLVKLIEKGTISSKIAKKVFKELIEKGGDAEKIVKEKGLVQISDEATLRKLVTEALDNNPQSIEDFKNGKDRAIGFLVGQIMKASKGQANPPMVNKLLLEEINKR

SEQ ID NO: 5712 - protein, 100 aa, Bacillus licheniformis
MERKDVPEWILALEEEDVEFIKNFMLKSGSLKEIAKSYQVSYPTVRVRLDRLIQKIQLIDELENETFVNFIKQLAIDDQISLENAKLIIEKYKKERGVHK

SEQ ID NO: 5713 - protein, 93 aa, Bacillus licheniformis
MNPIYILLIGFTILGIQYFLSTRNHTFWGAILPTAYIVFLVALSIYEGKSFASFFLPLIGGLALLLGEWIKGREALKKKREREMRIMKAMDIK

SEQ ID NO: 5714 - protein, 360 aa, Bacillus licheniformis
VKKNIVCSIFALLLAFAVSQPSYAHTVSPVNPNAQPTTKAVMNWLAHLPNRTESRVMSGAFGGYSLDTFSTAEADRIKQATGQLPAIYGCDYARGWLEPEKIADTIDYSCNRDLIAYWKSGGIPQISMHLANTAFTSGHYKTQISNSQYERILDSSTPEGKRLEAMLSKIADGLQELENEGVPVLFRPLHEMNGEWFWWGLTQYNQKDSERISLYKQLYVKIYDYMTKTRGLDHLLWVYAPDANRDFKTDFYPGASYVDIVGLDAYFDDPYAIDGYEELTSLNKPFAFTEVGPQTTNGGLDYARFIHAIKEKYPKTTYFLAWNDEWSPAVNKGADTLYLHPWTLNKGEIWDGDSLTPVVE

SEQ ID NO: 5715 - protein, 282 aa, Bacillus licheniformis
MTEKEEKIIKAGLHLFAKNGFASTTIQDIANECNISKGAFYLHFKSKEALLLAIIKYYIDRMMENMKIIQQKNFPPKETFKEQIAYQFSESKEHRDFILVMISEHSIPENSKIEEYFKNVSQKFHETYQNALSAAYGDIVKPYLSDLSVIVQGIVQSYQNLFIFNELDIDFYELADFIMRRIDDMIDGMVQNGEQPILAGRTYSYYRNAGNTADKHTILRELEDAKRQPELSEDILITLDVIEEELRKDSPRAPVLQGMLTNLQHQDNVQHLYGMITRFLHS

SEQ ID NO: 5716 - protein, 1052 aa, Bacillus licheniformis
MNSIINFVLKNKFAVWLMTIIVTVAGIYAGLNMKQESIPDVNMPYLTISTTYPGATPSQVADEVTKPVEQAVQNLDGVSVVTSTSYENASSVMIEYDYEKDMDKAKTEAAEALANLDLPDNAKEPSISRYSMNSFPILALSVSSDKDDLQSLTKKVEDSLLTKLEGLEGVASVQLSGQQVEEVEFSFKKDKLKQYGLDEDTVKQVIQGSDVTTPLGLYTFGKEEKSVVVSGDIDTIKDLKNMRIPAASAGGASAQAGAQSAQAAQGAQAQAGAQSAGQAQQSAGVPTVKLSDIATIKDVKKAESISRTNGKDSIGISVIKANDANTVEVADNVKAELEQFKKDHKGFKYSSTYDQAEPITESVETMLSKAIFGAIFAVVIILLFLRDIKSTLISVISIPLSLLIALLVLNQLDITLNIMTLGAMTVAIGRVVDDSIVVIENIYRRMRLKDEPLRGKALVREATKEMFMPIMSSTIVTIAVFLPLALVGGQIGELFMPFALTIVFALAASLLIAITLVPMLAHTLFKKSLTGAPVKAKEHKPGVLANFYKKVLNWSLSHKWITSIIAVLMLVGSLFLVPLIGASYLPATKEKMVQITYTPEPGETKKEAEKEAQKAEEILLDRKHVDTVQYTLGAGNPLMGGSSNGALFYIKYEEDTPDFDQEKDSVLKDIQKQSKRGEWKTQDFSSSGNNNELTYYVYGDSEKEIKGTVKEIEKIMKDQKDLKNVSSGLSSTYDEYTFVADQEKLSKLGLTASQISQALMKETSQAPLTTVKKDGKDLDVTIKTEEETYKSVKDLEDKKITTPTGQEVKIGDVAKVKEGTTSDTISKRDGKIYADVTAEVTSDNVTAVSVDVQKNIDKIDLPDNVTIDTGGVSADIEDSFTKLGLAMLAAVAIVYLVLVITFGGALAPFAILFSLPFTVIGALVGLYVSGETISLNAMIGMLMLIGIVVTNAIVLIDRVIHKEAEGLSTREALLEAGSTRLRPILMTAIATIGALIPLALGFEGGSQVISKGLGVTVIGGLISSTLLTLLIVPIVYEVLAKFRRKKPGMEEE

SEQ ID NO: 5717 - protein, 66 aa, Bacillus licheniformis
MESKGNSEPSPKIVKRLTWIIPIVLIGVIFLLKNMRNPVTDVLFYIVCAGVIILVIFRIIKETKSR

SEQ ID NO: 5718 - protein, 180 aa, Bacillus licheniformis
MIKKGTNIYIRPLTAEDAEACLELQNANRPFFEQFSMERNEEFYTIEGQKKRLQRLYENMENDEDYYFGIFDPANDALIGTINLFQVLRGSLQSAFIGYFLDQKHNGKGYTTEAVKLMVEFAFHDLKLHRIEAGVMPRNIASIRVLEKAGFHKEGIARKNVKINGKWEDHQLLAVINPHD

SEQ ID NO: 5719 - protein, 317 aa, Bacillus licheniformis
VKKPVYFNHDGGVDDLVSLFLLLQMENVKLIGTSVIPADCYLEPALSASRKIIDRFGSYQVETAASDSRGVHPFPKEWRMHAFYVDALPILNEKGEVRTPVSDPPAHLHLIECVRQSPEPVTLLFTGPLTDLARALEEEPAIIKHIAKLVWMGGTFLEKGNVEEPEHDGTAEWNAFWDPYSVKTVFESDIQIEMVALESTNQVPLTNEIRSHWASLRKHIGIDFIGQCYAMCPPLVHNETNSTYYLWDVLTTLTLGTVDMTRSRSIKAVVHTQSPRQGTTEEHPDGRMVKVVDQVDRDQFFAYFEELMKRADRIPSL

SEQ ID NO: 5720 - protein, 304 aa, Bacillus licheniformis
MKRARIIYNPTSGREIFKKNLAQVLQKFEQAGYETSCHATTGEGDAVQAARHAAEREFDLIVAAGGDGTLNEVINGLAPLEHRPKLGVIPVGTTNDFARALGIPREDILKAVDTILEGEARPIDIGRVNGQYFINIAGGGRLTELTYDVPSKLKTMLGHLAYYLKGMEMLLPSLRPTEVEIEYDGKLFEGEVMLFLVMLTNSVGGFEKLAPDSSLNDGMFDLVILKRTNLAEFIRLVGLALRGEHINDEHVIYTKANRVKVTVKDKMLLNLDGEYGGELPGEFENLYRHIDVVMSKEKARKLDE

SEQ ID NO: 5721 - protein, 460 aa, Bacillus licheniformis
MKQKAPVQKNEYYNVVFEDLTHEGAGVAKVDGFPIFVPNALPDEKAQIKVTRVKKGFAFGRLIDLKEESRYRTDAPCPIYKQCGGCQLQHINYEGQLLYKQKQVKDVLERIGKLDLSRITVHPTLGMEDPWNYRNKAQVPVGEREGGLIAGFYQQRSHEIIDMNECLIQQSENDRVVQAIKEICGKYGIKAYNEERHKGWLRHIMVRYGAATGEMMVVFITRTNDFPHKAKIVEEITAAFPHVKSIVQNINPKKTNVIFGDETTVIWGEEYIYDTIGGIKFAISARSFYQVNPEQTKVLYDKALEYAELNGEETVIDAYCGIGTISLFLAKQAKKVYGVEIVPEAIEDAKRNAELNGIENAEFEVGEAETVIPKWYEEGIAADTLVVDPPRKGCDEALLRTILEMKPKRVVYVSCNPGTLARDLRVLEDGGYATLEVQPVDMFPHTSHVECVVLMSRVEK

SEQ ID NO: 5722 - protein, 56 aa, Bacillus licheniformis
MMTAKEFLKQAYRLNELINSDLEELQNLRELSRSVSSPVLEEKVEPSVLTHPLKSM

SEQ ID NO: 5723 - protein, 119 aa, Bacillus licheniformis
MSSGALRHYFSTQDEMLLFIMNEHAKKEAARYEKYDRDPATRKRYGRAWKRIRDSYIAAHPLCEECKRQGKLTPANEVHHILPLARGGTHDRSNLMALCTPCHSAITLYPSCRTHGISL

SEQ ID NO: 5724 - protein, 79 aa, Bacillus licheniformis
YDVMSKRYLTAESVCAGHPDKLCDIIADSILEACLRKDRASRVACEVIATKGKIIVAGEISCSGKIDIRYIVRNVLKEI

SEQ ID NO: 5725 - protein, 253 aa, Bacillus licheniformis
LPLVLSHRIVKRLDDCRKGKLIKGILPDGKAQVTVEYEADTPVRIKTIVISVQHDKNKTQEELKADILNNVLWQCFEDFPFDDETEILINPSGQFVLGGPAADTGLTGRKIMVDTYGGLASHGGGALCGKDPTKVDRSGAYMARYIAKHIVWCGYAKKCEVSISYAIGKANPVAFTVNTLGTGTISDEILTLAAQETFNLRPAAIIEKLRLRNVIYSDTAAYGHFNSCLFPWEDVNKYSEFRKAVEKYVDRED

SEQ ID NO: 5726 - protein, 413 aa, Bacillus licheniformis
MLIEKIKTKQLIPAEYNPRKDLKPGDSEYEKLKRSLEEFGYVEPVIWNKTTGRVIGGHQRLKVLLSMGIDEIECVVVEMDEQKEKALNIALNKISGDWVKDKLALLITDLNASDFDVSLTGFDPGELDDLFKDSLKDNIKEDDFDVDSELKKPAVSHLGDVWLLGQHRLVCGDSTKKDTFDVLMDGKAANLVVTDPPYNVNYEGTAGKIKNDNMANEAFYDFLLAAFQNTEAAMAKDASIYVFHADTEGLNFRRAFSDAGFYLSGTCIWKKQSLVLGRSPYQWQHEPVLFGWKKKGKHLWYSDRKQTTIWEFEKPKKNGDHPTMKPVALVAYPIMNSSLSNCIVLDPFGGSGSTLIACEQTDRICYTIELDEKYCDVIVKRYIEQVGNSDGVFLLRDRLKFRYCDLPEVNEDE

SEQ ID NO: 5727 - protein, 157 aa, Bacillus licheniformis
MSKLTLGSLFDGSGGFPLGGLLCGIEPLWASEIEPFPIRVTTKRIPQMKHYGDINKLNGAELPPVDIITFGSPCTDMSVAGKRAGLDGEQSVLFYEAIRIIKEMRCKTNGQYPRYAVWENVPGAFSSNKGEDFKAVLETVISVKEPNTSVPLPEKGR

SEQ ID NO: 5728 - protein, 370 aa, Bacillus licheniformis
MSKVASEVVAGVLNEFHLAIKKHDTEQAKHLFDEAKSMFSEMEEDQNVLAYFSLLEERYRMMLYDARGERLPRESYFNASQIECIEQTDHMIDYYFYFFEAMHEAYNKNVERAISLYKVAEKKLAKVPDQIEAAEFYFKVSWLYMSLRQNAVSLNYARDAMNIYKMHDGYEKKLAISQVVMGTNYMQMQRFKDAEKYFEESIEISKKIDDSFLEAMLHHNISILYSNSGRSQECILAVQHALSNAEWCKSSYYINSLYMLTREFFKIGETEAALFYHKKGQEELKKNGNKHYEKKINIIYELYCHENVKSIKDDIHSLDEMNDLDGVCDLSLLISSYFEKKGDDKKALEFVKIFMKAENKMRSLGSEVLS

SEQ ID NO: 5729 - protein, 40 aa, Bacillus licheniformis
MKKLILCLSLTAMVLGGAALSQSHNQASGGVQTAELPVGG

SEQ ID NO: 5730 - protein, 41 aa, Bacillus licheniformis
MSKNVLNDWRASREYGRFLYFMLLQIHFNRTPFHGFKKEAL

SEQ ID NO: 5731 - protein, 252 aa, Bacillus licheniformis
MNDKTFLSFLKHADKPFSGWDFSFIEDTGRMKSDLLSWSYGSMALSLIQDSESMLDMGTGGGEFLSKLGPFPSSAYATECYLPNVPVAKERLTPLGVQVVQIDDDEDLPFESGQFDLIINKHESYSVQEVRRILSKGGRFLTQQVGGLDCEEINEKLGVPLNEEFKDWDLETALKEMEKHDFKILKSREECPTQRFYDIGALVYYLKAIPWQALGFEVNQYKDELYEIHKMIEEKGYFDVTQYRFMILAEAV

SEQ ID NO: 5732 - protein, 50 aa, Bacillus licheniformis
LFTVLAFYYIRSFDRNRVLIAGIFVTVCEKKAEEKQRKTRVLGRISKKMS

SEQ ID NO: 5733 - protein, 239 aa, Bacillus licheniformis
MGRKWNNIKEKKASKDANTSRIYAKFGREIYVAAKQGEPDPELNQNLKFVLERAKTYNVPKAIIERAIEKAKGGSEENYDELRYEGFGPNGAMVIVDALTNNVNRTAADVRSTFGKNGGNMGVSGSVAYMFDPTAVIGFEGKTADETLELLMEADIDVRDILEEDDAVIVYAEPDQFHAVQEALQNAGITEFTVAELTMLAQNDVALPEDARAQFEKLIDALEDLEDVQQVYHNVDLGA

SEQ ID NO: 5734 - protein, 69 aa, Bacillus licheniformis
MKTLIKEKRTSLNMTQEELAKRLNVSRQTVISLEKGKYKPSLVLAHKLAQIFECLIEDLFIFEGDENID

SEQ ID NO: 5735 - protein, 104 aa, Bacillus licheniformis
LTETMTNILIALAGLGIGVLGIAIVYKVNRRIGKKERLFDERQQKISYQAKALSWNITMAAILIAWALVIIFQGISFSFFLITGLYILQYLSMLITTVYLAQKN

SEQ ID NO: 5736 - protein, 485 aa, Bacillus licheniformis
MIQITDLNRQYIGGEWRDGQSESVLADLNPFTHKTIASFRKATREDVDAAYKAALEAKKKWDGVNPYEKRVILEKAAAYIEDNREAIVFLIMEELGGTRLKAAFEIDLVVNMIKEAAGFPLKMEGKILPSPVDGKENRIYRIPAGVVGVISPFNFPFFLSVKSVAPALGAGNGVVLKPHEETPICGGTLIAKIFEEAGLPKGLLNVVVTDIGEIGDSFVEHPIPRIISFTGSTKVGSYIGQLAIKHFKKPLLELGGNSALIVLEDADLEYAVNAATFSRFTHQGQICMSANRILVQKEVYPEFLKLFSQKVSGLKTGDPLDPETVIGPVINERQAEHLRKSIEKGIEEGATPLLKGDIKGNLVEPTILADVTPDMSVAKEELFGPVVCVMPFETEADAVEIANDTPFGLSGAVHTGNVESGVAIAKQIETGMIHVNDTTINDEPHVAFGGEKQSGIGRLNGEWSLDEFTTLKWISVQHQKRSFPY

SEQ ID NO: 5737 - protein, 283 aa, Bacillus licheniformis
MNEAVKTDIHPLLDAFVKVAPFLNQLIQDDVTVGIYDTEKLIVNIPGKTFSLNVKVGDPLQEGDIITDAIRQNKKKVSMVPKELFGFPLAARAIPLHDENGRVIGGVGLGTSLEKSDQLHRVAESLSVIVEQTASAIQDIAESVSGFSGQMSDISKQAKEVSESAGEIEKISVTVKGISDQSNLLGLNAAIEAARAGESGKGFSVVADEIRKLATHSKENVGQIDQITKKIHALLKDLEHSIEVINEHTSGQAAGVEQISATMQEISSNAQNLAKMAEHQFED

SEQ ID NO: 5738 - protein, 474 aa, Bacillus licheniformis
MRVYTTTKLTGLLLGPISFLLILGLIPEAELAYAPRIVLAVTAWTAVWWITEAVPIPAASLLPVILLPTLGGLDMETTAKAYGDPIVFMYMGGFIIAIAIEKWNLHKRMALHILKRIGAESHRIVLGVMAATAFLSMWISNAATALMMLPVALAVIKEVQEKEILKGESLQKFSKSILLAVAYAASIGGLATLVGSVPNAVFAAMSKQILNHEIMFFEWFLFGFPVSILFLAILYVYLTKIKFKVSAFQGKKPDFIDHDLKALGAMTREEKSVFTVFLLTACLWMFKFILPFQISDTSIAIFGAVLLFLIPSTKDERILEWKDMQSLPWGLLLLFGGGLSLAAGFSATNLTAWIGGKLKLLEGHPYLFVLIILTAAILFMTEIMSNTAVANMVIPMTIGLGAALQVEPYGLMAAAALASSCAFMLPISTPPNAAVFSSNLLTIKDMVRAGFWLNIAGVFLIVISAYFWLPAVFQ

SEQ ID NO: 5739 - protein, 629 aa, Bacillus licheniformis
MSIFKAEGLYKTYGDKTLFDHISFHIEENERIGLIGPNGTGKSSLLKVIAGHESTEKGDITKPGSLHIEYLDQDPDLDGPETVLEHIYSGDSVMMRTMRTYEQALQELNTAPDDPKKQENLLAAQGKMDEHGAWDANTAAKTILTKLGVADVAKEVSSLSGGQKKRVAIAKTLIQPADLLILDEPTNHLDNETIEWLEGYLSGYPGSVVLVTHDRYFLNRVTNRIYELDRGRLYTYKGNYEVFLEKRAEREALAEQNETKRQNLLRRELAWLRRGAKARSTKQKARIQRVEELKEQDAPETGSSLDFAIGSHRLGKQVIEAEGVDISRGGNQLVRSFNELIVPGDRIGIIGPNGIGKTTLLNALAGRIKPDGGQITIGQTVRIGYYTQDHSEMNDALQVVEYIKETAEVVKTADGQVVTAEQMLERFLFPRSVQRNLIRKLSGGEKRRLYLLKVLMEEPNVLFLDEPTNDLDTETLGVLEDYLEQFPGVVVTVSHDRYFLDRVVDRLLVFEGGGNVSRFQGSYSEYMEKQKENSRQKPASEAAEPVKPEKKKRKKLSYKDQLEWDGIEDRIAALEEKHKRLEEEIAAAGSDFAKIQTLMEEQAQTAEELEAAMERWTELSLLIEELEQS

SEQ ID NO: 5740 - protein, 64 aa, Bacillus licheniformis
MPFEELLSCLLMAALCVLLFIKAMGCRKENRRGSLAFFMMFSIVCLTTLIIKIVKLGHFFGRAF

SEQ ID NO: 5741 - protein, 300 aa, Bacillus licheniformis
MERKLHFPAKPERHRRFGSVEAVKGIKPTDKEQMKDIQNTPNDYFFDIDHVGVSNVSHPILIASSLKPFTQTTIGAFSFTTSLARDRKGINMSRLTEQLQRYHEANWTVDFHTLKDFAKDLAGNMEQESASVSVSFPWYFERISPETKLSGLMHADIHMTVSYHENKGFSQTAGITAHATTLCPCSKEISEYSAHNQRGIIKITAHINEQAEMPDDFKAELLAAAETNASAKLHPVLKRPDEKRVTEQAYENPRFVEDVLRLTAADLYEMDWISAFEIECRNEESIHLHDAVARLSFSKC

SEQ ID NO: 5742 - protein, 370 aa, Bacillus licheniformis
LQHSEIVIVGAGPAGIGMGIVLKKLGFKSFTILEKDRAGASFRSWPEEMKLITPSFTGQGFGALDLNAVAPGTSPAFTFQREHLSGREYGDYLALLADHFQLPIQEGTSVRSVHKDDGGFSVETDKGTMKAKDVIWGAGEFQFPKYSFHGAEIGIHNSKVARWSQFEKAHYYVVGGYESAMDAAVQLASYGSDVTVVMPNSLRENAEADPSRSLSPYTWERLEDAYEKGKVQFLEKAVVEKLAKNGPAYDLYLSDARKIRSETRPIIATGFHSGAKQIEHLFEWGENGKPLLTNEDMSTVTDGLYLIGPSVQHQNAVFCFIYKFRQRFAVIAEHLLKKRRFSIDEKVLTEYRENQMFLTDLSCCEVQCEC

SEQ ID NO: 5743 - protein, 547 aa, Bacillus licheniformis
MLFIGLESVGKTTLFSAITDQRAGEAANVKGSTIFAAEREIKSLPGWQAIDTPGIREDGSVSKRALKKEIEKADEVVAVLRGTHFSEELNAVLELIPPEARRVCFIVTFQDKMTDAMRRKLSEQVAKHSLPVLLVDTRTVTDDKKERIIAFLRKEAEFHPLKRRRMKQIELESVAVQQSVFHRPVAGPVVSAALLCLLFMAPIVLAYHTSEWVQQSADKWAVEPLQNAVGGLPSWLGAALAGNYGLLSLGIYSFVWAFPVVLFMSIANAAADDSGLKDRIVDSLDPLMRKIGLNGRDLVPLLTGFGCNVVAVQQTRSCSMCTRKRCVSFISFGSACSYQIGATLSIFHAAGREWLFIPYLAVLVAAAAVHNRIWYRIDQKWAAYFERRQTFLQKPSWKGIVFRVKEVLQQFIFQAMPIFLIICLAATVLNELGVIRLVTLLVSPVLSLFGAPEDAAPGLVFSLIRKDGILLFNEGNGALLDMLPGATLFLLIYLASTFTPCMVTVWTIAKELGMKTAAAIMGKQMATSVVSVLIIMIILKLTLCIFK

SEQ ID NO: 5744 - protein, 400 aa, Bacillus licheniformis
MSKKIPVTVLSGYLGAGKTTLLNHILQNRQGLKVAVIVNDMSEVNIDAGLVKQGGGLSRTDEKLVEMSNGCICCTLREDLLVEVEKLAKQGNIDYIVIESTGISEPIPVAQTFSYIDEELGIDLTRFCRLDTMVTVVDANRFWHDFQSGDSLLDRKEAVGEEDERDIADLLIDQIEFCDVLILNKCDLVSEEDLQKLEKVLKTLQPKANIIRAVKGEVDPKAVLNTGLFNFDEASGSAGWIRELNQGHHQHTPETEEYGISSFVYEARRPFHIERFYNWIHSLPENVVRAKGIAWCATRNTLALLMSQAGPSVSLEPISYWVAALSKPEQEQILRQNPELLKEWNEEFGDRHTKLVFIGLDLSPSEITAEADRCLLTDSEMAADWSLLSDPFDWQIERAR

SEQ ID NO: 5745 - protein, 261 aa, Bacillus licheniformis
MKGEAYYSVRMRASENGPHEEGGKHISGGERLVPFIGLNDAVSDLLEKGMSHSRGRPDFMQIQFDLVNEPIKLVQPLRIETNETVSAEEGQALARELISRAGVPESAVEKAFQGIAEYWGVRGAVLFDIHSGRRIDGRKEKGVRVSRLDWPEADFQRWAALCGVPPNPRLKEALAIASKVCEHPAVIAELCWSDDPDYITGYVAAKKLGYQRMTKMKEHGDESGCRIFFVDGSADVKSCIDDLEKQPVFIGQEVNHESIIR

SEQ ID NO: 5746 - protein, 448 aa, Bacillus licheniformis
MNQSFVEKSKQYLWLPFTQMKDYDENPLIIESGQGIKLKDIDGRVYYDGFSSVWLNVHGHRKKELDEAIKKQLGKIAHSTLLGMTNVPATELAEVLIKITPENLTRVFYSDSGATAMEIALKMAFQYWKNIGKPEKQKFISMKNGYHGDTIGAVSVGAIELFHHVYGPLMFESFKVNVPYVYRSKSGNPDECRDECLAELERLLSERHDEIAAMSVESMVQGASGMIVMPEGYLAGVRELCTKYDVLMIVDEVATGFGRTGKMFACEHERVQPDLMAAGKAITGGYLPIAVTFATEEIYEAFYDDYNKLKTFFHGHSYTGNQLGCAVALENLRLFESEKIVAQVAEKSKILESLFHDLAALPHVGDIRQLGFMSGIELVQSKETRQPYPPEERIGYRVSLKMRELGMLTRPLGDVVAFLPPLASTADDLRAMVSIMKEAIQEVTGRAY

SEQ ID NO: 5747 - protein, 379 aa, Bacillus licheniformis
VRIDEWLSSRLAKTKAAGLYRSLKLPQAERTNWASNDYLGLANDKRLIHAAETALRRFGAGSTGSRLTSGNTAWHEKLERKIAGFKQTEAALLFSSGYLANVGVLSSLPEKGDVILSDQLNHASIIDGCRLSKADTVVYRHKDMNDLEEKLRAAQSRARRFIVTDGVFSMDGTIAPLDEIMLLAKQYRAFVIVDDAHATGVLGEAGRGTSEYFGVSPDVVIGTLSKAVGAEGGFVAGSKTLIDFLLNHARTFIFQTAVPPASCAAACKALNIIEDSRAKRRLLQSSVNTIKRSLVDIGFTVNGEDTPIIPVMIGDPQKAVQFANGLKEKGIEAPAIRPPTVAEGESRIRLTVTAERRLKDIEDLLEGFKLMGRELNLVK

SEQ ID NO: 5748 - protein, 235 aa, Bacillus licheniformis
MKGFFVTGTDTGVGKTFIACGLAALLKEQHVDVGVFKPFLSGELASDPQSDTALLKNMSETPLTDEEVTPFIFKEPLAPYTAAKLEGRTVGLEDAVNHWKKIKDRHECFIVEGAGGIAVPLGEDYFVSDLIKALDLPAVIVARPNLGTINHTYLTAQYAKQMGIRVIGIVINGISSRPGLDEQTNPDMIERFCGVPLLGVTPKLEDASPTQIHHMIKDHVDVSLIMNQMQMGAEK

SEQ ID NO: 5749 - protein, 333 aa, Bacillus licheniformis
MNQWMELAERVLDGGEVTEKEALSILECPDDDVLLLMHAAFQIRKRYYGKKVKLNMIMNAKSGLCPENCGYCSQSSISKAPIDSYRMVDKTTLLEGAKRAHDLNIGTYCIVASGRGPSNREVDQVVDAVKEIKETYGLKICACLGLLKPGQAERLKEAGVDRYNHNINTSKTNHSNITTSHTYDDRVNTVETAKKSGMSPCSGVIVGMKETKQDVVDMAKSLKALDADSIPVNFLHAIDGTPLEGVNELNPLYCLKVLALFRFINPTKEIRISGGREVNLRSLQPLGLYAANSIFVGDYLTTAGQNETEDHKMLHDLGFEVESVEEMKASLQR

SEQ ID NO: 5750 - protein, 398 aa, Bacillus licheniformis
MTTELHEAGPSLKSDSDFWRDPYLFYDQLRSIHPVYKGTVLKHPGWYVTGYEEAAAILKEPAFINRVPLPEASTKYEQLQRLQRNMMLFQNESGHKRMRTIAGKEFMPQKTATFRPAIEETVHELLDQLENKKTADMVSEFAFPLASLIIAGMLGVPEEERYQFRQWTADLIQTIDLTRTRKVMAKGGDTVAKLKAYFKNLIEKRKAHPSEDLISTFAGHEQLADEEVLATCILLVIAGHETTVNLLTNGLFLLMTHPDQLSELKENPLLIESAVEECLRYESPTQLTARTASEDCEINGKIIKKGEHLYILLGAANRDPKIFQNPHLFDITRKPNPHLAFGAGAHVCLGSALARLEAQIAIPALLARLPNLKLASTDVPFRRLIGFRSLAELPVILN

SEQ ID NO: 5751 - protein, 276 aa, Bacillus licheniformis
VNTHQNRYSVQSKVSALINCRLFQSFITTVIVLNAISIGLETYAFFKPYQKVFFIVDCLFLTIFVIELSLKLFVQKQHFFKNNWNVFDFVIVAGSLILYNTNFVSVLRIFRVLRVLRTITSVPSLRRIVNALFMAIPTISSVIILMSIIFYVYAVIGTMFFSAIAPEYFGNLQLSLLTLFQTFTLESWASGIFRPIFAESGWSWLYFVSFIVIATFIMINLIVGEIVNNAQKISQEIEDETGELKEDTKEIKELRAEVKELKALLQTYITQNEKKD

SEQ ID NO: 5752 - protein, 140 aa, Bacillus licheniformis
VEWMKIDQMAKRSGLTKRTIRFYEEIGLLSSPKRTEGGVRLYSEDDLEELERVISAKEVLGFSLQELQQFMETGKHLEMNKEGYLLSLDKRERKEKLEDIQRMLNEQMRMIDEKIEKFQSFKKRLEGMQAKAENALQSID

SEQ ID NO: 5753 - protein, 394 aa, Bacillus licheniformis
MNEQPPENSSMFKQPKAVWAVAFACVISFMGIGLVDPILPAIAQQLHASPSQVSLLFTSYLLVTGFAMLLSGAVSSRIGAKLTLISGLILIIVFAGLGGLSHSISQLVGFRGGWGLGNAMFISTALAVIVSVASGGSAKAIILYEAALGLGISVGPLAGGELGTISWRAPFFGVSVLMAAALLAIFFLLPPVQKPQKKISVSAPIKALRYKGLLTLSGAAFLYNFGFFTLLAYSPFVLDLNERGLGYVFFGWGLFLAITSVFIAPAVQRIFGTVRSLILLFMLFAADLLAIGIWTEHMALVIGAIIIAGGILGMINTILTTAVMEAAPVERSVASSAYSSIRFIGGAIAPWIAGVLADHFTAHTPYFAGCIAVLAGIAVLAGGRRYLAGIKAGH

SEQ ID NO: 5754 - protein, 518 aa, Bacillus licheniformis
MSLLTVTKLSHGFGDRAIFHDISFRLLKGEHVGLIGGNGEGKSTFMNIITGKLEPDEGKVEWSKNVRVGYLDQHTSLERGQTIRDVLRNAFHYLFAMKEEVNAIYTKMGEADPDELEKLLEEVGTIQDALTNNDFYAIDAKVEEIARGLGLNDLGLDRDVAELSGGQRTKVLLAKLLLEKPDILLLDEPTNYLDEQHIEWLKRYLQEYENAFILISHDIPFLNSVINLIYHVENQELTRYVGDYNQFREVYEVKKQQLEAAYKKQQQEISELKDFVARNKARVSTRNMAMSRQKKLDKMDMIELPSEKPKPEFHFKQARTSGKLIFETKELVIGYDEPLSRPLNLRMERGQKIALYGANGIGKTTLLKSLLGEISPLSGEVERGEHLHIGYFEQEVKETNNNTCIEEVWNDFPSFTQYEIRAALAKCGLTTKHIESRVSVLSGGEKAKVRLCKLINSETNLLVLDEPTNHLDVEAKEELKRALKEYKGSVLLISHEPEFYMDIATETWNCESWTTKVL

SEQ ID NO: 5755 - protein, 376 aa, Bacillus licheniformis
MTERWPFLNKAKPFIQENWKASGFQDPTNVQKNAVDLILDGRDVIAESPTGTGKTLAYVLPILEKLEADQKNVQAVILAPSRELVMQIFDVIVEWKKGSDIRAASLIGGANIKKQQEKLKKHPHIIAGTPGRVFELIKMKKLKMHEVKTIVLDETDHLLTPEHRGTIQSIIKSTLRDRQLLCFSATLKDDVERELREMTKDAEVLKIKRSKEESAKVKHQFLVCDQRDKVKILQKFSRLPGMQALVFVKDIGNLNVYAEKLKFHHVEIGVLHSEAKKIERAKILQAFEAGEFTLLLATDIAARGIDIEDLPYVIHADLPNVEGYIHRSGRTGRTGNEGTVISLVNRIEEERLKKLAKKLEIPLQRIVYERGRIIER

SEQ ID NO: 5756 - protein, 340 aa, Bacillus licheniformis
MPQKQIELARRPQGIPVMDDFRIKETEIPEAKNGEALVKTLYVSVDPYMRGRMQDTKSYVEPFPLDEVITGGVIGEVISAKGDKLKKGDIVLGRLGWQEYSAVREDNLQKIDPSLAPVTAFLGILGMTGLTAYFGLLDIGQPKAGETVVVSGAAGAVGSAVGQIAKIKGARVVGIAGSDEKTAYLKEKLGFDEAINYKTTENMASALEQACPDGVDVYFDNVGGAISDAVFTLINKFARIPVCGAISSYNVKSAEEDMGPRVQTALIKSSALMKGFVVNDYRDRFPEGIKQLAEWVKSGQLQYEETITEGFERIPEAFLGLFEGKNLGKQLIKVADSDNA

SEQ ID NO: 5757 - protein, 127 aa, Bacillus licheniformis
VYYFSPEQQYNAWIISDLVKQIFSREGHQEADTHRFESFAARRFGINIDYVFSIIMNIGDPEERRTASSTEDLLSSYLLSLLPFITKDMFQYSRENANQYLLNERNADVFHLFLPDSVLKKTFRAIR

SEQ ID NO: 5758 - protein, 115 aa, Bacillus licheniformis
MKPVVRQYTNDEKLMKDVEELREIGVAREDIYVLSHDDDRTERLADNADANTIGAEETGIKNAVGNIFNKKGDELRNKIHEIGFSKQEAEQFEKQLDEGKVLLFVTDHEKVKSWV

SEQ ID NO: 5759 - protein, 478 aa, Bacillus licheniformis
VAKEKDAEQKSALNIIPLAVTILVGAVIWFIPSPAGLDPKAWHLFAIFVATIIGFISKPLPMGAIAVFALAITALTGTLSIEETLSGFGNKTIWLIVIAFFISRGFIKTGLGARIAYLFVRMFGKKTLGLSYSLLVSDLILSPAIPSNTARAGGIIFPIIRSLSETFQSTPKDGTERRIGAFLLKVGFQGNLITSAMFLTAMAANPLIAKLAHDVAGVNLTWTSWAVAAIVPGLVSLIITPLVIYKLYPPEVKKTPDAAKIATEKLKEMGPFKKSELSMVAVFLLVLFLWIFGGNLNIDATTTALIGLAVLLLTQVLTWDDIKKEQGAWDTLTWFAALVMLASFLNELGMVGWFSDAMKSYVSGFSWISAFLILIAVYYYSHYFFASATAHISAMYSAFLAVIIAAGAPPLLAALSLAFFSNLFASTTHYGAGAAPVFFGAGYIPQSKWWSIGFILSIVHIVTWLVVGGLWWKLLGIW

SEQ ID NO: 5760 - protein, 39 aa, Bacillus licheniformis
LDNQKEDKKEEGIIYEKIIKEKENIWYFLCGSFGLYFRL

SEQ ID NO: 5761 - protein, 227 aa, Bacillus licheniformis
MRQDNKIIISTNQVTKTYGEGASLFNALHPTTLSISKGSINVILGKSGSGKTTLLSLLGGMEEPTNGHVWFKQQNFYKLKDPEQANIRGNNFGFIFQNYHLIPEISVFDNIILPLMINKKEKDISDIKKLTNILGIGHKLKSFPFQLSGGQQQRVAIARAMANDPEIIFADEPTGNLDQKNAEKVIELLVSLCKEFDKTLVIVTHEENLIERPDQLFLIEDGRVKTL

SEQ ID NO: 5762 - protein, 852 aa, Bacillus licheniformis
MFWVKLAFKSLFQRRKISYLMVLIISISMVFLIMVNSATEEILKYTKEKAYEKYGEHHAIINNLSEKEFKELKGIHSVKKGGGIFLVGYTEDFNESSVGASIGWFDKSALELGHIHILHGRMPVHKNEIAIESFLTDSFKTNDVIGADVKLKIGAVEEVYQIVGIVNNYSSNWSTPINIEKGKNTYPNVFISPTKFNADKHIDIQKSFIFSLQNENVEKIEQEINENFEQHLSSPEQLYENENLFNEGYKNYNRIFYICLFFSIILIFGSLCCCFRIFEVFYQNYRQKIAILRSHGAKKNHIRLLVFFQSTIIVLVSFLISFPVGVYLKKILNHQTYRTENYSSSPLLESTLFVTIWLTLLFFSLCITALIVTEKISKETIHTNLKGNPLIAKGYRVYQFIEKFPFKLKSLVIQLTFRWKSSILFIVILSFSIMIFFFTQLIADETIEKSEETTPDFILSSKQLTAEEHVNGYIIETNQSVSFDYKSVEDLQRLPGVVYIDKVPNSLGSTLLLTKQQLSPNIKSWINTYKLENINVEISEDTIDNLVPNNLIPIPNVNFVLVNDSELKHLQRMYSFDESSVRKVKKSRSAFIFFPEINQKEMNNKIINGDEVKIGRIAYSDEKKPKFENWDLKVERIILSPYLMKQNQISQEREGITVLIYEEVAKKIGVFDGYKELTIYTDHSISKQKKKGIINKTKQMVSSIPGSLYYSETEDNKRLESISNYLSILGTVLFAVTAFYSVLTLAATMYSRIIQRKAEIAINRAFGKSVTAVLKDLIIEMTIYLILAFLLSGTIILFLTLSMPENYNNYNYFKYYFYSVAFTSTLSLISLSILFFVLKKISISDALKTKEE

SEQ ID NO: 5763 - protein, 192 aa, Bacillus licheniformis
MFWSVDLMLLGFMCAIVYFLYDIVKNRKKTSFFRKMVFASFIVYLSVVYHYTIGGINIPPQPAYAQMNIQLIPFYFVAEWVQMHQQSGFDWFFWNSVKLTFFNVLLLIPLGVYLSVLWRKIPLKKAAVFVFLTSFLIESLQLVLSVTGFIMARTFNVDDLILNTAGGVMGFCLTSFMFGAKGSGYRRKGLHF

SEQ ID NO: 5764 - protein, 260 aa, Bacillus licheniformis
MGDGQWFTVTELDESTYAISEYGHWENVHSYLLIGAKEAVLIDTGLGIGSMKTVTDSLTDLPVSVITTHVHWDHIGSHGEYQRIYVHEAEKDWLTDGIKGLPIEHIRRDVSRDITKPVPAGFSAETYTPFRGEPSGTLQDGDTVGCDSRPLVIYHTPGHSPGHICIFDPASGYLFTGDLLYTGAPIYAFYPTTDPVQLIQSLEKISAIGRVKKVFGGHHQLGLAPDILQEAGHAALHLKKHGLAKHGTGTHRFNSLSFQF

SEQ ID NO: 5765 - protein, 264 aa, Bacillus licheniformis
MSDPYMPLTSINSGVLEEYAEGVFGLTVQIVNVYFIFDPDSREAVLIDAGMPKSAPFILREAKERFGDFSLKAIVLTHGHFDHVGALEGLLETWPVPIYAHEKEMPYLTGKADYPPAKPQVKSGLVAKMSPLFPRHSINISSHVKQLSEDGSLPFLKGWKWIETPGHTPGHVSLFRQSDRTLIAGDAVTTVEQESLFEVAIQKQELNGPPAYFTMDWTKAADSVRKLSELKPAALLTGHGVRMKGNDFSKELLDLSGRLPASDS

SEQ ID NO: 5766 - protein, 547 aa, Bacillus licheniformis
MNIQKRVQALLAAAAMFAGLMVSDAVHAAETPYYGKNYTQPEQVSSLYPEPEETFSTPAFVKEGEAFTTQEEMMKFITSLTKKSPNVKIGNIGFSIEKRNIPVLYFTKDKQIRSISKKPTVWLQGQIHGNEPAAGESVLAMAEKLAGPYGDKVLDKINVIVVPRVNPDGSYQFNRRLASGIDGNRDHVKLESPEVRAIHQEFNQYSPEVVIDAHEYGVGQNEFQSVGEKGSLKYHDILILSGKNLNIPESIRYASDSLYVNGVRAKLDEKGFSNDAYYTTGKSKDGKIEIYEGGTEARIGRNAFGLQPALSFLVESRGIDIGRENFARRVAAQVATHETIIDTTVKHAAEIKRLVSKEKLKLIQNGAKVSDKDQVVINSEFAGPFKDTLKVADIASGQAVDVPVQYYSASEAVPVLSRTRPTAYLVLPGHQDIEQKLKDQGLKSVTLAFKQKLTAEAYEVLSKETAGESEGRPVIKVETKLKKQKKEFPKGTKIYFTAQQQSNLLSIALEPESVDSYVSTGYIPSQKGKELPVYRFMLNTKTLNFKE

SEQ ID NO: 5767 - protein, 365 aa, Bacillus licheniformis
LESHEELWREAKAFIELCYGELSKSEEETRMRLHKIDKEIRETGSYTHTLEEIEHGARMAWRNSSRCIGRLFWHSLTVIDQRGVQTEAEVRDALFHHIQLATNGGKIRPFITVFPPEQNGQKKVSIWNHQLIRYAGYETEQGVIGDPASLELTKACEALGWKGEGTPFDVLPLVFQIDGRPPVWYELPREIVKEVRIEHPEIEGFKSLGLKWYAVPIIADMKLEVGGIHYNAAPFNGWYMGTEIGARNLADADRYNALEKVAAIMGLDTERNTSLWKDKALVELNTAVLHSYKKAGVSIVDHHTAASQFKRFEEQEAEAGRELAASWTWLIPPLSPAATHIFHSYYENKTLKPNYFYQEKPYLNK

SEQ ID NO: 5768 - protein, 212 aa, Bacillus licheniformis
MRKHIFSLAIIAMNLIMWAIAYPHISGQVPIHWSSSGEIDRYASKMEAMLAMIGLLVFVYVLMFLTPKIDPRRKNYQLFSKTYYILINAMLLIFSLINVLVIMTGLGYDLPAGSIVPVLVGALLIVIGNYLPRVRSNFFFGIKNPWTLSSDSIWKKTHRFAAKVFTLAGLLIAADGLLSISPEIMLPVILATVLAPYIYSYVLYRKEINMKS

SEQ ID NO: 5769 - protein, 94 aa, Bacillus licheniformis
MNQTFKALADPTRRKILNLLKDRDMTAGEISDQFQMSKPSISQHLKILKQAELIQDEKKGQYIIYSLNTTMFQEIIGWAFSFTEQAGKDKGDAK

SEQ ID NO: 5770 - protein, 90 aa, Bacillus licheniformis
MLQYRIIVDGRVQGVGFRYFVQMEADKHKLTGWVRNRDDGTVEIRAEGLEESLKQFLKAIQKGSPFSKVTDVKVEETKELDGFQKFNISY

SEQ ID NO: 5771 - protein, 216 aa, Bacillus licheniformis
LENQEYEIISIHVGRPRTYEFDGKQVETAIVKEPVSGPVYLSRTNFEGDGQADLIHHGGEDKAVCVYPADHYMYWESVLKRKLPEAAFGENVTVKGLTEKEVCIGDIFKLGEALVQVSQPRQPCFKLAKRLNQKDMVLKVRDTGYSGFYFRVLEEGIVAPDSRLQLVSRDAHEATVSYANHLMYHDMGNHPAIRKILEVEALSESWRSSFLKQLSA

SEQ ID NO: 5772 - protein, 43 aa, Bacillus licheniformis
MHYGSKGWYVEELKKLGMTKYEGRKLQSYKKHFLANLLESVKK

SEQ ID NO: 5773 - protein, 51 aa, Bacillus licheniformis
MLFAIIGLIFFIESILLIVYAHKKKNGFLKYIGIVLSIAIIVMIVTSLTHG

SEQ ID NO: 5774 - protein, 250 aa, Bacillus licheniformis
VIVTNDQELEGLKKIGRIVALAREEMKAKAAPGMSTKELDLIGKEVLEAHGAASAPEKEYDFPGTTCISVNDEVAHGIPSESRILKEGDLINIDISAEFGGYYSDTGISFVLGKGDEMLHKLCQSAESAFQKGLLQARAGKKQNQIGRAVYNEAKANGFTVIKNLTGHGIGRNLHEAPNHILNYYDPFDNALFKNGTVIALEPFVSTKAEHTIEAGDGWTFKTPDGSFVAQIEHTIVITKNEPIILTQLD

SEQ ID NO: 5775 - protein, 653 aa, Bacillus licheniformis
LKRFIKERGLAFFLIAAILLWLKTYAAYVIEFNLGITNTVQHILLFVNPISSSLFFLGLGLLFKKKIQQTAIIVIHFLMSFLLYANVVYYRFFSDFITLPTIMQAKTNGGQLGDSIFSLMHPLDVLYFIDTFILIGLAVFYNRPSETATKRPFKIVMGASILVFLANLAVAEIDRPELLTRSFDRNYLVKYLGTYNFTIYDAVQNIKSNSQRALASSSDVTEVENYIKANHDKPNPEYFGKAKGMNVVYISLESLQTFLIDYKLDGKEVTPFLNSLAHDNETFYFDNFFHQTGQGKTSDAEFMMDNSLYPLSQGSVFINKAQNTLQSAPAILKSQGYTSAAFHGNYKTFWNRNEMYKAIGYDKFFDATYYDMSEDKTKNYGLKDKPFFEESMPLLKSLKQPFYTKFITLSNHFPFEMDEGDTDFPAGDTGDSVVDHYFQSANYMDQALEQFFNDLKKAGLYDNTIVVMYGDHYGISENHNKAMAKVLGKDITPYENAQLQRVPLFIHAPGVKGIKSHKYGGEVDVAPTLLHLMGVNTKDYLMSGSDLLSPEHREIIPFRNGDFVSPEYTKTNGNYYDTKTGELLNEKDIDPNIEEAVKKELEMSDKIVDGDLLRFYKPKGFKAINPSDYDYTNHNPKTSESDAAQTTKSDSGQ

SEQ ID NO: 5776 - protein, 44 aa, Bacillus licheniformis
MKYRFRKAETGLAKKIAKPLSNQGFTALKKMFGNILRLYCIGGN

SEQ ID NO: 5777 - protein, 128 aa, Bacillus licheniformis
MDFSSIVSEDKIKQAIKDGEFEGLPGMGKPLKKDDAAHVPEHLRMAYRVMKNAGMAGDEGALKKELMTIDDLIAKCADEDERERLIERKTETRLRLDRLADKKGMFSKPASAFYKEKVYRRLSGNKKR

SEQ ID NO: 5778 - protein, 175 aa, Bacillus licheniformis
MERLLNWVEYISDWLWGPPLIILLTGTGVYLTILLKFFQFRYPLYIFKQTIGSVGKKPKGEGTVTPLQALTSALSSTVGAANIVGVPAAIMFGGPGAVFWMWLVALFAMAIKFSESVLAVHYREKNEEGEYVGGPMYYITKGLSMKWLGVFFSSADDRTCTEHHGAGKFGFRIAG

SEQ ID NO: 5779 - protein, 470 aa, Bacillus licheniformis
MTDLNQSARRIVDAVGGADNIAAVTHCVTRLRFALLDESKVNQEVLEQIDVVKGSFSTNGQFQVVIGQGTVNNVYAELVKATGIGESSKDDVKKASEKNMNPLQRAVKTLADIFIPILPAIVTAGLLMGINNILTAQDIFFSGKSIVEVYPQWADLANMINLIAGTAFAFLPALIGWSAVKRFGGNPLLGIVLGVMLVHPDLLNAWGYGAAEQSGEIPVWNLFGLEVQKVGYQGQVLPILLASYLLAKIERFLTKRTPESIQLLVVAPITLLVTGFASFIVIGPITFAIGNVLTSGLIAVFEQFAVLGGLLYGGLYAALVITGMHHTFLAVDLQLIGSKLGGTFLWPMLALSNIAQGSAALAMMFIVKDEKQKGLSLTSGISAYLGITEPALFGVNLRYRFPFVIAMISSGIAGMFISSQGVLASSVGVGGVPGIFSIMSQYWGAFAIGMAIVLIAPFAGTYLYAKLKMK

SEQ ID NO: 5780 - protein, 562 aa, Bacillus licheniformis
METKENPWWKKAVVYQIYPKSFKDTTGNGVGDIRGIIEKLDYIKELACDVIWLTPIYQSPQNDNGYDISDYYSIHEEYGTMADFEELLEEAHKRGIKVIMDLVVNHTSTEHRWFKEAASGKENLYRDFYIWKDMKPNGAPPTNWESKFGGSAWEFHAESGQYYLHLYDVTQADLNWENEAVRKKVYEMMHFWFEKGIDGFRLDVINVISKDQRFPDDDEGDGRRFYTDGPRVHEFLNEMNREVFSKYDSMTVGEMSSTTIADCIRYTNPESRELDMVFNFHHLKADYPNGEKWALADFDFLKLKKILSEWQTEMNKGGGWNALFWCNHDQPRIVSRYGDDGKYRKKSAKMLATVIHMLQGTPYIYQGEELGMTNPKFDDISLYRDVESLNMYRILKEAGKPEAEIIEILKAKSRDNSRTPVQWNGEENAGFTAGTPWIPVPDNYKEINAEEALNDPDSIFYHYKKLNELRKEFDIITTGDYQLILEDDQELYAYLRNGADEKLLVINNFYGKETEFQLPDDIDIEGYDAKVLISNDTDLPESFKRFTVKPYQSIVYHLAKPC

SEQ ID NO: 5781 - protein, 238 aa, Bacillus licheniformis
MKINKYMMIYKQIAEQIDQSILNAGDILPSENDLAEQHDTSRETVRKALNVLAQNGYIQKIKGKGSVVLHREKMQFPVSGLVSFKELSETLGKETSTTVHEFGLTHPDAYIQKQLRTSGDEEVWRVVRSRNINGERIILDKDYFIRKHVPLLTKEICEDSIYQYLEDECGLVISYAHKEIVVEPCTAEDQEYLDLNGYEHIVVVKNFVFLDDTTLFQYTESRHRLDKFRFVDFARREK

SEQ ID NO: 5782 - protein, 230 aa, Bacillus licheniformis
MIHETAKIGKNVVLGEHAVIEENVVIGDNVTIGHHAIIKKDTHIGSGVKIGDLAVLGKAASSNKKMARQPKQAGAPLRIEDDAIVGASAVIYRDVLLEQGVFVGDMASIRENVAIGRESIIGRNAMVENNTRIGSKTTIQTGCYITADMTIEDEVFIGPCCSTSNDKYMGKGNYPYQGPTIKRGAKIGNNATLLPAVVVGEGAVIGAGAVITKDVPAGKTAVGNPGRLMK

SEQ ID NO: 5783 - protein, 408 aa, Bacillus licheniformis
MSIRNAVMNGGFETGTLSSWLGVNASVTSQFSHSGFFSARFLGGTVTSYIAQFVPARAGEGSEFLVSLARASFLPAPSVTIQVTYFDSQFNFLGYGLFATVPSSRIPAAENGTWLEVYQTTSPAPSGTTQAFILINNIPQAGTASVLVDDVALLSVEGGGGPTGATGPTGATGVTGATGATGATGVTGPTGAPGPTGVTGPTGVTGATGPTGPTGATGPTGATGATGPTGTTGPTGATGPTGATGATGPTGVTGPTGATGPTGATGPTGATGPGSLLGTLAQSTDPVSLTVGSETPILTTTVTSSAGQNIKLDSMAEVDIIIGPATTFEYSIIFTLYRNNSAIAQVSVDSQDEKSAGSVRVYGDIPNLTWVDTPGAGTQTYEVRINVTGTNLLAANVNTRALNAVIFD

SEQ ID NO: 5784 - protein, 485 aa, Bacillus licheniformis
LLPLGLSLRLPLLVLLLRLPLLDPSLPLLRLPRLLLLDLWLRLDPLVLLPRLDPSLLLPRLLPSGLSLPLGLLRLSLLSGRWLLLDPLGLSLLLGLSLPLLLSGLLGRLNPLLPSDPLVLLDPLLLLGRLLPLLLLILLDRLRLWLPLPRLLLLDLSLRLDPLGLSPLLDPSLLLPLLDPSLLLPLLDPSLLLPLLDPSLLLPLLDPSLLLPLLDPSLLLPLLDPSLLLPLLDPSLLLPLLDPSLLLPLLDPSLPLPRLLLLDPLGLLLLSDLLLLLDRLSLWLRLLPSGRWLLADLLRLSLLLDPLGLLPLLDPLLLLGLLILLPLLDPLLLLGLLILLPRLLLLDPLGLSPLLDPSLPLPRLLLLDRLSLLRLWLPLRLSGLLILLSRLLPLVLLDPLLLLGLLPLLGLSLPLGQLRLSLLSGRLLLLDPLGLSPLLDPLLRLLLSLRLLLSGRLLPSLLVDQLLSLQHHQLVSVPPPLRGSF

SEQ ID NO: 5785 - protein, 764 aa, Bacillus licheniformis
MITIDQPGATGATGPTGATGATGATGATGPTGATGPTGPTGATGPTGATGATGPTGATGPTGATGPTGATGPTGPTGATGSTGSTGPTGATGATGATGSTGPTGVTGATGATGPTGATGPTGPTGVTGATGSTGPTGATGPTGATGSTGPTGATGPTGATGPTGPTGATGATGPPGATGPTGATGATGSTGPKGVTGPTGATGPTGPTGVTGATGATGPTGATGATGPTGATGATGPTGATGATGPTGATGATGPTGATGATGPTGATGATGPTGATGATGPTGATGATGPTGATGATGPTGATGPTGPTGAIGPTGVTGATGATGATGPTGSTGATGATGPTGATGPTGPTGPTGATGSTGPTGPTGATGATGPTGATGPTGPTGATGPTGATGATGPTGATGPTGATGATGATGPTGATGPTGPTGATGPTGVTGATGATGATGPTGATGATGPTGATGVTGPTGATGPTGVTGPTGATGPTGPTGPTGATGSTGATGPTGATGPTGATGPTGATGPTGPTGATGATGPPGATGPTGATGATGATGATGATGPTGPTGATGATGATGPTGATGPTGATGPTGPTGATGTTGATGPTGPQGPTGPPGEAGTMGAAGPTGPTGPASPQTAIFFNNLFGSTTVYNPPTVPLNTEVTVVSVPNVSVTSGQNIKVDYALAIEAVNTANSNIIFEIRLYRGGTLVQTRIFNRSLAAAGTQRFPLASTIVDTVPATATVDYSVRVAVTTASNVTSAAAFNRDLNLIRFP

SEQ ID NO: 5786 - protein, 815 aa, Bacillus licheniformis
MSIQNLVVNGSFENGALPPWVGQNATVTTQFSHSGFWSARLLGGAVTSFIAQFVPVDAGEGLEFLVSLAKEGFPAPSPQVQIQVSYFDSSFNFLGQGLFLNIPFNRLPIVQNNTWLEVYQTTTPAPAGSTMAFILINTLPQAGTANVIVDDVALLDVEGGGTGPTGPTGPTGPTGPTGPTGATGPTGPTGPTGATGPTGATGPTGPTGATGPTGATGPTGPTGATGPTGATGPTGATGATGPTGATGPTGATGPTGATGPTGATGATGATGATGATGATGPTGATGPTGATGPTGATGATGATGATGPTGATGPTGATGATGATGATGATGATGPTGATGATGPTGATGATGATGATGPTGPTGATGATGATGATGATGPTGATGPTGPTGATGPTGPTGATGPTGATGATGPTGPTGATGATGATGATGATGPTGATGATGATGPTGPTGATGATGATGATGATGPTGATGPTGPTGATGPTGPTGPTGAIGPTGATGATGATGPTGATGATGPTGPTGATGPTGATGATGPTGATGATGATGATGATGATGATGPTGATGPTGATGATGATGPTGATGPTGPTGATGATGATGATGPTGPTGATGATGATGATGPTGATGATGPTGATGATGATGPTGATGPTGATGATGATGPTGATGPTGATGATGATGPTGATGPTGPTGATGATGPTGATGPTGAIGPMGATGATGATGATGPTGATGPTGPTGPTGATGPTGATGPTGPTGATGPTGPTGATGPTGPTGATGPTGPTGATGPTGPTGATGPTGPTGPTGPTGPTGPTGPTGPTGPTGA

SEQ ID NO: 5787 - protein, 363 aa, Bacillus licheniformis
MIRLIEPYITFEEVQAELKEIFSSGMLTKGPYVRTFADHMRQYVSAKHAFLTTSATTALSMCLKSLNVQPGDEVIVSDFSFPATVNVIEDLGAKPVFADVDLETFNMLPEELESQITSRTKAVLFVDALGNPTGITNIKQICKEYGLPLVDDAACAIGSSEYGCKSGKIADLTCFSFHPRKLLTTGEGGAITTDREELKDWLSVKLNHGAAISDGKLDFIDFGYNYRLSDIQAALGIKQLQKLDDIIHRRNLQQKAYSEQLEPLGFQSQQIGPNVVHNIQSAVFKVPKNIVRDELIQYLSDCHIESTFGTYCLSGTTYYRRKYRQIKPNSIFLEQNTITLPCHDQVNVDQVVSAIQSFSQRKG

SEQ ID NO: 5788 - protein, 180 aa, Bacillus licheniformis
LKQWKSEGKGEFTLSQLGGCGENVVIEDGVRIFHPENIYIGDNVYIGHDTILKGYYKHDLIIGSNSWIGQQCFIHGAGGVTIGEFAGIGPNVRIHAAYHTDPDKPDSTILFSPLTFAPIHIEENCNIGIGASILAGVTIGAHSKIGANAVVNRNIPPYSIAVGVPAKVIKNRRMKDEDLS

SEQ ID NO: 5789 - protein, 324 aa, Bacillus licheniformis
MSDMTELSGQHIFITGGAGFIGSSLIGKLIERNSVTVYDNFSRDSLRYKPYRDHPHLKVLQGDILDLNALKKAIQGASHIVHAAGIAGIDTVIQNPVKTMQVNMIGSANLLEAAAGLTECKRVVCFSTSEVFGQIAFRARETSHTVLGAVGEARWTYAVSKLAEEHIAYAYFKELGLPTVTVRPFNVYGPEQVGEGAIKTMVHRALLDEPIYIHGDGTQIRAWCYVDDMIDGILRCLTMKEAIGESFNIGNERTVITVYGLASTIIRVLGSKSQIFFGEKKEADIDLRIPQVNKAKEMLGFSAKVDLEEGIRRTAESIKKNLDQ

SEQ ID NO: 5790 - protein, 457 aa, Bacillus licheniformis
MKDFKSDIIHCLEQKEWNKAMKRLKEWEAEGSHNEPDFYFLQASLSVYLGHDHNAWLWLWRGLDLFPENRSLNLLMGKVCLRTGREKESAAYLQKGDGAETASAPKLDLPVDEKTEPPAGQIRILQGTMEIANQMNTLAKGLSQHGALAHTLNYYPYYLNYAADYTWSLLKERNTPAMNAKLRRLANDLLPSYDLFHFHFGTSFTLDMSDYPILKQAEKPMVMHHWGSDVRLYSTLAKTNPYAVVKTKNEARIRYHLKRISQYVQHCIVADMELYEYVKDYYEHVHMIPTMIQLDRYTPDYRSNEKPLIVHAPTSPGIKGTRHILKAVESLKEKYDFHFHLVQGVSHEQAKKIYQKADLIIDQLHIGSYGLFAVESMAMGKPVICWISDFMKDHYPSELPLIRANPANITEVIENVLKNRDMLPEIGQKGRKYAEVHHDMVKNSKKTLAVYQSLLSE

SEQ ID NO: 5791 - protein, 747 aa, Bacillus licheniformis
MDNELEYLLDSVGLSWRETEISQLIFHHKWHDAAQKLEEKLKAAPFDPGLLISAAFVCEKKQQAQRASELYDDALLFVRREHRPRLMKEKEDLFKKMVRRPKIIFFVKPDLDRFLNSVVEHLSGTYRTKKIVVHDLNQIDAGMQWADICWFEWCDDLLIHGSKVPSAAAKTLICRLHSYEAFTFYIKKVYWQAVDQVIFDGEHLREYVLDQVKALKKEKTAVVPNGIKLDQYTFKQRQKGFHIAYVGYINYKKGPMLLLQAFKALIDKDPRYKLFIAGTFQDARYQLYFNQMIDELRLTDNVQFDGWQDDMNQYLEDKHYLICTSLLESQHMSAMEAMAKGIKPLIHNFYGAKTIYDESVVWNTIDEFVSMMTNGDYTPLQYRSFIEEHYSYDLSMRKIEEMISGFARQSELTVILNPPLITVGIINYNYSSFIDECLQSVLNQHYPNIDILIIDDHSTDGSMQKTSSYQKTHPHIRAICHSENTKLPDLAFKEIFQEAKGEYVLLLSADDFLPHNLVIHDFMQCFFEEEELDYVYGDLLLVDQHGKNAGLWTYQEYGDEELVRTIFQRGGSGIVPMVGMFKASYYQQKGFSWLVDPQKPLAGDVLNCLANTKRGWKRRYLKKPVLCYRRHQKNISYQLHKRIQSLVYVMDYIVKEFDESVYFPHIKWKELEENQRQSLKYFSIGKTFWRMARRYAQNGYTRHLDHDGKKECIQPLLNKMDEYFQLSLASDNQYERYMKNIKKIQLI

SEQ ID NO: 5792 - protein, 360 aa, Bacillus licheniformis
LVTISLCMIVKNEEEVLARCLDTVKDIVDEINIVDTGSTDKTVEIAKRYTDRVFFFEWIGDFAAARNESFKHATKDYILYLDADDVLLEEDQKKLKELKETLDPSVDSVSMYYDAGTDEFGNVTLRYRRNRLVKREKNFKWKGDCHQYLEVFGNIINADISVTHKKIRHSVGRNLNIYQKKIDRGDTFTPRDYFYYGNELRENRHYEKAIESYNKNIEMKEGWIEDKVYACINKADCHRFLGDMDNELRSLFQSFEFSKTPRAETCSRIGYNFQRRREYKAAIYWYELATTLVPDSNKWSFTYPAYYTWYPHLQMCVCYYNLGDFEKSYHHNEEARKYRPEDKSVLHNKQLLEGKLGINN

SEQ ID NO: 5793 - protein, 369 aa, Bacillus licheniformis
MIPLVNLKRQFQTVKQDILKEFEHVLDSGQYILGPKVEELEKRIAEKLGVKEAVAVANGTDALVLTLEAFGIGKGDEVITTPFTFFATAEAVSRVGAEPVFADVDPETYNLDPKKIEEKITPATKAIIPVHIFGQPADMDEIMELAKKHGLLVIEDACQAFGASYKERPVGSIGDAACFSFFPTKNLGTLGDGGMVTISDPDAARQLRTLRTHGTSKKYFHDKIGFNSRLDELHAAALLILLEKIDGWNEQRRRVSSRYREGLKTAEHLTLPAEKEDRTHIYHLYCIGAKNRDYIIQSLKEQDIHSGVYYPCCLHLQSVYSSLQYKKGDFPIAESLSETLFAIPMDPFLAAEEQDQIISALLKKGGGEK

SEQ ID NO: 5794 - protein, 354 aa, Bacillus licheniformis
VTVHFGLIGCGYMSRKHLQALAECDDAKLSAVSDLQEERMKEAEEYYASLAGEESRMTRYPQYQALLSDPKIEAVIIAAVSGLHAEMAKHALLAGKHVIVEKPMTLSLRDADELIELAEQNGLKLMVCHQMRHRPIMKKLKETIEEGKLGKIYLGTVSLRLNRSPAYYEAASWRGSWEKDGGMLVNQGIHLIDLLQWFLGDVKGVYGDMLGGSGAKETEDVAVGILTFASQAKGVVEANIVTQPNNIGSSLSIFGENGTISLEGPALNRISRWYIHGEKADAEEAAKLIDISGEQTAMYQNFISALKRQDTLLVDGYEGKKAIETIFGIYQSVLQKQPVQLPLSSFQTTDMKNK

SEQ ID NO: 5795 - protein, 431 aa, Bacillus licheniformis
MSKQEIHNETIAVIGLGFVGLPLAMLLISKGMRVIGVDLDKKKVEALRKGTSYISDINDQAVQDGIGTGFFRPVSDYSLIGEADAVIICVPTPLNDDAGPDLNYVKRAAQLIGAHLKKGQLVVLESSTYPGTTRDIVKPILEKSGLVCGKDFYLAYSPERVDPGNQFPIEVVPKVVGGATDACLEKVHQLYSGIYEEVVPVTSPETAELTKLLENTYRFINISFINEFAMICDRLGVNVWEVIEAASTKPYGFAAFYPGPGIGGHCIPVDPLYLQFVMKQSGLSSDFIELSEATNDRIVRYIAERSLQLAGKDKATDARILIYGVTYKRNIADVRESKSLDTIEKLIGMGADVSYHDPHVPDLDLSGKKLASVPIDSKMLKEYDCVVILTDHDALPKELLLNHANVIFDTRGVLREAAGKAKVIQLGNGRS

SEQ ID NO: 5796 - protein, 303 aa, Bacillus licheniformis
VWIGILLMVSGIGISIFAVSLIVSYLFVLPNRSTYEETFFSGLKHGEIIDDVFESHDKEELFLTAGDGCRLHALLFPVQKSRKAVIISHGIKWSLFGGYKYVELFQSIGYNVLLCDSRCHGLSGGSHVSYGFYEKDDLARWADELENRFGKDLWIGVLGESLGAAAAIELMKQDRRIKFCIADSCFSDLTELCRFQLKAAVKLSVPFLIPLASGLIKRRHGWSLADISPVSNLEQSDTPLLIIHGTKDQLVPPEMAKSLYERKKGFKKLYWIEGAGHVGGFRHNPEEYLNKIKDFILKIEPAN

SEQ ID NO: 5797 - protein, 130 aa, Bacillus licheniformis
MKKHPAACEAPDGYSCPVEATIEIIGGKWKSVILYHLIDDKKRFNELRRLIPGVTQRMLTLQLRELERDGIVCRTIYKQVPPKVEYSLTEFGKTLIPIIRQMMNWGTSYAGKIKEARQRSAAAEKLESQG

SEQ ID NO: 5798 - protein, 227 aa, Bacillus licheniformis
MTEQSKKQEILDAFQFRHATKEFDPDRKISDEDFQFILEAGRLSPSSVGLEPWQFVVVQNKELREKLRQVSWGAQGQLPTASHFVLLLGRTAKEMRRDSGYVADQLKHVKKMPEDIIENMLKEDGVLESFQDGDFHLYESDRAMFDWVSKQTYIALANMMTAAALIGIDSCPIEGFNYDKVHDILEKEGVLEDGRFDISVMAAFGYRVKEPRPKTRRALDQIVKWVE

SEQ ID NO: 5799 - protein, 1444 aa, Bacillus licheniformis
VGIQKRRFSRKNILRILLTSVMILSLLMPNTQTYAEEQNEHPLISLSILGTTDIHAHMMDYDYYADKETAEFGLARTAQLIEKYRSRNPNTILVDNGDLIQGNPLGEYIFKHERESIISGTKTHPIIDVMNKLQYDAGTLGNHEFNYGLEFLDGTIKGAEFPIVNANIKTPDGKNKYTPYHIEDRTLTDESGRKHQLKVGYIGFVPPQILTWDKKHLDGKITVQDITESAKETIPKMKQEGADVIIAIAHSGIENGEQAAGAENAVYDLALKTEGIDAIISGHQHGLFPGTDYPGNGVIDNQKGTINGIPVVMPKNWGSHLGIIDMQLELDGGKWKVKDASAKTEAIAGNVTSRNETVVSAIKDTHEKTLEYVRAPVGQTEADINSFFAQVKDDPSIQIVTDAQKWYAEDVMKGTEYENLPILSAGAPFKAGGRNGADYYTNIKAGNLAIKNIGDLYLYDNTLYIVKLTGSEVKDWIEMSAGQFNQIDPSKSGEQALLNPDFRSYNFDVIDGVTYQIDVTQPAKYNASGGVKNPQANRVKQLSYNGKPVRDDQEFLVVTNNYRASGGGGFPHLTQDKVVYAAADENRQVLMNYIMEKKTVNPAADNNWSIAPIKGADVTFESSLLAKPFAEKANDIDFVRESENKGYGVYKLNFDGSEPPVDDENWTLTVMHTNDTHAHLDGAARRAAKVKEIRSETENNLLLDAGDVFSGDLYFTKWNGLADLKLMNMMGYDAMTFGNHEFDKGPKVLADFLSGNYTAVDPLNRHQLEKPDFPIVSSNVDVSKEPKLRSFQKEPAVLAAGKKKESGIYPYILLDVNGEQVGVFGLTTEDTSYTSSPGPNIAFHDAYQSAEKTVKELKEKEKVNKIIALTHLGYNRDLEFAKKVKGIDLIIGGHTHTLVDHLKVVENEEPTIVAQVKDYGQFLGRVDVVFDENGVVQTDQSRFNLIAIDDKVDEDPPGKEVLDGFKEDIDELKKKKVGYADVPLDGKREHVRSKETNLGNFIADGMLKKAKQAGGADIAITNGGGIRSGIAKGEITLGDVLTVMPFGNTLYAADLTGAQIKEALEHGVSQVEEGGGAFPHVSGLSFTFTLSKPKGERILDVNLVNDKGDAVPLDLDKTYRVATNNFMGGGGDGYSVFKEAKNGVDLGFTDYDIFTEQLALYDSVSPNIENRITEVFLPDRQADGSWTLAEKPFETYAKNANQAIAYFPDTEKEHIMLNMTKAQTDLVKERTGDPSITLKNDRIAMQLPAVNLASEKTKISIKIAKDIKQAVTKVYDFNIQQNGKTVSTFKEPVGLLFQVDAPDKHLSVYYVDRKNNSFTKVTNGYTKGRTVAGYVDHFSEYTVMNDNDAGSPSLPTGSGDDDTPDGGSGGEPPASPGAGSGGDGSGGHDSGGADDGNEPSDGSNGGFLPDTASNAYHWLMLGLLLLISGSGLYLYQRKRRKLQI

SEQ ID NO: 5800 - protein, 171 aa, Bacillus licheniformis
MSKKIAVVLTDYFEDSEYTEPAKAFKDAGHQLTVIEKEKGKTLKGKQGEAQVETDASIDEVSPADFDALLIPGGFSPDILRADQRFVSFAKSFMDDKKPVFAICHGPQLLITAKALDGRGATGYTSIQVDLENAGVKFKDEEVVVCQNQLVTSRTPDDIPAFTRESLKLLG

SEQ ID NO: 5801 - protein, 71 aa, Bacillus licheniformis
LSEQKTAELNKMIEEISQKLNMLNIGVIKAEDFSNEKLEDLEYLHQMVMKKKSFSPSEMQAIAEELAALRK

SEQ ID NO: 5802 - protein, 452 aa, Bacillus licheniformis
MEFISHIVDTMNGFLWGPPLLILIVGTGIYLTFRLAFLQVRLLPYSLKLAFSRHQDKSSEGDISHFQALMTALAATVGTGNIVGVASAVIAGGPGAVFWMWLAAFFGMATKYAEAVLAVRFRVKDKNGEMSGGPMYYLEHGLKQKWLGVLFAIFGALAAFGIGNMVQSNSVSGVMSSTFSVPAWVTGIIVTTFTALVILGGIKSIGRVTSLFVPVMALFYVIAGLIILVTNFELVPGAVGLIFSDAFTGQAVAGGAIGTVIRWGVARGVFSNEAGLGSAPIAAAAAKTDMPARQALVSMTQVFIDTLIVCSITGISIVMGNMYLTEKTDALTSMTFAHFLGPAGSTIVAIGLLLFAYSTILGWSYYGEKCFTYLLNEKYAIVYRIIFVIAVFFGAVFKNDFVWALADMLNGLMAIPNLIGLLGLTGIVVYESKQILAKIKAEKEEKQNSVSV

SEQ ID NO: 5803 - protein, 157 aa, Bacillus licheniformis
VMIKVLFVCLGNICRSPMAEAVFNDMLKKSGLEDRIEADSAGTGSWHVGKPPHEGTRSLLSEKKISCEGLYARQITDKDPEAFDYIIAMDAENAGHVRSLAGYGSKAVIRRLLDYVEDCETADVPDPYYTGNFEEVYELVAKGCRELLKDIRKEHNL

SEQ ID NO: 5804 - protein, 116 aa, Bacillus licheniformis
MKNDRVFIRNILLGASVGAVMSLLHKPTREACGAKLTACKNKVRLYRANPGMLTECVKEKMDEAKKLTASISDDLSFLNQQIKELKETTPKVIGLIEETRDHFTAKSKGRTEPEKE

SEQ ID NO: 5805 - protein, 271 aa, Bacillus licheniformis
MSFLKELGWRFFLHEGPSKSAELAYFFLLSLFPFMIFLLTLIGYLPVKTGDVIGLIEQYAPEDTMSVIEETLNTGNRGLLSFGIIAALWSASNGLNAIVRAFNHAYEVEENRSFIMVRLTSLLLTAAMVFTILVALLLPVFGRAIGHFIANLDGTPEMFLTAWSALRWGISPLVLLIVFTALYFFAPNKRLSFKFVLPGAVAATAGWILVSVLFSYYVSEFANYSATYGSLGGIIVLMIWFYLSGMMIILGGEINALLHKRKIIPEENPRN

SEQ ID NO: 5806 - protein, 392 aa, Bacillus licheniformis
MTRFHFFILVLIVSISGFSQGMLLPVISVIFEQEGHSAALNGLHATGLYIGVLIASPFMEAPLRRLGFKPLIVIGGVMVCASLFAFVFIQSFIVWFFLRLLIGIGDHMLHFSTQTWVTTLSSEKKRGRNISLYGLSFGLGFAAGPFLTPLVNIAPSLPFIVSGAFSLLAWLFIFCLQNDFPEKSGSESRSDNSLKRFAQAFLLGWVAFLPTFGYGFLETALNGNFPVYALRSGISIEGVSIILPAFAIGSIVFQYPLGVLSDKYGRRNVLLVILAVGAGCFFAAGFSESVLLLAACFFIAGMAVGSTFSLGISFMADLLPKRLLPAGNLMCGITFSFGSIFGPVAGGWYMQIFHNSNLFYLITCVMVLIWIGVLFGKTKKNGALEQSEAAPM

SEQ ID NO: 5807 - protein, 126 aa, Bacillus licheniformis
MEIVWNQNGFEADLEYGKLKISSNEEAGFRPYQLLAASIAACSGTVLHKILEKKRIQLKDMIIETKEERISEEAGRIKSIHLHFILKGENLGTEQIKKALRIALKNCAMVRSVENSIDITETFEIR

SEQ ID NO: 5808 - protein, 351 aa, Bacillus licheniformis
MSRFFFWMMAAGVPLSVAGSLLHWPQVLLFIIYCLTIIALASYMGRATESLAIIAGPRIGGLLNATFGNAVELIISIFALREGLIGIVLASLTGSVLGNLLLVAGLSFFIGGLKYKRQEFNVYDARHNSGLLMFAVIVAFVIPEVFSAEMTEPRKLSMSVGISIIMILLYLAALYFKLVSHRGVYQTNQNEQEESHEEPEWSGKRATLILFLATVAVAYISEHLVHTFDTVAEQFGWSELFIGVIIVAIVGNAAEHASAVIMAYKDKMDVAVEIAIGSTLQIAMFVAPVLVISSLFFPTSMPLVFTLPELVAMASAVLLMIIISNDGDTNWFEGATLLAAYIIMGIGFFLL

SEQ ID NO: 5809 - protein, 263 aa, Bacillus licheniformis
MKKLLCFTLTAFLSFSFFAVQEADAAKPIKIPSSVTNISKENTYPNASQDQPRLQPSELAEELLKTTDIAIENPHLIKMLNESSISGTPLAIGYRATIYLGRWALGYTSNETVANWEYRKINTNRFDNRGGKAPAELTYSQEQTSKIKGGLTAKVPKAEDVKNMMMLKAMEKTKLPLAFETVVGSGTKRDQIYKVQPKKLGNLHAYAPAVNEKGKVTYGEVYIVLKGNKRKLVVKNITSQGIGAWIPVQDHLTFGFQLSHQPK

SEQ ID NO: 5810 - protein, 373 aa, Bacillus licheniformis
MTEKMQVRPITPEYDPWEAYMDVDQFGDIQLTNVEFTTTTLCNMRCEHCAVGYTLQTKDPDALPVSLLLKRLDEIPRLRSLSITGGEPMLSLKSVKEYVVPLLKYAHERGVRTQINSNLTLDIGRYELIIPYLDVLHISHNWGTVEDFAEIGFAMMDKKPTFAQRARYFEKMIENSRTLVDEGVMVSAETMLNKRTLPHIEHIHRQIVEDMKCQRHEVHPMYPSDFASALESLSLKDMRKAIHRLLDIRDENTWMLFGTLPFYACSPDPEDHALLQRLREAKNVTVRNDPDGRSRLNVNIFDGNIIVTDFGDTPPLGNIQTDSLPSAYAKWRKTELAKELNCHCPHVRCLGPNVLVKNSYYQDVDFTSRTARV

SEQ ID NO: 5811 - protein, 61 aa, Bacillus licheniformis
MGNAVHDKEQQVNYLKNRLDMFMSVIDSLDPESTDLEDIDRLISMIDDLEAKYERFKKDWK

SEQ ID NO: 5812 - protein, 263 aa, Bacillus licheniformis
MKRICAICCGFLLTLGFSGNAEAISNKAIHWGFSKSKNHQPADAGQELNNLLQQYDAFYLGNTKEKTIYLTFDNGYENGYTPQVLDVLKKQNVKAAFFVTGHFVKDQPELIKRMAEEGHIIGNHSYHHPDLTTKTSRVIQEELESVDEEVYKITGEKNNLYLRPPRGIFSERVLEETKKLGYQTVFWSVAFVDWKINAQKGWRYAYDNMMKQAHPGAIYLLHTVSRDNAEALDQAITDLKKEGYTFKSLDDLMFEKSMMLETL

SEQ ID NO: 5813 - protein, 367 aa, Bacillus licheniformis
MSKSVKSVTSPKKFITGKRLLENLNDYIEDFGDNAYIICDEFILERAQKEAGNSIQKAGNQAVFEKFNYECTQEEIDRNRELARNAGANIIVGIGGGKTLDTAKATAYYEKLPVVIFPTIASTDAPCTALAVIYKHDGSFDRYLFLPTNPDVVLADSEILASAPPRFFAAGIGDALATYFEARACFKANGDNLVLMKPSTTGLGLARLCYDTLLENGVKAMQAVKHGVSTRAVEDTIEATIYLSGVGAESGGLAAAHAIHNGMTAVPSLHRAQHGEKVTFGLLAQLVLENAPAEELETVIDFIKGVGLPLTLKDLGVDEFVEEEWRQVAQSACAEGDTMGNMPFPVTPDDVYNAIVAANAIAESYHD

SEQ ID NO: 5814 - protein, 198 aa, Bacillus licheniformis
MKVHTGLAGIIMIVIGLLISAENHQGASVADALSGFLKLPIRNLVVLICMFMIIAGFIMAWRHYYGVPWIRFKLFLFIIGISVFYPLVTEQLMFFQKWNAQGDSAVEYMKRGSACSYQGDMEAGSMDCEVKVNNYGKKTERVQLTPDIINEFDFQPEELELSPHSQETYSVTFTAPGNEDAFASGIEEEPRLKIKVVK

SEQ ID NO: 5815 - protein, 319 aa, Bacillus licheniformis
MIKHFAMTKDGRLLSDNKAERLTDQDIEWFWTDFDQPSEEEVSLLKSHFHFHPLSVEDCVHRLQRPKLDQYEDYLFFVIHALNQKTLASEEVDLFVGKDFIVTFHFHHSDGIEKVRRQLSENSELWKNGPGHIAYMVMDTLVDEYFPILYKIEDRLNEIAESDSRKTYGTLMNEVFDIRGDLLKLRKTIIPMRDLLYRILNIEISKENRERKAYYSDIYDHLLKLAEIVENNRDMTADLRDSYQTLNSNRMNAIMMTLTIVSTIFIPLTFIAGVYGMNFDNMPELHWRYGYFFILGIMAAVVAGMIFWFRHKGWFDIFK

SEQ ID NO: 5816 - protein, 287 aa, Bacillus licheniformis
MWKETVSVTPPYHFDRVLDRLSLDPLNAVNLDKREVKLPLRNQNKEPRVVAVQATGTAEAPAFAVSGIDDRDDMIKEVKRIFRWEESLQPVLDHFSQSSLSSIFEEHAGTPLVLDFHLYHCLMKCIIHQQLNLSFAYTLTERFVHTFGEQKDGVWFYPLPETIAQLDYNDLRELQFSMRKAEYVIDTSRMIADGRLDLDELDQLSDEDIMEKLVKIRGIGPWTVQNVLLFGLGRPNLFPAADIGIQNAIKRHFGLNDKPTKEQMLEMSKEWHPYLSYASLYLWRSIE

SEQ ID NO: 5817 - protein, 463 aa, Bacillus licheniformis
VKRDKKGSSAELKVGQQFPLTIKRLGINGEGVGYFKKKVVFVPGALPGEEVVVEATKVHPKFSEGRVKKVRKRSEHRVKPPCIIYEQCGGCQLQHLAYEEQLKGKRDIVIQSLERHTRFDIGKMDIRPTIGMENPWHYRNKSQFQLGLSKNGKMVAGLYGLDSHRLVPITECIVQHPATNKTTQTVKQVLEDFGISVYNERKRTGDVRTIVTRVGFETGEVQVVLVTSKEDLPRKELIAEEIKKRLPEVTSVIQNVNKAKTSVVFGDDTRLLAGNMVIQEFLGEVSFELSARAFFQLNPIQTVKLYDEVKKAAKLTGREKVVDAYCGVGTIGMWIADGAKEIRGMDVIKESIDDANQNAKKHGIENARYVTGTAEHWLPKWTKEGFRPDVVIVDPPRTGCDRTFLDTIRQVKPKRFVYVSCNPSTLAKDLQYLAKDYHVEYIQPVDMFPQTAHVESVVSLKLK

SEQ ID NO: 5818 - protein, 159 aa, Bacillus licheniformis
MKRLCIIPCGAKKIWDVDPDIGPSAAKDVYLSPFHRACRAYAQTFFTDWVILSAKHGFLKPEDIVPENYDVTFGMRHPEIMPDGGLKAQGERKNLMDCDEIVMLGGKKYRPVLRNVFGSGQQIIYPLAGYRGIGYMLQALKRAVDEGRELGEHEKNEFF

SEQ ID NO: 5819 - protein, 93 aa, Bacillus licheniformis
LLKKHFRSGASKAGANIMIHQVKAACLSPEEHFLKTVKERRLLEEINRLDENLQEIVSLRIYENRHAHRQNRKLCQGGVSQGEGQASARNGGV

SEQ ID NO: 5820 - protein, 187 aa, Bacillus licheniformis
MKDKERSIFEDLLPLYHEGLLSKETAEWIEEAAENDEELQKLLKMTEAELPKEQIESSVHESQMFKRINRKLSLYQLMFMAISFFLAIRTSLLNESFGFILWYAVLGFAGYLFYRDMKLVMLLSFAPIFVWGMGDILAGWDAAGGTGVVEHLLYAVFGAFVLAVIHCFFAAVGMMIGWLFLKLKERS

SEQ ID NO: 5821 - protein, 240 aa, Bacillus licheniformis
MKKKVLYSVLIVLLVSFVLAAYNAFNGNPVSKKLSQTALEHYLTDRYPEKDLRIDSGIYNFKFTEYVFEVTDTGDPKRKDPYLLTLRGFVQPEVYTDGIYEENLNEPLMERLGEEAGKEIKALLSKSIDQLKDVDVHVEVLKGKLKNDAKWEKSIRLDKPMQIHILLDAENAGRKEVYNTAQKIQRLLNEEGYDYESVTINANIFDGEDIKDEEIGCLKYSTSFEKNTEIKLKDVEELND

SEQ ID NO: 5822 - protein, 191 aa, Bacillus licheniformis
LQETNERIISAALDLMQKYGFKSVTIKDIALHSGVSEMTVYRHFKTKLGLLEAAVQQFSYIPAFQRVFENDITWNLEKDLTLIAESYLLHMEKNKPLYLIAVQDGGRMTDLFGSLLKHMEELLCYLTDYFRTMQDKNLMKKGDADSQAFAFLSSLYGYFSSGALAGGRFQKVAKDTYIKQITAAFCGGLHV

SEQ ID NO: 5823 - protein, 398 aa, Bacillus licheniformis
MKNILIVNFPAEGHVNPTLGITKAFADRGDNVHYLSTEKYKDRLEGVGATVHLYKDLVRNAHIDPNSPSGLLEFLKIHLKTSLYILDIVKELSKSISFDVVYYDTFGAGELVRDYLNIPGIASSASFLFGQEHMKILPLHPDSGAELHLDKECEDLLTELKEKYGVSPRHTGQFMSNQAELTVVYTSRYFQPDSGRFGDDVLFIGPRFPKRLDKTDFPVESLKNEKVIYISMGTVLGKTADFFNMCIDAFRDFDGKVVIAAGEKSDYAEIKEVPEHFIIAPYVPQLEVLKEADVFITHGGMNSVNEGIHYRVPMVVLPHDKDQPMIAQRLKELNAGYPLFAEEVNAERLRDAAEQVLTDGKYQEGIQKIDESFSNCMDIKDALARIDEYTARKKSLQP

SEQ ID NO: 5824 - protein, 106 aa, Bacillus licheniformis
MRKLCVCLLLVIPLSCTAVMPSAYGETRVYQELTDKQKNELASLQKDIMEKKKQLINKYVEYGILDQERGKEIKSHIEKRYEKEREDGFLPKWKHHKEKFRPHHIH

SEQ ID NO: 5825 - protein, 400 aa, Bacillus licheniformis
MKNRPVSERRLLGIAGLGWLFDAMDVGILSFIIAALHAEWKLTPQEMSWIGSVNSIGMAVGAFVFGLLADRVGRKYVFIITLLFFSIGSGLSALTTTLWAFLVLRFFVGMGLGGELPVASTLVSETVAPDRRGRVVVLLESFWAFGWLAAALISYFIIPAYGWQIALLITAIPAFYALYLRIALPDSPKYEKLAQERKPTIMENVKSVWSRKYARPTAMLWIVWFCVVFSYYGMFLWLPSVMVMKGFSMIKSFEYVLIMTLAQLPGYFSAAWLIEKAGRKMVLTVYLLGTAVSAYFFGSAESLALLLVSGMFLSFFNLGAWGALYAYTPEQYPTSIRGTGAGMAAGFGRIGGILGPLLVGYLVARGTEISMIFFIFCIAVVAAVAAIIFLGTETKQKELA

SEQ ID NO: 5826 - protein, 458 aa, Bacillus licheniformis
VQHKEIARELLPLIGGAENIISISHCTTRLRFNVRDEEKIDIAAIEKMESVQGTFFRYGLFQIIFGTGVVNKIYKEMIQYSDPAPFEEARREARPNMNVLTRFAKTLSDIFVPIIPAIVASGLLMGLISVLKEFSLGAYGGPLMKMLDIFSSSAFVILPVLIGFSAAKQFGANPFLGAVIGGILTHPDLLDPSMLGSQKPESIEVFGLEVPLIGYQGTVIPILLSVYMMSKIEKFLKRIVPSSLDLIVAPFITVMASGFAALFIMGPLSLMIAHFISDCLGFVYHFAGACAGFLFGGLYALLVLSGLHHSFYVIEASLLADPEYGVNFLLPIWSMANVAQGGAGLAVFLKTKNAGIRKIAIPASLTAFLGIVEPVMFGVNLKLVRPFIGASIGGALGGAYAVFTHVAANSYGLSGIPMISIILPLGTANLIHYLIAFAIAVISAFIATLCLGFKDEKE

SEQ ID NO: 5827 - protein, 280 aa, Bacillus licheniformis
MKVKKILNNNALVVKDRGEEKIVLGSGIAFQKKKNDIVDRSKIEKIFVMKDSSEYRQFEEILKTLPEDHIQVAEDIISYAEKELGIKINERIHVAFSDHLSFAIERLSKGMVIKNPLLQEVKVLYTKEFQIGRWAKALIKEKLKIDIPEDEVANIALHIHTAKTNAGDMTKTLDLTTMIKDIIEIIENKLNIKIKDETISYERLVNHLRFAIQHIESGETFYEMDGEMISLIKKKFGQAFMCAEEIGAFVKREYGFEFPEKELCYITMHIQRFYQRSAVV

SEQ ID NO: 5828 - protein, 168 aa, Bacillus licheniformis
MEENKKILMIIGMEKQLEQTICRAANIQPEDALVLKSVFPDISQPYGDFMRDIITLVHRNKAEEIWIVRDKYEPSADEDISDLLNRDKDLKDRMQTLEYLFQNCSPEFTQGSIDEWLSPSENVAEGVQKSVAAIRRHPLIPLHVKVKGFLIDKSVLTEVEALNKNGAR

SEQ ID NO: 5829 - protein, 873 aa, Bacillus licheniformis
MKAAPTLSKQLIFQYEHQTADFNMDELVQSAARVIAPLWPIETFAARHPWMGLEEQTFEQTARQLKQQLHVDIYPKSSIFRSAKQRGEIVETILEKKLINWLDSHQPGMQRETAEAFCKAALKLDEIPGQLLRSRQVKKLAKQAARGTIDGRKTSFIKPLSVFAGQKSAHLLDHHVIKWCKLFLDESQSAWRLPHREKGFYSAWRQLVEHDPALSRAERQRLNGWPEEPRDAMKKALRAFDISNADVQAYLEAHLLSLPGWAGMMLWRSQQSQDEEELLLEYLAVRLSMEWMLIEPYLPMSKPNPEKEMQLVPLIASWLHWGGLTPEEWLELSAAEQKARLTLARRFDDITRRRLWLEAWEQTYAAEVRKLITANKPAAADKSETVLAQFAFCIDVRSEPFRRALEKSGPFETYGTAGFFNMAIETCELGTKHSHSSLPVILKPQHRVEETAEELPFKSYQEHKKAAASLSSAFKTMKQNLLAGMLLPEVSGPWLSLQMAARSLVPRAAGQAFRNARKTWLKKPQTKLSLDRMETSEAGIPVGFTEEEKAAYARQALKMMGITDRFAPLVVICGHGSRSTNNPYASALDCGACGGASGAFNARVLAALCNLPSVRQRLRSDGIFIPDDTVFAAAEHITTLDELHWLYVPELPAKAQQAFDRINSVLPDVSRTVGAERLEELPQLGYQNPRNEVERFAEDWSEIRPEWGLARNASFIIGTRRLTRGADLEGRAFLHSYDWRNDEDGSILSGIISGPGTVAQWINLQYYASTVAPHYYGSGNKATQTVTAGLGVMQGNASDLLAGLPWQSVMRSDDEIYHAPLRLLIVIEAPDDDIERLLDRDHSFRQKAENGWIHLASINPEGKWKNWTNTINE

SEQ ID NO: 5830 - protein, 510 aa, Bacillus licheniformis
MFDMLDSLFWLKIFFASLALCMFSALLVLNRKVPLAYVRIHAKIIALPPLAALAALITANPGQAEASWRLDSLAWLIALFVLTIGFIVQRYSVRYLFGDRSYRKFFVLLTLTTGGASCAWLNDDLRWLLLCWGITLLGLTALIGLNSAWQAAKNAALYAGRIFALSWLAIAAAALWLSLSTGHWRLSSAIAEESLVQLSSWEKTGIGLLVILTVMIPAAQWPFHRWLLDSAIAPTPVSAVMHAGLVNVGGVMLTRFAPMFSGDVLQLILLVPAVLSVLLGTGMMIVQTDYKRQLAASTVAQMGFMLVQCALGAYIAAVIHLILHGLFKAALFLQAGSAVRRYESFASKPGRPALFWNMIGGVFALALVIGIWASAADDGYQLISALVLGWALFIAWRQLVTANYGRVTRIAGLFILTGASLAFAIIHSVLHGLLKDAVVQGAEPPAMAAVLTAVVLLAGSAAGALIVRQRFAWSGALYLRLVKTGEPHFESVEERPNYLDQYLTQGGRQS

SEQ ID NO: 5831 - protein, 124 aa, Bacillus licheniformis
LEKQKVTKGSLEAEISKALTQWEKDYLGRGSVSVKTDIIRNMVIVSLNGILTPAEYELCSTKEGLLSIKRTRSGLVESGIEQLSRMMKKLTGEETISFHTDISTRTGERIMVFKLANDLQKKLS

SEQ ID NO: 5832 - protein, 65 aa, Bacillus licheniformis
MLKLFCMRLRLLILRNYFLNIISFKIYDVNTVLLLDKKEECRLSRRAFPWRLHRLFPCRSAVRQA

SEQ ID NO: 5833 - protein, 183 aa, Bacillus licheniformis
MKKAYVFLIDGFEEIEAIATIDVLRRAEVETVTVSLDPSRSVKGGHDIVVEADVMFDDADWQEADMLILPGGNVGSKKMLEHQALHKTLTEAANAGKYVAAICAATMTLGKTGLVSGKKATCYPGVEEHLTGADVTAHENVVVDGNIITSRGPATTIPFALKLAELLNGKEKAGAVAKGMLVC

SEQ ID NO: 5834 - protein, 324 aa, Bacillus licheniformis
MEEALTKEKAVWMYQKMLEIRYFEDQVHQLFAKGILPGFVHLYAGEEAVAAGVCAHLNDEDTITSTHRGHGHCIAKGCDLKGMMAEIYGKSAGLCKGKGGSMHIADFDKGMLGANGIVGGGFPLACGAALTAKYKKTKNVSVCFFGDGANNQGTFHEGINLAAIWKLPVIFVAENNGYGEATPFSYASSCESIADRAAAYGIPGVRVDGKDAAAVFQAAGRAIERAKNGEGPTLIECMTYRNYGHFEGDAQRYKTNEEKAVHQEEKDAIAVFKSELLAKGLMSEEEQSRIEKEVEEAVEEAVAFSEKSAYPEETELLTDVYVSY

SEQ ID NO: 5835 - protein, 344 aa, Bacillus licheniformis
MTREISMSAALNEAIKLAMRRDDHVILMGEDVAGGANVDHLQDDEAWGGVLGVTKGIVQEFGRERVLDTPISEAGYIGAAMAAASTGLRPIAELMFNDFIGTCLDQVLNQGAKFRYMFGGKAEVPITIRTTHGAGFRAAAQHSQSLYALFTSIPGLKVIVPSTPYDAKGLLLAAIEDQDPVIFFEDKTLYNMTGDVPEEYYTLPIGKADIKRKGADVTIVAIGKQVHTALQAAEQLSARGIEAEILDPRSLSPLDEEAVLASVEKTNRLVIVDEANPRCSIAADIASLAADKGFDSLDAPVKKVTAPHTPVPFSPPLEDLYLPTPEKVVNTVLEMLGETSTHTV

SEQ ID NO: 5836 - protein, 377 aa, Bacillus licheniformis
MAVEVVMPKLGMSMKEGTVSVWNKKVGEAVEKGESIASINSEKIEMEIESPANGTVLDIQVSEGEGVPPGTVICRIGNENEQTQESQTKQPDPTKERIKISPAARKIAQSANIDIKTLKGTGPGGRITKADVLQALPGRPNKQAAKAEAEERPPASPMRKTIAARMTESLQNSAQLTITMKADITKLTVLQKQLNETAQSRYDTKLTITDFAARAAVFSLLDHPAMNSVYQDGRLATFEHVHLGVAAALDEGLAVPVIRHAERLPLIELAKKIKWYAKKAREGRLLHDEIEGSTFTITNLGAYGVEHFTPILNPPETGILGVGQMYSAPVYQDGELTKGAILPLSLTFDHRALDGAPAAAFLSDVKNYLEDPASILL

SEQ ID NO: 5837 - protein, 458 aa, Bacillus licheniformis
VTLAIIGGGPAGYVAAITAAKNSREVILIEDGSLGGTCLNEGCIPTKALLESADMFEKIKSAGAFGIGLSGESPTVHWEAVQSRKREIIQRLAGGIEYLMNKNKIKVLQGKASFLSEHDILVEKDGKQEVINAGHVIIAAGAAPAALPFASFDGSWIIHSGDAMSLPSIPETIFIIGGGIIGCEFASIYSRLGANVIIAEQAEQILPEEDPDIAAFLRTSLEESGVRVFTSVQVERLDPARQRVFLKNGDDSFNIQADRCLVAVGRKPRTDDLKLDHIGVQYDRKGIHVNQHMQTNIPHIYACGDITGGVQLAHAAFHEGTVAASHASGRDMKVNSDIIPRCIYTSPEIASVGLNEKKARERYRDVRIGEFPFSSNGKALILNETAGKVKIIIEPEYQEIVGVSIVGPGATELIGQAAVMLHAELTADAMEHFIAAHPTLSETIHEALLQAAGRAIHC

SEQ ID NO: 5838 - protein, 611 aa, Bacillus licheniformis
MNPTPCYLNTWKRFVQEGLLDQARLNKRVMESWYRCKNRNVNPYLDKGQSILKKDLFDAQKKKHSLFLDIALPYLHNISRELKESEMMALLIDADGYVLSLAGCRRTLEEAKKINFVEGVRWTETEVGTNAIGTALEIGEAVTIHGTEHFSVASHHWSCSAAPIRDEDGTVMGLIDISCLTDRRHPFMLGMAATAAHAIEREISAHTKKNEAELISHCLEKIDLDQPFIVCNEKDKIVAASRPVRERFSDWRRMDVNDLYERGFAGGHKQTIFSAKDGRPLGKSIALAEVSRNKTAPSLVSRFIYPGETGTSRAFQQALHHMRLAAKTDANVYIWGETGSGKELAARAIHQASARRNGPFIAVNCGAIPESLMESELFGYAEGAFTGAKRRGSKGKFEQAHRGTIFLDEIGEIPYQMQVALLRIIEERKVTPIGGTREVPLDIRIITATHRDLKDLLQKGKIREDLYYRLHVYPVKIPPLRERKEDIPDLFRHYQQQHEWKAEFPPNFFKRLQEYHWPGNIRELFNTFERLRVLFPEGGLIDPSQYSAVLDGLDWNSGAPSEEDRLTFRERVQKQTMMEALQKTKGNVSEAAKLAGIPRSTFYKRLRKYNL

SEQ ID NO: 5839 - protein, 108 aa, Bacillus licheniformis
MMIAIGLFLLAGLAEIAGGYLVWLWLRESKPLWYGLAGGLTLIIYGVIPAFQAFPSFGRVYAAYGGVFIILAVLWGWLVDKKTPDLYDWAGAVICLAGVSVMLWAPRG

SEQ ID NO: 5840 - protein, 449 aa, Bacillus licheniformis
MDKTYSIVIAGGGSTFTPGIVLMLLDNLDDFPIRQLKLYDNDGERQDKIAGACEVLVKERAPHIQFLATTDPEEAFSDVDFVMAHIRVGKYAMRELDEKIPLKYGVVGQETCGPGGIAYGMRSIGGVLELIDYMETYSPDAWMLNYSNPAAIVAEATRRLRPTSKVLNICDMPIGIEDRMAQILGLSSRKEMVVRYYGLNHFGWWTSICDKDGNDLMPAIKEHVRRFGYIPEQEHEKAEASWNDTFKKAREVFELDPETLPNTYLQYYFYPDDMVKKSNPEFTRANEVMEGREKFIFGECEKIAKAQSSAGSKIEIDDHASYIVDLARALAFNTGERMLLIVENNGAIQNFDSSAMVEVPCIVGKNGPEPITIGKIPQFQKGLMEQQVSVEKLVVEAWIEKSYQKLWQALILSRTVPNARTAKLILDDLIEANKGYWPELSAENLQLSL

SEQ ID NO: 5841 - protein, 256 aa, Bacillus licheniformis
MQLEELMNKHYKKLNENDFYVLKYILNHQDTCYKLGINELAKKCNVSRTSILRLSQKLDFSGYSEFRVFLKWEAEKREEEREDCRSFESLMRDMEASMKYLKNTDLRKICQLIDEADRIFVYGSGTAQTTCAYELQRMFVSQHRYLTVIKDQIDFDLMFPDFSTADLIIIISLSGETPSLIPQAQSLSAKGIPFISLTNLKNNLLAQLTPYNLYAPSQTVTVYPKTELTAFAPFFLVGEALFRSYVDYAEEKKNQE

SEQ ID NO: 5842 - protein, 530 aa, Bacillus licheniformis
LMQKVQRFGSAMFVPVLLFAFAGIVVGLSTLFKNEQLMGSLASQDTFWYQFWYILEEGGWTVFRQMPLLFAVGIPIALAKKAQARACLEALTTYLTFNYFVSAILTVWGDFFGVDMTQEAGGTSGLAEIAGIKTLDTNIIGAILISSIVVYIHNRYFDKKLPDFLGIFQGSSFVVIISFAIMLPVALATAWIWPMVQDGIASLQSFLVASGAFGVWVYTFLERILIPTGLHHFIYTPFVFGPAVVEGGIVTYWAQHLSEFSASSEPLKELFPQGGFALHGNSKIFGILGIALAIYVTAKKEKKKIVAGLLIPITLTAVIAGITEPIEFTFLFISPLLFFVHSLLAATMATLMYAAGVVGNMGGGLIEILTLNWIPLFHQHGSTYVFQILIGLSFTAIYFFVFRFLILKLDIATPGREKDQQQETKFYSKKDYKAKKESEKEVSAAQEIAETDQAVLCIKALGGKENIAEVTNCATRLRVSVYDESKVEPDSTFKSFGAHGVVRNGKALQIIIGLSVPQVRERVEKLLNQS

SEQ ID NO: 5843 - protein, 192 aa, Bacillus licheniformis
MGTEMPAEFYDQFIDRHLIPLEKSPWRKVYEEAARLLPESKDETIVDIGCGTGRFAKLLYDKGYRKYLGIDFSKGMLEEAKRYNPSFTFIEGNVYDEAIVRMLQKYHVFVLLEVLEHIEKDKAFLSSLPQGSDMVISVPNYDSRAHVRHFKHIDEVIERYDGILDFQGTEKVVIKTSERLKNEIYVLNCKKR

SEQ ID NO: 5844 - protein, 325 aa, Bacillus licheniformis
MRRCLKILVLIKTFWKTMPKHEVKYKMMKSLEEFAEVMYWHTDGYLPDILDKIQFRPDFIFHYDIAYGFSLSPNIRGLKDTNIPTGAFVIDSHFNKQIRSSYFEDNQIDLIFSVTKEHFLNEYPQYKDKFRWVPWAVDPEIFKDWKLKKTIDYLLMGLVHEGNKRYPPKGKYLFREAVLQTMKHEEGFVHHPHPGNVITDEEEIKQAFLNEKYAQELNRAKIFFTCGSALRYPLLKFFEAPACRTLLLAEPNQDIFDLGFKDGTHFIACEVEDFYDKAKYYLQNKKERQRITDNGYRLVHSQHTYHARAQEIVDTIIDFLEQQEQ

SEQ ID NO: 5845 - protein, 112 aa, Bacillus licheniformis
MSLSSLCPKFEKGMKMISQRWNGFIIHQLLNGPQRFCHIESSLPISGRLLSERLKELEHEGLIHRHVYPETPVRIEYSLTEKGQALEPVLKGMEKWSQEWIDLDEANERENH

SEQ ID NO: 5846 - protein, 147 aa, Bacillus licheniformis
MNNKYELGALILRLVTGLTFLLHGLSKFQGGIENTVGFFSSVGIPGFLAYIVAIIELAGGALMILGLGTRVIGLLFAIVMLGAIFTVKLSAGFMGTDGGAGYEFDVTLLAMSVYLALSGSSMLSLGEMILKSRKEGKTDDAANPPGH

SEQ ID NO: 5847 - protein, 286 aa, Bacillus licheniformis
MTQQIHPGTELGYVKLKVSRLERSVSFYRDVIGFQVLKQDGKTAEFTVDGKNPLLIIEEIPNAVVLPERSAAGLYHFAILLPNRKQLGMAVKHLIRAGIELGQGDHLVSEAFYLSDPDQNGIEIYRDRPREGWKRDEQGNYVMGTEPVDVQGLLEEADGHEWQGLPPETKIGHVHFHVRDLKQAKEFYHSVLGFDITGDYQHMSALFVSAGGYHHHIGLNIWAGQHAPFAPLDAAGMAYYTVLLPNRAELDRIAKKLKSSGYAVEHEENAWFVKDPASGIDIRLTV

SEQ ID NO: 5848 - protein, 534 aa, Bacillus licheniformis
MAKSLTGKAKHHPPVWNPNIDGGRFCNPVLFMDYSDPDVIRKGSDFFMAASSFSCFPGIPILHSTDLVNWSLISHVFDELPFGEYEAPAHGKGAWAPSIRYHNGEFWVYFATPDEGIFMSKTSDPFKGWEPLIQVKKTKGWINPCPFWDDDGNAYLIHAYANSRIGIKSKLNLCRMKKDGTALEDDGEIVFDGTLNHPTIEGPKLYKKDGYYYIFAPAGGVKTGWQTVLRSKQIYGPYEDKVVLHQGNTVINGPHQGGWVELDSGESWFIHFQDRGAFGRVVHLQPVRWFDGWPLMGEDINGDGIGEPVLHWEKPKTGAKEVKLPFDHGNDDFSSSDRLALHWQWEANPKQEWYSLSASPGRLRLYSRGIAHPFKLSRLPNLLMQKFSGPSFTATVKLSLNALSETMMAGLAVMGREYAYLGFSKSENGYRLSVYEGRIEGDQEDVKTEERGVHAEMVYLRVTVDEQAVCRFSCSMDRRHFTQIGNSFQAVPGLWTGAKAGVYCADTGGEDGQDGWCDIEWFSVEPAGGECHER

SEQ ID NO: 5849 - protein, 515 aa, Bacillus licheniformis
MSGEHTYTNPVLTGFHPDPSIIRVGEDYYMVNSTFQYFPAIVISHSKDLVHWKIIGHGITENEGLDLSDINDSHGIWAPDISYHNGTFYIFATHRLNGPTVINGRKLIRRQIMIKSSRPEGPYSKPVFIDEGSGIDPSHFVDGDGKHYMLLSPACTLFPLNEECTDISGEPVQIWEGTGRRAPEGPHLLKKDGYYYAILAEGGTGYSHSITTARSTHLYGPYEPCPYNPILTQTDPDAPIQRAGHGKLVETQNGEWWAVYLCGRPNQGSYTTVGRETALDPVEWTDDGWFVINNLKGPSLVQRAPNLPQVKWDEKNFDDFDEDTLGLDWQFVRNPDHSSWSLTERPGYLRLWTGDWDLHDIRAKNTVVRREKHHLYSAGVKLDFSPSASGEQAGIVCYYSTNNYLKCCLIYEEGLKIKVVENRSGCQKTLGKKHAEAGPLFLKAVINKQKRDFYYSYEGKHWHHAGGTEDASFLSDEGSRDAKGHTGTMVGIFANNGGSGRKAAADFDWFRYIAY

SEQ ID NO: 5850 - protein, 281 aa, Bacillus licheniformis
MLHPKYFIAEHSFSIQYMQRKGFTEMNAPHVHEGYELYYLLSGERTYFINQSVYTAEKGTMIIINPHDLHRTSSTEVQEFERILINFSHDFIEPLLKCSHYRLLPFPENQNFIAFSLREQAAVEHMLMEMKKECKLKKEGHEDVVRALLFQLLFTIYRSLAGGGRNQTRPLHPMDEKISEIASYINCSFQETMTLDGLAGQFYISPSYLSRVFKKVTGFHLQEYIRHIRIREAKKRLRDTDEKILDIAADTGFKHISHFNKVFKEIVGIPPLQYRKKSRDI

SEQ ID NO: 5851 - protein, 282 aa, Bacillus licheniformis
MKKLCCLILVLVFSAGCTQQKASTEEDGALEINWLVPLHTPQPPKEKALDIIEDKTNTKLKLIWVPDSTKEERINTTLASGNMPKVMTLPDLEDSAVVSALRSGMFWEIGPYFKDYPNLRKLDKTILKNISVDGKVYGIYRERPMARQGVVIRKDWLDNLGLEMPETVDDLYKIAKAFTEQDPDQNGKDDTFGLVDRNDLTFGAFKTLASYFGAPNEWGTDEDGNLFPYFKHEAYKDAMAYMKKLYEEGLMNRDFAVTSKTQQQDLVIQGKAGIYIGAMSDA

SEQ ID NO: 5852 - protein, 37 aa, Bacillus licheniformis
VCIYNGSLHIASSFSSYDGIILFILQNLKKMNLERIR

SEQ ID NO: 5853 - protein, 197 aa, Bacillus licheniformis
MQTAVIYAHPNPNSFNGAILNQVIKALEDGKHFYDVIDLYRDRFDPVLLFDEKKRRSDMKRDPETAEYRRIVKNADHLIFIYPLWWGGMPAIMKGFIDRVFAAGEAYTYQGKLPKGLLKARTASVYYTADAPSWYLRFWQRDADWVTVKDVMLKFCGVRRVKRLLFAGVKDSSEEKRTQWLDRVYRSIAPADRGISK

SEQ ID NO: 5854 - protein, 203 aa, Bacillus licheniformis
MTKEMKWLDWAKEIQAIAQAGLAYTKDDFDRERFEQLRELSCEIIADYTETDFSKVKELFAGESGYQTPKVDVRAVIFKDHKLLLVQEKADGKWALPGGWADIGFTPKEIAVKETLEETGLKVKAHKLLAVMDKKRHNHPPSAFHIYKLFISCQIVGGKAEAGTETQNLVFFSLENLPELSAARNTYEQIEYLFEKHDEVYCD

SEQ ID NO: 5855 - protein, 125 aa, Bacillus licheniformis
MDQLKYPIGTFSKPLEADERELEKWIGDLKQAPHLLRSAAAGLNEEQLDTPYRTGGWAVLQVVHHLADSHMNGYIRSKLALTEETPLIRTFDEQNWAGLTDARTLDPDLSLALLDTLHLRWAALF

SEQ ID NO: 5856 - protein, 850 aa, Bacillus licheniformis
MKKNALAILRIVIPAAVLLFVFFQAKKELAGLSFKETFLIIDQINRIDLFILVFLGLAAILAMTLYDFVLVRSLGMKVSKWKTIKVSWIANSLNNVLGFGGLSGAGLRTILYKEHVDDVKKLIRGIAWLASSVLLGLSVLSLLVLAGILPAGDLFTEKTWVLLAVAGTAMIAPGAAVILMIKKKRSRGAEKGMRLSVFFSYLGASVIEWVAAAAVMYYSLATMGVELDLKTVIGVFTIASVAGMISLVPGGFGSFDLLFLVGMSQLGVDQEITLTAIVLYRIAYSFIPFVFGLIFAAADLTGNTMKRLEEKPIIAPAIETTNILLILHRALLFRLLNGSLSVIAFCSGAIVIASVALPIDRITLIPNISKFMLVFFNGLSLSFGLILLILPLELYRRTKRSYYMTLTALALAFLFTLFKGFNISAVFMIPVVFALFVLLRGQFTRERAVYTFGQIAWGAFIFLFTLLNYNIIASHIWEALGHLLVKDYFIHSERHVDFATFFALFFVPLYFAVFIWAFNRKTKEIGEEPDPEKLEAFLEEKGGNALSHLGFLGDKRFFYSSDGNALIQFAKVGQRLVVLGDPSGREDSFPLVIKEFLHAADQKGYLVIFYQIEREDMALYHDFGYRFFKLGEEAIVDLDTFTISGKKRAGLRAIYNRFEREGYTFHVEQPPFSREFLNELRQVSDEWLGRKKEKGFSLGFFQEDYLQKAPIAVLKSEEGEIVAFMNIMPMYREGEISIDLMRYSKKAPKGIMDALFIYLFQWGKEQGYTAFNMGMAPLSNVGTTFQSFWTERLAAVIFNNVSYMYSFSGLRSFKEKYKPVWRGKYLAYRKNRSLPVTMILVTRLIGRRTK

SEQ ID NO: 5857 - protein, 43 aa, Bacillus licheniformis
MRPFIKTAFFLYCHCKKHSKGGILQMIGREGSNRQMGDQNEAN

SEQ ID NO: 5858 - protein, 298 aa, Bacillus licheniformis
MKPIEVLRYDAFSKTAGQGNPAGIVLEADGLTDWEMQKIAEQAGYNETAFLLPSESADIRIRYFTPGHEMNLCGHATVASLYALLEKGAIEAGAELKVETKAGVLSVYTASDGNRRFLVTLEQAPPCFQSFTGSRSQLAEALGISEADFHEALPVVYGSTGIWTLLVPVRDLAAIRRMKPVQAEFPNVLTEMPRASVHPFCLETIHRDCQLHGRHFSSPYSGTSEDPVTGTASGVMGAYMKTFGKEFCEEGQTDFQIEQGQEMGKDGKVKIEVAEQNGIMKVRMTGTAVFAEKQSFEV

SEQ ID NO: 5859 - protein, 192 aa, Bacillus licheniformis
MNDTLEIQSIRDCVRNRRTIRKFKQDPVPKEVVLELLEDAIYAPNHKLTEPWRFIYIGTENGKKKHADNLKAAFKELKPNMQEEQINKFREHILSVPAFLFVIMKEDENERDRRDDFAAVSCLIQNLQLLAWEKGIGMVWKSGEVLSHETLHRLMGLKRDEQVAALLQIGYPAEIPEAKHRTPAAQLFTELT

SEQ ID NO: 5860 - protein, 64 aa, Bacillus licheniformis
MGRNAIHKNRDKNKQKLPQVPDQYKREADGVYEEYSAELADQDDREAQARMQAADKRAKKRQSK

SEQ ID NO: 5861 - protein, 37 aa, Bacillus licheniformis
MADKKKRERFKSTLNKTQEVRYSREFKMAERAAREKS

SEQ ID NO: 5862 - protein, 176 aa, Bacillus licheniformis
MLKKRELTDCYALFELMIHPDVFPFVRNKAETIEEYMFHVKNMIEEEEQGKLISRTILDEWENPIGCISLYEIEEQKGFLGTWLGKPYHGKGYNQRAKDAFFCELFYEKQIEAVFMKIRKTNMRSLKAAEKLPYAVKTDLDWAGSDTFHLYEIPKDLYTLYSMRTFEEENSRLKEA

SEQ ID NO: 5863 - protein, 299 aa, Bacillus licheniformis
MKIAIAGGTGFIGRHLTNALTARGHHVYILTRKPAETEQKNTSFVLWQKNGARPEKDLTDIDVWINLAGKSLFGRWNEKTKAEIATSRLRSVEESARIIQSLQKKPNTLIQASAVGIYGTSLEQTFTEESPVSAEDFLSRTTALWEQAAEPIEALGIRTVWMRFGLVLGKDGGALPKMALPYQLFAGGRIGSGRQWVPWIHIEDAVGMILSAIEQTLMSGPVNVTAPNPVQMDTFGQTVAKVEKRPHWLPVPEFAIKGVLGEMSMLVLKGQRVLPKKALQNGYHFLYPDLEDALHNLLA

SEQ ID NO: 5864 - protein, 263 aa, Bacillus licheniformis
MPYITKISAQKNNEERVNIFLDEKYAFSVDLDVLVKFDLRKGKELDELDIIEIQYGDDVKKGFKKALDYLSYRMRSTKEVQDHLKKKGVADSAITEILHMLKGYKYLDDREFAAAYVSTHRKTSGKGPDVLFRELKLKGIDDELIHEALSSFSFSDQVEAAVKHAEKVLKKEKKLSSKETKQAIEQHLVRKGFSFDVISAALQETDYENDDGAEREALEKQGEKAMKRYGYDGSYETKMKVKQYLFRKGFSIDLINQFLDEKG

SEQ ID NO: 5865 - protein, 104 aa, Bacillus licheniformis
MEKRYSEMTAHELHQEIAGLTEKARKAEQMGIVNELAVHERKIAMAKAYLLDPADFKAGNVYEIEDGGDDFHIRYLNGVFAWGYRLSSPDHEEALPISLLKEKG

SEQ ID NO: 5866 - protein, 56 aa, Bacillus licheniformis
LCANRKPYTNDFNQMKTQNYPQPWANTKHARAQVNGETQQTQDLIILQRNTRIRTR

SEQ ID NO: 5867 - protein, 49 aa, Bacillus licheniformis
MRNKSRGFPNMNNNKFEGEPRAKDDFASKRPDGSTNTHPQERMRASGKR

SEQ ID NO: 5868 - protein, 89 aa, Bacillus licheniformis
VEEYFEKLTNALLEKNHMLSYAQARTWVELLWGDFEATFAKAGHPYRGKELTERVVKEWIEHYGSQLHLFQNDKPSYQDLFSGARGLLH

SEQ ID NO: 5869 - protein, 65 aa, Bacillus licheniformis
VKLSCENGRRRSQIRFSPDDKDLLPFARTYQGNGFDCGGGVWPLTISPDASSLAAALVSGKIELM

SEQ ID NO: 5870 - protein, 319 aa, Bacillus licheniformis
VKKGFVSIIIPSYNEASNIKLIYESLRNEFQSIDYDYEIYYINDGSTDRTLEEIKKLAEKSEHVKYISFSRNFGKEAAILAGFQHARGDAVVVMDADLQHPTYLLHDFIKGYEEGYDQVVAQRNRKGDNPVRSYLSSLYYRFINNAVEVDLRDGVGDFRLLSRKAVNAMLKLSEGNRFSKGLFCWIGFDQKIVYYENVERKNGKSKWSFRHLLNYGIDGIVSFNNRPLRMCFYAGIFILFLSLIYIAATFIRILKYGVIVPGYFTIISAVLFLGGVQLLSLGIIGEYIGRIYYETKKRPHYLIQEANIAHGETHENRES

SEQ ID NO: 5871 - protein, 133 aa, Bacillus licheniformis
MEKLMKIVNPEFIRFAVVGVVNTLNYYAVYLLLHVLLQLNYMVSHIAAFFVSLVISPFLNCYFTFKIKPTLAKFLQFPLTQLFNLTVSSLFVYTFVNFFKMNSEAAPLASMFLTVPLTFLVTGKILKKDRGRV

SEQ ID NO: 5872 - protein, 861 aa, Bacillus licheniformis
MKKTVFLFVIASIAVSVAAHSFFLYEWAHDRYMTGNGDGLAQMIIFKSFLFEQYKQGNFFYSYSFGLGGGIYSQLGYYFTTSFVFIASFAAVFLMQLLHLAGDADPLFWAQAAVFISVIKLSLIILAAAYALNGMVKNKLAAFTGAVLYGTSVIYFRHTVFWEFFSDAMLWLPLLVAGAEKVIREKRTALFITACSLTLINNFYFAYINLIFIAIYIIFRWLIRLDPEKEAPRWKQFRMFAASGLISFGISAISFVPAVYGFLNNLRPPYDQAVAVYDLTDNILFSSRIVLLPAVFMLFLFAFSFYKNKTFRLFASISVLLVLLHYSPLAASAFNGFSAPQNRFEYLLAFTIGGAAAAGMTELKNIRRKEMIWSILLVLLVYIAVIWRKDLDLSLMQNWSIIVLLFLTIAIFTAAGFQYKKSQLFLHVCILLSSVLVANTYQKYVLSESSGIKNVTKSYLTSNEYNGEEQRRLLNNIRKDDKGDPYTRIDWMNGVRNNTPLMQDFNGFSAYSSILNRDLLLFYWEDLQIDMGRESVSRYASMGDRANLYSLLYGKYYMTEKDNAANVPYGFIQTDESEHYTVYKNKYTLPFIRTARTLFTEKALADAPVLAREHAMLEGIVLENGGNGKEQPPSVPDLMKQTKLKTEGASYHNGFLDVTAENGGIDLIPEGGVPKEGDYYVGFYLKSLAKDQFFNLRVNDYVTSRKSNQSIYKTGVYDLTIRVPKTDKISIRLPKGKYQLDHLRLHQEDYQLLKKAAAKKTPAADLNWRNNQVSISFDNQNGDRYMVLPVPYEKGWEVTVNGKTQTVQKANYAFIGIPIEKGKNNIRLVYYPPYFKATLAVTVISLIIGIWYSRRRKKLGS

SEQ ID NO: 5873 - protein, 327 aa, Bacillus licheniformis
MDTGTHVVMGVALGGIATLDPVVGMDPSMAQAVMIATIAGSQAPDIDTVLKLKNNAVYIRHHRGFTHSIPAVLAWSLMIPGILMLFYPEANLLHLWLWTLAAVALHVFVDIFNAYGTQAVRPFSRKWVALGLINTFDPFIFVSHLIAIAFWLAGAHQGYTFLALYIVLAGYYLVRYFMQRKIKHELREKIDDIEEIIISPTMKFRQWRIAVKAKSAFYVGRSMDGNVVIVDTFNRVPLPDTDVMKAAKQDKNISAFLSFSPVYKWEIDTYKDHYEVRFIDLRYRSKGHYPFVAIAHIDRDTLELITSYTGWIFSEEKLQKKLKLGSV

SEQ ID NO: 5874 - protein, 360 aa, Bacillus licheniformis
MDLQKKLEQKNIKQFQEDLISWYEQEKRDLPWRSDSDPYKVWVSEVMLQQTRVDTVIPYFNNFIEKFPTVEALAEADEEKVLKAWEGLGYYSRVRNLQSAVREVHERYGGVVPPSKEEFGSLKGVGPYTRGAVLSIAYNQPVPAVDGNVMRVMSRILSVWDDIAKPKTKTLFEKIVEAFISEEKPSEFNQGLMELGAVICTPKSPSCLLCPVREHCSAFAEGCEKELPVKSKKKKPSVKTLAAVVLTDEEGYIYIHKRPASGLLANLWEFPNTETQKGLKYEREQLAAFLKEEAGIEAEIGPLEGVVEHVFTHLVWNISVFFGKTLDQPDDSYFKKVTKEELAEYAFPVSHQKIWNMYMK

SEQ ID NO: 5875 - protein, 74 aa, Bacillus licheniformis
MYVGRDMSELDHTPKNEWKDAELLYFHRAFQQIMPFLNEEGHAEYLEVVKEIQARGGLCRQEADYTHGTTIQYD

SEQ ID NO: 5876 - protein, 250 aa, Bacillus licheniformis
MEQRKCALITGSSRGVGKAAALRFAENGYNIVINYARSKKAALETAEEIEKLGVKALVVKANVGQPAKIKDMFQQIEEAFGRLDVFVNNAASGVLRPVMELEESHWDWTMNINAKALLFCAQEAAKLMEKTGGGHIVSISSLGSIRYLENYTTVGVSKAALESLTRYLAVELAQKNIIVNAVSGGAIDTDALKHFPNREELLEDARQNTPAGRMVEISDMVDAVEFLTSGKADMIRGQTIIIDGGRSLLV

SEQ ID NO: 5877 - protein, 54 aa, Bacillus licheniformis
MANQQSKTNAQKVRQQNQASAQGGQFGTEFASETDAQQVRQNNQQAEQKKQQNS

SEQ ID NO: 5878 - protein, 81 aa, Bacillus licheniformis
MPEFENLVQGQMEIMDKLLYLQAEIERCQKIEKELAALEKKAQLLSIREDISQKRKDLAQIQDLFQKQTEQVIQAYQRIEA

SEQ ID NO: 5879 - protein, 176 aa, Bacillus licheniformis
MGFPKEGETIQIHSYKHNGQIHRIWNETTILKATELCIIGANDRTMVTESDGRTWMTREPAICYFHAKQWFNVIGMLREDGIYYYCNISSPFALDDEAIKYIDYDLDVKVFPDMTYHILDEDEYADHKKAMNYPKEIDGILRYHLNTLLHWIHQRKGPFASEFIDIWYERYLHYTK

SEQ ID NO: 5880 - protein, 580 aa, Bacillus licheniformis
VGVIRRYMEFVKPYKWKIVLTVLIGIIKFSIPLVIPLLLKYVVDDIIQGSGTAEEKTSTLFMVMAVMFAIFLVLRPPVEYYRQYFAQWTASKVLYDIRDKLFAHIQKLSLRYYANTRAGEIISRVINDVEQTKEFVIIGLMNVWLDVMTIFIAIAIMMTMDVKLTLISIVLFPLYGLSVKFFYGRLRKLTRERSQALAEVQGHLHERVQGMPVIRSFAIEDYEQKQFDHENGNFLGKAIRHTAWNAKTFAVVNTVTDLAPLIIITVAGYHVIHGNLTVGTMVAFFGYIERLYNPLRRLINSSTTLTQSIASMDRLFEFIDEPYDLKDKPNAVKAERLKGIVEFKNVSFQYEKSEEMILQDLSLKAERGETVALVGMSGGGKSTLVSLIPRFYDVSAGSLEIDGIDVRDYEARSLRNQIGMVLQDTFLFSESVRENISIGNPEASMEDIIEAAKAANAHDFIMELPQGYDTKVGERGVKLSGGQKQRISIARVFLKNPPLLILDEATSALDLESEHYIQEAMEKLAKDRTTFIVAHRLSTITHADKIVVIENGRVAEIGTHDELMSRDGHYKHLFTIQKLN

SEQ ID NO: 5881 - protein, 326 aa, Bacillus licheniformis
VTKEKLLEVSDLSISFQKKKSETPIVQGVSFDLHPGEIMGVVGESGCGKSVTSLALMGLNANTRTTGRIKFQNKDLLMQSEKEWRQMRGNDIAMVFQEPMTSLNPLFTIGDQLTEALSSHTNIHKKEARRKAVQMLDTVGLPRTDQLMKQYPHELSGGMRQRVMIAMALICEPKLLIADEPTTALDVTIQAQILSLLKKMNAEFNTAILLITHDLGVVHNTCERVMIMYAGRIVEEGGVTAVFDSPKHPYTKGLFASIPAFTGKSERLSSIEGQVPKPGSIKKGCMFAPRCPHKRERCVEEEPGLNRLADDHAVSCFLYEEEGAFT

SEQ ID NO: 5882 - protein, 318 aa, Bacillus licheniformis
MNHELLNVQELKTYYRVSRKKIVKAVDDVTLSVKKGEIVGIVGESGCGKSTLGKSILRLTEPTSGKVTFLGREMTGLDAKQLRNMRRHIQMIFQDPYASLNPRMKIKDILEEPLIVHKLGTKAERREVVRSMLEIVGLDASYGDRYAHQFSGGQRQRIGIAKALITKPKLIIADEPVSALDVSVQAQILNLLSDLQKAFNLTFLFISHDLGVVRYISDRVAVMYFGKIVEMADADSLFREPKHPYTETLLAAVPVIGKGEAVHTAPDIAAPRMSEKGCPFYSRCMKRADVCLEAEPLLEETADGHYAACHFTNKEAVR

SEQ ID NO: 5883 - protein, 532 aa, Bacillus licheniformis
MKKKSWLICLGMILSVSAFLMGCSGNESGKNDGGTNGGKDTLIIGRGGDSTSLDPITTTEGEAFKVTINMFETLLNYGEQDTTLKEGLAVKWDASDDGLTYTLELRKGVKFHDGTDFNAEAVKYNFERWMNGDEEKFPYYGMFGGYKKDEGHVIKDIKVLDDHKIQFILKRPQAPFLKNLAMTSFGIASPAAIEKYGEKFREHPVGTGPYKFVEWKPNDRIVLEKNEDYWDQGKPKLQKIIFRAIPENSARLNALKTGEIDLMDGVNPSDIESIKADANLKIFERPSMNVGYLGMTTTRKPFDNKLVRQALNHAVDKQAIIDSFYGGLAESAKNPLPPSLEGYNDQVKEYPYDLKKAKELLKEAGYPDGFKMKLWAMPVPRPYMPDGMKIAEVIQSSFEKIGVKAEIVTYDWATYLDKVSKGEADAFLMGWTGDNGDPDNFIYTLLDKDNIGGNNYTYFSNDELHDILIEAQSDPDQKKRNKLYQDAQELLHEESPWVPLVHSTPILAGSKDIDGYVPHPTGSEVLSGVEFK

SEQ ID NO: 5884 - protein, 333 aa, Bacillus licheniformis
LLAYCLKRTAMLIPVLIGMTLVVFSIIRFIPGNPAQVILGQRATKEAVQQLTVQLGLDQPWYMQYARYIGDLLKGDLGTSIRTGAAITQEIKPYLFATLELAFFAMLIAVFVGVNAGIISAWFKNSVFDYIAMLVALIGVSMPIFWLGLMGQWFFSIELGWLPTTGRENVRNPVEAITYIHTLDTLLHGRFDQFAEAIRHLILPGTALATIPAAIIARITRASMIEVLQSDYIRTAKAKGVHMFFVIYKHGLKNAFIPVLTVIGLQTGLLLGGAILTETIFAWPGIGRYIYDAISYRDYPVIQSGILVIAFIFVMINFIVDLLYAVIDPRIKY

SEQ ID NO: 5885 - protein, 296 aa, Bacillus licheniformis
MVVLQNEQQREDVKVRSPLAEHIRRFFEHKLAAAGTILVALFILLAIFAPLIAPYGINDQSLSDRLAAPSAEHLFGTDDFGRDIFSRVLYGARLSLWVGFFSCLASALAGTLLGLIAGFYGRWADALISRLFDIMLAFPSILLAIAIVAILGPSLENALIAIAIINVPTFGRLVRSKVLSIRQEEYILSARAVGMSNIRLMFKHILPNSMAPVIVQATLNIGTAIIEAAALGFLGLGAQAPNPEWGKMLADARPYLAQAPWTLFFPGFAIMLTVLGFNLMGDGLRDTLDPKMKEGK

SEQ ID NO: 5886 - protein, 356 aa, Bacillus licheniformis
MKLGARIFKTGIAITLALYLASWLGLPTPVFAGIAAIFAIQPSIYRSFLTIVDQVQANIIGAATAIIFGLIFEPSPIIIGLTAVIVITINLKLKIENTISIALVTVIAILESSGDNFLWFALVRTGTVILGVLSAFLVNLIFLPPKYETKLVSHIVENTDEVIKWIRLLTRKTTEHSMLKEDIEKLKEKMMKVDHLYLLYKEERSYLKRSTYVKQRKLVLFRQAIIASNRALDALKKLHRLENEFYHMPEEFQETLVEELDYLLHWHERILMRFVGRIKTQDHVDLHEEGDVYKQHLTESFLKNQDKLKEELLDYNMLTIMASTVEYREQLEHLETLLSSFQTYHKKDSELEVEEE

SEQ ID NO: 5887 - protein, 432 aa, Bacillus licheniformis
MQHTQSEKLHEEALQHIVGGVNSPSRSYKAVGGGSPVAMERGSGAYFWDVDGNKYIDYLAAYGPIITGHAHPHITKAIQTAAENGVLYGTPTKHEVTFAKMLKEAIPALDKVRFVNSGTEAVMTTIRVARAYTGRTKIIKFAGCYHGHSDLVLVAAGSGPSTLGTPDSAGVPKSIANEVITVPFNDIDSYKEALDKWGNDIAAVLVEPIVGNFGIVEPKSGFLEQVNELTHKAGALVIYDEVITAFRFMYGGAQDLLGVKPDLTALGKIIGGGLPIGAYGGRKEIMEQVAPLGPAYQAGTMAGNPASILSGIACLEVLKEKGTYEKLDRLGAMLEEGILAHAETHGIDITVNRLKGALTVYFTNEKVENYEQAENTDGDMFAAFFKLMLERGINLAPSKYEAWFITTAHTEEDIKDTLKAVDDSFKQLKQRM

SEQ ID NO: 5888 - protein, 157 aa, Bacillus licheniformis
MTVEIGQKVPDIELLGDHGEKVKLSDFEGKYVVLYFYPKDMTPGCTTEACDFRDRHESFAELDAVIIGVSPDDQARHEKFKQKHDLPFLLLVDDEHKLAESFDVWKLKKNFGKEYMGVERSTFLIDKEGRLVKEWRKVKVKDHVAEALQAVKEIAEA

SEQ ID NO: 5889 - protein, 145 aa, Bacillus licheniformis
MAEHNLKEALEALKETGVRITPQRHAILEFLVNSMSHPTADDIYKALEGKFPNMSVATVYNNLRVFKESGLVKELTYGDSSSRFDFVTSEHYHAICERCGKIVDFHYPGLDEVEQLASHVTGFKVSHHRLEIYGLCQECDKKESH

SEQ ID NO: 5890 - protein, 37 aa, Bacillus licheniformis
MSGMRQKRKPLKRAGRFFNGQLIFVAAFTETFDYTIR

SEQ ID NO: 5891 - protein, 115 aa, Bacillus licheniformis
MAKYSSKINKIRTFALSLVFIGFIIMYVGVFFRSSVLLMSVFMILGVLSILLSTAVYFWIGMLSTKAVQVVCPNCEKPTKILGRVDMCMHCREPLTLDKNLEGKEFNESYNRKSQ

SEQ ID NO: 5892 - protein, 294 aa, Bacillus licheniformis
MENLLRPIYQERASRPDTLAVMLIERRNQTSSATDNFDAALLIIVNKAEDPVFVKHYEFDGKTASLHIISVEQLQEWILLGTNRRIIDWVLNGKVLFDRNEFIAKLIEQLNTFPFSERKLKIGLEYGKLIRRYIEGKSFFEDGQFLDAYNSIVHALHHLARIEVIDKGFHPEVTVWNQVRHMEPQVYKLYKELIESNESLQKRLELLFLASDFLIHSKAEIGAAYILNVMDEKSVWQFAELLKHPDLKYFTTDLGVILEFLAEKDLVGVKPIETKGQKIFHRGYFIKKSVDTNL

SEQ ID NO: 5893 - protein, 37 aa, Bacillus licheniformis
LNRKQQRRKIKKHLTLLVENVILIKSLRTEAEMIFEN

SEQ ID NO: 5894 - protein, 346 aa, Bacillus licheniformis
MKTVASVNVANLINQWYVHIKKRDVSNAVELRDRIKGLLNVMEEDQDVLLYFNLLDYRFRVLMEDVAGEPQLPPIAEDKAKTDGLLRYYYFLFKGMYESARSNYSKALNCFRVAERQLDNVEDEIEKAEFHYKLGNLYYFTKTTLLSFHHLSIAKSIYRAYEEYKTQSINCTVLLALNYIDDGRLTRAENMLKSCAERLIKMGDNHLLAAVYYALGFLKIQEDKHEEALEYFDLSFKTDDIEKNAPIMYMQCIYESARSTYKIGEVDKALKWVHLGFEFAQKTDNINFSLKFSILNICYSAPIEGVPQVKEFIEMLEEREAYVDIEALAEDVANVYSSLNNYKYST

SEQ ID NO: 5895 - protein, 69 aa, Bacillus licheniformis
LEQQAFLLTSAVFDQHQHPLKFIQKVINVELILVEINFLHRLPGLMKKSIIFKVREPPDESIYFHRVIP

SEQ ID NO: 5896 - protein, 58 aa, Bacillus licheniformis
LFSSVVFEQKLFSKERMFIVRACMYVVYTFAWMVIFVSLGETLKKSLIWIITKICLYG

SEQ ID NO: 5897 - protein, 58 aa, Bacillus licheniformis
MNKKIKYEQVMKNLKYLLDFILNKVCSGFFTRFKVKRTKTFTAINISAVQTNFRYNPN

SEQ ID NO: 5898 - protein, 41 aa, Bacillus licheniformis
MIFCRKSRRALTISSRCKLVIPKKDDDKPKSKEEERFVGRM

SEQ ID NO: 5899 - protein, 71 aa, Bacillus licheniformis
MQEVTSEILIERYGLSEKILSGEIKACQKHKWAVQRFFKDVEVLADPDCPYYFDAEAVLDFYEWARQVQTC

SEQ ID NO: 5900 - protein, 116 aa, Bacillus licheniformis
MLRGCIGYLLPDAHGSRQTNFTRQFLNRYCEISRPLWWIKQPATSAPKKKARKSRSKKVPIPPGIYKSLIMKGTAVRQIQEALAALYFYPDKGAKNNGIDVYYGTKTKAQLESLLV

SEQ ID NO: 5901 - protein, 112 aa, Bacillus licheniformis
MEPDSLFKTLLKYKDRELILEWENGLRVIGKTDTFFETDNGLEDDDINYKEYYATAFQVNKVLSPPVNNEEDSLYNWLLEEKNSLVEISLYEDTPNKILVDGNTIWELDSDE

SEQ ID NO: 5902 - protein, 43 aa, Bacillus licheniformis
MKTLDVQALHNAIDQTLEQLKQQSDESPKSKRLLRASHHLMML

SEQ ID NO: 5903 - protein, 98 aa, Bacillus licheniformis
LFNIYCDESCHLEKDNSDVMVLGEMKVGARFLPDIYNRIRQIKVNHGLSSWFEVKWTKVSMSKIDFYLDLIDYFFDTAALSFRSVVATGKKEVRPQYI

SEQ ID NO: 5904 - protein, 146 aa, Bacillus licheniformis
MWDLKEQILTAAKSVDIKVNELSTNDTEIIFHNLANKYANGKKHFPLWEFVEKDFSVQNQDAWQWIADYIADSEAILMFNPSDEKSSYKIDGGNNVVKILSEMFNVEFYVTNKNNDYLLSFNHHDILSACGNAKEWLKQYNPQQQD

SEQ ID NO: 5905 - protein, 43 aa, Bacillus licheniformis; identical to SEQ ID NO: 5902

SEQ ID NO: 5906 - protein, 372 aa, Bacillus licheniformis
LETIPSSEVGIKINRWYNEIQKLNVIEAERLKAEVHLAIERMEEDQDLLSYYQLMNFRHELMLEYLFPAEKKLSKSDYLREIEGQGRKLSGLLEYYFSFFTGMYHFSRGKYIKAIKAYRAAEKKLTKVSDKIEKAEFYYKMAEVFYHMKQTHMSMYYVSLAYDIYKSYDAYVIRRINCLFVVAGNYIDLSTHDQALPHLLSAKESAEDIQNKAIVAKALLNVAYCYNAMERPTKAIEYFHKAIDVAKEIKAKELTQAYYDLALIHFRNNENIEGRKFYEKALESARVFEDELFLCLLDVLEALFIKSANKSEVLETMKPLRDSRGYPYLEELALEAALFYTRNERPNDSIFFYDQMVQAQKQIKRGDFLYEI

SEQ ID NO: 5907 - protein, 39 aa, Bacillus licheniformis
MTRCFILTDLLSVILIEWTSMKGQLFERYASFHGALNEE

SEQ ID NO: 5908 - protein, 441 aa, Bacillus licheniformis
LSIRIKLPDGSVREFEEEASIEDVAASISCGLEHAVAGKLNGKLVDLSTPLQDGALVEIVTRDSAEGQKIVREKSRGKGRIVALDAARGLAVIGMYLQHFALNETNGSIVSGNTTLLFVLCGGISYSIMAGRMMDRGMEPAAFRTRMLARAVFIDMIGYLLIMLNTPFGVILPAYAALFVLALALIRRSTRVLVTTAAVLLAVSPPLMILGGSVLSGANLLGDIAGGPMSALALAPAFVAGMAIGRFDLTRMRTALSLVSSGAVMLIVSKLLGVFVLPWLSRSFEEWLVSVQGTAGAELDQYAIWPHNVAPPLWHNLLSIAPHSASTFQTMLGLGVAFLVLGLVCLVQQKNSAVLKPFAGVGRVALTMYAAQFVVIWTLEISGAKYDIGAIPFSDLFVAAMVTVTGWLIARLPTGPLETAMRRFDRAFSNLGPVTGPARLR

SEQ ID NO: 5909 - protein, 72 aa, Bacillus licheniformis
VHKVLSDVGFIAYDAAKGKIMAFTYKDHNKNLTVFANDLTNDDHPQHQYRLLANSIFNAAPGKTDNAPSSKR

SEQ ID NO: 5910 - protein, 254 aa, Bacillus licheniformis
LKKLVKVRGITLGEGRPKICVPLVGKNLAQLKEEAAYFQTLDADIAEWRADFYEDVDDVDQVCAALAEIRGLLKDTPLIFTFRSAAEGGEKEISTARYFSLNEAVVKTGLADVIDIELFNDEEQVKALVETAHGHEVSVIISNHDFEKTPAAEEIVSRLRKAQELGADLPKIAVMPETTADVLRLLEATCTMNEKYADRPIITMSMAGKGIISRLAGEVFGSAMTFGAAKKASAPGQIAAGELKEILHILHRNL

SEQ ID NO: 5911 - protein, 591 aa, Bacillus licheniformis
MKQESVQQKNISIMSSFSGSRKVYVEGSRPDIQVPMREISLSPTTGSFGDEENQPVRVYDTSGPYTDANADVDILKGLKPLRATWIRERGDTEEYEGREIRPEDNGYKGKEKASHSYTGLKRKPLRAKKGQNVTQLHYARKGIITPEMEFIAIREHVSPEFVRDEVASGRAIIPSNINHPESEPMIIGRNFHVKINANIGNSAVTSSIEEEVEKMTWAIRWGADTMMDLSTGKDIHTTREWIIRNCPVPVGTVPIYQALEKVNGVAEDLTWDIYRDTLIEQAEQGVDYFTIHAGVLLRYVPLTAKRVTGIVSRGGAIMAQWCLAHHEESFLYTHFEEICEIMKTYDIAFSLGDGLRPGSIADANDEAQFAELETLGELTEIAWKHDVQVMIEGPGHVPMHKIKENVDKQMEICKEAPFYTLGPLTTDIAPGYDHITSAIGAAMIGWYGTAMLCYVTPKEHLGLPNKDDVREGVITYKIAAHAADLAKGHPGAQIRDDALSKARFEFRWRDQFNLSLDPERALEYHDETLPAEGAKTAHFCSMCGPKFCSMRISQDIRDYAKENNLDEEKAIQKGLEEKAKEFKKAGGSIYS

SEQ ID NO: 5912 - protein, 46 aa, Bacillus licheniformis
MLFNISENSISADRSTEGSYLNWDKSFLFSVLEKKGEQDVFINSCE

SEQ ID NO: 5913 - protein, 255 aa, Bacillus licheniformis
MSLSIRVNEKAFGKGSFKTSVLQDVNLTIENGEFLTVIGPSGCGKSTLLKIAAGLDGDYEGRISMNGREIKGPGIQQGFIFQEHRLFPWMTVEQNIAADLSLKEPAVRKKVDELIETVRLKGAEKQYPRELSGGMSQRVAIARALLREPEILLLDEPFGALDAFTRKHLQDVLTDIWREKKMTMILVTHDIDESVYLANRIAILTAKPGRIHKLIPVDLPFPRSRTSPVFQTIRQKVLKEFETTETFSFQEGSGI

SEQ ID NO: 5914 - protein, 329 aa, Bacillus licheniformis
VKKWPLYVLGCLLLLAGCSAAKSSEGGGDLKEINIGVQQSLSPLLLAKEKGWFEKEFAKEGIKVKWTEFQSGPPQFEGLAADKLDFSQVGNSPVIAGQAAGIDFKEIGLSQDGLKANGILVKKGSGIDDIKDLKGKKVAVAKGSSGFDFLYKVIDKAGLKPTDVNIIQLQPDEAMPAFDSGAIDAWSIWEPFLSLKTIKSDADILVDGEQIDKYSPGFTLVRSKFAEQHPDEVIRFLKVYDKAVKWQKTHKKEAVEAYAKIKNLDKEVVENVLNNTEPLNEPITDRIIQTQQETADFQYKLKAINKEIDVKEVVDNSFIKKALKEGDDK

SEQ ID NO: 5915 - protein, 278 aa, Bacillus licheniformis
MRAVSSSTPSIQPKTGAKLRPAAFRLAWGKGFVLPVMLILLWQLVGSLELISKTVLPAPLDILLTFRDLIVSGELFTHLGISIQRAALGFFLGAGLGLLLGLVIGFSKIAEDYLDPSLQMLRTVPHLAVTPLFILWFGFDELSKVLLIALGAFFPVYINTFSGIRGVDSKLFDVARVLEFHWLKQVTKLILPASLPNILLGIRLSLGVSWLGLVVAELMGSSAGVGYMIMDARQFSQTDKVFVGILIFAAVGKLTDSFVRILEKKCLGWRNSYQGNKK

SEQ ID NO: 5916 - protein, 376 aa, Bacillus licheniformis
LDILWFIPTHGDGRYLGTNTGGRAADHTYFQQVAQAADRLGYTGVLLPTGRSCEDPWITAAALASVTKNLKFLVAVRPGLMQPSVAARMASTFDRLAEGRLLINVVAGGDPYELAGDGLFISHDERYEATNEFLDIWRSLLKGETVSYSGKHLKTENGRLLFPPAQQPHPPIYFGGSSKAGQETAAKHADVYLTWGEPPHLVKEKIQSVKKKAEKEGRTVRFGIRLHVIVRETEKEAWQAADRLISRLEDETIAAAQNAMKRMDSSGQKRMVQLHQGNRSNLEISPNLWAGIGLVRGGAGTALVGDPETVASRIKEYADIGIESFIFSGYPHLEEAYHFAEKVFPLLPFRTKLQSKASGEVIGNDHFPSRQKEKTV

SEQ ID NO: 5917 - protein, 152 aa, Bacillus licheniformis
MNMITRTFFHILLFGLACWTFITFFHTSEQIAKSLKTNDSELHFVFNLIPILLFGLVLSIYTYLEKKSGSRKQRFMLVPDEFKEQDEREQMITAKACRTSYIVLYVAMPVAALLLIFYPFFQVRIPSFPIIVIFMLIIIQHLSYMFSFYKNR

SEQ ID NO: 5918 - protein, 68 aa, Bacillus licheniformis
MNNRVRELRARYGYSQEALAKAIGVTRQTVAAIEKGNYIPSLLLALKICKEFQLKMEDVFWLEGDKNE

SEQ ID NO: 5919 - protein, 70 aa, Bacillus licheniformis
MTYAAPQVDYSVNPSIEDQAWFLVFVAVLLALGATVVLGAAVWCVANGNGSFTGSVKWVSGLQVSIECRK

SEQ ID NO: 5920 - protein, 248 aa, Bacillus licheniformis
MFIIDHLSKTYKNNVTAVSGFHIKIEKNQIVAIAGPNGSGKTTIINSILGIITPTEGTILLDDLPNTTAEFKQKFAYVPDELLLPDALSAAEYLDFVSSMYHCTSNEKRKQLIELFDMKEALQEPIETYSHGMKKKTQLIAAFMLESEFVIMDEPFRGLDIEAVINTKKLMKRYAATQGSILLATHDMLSAEELCDKIAILSKGVKMDEGKVKELKAKYNSDSLEEVFLKASMLSDRGAHFDQIIRNF

SEQ ID NO: 5921 - protein, 486 aa, Bacillus licheniformis
LIKSFEISKMMLKMWQKEMGKLFNTGTKKAIAVLFLLLAVMMGSITGYSFTGMFLSAFLNGEVRSLGLFVISMFMNASIFTFVFFILFKVRTPEQHSFSMQLSWFPLTAFQRSLGYFIPFAGAVSFLVLFMIFILLIPNFVASGVGFWFAFTFFALLFVQIIFFFSLLNLVYNLVYMLILKFGFPLQKFFSMFVLVVLAVFYGITSFDLGNIQNAYSSFDYHLTYFAAPLFLMLNGQASDAGVIPIVLILTAAVTASFMSLNVVPILTEKKSSKLFSFIKIPSSKPLSLAVKEIKSQARNEENILNFIFLLLALCFLKFKFQFGFTGESYLVLGGVTGIIAFNSFGNDLRMMQMYKALHLKTATVLWSKYLGLCMLGLIQLFLFSVLTWTFPESFPVFLKTVAVILNSIAMFYLAGIIFPLDRNNPYMGIFSFGMLLLFLIPLFFIVNYAVDNVTGEALLFFIPCLELLLILLLYGGFKWRYHYDH

SEQ ID NO: 5922 - protein, 302 aa, Bacillus licheniformis
MIINMLKSLAGIKKIPYFPEHVTLNRKHISDHDLDADFPINPTAYQMLKEVDGKKDELEIAEALKGVFNVREEVLQKDLHELLTGLNRRYLINWRYGEGPSFAGVLYQFFSQYHIRYKERFSSHSDSFLLLYIKFLQVISKKIIVFWLVFLMLSLAAYTVVPDGSIVGIAAYFSVVYFGLITGTALHEVVHGIAHRKAAGRNGPQGFLAADMMSVKFVRPVMSLHDKRSIWITALGPLVPGVLGIAGVLFTVFFLKENAVSVGVLLFFSTYALHMMYLLPFMGDGKSIMKQLMIRGIGGKSS

SEQ ID NO: 5923 - protein, 94 aa, Bacillus licheniformis
MNTNSLKQGLIFASFSSFLAFPMLAAALLFYHLFSNQTSNDILFNSLSFVMESESAFSFQVKPNFFFIMIGLFIGIFIITAAISSIYQKKKGES

SEQ ID NO: 5924 - protein, 89 aa, Bacillus licheniformis
VAKKSKIAKEKKRQKLVEQYAELRKELKEKGDYRALSKLPRDSAPARLHNRCEVTGRPRGYMRKFKMSRIAFRELAYKGQIPGVKKSSW

SEQ ID NO: 5925 - protein, 209 aa, Bacillus licheniformis
LELRLQIAPAILNRIPSFKVGAVLYQGIEINGSPQMLKGRLRLFQESLFFDYADRSIEDESAVKEWHDAFRELNPSFSGRESGLERMLEDIKEQRFVEPKNSAVDLSRFFSLKYLIPVHIYDARNLKGPIKIEPGGPDEIITFSDDAGAFGTITENLSLHHAGADTKDALQLVFFRPSLSKEEASRLLDSLTKMFEQIHGGRHISAVFP

SEQ ID NO: 5926 - protein, 382 aa, Bacillus licheniformis
MDVKKLKQDVIEFAQQIGIDKIRFASADTFETLKERLIENRALGYESGFEEPDLEKRTNPDLLLPKAKSIIAIALAYPSKMKDAPRSKKGERRGIFCRASWGKDYHHVLREKLDQLEEFLKAQRSDVRTKSMVDTGELSDRAVAERAGIGWSGKNCMIITPEFGSYVYLAEMITNIPFEPDERIEDQCGSCNKCIEACPTGALVKPGQLNSQRCIAFQTQTKGFLPDEFRTKIGNRIYGCDTCQMVCPKNKGVDFHLHPEMEPDPEIAKPLLKPLLTMSNREFKEKFGHVAGSWRGKKPIQRNAIIALAHFKETDALPELIELMHKDPRPVIRGTAAWAVGKIGGADVMSELERALAHEQDEDAKAEIQKGIGLLKETSATN

SEQ ID NO: 5927 - protein, 301 aa, Bacillus licheniformis
LKQIIEQLLKARLQYLINGNDETNWRDAGGFEVIERKRRLFQKRGVHIVKANIEAAVKEHWLDEDGASHVNYQTHTAYLCKDGDDMYMEEHMEDRNALLYDQMVIKDSEALRPAAQSHPEPENGDEDMRELLGRAFRYDRLAAVRYAETYWNKRNPAYKNFEDNCTNFISQCIRAGDAPMRGYPNRGKGWWMQNHSWSYSWTVAHSLRTFLKHSKAGLRAVQKPAAKELIEGDVICYDFNGDGRFDHVALVTAKDKSNMPLVNAQTHDCRMRYWSYEDSPAYTSSIRYAFFHISDDTTKSK

SEQ ID NO: 5928 - protein, 157 aa, Bacillus licheniformis
LALHVVLYQPEIPANTGNIARTCAATDTTLHLIRPLGFSTDDKMLKRAGLDYWEFVNVVYHDSLDELFDAHPEGRFFFITKFGQKPHTSFDYSDQNEDYFFVFGRETNGLPKELIEQNMDRCLRLPMTEHVRSLNLSNTAAILVYEALRQQNYRDLT

SEQ ID NO: 5929 - protein, 204 aa, Bacillus licheniformis
MVQDDLISKKELLDLTSISYGQLYRWKRKNLIPEEWFIRKSTFTGQETFFPREDILKRIETIQSMKENLSLDEMAEMFSPDLTELNASRGELLKKGIVSEAVMAFFEECTGKRDHPFNLTEALAAYVLEGLLQSGDISLDEGKMVLDVIMSNEAENKGRLLVLRKLGVATCLIAEGSIVLEKGVKVAADINLAASSEELKTKFM

SEQ ID NO: 5930 - protein, 236 aa, Bacillus licheniformis
MENLLINGFGSSGGGAYQTVELNGKGTINGDIDCERFSCSGTGTVNGDVKADELRISGHAKLNGAIEASKVRIDGSAKVDGDVEAEKLKILGYAGISGHVKGDEAIVRGKTSIGKDCQVEHFSAEGYFTIDGLLNAEQIEIKVHGGESKVKEIGCRRIVCTAHQSKLFSFLSELISPPRLSAELIEGDHIELANTTAKVVRGNSVIIGENCDIGLIEYKEDIRVAETAKVGEKRKL

SEQ ID NO: 5931 - protein, 233 aa, Bacillus licheniformis
MKKHDLKIHGSGSAGGGSFHRVLIRGEGMITGNIDCEKFSTHGTSELSGDAKIKSFSVHGETEIRGRLKADKARVYGTVDVSENAEISDAAVKGIINIGGNMTADTCDVKGALNVRGDCEAEDFKLTGSLDVKGLLNAGVIDIGLKYGNSSIGDIGGTDIKIVNKRGLLFNRNGGTLSAGTIEGDDIYLENTAARMVRGNRVHIGPGCKIEKVEYKSSYRVSPKSEVNEDQQQ

SEQ ID NO: 5932 - protein, 28 aa, Bacillus licheniformis
MRTLIMMGVILAFLVSIFTAGYESKPGK

SEQ ID NO: 5933 - protein, 37 aa, Bacillus licheniformis
LTRLEQTIHNKSRKVPSACAPAERLAASVQMTTRDQG

SEQ ID NO: 5934 - protein, 631 aa, Bacillus licheniformis
MDILKKIEQYREEEQRLKWEGTFAEYLEIVRENPTVAQSAHSRVYNMIKDSGIEEKDGKKVYSFFDKELFGLEEPLERLVEEYFHPAAKRLDVRKRILLLMGPVSGGKSTLVTMLKRGLEAYSLTDEGAVYAIKGCPMHEDPLHLIPQHLRDDFYNEYGIRIQGNLSPLNMMRLEQEYGGRIEDVKVERIFFSEDKRTGIGTFSPSDPKSQDIADLTGSIDFSTIAEYGSESDPRAYRFDGELNKANRGMMEFQEMLKCDEKFLWHLLSLTQEGNFKAGRFALISADELIVAHTNETEYRSFISNKKNEALHSRIIVMPIPYNLKVSEEERIYEKMIAESDVSDVHIAPHTLKVAAMFSILTRLKEPKRSDIDLVKKMRLYDGESVEGYNSVDVEDLKKEYTDEGMSGIDPRYVINRISSTIIRKNMESINALDVLRSLKEGLGQHPSISAEDRERYLNFISAARKEYDEMAKKEVQKAFVYSYEESAKTLMDNYLDNVEAYCNKIKLRDPLTGEEMNPDEKLMRSIEEQIGISENAKKAFREEILIRISAYARKGKRFDYNSHERLREAIQKKLFADLKDVVKITTSTKTPDEQQLKKINEVVARLIDEHGYNSTSANDLLKYVGSLLNR

SEQ ID NO: 5935 - protein, 388 aa, Bacillus licheniformis
MSHKDNGHFIISQEDWSLHRKGYDDQQRHQKKVQDAIKNNLPDLITEESIIMSNGKDIVKIPIRSLDEYKIRYNYDKNKHAGQGDGDSQVGDIVARDGSDKRGAGKGQGAGDQAGEDYYEAEVSLIDLEEALFSEMELPNLEQKERDDIVVEDIEFNDIRKTGLTGNIDKKRTMLSAFKRNAMTGKPSFYPIYPEDLKFKTWNDSVKPESKAVVLAMMDTSGSMGVWEKYMARSFFFWMTRFLRTKYETVDIEFIAHHTEAKVVSEEDFFSKGESGGTICSSVYRKSLELIEDKYHPTRYNIYPFHFSDGDNLTSDNARCVKLVGEIMEKANIFCYGEVNQYNRHSTLMSAYKNIKNEKFKYYVLKQKADVFQALKSFFSNEERHQYT

SEQ ID NO: 5936 - protein, 210 aa, Bacillus licheniformis
MSKGRLIATNIIGLIIVLAILAGGAYFYYDSISYVKTDEAHVAGEMADITAPASGKLADWDLKEGSKVSKDEKTAKIKGEQTVDVKSIMDGTIVKNEAKEGQIVQAGQTLAKTIDMDHLYITANIEENDLKDIEKGDKVDIVVDGDSGTTFEGNVEEIGYATNSTFDLLSQSNSSGNYTKVTQKVPVKISIKNPSDKVLPGMNASVKISK

SEQ ID NO: 5937 - protein, 529 aa, Bacillus licheniformis
VASQKKGNMSLLIILMAGLFLAILNQTLLNVAMPHLMTEFNVSATTIQWLTTGYMLVNGVLIPLSAFLIMRFGGRSLFLTAMLLFTAGTLICGISPNFSTMLTGRLIQAVGGGILQPLVMTTILFIFPPESRGKGMGIFGLAMMFAPAVGPTLSGWVIENYSWRIMFYSLVPVGVIVIIFGFFLFKNMTEPKKIKLDTAGAILSVVGFAALLYGVSEAGSDGWDDPIVLSTVVIGVIGIAAFIIQQLKSKEPMLDFRVFKYDMFSLSSVINAIITVALYAGMFLIPIYLQNLVGFTALQSGLLMLPGALVMLVMSPISGILFDKVGPRPLAIVGLLITVVTTYEFTTLTIDTPYMYIVLIYAIRAFGMSMLMMPIMTAGMNQLPQHLNSHGTAMSNTLRQISGSIGTSLITTIYTNRTTFHYASMADQTNTADPSFMSTLQSTIQSTAQSMHISLEQAQQYVVKYLTGQAQLNSNVMGINDAFMWAAGFCVIGLVLSLFLRDVRKDKLRRKNKAQELTLLPAPKEAKES

SEQ ID NO: 5938 - protein, 176 aa, Bacillus licheniformis
MKIYVVYDSEGEHTKKLAEAIAEGAGEHDAADVRIDHVSQADIRKLEEMDAIIWGCPGHFGTISSGLKTWIDRLGYLWAEGKLINKIGAVFCTTATTHGGLEATMLNLITPMLHQGMMVVGLPGNVPENALYGSYYGAGITCPVDSDELIGEEGLELGRALGRRVAQVTDRFTAGQ

SEQ ID NO: 5939 - protein, 110 aa, Bacillus licheniformis
MTIILTIIAAVLVIIGLVVFNVRSASSQDKPEHEDKAASAAGIPQVQEEEEPEQVKADQQDPFEMNDQTYRAILQKLQQPKEEKKYPEKTEMDDMDYRNALKSMKKREQD

SEQ ID NO: 5940 - protein, 70 aa, Bacillus licheniformis
MSAQKIFGYQKIIRDISLLIYDAYGLFEALFIKSGLFQKVQRFWSISLNADFKFHDEQLERRRRTSLFRA

SEQ ID NO: 5941 - protein, 307 aa, Bacillus licheniformis
LETLLELKNVSKTIRGKKIIEGLSFDVRAGEIFGFLGPNGAGKTTTIRMIVGHMSITAGEIAVCGVSVKENFEKAARHIGAIVENPELYKFLTGYQNLQQYARMTKGVTKKKIDEIVELVGLKNRINDKVKTYSLGMRQRLGLAQSLLHDPKLLILDEPTNGLDPAGIREIRDYLRKLTREKGMAVIVSSHLLSEMELMCDRIAIIQNGKLRDIQHVHGPARDEKKRYYIQADDTQALTREAAAFRKVKVDEAEGGIELSIQKDEVPDLIKHLTDSGVRLYEVKAVNKSLEDRFLEITADKEEAQHV

SEQ ID NO: 5942 - protein, 115 aa, Bacillus licheniformis
MFNLIVIEWIKIFNRKGTYVMIGILLLAVIGLGVLTKTIGETDQNTDWKKELAQENKDMKEQLKGNSNPTLEKIMNSRSQLMSIESSTIYRQMGIIQLCLSSAIRAGSSRSPVCL

SEQ ID NO: 5943 - protein, 66 aa, Bacillus licheniformis
MLEGKVKWFNSEKGFGFIEVEGQDDVFVHFSAIQGEGFKTLEEGQSVSFEIVEGNRGPQAANVTKA

SEQ ID NO: 5944 - protein, 333 aa, Bacillus licheniformis
MITFEGVEKVYESGGQKVHALNGIDLHVDKGEIYGVIGFSGAGKSTLIRCVNFLEKPTAGKVFVGGRDLMSLSKAEIRTVKRKIGMVFQHFNLLNSKTIFANVAEPLALVKTPKADIKKKVTELLRFVGLEDKARDYPDQLSGGQKQRVGIARALATNPEVLLCDEATSALDPQTTGDILKLLKRVNEQYNITILLITHEMNVAKEICDKVAVIEKGRIIESGSVFDVFSAPETETAKSFVKSAIDHEIPESIQKLNLKHLYQLQFVGESSGKPFLSQVSKRYDVEVNILHGTITELQGIPFGSMTVELQGEDGEIGRALEYIRRENIRIREV

SEQ ID NO: 5945 - protein, 216 aa, Bacillus licheniformis
MLVTYDQIIDALVQTIQMTVFSLLFSSVIGIPLGILLVVTRKGHLLENPAVFTFVNMIINIFRSVPFIILMVALIPVTRLIVGTSIGTSAAIVPLTFYAGPYIARLVENSLLEVDPGVIEAAEAMGATPRQIIFRFLIPEALGSLVLSFTVATVGLVGASAMAGAIGAGGLGDLAITYGYQRFDTLTMIITVAILVIVVQGLQTSGNVLSKKLRRR

SEQ ID NO: 5946 - protein, 272 aa, Bacillus licheniformis
MKKFACVVIFLLLAAVIAGCAADSDAKTIKIGISGTDTRIWDFVKKKAEKEGLKLEIVKYSDYVQPNQALASGDIDANAFQTISYFNAFKKERNLELSPVGTTIIAPMGIYSEKYDSPGDIPNGAEIAVPSEATNMGRALLLLESAGLLQLKDGFDGNGTLDAIKENPKKLKITTVAAEQTPRVLADVAASVINNGIAVDAGFHPVKDSIKLEDETATPYINIIAARTEDRDREDLKKIVELYQADDTAELIKKEFDGAQLPTFVPLKDIGE

SEQ ID NO: 5947 - protein, 461 aa, Bacillus licheniformis
MTLFVVINIIVMLGLMALLYMMQKKHVSFSKRVFTALGIGIVFGFALHFIYGSSSETITQTSDWFNIAGGGYVKLLQMIVMPLVFISILGAFTKLKLTHNIGKISGLIIGLLIATTAVAAAVGIASALAFDLQAVHVDQGQAETMRGAELEQKSQDMEAKTLPQQIVELLPGNPFLDFTGARPTSTIAVVIFAAFLGIAYLGVNRKQPEQAELFKKMVDAVYAIIMRVVTLILRLTPYGVLAIMTKTIATSDLDSIAKLGKFVIASYAALIVMFIIHLLLITFSGLNPVTYLKKAFPVFVFAFTSRSSAGALPLNIKTQRSLGVPEGIANFAGSFGLSIGQNGCAGIYPAMLAIMIAPTVGQNPLDPSFLFTVIAVVAISSFGVAGVGGGATFAALLVLSALNMPVALAGLLISVEPLIDMGRTALNVSGSMTSGLVTSKVTNELEKDTYQDRTNIIEAEV

SEQ ID NO: 5948 - protein, 113 aa, Bacillus licheniformis
LFRRRSGIHPAVLVLGSAALTAAFSPEIRKRLTGMFANGMRGRQQGSGRNQTMMNPADMIKQAFNPGGQSHEHRQSGHTANDQHQSSHMTAPVNVMNDQAAAQTMFDDDQSYS

SEQ ID NO: 5949 - protein, 598 aa, Bacillus licheniformis
MEKADSILHALRIKDFAVHPDETQLIFDTNLNGTSNLWAMDLPDTYPYQLSFLNQDSKGIAYNPDGSILYAGFDNDGNEQSGLYKLSLKNGTFQSLNGNQTDRHFAPIPVQNAVYYSSTKDNPTFLNTYRYDCLTEKEELIFEGKDGTSMLSDVSPGEKAVSIHVYYVNSHSVCMVHTAEGVTTGIFPDETLPHMVYSSHFASDDRLFVTTNYEAEFSYLALYTVSSGIFTPVLSIDKTDLTSIHADPNGTFLYLIGKKGVKEVMYEYNTATGQSRQIDCPCTSISKIHCAYSGTLYILGSTPTRPTNLYVLTKGQSKWRQLTKHSVPGFSEQELSYPEVVTYPSFDGLPIEGLLFKPSPVEANGWTIIWPHGGPQDAETFMFYDLFQLAAKMGYQLFAPNFRGSANYGYSFFKMVEQDWGDGPRLDMTAGIDWLIDQKLADREKLFLMGGSYGGYMSLLLHGRHPEYFRAVVDICGVSNLFSFVKTVPDFWQPMMEKWVGNPERDYEKMKADSPVTYLENMTQPILIIQGANDPRVVKEESDQVVDQLRNMERNIEYLVLENEGHGFSKKENKMKVYRAIFEFFEKHRLYHAAKVEE

SEQ ID NO: 5950 - protein, 186 aa, Bacillus licheniformis
MFNMKKGAIAALLLPLLFTAGCGMANQGADNNRRNQDNALQNVTNRDNDATNVNDGRNVNDRMNVTDNRDANREDNNMEVADKAADKVAELKEVSSANVITTNRNAYVAVVLKGNPKGNLTNELKGKISKKVKETDNNINNVFVSANPDFVDRMRNYGDRIQNGEPIEGLFEEFGETINRIFPNQR

SEQ ID NO: 5951 - protein, 293 aa, Bacillus licheniformis
MKAAFVLIMAGALSALLLAIFVVFSQESPEAAVLSGKKEKLKESLEMVKYESVSIYYAEKDRPILELTKETLRDAADMNRELFVSPLQDSVDLIFFSNRDDMESFSKLKDITGFYSNDMRMIGLLPEERKHLNNGEGFAVFLYKRVLVHEYTHYAFHVKLRELNADPGTYPLWFHEGVAEWASAHDAIEIRTLPSVVPLSKLKTDRQWQKARTGYETDIYLQSYYLIEELAEKKGRGVILDIIEETAERGSFADGFKAAVGQSLTGFEKEFKRKYEAKKTALKFHLQCRFHDQ

SEQ ID NO: 5952 - protein, 215 aa, Bacillus licheniformis
VEQQNQPQMQINQGNEGMQHMNHGGHEVFDMHEVLSGMIGVLEQYMMFREHVKDPELLDILDRQHRFISSQYNITTECFRTGQKPSQETATYMMKEDRKFVYGLKDAQPKQPKQSVQAIDDACISSFMLGLMKTCCSSLAMAAPEVTNPVCRRVLADQIPHYIEMAYEIFLYQNKHGYYQVPQLAPQDMQKMTSAFAQVQGQPQMPPSGQQRPIH

SEQ ID NO: 5953 - protein, 47 aa, Bacillus licheniformis
LAAEIVYGGRILYRSRRGNKKLQALEARCFHADIEPGIAIQLFFGRF

SEQ ID NO: 5954 - protein, 674 aa, Bacillus licheniformis
MLGSSETVGKKSGLFGNDSVYPKVQTEVYKKINELSGFHRLDDIYLSLIDKYMFPCLILNDRGEIVASSESADQYLKSSKGSIHQVFPASLSVQVNAALQRAKKEKKEVSFKNVPIYLSGELSFVHLRLKCFFRQYHKLYVLFIEKAQEGAANAPVSGGEDGQLHLQHLYRTVKELEASNDALVSANQKLQEENRKLTALNRAFEKKVNELNTLKNDMNNLLTSTNIAAVFLDQELKLKLFTPEAANMFDLKNEDLSRPADKLTERFKYEGYADDLRRTLYENKTVVKEFEMPDGGWYAVKMIPYYTSGNMVEGIVVTFTNVTELKMTNEALHISSQAIDQSPANILITSVDGSVTYANKRFCRMFGKHQDDIIGGNVFDIYRKHFHCEDLTRFWKRVLEKKPWSGELNYQDEEQQDRWEQISLVPVEDSAGNVQQVMLISEDITNQKRSEKMLMKSEMLSAVGQLAAGIAHEIRNPLTSLKGFLQLMIQSKKYQKDYAEVMMSEFIRLEAIINEFLVLAKTKSNTFDPVQVNSIVEDVCMVLESQAVLNNVRIEKQLSGDLPEILAVSNELKQVFINILKNAIEAMEDAEGFITIRSYFEKDSVFITFEDQGKGISKEVLEKLGEPFYTTKEKGTGLGLMVTFKIIENHGGSIHFESEEGKGTIVKLKLPIKE

SEQ ID NO: 5955 - protein, 39 aa, Bacillus licheniformis
VIVKPAIKRLFTTLTIYSPPVFCFLSNLSDDYKGYMIFL

SEQ ID NO: 5956 - protein, 1206 aa, Bacillus licheniformis
MVNVVKSRFMAGLTITFMMIASFLTPFADVTHASETISVEEAIKHNEGHAAVEGYVVGHTISSGHYRFSGNFANDYNVAIADKKEETSPENILPVQIPAPFRDQFGLKTNPHLIGKKLIIEGERTTYFNSPGLKSVQSITFSGDDAPSAQPETKTIAEARKLLNETVKIKGIVTADQAAVGGGKLSTFIQDDTAGINIYSAAQGDFPELKEGMSVSVTGKITTYKGLTEIVPAPSGIEVTREGAALPDPVPLTIKDVLDQGTAAEYEGRLVRMKGFIETKPDAPAGGGYNITMIDENYHPLTLRVMEQTNAAASIEQGQWYEITGILSRYDAVQLLPRKQEDLRKLDGAAHPPPAAEGEYESVVERVVDGDTIHLKEPVLGSTKVRYVNIDTAETYHKPKNELDENQLQHGNKAKEYLQSILAPGDKVTVKVGKEAKDSYGRLLAQVITEDGVNTNLQLVQKGMAVTYFIWPVGSDEDYQLFQNAVKKAKGDKIGIWNPADPLLEMPFEFRAREQGKGLTRHVGDSPENTYVAPEKWREIPVERRIFFASAEEAEAAGYSKKEQSGNIPLRLLSMNDLHGKIDQQYQLDLNGDGRTDGTFGRMDYAASLIKEKKAEQENTLIVHAGDMIGGSSPVSSLLQDEPTVEVMEEIGFDVGTVGNHEFDEGTEELLRMLNGGEHPEGKGTKGYDGQDFPLVCANCKLKASGDSFLPPYEIIEVEGVPVAFIGVVTQAAANMVMPEGIRSIEFTDEAKAVNQAAKELRAKGIRAIAVLAHMTASQDGGVVTGESAELAKKADPEIDVIFAGHNHEVVNGQVNDILIVQAYEYGKAIGVVDLEIDRETKDIVHKKAEIEYVNQENLKPDPAVGQILDKYERMVAPIISEKVGEAAHDMAGGYSNDGDTPLGNLIADGMRQAMNSDFALMNGGGIRQDLKKGTITWGDLFNIQPFGNVLVRLEIKGRDLYDIIDAQISPSYGPDYSISGFAYTWDPKTNKTAAIFLEDGTPIDLDQTYTLTVNNFMASASGSKYLPISRLGKNPVTGPEDIEATVKFVKSFKEPIAYTAEGRIKKLAEDDSRPGEQPGRGADPDDKEKPGSGGADPNDEEKPSGDKGDGGKPGNDTGESPVHDGTGNASRSGAIPVAGMTTGEGSDAPAEKMDGLSNDAFLPDEREERKLPDTAAAYGGFLLYGFLTFMFGAILYMRKRGIARL

SEQ ID NO: 5957 - protein, 196 aa, Bacillus licheniformis
MKVKMLSFLLMIAGLATFAYGGWKIFDMNRQTDLSLTEAKEAIASSQSARSANHPSAPASFKPAAGEAAGILHIPKLGAELPIVEGTSPDDLEKGVGHYKGSYYPKQNGQIVLSGHRDTVFRRTGELEIGDKLKIELPYGSFDYEITHTKIVDQSDTSIITLQREKEELLLTTCYPFSYIGNAPERYIIYAKPLKG

SEQ ID NO: 5958 - protein, 305 aa, Bacillus licheniformis
MNQKNHGLFFSADIRHHGELLYAYLKREAKASKPVIQYWIANEKVKVNHKSVNHNVRLESRDSVMIDLREEEESGIVPEYGELPVLFEDDHMLIVNKPAGMATHPNEAGQTGTLSNLVAFYFQMNGEERKVRHVHRLDKDTSGAVVFAKHRLAHALLDEQLQRKELARTYVAVAEGKFRKKTGTISAPIGRDKHHPVRRRVSHSGQPAVTHFESKGYDSRHDVTLCRLQLETGRTHQIRVHLASIGHPLSGDTLYGGSKGLFQRQALHAIEINVTHPITKERVTVAALLPDDLKDEIGRLFGTVD

SEQ ID NO: 5959 - protein, 119 aa, Bacillus licheniformis
LRIVKAATEEQEIYIEELVSELYQIFPLYLNKQKIKELKKQGALQLKEDEYKGTLDEAFQIMTSLQLIHALLTKAKRKWVLKDRDLFDKNSRKLNDCGLYFPLTSADFHIVNTENKMLM

SEQ ID NO: 5960 - protein, 141 aa, Bacillus licheniformis
LTTISNAMSRQVATISSNQTVQEAAELMSRHNVGAIPVVDQGVLKGMITDRDITLRTTAEGQDGQTPVSNVMTTNVVSGNPNMSLEEASQLMAQSQIRRLPIVENNHLVGILALGDLAVNELSNESAGQALTNISTPARTQ

SEQ ID NO: 5961 - protein, 220 aa, Bacillus licheniformis
MIKAVIFDFDGLILDTETHEYEVLQEIFEEHGSELPMSVWGNVIGTAAGFQPFSYLEEQLQKKLDHEQLTKLRQERFTKRMENEKARPGVEAYLSAAKELGLKIGLASSSDYKWVSQHLKQIGLYDDFECIRTADDVEEVKPNPELYLKAAECLGVKPEECIAFEDSVNGSIAAKRAGMKCVIVPNKVTKSLLFEHYDHRLESMAEMELEQLIEKISDPS

SEQ ID NO: 5962 - protein, 512 aa, Bacillus licheniformis
VSEKLDLSRFEKKIVIRNIEEKDIDSIIGLQELCFPGMIPWKREHLESHLEHFPEGQFCAELDGEVIGSCSSLLINFDEYDDRHTWQDITDDGYITNHNPDGLNMYGIEVMVHPEYRRMKIGHRLYEARKDLARRLNLKSIIIGGRIPNYHKYASEMTPREYVEQVIHHQIYDPVLSFQLLNGFTMMRINPNYLPDDRASSKYATLMEWNNVDYLPQTKRYYKSAFPVRICVIQYEMKQIHSFEEFANQVEYYADVASDAGADFAVYPEIFTTQLMSFLEERSPSLAVQRITEYTEDYISLFTDLAVKYNVNIIGGSHFVEEEGKIYNIAYLFRRDGTIEKQYKLHITPNERKWWGISRGDEVRVFDTDCGKIAIQICYDIEFPELGRIATEKGAKIIFTPFCTEDRQGYLRVRYCAQARAVENQVYTVISGTVGNLPQTENMDIQYAQSAIFAPSDFEFARDGIVGECNPNIEMVVIGDVDLEILRRQRQDGTVRQLKDRRHDIYRIHYKK

SEQ ID NO: 5963 - protein, 44 aa, Bacillus licheniformis
MNQTGKRMTDMQAHLYICRAIFSGECVLRDQSALFYTLNWKKYQ

SEQ ID NO: 5964 - protein, 542 aa, Bacillus licheniformis
MIICSLQHVGQTYGGHTIFNGLSWDLHQGERVGLIGRNGEGKTTLLKLISGQMKPDEGLVTWKKGLSTGLLEQNPAWDGSKTVKELLYDVFSSLWNTQQKLSRIERQLAVEKDAEKLRFLLEKYGALQDEFQRKGGYGISAQIERVAHGLNIERLFNAEWRELSGGERTKAGLARLLLSAPDLLLLDEPTNHLDLTSIEWLTSFLKQYKGTAVIVSHDRYFLDESVTSILEIDQGELHFSKGGYTHYADEREERLMREFHDYQDQQKKIKKMKETIKRLKEWANRANPPNDGLHRRAKSMEKALERMEKVKKPVLERKKIDLVFSMDERSGKDVVRLEDVCKSFGERQLFDNLSMHVRFQERAAIVGENGSGKTTLLNIISGKETPDSGDVQLGSNLSAAYLTQHVGEMEEERTVLAEFREHVSASEGEARMMLAKFLFFGQSVFRKVKDLSGGERMRLRLAQLVHQNHNVLILDEPTNHLDIESKEMLEEALSQFQGTIIAVSHDRYFLDRLFNVIWWLDGRKLVKYEGNYTFAREKRQQG

SEQ ID NO: 5965 - protein, 266 aa, Bacillus licheniformis
MAFRKPDEIANAAIEAGMKKVQLPLPSLLVLGFLGGAFIALGYLLDIRVIGDLPKEWGSLSSLIGAAVFPVGLILVVLAGAELITGNMMSVAMALFSRKISLKQLAVNWGIVTIMNLIGALFVAYFFGHLVGLTETGPYLEKTIAVAQGKLDMSFGKVLISGIGCNWLVCLAVWLSFGAQDGAGKILGIWFPIMAFVAIGFQHVVANMFVIPAAIFAGSFTWGQFIGNIIPAFIGNVIGGAVFVGLIYFIAYPKKDRSRKEMKQVS

SEQ ID NO: 5966 - protein, 125 aa, Bacillus licheniformis
MDISRRDIGIGECPYPLFGGLSKNPSTFRISRTVADLGSNSYGFLNRLLIIISLSPSQIRFNRSCRRQIKTADKRRHQCLYCLRDIPPISIFNHLFIKMAFLCFIERICPLFMIPASFLFWSGLS

SEQ ID NO: 5967 - protein, 303 aa, Bacillus licheniformis
MEFLFVLLPVFGIFAIGFIGQKLLHFDIQNLSKMSLYLMSPFLAFDTFYENKLTMDYIYMSVYCLGLCLTLILFVYLISYVHGYSNQERCALVLSSAFMNNGNYGTPVVLLVYGTAGLDIAVVLMVLQQLVMSTIGMYYAAKGSPEAGGFKIVMTRVIRMPVAYGALLGICFQLGHISIPEQLMTGIKLVGDAAIPTIMIILGMQLAVISFQHIEYRKISYSLLLKLFVSPLIALGFALILPVDGLVKQIMVLAAAMPTAANTTLMAVQFETKPEIVSSATFISTMLSIATLPVVLWLLSLWG

SEQ ID NO: 5968 - protein, 330 aa, Bacillus licheniformis
MKAIIHEGIKGLSGLKYTDVSDKTPGPGEVKIRLKAAGLNHRDLFLFQSRKAGDAPFIPGSDGAGMIEETGEGVRDLAVHTEVIINPSIGWEYTDSVPQVPDILGGPSDGTFAEHVIVPAKHVLKKPAHLSWEEAGVLPLSALTAYRALFTKGHLEKGEHILIPGAGGGVATNALLMAKAAGARVIVTSRSEEKRKEALRYGADFAIDSRGLWKESLDGERVDLILDSIGPATFANYFDVIKPNGRIVIFGASSGDSIQLPLRSLFFPQISIIGTSMGSLEEFRQMIDFIERHSLKPVIDQVFPLSEAVPAFKRMKDGEQFGNIALQIDG

SEQ ID NO: 5969 - protein, 185 aa, Bacillus licheniformis
MSFHDQNILPAVRNMKQFDTFLDSPFSYGVLLDIHLGQLGGVISAARSHGKKMFVHVDLIQGIKHDEYGAEFICQEMKPAGILSTRSSVIAKAKQKKVYAIQRMFLIDTSAMKKSIELVKKHRPDYIEVLPGVVPELIREVKEITGIPIFAGGFIRTEKDVEQALAAGASAVTTSDTDLWKKYWN

SEQ ID NO: 5970 - protein, 271 aa, Bacillus licheniformis
LTAFWGEVIGTMLLIVFGAGVCAGVNLKKSLSHQSGWIVIVFGWGLGVAMAVYAVGGISGAHLNPAVTLGLAFVGDFPWEEVPSYILGQMIGAFLGAVLVFLHYLPHWKETEDQGAKLGVFSTGPAIPNTFANLFSETLGTFILVLGLLTIGANKFTDGLNPLVVGFLIVAIGISLGGTTGYAINPARDLGPRIAHFVLPIAGKGSSNWKYAWIPVLGPALGGSFAGVFYNAVFKGHITNTFWIVSVILVVILLGFYIHMKKQAVDQSVNI

SEQ ID NO: 5971 - protein, 496 aa, Bacillus licheniformis
MEKYILSLDQGTTSTRAIVFNKAGEIVHIAQKEFQQYFPNPGWVEHNANEIWGSVLSVIASALSESGIEAGQIAGIGITNQRETTVVWDKHTGKPVYNAIVWQSRQSAEICQELKEKGYEETIREKTGLLIDPYFSGTKVKWILDHVEGAREKAENGDLLFGTIDSWLIWKMSGGKAHVTDYSNASRTLMFNIYDLKWDDELLDILGVPKSMVPEVKPSSHVYAETVDYHFFGKNIPIAGAAGDQQAALFGQACFEEGMVKNTYGTGCFMLMNTGEKAIKSEHGLLTTIAWGIDGKVEYALEGSVFVAGSAIQWLRDGLRMFKDAKESEKYAVRAESADGVYVVPAFVGLGTPYWDSDVRGAVFGLTRGTTKEHFIRATLEALAYQTKDVLDAMKEDSGIPVKTLRVDGGAVKNNFLMDFQGDILDVPVERPEINETTALGSAYLAGLAVGFWSDRSEIKDQWQLDKRFEPKMEEKERESLYNGWKKAVNAARAFK

SEQ ID NO: 5972 - protein, 555 aa, Bacillus licheniformis
MESLFSSRKRDDILQNMTKQKYDVFIIGGGITGAGTALDAASRGMKTALCEMQDFAAGTSSRSTKLVHGGLRYLKQFEVKMVAEVGKERAIVYENGPHVTTPEWMLLPMHKGGTFGKFSTSIGLRVYDFLAGVKKAERRSMLTAEETLQKEPLVKKNGLKGGGYYVEYRTDDARLTIEVMKEAVKFGAEAVNYAKVSDFIYENGKVTGVVIEDVFTKKTYRVYAKKIVNAAGPWVDRLREKDHSKEGKHLQHTKGVHLVFDQSVFPLKQAVYFDTPDGRMVFAIPRDGKAYVGTTDTVYNENLEHPRMTTADRDYVINAINYMFPELGIKAEDVESSWAGLRPLIHEEGKDPSEISRKDEIWTSESGLITIAGGKLTGYRKMAEHIVDLVRDRLKEEGDRDFGPCRTKTMPISGGHIGGSKNLEAFIQAKAAEGIEAGLSEETAKQIAARYGSNADRLFDRIPSLKDEAAKRRIPVHVLAEMDYGIEEEMAAVPADFFVRRTGALFFDINWVRTYKESLTDYMSEKLNWDGETKARHVKALEGLLHDAVVPLESK

SEQ ID NO: 5973 - protein, 40 aa, Bacillus licheniformis
LQLFFYHIDKPPLCPNLACQMKKMRLPVQDSLTPGHSIDY

SEQ ID NO: 5974 - protein, 582 aa, Bacillus licheniformis
MSWRTSYERWRNKENLDSELKALLLEAEGNEKELEDCFYKKLEFGTAGMRGEIGPGPNRMNVYTVRKASAGLAAYIGANGGEAKKRGVVIAYDSRHKSPEFAMEAAKTLAENGVQTYVFDELRPTPELSFAVRELNAFAGIVITASHNPPEYNGYKVYGEDGAQLPPADADKLTGYVNAIENELEIEAGDEAALTEKGLIKIIGEEIDQAYLDKLTSISVNPDLAKETEVKVIFTPLHGTANKSVRRGLKALGYEHVTVVPEQELPDPDFSTVSSPNPEEHAAFEYAIRLGEENGADILIGTDPDADRLGVAVKDQEGRYVVLTGNQTGALLLHYLLSQKQQKGMLPDNGVVLKTIVTSEMGRDIAASFGLDTIDTLTGFKFIGEKIKQFEASGEYAFQFGYEESYGYLIGDFARDKDAVQAALLAVEVCAFYKKQGKSLYDGLLELYKSFGFYREGLKSLTLKGKEGAEQIAAILSTFREQPPLSIAGKDVVSAEDYLTGKRTLLKENKRETIDLPKSNVLKYFLEDGSWFCLRPSGTEPKVKFYFAVKGRTNEESEALLNQLTDEVMKKIDDIVKATSNS

SEQ ID NO: 5975 - protein, 152 aa, Bacillus licheniformis
MKWIKIGDEYIEKKMTQFFSEAGTIVAAILCLDMIIRGFILGKPASEYIISAIGFAVYAGWILLRYLLSGFEYPEIAGQSAYRKKRKEIAALSLASGLIFAILTLLFTGIPEHPGSWVDFIGMVMLFAFLHFLINFISLRNSFRKNQDLLDD

SEQ ID NO: 5976 - protein, 65 aa, Bacillus licheniformis
MVNRVKLARIEKSLTQAQLAERVNVTRQTIGLIEKNKYNPTLQLCIAIAKALDKTLDDLFWEEKA

SEQ ID NO: 5977 - protein, 85 aa, Bacillus licheniformis
LREDTQFEKLKTLKEIAETLNEGNDLKETLHAVLKKLLRLTGLKTAWLFLIDEKGSFELAASARLPQALFLPAKPFTMRRKLLLS

SEQ ID NO: 5978 - protein, 217 aa, Bacillus licheniformis
MEKVKIIIADDHHIVRKGLLFFFKTKSDFDVIGEASTGIEALDVLRKREADIVLMDLSMPDMDGIEATKRIKKEYPSVKVIALTSYADESYVIPAIQAGACAYQLKDAEPDELVETIRAVYGGRYSLDPNIMSHVFHHVSQADEKEKIHQLTNREKDVLLEITKGKSNKEIAASLFISEKTVKTHVSNLLSKLGLSDRTQAALFAVKHGLQQNDGRG

SEQ ID NO: 5979 - protein, 172 aa, Bacillus licheniformis
MKITVISGTARKQGRTRIAASYIARAYQAEHIDLSEFILPIFNGDEEQSSLENVQKLKASVKEADAVVLLSPEYHSGMSGALKNALDFLSNEQFSGKPVALFACAGGGKGGMNALANMRIVARGVYANVITKQLVLDPIHIDEEHQTVTEAAKANIKNVMEELLLFAEFQKA

SEQ ID NO: 5980 - protein, 82 aa, Bacillus licheniformis
LNYADYDKALYYTHRSQWDNLLILMVRTEDDLLSKRIEHFLHAYNFERDDAIVEKRLYDLLQYIDHASFSGHEHENGVLVFT

SEQ ID NO: 5981 - protein, 106 aa, Bacillus licheniformis
MKKRYCTYFFCILTLLSFPAKGHFQTDVFDAPERWERIAWSALEEKYKGAKLEDYEYLGRTQVNDEETKDVFRVTVNQEGKSFSAHAEVYFHPVTNAIINVNIFPL

SEQ ID NO: 5982 - protein, 143 aa, Bacillus licheniformis
MKLTNYTDYSLRVLIFLATKNSNELVNIKDIADSYSISKNHLMKVIYELGKLGYVETIRGRNGGIRLGKAPELINIGEVIRHTEDDFNLVECFNGEKNHCILSPICGLKHVLNKALSAYLDVLDQYTLQDIIMNQDHIRKLLS

SEQ ID NO: 5983 - protein, 42 aa, Bacillus licheniformis
MTSIKQVSIILSHLPSIMRVERKLLQKYKTFIDNIALIPLKV

SEQ ID NO: 5984 - protein, 404 aa, Bacillus licheniformis
MLSEKTMQIVKSTAPVLKEKGTEITTCFYKRMFDAHPELKNIFNMSRQQTGGQPKALAFTVLQAAENIDRLEDLLPVVKQIGHKHKSLHVKPEHYPIVGQHLLEAIEIVLGEAATEDILQAWAEAYEEIARVFIEVEKQMYEEDKKQDGNWEGFKPFVIMDKRVESDTITSFYLKPADGTALPAFSPGQYVSVCTKIPGEPYFLTRQYSLSDAWNKDYYRISVKLEAEEGQPVGKVSSYLHENMEIGGSLEVSAPAGDFTLSEGTDRPVYFISAGSGITPVMSMVQTLAQKESRREITFVHAAKTERHHAFKEETEKLLGANPANRLLFVYSRGAEATEEHTVKGRVNEELLKSVVIDPNGEFYVCGPLSFMKSVIEGLQNLGVSMENIRYESFASSLDMQIAN

SEQ ID NO: 5985 - protein, 469 aa, Bacillus licheniformis
LSIREQKELQRAIEEITEIAEGFGLDFYPMRYEICPAEIIYTFGAYGMPTRYSHWSFGKQFHKMKLHYDFGLSKIYELVINSDPCYAFLLDSNSLIQNKLIVAHVLAHCDFFKNNCRFQNTKRDMVESMSATAERIKHYETVHGSKEVEAFLDAVLAIEEHIDPSLVRPKLSWSVDDEEEEETGAPATPYDDLWELDHKGSKEKKKRTKKKFPPKPEKDILLFIEEHSRELEPWQRDILTMMREEMLYFWPQLETKIMNEGWASYWHQRIIRELDLTSSEAIEFAKLNAGVVQPSKTGINPYYLGLKIFEDIEERYNNPTEDMKKMGVEPNSGREKIFEVREIESDISFIRNYLTKDLVMREDLYLFQKQGRDYKIVDKDWEAVRDQLVSMRVNGGFPYLTVEDGDYLKNNELYIKHWYEGIELDLKYLEKVLPYLHQLWGRSVHVETVLEDKPVMFSYDGKAVHRRYL

SEQ ID NO: 5986 - protein, 52 aa, Bacillus licheniformis
MSRPCSKINPSCFPMMERLSTADIYKGCILAAFFLLKRNDFNSSVLSKEMPN

SEQ ID NO: 5987 - protein, 40 aa, Bacillus licheniformis
MEFPPYNRSRGRAEAAVLKKMKLLIFAFENIKYSAIGRTT

SEQ ID NO: 5988 - protein, 277 aa, Bacillus licheniformis
MKKQVITAASAVVLGSTLFAGAASAQTITVKKGDTLWGFSKKYGTTVSKIKQENKLKSDIIYIGQRLSINGSSSSSAKASKVSSATHKVVKGDSLWKISRTYGMTVNELKTLNGLKTDLIRIGQVLKVKGTKSVKAASTTKPSASSGTSKTSAPAQKSSTLNTSKLVSDAKALIGTPYKWGGTSTSGFDCSGFVWYILNKQTNVARTNTVGYWNSMKSVSSPAVGDFVFFTTYQPGPSHMGVYIGNNQFVHAGSDGVTISDMTNSYWKPRYLGAKRF

SEQ ID NO: 5989 - protein, 292 aa, Bacillus licheniformis
MDFKWLHTFVTAAKYENFRKTAETLFISQPTVTVQIKLLEEELGCQLFTRKGRSIHLTKEGRAYLPFALRLLEDYESSMAELHRIRQGYSQTLNLAVSPLIADTILPFVLKKYTALHPNSEIKVKIAESAEIAPLISAGHADIGLSCLNVQSSNLNCYSMYSDPVILVAPHDGRAAEQAPPLDVEDLLEEYLLLTHNHPEYWDDLVRQLRIKFPFVRTMLVSQTHITKRFISEGLGISFLPLSTVRRELMEGRLIEVPCDFMKLPVAGGYAISLKDNEKVEHFLAFLAEFRF

SEQ ID NO: 5990 - protein, 363 aa, Bacillus licheniformis
MVYHGLKGITCVETAISRIDGEKGKLIYRGYNADELALSSTFEEVAYLILNGAFPTEAELSRFNELLASFRVLPEACERLIRSLPAELDDMAVLRTAVSSFGDISFAFKPTMEQALRLIAAVPSIIAFRKRLADGEEPVQPLDELGFVENYFYMLKGKRPTEAQKKALETYMILAMEHGMNASTFSARVTVSTESDLVSAVTSALGTMKGPLHGGAPSAVTDMLEGIGEKQHAESYIREKLEKGERLMGFGHRVYKTHDPRAKALRVKAEEIAGGDRDIDLALHVENTAIRLLEEYKPGRKLYTNVEFYAAAVMKAIDFDAALFTPTFSAARMVGWCAHVLEQADNNMIFRPSAKYVGELVSQ

SEQ ID NO: 5991 - protein, 354 aa, Bacillus licheniformis
MKKGFLMLIMLFFLGACTEGRDFDAEYEATSAKEGGSGAEVIADRLDVPWTIAHTGETFYITERNGGIVSIADGKKERMQLQLKKPVHQEGEGGLLGFVLHPDFRNSQEAYVYHTYKDGSHLKNRIVKLTLDRLTWTETDELLADLPGGAIHNGGRMAIGPDQKLYITTGDAGEREWAQQPEKMAGVILRMELDGTIPADQPFSSSYVYSFGHRNPQGLAWIGRQLYSSEHGQSGHDEVNKIEPGANYGWPVIEESDEKQGMKAPLIHSGEKTRAPSGLAQKGDVLYMAGLRGEGVFQVDPAEAKVVKWLGGYGRIRDVKVIGDDLYFITNNGDGRGEKKQTDDRLIRVPLPDK

SEQ ID NO: 5992 - protein, 289 aa, Bacillus licheniformis
MNPANRQTDGQKAQKQEKQPGAEHKMVPLPLSEDRDYKGSGKLKGKTAIITGGDSGIGRAAAIAYAKEGADIAVMYLDEHKDAEETKERIEQEGAECLLIPGDVGDEAHCKSSVEKTVNHFGGLDILVNNAAEQHPQKGIEDISTEQLERTFRTNIFSMFHMTKAALPHLGEGSAIINTASITAYEGSPVLIDYSSTKGAIVAFTRSMAASLVKKGIRVNAVAPGPIWTPLIPATFPPEKTEKHGTDTPMGRPGQPSEHAAVYVLLASDDSSYMTGQTIHINGGRYVTT

SEQ ID NO: 5993 - protein, 37 aa, Bacillus licheniformis
LKVVFQILIFPKKQTEKNRLPYNKQPVGIMSSHIFRR

SEQ ID NO: 5994 - protein, 452 aa, Bacillus licheniformis
MSDRRMTAKWASKLGFVLAAAGSAIGLGAIWKFPYVAGTSGGGAFFLVFVLFTILLGYPLLLGEFVLGRKSQSDAIGTYQKIAPGTPWVITGWIGIAACFLVLSFYSVIGGWILLYIIKAVTGSLSGLTQAGYGELFGSIIQDPLQTLAAQLAFIIMTILVVAKGVQKGIERVSSIMMPLLFILFIALVLRALTLEHAIDGVRFLLVPDFGSLTPQAILFALGQAFFTLTLGVSVMVTYSSYLSKSQNLPKSALSIVIMNLAVTLLAGLAIFPAVFSFGLQPDQGPTLLFAVLPAVFDRLPFGMLFFIGFLTAFLFAALTSAFSMIEIIVAAITKGDQTKRGKWTWTIGLLIFAVGIPSCLSYGMLDEPFIFKKTFFDAADYVVSNILMPLGALFISIFIPLKLSKHDLYEEMKSGSKAGKGFFIVWFYLLRFLVPLAIVLVFLNLIGVFSF

SEQ ID NO: 5995 - protein, 542 aa, Bacillus licheniformis
MVLDFQQMFPSEDGNHEARYQLLALLEAVLAGMDRLKDPGRLTLGRESEVSSDYYQSVIEEAVLPEKGFGAEKSVEELLKLLDGHRFLNRHYVANATPLPNNASIAGNLLMVLLNGNNLWDVDGTAAARTEVQITAMLSDIVGYDRHKSGGFTTWGGQGAVFQSLRLAIANAYPEANQQGTPHHLYAFCSELSHFSLYKSMEASGIGTDHLIKVKTNHDHSMDLADLREKMQAVIEKGGHPIYVLATLGTTDAFGIDDLAGIKNVTEEIEAAYGLPPVYIHADTAMGGMYSFFNGYDFSGNPLHIEDEVLETLARYKQHFQHLHLADSLVFDFHKLGQTPYITSLFLVKNRKALQAVDLDPDETPYVGNRGFGSYHTSYTLECSRMGSSIPIYASLLAFGIEGYQEILANYIRVNLAFRKKLLQAFPNAAVTNDVSPVTTFRFYPGNVRYHEEISGAITEEEVRNINKYNEKIAETLGRYRSHTYFGSTKKQTYVYPADSRLPVPLYVQKFYSVSPYTTVDTTDQYITFLKAHVETSDVAAG

SEQ ID NO: 5996 - protein, 295 aa, Bacillus licheniformis
MDLLKNMNQAMAYIEEHLTDSIDFQTVAKLSYCSEYHFKRMFSFLAGVSLSEYIRRRRLTLAAFELKNTKRKVIDIAVKYGYHSPDAFTRAFQKLHGITPTEARHDISTLKAYPPMTFQLTIRGGNEMNYRIVEKKAFRIVGIKKRVPVVFHGINPDIASMWKTLTSENIDELKELSNVEPLGLIQASANFSEGRMEEQGELDHYIGTATTKECPDQYEQLEVPASTWAVFEAAGPFPDTLQNVWGRIYAEWFPSSHYEQTKGPEILWNQDQDISSPTFKSEIWIPVQKRTACKN

SEQ ID NO: 5997 - protein, 470 aa, Bacillus licheniformis
MDITPFLNRSGSEPLYQQLYTFFKRGIHSGHIKPGTKLPSKRMLAKHLNVSLTTVEHAYEQLAAEGYLLSKPRKGWFAAEAEGDFAQTAPPPPAEKELEEHETAADMIDFHHGHVDLASFPVSQWKKTLAKTVGESGYDLFQSGPPAGDIPLRKMIAVYLRESRGVVCSPEQIIIGAGTPVLLQLLCHLFPKGTTVGFENPGFHRSKTVLKTGGFNVVPIPVDESGISVQDLEQYQPQLAYTTPSHQFPLGMIMPVGRRLQLLDWAAATGAYIIEDDYDGEFRYAGQPIPSLQGLDRNDRVIYLGTFSKSLIPSLRISYMVLPFPLVKEGLNMASLFKQTVSRHVQHAIALFMKNGDYQRHLNRMRTLYRKKRKTLLDAIKREFGDHAAVRGENAGLHIILEVKSAPSEEWLTQKALEKGVKVYPASVSYMPPPDTHAVLLGFGGLSEKSIADGIKKLKTAWFNGGQSQD

SEQ ID NO: 5998 - protein, 144 aa, Bacillus licheniformis
MLLDCRELHSETELKEVYPIMRQLRPHLDETSFVELVKEAREAESYTLFALYDGDIPVALAGFLPRVSLNQGRHVWVADLVTCEKHRSKGFGKKLLGAVEEWAKRNGLASIALSSGVQRADAHRFYEDKMEYKKASYLFRKALK

SEQ ID NO: 5999 - protein, 96 aa, Bacillus licheniformis
MELVRIFKEHNVFGWVSVGTAILSLFVLNLAILSDTIAYSYKMLPFAMAAVPLGIIELFIKKGRTGLGFLGVVLNIFILVCVWTIVSIDTNLQLGF

SEQ ID NO: 6000 - protein, 356 aa, Bacillus licheniformis
MNEDFKKRWEKYKNGELSESEMLRVEEELEQLEEYQDMLEQEMKDEDWDLAISPEKQKAILRYGKNKSYMRISTLAVISTLIILPLCTLGSYLYYGLGGHESKGNELVQTASMTVAVTKPNIQVDTEALVNKVKLFGIQTQFPLKKQIGNVTKVVGNENVEMFFDQLKSPQIHQYNQELSNEERHFVYPDGIKEKSVSKAESILKQLPDGTVTEAFLSFERAYPTKELYDQLKGYDIRVLWNAIETEGDLKDHPYAEPIGFPGKDSNRIFEIQHPAENGEEQFKAALSYMIKHNKWAETISGRKDLKLSKRLAYVEKNGVNVYGAVITGPSKEVERLIKKGPVKAAKVGEVELWNW

SEQ ID NO: 6001 - protein, 163 aa, Bacillus licheniformis
VTIDEIYQMYMNDVYRFLLSMTKDKHLAEDLLQETFMRAYIHIHSYDHSKVKPWLFQVARNAFIDYVRKHKKEVTISDDMIGSLFQNAVQSPAHQVEIKEVLTLYMNQLPDNYREALTLYYLKELNYKEASSLMNISEANFKSVLFRARQRLKALYNRGVNDE

SEQ ID NO: 6002 - protein, 180 aa, Bacillus licheniformis
MHPYQFPYHLPSPYSAGRFHGSGYAGAFRTPGTEERIVLRDYGQKPFASNINEAAKQNKTFRTALWTGRHLQVTLMSLNPGEDIGLEMHPHVDQFLRVELGRGIVQMGPSKHHLPFRRNVYDDTAIVVPAGTWHNLTNTGNTPLKLYSIYAPPNHPFGTVHRTKADALAAEGHRAHDRYF

SEQ ID NO: 6003 - protein, 62 aa, Bacillus licheniformis
MGHRRLQGRKPIQTIHAALDQEINLVNTAPAYGFGTDRAKIHGSADKRKSQETGEENSPVFL

SEQ ID NO: 6004 - protein, 199 aa, Bacillus licheniformis
MYQFTGYAAKAILSLRGGIKVYNKENLPKDTGFVIACTHAGWVDVVALGVGILPMEIHYMAKKELFENKLSGSFLSSINAFPVDRENPGPSSIKTPIKLLKEGKIVGIFPSGTRSSEDVPLKRGAVTIAQMGKAPLVPAAYSGPSNGKELFKRGKMKLIIGEPLNQEDFAQYSSKEKLVKMTEALNDSIKALEKKLEQL

SEQ ID NO: 6005 - protein, 47 aa, Bacillus licheniformis
MTVLKLWRKSWSSYNSNIRREKQLLMHREAVFFIFLKFTLHSIFMIK

SEQ ID NO: 6006 - protein, 121 aa, Bacillus licheniformis
MKWYLKAIKNYAGFTGRARRKEFWLFCLFSYMVLVIYGFFKAILHLPEYEIETFLGMVYLLANLVPGLAVTIRRLHDTGKSGFWIFIGLIPLIGKIILLIMLCQDSEKGENQYGPNPKTAL

SEQ ID NO: 6007 - protein, 425 aa, Bacillus licheniformis
LITLQPVLHIPAVSKWDEKINLKISGLQPFDTIDIIVTVKDEADAEWRSHAVFQANRLGEVAPASAAPLKGTYQSKDQMGLFWSMQAVESSCSFYKKSVHPSAYRIEVKQKERIILSKEIKRVLLSETVDRLEVNEDGLCGTFFRPLAVNRPPAIIILGGSDGGLDETMAGMLANYGYATLAIPYFQYKQLPKKLVEIPLEYFQKAIDWLGRQEGLHHRQIGICGRSKGGELALLIGSHFPEIRFVVSHVGGGVVFQGVGLKKFRQTSSWSLNGAPLAFAPLPMFSLPQLWNMMKHKLTRQPHAFLDLYQKALRKVKDDHPAIIKAELIKGPILLTSSTDDLVWPSASMNEKIEERLKKNRFSYSVKHLYFEKAGHNIRPPYFPTSGRKSRKIAYGGKTEYDAIAAQTFWQELLLFLEKATAPGN

SEQ ID NO: 6008 - protein, 198 aa, Bacillus licheniformis
MSTQSTRDRLIQAALALFKEKGYTAASTREIAQKAGVNHLTLFRHFGNKQNLFRESVIQHVASGDFIGELKAILTGDLREDLSLIAKAYLKENLEKGTVFLLYFNDAVSDKEVCELIMDIPRRLNRFLEAYFAKLYAEKKISDGNFQMLSQMFFGLLNQYIMFQHLPGFKESFNDRIDDYVEECVDLFYTKLEKEVPS

SEQ ID NO: 6009 - protein, 439 aa, Bacillus licheniformis
LEIVNLIFVAVLIALTAFFVASEFAIIRIRSSRVDQLIAEGNKTAISVKKVITHLDEYLSACQLGITLTALGLGWLGEPTVARLLEPLFVKWSIPSSVSHIVSVVIAFSLITFLHVVVGELAPKTLAIQKAEAVSFLFAKPLIWFYRIMFPFIWALNGSARLLTKAFGLEAVSENEMAHSEEELRIILSESYKSGEINQSEFKYVNKIFEFDDRLAKEIMIPRTEVVSFPNDMKIAEMIDITKAEGYTRYPVEDGDKDNIVGVINVKEILTACISGECSKEDTIEQFINPIIHVIETVPIHDLLLKMQKERVHMAILSDEYGGTAGLVTVEDIIEEIVGEIRDEFDIDEINEIRKIGENHYILDGKVLVNQVNDLLGIQLDNEEIDTIGGWFLTQKYDVQKGDMITEQGFEFTISEIDGHHVSYVEVKKAAETLLEEAE

SEQ ID NO: 6010 - protein, 141 aa, Bacillus licheniformis
LRRDADGAEKYRIGELAAAAGVTKRTVDYYTNLGLLTPDRSCSNYRYYDEAALKRLKFIMDCKQQRLALSDIKERLENQFPSSTVNDDEIGSLTTEIDHVNDNISVIINRLKRLNPDERKILKSRLSPEKMTVIQSFLLLL

SEQ ID NO: 6011 - protein, 457 aa, Bacillus licheniformis
MDDIVSLIIIGILIALTAFFVASEFAIVRVRSSRIDQLIAEGNKKAVRAKQVVSDLDEYLSACQLGITITALGLGWMGEPTVKKVLHPVFESLHVSGAVSHALSVAIAFLVITFLNVVVGELAPKTIAIQKAEQMTLWLAGPLHFFNVVMFPFIWTLNASARVLTGLFGLKPASEKDESHSEEELRILLSESYKSGEINPSEYRYVNKIFEFDNRIAKEIMVPRTEIASVPVDMPIDEAISVMLQEKYTRWPVYKGDKDHVIGMINTKQLFTDMLMMSEAEKKRLSLEAYVRPVIEVIETVPVQKLLIKMQRERIHMAILTDEYGGTSGLVTAEDILEEIVGEIRDEFDEDEKPLIEKVSDHEYIMDGKVRIDQVNELFEDDLEEEEVETVGGLVLKENIDIAEGQAVHIGSYTITVLEMEGRLIKHVEVKREQTTEHVELAPANPVVVNEITLSEK

SEQ ID NO: 6012 - protein, 133 aa, Bacillus licheniformis
LLWYEIISEEERKTYIKRIEFHLRNWKNYKAAVLNLERRMEKEQKNGLAVKERNAEYRIDAEKRLYQFLLDSMETAVSELDELERKLVECRYIHNWSMGKCAMEIGYSEKTLFLMKKSLLDKLLVSLAAITNI

SEQ ID NO: 6013 - protein, 95 aa, Bacillus licheniformis
MDFSEIALVPLITGLVHTVKLVGIQKRFLPICAIVFGISISLLFTAGDWKEDMMIGTWLGLSSVGFYSGSKNVLKPLSKEEIEHEDLFGSGTRRK

SEQ ID NO: 6014 - protein, 225 aa, Bacillus licheniformis
MKIYLDPGHGGSDPGASGNGLLEKDVTLAIALKINDILLKEYAGAETRLSRTTDKTVTLQERTDDANSWGADLFVSIHTNAFDGTAYGYEDYIYSGLSDESVTALYQRIIHGEVIKQNGLRDRGMKKANFHVLRETAMHAVLTENGFIDHPEDSAKMKSAAWIEQTARGHANGIALCLGLTQREFPLYKVTMDGGQIGAYQEKDDVLKVISANWDSFQKAAIEKG

SEQ ID NO: 6015 - protein, 118 aa, Bacillus licheniformis
MMAAAFMIAGGIGSVLRFWLGNVLMAMIPRPRIPVSVMVINILGSFALGIFISLGIDNQTVSIVVGTGFFGGFTTFSTFSVEAVQLLAAKRVKASAVYILLTMAGSIGGFWAGSMLIP

SEQ ID NO: 6016 - protein, 132 aa, Bacillus licheniformis
MKSYVAVFIGGAIGSLLRYAVNLLGGTAVFPWPTFIENASGSLLLGLLTGFFAARAKKPLVQLCLGTGFCGGYTTMSAFSKETVLLLQSAAHIGVLYLMASLACGVCFAFLGIVIGKKVSGAAGKEKERYQS

SEQ ID NO: 6017 - protein, 234 aa, Bacillus licheniformis
LHIIAHRGASAYAPENTFAAFEKAVELGADFIELDIQITKDGKLAVIHDDKVDRTTNGTGFVREYTMNELEQLDAGSWFGPEYQGEKIPSLEAVLRKYHNKTGLLIEIKSSKTQPGIEKAAGQLISRYGRSMNTIVQSFDAGAMRAFHHMYPSIQTAVLIRPRFGLLPRGRLRQIASFAQYVSLKATMISPFLIKSIHSCDLKALAWTVNGQKTGSRLKSWKIDGIITDYPDYF

SEQ ID NO: 6018 - protein, 35 aa, Bacillus licheniformis
MGKGRIKVEERIKIETDAEMFKATLLDQTQSQKKK

SEQ ID NO: 6019 - protein, 358 aa, Bacillus licheniformis
MFEKYMTMDFAADIGISIGILLLFFAFRKIFTKYLFNLILKLTNKTKTDFFNQVVLAFEKPARWFFAILGIYLAIIYSPFFEGHMGIVHKLYRVSVILVIVSGLYNLTAASSVLFDKINKRLELDMDDILAPFLSKILRFIIVALGISVIAGEFNYDVNGFVAGLGLGGFAFALAAKDTVGNFFGGVVIIMEKPFTIGDWIETKIVTGTVEDISFRSTKVRTAGEALVTVPNSVLANEAIMNWTKMRKRQVTFTLEIDPSTPREKVERCGERFKEMLESHEGVNPDVIMVNFDVLKDTHLSIFFNYYTNTTVWAENLDVRQDVNYRILDIMKEEQVDFVSPGHSLFELKKMKDQQGNA

SEQ ID NO: 6020 - protein, 249 aa, Bacillus licheniformis
MEEEALRFADMIENAERITVLTGAGMSTESGIPDFRSAGGIWTEDLSRMEAMSRDYYERYPKLFWPKFKELFQMKMTGTYRPNDGHLYLAELEKSGKDVRVFTQNIDGLHLKAGSRHVYELHGSIQTAACPKCGARYGLDHILQEEVPRCNRVNGKGRACGFILKTDVVLFGDAVQHFDTLFEVLNESDLLLVIGTSLEVAPVRFVPEEAHLIPGLKKAMINLDETPYDHLFDIVINQKIAEFVGKLNH

SEQ ID NO: 6021 - protein, 86 aa, Bacillus licheniformis
MKIEELHSTAEYANQLAELLIRVVDDGASVGFLPPLEKRLAEAYWKTAVAPDSVLWIAKQNGRIAGSVQLHLCTKQNGRHRAEICK

SEQ ID NO: 6022 - protein, 303 aa, Bacillus licheniformis
MRQVSKKTAPSVAYLLTKAACFFVLCLILLYVWDLSQSSAATEKRELTVSENSQMRHEGDSVPLKKATQGELLDHLSTKQQIEKRKQEKEKQKAAAEKKKEKSKEKTVYLTFDDGPSAVSQRLLQILSEHDAKATFFMLEPNMKLHKEAVLNMKQQGHALGLHGVTHDQKQFYKGANSPNLEMKQAQKTLKSITGVETHLIRTPYGSKPSLTEAQKKVLKKNGFIYWDWNIDSLDWKYRSQKFVPEVMNQLNILEKRQTKQPIVILMHDIPSTVQSLPLLLTNLKNMGYSFATLDESMTPVHE

SEQ ID NO: 6023 - protein, 39 aa, Bacillus licheniformis
LVLKAEKSFWKYCTILIGRVVLEWNGENSEVNKNKGMEK

SEQ ID NO: 6024 - protein, 283 aa, Bacillus licheniformis
MKVLFNGRLIERSECAVDIEDRGYQFGDGVYEVIRIYNGILFTLDEHIARLYKSAAEIGIDLSFSEAELKSQLKELVDINQMREGGLYLQVTRGKAPRKHQYGAGLTPQVTAYTFPIQKPEKEQQNGVSAITADDMRWLRCDIKSLNLLYNVMIKQKAHEASSFEAILIRDGLVTEGTSSNVYVVKQNAIYTHPATTLILNGITRMKVLQLCEENGLNYVEKAVTKDELLNADEVFITSTTAEVIPVTSIDGQTIGSGAPGPLTKNVQTALQNSILSETAKTV

SEQ ID NO: 6025 - protein, 452 aa, Bacillus licheniformis
LSNEKRLSFSISALLFMAILFIIFTCLFIFKAEPHIPLLICVGFLAAVGAVKGHSWKDLESGIVSGIRNGVQPIIILCLIGILIGVWEYSGAIPTVTVYALNLIEPQHLLLTALFSCLVISSLVGSSFTTVSTIGVALIGVAAAAGVPLTWAAGAVICGACFGDKMSPMSDTTNFAAGVGELPIFKHIRHMAGTTIPALLITILLFFFMGRSLTAAPASTENIQAIINGIEGMVNISVFTLLSPLLVIVLAVRRTPVIPSLAAGIVSAGIFAALIQPDAGISSFLSAMQNGPVFSADTEAVEKILNRGGLQSMMGSVSLIIIAFALGGLMEKIGMITSLLEGVIKGIHTKGRLVFSTVSSSIGMNLATGEQYLSILIPGQSFKKLYDKLGIDRKHLSRSLEDGGTLINPMIPWGVSGAFMSTALGVPVIEYLPFVFFLYLSPLFSILFGFRK

SEQ ID NO: 6026 - protein, 29 aa, Bacillus licheniformis
MYLIHVSISLSQNRGKCDVLHCSEKPVFT

SEQ ID NO: 6027 - protein, 326 aa, Bacillus licheniformis
MSCTVQKSRFLHEEAIRFENDDLEAVLVPGWGSNLISLRWKAGGLNLLKTPETKEEYDANPFLFGIPVLFPPNRIDHGRFTYAGRTYELPINEKPLENHLHGFLYDKKWTVKKMEATEERIIVQTMLDSDDHPGIKSIFPHSFSITITYTLEGQHLKIDASAVNRGQDPMPIGLGYHTSFRYPLNESGDKEKCLFTLPASKHWTLTDRMLPTGEYRVTEEFKAGKMAAGERLDDILAVEQDQEGNSTAVIADSLAGIRVRYQCDGHFKHWVVFNGTSDQDDLLCIEPYTWMTNAPNVNLPKSVTGFRDLGPQEELTMRSKIEVGGI

SEQ ID NO: 6028 - protein, 125 aa, Bacillus licheniformis
MKNIFVSLLVLCLVSISAFIGIEDAFAAEELQEEAYSEPIKSADDLQYDVNKNLTQEEITSRFNKINTKYDVGQAFSEQDAEFIKFYADSQLETPSELNDGISISAIQWYPGQTASKSFNTYKKF

SEQ ID NO: 6029 - protein, 137 aa, Bacillus licheniformis
MGYQLVQFNGIQVKQPANLSILTKSSNGVKVKFSGKVYGTIGIVNHSYRGKLSAKITSGTSKVKKALKVRVTHSAYGLVGKKSIGIVYNSGKSSTGTKSKVSMDNTVKYSALAVVYTYTNAYVSVTTKTGSFNKYAF

SEQ ID NO: 6030 - protein, 158 aa, Bacillus licheniformis
MKQEYKRPVLFISSLFMAFCAVYFGGRLIGFYMAENPKWNGQSADGNWEAVIKKIEGRTLFGGDLYWTGDRGELDDIYLEKLVVKFGDEIVLNSQVETPMKDYAGGEFPGGGSKEQSVSFLEELEKAEFAGRKVTVQLDWREGKQASHTAFTLDKSSW

SEQ ID NO: 6031 - protein, 644 aa, Bacillus licheniformis
MNRSILVVGEGLMAEGASQQLSAEYNVIRRSDFENSIPEETAFALVLHDAWRPLLYREAEKVLRAAGIPWLRGFASFGEGVIGPLVNPSASGCSQCADRRRYISGPDSRETLELEQKSNGISRDTWVSMTGCRQMVSLVCTEVDNIMNGGRGRLKKNLYIVNLKTLESSLHAFIPEPTCPICGSLPEDGAESARISLRPSLKTNPDSFRVRNTDDLKQTLAKDYLDHRTGIFNAKIYDAILPFADMIVNMPLWTGNEGVGGRSHSYEDSELTAILEGLERYSGIEPRGKRTVVHDTYENVKDRALDPAKVGLHQAEQYMHPDFPFQPFHPARPLRWVWGYSFLQNRPILVPESLAYYSLGREDSFVYETSNGCALGGSLEEAIFHGILEAAERDSFLLAWYARLPLRQLDLDSSGDPELRLMTERVRSVAGYDLHIFNSTMEYDIPSIWAIAKNRKREGLNLICSAGAHPDPVKAVKSALHELAGMMLKHDRKFESERSKYHQMLSNPALVQEMEDHSFMYGLPEAEERLRFLLNQSGPLQTFDDAFKKRKKHLDLTEDLCDLLEAFRSLNLEVIVVDQTSPVIERNGLYCVKVLIPGLIPMTFGQRFIRLEGLERIFTVPKELGFAEEPLTPEQLNLHPHPFP

SEQ ID NO: 6032 - protein, 617 aa, Bacillus licheniformis
MTHLTASARLKVNQDTWFLPDPNGGAYFRNNSGSFRIKGSSIAQWIEKLLPMFNGEHSLEDLTKGLQAPYRKRVYEIGEMLYKNGFVRDVSRDLPHKLESSVLQTFEAQIEFIESFADSGAYRFQLSRQTKISAIGTGSFLTKLVRSLIDSGFSRIRAIVTDASGHALDELAEISGQTESGLEIGCAETQHWREAVRSADWVLYVSDLGFTDELRALQTFCLEENKGFIPGICLKQVGLAGPVFHQQGDGCLEDAWRRLHRSALHEERTLGTFPSAGKDMLANVIVFELMKAAAELAPLSKKNQVYLIDLATLEGGWHMFLPHPDFACGKDSPEIICDLEAKLSERPGREAESRLFQCFSELTSPVTGIFHLWEEKQLRQLPLAQCFVQTADPLSSGPAELLPETVSVGLTHQEARREAGLTGIEMYASRLTRSYPNNGEFAIAAGETLAEGVLRGLEKCLEHRFRERIKSGKETISLVQLGGMEDRHSSFYLKALTVLYGKPEIGLGKNIEGFPVAWAGIRGRWYGSSGLNITFALRKALERALTDKDPVKGADVLLEPSDLKLAIPISAALQQTLLSALKNNRGLPLYVYELPAEPFFKEKLAGIYCVQLRKEEP

SEQ ID NO: 6033 - protein, 38 aa, Bacillus licheniformis
MQLQQQWPAQLQQLWPAQLQQLAQLPQLQQLAQCLTLA

SEQ ID NO: 6034 - protein, 166 aa, Bacillus licheniformis
LFKADRIIVAFDGKEESKKALRKAIDLSKRLGSQLTVAHVHEPRQVRTEAAAERPAAGAPYLYSGFPAAPRIPRDSDLAGEPMIYEDSAEEAIAAAKIILSENQYDAEIEVLEGDTANAVLQHAENIGADLVITGTRDQNRLKKLLFGSVSDKISTKSEIPVLIVK

SEQ ID NO: 6035 - protein, 48 aa, Bacillus licheniformis
LISFFLILGIKNSSLCAVDLLEKHAAPHRKQDVFSPKKKAHCVPACLF

SEQ ID NO: 6036 - protein, 584 aa, Bacillus licheniformis
MFSVLWKLGWFFKASWRRYTIAVVLLIIVNVLEMFPPKLLGNAIDDMQAGTFSKAGMLGYIGLFLALGAVVYTLSYYWMYQLFGGANLVEKILRSKLMGHLLKMTPSFYEKNRTGDLMARATNDLKAISMTAGFGILTLVDSTMYMLTILLTMGFLISWKLTLASIIPLPLMAAAISIYGKKIHERFTEAQDAFGALNDQVLESVSGVRVIRAYVQEKNDVSRFNSMTADVYKKNMKVALIDSLFEPTVKLLVGISYLIGLGYGAYLVFRSQLTLGELVSFNVYLGMLIWPMFAIGELINVMQRGNASLDRVNETLAYEPDVREPAEPEAAEPGDIVFDGVTFTYPSSASENLADISFTVLEGQTVGIVGKTGSGKTTLVKQLLRQYPQGKGTITISGVPIERLPLDQLRSWIGYVPQDHVLFSKSVKDNILFGGHLAEERDLHAVISAAHLKKDIEMLSDGLETMVGEKGVALSGGQKQRISIARAMIAEPHILILDDSLSAVDAKTEAAIIENIRSRRKGKTTFITSHRMSAVEHADFILVMEDGRIVERGTHQELIGRKGWYFEQYEAQQLPSGEEGGTVA

SEQ ID NO: 6037 - protein, 672 aa, Bacillus licheniformis
MTTGKRLFQYALLYKKILIWALVMLTTAVTAELTGPMIAKKMIDDHILGIEKTWYETTENSKYTVSYKGKEYIREDRTDPSAEKLQEVHIFQVGMNYYFVGKPVSFDGERTVSGGELRMTSGDRTETYKADRLSLSEVYAFYEPEIGGLISLVSIYFGLLIFSIFFHYGQFYLLQMSANRIIQKMRQDVFANIQRLPIRYFDNLPAGKIVARVTNDTEAIRDLYVTVLSTFVTNIIYMAGIFAALFFLDVRLAGVCLLIVPLIVIWAAVYRKFASGYNHKLRSINSEINAKMNESIQGMTIIQAFRRGQDTKEEFEQLNDSHFHYQNKMLKLNSLMSHNLVNILRNVMFTALIWYFGGAALNAEGMISIGVLYAFVDYLNRLFQPITGIVNQFAKLELARVSSERVFRLLDEPGVDVKEPSSERARGRVVFEDVSFRYHDGEDVLKNISFEAKQGETVALVGHTGSGKSSIMNVLFRFYDIEKGDVKIDGRSIYDMSRQEIRKHMGIVLQDPYLFSGTIASNVSLDNADITREQIEDALKQVGALEVLARLPKGLDEPVIEKGSTLSSGERQLISFARALAYDPAILILDEATAHIDTETEAVIQKALDVVKQGRTTFIIAHRLSTIKNADQILVLEKGRIIERGNHEELMKQKGQYYQMYELQKGKGTLIG

SEQ ID NO: 6038 - protein, 206 aa, Bacillus licheniformis
LKIALFGGTGRVGQAFLNFVEEDGHHSVNALVRRTEGASIPDLCQAHIGNARNRHDVESLIKDCDIVVSCLNTDGDDTLTVSIEHIINAMNVHRIKRLITIGTAGILNARQNPALYRFETNESKRRSTRAAQEHARVYERLRESDLDWTIVCPTYLPDGPALKTYRFEQDVLPPGGREISTGDTAHFLFTQLESDQFVKARVGLAY

SEQ ID NO: 6039 - protein, 40 aa, Bacillus licheniformis
LMLNISCMPTPPLYQHMKKGEAGAGFHKICQRGGPRDGNE

SEQ ID NO: 6040 - protein, 67 aa, Bacillus licheniformis
MANQNSSNQLLVPGAAQAIEQMKFEIASEFGVNLGADTTSRANGSVGGEITKRLVSQAQASMGGQQF

SEQ ID NO: 6041 - protein, 74 aa, Bacillus licheniformis
MMCPVCNGILVQTRHCPKCGGEMADAGRATDFFGPYSPYMEFDSFKQTQTACVHLYTCQDCTYEETVEIETTEA

SEQ ID NO: 6042 - protein, 368 aa, Bacillus licheniformis
MAELVLDRIYKVYDNKVTAVDNFNLHIEDKEFIVFVGPSGCGKSTTLRMIAGLEEITDGEFTIDGKRMNDVAPKDRDIAMVFQNYALYPHMNVYDNMAFGLKLRKFPKDEIKRRVHEAAKILGLEQYLDRKPKALSGGQRQRVALGRAIVRDAKVFLMDEPLSNLDAKLRVQMRAEITKLHQRLQTTTIYVTHDQTEAMTMATRLVVMKDGIIQQVGAPKEVYENPENVFVGGFIGSPAMNFFTGTLKEDMFTFDGVSVRVPEGKMKVLRGQGYVGKEIIMGIRPEDIHDEPVFIEASKDSKVDAKIEVAELMGAETMLYSQAGTQPFIARVDSRTDVQAGDTIPLALDMNKAHFFDKETELRIRSEG

SEQ ID NO: 6043 - protein, 293 aa, Bacillus licheniformis
MLEKLKTLYGERMVGSDAVSKHDALWFQTDEGETFGVLKSAVTDREKELLYCLFRPFSEPHRPQQLTKREKEWHEYFFCDAPLQNPGNIQLIQGHFFKMEHAPEERQAIKEAVSGFFKDPLVVWYDRHEAVIVHENPSPFLAKKELSELADALTSDFMATPVFFSGQLHPVNGSLQGKIRFEKQMFHYMLEAGDIGNVATFCQCLPSFLTAKPERVHASSFSDAVREALSDPETSLTIKTYMRCNLNASLTAKRLFIHRNSLQYRIDKFIERTAIDIRQFEEAAAVYLMMHLL

SEQ ID NO: 6044 - protein, 69 aa, Bacillus licheniformis
MISHFQWKPLFKKERLPGWKISFYHKGIHYEGIYHKSGEIEWGSTYPPHDDEPSLKSEIHELMLFHIYE

SEQ ID NO: 6045 - protein, 44 aa, Bacillus licheniformis
LLSLYLIHRKDHRFFSNGDFTKKYREEADSSRLEVMPHVLRIKD

SEQ ID NO: 6046 - protein, 452 aa, Bacillus licheniformis
MTGQPLTVGIHQTSENTMLLPASFKQDGLLFAAFGTSVERCHVSFDSHLKRTVLLSENLYKNLRIPYRGKASLLFRDNTVYIGPLIGIFTAGFTKSQLDPVRGRSLFFSKLLTMDLPAGGYSYLFGAHQINWEEGTVQALIFRENGWEEAIVPLPNVVYDRLPNRKAEESSALRETKKRLMDEYRIPWFNPGFFNKWEIYECLEQDERTAELLPFSALEPDADKIEDMIDQYGFIYVKPAGGSFGKGIFQLSKREENGILARHAEGVTSFSSAAECLKEWQMLHKHTSYLAQQGIERIEVDHHPADFRVHTNKNGKGQWTVTAIAAKIAGKDGITTHMSSGGAVKTLAEIYDDPQERLHTLQKLTKAAVLLSRVLDEKLDGFIGEIGFDLGLDRSGKVWLFEANSRPGRGIFSHPRLASVSRLTKKRSFEYASYLTEQSILNPEDMWHDLKP

SEQ ID NO: 6047 - protein, 361 aa, Bacillus licheniformis
MMTLGFMSLSHEHEKAYAEELAKVASDYGIRFIRFTPLDISPGSLLVKGLSFHPKSGQWNEIEREIPELIYDRCFYGRDQQSKKAKPIVEWLKKYPKTTFLGLGLPDKWTVYKTLKADPVIKSYLPATTIAENAQDILRKLAKEKSCILKPASGSGGRGIIHFELTGKTVKAAYQTGKHKQLKSFSKQASFETWCQKVLQHRYLLQSFLDIQDKDGFPCDIRLLLQKNSYGEWETAGKTVRRSYQHGLLANLAGGSEAVSFDSWLLSVPKKRQAVLLDDLETMAQAVPLALESNHGPLFELGLDICLTKDGKVWLLDVNSKPGKHAFIKHSPEKRELLYKGPLEYCSFLTASAGAKGAEKR

SEQ ID NO: 6048 - protein, 376 aa, Bacillus licheniformis
MYVFGIFAVMIAVGALIGAVTNHVAIKMLFRPYEAIYIFGKRVPFTPGLIPKRRDELARQMGQMVTGHLLTTEGIKKRLASDAVKSQAVQVGERLLAHLSQSTATVEEALESIGISNPAQKADRAVSRWADEKLSAFLEAYENEPLKELIPLEAQEKLKEKIPMVSGYILNRAVSYFESDEGKKRLGHMIDDFLKERGMLGSMVQMFLGNSSLVDRVQPEIVKFLKNGETARFLTDLLENEWDKMKEYTFKEADDKWNLKPLIFDLKEKFLKRFSLQPFFEKTIGSTISSFERDIALRLPQMADRLLEEAGRRLDQALKQLELEQIVKEQVDNFPVERLEEMVLSISKREFKMITYLGGLLGGIIGAVQAIFVILI

SEQ ID NO: 6049 - protein, 117 aa, Bacillus licheniformis
MTVNLHDSAYDLEQALRQSDEYSRLKNLYDEVNGDPSAKKMFDNFRDIQLNLQQKQMNGEDITQEEVEQAQKSVALVQQHEKISQLMEAEQRMSMLIADLNKIIMKPLEELYGNPES

SEQ ID NO: 6050 - protein, 66 aa, Bacillus licheniformis
LTTPLFDQQTVLSICQIPLYPLSFCRQSVFHDRIPAKMKALTFSIIATISQIDKSFLNLYEHYLFT

SEQ ID NO: 6051 - protein, 74 aa, Bacillus licheniformis
LPGYDHEKRTGGKMIRGTEEFDRLKAPSAGQIKGLSIYGELNERGVEFTVLNMRENHDRIHKMRSQKSVKTGFF

SEQ ID NO: 6052 - protein, 42 aa, Bacillus licheniformis
MYILKKACFHRLLTSHLVDTIMILPHIQNSEFNAPFVQFTVY

SEQ ID NO: 6053 - protein, 287 aa, Bacillus licheniformis
VSKQMLALNIDGTLLRTNGRLHPATKEAIEYAKKKGVYVTLVTNRHFRSAQKIAKSLKLDAKLITHSGAIIADKIAEPLLEKRISEEQTFNLVQILESYDCNIRILHEKYSIGNRKKTNSNLLGKTMIHPSDPIFYPVQFVDSLSDMLMDEPVSAPVIEVYCSTGQSEEIRQTITNAFPLVDIIEAGEKMLIVHKGISKEAGLTMLAADLGLKMEDVVAIGHDIDDLPMIELAGLGVAMGNAPQEVKQKADWVTRSNDEQGVAYMIKEYFRMQQSKGFLKKFHIKKV

SEQ ID NO: 6054 - protein, 501 aa, Bacillus licheniformis
LRIYIEGLQDERFQRPLEHIANLFFEESEVALGEEAPADLAIVLGYEREENGVKASGAIKDTDITAEYAKNIDPKLTEKEAFKQVKNTVSYVFLSMLQEHTGIIQKWGILTGVRPTKLLHKKLESGMPKEEAHAELKRDYLIHDEKIELMQNIIDRQLKAVPDLYELGQEVSIYIGIPFCPTKCAYCTFPAYAIRGQAGRVGSFLWGLHYEMQKIGEWLKENDVSITTVYFGGGTPTSITAEEMDLLYEEMHRSFPDVKNIREVTVEAGRPDTITEEKLAVLKKWNIDRISINPQSYENETLKAIGRHHTVEETIEKYHLSRNAGMSNINMDLIIGLPGEGVKEFRHSLSETEKLMPESLTVHTLSFKRASEMTKNRHKYKVADREEIVAMMDDAVSWTKQHGYHPYYLYRQKNILGNLENIGYSLPGQESIYNIMIMEEKQTIIGIGCGAASKFVDPGTGKITHFSNPKDPKTYNDRFEHYTEEKLRYLSGLFDKNAKGS

SEQ ID NO: 6055 - protein, 403 aa, Bacillus licheniformis
LDHLVFEVGTALLLVAIAALIANRIKFSIIPFLIVLGMIVGPHAPTIGIINLKFIESSEIIAFFGRMGVLFLLFYLGLEFSIGKLIKSGRSIAVGGSIYILINFSLGLMFGFIAGFEFLEVLIIAGVITISSSAIVAKVLVDLKRTANPETELILGIIMFEDIFLAVYLSVVSGLVLGDSTSVGSALLSILIAFGYMILFFIVARKLPKLLNRLFDIRSNEVFIIVIFALLFFVAGFSETIHVAEAIGALLLGLVFSETEHASQIEHLVVPFRDFFGAMFFFSFGLSIDPFTLGDAVWLSIGAVILTLAGNFIAGMIAGRRAGLSHKASSNIGLTIVSRGEFSIIVANLGIAGGLSATLKPFAALYVLILAILGPLLTKESKRIFHILNKIFKWKKSETKQRG

SEQ ID NO: 6056 - protein, 165 aa, Bacillus licheniformis
LNIKESDLPGIGKKFEIEMRNHEKMTIVVHDDGRREIYRFDDEDPDEIVTNISLDDSEARQIAAILGGMVYKPQALESIEMAFNDLIIEWFKIEKGANAVGKTLGEIDVRQNYGVTVIAIIKKNQEKFLNPGADSVLDENDTLVLSGERKNLKEMKQAFLSRKEG

SEQ ID NO: 6057 - protein, 258 aa, Bacillus licheniformis
MEYIKWKDEDGIFEIVLNRSEAYNALNEKMLEELNEALRVAEESESLLLLVRGSGKGFSAGGDIKMMLSSGDQDSSARVIDTISEIAVKLYSMPKMTTAAVHGAAAGLGLSLALSCDHVLVEKEAKLAMNFIGIGLVPDGGGHFFLERRIGETAAKELIWSGKKLTGAEALELRIADAVFSGDSGRFARIFLEKLLHAPLAAMIETKKIYQALNGGRLQKTLELEKTAQMKMRLTSDHQEGIRAFLEKRQPQFNRQQV

SEQ ID NO: 6058 - protein, 45 aa, Bacillus licheniformis
MKAKLLFAMVPLAVVLPSSSFLADKGKAPSLYADKMITTDKEARV

SEQ ID NO: 6059 - protein, 92 aa, Bacillus licheniformis
MISSENERADAAKEWAMYIAVSCLFILIVSVICFFAPAYRLQDLLFRMFDAVIICVLTVNGLYYLKKNKGVACASFLLGFINMGLLVVLMVR

SEQ ID NO: 6060 - protein, 61 aa, Bacillus licheniformis
MENYYVTVFDTSGKTLLNERFEAADDEEAKEKGRGMLKEKQFLEHTHRVVHSSGKIIVFRS

SEQ ID NO: 6061 - protein, 298 aa, Bacillus licheniformis
MLKIDHVTKRFGSFTAVNDLTLEIPDKQMFGLLGANGAGKTTTFRMILGLLNATEGTVTWKGQPINYGVTNSIGYLPEERGLYPKLKVKDQLVYLGRLKGMTKQNALKEMEKWLERFHITEYADKKVEELSKGNQQKIQFITAVLHKPELLILDEPFSGLDPVNVELLKDAVISLKDDGTSIVFSSHRMEHVEELCEHVCILQRGTPVVQGKLKEIKRSFGRKNVTIHADGDLSFLKEADGIVKWRDHSEGVRLQVENEEVSQELFTMLQGRGFIRKFELEEPSLHDIFVEKVGARYE

SEQ ID NO: 6062 - protein, 422 aa, Bacillus licheniformis
MNKFWIVLFHTYISKLKTKSFIISTAITLALVVLVTNLGSIISMFDDGGEGDKIAVIDRSNQLYDTFAQQVKALDTDEALEVQKADKPEKELEKDVRDEKLEGILILERDKKGVLKGTYKALDIADSTAVSTIEQALSQAKIAVGTAELNVPQEKLSELFTPVKVNSVALKEGAKTEEELQKATGLVYVVLFVIYFSVLMYASMIATEVATEKSSRVMEILISSVPPVQQMFAKLFGVALLGLTQLAALLLAGYLSLQSSQESGGDAAELVKGFFDVSGVPTATLVYAVIFLMLGYFLYATLAAFLGSVVSRIEDVQQMISPMILLVVAGFMIAMFGLNAPDSTFITITSFIPFFAPMIMFLRVGVLDIPFWEAALGIGITALTIVILAVIGARVYKGGVLMYTSGGGLKNIKQALRLSKDR

SEQ ID NO: 6063 - protein, 408 aa, Bacillus licheniformis
LTNITFIHAADLHLDSPFHGISQLPEEIYQRIKNSTFKSAENVFKLAIDEQADFILLAGDLFDEANRSLKAQMFLRKQFLKLKENNIQVYVIFGNHDHLGGDWTPIEWPDNVHIFSAEDIEEKSFYKDGRLAASIYGYSYPERSVYANKAAEIKKTTDAPLHIGMIHGTLSGESGHDPYCPFSLQDLKNGQMDYWALGHIHKRQVISAADPAVIYPGNTQSRHMKETGEKGCYLVNVCGGELSFEFKAVSDVLWETASIDISGTKQMTELISLMHDAFQSFRKRGKPACVKMVWTGETPSYLAEGQAGIADEILDIFHEEEREEDAFIWLTAIEDQTDAALSGIERDAFFQELLQEIHEFQDFSLILDDLERHPVFRRHGELFNEEDFRDIRTQAEKLLLHELKTLKR

SEQ ID NO: 6064 - protein, 988 aa, Bacillus licheniformis
VNIHAIHIYGYGKFANQTFRLSPSNLHLIYGLNEAGKTTLMSFIESVLFGFPKTKRYEPKTGVIYGGMLEVGHPDFGQIRIERTAGKPERVTVYLEDGSTKPEGFLNELLSGIDRQLYKAIYSFDVFGLQEIHKFNRDKIGRFLLFSSLFGSDAISKLDAGLVKKQEELFKPNGRKPELNQELDRLKRLSEDLKKAKAREGGYYRLLNEKKGAEASIKESGQLLKDLEHLVLQIEQAIEILPAAAEMRQLKEQLASLGGSEESRFPEGGLFELEKLESHLHPKAAQLKALEEKKRGLEQRAAAFAPAEDFLEHEAEAEELLTAYPFYQSYTEKIASLTEQLHQINGRVQAGLDRLQIEEYDILNADTTYEYEWKLQETVQAYIELRELKRSLDERFEQARADLEEAEQAHAALSNEVMPDDVRKQKEETLGRLASAGGHAGRREELILQLSYLKQEQKVRMKRRRTAFAGALCAAFAAAFAALFFKEWFPGALLAPILLIFAAFILKKPEPSAAAAFIQKQLDDIDHSGSKGGVSDSALREELWKDDQTRQLLIAKQAELRQKEAEYERAIQKFEEWEKDIRPYQEKTERYLKELNLSIDPSFLADAYALIKELREEILKKRDIEKELSRLHAKKASFEAGLRKLVTSLSLAGGSVQEQVFQLKSELESQKEKLRQKQEADVSLKHAAEQIKELAKEVEYFQSQIAELFQKAGADGREMFVGLAKRDQARKELTARLGQLKRELGRQDEKAVMLASGHSLAELKGKLAETQEKRARIEKQLTEERQTAANFHAELARLEESGAVSELAYQTGMQKERVAELAKKWAAVKLIRQAVQNKIDEHKKVRLPKLLQTAETLLNPLTAGQYEKIYFSETDDSMMVMRKDGALFCAHELSQATCEQLYLAIRFALALSHQKNVKLPFQLDDSFVHFDQERFKQVLNILKKLSGEDQQILYFTCHEHVREAFRDEDVILLPSGMKKVEGKEMTNK

SEQ ID NO: 6065 - protein, 314 aa, Bacillus licheniformis
MAKGIMLHEVGEQVDLYLLIKSSTKGIASNGKPFLTLMLQDQSGDIEAKLWDAKQQDEVTYGPQTIVKVVGDIHHYRGRNQLKLRNIRPAGENENVKIDDFLETAPIPKNEMMDAVTQYIFEMKNPNIQRITRHLVKKYGKEFIDYPAATKNHHEFVSGLAYHVVSMLNLAKSVADLYPSLDRDLLYAGVILHDLGKVKELSGPVSTTYTVEGNLLGHISIMVTEIAKAAEELQIDSEEVLILQHLILSHHGKPEWGSPKPPMVKEAEILHYIDNLDAKINMMDRALERVKPGEYTERVFALDNRSFYKPVFHK

SEQ ID NO: 6066 - protein, 77 aa, Bacillus licheniformis
VLLFPWWVYLCIVGIIFSAYKLMTTAKEEEKIDQAFIEKEGRIYIERMEKEKAKRMKRTLDEDQEQHEKSADSHSIA

SEQ ID NO: 6067 - protein, 286 aa, Bacillus licheniformis
MKKIAIAAITATSVLALSACSGGDSEVVAETKAGNITKEDLYQTLKDNAGADALNMLVQQKVLDDKYDVSDKEIDKKLNEYKKSMGDQLNQLIDQKGEDFVKEQIKYELLMQKAAKDNIKVTDDDVKEYYDGLKGKIHLSHILVKEKKTAEEVEKKLKKGEKFEDLAKEYSTDGTAEKGGDLGWVGKDDNMDKDFVKAAFALKTGEISGPVKSQFGYHIIKKDEERGKYEDMKKELKKEVQEQKQNDQTELQSVIDKLVKDADLKVKDKELKKQVDQRQAQTSSSS

SEQ ID NO: 6068 - protein, 28 aa, Bacillus licheniformis
MSGGYSSGFALLVVLFILLIIVGAAYLY

SEQ ID NO: 6069 - protein, 71 aa, Bacillus licheniformis
MEQKQRGGSPIILFYFILFAVFTVFNINKLTNSLCLVREIPEERQDKVFRMINVLILILLISSFIEISFTV

SEQ ID NO: 6070 - protein, 171 aa, Bacillus licheniformis
MSCWKTINLVKDYGGMRIVLTAVSLMILFFIPEYLAMQLIHPQTVQRGDHALLFAGLLVAAIIAHKILHILPMISKKKLEKKIYWLKMRTWREIPKNMMLVSLLCPFLVITPVLFYAGAAMPSFAHYFCIISSIHFGYCLPDFLFAWKLIKAPKNCFVDQEADDFDILIQK

SEQ ID NO: 6071 - protein, 115 aa, Bacillus licheniformis
MNSMEQRLERLEYYIKLLLNNADMEEYPYYKILIEKGLSEEEAKETEKLCEELSKELEAQKAQGFVMFDHLLTLFAGQLNEKLEVHETIFALHRQGLYKPLMSEFISIIRQYDLA

SEQ ID NO: 6072 - protein, 206 aa, Bacillus licheniformis
MNRAEEPYTVKEALLFSQRMAQLSKALWKSIEKDWQQWIKPYDLNINEHHILWIAYQLNGASISEIAKFGVMHVSTAFNFSKKLEERGYLEFSKKLNDKRNTYIQLTPKGEEVFLKILESYDPTRNAVLKGAQPLHQLYGKFPEIVEMMSIIRHIYGDDFMEIFEKSFSNIENEFTSEEGKMKKKQEAKEAGESIEVDKPLEPLKN

SEQ ID NO: 6073 - protein, 118 aa, Bacillus licheniformis
MSKGRSLAAGLIVGGVIGGVAALLTAPTSGKNLRGQLKANCGKWEDTVKRLKNDGIALKEQFVKTAIEGAEIIKDVGSELQTSIQEWREEIKPHQQDLKKEIAEIEEKIKQLEKTLQN

SEQ ID NO: 6074 - protein, 73 aa, Bacillus licheniformis
LSVIIIVLTIISAVFTAGSFYYLRLLGYSASYPPKRILKQKALFCTGSAGLALLLPFFLFSFLYKISGGFPFF

SEQ ID NO: 6075 - protein, 175 aa, Bacillus licheniformis
MKTKELVAMALFVAIGAALHAVIPPFFYGMKPDMMLIMMFMGILLFPRLQNVLVIGAVTGVISALTTAFPGGQLPNIIDKPLTALMFFGVFLLVKKLNSKTLAAAGLTAAGTVLSGTIFLTAALFIVGLPGNQGFITLFSVVVLPAAVINTIAMAVIFPIVQSIMKRSRLIEQVK

SEQ ID NO: 6076 - protein, 357 aa, Bacillus licheniformis
MIRTTNFNAGPAALPLEVLQKAKDEFLDFNGAGMSVMELSHRSKEYDAVHQKAKALLKELMDIPDDYEVMFLQGGASLQFSMIPMNFLSKDKTAHFIMTGAWSEKALAEAKLFGNTSIIASSKEDTYSYIPEVPEIPADGAYLHLTSNNTIFGTQWQKFPDAPIPVVADMSSDILSRKIDVSQFDIIYAGAQKNLGPSGVTVVIMKKDWLGKENEQVAKILKYSTHAKADSLYNTPPTFAIYMLSLVLEWLKEKGGLDAIEKRNREKAGILYNAIDESGGFYRGHAREDSRSNMNVTFTLKNDELTASFIAKAKEEKMSGLGGHRSVGGCRASIYNAVSVEDCEKLAAFMKKFREEN

SEQ ID NO: 6077 - protein, 139 aa, Bacillus licheniformis
MSDCIFCKIINGEIPCAKVFENEHVLAFLDISQVTKGHTLVIPKVHKTNIYEMTPEVSREFFEAVPKIAQAIKDEYEPIGLNLLNNNGEKAGQSVFHYHMHIIPRYGKGDGFGAVWKTHADDYSPEDLQNIAASINKHL

SEQ ID NO: 6078 - protein, 100 aa, Bacillus licheniformis
MTKTSNKAGAFSIQWMKEISKLDMFHTQDSCRILSLTNTSFARVDKLSLLQELECPKALSIIRFIFTAEKREGKRFKYILVFGTIKKNAGKERTYVTTDC

SEQ ID NO: 6079 - protein, 246 aa, Bacillus licheniformis
MSLLTVKELTGGYTRNPVLRDVSFAIEREQIVGLIGLNGAGKSTTIRHIIGLMEPHKGSVELNGKTFMDDPESYRSQFTFIPETPILYEELTLKEHLELTAMAYGLSKETFEKRLPPLLKEFRMEKRLKWFPAHFSKGMKQKVMIMCAFLVEPDLYIIDEPFLGLDPLAINALLERMNEAKKNGSAVLMSTHILATAERYCDSFIILHNGEVRAKGTLEELREQFSMEEASLDDLYLELTKEESYE

SEQ ID NO: 6080 - protein, 407 aa, Bacillus licheniformis
MNSILGIWKTRIEEYVKETRSYLKYMLNDHLVIVMIFFLAGAASWYSKWLKEMPEGFPAYWVMAVIFSLILTGSYVRTLIKEADLVFLLPLEAKMGPYFQQAFRFSFLTQLFPLAAAALALAPLYFEASGKGFSAYLVLLIQLLVLKGWNTAMQWRMTFFGEKNMRVTDRFVRLLLNTIGIYFALESSYAFAAAVYLIMAALYVYFKVIDKKKSFKWELHIEDEIRRKQRFYRIANLFTDVPHLRKQAKRRAYLDWMLRFIPYEQSRTFTYMYGRAFIRSNDYFGIVVRLTVIFGIIIAYFSAYEWVSAALIVFTVFITGIQLTPLFDHFSHLPLQELYPVKAEEKRKSFFGLLHIVLSVQALVLSAAAGAMMQWTGMLAGLAGSALLIFVILKPYFSSRLKKSAKR

SEQ ID NO: 6081 - protein, 236 aa, Bacillus licheniformis
MNENQLYLEEATRWKMKFLRKPSMAERMSKGVQSKINARIPAKVHKAITESIKKMVEATLLGSNLTTFDKKTGTLSLREKDELAQKTIAQYQKAAAVEGIGTGAGGIFLGLADFPLLLGIKMKCLFELASIYGYDIKEKEERMFLLYIFQLAFSGEAHRKEIFRMIEHWDTEKREIDWQAFQQEYRDYLDLVKLLQLVPGFGAVVGGTANYKLLGHLGETARHVFHLRLIHETAGY

SEQ ID NO: 6082 - protein, 410 aa, Bacillus licheniformis
LSASAFIRQINEQLDAHYDEMVKLRRHFHQHPELSFQEKKTAAFIASYYEALGIPIRTNVGGGGVLAYIEGGSPGPVIALRADFDALPIHDEKDAPYRSTVPGVMHACGHDGHTATLLVLAKVLNEHADRLKGKIVFIHQHAEEYSPGGARPMIEDGCLDGVDVIFGTHLWATEPTGTVQYRTGPIMAAADRFTITIKGKGGHGAQPHKTKDAVLIGSQIVASLQQIVSRRLDPTQPAVVSIGSFVAENSFNVIADKAVLIGTARSFNEEIRTLIENEIEQVAKGICGMHGADCDYSFERGYPPVCNHPEETSFLAKIAKQTEGVEKVEESGMQMGGEDFAYYLQHVKGTFFFTGARPEDPEAVFPHHHPKFDIDEKAMLIAAKVLANAAVSYQEKEQAVRETPAMEQPK

SEQ ID NO: 6083 - protein, 40 aa, Bacillus licheniformis
MRSKKFLLLGMVSFYNFMTIGAAVQPCCPVFIEEKWRQSL

SEQ ID NO: 6084 - protein, 457 aa, Bacillus licheniformis
MEIELTSVHFIYLGFIAAILAFMLLRLDTTFISLAGVFFISLAATHSAIASVMGLFNSLIYAAGELLPTIFIICFTVSMSELLAKTGVNEAMVTPIAKWMKGPALAYWITGALMFIISSFFWPSPAVALVGAVLLPAALKAGLSPMAVACAMNLFGHGFALSGDYIIQAAPKLTGDAAGLPVAEVMSASVPLVLIMGFSTTGAAFLMLRKEKGNRAAASKQLQSEPEWLLPQTSRKWLALLIPVIFLGDIAAMLILELQGDEATALVGGTAVFVMILIHFIVHKHRRLEKITGYFISGFQFGFKVFAPVIPIAAFFYLGDAGFEKVLTAEIPGFSNRIVQDLGSAFAHSVPLSPEIAAVALTVTGAVTGLDGSGFSGISLAGSAASMFAAAVDSNPAVLTALGQISAIWVGGGTLVPWALIPVAAICKVDPFDLARKNFIPVAAGLTVTTIAAIFLL

SEQ ID NO: 6085 - protein, 167 aa, Bacillus licheniformis
LNFYITYGTVDFLKKLAKQHGLENMLFMKSHDSAILFHETDGESVFHSPHRYEIIDQSGSLEHSGFAVLNNIPVTPEGRPLFEARFKNRAGKIENQPGFKALRVLRPKDSDTYIVLTLWDTEQSFQDWKNSKSFSEAHQKKESSAGINQGGTIFSRPSYISSYHSVE

SEQ ID NO: 6086 - protein, 712 aa, Bacillus licheniformis
MRKRFFIPIIITAAIFLLSLIGYITILFLGDYVIDEKKLIFHASSKIVDQNGEEVTSLYTENRRPISIAEVPDGVKNAFIAVEDKRFYEHHGIDFKSVSRAVYKDILAGGKVEGGSTITQQLAKNTFLTNDKTFLRKTKEVIIAINLERDYSKDKLLEMYLNQLYFGHGVYGIQAAANYFFSKDVKDLTVSEGAVLASIPKAPSTYSPILNPEKSRERRNVILGMMNEQGYISSKETVRAQGSTLGLHVKEKSKNPWLDSYIDLVMKEAEDKYSISSEQLLQGGYTISVPLDVSIQKAAYTLMKQDGYFPGTDNKAEGSAVFIDNRTGGVVAALGGREYAPKGYNRATAPRQPGSTFKPLAVYGPALEEKRFKPYSMLEDKQLSYGGYSPKNYDGQYEGKVSMVDALTYSKNAPAVWTLNEIGIETVKPYLSRLGMNVPDEGLALGLGGLEKGVSPLEIAGAYRTFANSGQYTEPFFIKKITDENGDVIFRREEKSEKVFSKQTAWNMTRMLEEVVKSGTGKAGDFSGEIAGKTGSTTYTGKEGGTKDAWFAGYTPEVTGAVWMGYDKTDESHYLKGGSAYPTRLFKDILKRSNHKPERFKAPEGVKDLDRPIRLEDLESVKADYSFTPMGLITVSLKWHEQEDKRVEYRIYERKNGKETLIDTVKGKGSYSIPYANIFSNASYKIVPYNPQTKTEGKGTDYIEPKVFPSGH

SEQ ID NO: 6087 - protein, 353 aa, Bacillus licheniformis
MKNDKAFNDTFLKACRGEKAAHVPVWYMRQAGRSQPEYRALKEKYGLFEITHQPELCAYVTRLPVEQYGVDAAILYKDIMTPLPGIGVDVEIKNGIGPVIDQPITSLTDVEKLGELEPEEHIPYVLETIRLLTEEQLNVPLIGFTGAPFTLASYMIEGGPSKNYNKTKAFMYSQPAAWDLLMKKLGKMAAVYVKAQIRAGAKAIQVFDSWVGALNIGDYCRYIKPTMDILFKELKKEGVPLIMFGVGASHLATEWHDLDLDVVGLDWRMSVQEARDKGLTKTLQGNLDPSILLAPWEVIEERTKAILDQGMQTDRFIFNLGHGIFPEVSPDTLKKLTAFVHEYSASKKSSLMT

SEQ ID NO: 6088 - protein, 312 aa, Bacillus licheniformis
LGKKKMGLLVMAYGTPYKEEDIERYYTHIRRGRKPEPDMLQDLKDRYKAIGGISPLAKITQEQTKQLEKRLNELQDDVVFKSYIGLKHIEPFIEDAVQEMHKDGITEAVSIVLAPHFSTFSVQSYNKRAKDEAEKLGGLSITSINSWYDEPKFIAYWADQVRKIYDEMPSEERENAVLIVSAHSLPEKIVEMGDPYPEQLKESAKLIAEAAGVKDYAVGWQSEGNTPDPWLGPDVQDLTRDLSEQKGYSAFVYAPVGFVADHLEVLYDNDYECKVVTDDIGASYYRPEMPNAKHEFIDALADVVLKQLEKEQ

SEQ ID NO: 6089 - protein, 470 aa, Bacillus licheniformis
MSGERRQIVIIGGGITGLAAAFYLEKEIKKNDLPAEVTLVEASPRLGGKIQTVHKDGYVIERGPDSFLERKQSAPQLVKDLGLEHLLVNNATGQSYVLVSETLYPIPEGAVMGVPTKIGPFLTTGLFSLPGKLRAGMDLLLPASKPQEDQSLGEFFRRRVGGEVVENLIEPLLSGIYAGDIDRLSLMSTFPQFYQTEQKYRSLIIGMKKSRGAQSAKKPANKKKGQFQTVKTGLQTIVEELEKQLDITKVYKGTKVVSIERAGSGYSMKLDNGKVLHADSAVVTAPHKAAAAMFPKADWLKGLEDMVSTSVANVALGFPEEAVQMEHQGTGFVISRNSDFSITACTWTNKKWPSTTPEGKVLLRAYVGKAGDESVVEQSDNEMVKIVLDDLRRIMKIDGEPEMTCITRWHEAMPQYHVGHKKRMKEIREGLQASYPGVFMTGASFEGVGIPDCIDQGKQAVADVLSHLFE

SEQ ID NO: 6090 - protein, 41 aa, Bacillus licheniformis
MYSHTFSNKEEQIKLSESIRRLFLFHSFYSFHHFKVCLWKR

SEQ ID NO: 6091 - protein, 190 aa, Bacillus licheniformis
VSKDRKALILEAATKSFTQFGYKATTMDLVAKLANVGKGTIYTFFKNKEELFDDIFSSLLIEMKQTADQAIDPDLPFHENAHRAMMAILEYRKKHQLTIKIFQEGAELGTPAAREVIEKLERMVIGYIKRKIKEAIKNDDIRPCDPELNAFVIFKLYIALIFDWEKNHEPLKDEELAEMLKMYILKGLSR

SEQ ID NO: 6092 - protein, 720 aa, Bacillus licheniformis
MNVFKNQWRELITNKKLLISVIGVLFIPLIYSSIFLAAYWDPYGNVDQLPVAVVNSDKGTTYEGKDLHIGDDLVKELKENDKFDWHFTTKEKAMRGLQNEEYYMVVEIPENFSKDASTVMDKHPKKLNLIYHTNAGRNYVGAQISDKAIEQLQHSVGSEITEQYAEVIFDNFGKIAKGLGEASEGAGKLDKGLKDAKEGSEKLKKNLEKLAKSQIQFNKDGMEKFGAAFNTLNDKIHELDSGLAQFLEKSGQLHSGAQQLQQGMPQIVAGLEQMNEKAQKISKLEEAISNEKIQQLETALSNAEKAKKEISQISKNIDELEAALKNQHSEVKQIIESSNMLTQEQKAALMKQVDEKMGTVKLPEFDKLKAQIPDVSELPDLSGLKQKLEELKRVPSDVNKLYKGSQKIQQGLDALTNGLGAYNEKFAEAKSGSSKIAEGSQTLVGKFGDLQSAADKLKDGSSKLAEGAKSLDEGLGKLSDGSGELFDKLSDAADQTGDIQAGDENYNMFSDPVDVKGDKIDPVSNYGTGLTPYILSLGLFVGALMITVVFDVKEPAVRPESAFGWFMSKFSVLFAVGILQAAIACTIILWGIGLEVQSVWRFYLFSIIMSITCLAIIQFLAATMGNPGRFIAVILLVLQLGGSGGTFPLALVPKFFQVIHSALPMTYSIAGYRAVISSGDYAYMWEQAAVLGGVAIVMMALTLTYFKVLLKKGKIEEQHA

SEQ ID NO: 6093 - protein, 331 aa, Bacillus licheniformis
MKTLSKARISAIGTYVPEKRMTNKDFEKIVDTSDEWIVQRTGMKERRIAGSHEFTSDLCIKAVENLQSRYNGTLDDIDMIIVSTTTADYAFPSTACQVQEHFGWNEVGAVDVNATCAGLTYGLHIANGLITSGLHRKILVISGETLSKTTDYTDRASCILFGDGAGVLLVERDDKAPSFITFAQDTKGDGARHLYRTGLRSDLKGEPLSGEGKMVQNGREVYKWAVRSIPEGVKKLLTQAEMELKDIDWFVPHSANLRMVESICEKTGIPLEKALTSVEWFGNTSSVSIVLALDEAVKNGKLKEGDTLILFGFGGGLTYTGLIVKWGAPAS

SEQ ID NO: 6094 - protein, 345 aa, Bacillus licheniformis
MAGQKTLELIKELVSIPSPTGNTYDIIDYINRLLQEEGVETKFNRKGGLIATIPGSDKSRHRMLTAHVDTLGAMVKEIKPNGRLKIDLIGGFNYNSIEGEYCNIETASGKTYTGTILMHQTSVHVYKDAGKAERNQKNMEVRIDEPVNSEEETRALGINVGDFISFDPRVEITPSGFIKSRHLDDKASVALLIELIRTINTEGMTLPYTTHFLISNNEEIGYGGNSNIPPETVEYLAVDMGAIGDGQSTDEYTVSICVKDASGPYHYGLRKRLTALCEAHGIDYKLDIYPYYGSDASAAVKAGHDIVHGLIGPGIDASHAFERTHQSSLEQTAKLLYHYVQSDMA

SEQ ID NO: 6095 - protein, 65 aa, Bacillus licheniformis
MYFYHDHCKKDYDYDYHKKDHDCKKYYYYYYYYYYPCYKKYDYDYDYKKYDHYDHCKKKKHYDYW

SEQ ID NO: 6096 - protein, 428 aa, Bacillus licheniformis
MKRLKFGLATQIFLGLILGVAAGAIWFGNPAVATYLQPVGDLFLRLIKMIVIPIVVSSLIVGVAGAGSGKKVGRLGFRTILYFEIITTFAIGLGLLLGNIVQPGHGVNFSGAEKQDISQYVETEKEASTKSVADTFLHIVPTNFFQSLAEGDLLAIICFTVLFALGVSAIGEKGKPVLSFFEATSQAMFHVVNIVMKFAPFGVFALIGVTVSKFGFSSLLSLGKLVLLVYLALAFFLIVIFGIVGKLCGINIFKFLAYMKDELLLAYSTSSSETVLPRVMEKMEKIGCPKGIVSFVIPIGYTFNLDGSVLYQAIAALFLAQVYGIDLSIGQQLTLILVLMVTSKGMAAVPGTSFVVLLATLGTIGVPAEGLAFIAGVDRIMDMARTVVNLTGNALAAVVMSKWEGEYDAVKGQNVLNQREPADIEVSG

SEQ ID NO: 6097 - protein, 44 aa, Bacillus licheniformis
MLAKITEFFRNLPSKKCSVCGHDIDEQHECYGNTCSKCLNVKDI

SEQ ID NO: 6098 - protein, 244 aa, Bacillus licheniformis
MKVTVIGCCGGFPAANEATSGYLFQSGYYSVLIDCGSAVLSKLQLFLPVEELDAVILSHYHHDHIADVGPLQFAKLVGSFLGKGANALPIYGHPFDEEQFSKLTYKTHTAGLAYDPTQPLAIGPFTFTFLKTVHPVDCFAMRVTDGVHSVVYTADSSFQKAFIPFSEGADLLISECNFYAGQDGGSAGHMNSLEAGRIAAEAGAGQLLLTHLPHFGEHQKLAEEAQTVYKGAVDLAHTGYVWGE

SEQ ID NO: 6099 - protein, 329 aa, Bacillus licheniformis
MLFIDNQNITDPRINLAIEEYCLKHLDPEETYLLFYINQPSIIIGKNQNTIEEINTKYVDENGIIVVRRLSGGGAVYHDLGNLNFSFITKDDGNSFHNFKKFTEPVVAALKRLGVDAELSGRNDLMANGRKISGNAQFSTKGRMFSHGTLLFDSEIEHVVSALKVKKDKIESKGIKSIRSRVANISEFLDQKMTTVEFRSMLLRYIFDTEGEIPEYKLTEKDWKIINQISKERYQNWDWNYGKSPKFNLQHSKRFQAGSVDIRLEVQKGVIRECKVFGDFFGVGDVSDIEEKLTGVQYERKAIEEALQGVDIKHYFGNIQKEEFLDLVY

SEQ ID NO: 6100 - protein, 513 aa, Bacillus licheniformis
MNLVSKLGETAQSKPDRTAYIFGEQTETYGGLQQKIDCFAEGLREIGVEKGDHVALLLGNTPHFVIAFYGALKAGAVVIPINPAYTPTEIGYMLTNGDAKVIVALGQLLPLYEKVHESLPKVGCVVLCETGEPLQEPENTEVKMKLKSFTSIMKPPVRPFPEIDDEDTAAILYTSGTTGRPKGAMLTHQNLFSNANDTARYLTMNESDLVVAALPMFHVFCLTVCMNAPLMNGAAILIVPKFSPAEVFKLIKKHQATIFSGVPTMYNYLYQYEGADETGFRSIRLCISGGAAMPVALLKSFEERFGVLVLEGYGLSEASPVTCFNPFSTGRKPGSIGTNILNVKNKVVNELGEELPAGQVGELIVKGPNVMKGYYKMPDETAHTIKDGWLYTGDLAKRDEDGYFYIVDRKKDMIIVGGYNVYPREIEEVLYLHPKIAEAVVIGVPDPNTGEAVHCYVVPKDKTLTEEDVLSHCKKHLAKYKRPSAIVFMDEIPKNSTGKILRRALKDILTNKS

SEQ ID NO: 6101 - protein, 83 aa, Bacillus licheniformis
MKKKTAHHLPSPAYHGYISMTGTHRVHFTVWLKKDEAVILKEEEGTYFVLRQREKDALLGELQKRDAAGVPFSGSRFVCQNVF

SEQ ID NO: 6102 - protein, 183 aa, Bacillus licheniformis
MNSIEKQVAENIKRLRKVRNYSLDQLSSMTGVSKGMLAQIEKGSSSPTITTLWKIANGLQVSFTSLAEKPAGEPTVVRKHEKTPVMAGEEKYAAFPHFPFDQKKKFEIFYIELAPGCVHESEPHHGGIEEYVLVSRGAIAVTACDYTCSLNEGDAMHFTANTVHTYENNTEQTASCYTLIYYP

SEQ ID NO: 6103 - protein, 238 aa, Bacillus licheniformis
MEKHDSLNFLDGLRSGVSLAVGYIPVALTFGLLAKTTGLSLFETFLMSALVFGGASQYMSLSMLAVQTGIIEIVMTTFIVNIRHFLFSATLNQLVEKDSPWKKAFYSFFAVTDESFAVAALRKEKLTTGYMIGLGSIGYVSWVFWSAAGHFAGAAMPAVLQESMSIALYAMFIGLLVPPLKKQRKVLLLAGAAALFNTVFQMNGILSAGWSIVCATLLSAVLIEWLYQFRTEGKRNYV

SEQ ID NO: 6104 - protein, 103 aa, Bacillus licheniformis
MFSPIIWMIIGMAAVTYVPRMVPLIAFESLKLPGFLERVLKNVPYAVLGALIFPGVFLVQSGMLYGLAGALIAFLFSYFGASVIVVVMGTILTLAGAGLLLSL

SEQ ID NO: 6105 - protein, 418 aa, Bacillus licheniformis
MRKWIAGAGLLYVLYGLFFYWYLFMAGEPSVPEALKGTSADPAAFMNERELMLTEEYSKIKDFLFFIRIPFEWFLFFILLIAGLSRKMKNWAEQTSKRRSIQITAYVFALFLIVTIVSLPLDWISYQYSLDYGISTQTTASWIKDQVIDFWISFPITAAAVIVFYYLIKKHEKRWWFYAWCLTVPVTLFLFFLQPVVIDPLYNDFYPLKNKELEQSILKLADQADIPANHVYEVNMSEKTNALNAYVTGIGANKRIVLWDTTLNKLDEPEILFIMAHEMGHYVMKHVYIGLGGYLLLSLAVFYVIDKLYKRIIGRYGRSLHIAGKSDLAALPLLLMLMGVISFASSPFTNAVSRHQEKAADQYAIELTQNSDAAVSTFQELSKAGLSEANPPFLVKIFKYGHPTIMERIQNIEQPSSE

SEQ ID NO: 6106 - protein, 333 aa, Bacillus licheniformis
MRKKSFWLGMLTAFMLVFTMAFSDSASAAQPAKNVEKDYIVGFKSGVKTASVKKDIIKESGGKVDKQFRIINAAKAKLDKEALKEVKNDPDVAYVEEDHVAHALAQTVPYGIPLIKADKVQAQGFKGANVKVAVLDTGIQASHPDLNVVGGASFVAGEAYNTDGNGHGTHVAGTVAALDNTTGVLGVAPSVSLYAVKVNAYARGVVVVAAAGNSGSSGNTNTIGYPAKYDSVIAVGAVDSNSNRASFSSVGAELEVMAPGAGVYSTYPTNTYATLNGTSMASPHVAGAAALILSKHPNLSASQVRNRLSSTATYLGSSFYYGKGLINVEAAAQ

SEQ ID NO: 6107 - protein, 309 aa, Bacillus licheniformis
MKSAHVKGVLMVLAGASLWGLSGSAAQYIFERGAVEAGSLVSVRLLASGVILLLYVSMKNGFQHVCQIWKKKTDICSILVFSIFGMLTVQYTFFASIEKGNAAAAAILQYLAPFFVLFYLYVKKELPPKWKDAVLTLLALFGVFLLLTGGRPDSLYIPAEAAVWGILSGGALAFYTVFAGGLIQSFGALTVTGWGMLVGGAGISFLFPPFRFDLSHIGAGEAAAILFVVLCGTALAFALYIGSLSYLSAKETSCLSCAEPLAAVLSSALWLGVPFNAFQGAGTVMVIITVIILSLSRERKAADSVNERV

SEQ ID NO: 6108 - protein, 325 aa, Bacillus licheniformis
MKHKYFAILFLLMISVMTACSGGSESTKTSGQDSVTVKHDLGETKVRNKPKKVVVLELGFIDALLDAGIKPVGIADDGKPKFINEKVRGKIKGYTSVGSRAQPSFEKIASLKPDLIIADSSRHSGVYDKLSKIAPTIALKNLNADYQDTLDASLTIAKAVGKESAMEKKLAEHKQKLDELKQKFGSRKQSILLLGNTNEEITVRDENFFTSQLLTKIGYTYGVGDSGKGDAENGESVNIKMTLEQLLEKDPDVIVLMTGEKDKVDEDGKRPIEKDPLWKKLSAVKNGKVYEADRFAWSLRRSIDGADELMDEIDQHLLSEDQKKS

SEQ ID NO: 6109 - protein, 329 aa, Bacillus licheniformis
MKRFAPLIFVFLLLASFALSVSIGSSMIALSDIWAAVFAYDGSKLHAIIQSIRIPRALTAALIGANLGAAGALMQAVTRNALASPSIFGINAGASLAVVCLTVMFPALAAPQTAMGAAFAGGAAAALIVYAVASVFSEHDRDISFALIGVVIQAILASMTQMLLIFHEESTETLLFWLSGSLAGSSWDKLHLLVPVSIAGLLTALALGRAASVMSLGDEVSHGLGQKVWLSRLLIAFTVVALAGVSVSAAGPIGFIGLMVPHMIRYLIGADYRAVIPYSALLGAVLLLFADILSRFVYFPYQTPVGVVTAMIGTPFFIYLARRRKKGAA

SEQ ID NO: 6110 - protein, 342 aa, Bacillus licheniformis
MNNPARKTKRRRGQSAVVLCALFACLFVLIVLNLAIGDENIGLWDVLKSLAGQGDAGVRFLVMEFRMPRILLAVLAGGALSIAGVVAQFLMKNPLAAPDTLGITGGAGLGAVIVTVLFSQQSPLLLTGAAFSGSVLAAILVYLLAYRNGISPVRLALVGIAVNAFCHSGIQLLISRGSPNVNSALIWLNGSLWGRGWQDVLPLFIWCCLVIPPIWLAAKPLDIIKSGDGIAVGLGIRLERTRFLLLAGAVLLTAAAVTAVGTIGFIGLMAPHIARKLAGAETKILIPVAALVGGIVLLIADAAGRGLVPPLEIPAGLIAAVIGGPYFIYLLRREEHKKRRHA

SEQ ID NO: 6111 - protein, 190 aa, Bacillus licheniformis
MTAICLIRHGETDWNALGKLQGRTDIPLNETGKKQAKETGAFLKGSDWDVIITSPLRRAKETAEIINQYLGLEIIEMEDFIERNYGDAEGMPFEERMRLYPDKEYPNQESKEALAERLMAGVQKVSERYPDKKVLIVAHGAAIHALLSKISNGDINLENTKLVNACLSNIKFHENKWHVKDYNLSHHLSD

SEQ ID NO: 6112 - protein, 52 aa, Bacillus licheniformis
MTGTEQHLHDFFKQAVPILLFFRSRLQSLSSVAVMAVNIYLCLHGRLLKVWM

SEQ ID NO: 6113 - protein, 430 aa, Bacillus licheniformis
VLFKKDRKTERSFFAGESPDQTKRIRLNQHAEFKKQLAMVDLTDEDLWVLSRLKPLVTEHIETIVTRFYQNLEHESSLMEIIHDNSSVDRLKKTLTIHIQEMFSGVIDEAFLEKRIRIAHVHLRIGLLPKWYLGAFQDLLLSMLKIFENALSDEEYRRSVKAVTKILNIEQQIVLEAFEDEHARLRRLDEESKNELHRQIKDTSGSLAAIFAETTGAVQELVDKSSEIAETSRAGTKTAVSVEQKSIGGKKELEEQEQQLNQMGSSMTQIEQEIKKLEEIALQIEKIFGIVTGIAEQTNLLSLNASIESARAGEHGKGFAVVANEVRKLSDDTKKTVSTVSELVNNTNAQISIVTKHITDVNQLVNESKDKMSEINRLFDDIVSNMKTSKEQSGRIEGDLQSFLSGLQDVNAAVSQVAVSVDSLVELTKK

SEQ ID NO: 6114 - protein, 509 aa, Bacillus licheniformis
VSNQEQKLPDSPESYWRNSTDLPSFEELSEDVKTDVAIIGGGMTGLTTAYLLTKKGYSVVLIESGRILDGTTGYTTAKITAQHDLIYDELIGHIGMPNARLYYEANLKALSFIKNLVLEQKIPCDFEEQDACIYTTEEQSVQKLRKEYEAYQKLGIDREFIKDLPVPIDVKAGLVMKNQAQFHPLHYLKYLAEAVREAGGKIYENTASKEIKEGDRPKVLTRSGHQIFSDYVTCCTHFPFHDKKGFYFARLEPSRSYVLAVKPKTPYPGGMYLSIDQPSRSLRSVTIDGEKMVLVGGESHKTGQGEDTIKHYQALESFAEGVLGIESIPYRWSAQDLITLDKIPYIGPIYPKEKRILVATGYRKWGMTTSTLAAQLMTDHIAGEDNPYQAVFQPARFHPDPSIKKAISYNADVAKHFAEGKLEQPIRKPEDLVNGEGAVVSHAGKRAGAYRDEKGELHLVDTTCTHMGCEVEWNDGEKTWDCPCHGSRFSIDGDVIEGPAVEPLKDPES

SEQ ID NO: 6115 - protein, 285 aa, Bacillus licheniformis
LSKQPKKVLPPQHQTQRPGLEYLMDPRPVFDRPKRERKLAGKTAIITGGDSGIGRAVSVLFAKEGANVVIVYLNEHRDAEETKGYVEKEGVGCKLIAGDIGDEAFCNDVVRRAKEAFPTIDILVNNAAEQHPQKGIEKITSHQLIRTFQTNIFSMFYLTKAVLPHLKKGSSIINTTSITAYAGNERLIDYSSTKGAITSFTRSLALSLVDQGIRVNGVAPGPIWTPLIPSTFTEREVEIFGSTTPMERPGQPAEVAPSYLFLASDDSSYMTGQVLHVNGGTIING

SEQ ID NO: 6116 - protein, 77 aa, Bacillus licheniformis
MKEKKSYAELMKSRNTQKVKELDVTITDIYIQMVLDESLFKRRLHTLSKKINEALDKGDKQSFLELSREYTALKKHA

SEQ ID NO: 6117 - protein, 192 aa, Bacillus licheniformis
MSTEDMTKDTYEVNSSTMAVLPLGEGEKPASKILETDRTFRVNMKPFQIIERSCRYFGSSYAGRKAGTYEVIKVSHKPPIMVDHSNNIFLFPTFSSTRPQCGWLSHAHVHEFCAAKYDNTFVTFVNGETLELPVSISSFENQVYRTAWLRTKFIDRIEGNPMQKKQEFMLYPKEDQNQLIYEFILRELKKRY

SEQ ID NO: 6118 - protein, 46 aa, Bacillus licheniformis
MTRIPAEARDMIEKAIYLPMTVSILNRDMKIIQQGPFKLERPLSAS

SEQ ID NO: 6119 - protein, 51 aa, Bacillus licheniformis
LSWLFSSFLFLFRNICSVFILHEIRPFNQEREKMTKMIRLFQTNTENNRDG

SEQ ID NO: 6120 - protein, 203 aa, Bacillus licheniformis
MLEQLFSYFTEENLTEFFQSYRAFGPFVAVLLPFIEALLPFLPLLVFVVANVNSFGLWQGFLLTWVGASLGSIAVFLFIRHFGQQKALGFIRRHPSVKKLMIWVEKRGFGPLFLLLCFPFTPSAAVNVVAGLSRVSLLPFSLAVLCGKFVMIFMVSFVGHDLKALFTQPLRTAAVIIVMLILWYAGKRVEHRLNVRFSQREKD

SEQ ID NO: 6121 - protein, 172 aa, Bacillus licheniformis
LKKRFLVIAGVLLVIVVGIQVKNAVFIEYKVEGVSMNPTFQEGNELLINRFAHRFKTISRFDIVLFKGPDKDIFIKRVIGLPGETLRYEDDQLYINEEKIKEPYLDDLKAVTAGGDLTGDFTLQEVTGEEKVPENEYFVLGDNRIHSFDSRHFGFVSERDIVGIVTERIDKK

SEQ ID NO: 6122 - protein, 591 aa, Bacillus licheniformis
MKKLWKIAVSAAMFVGFFANSPRIQAESNKQENEVIVVYKNTSGKETVIEQADTVEHVYRHIPAAAVTADDKTVRELEHDPDVLYVEDNLPVAAADSTALKAFSSSTAQNASAFSQWNIKLIQAALAWNKGLTGKQVKIAVIDSGISPHEELSIAGGASMVGYTASYRDDNGHGTHVAGIIGAKHNGRGIDGIAPGAQLYAVKALDRNGAGDLKGILQGIDWSIQHGIDIINMSLVVSGDSQVLHDAVDKAYKRGIILVGASGNAGNGKSVYYPAAYSSVIAVSATNEKNQIASFSNTGSAVEFSAPGTSIISTSSDRGYAIGSGTSQATPHVTGMFALLKQLYPTASNAELRKKMQFYTSDLGAPGRDHLFGYGLIRFKEVTQPLEKAQKAVGQAEKTKKKADIQTAQKAIEPLPADADKTALKKRLNTVKEQLKKTAESKVKLAEKQKKKTNADSAQKAVNELDSGTFKTNLQKRINAVRSSLLKTAKQAVAKAEKAATDSNLGKAQKAINELPAGKDKSNLQKRLNTAKKQAAAAYNKKVSAAKAKVKTAEQKRTKKTKSAAQSAVGKLKASAEKTKLQKRINAIKLK

SEQ ID NO: 6123 - protein, 51 aa, Bacillus licheniformis
VEKTIKHDPNYYKKIIIALCLGWVAIWIYRTILTPIYPQIQESLGNISDRK

SEQ ID NO: 6124 - protein, 157 aa, Bacillus licheniformis
MPRVRIQLFFNSSLSFGIGNEVSELSQLPLSFFEANEAYDNKYEQGEMEFIEPYKSKSVEELLQLIPTNKLKPFIIYTLGPLAYPQTTKEKELRFTLSVYMANQCDLTKTSEDIFIHRNTVKYRIKKCEEILGQSVESPDTSLSIRLALFASEKISL

SEQ ID NO: 6125 - protein, 400 aa, Bacillus licheniformis
LDKKFTSFGGLEQGGITRLLYSPEWIAAVRELEATFKEEGLEVSFDDVGNLSGRLVGSKYPEETILTGSHIDTVVEGGHLDGQFGILSALVAVKYLKEKHGQPLRTIEVLSLAEEEGSRFPYTFWGSKNFFNLAKKSDVETIEDADGIKFEDAMHESGFDYRKTDHVRDDIKAFVEVHIEQGKVLEAENKAIGVVTGIVGQKRYTINLKGEANHAGTTPMSLRRDTVVAYSEIVTDLTKRAREIGEPLVLTFGHVTPVPNTVNVVPGEITFSIDCRHIDQQLLNNFAKEIEDKVKAVAETNNMTYDINLWMDEAPSLMDKEIIQIIEQAAKANVGDSYKLMPSGAGHDAQIFADFVPTAMLFVPSIGGISHNTNEETKIEDLVKGIEVLKDVLFELAYKE

SEQ ID NO: 6126 - protein, 262 aa, Bacillus licheniformis
MSYLNHNQGYREGLLETRSVIKKDNYAVITPDGLVNNVVPGFEDCDVTILGSPRLGARFVDYLVTVKNKGGNKTGFAGDGIQSFVYVEYGKINAFADGEKYELAKGGFLYVPPHLQLTFENNNNGEDSRLFLYKKRYQPLEGHTPEIVAGNVNNIKQEAYEGMKEVLIQDLLPKEIAYDMNIHILSFEPGASHGYIETHVQEHGAYILSGRGVYNLDNEWMPVDKGDYIFMGAYTPQATYAIGLDEPFSYIYSKDANRDINL

SEQ ID NO: 6127 - protein, 342 aa, Bacillus licheniformis
MSEPLVYVERNRLRQLMKDKLVKAGLPEEQADKTADLLIFADERGVHSHGAVRMQYYSERALKGGYNLKPNLSFEKTGPASGIYHGDNALGHYVSYQAMKKAIELAKTSGIGVVGVKEMGHSGAIGYYAHQAALEGMAALTVCQSDPMVVPFGGTEPYFGTNPIAFSAPRKDGSPILFDMATTVQAWGKILDARSKNKSIPDSWAVDKNGAPATDPFKVNALLPMAGPKGYGLAMMVDILSGSLLGLTFGKHVTSMYKDLSEYRRLGQLHLVINPEYFGGKEQFLEKISQMVEELHDNPPAEGFNKVYYPGEIQIDVMKQYKKTGIPVTKEILDYLESDKIY

SEQ ID NO: 6128 - protein, 349 aa, Bacillus licheniformis
MRVSKQELFHLIKQKLIKAGLNEGAAHDVSDVLTFADHRGIHSHGAVRVEYYAERIAKGGITANPNYTFEQTGPASAVFSGDNGPGHQAAKQAMEKAIEMAKNSGVAVVGMKNISHSGALGYFVEMAAEQDMVALSMCQSDPMVVPFGGTEPYFGTNPIAFSAPSADERMITFDMATTVQAWGKVLDARSKNESIPETWAVDAAGAPTTNARDVHALVPIAGPKGYGLMMMVDVLSGSLLGVPHGVHVSSMYQDLTKGRDLGQIHIVINPAYFTDLTAFKQQISTMLDELKAQPAAEGYGEIYYPGERGKLRSAKYDKEGIEIVDDIYNYLVSGDVHYNRYHGKNRFAE

SEQ ID NO: 6129 - protein, 585 aa, Bacillus licheniformis
MLYTIIKENTYQDSIVLMLLSNKLSAIDGVNKVSIMMGTPANKDIFKSSGLGTDELEKAKPNDIVIVIDTNQEEKVSEVKEEVEAALKGDSASQDTSKDQEAHNWKRAMELANNPNLALISIPGQYAAMEAENALNEGLHVFVFSDNVSKEDEVKLKQKAHEKGLLVMGPDCGTGIIHGVPLAFTNIVNKGDIGVVGASGTGIQEVTCIIDRLGKGVTNAIGTGGRDLSTEVGATTVLDSIKALNQDPQVKVITVISKPPAKEVQQKVLNVLRNIEKPVVTLFLGDKPTYQEENIYHAYTLEEAAVVSVQLSNGDKPNFKPTVAENVNVSLKDSQVGIKGYYSGGTLASEAAVLVKEAFKEEVPEEKKGAYILKTKHHEIIDLGDDIYTQGKPHPMIDPEKRIEMLETSGNDPETAVIMIDNVIGYGSHDDMANELAPAIKRILANAHQDGRELAVLVTVVGTDKDPQGYEKQIETLKESGAMICETNDQMVRTAIKLAGGKVEQPVLDIQKFEYTQEDLTVDEKIMSLINTKPSVINIGLKSFTAAVQKSGSECVQFNWRPIAGGDEKLMKVLQYLNYYEGETI

SEQ ID NO: 6130 - protein, 421 aa, Bacillus licheniformis
MGYKTINEANEAVIRKIIAAEPFLTDVVPAKSVIPELEDYVLLHAGPPIKYENMTDPMQGSCVGAILFEGWAEDEEGARGLLENNKITFIPCHHVNAVGPMGGFTSPNMPVLVVMNKESGNEAYCQMNEGIGAVLRFGAYHEQVINRLHWMKDVLGPVLSKALRKIDGGINVNVLMAKAIAMGDEFHQRNIAASLVFLKEVAPVIVALDDVENEQSAEVIQFLADTDQFFLNIAMATGKAIMDAARTIKHGTVVTAMCRNGENFGIRIAGMGDEWFTAPVNTPQGLYFTGYSAEDANTDIGDSAITETIGVGGVAMIAAPAVTRFVGTGGFNDALETSNQMTEICVGENPNFVIPTWNFKGACLGIDARKVVETGITPVINTGIAHKIAGYGQIGAGTVHPPIECFEKAITAYAEKLGFQG

SEQ ID NO: 6131 - protein, 256 aa, Bacillus licheniformis
MILQASAIGSIALQLLIEGKTFTVHSIFEKGLNIVDQNDELIFIGTNENGTFPFGILLGSQTKQTLKAGLEVGDSLQVRNNHLSHNCFKLNFNAKILPLYTDFKHANINKLKENVKQISFKSYESTDFESAHVSDLIKKLHDPTENLEEELRYFIGRGQGLTPTGDDILVGILYGHFINSFIAEKHLETLGSLIREPLTTLVSTRFLTCAIEGLFSSKITKLQHDSSLKSIKSLIKVGSSSGMDTLYGIYMALTKE

SEQ ID NO: 6132 - protein, 310 aa, Bacillus licheniformis
MGKSVVIALGGNAILQPKQEATYANQFKNVISATRHMIEIKEAGHKIVITHGNGPQVGNIIAQNEAAKNVVEPLPIYACNAESQGFIGYMLEKALKNHIKKRGITANVATFLTMVEVDKYDKAFEKPTKPIGVFYSEEEAKKLEKKGFAMSEDAGRGYRRVVPSPEPKVIHGIEEIRRLIDETIVISSGGGGIPVYRDDSGLLHGIEAVIDKDRSGLKLAQQLNADVFMMLTDVPNVFINFGKENEQKLSRITVEEAEQYVAEGQFPAGSMLPKMQAAIEFAKLGKEAIICSLNQAAAALDGKAGTRLTK

SEQ ID NO: 6133 - protein, 416 aa, Bacillus licheniformis
MTKEAGSVEGKGKQPLVPYWVKVVIVFFFGWVAYATRTILNPIMGDIESAFSLSKAQLGLIMSIFFIGYAGMNVPAGILGDKIGKKRVLVPGVILFGSLAAVTGMMPTFFLFISAWLMVGMAQGVYYGPQYGISSEIIPKNRLTLGSAVINAGMAFGTSIGYYISSYVIGEWGFGWRTPFFAIAVPVVLIGIAMAIVIKDKPKTDKEVKRSAEPFKFSSLFNRNLILAYIIIFCSIYGFFMIITWLPYYLETARGLTGGNIAFVASLVPWAAIPGSLFFSWLSDKLGRRKPVLLMMLPFGILSTAAIVYFDSLPILYMTLIVYGIVGKISVNPVLIAVVANNAPKQSLSTAFGFYNFVGMLGSILAPYITGWLTDTTGSMNIGFYFAAALLVIALIATYLIDESNLPSVDKAAKHH

SEQ ID NO: 6134 - protein, 112 aa, Bacillus licheniformis
MLSQIKYEETHSLQLRFKRHNKGDSQRLIDANNKQFGIVVLKFSSVCKTAWAKMTLDKAVSLGLEANAYLKRNTDGKELSCSPAGGKGKVLPGQTSCYTPMVDFDPRSSYAM

SEQ ID NO: 6135 - protein, 366 aa, Bacillus licheniformis
MNKIAAEEVANILNTWYRAIRRNDAEQSIRIFEEVKPMLAEMEEDQEVLIYYSLLELRHKIMLYDTRGKKIEQQEELTNGGSAASHMTSYYYYLFSGAYEVYKKNYEQAISFYKIAEKKLAHVHDEIEVAQFHDKVGKLYYYLGQNIVSLNHTRQAMEIFKGHGDHDMNLVSTYITMAGNYTEMGKYTEAEEYLTEAIHTVRKAGDCFKEMQLLHNFALLYAAMDNSEKSIQFLEIVLDDQAYAASDYYFNAVFLMIKELFKVGDHKRAAAFYKEGKERSKSAANKIFDAKIDILYAAYAGDGEQAVKDCKDNIEILFQTKQYDSARELSLLTANVYRSKSLYKEAAHFFLEAIKAEEKMKKVEGM

SEQ ID NO: 6136 - protein, 38 aa, Bacillus licheniformis
MKKLFIVAAIAAVVCSGWFAAETHWASGDMQVAEKMVG

SEQ ID NO: 6137 - protein, 39 aa, Bacillus licheniformis
MGFSLKSKTLKKEILILNKRVILHKYLVLPSGSQKSLNV

SEQ ID NO: 6138 - protein, 39 aa, Bacillus licheniformis
VIGAFVGYLKSNGSIQMPLLMIDYKRKWEHKNVSHFKNH

SEQ ID NO: 6139 - protein, 175 aa, Bacillus licheniformis
VITLTATTLIISGFSGFASSVSAAEQEQSTTSITETTDVTLPASLQEYMETHQEPTTLEDSKAFIQFASQTPEFQTYNQLNQDGQVHTAGLIGGSLKAIKAFGWVCRVGGKTLKWAIRPLSPSKARLVDKYARKIAYATERLNSASKGALVKALVKAGVPKKTADSLAEIILWLV

SEQ ID NO: 6140 - protein, 164 aa, Bacillus licheniformis
MGEKTKEKNYSIGDHIFAILVVLLMCLFLISSPFLIFFGVFKLVALAPDVSINTKGTFDSVIVLFKFFVLTVVVVGIVDVVFSQILLKKRGFLNFVIEALLMFCVFYLYVLIYSMHSQEIVIRNNGVFLVSLFLFILYLLINVAYIVSRRLYKATMKNIQKKNN

SEQ ID NO: 6141 - protein, 51 aa, Bacillus licheniformis
LNKTITESKVPFVLIDTSGAKATNLKTPKNIRKGEEIRNKHIRRTTNIAKI

SEQ ID NO: 6142 - protein, 345 aa, Bacillus licheniformis
MATIKEIALQAKVSSTTVSRVLNHDQSLSVAPETRQRILDIAARLGYKSTRRRREVYASGSGESPRIGIVVCQSQEEELNDPYFYSIRQGIESECFERGAFITKFIQLSSIRSNQPVGDVDGLIVIGRINFAGLQQCMGALNNVVYINHTDNEELRDSVVVDFEKATGRALNHLKSLGYTRIGYIGGREKEHFRISDQETSAIEIEDKRLTAFLEMAGSDNAKHIYISEYSMQQGYELMKKALLEKNVPEAFFIASDSMAIGALRALRESGLKVPEDVAIVSFNGIEASEFANPPLTTIKVHTEEMGRTGVKLLLDRLKGRELPLKVTVPSELIIRESCGFSKRS

SEQ ID NO: 6143 - protein, 417 aa, Bacillus licheniformis
MKKIIFSFVLLIILSAILAGCSGKNAGKSGDVTLTMFSTMTNDSEKNTLRSIADDFEKENEGIKIDISFPGPDYENMLRVKMAANDMPDLFDTHGWAKIRYGEYTADLKDMDWVKHLDPNLDPILKDEKGKVYAYPFNQAKDGIVYNAGFLKKYGLKPPQTLDELMHALETIKEKSNGSVIPFWFAGSDKGALAQFYDQLATPLLITDDRRNEKKALENGTFDWSDYTLLAETFKEMQEKQLINKDILTAKPSQLVELMAQEKIGFTLSVTSIGPDTREVNPDIQLGVMPTPAVYEGDKPSWIGGERHTVAVWKDSEHLEEAKRFIEFAAQPKYVKKIAEATSFPQALTNTEAENYYSKFYDQYEEIKIEPYFDRVYLPSGMWDVMGTTGQELLAGTLTPKQVSEKMKQEYSRLQEQ

SEQ ID NO: 6144 - protein, 305 aa, Bacillus licheniformis
MSELAKEKSLTIVKRRYVRKNGSLWWMYLPALALVSVFMIYPFASGIKITFTNWNGFSQSYDWIGFAQYKRMLADPATWLVVKNTLLYGLGSTVFQNVIGLLYALLLFKSIKMKALTRTVVYLPVIISPLIMGYIWYFFFSYEGGALNDLLKLFGAGPVNALSSPEINPWIIVFVNSYQFVGIAMVIYLAGLGSVPKDFYEAAQIDGASGFQQFWKITLPLLMPSVTINMVINIIGGLKLFDVILALTGGGPGNASQSMSTFMYDLYFKRQDAGYAAAQGVFMSVLILLISFTALIYFKRKEVEA

SEQ ID NO: 6145 - protein, 276 aa, Bacillus licheniformis
MNRQEKKKRALWTLLAAWITVFHLIPFYILLTTALKAKGDFSSKWKFPDEISLGNFAEAWDKAGLAGSFFNTAVITFASAALLIVIGSLAAYPLARRRTKLNQAVYFLFIGIMIIPPLTSMVPLYKMVVELGMLNTLEIAILNNTAAYMPLTIFLYAGFIRSTIPKELEEAARIDGASTAGIFFRIVFPLLKPVTATICIIACVFIWNDYQFSIFFLQDKSVQTLTVAIAGFFGQNANNLHLVAAASLMAMLPMTILFLFLQKYFIKGLSAGALKG

SEQ ID NO: 6146 - protein, 432 aa, Bacillus licheniformis
MTKIAFIGAGSTIFAKNVLGDCLMVPAVNGFEFALYDIDPKRLKESKDMLEHLKNRYNDTVSIRAYDDRKEALAGAKYVINAIQVGGYKPGTVIDFEIPKKYGLKQTIADTVGIGGIFRALRTIPVLLDMAKDIESAAPDAWLLNYTNPMASLTGALLRYTDVKTVGLCHSVQVCTKDLFKSLGMKHERIEEKIAGINHMAWLLEVKQDGRDLYPEIKKRAKEKQKTKHGDMVRFELMDKFGYYVTESSEHNAEYHPYFIKSRYPELIEELNIPIDEYLRRCEKQIQNWEKMRGEIVGNRHLTHERSNEYGSRIIEAMETGQPFTFGGNVLNKGLITNLPEKAVVEVTCVAERNRITPCYAGELPEQLAALNRTNINTQLLTIEAATTKRKEHIYHAALLDPHTAAELSMDDIVSMCDELIEAHGDWLPEFE

SEQ ID NO: 6147 - protein, 384 aa, Bacillus licheniformis
LREKRDFLRDILLILISSFGGFLLSLTGMTIGWMVGTMTAAACLSLFRPSPLKAAVRQNGIHHGWLQFGQMLLGIELGQKINMSVISIFKENWLIVGVMLLLSVVFAMLSGFVLWRFSKTDMLTSFVGTAPGGLSAMPGIAQEVGANTAIVSLVQMIRVLLVVMTIPFFVFFINAKHPDAHAAGSQVMAAGTSAFEAPHIAWTALIVLGGFGVCKAMKALRFPAPWLLGSMTGAAVLQIAGASMTGLSTTAWWPHGFSVLSQICLGATIGSKISKDMFIGVRKTLIVALASSVGLIIAMILSAAVTAKAAGISLTTAILAFAPGGIAEMATTSVTLHADSTFVVAVQVLRVVLVIAMLPPFFRLLHQKSEKYTHPRVKKARVEG

SEQ ID NO: 6148 - protein, 77 aa, Bacillus licheniformis
MKHPKESFTKVKSYRPFHSAFDPCPPIGKRYYRTPPNLYLGFQPRGLPQFSPMEALQKGTLWPVFYDHYENPYEDGR

SEQ ID NO: 6149 - protein, 87 aa, Bacillus licheniformis
VTNSLPQDYYKRLHEIQAVDFVIVELMLYLDTHPDDTDAIKQYNQYAGFSRKLKAKFESKYGPLIQGSPDQTESYWSWKRSPWPWQV

SEQ ID NO: 6150 - protein, 189 aa, Bacillus licheniformis
MWLYEKKLQYPVRVRECNPRLAKFLIEQYGGADGELAAALRYLNQRYSIPDKVVGLLTDIGTEEFAHLEMIATMVYKLTKDATPEQMKEAGLGDHYADHDKALFYHNAAGVPFTATYIQAKGDPIADLYEDIAAEEKARATYQWLIDMSDDPDLNDGLAFLREREIVHSQRFREAVEILKEERDRKKVF

SEQ ID NO: 6151 - protein, 539 aa, Bacillus licheniformis
MVTLKKQTIGGLLKSTAGRFPNHEAVVYSELDLRYSYQELVEETSKIAKGLLALGIQKGEHVAIWASNIPEWILLQFATARIGAVLVTVNTSYQARELEYLLEHSDSTTLFLMDGYKGTSYINMIDEIMKNPEKLPKLKNLVYLGKNETPEHMTAFAEIAKMGETVSDADLFEREQSLTHDDVINMQYTSGTTGFPKGVMLTHYNIVNNAAIVADRMGLTSEDRLCIPVPLFHCFGCVLSTLACVASGAAMLPIIEFKPDIVLQTVEKERCTGLQGVPTMFIAELTHPDFANYDLSSLRTGIMAGSPCPREVMKKVMKQMNMTDITIAYGQTESSPVITQTTVTDTIERRVETVGKVHPHVEMKIVDPDTGETLGPDEQGELCTRGYLVMKGYYKMDEATKKAIDEDGWLHTGDLAEMDRDGYVRITGRLKDMIVRGGENIYPREIEEFLYEHEDIVDVQVVGVPDEKYGEKTAAFIKCRPGKKLTLEDVRDFCKGQLSYYKIPEYVFLIDEYPLTASGKVQKYVLRDRAAELLASPVQ

SEQ ID NO: 6152 - protein, 403 aa, Bacillus licheniformis
MNRLKQRYGSPVLICFFGEFLTGITGAMLAPFLLFYLYDVLGTGILPVMLVIGARPLTEVAVTLVAGGLTDRIGRRKVILTALAFQTVSAAGFMMADHIWLFALFYVLNGIGGALYIPAQRAQITDSTESGRRSEAFAVLHAIEGLGAAVGPAAGLAVYSYQPSLMFGFQACAFFLYWLVVYFKMPEVWRSKRQKEILEREKLLSAKKVFFQHRPVLSLMFLSVPVSLFYAQLESNYRLYLETLFEDFLFILTVYTVCRALLSITMQIPLVKWTEGLNIQTVVSISYVCYAVAAIGFAFSSSIFWLLSTAVLFTAAESMLLNHMQTFVSRLAPDHMRGRYFAFFGLHWDISRTIGPFLGGMMFIKFGGAALFLAIAGIMALGGIAQYRAVSRLKKLVLYSTWY

SEQ ID NO: 6153 - protein, 587 aa, Bacillus licheniformis
MKSIEHYMELTAGIKCESEGEAEEISVSEIADILYCTPRNAKLILAKLEGLQWIAWKRGRGRGNKSEIRFLKEPCELLLETAKNDTKEGKIDRARHLLEAYQHSCPDALPSYKEWLERVFGFQTESEGSKQKDVLRLMTAMEPEHFKRLDPCRIYLRSESHVVKQVCDTLIRFNEKEGGFMPHLAHHWECDADQKTWTFYLRKGIYFHDGTTLTAEDVKYSFERFMLDDENKCKWLVEDIGNVAVRDKYSFDICLKAKNSLFLHHLCDERLSILNRHQNDGLLIGTGPFRLVRRDDRILGLEAHERYFQGRAFLDRIELWYMDGNFSLVDYGFYMEKEEQSQVFDEWHEERNVQYISVNANKSGPLKHKAFRKALRQSISPSHMVSELAGQRTAPAGGFLNRDLPPESGDDDIGKLLMEGHYKGDPLRLYTFSEPDHREDASWIQKRCRRYGIALEVCYMKADELMKEEVIAKADLIHDSATFGRSEEMSWLHLLLTENSFLHVHMPGEWQRKSALMRDQLRFIDEHSKRISLLCEADRALAEEVYTIPLYQNNIRVKAGEAIQGIVLNEEGWIDFYGIWYKKEALL

SEQ ID NO: 6154 - protein, 413 aa, Bacillus licheniformis
MKLRFGLLFVMLVFALPLAACQNSGSGNTGGHEEHHTKDHSEMKEKDADSLPSDFNKRAEEGLLVKNTKNSTRLDANTPEDMSIKTSQTIWPATHKQNRPGAVILVSGGSWQTALASADLIHHPNNGPVLIAEKGKISGQIQNEIKRLNPTGTSDGTQIMAVGEFDSKALQALNTFKIKELKGKNAADLAKEIDKEYAEAAGEYPKSVIIGSSEDDAELYSLPAVNWIAHMPEPILYVNKKGIPEETAEALKKRDAKANIYILGPKKAVSEKTENALKEYGTVKRISGDTPVANSIAFAKFRDKNTGFGWGITDPGHGLSFASTAAPELALAGAPFSHLGKHAPLLLLKNGQADSTLYSYLSEIEPSFHDRPQDGPYNHAFILGSENEISFRTQGILDGILEIKSADGGHSGH

SEQ ID NO: 6155 - protein, 455 aa, Bacillus licheniformis
MKKISFELAGSFFVLILFIEAVLFAALYTTIVNTRINEEISALQLRGNSHRDVLEKHFDKRTIDHVTLMETEARTNVIITDQNRRVLAQSAPGDMTEHLHFEEQNIPRNGTALSSHWNTSKYICTISPIMNGRETAGYVFMYLETSSIKALVASITKRFFLSFGLTGVLTVAAILWFSRVLAKPIIKLKEATESIKNGQASIPLDIKRNDELGELAASIESLSSNLSRLQKERNDFLSSVAHELRTPITYIKGYTDVAMRDKLEPQARNQYLSIIKEEADNLNTLVDDLFLLTKLKQPGFQINKKQVHLYTFVKKEIQKAAVAFSEKRISVSFDIPTDLYVTVDEVRFSQVISNLLNNARQYSDPESTAAVTASKLEDQVKITVADEGCGIPEEERDYIFERFYRIDKSRSRQTGGTGLGLAIVKEIVELHGGQIAAKNRTPKGSEFIITLPSDV

SEQ ID NO: 6156 - protein, 224 aa, Bacillus licheniformis
LNVLLVDDENRMLDLLELYLEHYSCTKAATGKEALDLIKMRNFDLVILDIMMPEMDGWTVCKEIRRLTSIPVIMLTAKNGQDDIVRGLNCGADDYLTKPFSEKVLLAKIEAVLRRTRRFHEIRFRGLIWNKQHHTLHVNHREISITPSEFDLLGTLLDHMDQVLSRDQLIENIWGFNSDIEPRTIDSHMRNLRHRLKKAGFPVEDHLRTVYGVGYKWTSKGTGA

SEQ ID NO: 6157 - protein, 129 aa, Bacillus licheniformis
MWYVQPYHPAYPARQNNRLIKDLEKAVNGEHSAVVCYQKIAQKAPDAEAKQQILEIRQDEIRHFNAFLAFYTSLAGRKPDISITEPCPEQYWNALESALKDEQETVDFYLDIADCQRPGDTGCVQAGGS

SEQ ID NO: 6158 - protein, 264 aa, Bacillus licheniformis
LKKAILTVIAVLTSVVLFAGCQAEKGGSAKGQSEKVQITVSAAASLKDVLTELSSVYEKDHPNVSIKFNFGSSGALQQQIEQGAPADLFFSAAEDKFNRVVDQGLIDKKDSVKLVENSLVLIVPKGKSQHVNSFKDLADDKVEKIAIGKPESVPAGKYAKETLTNLDVWSKVQSKVVYSKDVRQVLSYIETGNADAGIVYRTDALSSDQVETVETAKSDLHTPIVYPLGIVKNTKHREQSEEFYQFLQSDQAVKAMEKYGFKKG

SEQ ID NO: 6159 - protein, 218 aa, Bacillus licheniformis
MLEEFLSPIEISIQVSAAAGIIAVLLGTAAARLLANRNFKGKSIIETVMMLPLVLPPTVVGFFLIVIFGRQSVIGRLIENVFQAPVIFTWWAAVIAAAVVAFPLMYQSAKSGFLAVDRDIEDAARVDGANEWRVFLFVTVPLASNGIMTGIVLSFARALGEFGATLMFAGIIPGVTQTVPTAIYLAIDSGNMTLAWMWVASIAIISFLMLFFVQFKQK

SEQ ID NO: 6160 - protein, 1166 aa, Bacillus licheniformis
VGAVFLSGRSGSGKTTFILNEIREKLRDEPLGKPIIFLVPDQMTFLMEYELSKTPDLGGTIRAQVYSFSRLAWRVLQHTGGMNRPFLTGTGIQMLLRRLIEEHKGEFKVYQNASDKSGFTEQVERMLTEFKRHCLPPQSIRDMMEGTGKSEYEDERILSDKLHDLYILYSKLEENLENQYVQSEDYLTLLAEQIPYAEEIRNAAVYVDGFHQFTPQEMSVLEQLMVHAEEITFSLTADKPFTANSPNDLHLFRMTGKAYYDLYQKAKELGLDPSEVRLEETKRHRHHPELQHLERYFDERPAKPYPGQTESLRIMQASNRRTEIEGIAREIHSLIRQGRFRLRDIAVIARNVEDYKDTIKEVFKDCELPFFIDGKESMQNHPLIELIRSTLDIIKGNWRYEAVFRCVKTELLFPEGQPKERLREQIDQLENYCIAYGIKGDRWTSKDPFVYRRYASLDEDFAKTDKEIETENMLNELKGWIVPPIHRLQKRLKKAETVREMAEAVYLYLEEADVPMKLEQERRLAEEGGRIAESRQHEQVWDAVIQLLDEFVEMMGTERISFALFQQMIETGLESLKFALIPPALDQVFIGNMDLSRMYGTKCTFLIGVNDGILPARPADDGVLSDEDREWLKRNGAQLAATGREQLLDENFLIYMTLSSPSEKLYVSYPIADSEGKTLLPSTVVKRLNELFPDSEEKMLIHEPEQLDDEAQLEFLVNKGIALSHLAGQLGIWTRQYAISDVWWSTYNFLMNEPDRIFSQNILSSLFFRNKVENLNRHVSRDLYGEHIQGSVSRMETFKACPFSHFASHGLKLKERQFFKLEAPDIGQLFHSALKLISDRLHELKLDWRDLTKAQCETLSSDAVERLAPKLQKEILLSSNRHHYVKQKLQKIIARVSGILSEHAKASGFAPVGIELGFGGKGPLPPMRFTLKNGCTMELVGRIDRVDKAESSKGLLLRIVDYKSSDKGLDLAEVYYGLALQMLTYLDLSITHSTDWLGMKASPAGVLYFHVHDPMIQASVPLGLDEIEKEIFKKFKMKGLLLGDQEAVKLMDTTLEQGRSNIISAGLKKDGSLRSDSDVVAEEDFHVLRRHIRRTFQQAGEEITDGKVSIEPYKLKDRTPCTYCSYRSFCQFDESLEENEYRILKPEKDSVILERLKKEDEADGDF

SEQ ID NO: 6161 - protein, 1230 aa, Bacillus licheniformis
MEISKPKGSTWTDDQWKAIVSSGRDILVAAAAGSGKTAVLVERIIRKITDQERPVDVDRLLVVTFTNASAAEMKHRIGEALEKELAENPGSLHLRRQLALLNKASISTLHSFCLQVIRKYYYLIDVDPAFRIADQTEGELLGDEVLDELFEEEYKKGNPAFFELVDRYTTDRHDLDLQHLVKRVYEFSRSHPDPEGWLHSLAELYDAASDTKVEALPFYSYIKEDIALVLEGMRQKLTRALDLTKQPGGPAPRAENFLDDLAQIDRLIQQQDDFSALHELVPTVSFQRLKPCKGDEYDPRLVDEAADLRNSAKKQLEKLKSDYFSRTPEQHLESLREMKPVIQTLVQLVLEYGRRFAEAKKEKAIVDFSDLEHDCLAILSVKNPAGEAVPSEAAKFYRHQFHEVLVDEYQDTNLVQEAILKLVAKEEHEGNLFMVGDVKQSIYRFRLAEPLLFLSKYKRFTDDGSGSGQKIDLNKNFRSRSDILDSTNFLFKQLMGEKVGEVEYDEQAELKLGASYPPNEATKTELLLIETPSGAPGEEAEELEAVQLEARAMAGQIRRLITEKFQVYDAKAKASRNIQYRDIVVLLRSMPWAPQIMDEFKQQGIPVYANLSTGYFEATEVSVTLSLLKIIDNAYQDIPLASVLRSPVVGLDENELSLIRIKDKKAPFYEAMKAYLAAADGDERLSEKLRRFDGLLKKWRAYAKNHSVAELIWEIYRDTKYLDYVGGMPGGKQRQANLRALYDRARSYEATSFRGLFRFLRFIERMQERGDDLGTARALSEQEDVVRLMTIHSSKGLEFPVVFTAGLGRNFNMMDLNKSYLLDKELGFGTKFIHPKWRISYPTLPLIAMKKKLRRELLSEELRVLYVALTRAKEKLYLVGTAKDKEKLLADWRTQAAGSEWLLPDYERFQAKSYLDFIGPALMRHRDMDESGAPPVIDEIREHPARFQVSWLSAADLQAEAVDQAGEERHDRLVQIQMGHAIEGAFEYEQQVRERLAWSYPYKDAAKVRTKQSVSEMKRQKEYEDEYGDRSLIRPSQEALLFKRPSFMMAKGLTAAERGTAMHTVMQHIPLTRTPEKNELSRLLDRLVEKELLTEDQRAAIEEDDILAFFDTEIGQKLFGARRVEREVPFNMTLSAKEVYPDLESADEPVLIQGIIDCLFETEDGFYLLDYKTDRIHGKYRNGFEGAEPILRKRYETQIQLYARAVETMIKMPLKGRALYFFDGGHVLLF

SEQ ID NO: 6162 - protein, 393 aa, Bacillus licheniformis
MRILHTADWHLGKTLEGRSRLKEQEDFLEELARIVKDEKIDAVIMAGDAFDTVNPPALAEQLFYESLSALSDKGNRPVVVIAGNHDNPDRLSAASPLTTDHGIHLIGYPRTAPVDIEVASSGEILSVAALAYPSESRLNEVLSETFDEKLLRDQYDEKIKQTFQRMCSKARKDAVQIAASHIYVAGGSQTDSERPIEVGGAYTVAAESLPENAAYVALGHLHRPQTIKRARTLARYSGSPLAYSFSEAGYAKSVTIVEAAPGQTASWEEVHLTSGKPLVKWKAEKGMSQVYSWLEEERDKNAWIDLEIHLTDQLSIEEIHRLRKARQGIIHIRPVFEEAASAEEKTRSRNVPIEERFKAFYERQTGGAVPDEETVKLFLELASGSEQEEGDET

SEQ ID NO: 6163 - protein, 1130 aa, Bacillus licheniformis
MKPISLSIKGLHSFRQEQVIDFERLCDAGVFGIFGPTGSGKSSILDAMTLALYGKVERAANNTHGILNHAEDELAVSFTFKLQTGHETAYKVERVFKRTDAVKVKTSICRFIEMKEEQIVLADKANEVNRKIEELLGLTIDDFTRAVVLPQGKFAEFLSLKGAERRQMLQRLFNLEQYGDRLVKKLKKQAQTAQSRKNEMLAEQAGLGDAGEEALKLAEQHLEEAETLLQSKRRERDAEAQRFAEYQEIWNLQQEKESYLKKEAELLKKKEQIREKESRLHLAETANTLKPYADAFLAAREDAERALREEKQAREQLEQYEELHKKTECEYENFRRHKNEKEPELLKQEEQLTALKEIENKRLAAQAEAEKKQREQRLKEEEIKHAADELAKVKSLLERGTAKQNQLKAELKSVQVSSEERKNCRKANQLAFHIQQLNSDAALEKKRLDQQEALIKELRQEQQAVDQKVKDETERIQALFAAVERAYALVCETDRSLSETVRLATQKKEEIVAKRKQANRDQLAIELAKQLKEGEPCPVCGSVHHEMPAGDGTESPSFKETESELEKTEAIIAEAGALAQEFLSAKVALEQQSGHLMSECPFLVKSKHELPETAASLEEGTIPERFSRISFEWKGIRQDLAETKSRMSKLLHTYKELCKKRDQISERLSHEEKEQNRLQNRVRELNDELNERQKSFGEQFGGLSYEQAEKWQKTIEEKDLAAEEFEKRIETSVEFLTEHEQQKEKLTERLFALDKEKLDLHYAVESLKKDINDYQKELTGYPDTAAIDEKLQDVKTQLAKLHEQEQTLYGRLKETESEVSRLRGQTKGCELALREAEARLAKAADIWQEKAGGTPFEKASEVKASILDRDELSRLKEDIQLYWDHTKQCESNIKRITEKLDGRSVSEENWEKAAVTKDQAEEAFSKALEERGAAGKALAVIRENHKRFKELEASLAEWQTYIDRLDKLQAVFKGNSFVEYLAEEQLESVTRDASARLGELTRQRYAIEVDSEGGFVMRDDANGGVKRPVTSLSGGETFLTSLALALALSAQIQLRGEYPLQFFFLDEGFGTLDQDLLDTVVTALEKLQSDNLSVGVISHVQELRARLPKKLIVHPAEPSGKGTAVSLEMI

SEQ ID NO: 6164 - protein, 72 aa, Bacillus licheniformis
MPAIVGPIKINEISGGVVNFGDSFYLSPKSSSKSALGSGAGNTGDFFIVNNGINATNYIDPDVSDQNVVGNA

SEQ ID NO: 6165 - protein, 128 aa, Bacillus licheniformis
MILRTSKVKFLKVHSVGISSTLQIGDTEEQFLKSKVLAVQRYLSLFYGNEGSFKQDDFQLFRQPIPQLLPETGVCSAFFHEIPFIRVRAIKINGVSSSSVAQVGSTRRINADSRVKHIRKLPPARNSQ

SEQ ID NO: 6166 - protein, 59 aa, Bacillus licheniformis
MNFTVVNRCFDVGNIVITGVSTSSVFLVGDTDCISLSSIFDTPPESLIVGPFVPLAPES

SEQ ID NO: 6167 - protein, 30 aa, Bacillus licheniformis
VITILPTSKQRFTTVKFIRFHFLSFRQVLI

SEQ ID NO: 6168 - protein, 198 aa, Bacillus licheniformis
MKQSNPQNWYVYLQQQAAQIQRLESQIAVLHSELNQLKENPGTRIEYKFDQLKIERLDGTLNIGLNPADPDNVENFEISQQPPGIGMLQQELDSQLMQQTRQLVDAYLNEETPRLLEQLEDRYDSKLDDTNRHHIIEDIRKQIDSRIRYYVKHVKPDGNIQPREHAERLADYVKRDIARAIEHFLKSIPDEMKGNENE

SEQ ID NO: 6169 - protein, 80 aa, Bacillus licheniformis
MNFYINQTIQINYLRVEGISNSSVLQIGSAGSIKTLAHLYNTGSYTEPAPPVTGEVFDDAFGDGTQPTLVPLHAPSVTVP

SEQ ID NO: 6170 - protein, 73 aa, Bacillus licheniformis
MPAIVGAFKVNAVGTSGVVHVGDCITISPYAEVKTFAGAGSFNTGDGLRVYNQNSITNTYDNDVIDQPVAGNL

SEQ ID NO: 6171 - protein, 97 aa, Bacillus licheniformis
MYFQLNPISIAAALLFFAAAYAVGIKKQTWILRGFRRERVRDQDKLAKIAGYFFLNSGFLLFLNGVVYIPYQESFTPSAILAYGICTMIYVQKTMAE

SEQ ID NO: 6172 - protein, 59 aa, Bacillus licheniformis
MNNKIEAKRLALFEAAEKFGINSKEAIRCSQELDNLLNQRMQKDDNCVHAEERKGRHTS

SEQ ID NO: 6173 - protein, 357 aa, Bacillus licheniformis
MSATALPAFRLHIHPKHLLELKKDVWSDEAVPGMLLTGSAKTPVAVSYRGAHTRKLTKKSYFIQYPDNKEKAAFHLNAEYHDPSFIRNRLSFHFFEQIGVLAPAASHVFLYINEKKEGIYLKIESVDDHFLKRRNLERGAIYYAVDDDANFSLLSSFNKKAKQNLMQGYERKTGSSRHDDYLQEFIYFINTAKDDIFEKEIKRYLDVKQYLLWLIGAVYTQNIDGFVHNYALYLNGRTKTFQIIPWDYDATWGRNIHGEEMEHNRIPAKGYNTLSARLLDIPAFQSQYFNLMKNVLHRQFTISRLSRYAVNWHETIAPFLEHDPYTTVTYSRLEDEQKQIFHFIDQRKRFLLFELSR

SEQ ID NO: 6174 - protein, 168 aa, Bacillus licheniformis
MSGVHDHDIKKAVDQLKSEGRDHYLDREPEEYAGSGKERRPHNIWDLWWGIKPDRSKKHHKSKKHDDYEKPDKSKKPDKSKKPDDCKKPDKSKKPDDCKKPDKSKKPDDCKKPDKSKKHHDCKKRDKCGRKRPDHHRCKKTHHHKRGGYETITKWSDGNLTEVIYRKK

SEQ ID NO: 6175 - protein, 301 aa, Bacillus licheniformis
MKFATAKLHSRTFVGLVMDEKIMDLQKAEKKLFELETIPETLIECVSEGEKFVRHVEQLVEWSKKKNSEESGSYIYPLSDVDLLAPIPEPRKNVICIGKNYRDHAIEMGSEADIPEHIMVFTKAPTSVIGHMEGIDAHEGVTEALDYEGELAVVIGKTGKNIPKAEALDYVFGYTIINDVTARDLQKRHKQFFIGKSLDATCPMGPFLVHKSMIEDPGDLKVETRVNGELRQSGSTKDMIFPIAEMIETLSKGMTLEAGDIIATGTPSGVGKGFNPPKFLRKGDQVDITIEPIGTLSNPVK

SEQ ID NO: 6176 - protein, 350 aa, Bacillus licheniformis
LNLSALGIKYIMEALKDEEGLVLGRIALEHKRLYRVWTEEGEWLAEISGRLRFEVESRGDYPAVGDWVYMRPRGGEKKGIITEVVPRFSKFSRKAAGEPAEEQITAANVNTIFLVNALGLDFNVRRIERYLLLAWESGANPVIVLSKADIADRIEEKVRQAESVAFGVPIHVISAHEGSGMDELKAYVKQGETVALLGSSGVGKSTIINFFLKEDRQAVQSVREDDDKGRHTTTHREMFMLPEGGLLIDTPGMRALELWESEEGFKQSFSDIDQLAQNCRFSDCLHQTEPVCSVREALADGRLDAGRFQSYLKLKKELEYLERKTDKRAMQQEKKRWKQITKSMKKNKNK

SEQ ID NO: 6177 - protein, 47 aa, Bacillus licheniformis
VETDNEKHEKEQKQINEKGADKWLQRLFAAEMTAFTLFCLMDRFMIR

SEQ ID NO: 6178 - protein, 117 aa, Bacillus licheniformis
MTHMHITSWVIALILVFVAYGLYSSGNSKGAKITHMILRLFYIIVIITGAQLLKFTAWNGEYIAKALLGLITIGFMEMLLIRRKNGKAATGIWIGFIVVLLLTVVLGLRLPLGFKVF

SEQ ID NO: 6179 - protein, 188 aa, Bacillus licheniformis
MDTERQKRLYAEKRKWIYGKILMEDGICLIENEEGDLLLVESLNSPGVFISIDGEWQKAELFDQFAVTEKPETVKLTGGEPIRYLKTVKQAFLEFLNDLEDGQFYSFLDQLNSLGFSVFDCVFAYNGLSFWPEKKDVKGVSFYQFSHDMKQCALQHHYERKEEWKDRFEWTASDGERIVMISTFKPPT

SEQ ID NO: 6180 - protein, 613 aa, Bacillus licheniformis
MCGITGWVDFKKPLVREQSIMEKMTDTLSKRGPDDTNIWGKRHVLFGHKRLAVVDLEGGRQPMTRTHQGYDYTICYNGELYNTEDLRKELRRRGHQFKSHSDTEVLLHSYMEWKEECIDRLNGIFAFAVWDEKRDLLFAARDRLGVKPFFYTEQGSSFLFGSEIKAILAHPEVKAKVDRSGLAEIFGLGPSRSPGSGVFKGVKEIRPGHAMIFSKDGLTVWRYWNVKSEKHTDSFDETVENVRSLFQDAVTRQLVSDVPVCTFLSGGVDSSAITATAAKHFEREGKAPLHTFSIDYEDNEQYFTSSSFQPNADGPWIKKMSDAFGTVHHNCVISQEELAAYLEEAVLVRDLPGMADVDSSLLWFCREIKKDFVVSLSGECADEIFGGYPWFHSAEDVKGFPWMRSMEERIGLLQDGWQKKLNLSEYVKAKYEETVKETPLLEGETGAEKRRRELFYLNMLWFMTTLLDRKDRMSMGASLEVRVPFADHRLVEYVWNIPWDVKMHGSREKGIFRKALEGILPDEVLYRKKSPYPKTHHPAYTKAVIRWLESLLEQKDSALYAFLEKKKLERLIETEGASFQVPWYGQLMKGPQLIAHLAQIHTWFESYRIDIEE

SEQ ID NO: 6181 - protein, 459 aa, Bacillus licheniformis
MKTKVSAVLLLSFFFTASALAAEPTVQSVNDSVNMTWVAIGTLLVFFMHAGFAMVESGFTRAKNTLNILMKNFLTISIGSILYFFAGYAFMFGDSAGGFIGTSGFALAGDQDVGFFVFQAVFAATCATIISGAVAERMKLGSYMILTLFMTGLIYPVVGHWTWGEGWLYDLGFVDFAGSSIVHLTGAAGAVAAVMFLGPRIGKYTNGKVNAIPGHSIPLGALGVFILWFGWFGFNGGSTLAADPAAVPHVITTTLLAASGGVVSSALFTYFRYGRIDPSLTLNGALGGLVGITAGADGVSFTGSILIGFIAGVILVVGVQFIDQVLKLDDPVGAIAVHGICGVWGTLAVGLFNTSSGLFYGGGAAQLGIQAVGILSIAAWTLAATSAVAAAMKALAPIRVSKEEEISGLDYAEHGSSAYEYKESYIDQDDVDVSSAFGTDLVSRLNNLKPGPSSKTEQV

SEQ ID NO: 6182 - protein, 113 aa, Bacillus licheniformis
VKKIETIIRPEQFPRLRKKLEEVGINGLTVSEVAGCGQQRGKQALFRGTSYEIKLLPKVKVEMVIESESVDEIIKIIESTCSTNTVGDGKIFVLPIENAIRIRTGESGKEAIV

SEQ ID NO: 6183 - protein, 446 aa, Bacillus licheniformis
MKKTAPQNLSLFALTWPIFIEVSLYMLMGNADTLMLSQYSDDSVAAVGVSNQMLNLIIVMFGFIATGTTVIISQFLGSRQKAEAMEVGYVSISANFIISLFISAAIYIFAKPLLLMMGLSANLLAEAGIFLQIVGGLSFVQALIMTFSAILKSYGYTKDTMVVTIGMNILNIAGNYLVIFGPFGFPVLGVAGVAMSTSIARIIGLLAIALLVKKRVGMPLLSKRLFVLKKSHLKKLLKIGIPSAGEQLSYNASQMIVTYFITLMGAQALTTKVYTQNLMMFIMLFGTAISQGTQILIGRHIGAKQFDEAYSRCLKSLWWALAITTFTSVLFAVFSKQLIGIFSSNPDIIATASILILLTIILEPGRSFNVVIINSLRAAGDAKYPVYMAIVSMWGIGLPIAYIFGIQLGFGLAGIWFSFIADEWVRGILMYRRWRSKMWLQKGFAA

SEQ ID NO: 6184 - protein, 287 aa, Bacillus licheniformis
MEHIIFTIPPLPVLITGGEGLFKRGEKHVRREYSVFDLLYVIQGELFLTEDGEPHQIREGEYIILIPGLEHYGHRGCQDDTRYFWLHFQEPSYGFAQQGGENWTELKLRKGTFETPTLYHLKIPRKGKIDQKAFIEQQFRRLIDDSSQNSDLSLRRQLLFEELLIHLQKEAFHIPSASERVASEAQHYIDRHYKEKLSMEQLSAALHYHQDYITRCMQKVFGITPGQYANKAKVFEAKRLLSSTNDKMSSIAEQVGIDDPTYFSKLFKQIEGISPVEYRKMMKRNIE

SEQ ID NO: 6185 - protein, 129 aa, Bacillus licheniformis
LASINGEKVKLRTITMDDLPGLWRMIYGTKNPEWKKWDAPYFPLQPEPFQYFIDSFVPALKEKPPRYLAIEIGGELKGTVSYYWESRPTRWLECGIGIYDPRFWNGGYGTEAVELWIGFLFENVDVPRI

SEQ ID NO: 6186 - protein, 347 aa, Bacillus licheniformis
MKKTIYDVAEAAGVSISTVSRVINNTGRISRSTRQRVHAVMKELDYQPNVHASALTGKRTNIIGLLTPDIANPFFGELAKSVEERAGELGFSIMMCSTDRDPKKETTYFSVFKQKSVDGIIFATGIENQETMDALEDIAKEGIPLVMISQDRALVPMDVVVIDDFMGGYLATRHLISLGHKTIACIAGDGSTTGEKDRLKGFKKAMDEAGIKADETLIAGSGFSLECGKKAAAQIFKSNIPTAVFAMNDVLACGVIQTAREWGLHVPTDLSVIGFDNTFLAEMTDPPLTTVSQPIEEMGRRAAELLAEEISGKKSSKSKIILTPELVVRQSTAPPFKKEAHAEKSGF

SEQ ID NO: 6187 - protein, 342 aa, Bacillus licheniformis
MTEVVRCAVLGLGRLGYYHAKNLKTEVPGVLLAAVADPAEGSAREVAAELGVEKWLKTRLSASANPEIDAVVIVTPTSTHAEMIKQAAEFGKQIFVEKPLTLNLEESIEVISKVKEMGVICQVGFMRRFDPAYADAKRRIDAGEIGKPIYYKGFTRDFGSPPAEFIKKSGGIFVDCSIHDYDIARYLMGAEITAVSGHGRVLKHAFMPGCHDVDQALTYMEFDSGAAGDAEASRNSSYGHDIRAEIIGTDGSIFIGMLRNPAVTVRTGKGSSYNIIPDFQARFHEAYCLELQHFADCVRIKTKPLVSEVDAAVNLEIALAATQSWSTGRPVKIQYQTKKLTV

SEQ ID NO: 6188 - protein, 362 aa, Bacillus licheniformis
MISGKRIKLKCCLVLGIFTAVAGCSPFVENNEIEEISPVTFWYMKEGKKGKISMSTVVPPMGLEKKRLFSTEVDMIKQAGKRFNLNYYNELKNGQLRMVMIEENLADKGILPIINTLLSDPKIGPRLYLIVVKGDFDKYIMSELKQSENFDFYLYQTLRHFERANQGEMSIVNLHQFKNQLYTHFSDPYVPVFRTDGNQFTYEGTGLFRNDKFVKVLTGIDDQIFQLINNNRFLKFLTIPNLSIVIGQARSTVTFDLNQNNTALSMKVSLNAGIEEYTGDKNLQDQSEFNALVHDVESELEKKTADMIKDMQNIRVDPLEVGGEALFPFTKPMSDKAWLKRWENMDVKVDYQLNLRPVVNTQ

SEQ ID NO: 6189 - protein, 215 aa, Bacillus licheniformis
MVFLFIRFYIPPIASLTDLYPLIPFEWTEHSWKALLVMWSSFSSPEYLICLAPWFSKEANVLKCLSVGNAISLFEYLFLFIGALFFYGSSYLRETVFPVMNMLRYLQSPILERIDTFLLSAHMFHFAFVIAIFLLCFYGGLRILFKRVSKPVTRRGFLFSFLLIMGCSLIMSTWFWQSGKEQNMWFLIEVSIGAATYALIPALLVFAGKRKGRIE

SEQ ID NO: 6190 - protein, 48 aa, Bacillus licheniformis
LLNHGARQIKYSGLEKEDHMTSSAFQECSVHSKGISGYKSVKEAIGGI

SEQ ID NO: 6191 - protein, 175 aa, Bacillus licheniformis
LSSFQLFHKTRPLGGIYIALIANRMQVLFFILVLPMYLVHPYMMFVMLGVGMLSQLNLYLLSKWLSSPAAAKGYEGFAALFGERKLRFFILIGLIQLALKIAIMITSYAETVRHFIFPAININWLVIFILVISGYAASRGMENTMRFVIIAFMSSFWMDGVPFYQILYTPDRFLD

SEQ ID NO: 6192 - protein, 489 aa, Bacillus licheniformis
MFRKYKRKGAGLRSAPITRDALLDATAGMADAVIEEHETKGGQKAVIYYLHTIIDRVLLQQSIIRPLITSGEEESIYRCLKTFVLHVEPIVSLESAKEWLMSGSIIIHDPAQQQWFAIPAENRVGRQIEPSQTETVMYGPKDSFTEQLDVNLSLLRRRLPLSNLKAERLTVGSLSKTSVVIVYIAGLTNPELIEEARKKIAETDFDMIFDSAQLTELIEDHHHSIFPQFQQTERPDISAYNLSIGKIAILVDQTPFVLHAPITFFHLFHSAEDYTTRWPVASFFRMLRYASFFLSILLIPLYVALSTHHYHMFPLQILYVLIESRSKVPFSPFWEAVLMLLVIEIIKEASVRMPTKSSSTLGVISGIVIGEAAVQAGFVSKVLIVLVGISTVASFLVPNYIVAKGHTMIHFTMLVFSACLGFFGLTFGMIGLFVHLNGLTSLKQPYFAPITPLYWRDWLDLFIRSPLIWLKKRPEYLHPLQKWRYVKRR

SEQ ID NO: 6193 - protein, 117 aa, Bacillus licheniformis
MNAAIHGIILAFGLILPLGAQNVLIFQQGAASSSIWRVMPLVISASLCDSLLIILAVTGISAAVAGLPEVKFVLLAGGVLFLIYMGWITWRSKPAVGNASEAMPAKKQIAFAAAVSL

SEQ ID NO: 6194 - protein, 490 aa, Bacillus licheniformis
MLSFKKGAEHEVHRQLNRHSDIPLYKQIEQIIKEKILQGEWPAGTKIPSQRKLASMFQVNRSTVTAALDELTAQGLLEGNRGGGTKVANQIWSELTAGPPLDWTSYVRSGIHRPNSMTVQEINRQEFKEGVIRLGTGELAPELLPYQQMEKILRGAASERLMLGYEEPKGNRFTREVLAAHLSRKGVRASADSILIVSGALQALQLISIGLLKRRAVVLTEKPSYLYSLHVFQSMDMRLCGLPMDAGGLDPSVIPAVKKRHGADLLYTIPSFHNPTGKLMSEDRKRELIQISKQLSLPVIEDDAYGDLQLDGPPSSPLKAMDREGSILYVGTLSKTVSPGLRIGWVAGPEPVIERLADIKMQTDYGSSSLSQWAAAKWLSSGLYDENLSPIKVELRQRRDEALRCLETYCRGIARWEKPSGGFYIWVTFLKPLSLSALFEQALQKNILINPGTLYDKEAKYSIRLSYSYASLTELRYGIQTIAELAGKLM

SEQ ID NO: 6195 - protein, 44 aa, Bacillus licheniformis
MEFYGLFLNNLRPEIKSGAAAERRFFSSRYSGVHMSLPASSAIV

SEQ ID NO: 6196 - protein, 448 aa, Bacillus licheniformis
MPVQTSSKNQVFLEQQNRRESNARSYPRRFPLAMQTAEGVLVTDADGKQYYDCLAGAGTLALGHNHPVVIEAIQKMIEEKRPLHTLDITSEIKEEFVNEVFASLPEAFAKRAKIQFCGPTGGDAIEAALKLVKTATGKRTILSFHGAYHGATHGTMALSGNLSPKENVQGLMPDVHFLPYPYEYRCPFGKGGEASHKLSSAYIENMLDDPESGVLQPAGMIFEAVQGEGGSVPARAEWIREMRRITKERGIPLIIDEVQTGIGRTGKMFAFEHAGIIPDVIVLSKAIGGSLPLSVVIYDQDLDQWGPGAHIGTFRGNQMAMAAGSATLKYIKEHDVLSHVEKVGAKLMRELQDIQEHVPEIGDVRGRGLMIGAEIVAPHKKQNANGSYPADAELASTIQRKCFEKGLIVETGGRHGSVIRFLPPLIVTEAQIDDIITIFREAVYEAVK

SEQ ID NO: 6197 - protein, 503 aa, Bacillus licheniformis
MKQSSKQKNFDSLFMHNGEQGIKAYRDAVETAVETLWADWKNKSKPYSGKMPKELDLEIKSLFSFQEAGESLADVLEHLKEAYLPHRIHVEDPKCAAHLHCPPLIPALAAEMLISVLNQSMDSFDQSGAASLIEEEMVQWLCRKFEYGKDADGTFTSGGTQSNYMGLLLARDAFCEKQWNWNVQKDGLPPEANRLRILCSKDAHFTVKKSASQLGLGERAVVLVDTDAEKRMSLYDLKQKTAMLKESGLHPFAIVATCGTTDFGSIDPLSELADAAHAGGLWFHVDAAYGGALILSRTRRYKLAGIDRADSISVDFHKQFYQPVSCGAFLVKDRRHFRLIDYHADYLNPEEDEAEGIVHLVNKSIQTTRRFDALKLFVSLRVLGEDTFAEMIDWTFALAEAAAEKISASDRFELLNPHPELNAVVFRCLASEDDAENDRLNKCIHRELFRTGQAVIAKTAAAGKTYLKFTLLNPRTTLSDLDDILGRIQELASLYTNSRRVTG

SEQ ID NO: 6198 - protein, 588 aa, Bacillus licheniformis
MSSFKEIAENATIQSFLNCYLRETGIETREIADGSQKTLIVPLERQQIELIVPIKYWSKTGRHLFSFPLYYQTAQNGKPLPLDYVTLVSLASKELLLQQSRGGAEDEFMLRVILSCRNISRYVEERADDQSELSRADFTFIEAEQSLLLGHLMHPTPKSRQGMKPEEESIYSPELKGEFQLHYFKAHASLVLHDSSTGTKAPLVIQEELRNDPMIDNAWLDEQTADPDFALLPAHPLQARALLEEPYVQKLIAQGLLTYLGAKGRKYTATSSVRTVYSKHSRYMYKFSVPIKITNSLRVNKQKELDRGVEMARLLQTELGQRLKQEFPGFRVITDPAYISIRGENGESGFEVVIRENPFYEDDRSACLIAGLCQDHAYGKESRLCSVIRGLALEEGRTTEEVSIDWFDKYLSISLEPVLWLFETYGLAIEAHQQNAVIRLKNGYPETFYYRDNQGYYYSESKAGILSKLIEGLSERSETICSDSVAVERLRYYFFFNHLFGLVNGFGCEGLIGEETPLSMIRERLEKAEQIYGITELTDSLLRFAELPCKANLLTRFYDMDELTGSLETQSRYTSVNNPLLKEAAAVQ

SEQ ID NO: 6199 - protein, 184 aa, Bacillus licheniformis
MNERITFQKADYERDISLVYRWMQEEHVIPFWHLNMPFAKFEAHFHKAITDPHQTLYIGFIDGVPMSYWESYWVKGDIIEHHYDNEPFDQGIHLLIGEKAHLGKGLALPLLKAMVNMQFAVPETKKVIAEPDIRNKKMIHVFEKCGFRPIKPVNLPDKTGLLIFCERERFFEKEKKDELYKETQ

SEQ ID NO: 6200 - protein, 447 aa, Bacillus licheniformis
MNSTKRPNDVYDVIGVGIGPFNLGLAALADSVPEINALFFERNESFNWHPGMLIEGTTLQVPFLADLVSMADVTSKYSFLNYLQQHNRLYSFYFLEDFHIPRQEYNHYCRWVAEQLDSCRFGMNVESISLVESNPEALFKVRVANRENGGEAVYYTRHIALGIGTGPHVPDALSDALGGSVFHSAEYLKRKPGGFKGKRVAVVGSGQSAAEVFYDLVGEDEAEHVSWLTRSKGFFPMEYSNLGLEYFSPDYIDFFYQLPQWKKDELLTQQDLLYKGISAKTISDIYHLLYERTCGGRKAAFDLQSMTEVEQIEQRGETLVLYCTNRVNEDRFERQADVVVLATGYKERLPECLAPVDSLIEKDASGRYVITRDYRLVTAAKSKNHIFIQNGELHTHGVGAPDLGLGAYRNSVIINQLAGREVYTVSHKTVFQTFGTGIAEKTAVPNG

SEQ ID NO: 6201 - protein, 604 aa, Bacillus licheniformis
MLFQDELKRVLDPDRWREVNRRLLAKMLSEYMYEDIIKPDFIETEDGINRYELRTAEDKVYRFAAKPRMFDSFDAVPETIEVFKGGQWTKHVSAIEFLLDIQPHIPMSPETAGHLIKEFNHTMLADAHLLAKDALTADELTEADYAVIEGEMTGHPWIVYNKGRIGFGYDDYLRFAPENQRAKRLLWIAVHKDTASFHSVEGLDYETLIHKELDELTLRQFAKVIEKQGAASEDYYYMPVHEWQWTNTIIQQFPEEIASKAIIPLGEGGDEYLPQQSIRTFTNITNKHKHHIKLPMSILNTLVYRGLPSERTVIAPKITEHIKGIAENDAFLKDECRVILPGENASLNVDHQYYHSLEKAPYQYLEMLGAIFRESIYTYLEEGERPVTLASLTYIDQGGVPFIRRLIEKSGLSAEEWIGKLFDTVMPPLLHFMYRYGTVFSPHGQNTILVLKDHQPHRLAIKDFVDDVNISDQPLPELSGLTGDLKAVLRSEPPEGLVQFIFTGLFICHLRYVANILENDGLLPEKRLWKALADAILDYQQKFPELRERFELFDLFKPELTKLCLNRNRMVDYGYKDGDDRPHASEFGKVTNALAKFKKEAAKL

SEQ ID NO: 6202 - protein, 146 aa, Bacillus licheniformis
MIEVKPINAEDTYEIRHRILRPNQPLEACMYETDLLGGAFHLGGYYRGKLISIASFHKAEHSELEGEEQYQLRGMATLEGYREQKAGSTLIRHAEELLRKKGADLLWCNARTSVSGYYEKLGFSEQGEVYDIPPIGPHILMYKKLT

SEQ ID NO: 6203 - protein, 277 aa, Bacillus licheniformis
MKPLKGKIALVTGGSRGAGRAIAAELGKAGATVYITGRSIRGASTNQWPGTIDDTVSQIEASGGKAIAVRCDHTNDAETEAVIAKIREEQGKLDILINNVWGAHDLGVEAKPFWELSLKNWDTMFAAGVRAQLATNHFAVPLLRENKQALIIHTTFWDENKYTGQFYYDLAKNAIVRMAYGLSLELKRDNIAVIAVSPGFMRTELVLKYHESDEAHWRESEDLRRTETPYYVGRGITALAKDPDVMEKSGRALRVGDLAKEYQFTDVDGRYIPPFTI

SEQ ID NO: 6204 - protein, 320 aa, Bacillus licheniformis
MRGDRLISILLMLQAQGQMTAKELAERLEVSERTIYRDMEALSGAGIPVVAERGINGGWSLLDDYQTTLTGLKESEIRALFVPLSEQLLDDLGLTRISEEARNKLIASLPSEYRQNAKDVWNRIYIDTCSWRHKKEKAESFEVLKDAIWKDQKLKIVYQRADGQTADRVVAPLGLVAKGANWYLIASKENGEIRNYRASRIQSAVFVRETFDRPENFDIAHVWRSSTKEFIERLPTYEVRVKAAQAILPRLSFTNHFVRIIETNEIDQEGWIPVTLSFDTEEEAKRYILGFAEHMRIIEPKELHGKILKMAESIVAHYKT

SEQ ID NO: 6205 - protein, 1138 aa, Bacillus licheniformis
MSNINDQLKKKILVLDGAMGTMIQDAGLSAADFGGEAYEGCNEFLSITAPHVIQGIHEAYLEAKADIIETNTFGATRLVLDEYDLGHRAYEVNLASVKLAKAAAEKFSTPEWPRFVAGAMGPTTKTLSVTGGTTFDELIDNYEEQARALITGGADLLLLETSQDMLNVKAGFIGIRQAFEKTGKTLPLMVSGTIEPMGTTLAGQDIESFYISLEHMKPVSVGLNCATGPEFMTDHIRTLSSLARTAVSCYPNAGLPDEEGQYHESPQSLAKKIKAFAEEGWLNIVGGCCGTTPAHIEALADEVALLPPRTVPSGAKPHTVSGIDGLIYEETMRPLFVGERTNVIGSRKFKRLIAEHKFEEASEIARAQVKNGAHVIDICLADPDRDEAEDMEGFLKKAMKKVKAPFVIDSTDKTVIEKALKYSQGKAIINSINLEDGEERFADILPLVKQFGGALVVGTIDEEGMAVTAAKKLAVAVRSHQLLTEKYGIPASDIIFDPLVFPVGTGDEQYIGSAKETIEGIRLIKEQLPECLTILGVSNVSFGLPPVGREILNAVFLYHATQAGLDYAIVNTEKLERFASIPKEEVEMAEKLLFHTDDKTLASFTDFYRGKKKADKQPKTSLSLEERLAEYVIEGTKEGLIPDLEQALKKFATPLDVINGPLMDGMAEVGRLFNNNELIVAEVLQSAEVMKAAVSFLEQYMEKKDDSGKGKIILATVKGDVHDIGKNLVDIILSNNGYKVVDLGIKVTPQELIEAIRKENPDIIGLSGLLVKSAQQMVVTAKDLDKADISIPIMVGGAALSRKFTNMKISPEYKGPVLYAKDAMDGLSLANQLRTDPSQFLEKKEAAAPAAVAEKKQTKAVIEMLEKRAHVPKAPVFQPEDLKRHYLKNIDLSYIVPYVNEQMLLGHHLGLKGKVKKLLAEQHPKALELKELIDELLRDGKEHGWFDPAVVYQFFPAYSDGDSLHILDPVNKDSILETFVFPRQEKLPYRCISDYVRPKGELDYVSFFAVTAGRHVRAAANRFKEEGDYLKSHAVQALALELAEGLAERTHQVIRDRWGFPDAPDFTMEQRFQAKYQGQRYSFGYPACPNLEDQEKLFRLIQPEGIGVHLTDGFMMEPEASVSAIVVSHPEATYFNVH

SEQ ID NO: 6206 - protein, 609 aa, Bacillus licheniformis
MGFLEDIKNKTLIADGAMGTLLYSYGIDRCFEELNISKPEEIRRVHEAYVQAGADIIQTNTYGANFIKLSRYGLEDETKQINEKAVRLARAAAGSAYVLGTLGGIRTFNKNSYSLEDIKRSFREQLYLLLNEQPDGLLLETYYDLEEAREVLKIARKETELPIILNVSMHEEGVLQDGTPLADGLKQLASLGADVVGINCRLGPYHMIRALEEVPLLEDAYLSVYPNSSLPSLVEGRLVYETDDEYFRESAEEFRNQGARIIGGCCGTTPNHIRAMAEAVKGLPPVTEKRVKIRKKAALAVQNERTEPALDDLAKQKRSIIVELDPPKQLNFEKFLHAAEELKSAGIDALTLADNSLATPRISNVACGALLKQRLDMRSLIHITCRDRNLIGLQSHLMGLDTLGLSDVLAITGDPSKIGDFPGATSVYDLTSFDLISLIKQFNEGLSYSGKPLGKKTNFSVAAAFNPNVRHIDKAVKRLEKKIACGADYFISQPVYSEEQLIKIHKETRHLETPIYIGVMPLTSSRNAEFIHNEIPGIKLSDSIREKMALAGNDKQKQAEEGLAIARSLLDAACDLFNGIYLITPFLRSDLTAELTAYIHQKEKEKTNV

SEQ ID NO: 6207 - protein, 163 aa, Bacillus licheniformis
MVKESSFDIVSKVELPEVQNAIQTALKEIGTRYDFKGSKSSITLEGDELVLVSDDEFKMNQLKDVLVGKLIKRNVPTKNIEYSKLENASGGTVRQRGKLVQGIDKENAKKINNLIKKSGLKVKSQVQDDQVRVTGKNKDDLQQIIAMVREADLPIDVQFINFR

SEQ ID NO: 6208 - protein, 282 aa, Bacillus licheniformis
MKPGQQLTLKIDHKADYGYFLTDGETAVLLHQSEITEDIDGREEVDVFLYVDHEDRLAATMRKPIISAEQYGWVEVVDAVSGMGVFVDVGLSKDALVATEHLPPYESVWPQKGDRLYCMLKITGHGRMFAKPAPEDKISELFTEASPGLMNKELTGTIYRLIASGSFMISEAGIRGFIHSSERKEEPRLGEKLTARVIKVKEDGSVNLSLLPRKQDALSVDAEQILTYMRSRNGAMPFWDKSDPEDIRERFNMSKAAFKRALGHLMKQDKIYQEEGWTYEKK

SEQ ID NO: 6209 - protein, 40 aa, Bacillus licheniformis
MKDDDKKPVDNNAVNQQKNRLAEKNRQAGKHQESKKPHHL

SEQ ID NO: 6210 - protein, 68 aa, Bacillus licheniformis
MKHCCSVYIHRVSAGGVVNFGGAYKICPITMEKVVEGSGGPDVATAAAGFLDGALAPAVEEGTVTEDS

SEQ ID NO: 6211 - protein, 286 aa, Bacillus licheniformis
MNVHLLADSAADLPKSFYDEHRISFIPLRVLLDEKEYDDLLTIQPLDVYEAMREGKAPKTSQPSLMLFKNAFSELANENKPALYIAFSSELSGTYQTAVMAANEVKEEFPDFDLRIIDSKCASLGYGLAVKHALKLATNGNTIQEIESSVKDFCEHLEHIFTVDDLTYLARGGRISKASAFVGGLLNIKPLLHVDDGKLVPLEKIRGKKKLLRRMIELMKERSVDLSGQTVGISHGDDEETAEEVKRMIEAEFQPEEIVVNMIGSAVGAHAGPGTLAVFFPGKDKR

SEQ ID NO: 6212 - protein, 280 aa, Bacillus licheniformis
MVIAEAKKLFIVIIGALLNAIGLNLFLIPADVYASGFTGVAQLLSSALDQYSPIYFSTGTLLFILNIPVGILGWLKVGRSFTVYSILSVALTTVFLGMLPEASLSNDILLNAVFGGVIAAVGIGLTLKYGASTGGLDIIAMILAKWKDKPVGTYFFILNGAIILTAGLLNGWEKALYTLVTLYVTTRVIDAIHTRHAKLTVMIVTKKAEEIKEAIYGRMVRGITTVPAKGAFTNEQKEMMIIVITRYELYDLEKIINEVDPKAFTNVVQTTQVLGFFRKD

SEQ ID NO: 6213 - protein, 150 aa, Bacillus licheniformis
MRLISMIVMLLFVSGCGQNGDQVPDKEVSGEVDNGSVTLTVEPVQKQGEIEFRMSVVNHTDDAAEFEFSSGQKFELIVSDKEGNERYRYSKGKMFTQAFQTMTLNPKESYDFTDVWKEVPEPGTYEVNVTFLGRSEQFATLRAGKTFEVK

SEQ ID NO: 6214 - protein, 326 aa, Bacillus licheniformis
LENVFDYEDIQLIPAKCIVKSRSECDTSVQFGGRTFKLPVVPANMQTIIDEKLAVSLAENGYFYVMHRFEPETRIDFIKDMKARGLFSSISVGVKDEEYAFIEELTRENLTPEYITIDIAHGHSNAVINMIQHIKKHLPDSFVIAGNVGTPEAVRELENAGADATKVGIGPGKVCITKIKTGFGTGGWQLAALRWCAKAASKPIIADGGIRTHGDIAKSVRFGATMVMIGSLFAGHEESPGATIEKDGKLYKEYFGSASEYQKGEKKNVEGKKMYVEHKGAIMDTLTEMEQDLQSSISYAGGNKLDAIRNVDYVIVKNSIFNGDQY

SEQ ID NO: 6215 - protein, 62 aa, Bacillus licheniformis
MRNELFQMAKAAVHAAEASADSGEKAKAVARAKNALSSAYANSTDAERRQLHNLQEQLDQLS

SEQ ID NO: 6216 - protein, 46 aa, Bacillus licheniformis
MGKRSKSKRFIQQGKDSLKQHAARFPYRSTLEEAEQKSGPTECGGL

SEQ ID NO: 6217 - protein, 270 aa, Bacillus licheniformis
METKPYLIALDLDGTLLKDDKTISESSSEVIRKLREDGHYVCISTGRPFRASSMYYDQLQLDTPIVNFNGAFVHHPKDESWGRFHTSLDLEVVKQIIEVSETYNVHNILAEIVDDVYFHYHDEKLIDVFTMGSPNITVGDLRTNLGQDVTSVLIHAKEEDVPAIRSYLSDVHAEMVDHRRWAAPWHVIELIKSGINKAVGLEKITDYYGIPPERVIAFGDEDNDLEMLEFAGCGVAMGNGIEGVKSVANKVTKSNEEDGIAVFLKDYFAL

SEQ ID NO: 6218 - protein, 255 aa, Bacillus licheniformis
VIIIEKQHISNIPLLHIVKEEKKEKALPLVFFIHGFTSAKEHNLHFAYLLAEKGMRVILPEALYHGERNEQLTQEELAPRFWEIVTNEIKELEVLKNHFERENMIEKGRIGAAGTSMGGIVTLGALTQYEWITTAVSLMGSPAYVEFFDQQLAFMREKKIELPITEEQIDQQREELKRFDLSLQPDKLNMRPLLFWHGKQDGTVPFALTRRFYESIIPLYEARPDLLHFIEDERAGHKVSREGLLKTVEWFDAHL

SEQ ID NO: 6219 - protein, 102 aa, Bacillus licheniformis
VDEALKENIMGALEQVVDPELGVDIVNLGLVYDVDMDENGKTDVTMTLTSMGCPLAPIIVDEVKKALADIPEVKEVDVHIVWNPPWTRDKMSRYAKIALGIQ

SEQ ID NO: 6220 - protein, 61 aa, Bacillus licheniformis
MASPVINEKERFYKRSFFIAITAAGTFSGLKSGEPGKVRTEHDRAEEKDRRREERTNMKGD

SEQ ID NO: 6221 - protein, 345 aa, Bacillus licheniformis
LKIGIIGATGYGGAEIMRIMRTHPYADECILYSSSDEGARYDAAYPHLVKLIDQHLQPIEVKRIANEIDFLFMAAPPGISSRLTPQFDAYDIPIIDLSGDLRIQNPSVYEKWYKREAAPEHVLQKAVYGLSELNREDIKTAQYIANPGCFPTAVLLGLAPLVKSGSINESFVIIDAKTGVSGAGRKPSMGTHFSEVNDNFKIYKVNEHQHTPEIEQTVKQWNSAFKPITFSTHLVPMTRGIMATIYTELKDSMDAEQLQLIFSKFYKDSYFVRVRETGSFPATKEVYGSNFCDIGVTVDERTNRVTIVSVIDNLMKGAAGQAVQNFNIMNGLSETAGLEFTPIYP

SEQ ID NO: 6222 - protein, 406 aa, Bacillus licheniformis
MIQVSQDSIKKTDGSVASPKGYLAKGVHCGLRYSKKDLGIIISSRPAVSAAVYTQSHFQAAPIKVTQESLKKSAHLQAVIVNSANANACTGEQGLKDAYEMRRQSADMLGIEPDLVAVSSTGVIGEYLNMENITKGISLLAETEPAEGDFEEAILTTDTVIKQTCYELMIGGQKVTIGGAAKGSGMIHPNMATMLGFVTTDACIEESALQRALREITDVSFNQITVDGDTSTNDMVLVMANGCAGNERLHEEHEDWPVFKKGLQLVCTDLAKQIARDGEGATKLIEVEVNGAKSNLEAQIIAKKIVGSNLVKTAVYGTDANWGRIVVAIGDSMAAVTPEKVEIRLGGQCLFKNNEPQPFSEELAKTYLENSEVKIEVFMQEGEGKGTAWGCDLTYEYVKINASYRT

SEQ ID NO: 6223 - protein, 258 aa, Bacillus licheniformis
MGKTIVFKCGGSVIRELSDEFFQNLKDLTESGWKIALVHGGGPDITKMLKKLNIRTEFVNGQRKTTKAVLEVAEMVLSGSINKFFVAELTKHGLPAVGVSGKDGGLLLADYLNEKEYGQVGRIKKVNGQMAEALMEKGFIPVIAPLSMTDGCETLNVNADLAASAVAAALRADKLMFVTDVKGIMKNEELLKELTPEDIESLIAEGVISGGMIPKVHSAKEALTDEVEEVMIVSGKGSFLTKDDFIGTKIIKQKEAVS

SEQ ID NO: 6224 - protein, 385 aa, Bacillus licheniformis
VSHLFQTYSRWNINIKKAKGTIVQDEKGNAYLDFVQGIAVCNLGHCPDSVTAALKKQLDDVWHVSNLFQNELQEKVAQLLAKNSAGDLVFFCNSGAEANEGAVKLARKHTKKTKIVTFQQSFHGRTYAGMAATGQEKIKHGFGPMLEGFHYLPYNEPKAFAELQDEKDIAAVMLEPIQGEGGVIPASREFLQSVQDFCRDKQALLIIDEVQTGIGRTGKAFGYEHEGLSPDIVTVAKGLGSGFPVGAVIGKKELSEAFSPGSHGTTFGGNMLAMAAANATLETIFDRSFLEEVSAKGAFLHQQLKDKLQFPLVKDIRGKGLIAGIECKEPVQPLIEALQKEGLLVLPAGPNVIRLLPPLTVAKSEIKAAVEKLKDVMANHSAVKQ

SEQ ID NO: 6225 - protein, 354 aa, Bacillus licheniformis
MEGYLVLEDGTSFSGELDGLDGCTGEVVFFTGMTGYQEVLTDPSYKGQIIVFTYPLIGNYGINGSDAESKQPQVRGVVVYEACDRFSHHQATESLREYLAKWDVPLLSHVDTRAVVQHIRAKGTLNARLTKQKDDIPAPRQLENYAAQVSGQNENGALGEGNTHIALIDFGYKKSIASSLANRGCKVTVVPYQEMDGIAKLNPDGIVLSNGPGDPKAILPYMDALRGIISSYPTLGICLGHQLIALAFGSDTYKLPFGHRGANHPVMDKETGRVFMTSQNHSYVVDRDTISENEFSVRFHHVNDGSVEGLMHKTLPVLSVQFHPEAHPGPAESEWIFGEYLQKLNEARREIAHA

SEQ ID NO: 6226 - protein, 1029 aa, Bacillus licheniformis
MPKDQTIKSILVIGSGPIIIGQAAEFDYSGTQGCMALKSEGYRVILVNSNPATIMTDESFADEIYFEPLTVESLIQIIKREKPDGLLANLGGQTALNLAVELEKAGILKAYGVKLLGTSVDTIEKGEDREKFRALMKELNEPVPDSEIVDNQDDALRFALSIGFPIIVRPAYTLGGKGGGIAATKEEFLPLIESALLASPIHQCLVEKSIAGFKEIEYEVMRDSNNTCITVCNMENIDPVGVHTGDSIVVAPSQTLTDADYQMLRSASLKIISALDVVGGCNIQFALDPESKNYYVIEVNPRVSRSSALASKATGYPIAKMAAKLAVGYTLAELKNPLTDSTYASFEPALDYVVVKFPRWPFDKFKQADRKLGTKMKATGEVMAIDRNLEAALQKAVASLELKTSGTHLPELGGVSSEVLWKLLETPDDRRFFAVMELLSRGTSISEIHEKTKIDDYFLHVFSNIIQLENTLMEQGDSLSVSLLKKVKEKGFTDFTIASLTGKTEEEVRALRKKMGIAASFKIVDTCAAEFDAKTNYFYSTYFGKSDGDISQKTKKRALIIGSGPIRIGQGVEFDYSAVHGVMTLKSLGFETIMLNNNPETVSTDYEMADRLYFEPITPEHILNVAEAEDIDFAIVQFGGQSAINVAQAIEKAGITLLGTSSETLDILEDRDQFYQLLDELGISHAKGETASSKAEAVKKANEIGYPVLIRPSYVIGGMGMMIVHSEAELRELLGGASQMPYPILIDQYVSGKEFEIDLVSDGGDLYIPTYIEHIEKAGVHSGDSYAILPGPSVTPEMKSAARDAAAKIVRKLGFKGIMNIQFIADSDELLILEVNPRASRTVPVVSKVMGVPMIPLAAKLLAGSSLKELKPAAKNSRGVAVKFPVFSSHAIQDVDLKLGPEMKSTGEGMYVGFNPESALKKIFAGIWQTKGCIYMEGAGELRSLAEQAGFTVQSDDFPGWIKRKDKALHIHLAESKEARKQRIEAVTHGVAVMTEEETVRAFLTSGHGTTKAVSLKDLYKKEVETCLL

SEQ ID NO: 6227 - protein, 316 aa, Bacillus licheniformis
MSTVNIGATREINLSGKDFLSLKDFSKEEIVYLLKEAAAMKRNKIQDIFKGKTLAMIFEKSSTRTRVSFEAGMAQLGGNALFLSSKDMQLGRGETIADTAKVLSRYVDAIMIRTFEHEKVEELAKHAEIPVINGLTDLFHPCQALSDLLTIQEMKGTLKGLKAVYVGDGNNVAHSLLIGCAKVGCDITVASPKGYEPNQDVVKLAETFAEESGAAVTITNDPVSAVQQADVIYSDVFTSMGQEEEAEERMKIFAPYQVNGTLVSHAKPDYIFLHCLPAHREEEVTAEIIDGPNSAVFQQAENRLHVQKALLKALLS

SEQ ID NO: 6228 - protein, 270 aa, Bacillus licheniformis
MDFLVLIKYILLGLLQGFTEPIPVSSSGHLVLAQHFLGLNIEGFSFELLMNAGSLIAVLLVYKNDIFRLAVNGLSYVTSKNEKGKADFRFIIYLIIATIPAGVIGVLFDDEISAFFKDGVRITAVTLLITGLALFLIRNLRGRKSDGEIRLRDAVIIGFSQMVALVPGISRSGATIVPAMALGLKSETALRFSFLLYIPVSLGGTILSITDIFHDPRLGELFLPYLFAFIASVIATYFSLRWFMNIMAKGNLVYFSIYCFVIGIAVLIFA

SEQ ID NO: 6229 - protein, 156 aa, Bacillus licheniformis
MGQQRQFRPGQKAPNNGVYVEIGETGSMVQNPQQIKLSAGEFFPETSNHNRLWTYKRKTLKKQPSVFLPAVCLKQKTPLLEAGVLMLTCILFNRHNFSKNNNGCGDDKAHNDTGLKVIPSTVHGADNVAGHLRQKKCPEKSDHKSHVSHLVLLIQF

SEQ ID NO: 6230 - protein, 44 aa, Bacillus licheniformis
MMKNELLSNALFDISEIGVESPVLFTKMSFPAGYVYGMISFRIE

SEQ ID NO: 6231 - protein, 244 aa, Bacillus licheniformis
MKITDRFFQVDTEWNVVHLPYRPNGFLVFIFGDRTHFVGEDTSFWLQHYGRSQLLTSLKNKGYTLVNSNLFGRHWGSEKAVAYAKQLIHYVFKQEILNEKIHLLAEGTGALIADELLRSIPNQIRSAAMVNPCLDLQAHHKREKENKFFYKQFIKEIAESYGISEREAADYPFKGISPYHNLVPVHIWQRLNGSPYPYMIHAKTFEERQLKGRHSVGLTLHLSEHPQRIHSAIANFFKTHEKVL

SEQ ID NO: 6232 - protein, 191 aa, Bacillus licheniformis
MKPALVYGADEFFGLSFCEHLLEEGVNIDVKLEQTSDEKKLMYLEERLMWLGRNRHFRLIEKELEAPYEQVFIQYTGSVPEEALAAGIENKPVILFVYQDQFEEDLRAGIEEKGVELVVLPELFGPWDIKADDKQNRDGAIFVNDAAAQAAACAVQKDFSALRFVQKTPYEKADEIIEEWSRQMSTFFDKK

SEQ ID NO: 6233 - protein, 317 aa, Bacillus licheniformis
MVYRLVAIFFILLALSGCGQSPLKGKIEKVGLLVPDTISDQVWGTKGYKGLLRIQSVYNVDVYYKEGIDNDAAIKMAVEDFHKKGVNLIYGHGSEYEKAFNEICKDYPDIHFVLMNSKAEHQNVTSISLEGEAMGFFGGMTAAHQSKTKKIGVLATYKWQPEVEGFAEGAKYLDPDIEVMTEYVGQWDDSENAVKLYEKMKKAGADVVYPAGDGYNVPVIEQIKKDGLYAIGYVSDQSELGENVVLTSTIQHVDDAYELTADEFNKGTLKGGKRSFDIQEGVIEMGKFSPVVDPSFQEEMKRLIDEYKKTNKLPNEH

SEQ ID NO: 6234 - protein, 61 aa, Bacillus licheniformis
VHEKSMEFLQIAMKYVPEAKEEMEKAGIELSPEMLEPFMNLFTKVMAEAYELGKADAGSDA

SEQ ID NO: 6235 - protein, 79 aa, Bacillus licheniformis
VANDDFFTKMMFGSNAPARHEEEPDAESETVEDAEVSQEADYMHVLHQVGEIMDSIDELKPVFKEIGSMVSALKNKMSI

SEQ ID NO: 6236 - protein, 312 aa, Bacillus licheniformis
MKAGIIGIGRYIPEKVLTNFDLEKMVETSDEWIRTRTGIEERRIAAEDEKTSDMAVAAARRAMEDANIEPEDLDMILVATVTPDQAFPTVSCMIQEKLGAFNACAMDISAACAGFMYGLVTGKQFIEAGTYKHVLVIGVEKLSGITDWDDRNTAVLFGDGAGAAVVGPVSDDKGILSFELGADGRGGKHLYLDEKDHTIMNGREVFKFAVRQMGESSVNVIEKAGLSKEDVDFLVPHQANIRIMEAARERLELPVEKMSKTVHKYGNTSAASIPISLVEELEAGKIKDGDVIVMVGFGGGLTWGAIAMRWGR

SEQ ID NO: 6237 - protein, 412 aa, Bacillus licheniformis
MNSKRVVITGLGALSPLGNDVKTSWNNAINGVSGVGPITRVNADEYPAKVAAELKDFKIEDYMDKKEARKMDRFTQYAVVSAKMAVEDAGLDINESNADRIGVWVGSGIGGLETLEQQFETFLTKGPRRVSPFFVPMMIPDMATGQISISLGAKGVNSCTVTACATGTNSIGDAFKVIQRGDADVMISGGTEAPLTRMSFAGFSANKALSTNPDPKTASRPFDKNRDGFVMGEGAGIVVLEELEHALNRGATIYAEVVGYGSTGDAYHITAPAPNGEGGVRAMKEAIKDAGLSPVDIDYINAHGTSTPYNDKFETIAIKEVFGEHAYKLAVSSTKSMTGHLLGAAGGIEAIFSVLAIKEGIIPPTINIETPDEDCDLDYVPDKARRQDVNVVLSNSLGFGGHNATLIFKKYE

SEQ ID NO: 6238 - protein, 242 aa, Bacillus licheniformis
MSIASTYEWLEQASSVQELSNFLIPYFKGASKADAAAIVSHLQTHGMFRSWTDGERTMKQLKKNGVFQHVRREEQLLCKRWNGPDVPIFILPVDERNRKIRVEFGSKSGLAFSDKLFLFLSADLPRSSISAIMTHEYNHVCRLENMTKEENKMTLLDTIILEGIAEYAVFERLGEAETAAWTSYYTEKQLRHFQDRFVKPHFELRRHDGRLFSKTFIGSKFEGCRCFSLSVRRLYKAIALKY

SEQ ID NO: 6239 - protein, 324 aa, Bacillus licheniformis
MSALLEVNDLKTYFFRKKQPIPAVDGVDFSIKKGETVALVGESGSGKSITSLSIMGLVEGSGGKIMNGSIKLEGRDLVTYKEQDLCKIRGNEISMIFQEPMTSLNPVLTIGEQITEVLIYHKKLSKKEAAKKAIELLKLVGFSRAGELMKEYPHRLSGGMRQRVMIAIALSCNPKLLIADEPTTALDVTIQAQVLELMKDLCDKFDTSILLITHDLGVVSEIADRVIVMYCGQVVENATVDELFDEPLHPYTKGLLNSIPVIEGSIEKLTAIKGNVPTPDNLPAGCRFAPRCPSAVDKCWGAQPDLKTRPDGRSVRCFLYEEGE

SEQ ID NO: 6240 - protein, 340 aa, Bacillus licheniformis
MTSSAEQLQPGQEMNPQQSLLELKDIKKYFPIRSGIFQKKIGDVKAVDGISFSLKRGETLGIVGESGCGKSTAGRTMIRLYKPTAGQIFYKGRDISSLSEEALRKSVRKNIQMVFQDPFASLNPRKTLRSIIKEPFNTHHMYNFKERNEKAEELLAKVGLHPSFANRYPHEFSGGQRQRIGIARALALNPELIIADEPVSALDVSIQAQVINLMEELQEEFNLTYLFISHDLSVVRHISDRVGVMYLGKMMELTDKHELYDNPLHPYTQALLSAVPVTRKKGGTKRERIVLKGELPSPANPPKGCVFHTRCPAAKAICAEAEPAFKEVKTNHFVACHLYE

SEQ ID NO: 6241 - protein, 543 aa, Bacillus licheniformis
MSKRKTGFSILSLLLILSIFLTACNSGEVGGDEKEGKSDGKPQKGGDLVIGSTGEPTMFNALYSTDVSSSDIEGFIFDGLVGSDTDLNPTMKLAEKIDQSEDGITYNVTLKKGVKWHDGEEFTADDVVFTYNIPLSKDYAGERGSNFGMIDKVTKKGDYEVEFKLKHPDPSFLPVSLSYGILPEHILGDVPIKDLGEHEFNRKKPIGTGPFKFVEWKQGQYVKVEAFEDYYGEGPYLDTLTYKVIPDANAAIAQLQAGDINYFVVPGTDVKTVEKFDHVKLESDLGLNYSYLGWNEKNELFKDKKVRQALTHAIDRESIVQNVLDGDGEVANIPESPVSWNYPKDADIPVFEYDPEKAKKMLKEAGWEDTDGDGILDKDGKKFSFTIKTNQGNKVREDAAVVIQQQLKEVGIEAKPQIVEFSALIEQTSAPNWNYDALLLGWSLATFPDQYDIFHSSQSKAGLNNIWYKNEEVDKLLVNAKKLKDRKEYSKAYEKIYKMIAEDQPYTFLFYYNYHRAIPKNLKGFEFHPKNDFYEVNKWWLKK

SEQ ID NO: 6242 - protein, 316 aa, Bacillus licheniformis
MVTYIIRRTLMSIPILFGITILSFAIMKAAPGDPVSLMVDPSIKQADREKFIEKYGLNEPEHIQYLKWLGNMMQGDFGTSIVRKGTPVIDLILARLPNTLLLMLVSTILALLISIPLGVLSARRPYSKLDYGITFTSFIGLAVPNFWFGLILIMVLSVNLGWFPTGGVMTLNSGFSLWDRIHHLILPAFVLATADMAGLTRYTRSSMLDVLRQDFIRTARAKGFKENRVVYKHGLRNGLLPVVTIFGLMIPSFIGGAVVTEQIFSWPGLGKLFIDSAFQRDYPVIMAMTVISAVLVVIGNLIADILYAIIDPRIEY

SEQ ID NO: 6243 - protein, 304 aa, Bacillus licheniformis
MTQPNPQVPSAEIGLQENVSQKPETMTKIFFEKFFKNKLAVIGGILLLIIVLSALFAPLIAPYPPEQQNLMNKLKAPSAEHLMGTDKFGRDIFSRLLYGAQISLLVGFASVLGSITIGTVVGAIAGYFGGIIDAILMRIVDIILSIPDIFLLITLVTIFQPGIDKLILIFALTRWTTTARLVRSEFLSLRSREFVLAAKTIGTRNYKIIFSHILPNAMGPIIVAATLSVGTVILAESALSYLGFGVQPPMASWGNMLQDAQNFTIMIQAWWYPLFPGLMILLTVLCFNFLGDGLRDALDPKNIK

SEQ ID NO: 6244 - protein, 421 aa, Bacillus licheniformis
MLSVLKNKNFLFLILGRLVTNIGDSMYTVAAMWLVFDLSKSTFYSGLAGFLTMFPTVLQFLTGPIVDKVRLNKVLVWSQLIQAILVLIIPFFYFIGYLNIWIIMMIMPLIVFIEQFTYPAQSAALPKIIKSQDLVKANSLMSFSYQGTDIIFTGIAGIVIASAGAISIYLVDSFTFLLAALFFKCVKLEQKSEIQHKPRFHFKKVIHNYTTDIKEGFTLIRHSLIPKILLGSMISNFMLSATIVILPSFSSIRGGEEYYGYYLASMSCGLLIGSIFATWFGRFAIGSLTIYGFFISGVLWSISAIATSSYISIILFGLSQISIGVTNVIFMSILQSILPEEFIGRVFSFIASLTSIAAPFGSLLGGFTASLIGSDKVFFIGGIAMLFVSVYWVFQSSLRSIPSSERINAKEYSFFTNVLNK

SEQ ID NO: 6245 - protein, 39 aa, Bacillus licheniformis
LAGIASFSRDDFAYCLDSAMRLIRRILNKKLRGAALGFF

SEQ ID NO: 6246 - protein, 250 aa, Bacillus licheniformis
MLFLHDVWVNWFEGEENGYNVCHFHEWRKEDSVELLDQVPLLRVSSVLFHYIENDLSELPAELLNDVHQKAYIRKNHERTQLDHCFVVTDGIGILAVDTAGYTIPVRKSRLIPRQEQLVYEMVKDVEEETYDFAPEKLQPSKEYHILSLSPEHVRGLTRKERQLKQLLFMALDQLKGLQNRAEIAYWYTEWNPYMYEQIKRMTFEEIWDMLFNETIDGWSDKHRDFCENLIKGQPFFEKLWEIENESKVN

SEQ ID NO: 6247 - protein, 330 aa, Bacillus licheniformis
MKKTIFSGIQPSGSVTLGNYIGAMKQFVDLQDDYNCYFCIVDQHAITVPQDRLALRKNIRNLAALYLAVGLDPKKATLFIQSEVPAHAQAGWMLQCVAYIGELERMTQYKDKSAGKEAVVSGLLTYPPLMAADILLYGTDVVPVGEDQKQHLELTRNLAERFNKKYNDIFTVPEVKIPKVGARIMSLADPLKKMSKSDPNQKAFITLLDDPKQLEKKIKSAVTDSDGIVKYDKENKPGVSNLLTIYSILGQVSIEELEAKYEGKGYGEFKSDLAEVVIGALKPIQDRYHELIESEELDRILDEGAERANQTANKMLKKMENAMGLGRKRR

SEQ ID NO: 6248 - protein, 40 aa, Bacillus licheniformis
MLKRFTRITFAILYIEPNDAAPTLFSPVFVFFSPGLSTFI

SEQ ID NO: 6249 - protein, 55 aa, Bacillus licheniformis
LKINIAINYSINYNEFVHLGVTGFLHNKYSEKTKQRKKYGKWAYYFFMINLNVQE

SEQ ID NO: 6250 - protein, 541 aa, Bacillus licheniformis
LKKRLSFISLMLIFTLVLSACGFGSSSGDGGKKDSKGKDTLNVNIKTEPFSLHPGLANDSVSANVLRQTFEGLTTIGKDGKPVEAAAEKIEVSDDQKTYTFTLRDAKWSNGDPVTAEDFEYAWKWALDPKNESQYAYQLYYLKGGEAANTGKGKIEDVGVKAVNDKTLKVELEKPTPYFTELTAFYTYMPVNKKVAEKNPKWYTNADENYVSNGPFKMAKWKHGGNIVLEKNDQYWDKDAVKLKKINMAMVNDPNTGLNMYKKGELDFVGQPLDQISTDAIPSLKKEGLQIDPFASVYLYKFNTEAAPLNNVNIRKALTYAINREAIVKNITQAEQLPAMGLVPPAVHGFESNKGYFKDHDVDKAKEHLEKGLKELGLKKASDLPKITLSYNTDEAHQKIAQAVQEMWNKELGVDVELGNEEWNVYIDKLHAGNYQIGRLGWTADFNDGMNFLETYRDKEGGNNDTNWENAKYKELLNKASRETDSAKRIELMKEAESIIMDELPVAPIYFYTMPYLHDESLKDFVLTGTGEIYFKTAHFE

SEQ ID NO: 6251 - protein, 311 aa, Bacillus licheniformis
LIKYLGRRLVYMLISLWVIVTATFFLMRAIPGGPFSGERKLPPAIEASLNSYYGLDQPLFKQYLDYLVSVAKWDFGPSFKYKGQTVNDLISSGFPISFTLGLEAICLALAFGVLFGVIAALKRNKWQVYTAMIIAVVGISVPNFIMAALLQYVLAMKLGMFPVAQWESWGHTVLPAIAVASMPMAFIARLTRSSMLEVLSSDYIRTARAKGLSTSAVTFKHAIRNAIMPVVTYMGPMAASILTGTFVVEKVFGIPGLGMHFVTSITNRDYTVIMGVTVFFGAILLLCVLIVDLLYGLIDPRIKLFGAKKGE

SEQ ID NO: 6252 - protein, 305 aa, Bacillus licheniformis
MQQIPKDMFEPAAVDHSEAEKISKKNLSFWTDVFLRFKENKLALFGLVVLILIALMAIFAPVFSSFQYEETDLTNANQPPSGEHWFGTDDLGRDVFVRTWVGARISLTIGLAAALIDVLIGVIWGAISGIRGGRTDEIMMRIADVLWAIPSLLMTILLLVVMGKGLITMIVAMVITGWINMARIVRGQVLQLKNQEFVLASRTLGAKNSRIIRKHLLPNIMSPILVTMTLTVPTAIFYEAFLSYLGLGVPQPLASWGTMATDGVQGLEYYPWRLFFPATFICLTMFAFNVIGDGLRDALDPKLRK

SEQ ID NO: 6253 - protein, 355 aa, Bacillus licheniformis
MKHLLEVKDLAISFKTYAGEVQAIRGVNFHVDKGETLAIVGESGSGKSVTSQAIMKLIPMPPGYFKNGQILFDGQDLVPKTEKEMQSIRGKEIGMIFQDPMTSLNPTMKVGRQITEVLFKHEKISKEEANKRAVELLSLVGIPMPERRVNQYPHEFSGGMRQRVVIAMALAANPKLLIADEPTTALDVTIQAQILELMKDLQKKIETSIIFITHDLGVVANVADRVAVMYAGQIVEIGTVDEIFYNPKHPYTWGLLASMPSLDNDGDEELMAIPGSPPDLTNPPKGDAFALRSPYAMKIDFEQEPPMFKISDTHYVKSWLLHPDAPKVEPPAAVKSKMKEFKNQYEKPVQVKEGE

SEQ ID NO: 6254 - protein, 310 aa, Bacillus licheniformis
VNDMAEKLLEIKNLKQHFSTPKGIVKAVDGISFDIYKGETLGLVGESGCGKSTTGRSIIRLYQATSGEVLFKGKNVHDKKSAKDLLEFNRKMQMIFQDPYASLNPRMTVADIIAEGIDIHGLAKTKKERLERVHELLNLVGLNKEHANRYPHEFSGGQRQRIGIARALAVEPEFIIADEPISALDVSIQAQVVNLMKDLQKERGLTYLFIAHDLSMVKYISDRIGVMYFGKLVELAPADELYENPLHPYTQSLLSAIPLPDPDYERTRVRKTYDPSVHQLKGDEQMELREVKPGHFVMCTEEEFKAYQSK

SEQ ID NO: 6255 - protein, 192 aa, Bacillus licheniformis
MNWYEKLSEYFPIEEMKSKEHMEALLKEQNDIYHKEEGRHHVLMYAEFDSFIFIDYLFVSKDARGQGLGSKLIEKLKKKNKPILLEVEPVDEDDADTAKRLKFYQKENFKHAESIGYRRRSLATGKVNKMEILYWSPKSNTEKEVFDAMKETYEKIHTYKDQKWYGESYEDVDDVLTIVDDHKQKNIFDELS

SEQ ID NO: 6256 - protein, 131 aa, Bacillus licheniformis
MVTLYTSPSCTSCRKARAWLEEHDIPFTERNIFSEPLSIDEIKEILRMTEDGTDEIISTRSKVFQKLNVNLETMPLQELYQLINEHPGLLRRPIIIDEKRLQVGYNEDEIRRFLPRKVRTFQLREAQRLAN

SEQ ID NO: 6257 - protein, 220 aa, Bacillus licheniformis
MEHDILMSFLVIIGIDLILGGDNAVVIAMASRHLPPRQRQKAIIIGTLIAIMMRIALTMAAVYLLAVPYLQFIGGIFLLYLGYQLLIEKKDAQHVKGGTSLFKAIRIIVIADLFMSLDNVIAVAGASHGRLMLVVVGLMVSVPVIIWGSRLIQAALAKFPLLIYAGSGLLAYTGGEMIVREQELSSFMAQHSTLEMLLPVLTVIFVILASIYYEQTSEKH

SEQ ID NO: 6258 - protein, 212 aa, Bacillus licheniformis
MEIERINEHTVKFYISYGDIEDRGFDREEIWYNRERSEELFWEMMDEVHEEEEFAVEGPLWIQVQALDKGLEIIVTRAQLSKDGQKLELPIPEDKKQHVAEESLDALLDDFQKEEQAEEQKLQFVLKFDDFEDLISLSKMSVSGCQTTLYSHENRYYLFVDFNELPDEEVENQLSILLEYASESKMTIHMLKEYGKLIAADHALHTIKKHFA

SEQ ID NO: 6259 - protein, 338 aa, Bacillus licheniformis
MTKRGRCYGFTILLVFALILGGCGGNTASNKAANEKDFKPSKAIEVVAPAGAGGGWDTTARTISKIMGEEKLIEKMAVVNKPGGGGASGWSYVHRKKGDNHTLFVTSPPILFVPLNGQSQYGHNDFTPIASVIADYGAFVVHKDSPYQSMTDLVDALKKDPKAASIVGTSSPGSMDHMQFVSAVQKAGVDAKKLKYITAQDGAGMSMLLGKKADVYSTGVGEAAEQARAGKVRVLAITAPERMKGDTVKDFPTLKEQGIDDEFTVWRGFMGPPGMSKSAVKYYEEKIKEMMEKDSWKSIRDSYGWTDNFMGHQEFKDYLDTQYKEMKALLDEIGLGDK

SEQ ID NO: 6260 - protein, 151 aa, Bacillus licheniformis
MRITNRAVSVIILAVAAIYLALSFNLDSYPYAVIDADVLPKSLGILLLILGIFLFFEKDQKDTTVKKLFQLQKKDVKVMMLCVVSLLIYISVLEFIGFLLSTVMLLLVLPAVLGYRNWKTAAIVSLVFSSTIYFSFNYVLNIMLPQGVMPF

SEQ ID NO: 6261 - protein, 501 aa, Bacillus licheniformis
MLDSILYGFQVALTLQNIMFAFIGVLIGTIIGMLPGLGPITAIAIMIPLSYGMDPASALILMAGVYYGAVFGGSTSSILLNAPGVAGTVATSFDGYPMAKQGKAGKALAIAAICSFAGGTITVVALMLVAPTMANIAVTFGPTEYFALMMLGLVAISSLSEGSTVKALISATLGFMTATIGIDPQTGTERFTFGAASLLEGIDFLIVALGLFALAEVAFLIKTRNKPMTEGASQVGSLKVTKSEMKEISGPIARHSVIGFLLGILPGAGATIASFISYITEKRISKHPETFGKGNIKGVAAPETSNNAATSGAFVPLLTLGIPGSGTTAVLLGALLVVGVQPGPLMLTDHPDVFWGVIASMYIGNLFLLILNLPLIPFLSKILLIPKQLLISLIFVFCLIGVYAVTFNVVHLYILVFFGILGYFMRVLSFPAAPFILAFILGSLMEESFRQAMTLSSGSLSVFFESPVTIGLLITALLSLIVPPISRAMKNRNKKSIDLEG

SEQ ID NO: 6262 - protein, 238 aa, Bacillus licheniformis
MKALQVFIVEDDIRNADIHQKLISKIDGFSVIGIAENFQDAKDLLPDVKPDLVLLDIFLPDGSGMELLWLIRQTLRHTDVMMITAAKEVEYVEQAIRAGAVDYLIKPIMFSRLKETLLNYRSYRLKVNEMSSIDQTDVDSLMAKRRSITKEQIAKADYPKGIDGLTLKKVAGVLNKSENSDGITAESLGRTIGVSRTTARRYLEFLAAEKHVKTELYYGTVGRPERRYKPVKNESPET

SEQ ID NO: 6263 - protein, 531 aa, Bacillus licheniformis
LRKGVFDIKRKLTTKLTLLILTLLLLLLSVMSGLYLIILENSLKTQIQARALDMAKTLAHMPSVQKAFETDDPSRTLQPIAENARKQSGAQYIVIGSADAIRYAHPDPGKIGKPMVGGDNRRALEKGEAYVSEAVGTLGPAIRGKAPIHNENGEIVGIISVGFLIENIQDIVYQYQSKFIFLLGFVVLMGILGAVYISRNVKKSIFGLEPYEINQLYTEKQAITESVHEALIAINKHEEITLLNRKACELLRVESEDQWLGKPISELLPDTLLPEVLKTKTAQKDQELTIGNEELIVNRVPIFENEKIRGAVASFRRKTDIDELSKKLAQTSQYAEGLRAQTHEYSNKLNTIAGLIQLESYPEALELIQKENKSHQDMLQFLIHSIPDPLLSGLLLGKVNRAKELHINLEIDESSKLNALPDEMDKGKFITILGNLIENAFDAVSHKKDRSILVFLSDGADHILIEVEDSGDGIPEGEQERIFQKFYSTKTANHRGLGLFLVKEAVNALNGQIKADKSDLGGALFTVVIPK

SEQ ID NO: 6264 - protein, 382 aa, Bacillus licheniformis
MFSAMIDQGGTICLADGYKAEDLKRLRKRHAFYCPVCRCELDLKIGSVKLPHFAHKPDAACPVPHEPESPYHLKGKRLLYEWLGRQGLRPVLEPYLQEIRQRPDLLLEHGTRQVAVEFQCANLNAAAYRKRTEGFLRLGIEPVWILGGNRIKRLTGDLFQLSRFHWQFIQKSDKPPKLLFFCPEQKAFIILEHLIPFQTNKTSASLRFLPLAEASWRNVTERESRSPLQLKGWKKNILSFRMSAVRFLSKETKQIAALFYENHQLPLPFFPSEAFLPVPSGYIFAHPVYVWQGYLFLFITKHDTFRLQSALHYMDWLIKGKRLKLRWSGRQTAADAVGEYICFLHKKGFLVRKEEFYYSEGSFVPEPRLEALLKRDEHYFSE

SEQ ID NO: 6265 - protein, 609 aa, Bacillus licheniformis
VAEEKKSKKLPSREEVKQEDTWRLEDIFPSDDAWNEEFQAVKELLPKLSEFKGKLGHSADDLYEALTYQDKVMERLGKLYTYAHMRYDQDTGNSFYQGLNDKAANLYTQAASATAYMVPEILSIQEEKLQQFLLEKEELKLYSHALEEINKERPHVLSEEEEGILAEASDVLSSPSNTFGMLNNADMEFPEITDENGEKVQLTHGNYITFLESENRDVRRAAFKAVYETYGRYKNTLASTLSGAVKKDNFYAKVKHYKSAREAALSRNSIPEEVYDNLVSTINKHLPLLHRYVELRKKVLELDEVHMYDLYTPLVKDSGMKVTYEQAKDYMLKGLAPLGEEYSSILKEGLNNRWVDVYENKGKRSGAYSSGTYGTNPYILMNWQDNVNNLFTLVHEFGHSVHSYYTRKYQPYPYGNYSIFVAEVASTTNEALLGEYLLNTIEDEKQRLYILNHMLEGFKGTVFRQTMFAEFEHEIHVKAQEGEPLTPELLTSIYYDLNKKYFGDNIEIDKEIGLEWSRIPHFYYNYYVYQYATGFSAAQALSQQILKEGKSAVDRYIEFLKAGSSDYPIEVLKKAGVDMTSSEPIEAACKKFEEQLNEMEELLQKVNHS

SEQ ID NO: 6266 - protein, 55 aa, Bacillus licheniformis
MLQIILGLASILFFFVLNILGLMNMLPLYITSPLLFISILFTISRLNHRKTFKGF

SEQ ID NO: 6267 - protein, 300 aa, Bacillus licheniformis
LTLNQRDQFFSHCHGHPQKPMEIYMFVDPLSPECWALEPAIKKLKIRYGRFFTLRIIAACSITALNVQKRKKRRLAEAWEKIACRSGMSCDGTLLHDKALSAPYLASLALKAAELQGRKAGLQFLRCMQESLFLNQQDITEEQVLLAIAEHTQLDLEEFKRDLHSQSAVKALQCDLKIAAEMEVASVPTLTFFNSLREGEGLKVTGNYSYEIYEEVLFEMLGDEPKPSQTPPLELFIEYFQFVADKEIAVVYDWTLEQVEREMKKLAFARKVERVEAKHGMFWRYINEHHDAGPLYQCEK

SEQ ID NO: 6268 - protein, 132 aa, Bacillus licheniformis
MGQSFNAPYEAIGEELLSQLVDTFYERVKRHPLLYPIFPDDLTETARKQKQFLTQYLGGPPLYTEEHGHPMLRARHLPFPITPERADAWLSCMKEAMDHVGLKGEIREFLFERLTLTARHMVNQPKMEDGSH

SEQ ID NO: 6269 - protein, 217 aa, Bacillus licheniformis
MNINHLAALLELQAIRSFYPASDSGSEDAGFDFSSILNQYLSNVGGLESSQPAVAPTVSTASQLQAPLAAEKPEAIAAVPSAAAKPVSFGGQNQNIDQIIKNAAEKYGVDEKLIHAVVKQESRYQEKAVSPAGAMGLMQLMPSTAKALGVNNAFDPVQNIEGGTKYLKQMLDKYSGNVKLALAAYNAGPGNVQKYGGIPPFKETQNYVKKITSNYYA

SEQ ID NO: 6270 - protein, 191 aa, Bacillus licheniformis
MSQELEIEFKNMLTKKEFEKIKSYYQFSSEQFVIQKNHYYDTPSFSLKEKGAALRIREKQQRFVLTLKEPAPVGLMETHQELTRKPEIETFMIPHGPVYDRLKRLGIEADELILFGTLATSRAEKKLPQGLIVLDHSRYLMVEDFEIEFEVTDYERGKRDFSELLKSFGVIPERETKNKIVRFYEQKLKDQ

SEQ ID NO: 6271 - protein, 121 aa, Bacillus licheniformis
MQNRIEITEANLRNDRLVLTSEINDGAERKPAGRMLTDSDHFAFVYILEQDESFEYVILNEGIWSDLKAALDAGLPVFLHIGNTELELNGFHDELGYLIENIKDNANYGEEMEERVKRIFL

SEQ ID NO: 6272 - protein, 211 aa, Bacillus licheniformis
MDEKQWEQFLAPYRQAVEELKVKLKGIRTLYEYEEEHSPIEFVTGRVKPVPSILEKAKRKNIPLHNIESMQDIAGLRIMCQFFEDIRIVVDMLLARKDFTVVDKRDYIAEHKESGYRSYHLVVLYPLQTINGEKQILVEIQIRTLAMNFWATIEHSLNYKYSGNIPEKVKLRLQRASEAASRLDMEMSEIRGEIQEAQAAFSRKKKDEDDG

SEQ ID NO: 6273 - protein, 267 aa, Bacillus licheniformis
MMKFAVSSKGNAVSDSLKSKIQTYLLDFGLECDEEEPDIVISVGGDGTLLYAFHKYSGRLDKTAFVGVHTGHLGFYADWVPSEIEKLVIAIAKTPYQIVEYPVLEVIVRYNDGSDEARYLALNECTIKSIEGTLVTDVEIKGELFETFRGDGLCLSTPSGSTAYNKALGGAIIHPSIRAIQLAEMASINNRVFRTVGSPLILPEHHTCLIKPINDVTFQVAIDHLTLLHKDVKSIQCRVANENIRFARFRPFPFWKRVQDSFIGKGE

SEQ ID NO: 6274 - protein, 296 aa, Bacillus licheniformis
VSDFLMKQIITEEDSGVLLKEYVQRLGISKRMLTDIKFGGGDLLVNGGHVTVRYVLQKGDELVIQFPPEKMSKSLQPEEVPLHILFEDDHVLVLNKQPCISSIPSREHPSGSLANGLIHYYQRTGVHATVHLVSRLDRDTSGVMLVAKHRFAHSLLSGLQKKGAVKRQYRAVVHGLIAEEQGTIDAPIGRKSSSIIERAVIPDGQKAVTHFWVNRRFSGMTDVSIRLETGRTHQIRVHMSHIGYPLCGDTLYGGTRGFINRQALHSERLTFFHPFTMEELTFQAPVPNDMRQLIES

SEQ ID NO: 6275 - protein, 246 aa, Bacillus licheniformis
MKYDVIGDIHGCYDEMIALIEKLGYSLTSGVPVHPENRTLVFLGDLTDRGPKSLEVVEFVGRAVEEGAVRYVPGNHCNKLYRFFKGNPVKLQHGLETTAAEYRNLPKHKQKDIRDLFMRLYENAPLYEILHNGELVVAHAGIKAEDIGKKPVGKVKQFVLYGDITGETLPDGRPVRRDWAAHYRGEPWVVYGHTPVKNPRMIHHTINIDTGCVFGNRLTAFRFPELTTESVPSSLPYDESRFRMEA

SEQ ID NO: 6276 - protein, 40 aa, Bacillus licheniformis
MRFFASSPFVFHMYIHCPKPYKSSFCNFLRRKSGIFTFFS

SEQ ID NO: 6277 - protein, 614 aa, Bacillus licheniformis
MEHTSVSSLVVVLIIAFLTPILLHRFRLSIPVVVAEIIMGLIIGKSGFDLVAQHDTWLETLSMLGFIFLMFLSGLEIDFSVFEKGKKKQLLPSGKEAPNTFKTASVIFIAVFILSLGLSYSFVMAGFIDNAFLMTLIISTISLGVVVPTLKEERLMKTNIGQIILLVAVIADLVTMILLAVFASIYGDENSNMWLLMILFAAGVVLYLFGRIFKKRPFVEVLSKGTIQIGTRAIFTLIIVLVALSESLGAENILGAFLAGVLVSLLSPNKELVQQLDSFGYGFLIPIFFVMTGVKLDIWSLFGNPKILVMIPLLFVALLISKVVPVLFLKKWYDMKTVLASGFLLTSTLSLVIAATTIGERIGIIDAQMSGALILVAVITCIITPTGFKKLMPKTESEKEKKTITFIGANQMTLPVTLELSPEDYHVRILHVRQEKKEEKLADPVFDVEVLPDYEYETLQSFGVFQTDILVVATGSEERNTGIALYAKEQKVARIIASADSPDAESRLKENGIDTFSILLSTKTLLRALIEAPGVMKLLTNQDASLYQINMSNERFDGVLLREFPFTGDVIFVRIFRGVDSIVPHGDTRLQMGDRLIATGSREYIAELKKTLGD

SEQ ID NO: 6278 - protein, 233 aa, Bacillus licheniformis
MKFSEECRNSAATWWEGSFVHPFIQGIGDGTLPVDRFKYYVMQDSYYLTHFAKVQSFGAAYAHDLYTTSRMAEHAKGTYEAEMSLHRKFTDLLGITKEELESFQPSPTAYAYTSHLYRSVVSGSFAEILAALLPCYWLYYDVGETLKTCRPDNAIYQEWIATYGGDWFKKSVTEQINRFDELAENADEKTRAKMKENFVISSFYEYRFWDMAYQKESWSKSGVDQLASARDHR

SEQ ID NO: 6279 - protein, 203 aa, Bacillus licheniformis
LHLHAITDDKHSVEELSAKIISIHDAVDFIHIRERSKKVSEISSLIDRLAEEGVDKRKLIINDRVDIALFHHIHRVQLPSHGFSVKSVRSRFPHLKIGKSVHSPEEAVQAETEGADYVLFGHIFETDCKKGRKGRGALSLAEVKAAVRIPVIAIGGITEQRLAEVKMADGIAVMSGIFSHDRPNEAAARLASLAKGDSYEKAL

SEQ ID NO: 6280 - protein, 369 aa, Bacillus licheniformis
MRKRYDTIVIGGGIIGTSIAYHLAKAGKKTAVFESGEVGKKATSAAAGMLGAHAECDKPGTFFEFARASQKAYKRLTGELKDISGIDIRRHDGGILKLAFSESDREHLMQMGALDSVEWLEADEVYKLEPNAGKGILGANFIRDDVHVEPAAVCRAFARGARMLGADVFEYTPVLSIESEAGAVRVTSASGTAEAEHAVIASGVWSGALFKQIGLDKRFYPVKGECLSVWNDGISLTRTLYHDHCYIVPRHSGRLVVGATMKPGDWNEQPELGGIEELIRKAKSMLPGIESMKIDQCWAGLRPETGDGNPYIGRHPENDRILFAAGHFRNGILLAPATGEMMADMILGNPVKTEWIEAFKAERKEAVHR

SEQ ID NO: 6281 - protein, 67 aa, Bacillus licheniformis
VNIQLNGRKIEWRDDGGTIYDLLASYNLENRVVVVEKNRRIIGKDQYQTVKLEEHDVIEIVHFVGGG

SEQ ID NO: 6282 - protein, 255 aa, Bacillus licheniformis
MLKIADRQFSSRLLLGTGKYPSFEIQKEAVSASESEILTFAVRRMNIFEESQPNFLEQLDLSRYTLLPNTAGAKTAEEAVRIAKLAKASGLCDMIKVEVIGCDRSLLPDPVETLKASETLLEEGFIVLPYTSDDVVLARKLEELGVHAIMPGASPIGSGQGIINPLNLSFIIEQAKVPVIVDAGIGSPKDAAYAMELGADGVLLNTAVSGAKDPVQMAKAMKFAVEAGRLGYLAGRIPEKNYGIASSPEEGKLTI

SEQ ID NO: 6283 - protein, 336 aa, Bacillus licheniformis
LTGRYSRQELFHPIGPDGQEKLSRARVLVIGAGALGAASAEMLVRAGVGSLTIADRDYVEWSNLQRQQLYTEQDVIDHMPKAAAAEKRLRLINSSVQVTGIVADVTAEKALELAEEASLIVDATDNFETRLIMNDAAVKLGIPFLYGACVASYGITYSVIPGKTPCLHCLLGHLPANTMTCDTAGVIGPVVQQVAAYQVTDALKLLTGHEPSGMLRSFDIWTNERSEVRADTLKHETCPTCGKGEFPFLSAENETKAAVLCGRQTVQIRPAAEQPLELESLAAKLKKAGLNVTGNPYLVSCRAEDFKFVIFRDGRALIHGTNDINRAKTIYHRWIG

SEQ ID NO: 6284 - protein, 272 aa, Bacillus licheniformis
MSIYKALTIAGSDSGGGAGIQADIKTFQELGVFGMTVLTAVTAQNTTGVHGVYPLSPEALGAQIDAVAEDLKPDAVKTGMLWSAEMIEVTAEKIATYELKRVIVDPVMIAKGGASLLNEEAVETLKRRLLPLAYAVTPNIPEAEVLTGRSIQTMEDRKKAARDLHEMGVRNIIIKGGHQPEDGKVTDLLFDGETFTEKTNSYIKTKNTHGTGCTFAAALTAQTAKGNGIQGAFRIAEAFVHEAVVHSLDFGAGHGPTNHFAYQKLSNAGLEL

SEQ ID NO: 6285 - protein, 258 aa, Bacillus licheniformis
MNLSLEGRNIVVMGVANKRSIAWGIARSLHNAGARLIFTYAGERLEKSVKELADSLERNDSIVLPCDVTNDQEIEACFADIKKEVGVIHGIAHCIAFANKEDLAGEYLNTTRDGFLLAHNISSYSLTAVAKAARGIMTEGGSIVTLTYLGGERVVSNYNVMGVAKASLDASVKYLASDLGKDGIRVNSISAGPIRTLSAKGISDFNSILKEIEERAPLRRTTTPEEVGDTAAFLFSDLSRGMTGENLHVDSGYHIIAR

SEQ ID NO: 6286 - protein, 41 aa, Bacillus licheniformis
LLRIVFSARHLDPSDLFMVYLYAKKEKSEEKKKQSFSGLLF

SEQ ID NO: 6287 - protein, 159 aa, Bacillus licheniformis
MSSRKHDAEQKPLMYIVQPDYDKAEANMQDILIKRKKKAKPEASEQKARRKEQQDEAVRPDEKDEAEAVFNDEANRSEKGVKPIKKPLSKMTIAEKIDFLASLPGNMPKTLCLIEADGKTYRGTIVGKKGDSVFVRTSSKGAPAELPIESITSLHPLGF

SEQ ID NO: 6288 - protein, 149 aa, Bacillus licheniformis
MTKCSAENCVCEAVENIHDLQNAIEEEGCPTSCFSNLLSPSRHLGDTIPFILYTSKSKPFVAFGNVGELQAGPCFSTVFFRVENIDDCCATLRLLIAFDDNRRVLDFTEDKDKICDVFRLEKTSFCIEVDLECYCAIECLNPKLINRSN

SEQ ID NO: 6289 - protein, 162 aa, Bacillus licheniformis
MSCGKHHGRHENCVCDAVEQIIKEQDAVEETTACSTSCFGNLLSPTVSGKDTIPFLLYDKKGGLFSTFGNVGGFSDDMQCFESIFFRAESLKDCCATLSILRPVDINGDTLSVCHPCDPDFFGLEKTDFCIEVDLTCFCAIQCLSPDLVDRAADKKHNHHHG

SEQ ID NO: 6290 - protein, 170 aa, Bacillus licheniformis
METRPYSWIALDPECEHPGNDYHPSYPKKKLCDDYTCNCGRKGQNGFIDSDLDQLHLNKQLSDETIIIKDSCDVQVSTEDTQTLASVMTAAQTLAVTIILAIIDDPDLAELVTTDLLQVTANKQTNRQKLVIDNSRNVHVTTEDTDTAIIVSTFVQTVVITITALIVGLL

SEQ ID NO: 6291 - protein, 132 aa, Bacillus licheniformis
LADFEKLQENVDPIMKSVVKNILKNRGVTSDKVRTLSEEEKENIFNMLEDLKKQTDALVQKQKEKAAAPNEKGTKREKNADASSENGERPRRRRNRTNRLREKLRQRREQENTATAENSTESDTSAEKNGDL

SEQ ID NO: 6292 - protein, 128 aa, Bacillus licheniformis
MSFHEKAEALYAETFDELHREYDQLIEVIDSEHVTVNTANITAALSLQAIVISLTILSAQLAIEDEDTADIVSEHLLAVHRLQSRRRVIIKVIGSRNVTITLSSLEILLSVQVLTEVLIALITELDIL

SEQ ID NO: 6293 - protein, 118 aa, Bacillus licheniformis
VIQSWFLFFLFSIAVFRLTRLIVFDTIMAPFRSLFHEEVEEKNEKTGETETYLVMKGKGVRAWVGELLSCYWCTGVWCTAFLLVFYAFVPVIAEWLILLLSIAGLAGVLETIVSKWLD

SEQ ID NO: 6294 - protein, 218 aa, Bacillus licheniformis
LRYIDSTSCSNKFIASPPYDGVCTRRKIGNKKTGCIPAFFDINRFSFFCRIRSLFSSLFLRKWTDDCWKRSLIGLAAFFSLVSLHSFLSHAYTPLYESSFHKLLMTNPHSIEPFGNDRFQYSSQAGDRKQKNQPFSNDRNKCVKNKQKRGTPHARAPIAAQQLADPRSHAFSFHDKIRFGLSRFFVFFFNLFMKQASKRRHDRVEHNQPRQPKYRDRK

SEQ ID NO: 6295 - protein, 69 aa, Bacillus licheniformis
MNLFEQLVESIYRKHDQTQAGHDKVLFEQQKELETFDRSAEQFGRQIEAFAENAEKWLGEDGSLPGIFK

SEQ ID NO: 6296 - protein, 43 aa, Bacillus licheniformis
MGFCCGGYGGGYSGGYGGGYGSTFVLIVVLFILLIIVGASFKY

SEQ ID NO: 6297 - protein, 85 aa, Bacillus licheniformis
MDNQFFKNIEKKTGVSMNDVMQLANSLQNANFKDENTVRSVIKRVAKLANKRVPKEMEDKIVESIVSGKEKMDFNTIAKMMNSKK

SEQ ID NO: 6298 - protein, 760 aa, Bacillus licheniformis
LKCARFNNRDIHIHTYSREHLQFLFDEARKDRITCKYCGLPLRLKLSIHEEPHFFHRENGDFSQCEAACLNEKTEQKTKQNDYTESGVFRLPKGKAIGEEKKADTDFWTPPREASIHSPFSPAAETAPEPVFPNVPLNEKQLAAVTAPEEPLLVLAGAGSGKTRVLTARAAYMISRLDIPPSAILLVTFTTKAVKEMKERMASLYGLPMQTVNRLVTGTFHSFFYKILYHHDPAKWNGEHLLKWEWQKEQYIKMALAEEGLDEKDFPVDQAIQQIGYWKNAYLPGEQIPLEDEWEKRVHRLYRHYEEQKAARRQFDFDDMASACWQLFQEQPDILKRYQTRFHAILIDEFQDINPVQYAIIKLLASPENNLTCVGDDDQSIYAFRGSSPSFILDFEKDYPKAKTVRLTTNYRSSHPIVASADMVVRKNKKRFPKTLSAARDDRQKPLLFYPYDEEEEAIMIVSDIQEKIEMGAKPDDFAILYRTNSSGRAIFERLHQSAIPYTAEQGVRSFYSRRIVRQMLAYLYLSQNQDDAEAVKQILPALFLKQSALNTLKALSITEDCTMVQALEKLTDIKPFQLDKIKKIVPFFPGLKTMKPVEAISFAEEKMGFSDYLKKRGNEGNKLEKGSDDLRDLKTAAKKFKTIPEFLEHVDHMRAAEKQKADGYGVQLLTIHRAKGLEFKTVYILGVQDGSIPHDFALETARKGDETALEEERRLLYVAMTRAEDRLYISVPSFRRGRTAYRSRFLQPILRPNPQVQLQ

SEQ ID NO: 6299 - protein, 82 aa, Bacillus licheniformis
MGYLPPVRNDQYIQYANRSISQKSNYAYIQKTANIPSERAYREVEKREENQTAAFRRVEEKKTEKSAQPPCCEKGGKRALRQ

SEQ ID NO: 6300 - protein, 195 aa, Bacillus licheniformis
MGSIVNDILMWLTDLGYFGIAIGLMIEIIPSEIVLAYGGYMVSNGSITITGAVIAGVIGGTIAQLFLYWIGYYGGRPFLYKYGKYLLIQKHHIQTAEKWFEKYGGGVVFSARFIPVVRHAISIPAGIAKMPILKFTGLTVLAIIPWSILFVYLGVQLGSRWDHVENVARTYTTPIMLGAAAMIILYFGLKKLRRK

SEQ ID NO: 6301 - protein, 328 aa, Bacillus licheniformis
MTSVLVTGGAGYIGSHTVLELTKQNRSVVVLDNLSTGHREAVSGVSFYEGDIADAALVKAIIKHHDVDAVIHFAAKSLVSESIEKPEIYFRENTLKSCAFFETAIKEGVNNIVFSSTAAVYGIPEKAPIKEAAPLSPVNPYGESKLMIEKYLHWVGKTHGVKWAALRYFNAAGAALNGAIGEDHDPESHLIPLVLQTALGQRKQLSIFGEDYSTPDGTCIRDYIHVLDLAPAHLAALDGLYEDRLKQNVYNVGTGAGHSVKEIIETAENMTERSIAAKTDERRAGDPPVLVADSRTLMEDTGWKPQYSDLQTIIQSAWQWHKAHPDGF

SEQ ID NO: 6302 - protein, 296 aa, Bacillus licheniformis
MKVKKAVIPAAGLGTRFLPATKAQPKEMLPIVDKPAIQYIVEEAVQSGIEDILIITGRNKRSIEDHFDRSVELEQNLLAKGKNDVLKEIREIADMANIHYIRQKEPIGLGHAVLSAKHFIGDEPFAVLLGDDIMVSETPALRQLLEVYEEYQTEVIGVQPVDPADVSKYGIIQTSAQKNKVYQIDDLVEKPTVKDAPSNIAVMGRYVLRPSIFPVLEQTKRGAGNEIQLTDALREICREQSMYARKLKGSRFDIGDKLGSFKASTEIALMRDEMRPKLLAYLESVLKKEAQKGAWQ

SEQ ID NO: 6303 - protein, 131 aa, Bacillus licheniformis
MNKKNIPTLVRFGTVGAGNTLVDFVVFFLLTSLHVPYLAAQLFSYSAGVANSYIWNRTWTFQVKEKAHGAEIVRFIMINLAAAGATFVLLYIFQKAGLSLFISKMSATVAGMAINFTGNKLWVFQEPGADS

SEQ ID NO: 6304 - protein, 139 aa, Bacillus licheniformis
VEAVIVKNQQQLEDAFFVRKEVFIKEQHVSPEEEMDHLDQESSHLVIYDEKEPIGAGRLRLVDGYGKLERICVLKSHRSLGVGNLIIQALEEEAAKQGASQFMLNAQTQAVPFYEKHGYKVVSEEFSDANIPHVKMVKK

SEQ ID NO: 6305 - protein, 169 aa, Bacillus licheniformis
MKYGIVLFPSKKLQDIANSYRKRYDPNYALIPPHLTLRTPFEVSEDEISGVVRHLRELSKELKPVTLKITKFSSFAPVNNVIYMKAEPTEELMQLHEKMYSGVLEDKPEYAFVPHVTVAQKLSDDEHSDVLGTLKMRDASHEEVIDRFHLLYQLDNGSWTVYETFILGA

SEQ ID NO: 6306 - protein, 240 aa, Bacillus licheniformis
LAMKTGVIQEKKLFSEELGEEMELLVYLPSSFSPLYKYHVIIAQDGHDYFRLGRISRQVEELLANGEIERSIIIGIPYKNVQERRLTYHPEGSKFEAYKRFLANELVPFTDREYPTYQVGSGRTLIGDSLGGTVSLMTALDYPNMFGNVIMQSPYVDRHVLDKVKQSDSLQLISICHQIGEKETAVKTTDDQILDFTGPNEQLKELLESKQTNYDFKAFDGDHKWTYWQPLITPALKKML

SEQ ID NO: 6307 - protein, 110 aa, Bacillus licheniformis
MNLIIRLVKLKGCWEDLVPKMRCDASSIITNNPESGKSRRDFTAERKRYRERYGYPPIDRQCLGTKKNDHKKSRLPNSSAALFASFTREFRVTMNGNVHKHYFWRNSPWL

SEQ ID NO: 6308 - protein, 47 aa, Bacillus licheniformis
VKSRRLLPLSGLLVIMDDASQRIFGTRSSQQPFNFTRRMIKFMLDVA

SEQ ID NO: 6309 - protein, 162 aa, Bacillus licheniformis
MNQVQALRGDLFHELETGIRSTCHLLKKVKESDWSYRPADRMRSLKELASHLTAIPEADLAIMQEKEEDVIARIEKKYGALQSADQMAAAMQKGFDAFQTYMTSLSDEDFLTKKTKPFYLDEGMTQSRWLTETLTHIFHHRAQLFNYLKQLGYDVNMFDLYL

SEQ ID NO: 6310 - protein, 315 aa, Bacillus licheniformis
MPKTERLIELMMTIHTKRKFTAGELAVEFGVSYRTVLRDLDELSALGVPIYSETGANGGYYLLNEPVLPPLFFTQSEAAAMFFAYQSLQFFGSLPFDAETRMVLKKFYRHLPPETQERIDAMKDRIVFWNPHRPKAAEHLETLLDAAVTQSVLTVVYDGTDECTERSIQPIGLYSWNGFWYCPAYCFKRQAFRLFRADRILRAEKADSGQARQLPYPSVLSWIKHSESECPEPVRLQAELTRRGARRAAADVDLFKILTMRDDGTGAIDASIPRSELEYFGELLWNLGAEVTVTEPAEIKLHLKRKAADILARYG

SEQ ID NO: 6311 - protein, 374 aa, Bacillus licheniformis
MTEHVQTTLAQIGNRSDEITGTVNPPVYFSSAYRHKGIGESTGFDYIRTKNPTRQLVEDAIAKLEGGTRGFAFSSGMAAIQTIMALFQSGDELIVSSDLYGGTYRLFENEWKKYGLRFLYDDFSDEDCIKSKITDNTKALFVETPTNPLMQEADIQKIAQIAKENDLLLIVDNTFYTPVLQRPIELGADLVIHSATKYLGGHNDLLAGLVVAKGEELSEEMFQHQNAIGAVLSPFDSWLLMRGLKTLALRMRQHQENARELAAFLEEQEEIADVLYPGKGGMLSFRVQKEEWVNPFLKNLKTICFAESLGGVESFITYPATQTHMDIPEDIRIANGVCNRLLRFSVGIEHVSDLKQDLKAALEKVKGEAVPHES

SEQ ID NO: 6312 - protein, 391 aa, Bacillus licheniformis
MSHENWTLETKLVHNQNKTDGATGAVSVPIQHASTFHQDSFDKFGEYDYSRSGTPTRKALEDTIAELEGGTRGFAFSSGMAAISTAFLLLSKGDHVLVTKDVYGGTYRMITEVLSRFGIEHTFVDMTDLNEIALNIKENTKVIYLETPSNPTLGITDIRGVVKLAKAHGCLTFLDNTFMTPALQRPLELGVDIVLHSATKFLSGHSDVLSGLAVVKDKKLGEELYKLQNSFGAVLGVQDCWLVLRGLKTLQVRLEKASRTAQQLAEFFEKHPAVKQVYYPGLSSHPGASIHKHQANGAGAVLSFELEDAEAVKQVVENVSLPVFAVSLGAVESILSYPAKMSHAAMPKEERTKRGITDGLLRLSVGVENADDLQADFAQALEAVSGALARS

SEQ ID NO: 6313 - protein, 396 aa, Bacillus licheniformis
MNSSLISPDDVWVLWGFIAVWAAVSIYLEQRFRWAAAVSGAVLALGGSMLFTNAGILPAESPFYDAVWSYVVPLAIPLLLFQINVRKILKESGRLLMMFCISALGTAAGSVIAFFLFKDQIPHLDKIGGMISASYIGGGVNFAAMAAKFSTPGEYVSSTVVADNFMMAFLFFILMGIPALTWFQKRFGVQEVAGGRENQAEAYWKRKDISLQDIALNIGTAFAIVAVSVKAAAFFKERFSSDGGFQFLAFILGDQFLLLTTLTILLTVVFPRYFERLRGSQEIGTYLIYLFFVVIGIPADLRIILMNAPLLLAFVFVIAMSNLLVSLFCGKLFRFRLDEILLACNASVGGPTTAAAMAIAKGWRGLVAPVMLVGTFGYLIGNYVGTFLGTWFSTLL

SEQ ID NO: 6314 - protein, 189 aa, Bacillus licheniformis
MDINGLINELHLMQQSYATLFSVVNKVQTRGDEYMEILTARQHMALIAIAHLPPETATLTNISKKLGTTKQTANKLMTGLVKKGYVKSVPSQKDKRSINIEMTAEGKKALVECSERSVYFLADLFQQFTSEEVATFWRLLQKLYRFDGEEHDGFEENANIQLGVGNSLDTERILGEFEKRRYGGENDEK

SEQ ID NO: 6315 - protein, 94 aa, Bacillus licheniformis
MKSDLYVKATTFKIKAKKKFYHAKDKFRQTKETIRRGTKLDRTGPFFSSCIALIIIGCSWGTNAEWLVWLGAASLLSNVLLLFATFFRRNQKSI

SEQ ID NO: 6316 - protein, 457 aa, Bacillus licheniformis
VKQNKREQLVNLFSVLKEKGQINAAVLVAEDGDILYQGAFGYENLADKRLLQEHSLFELASLSKPFTALGILQLAQQGELKIEDPVERWITGFPYQGVTIRDLLTHTSGLPDYMEWFLQHWDHNKIAVNQDIVDMLMNHHPQRYFAPGEGWLYSNTGYVLLAVIIEKASGLSFAEYMKKNIFEPVKMRNSRVYNRRLQPETIENYAYGYVYDVHTAQYVLPDDLEETKYVCYLDGIQGDGTVNSTIHDLYLFDQALYTDCLINQVSKELAFSPASLKNGVSIDYGCGWVLRDSPETGRIVGHSGGWPGYSTVMIRYIDQRKTFIYLSNVEQDDEYEQAIFEAVENILFDKAYKIPDRPADKEKKEIDPAIYKRYAGSYSLQDGTAADVTVDKGRIYMQITGQIRFELFPASETRFFLRSLSVEVEFILEDGVATRLIIYQNGAEEEAVRIVESNSKL

SEQ ID NO: 6317 - protein, 49 aa, Bacillus licheniformis
MQFGDICPAEFPDEHQSDIHGKGAPSIRRLMRLNKFNLLKEPWVMNIVA

SEQ ID NO: 6318 - protein, 327 aa, Bacillus licheniformis
MLKTSKFERRTTVAKTIISGFILFFLLIFSSAEPTSAAFWDTKGDNIIHDPSMIKEGNTWYTFGTGIGNGIRVIKSTDGKTWSAAPSIFATPLSWWKKYVPNHEENQWAPDISYYNGRYWLYYAVSAFGSNTSAIGLASTDRISSGNWRDDGLVIRTTTSNNYNAIDPELVIDKEGNPWLSFGSFWSGIKLTKLDKKTMKPTGKVYSIASRPNNGGAVEAPSITYKNGYYYLFVSFDKCCQGVNSTYKIAYGRSTKSRGLTMTKAARMTEGGGTILDSGNDQWKGPGGADIVNGNIIVRHGYDALDNGAPKLLINDLNWDSKGWPKY

SEQ ID NO: 6319 - protein, 59 aa, Bacillus licheniformis
MDLILKSVDSILIVFLAIFFMWKFVYEIKHEKRKAVILLLLLINVYFIVKVFNLVLQLM

SEQ ID NO: 6320 - protein, 192 aa, Bacillus licheniformis
MKTEKQKMLDGELYHASDPVLCHDRLKARKMTNEFNHSNEIDDNKRTKLIKELFGSTGETILIEPSFRCDYGFNIHVGENFFANFDCVFLDVCEIRIGDNCMLGPGVHIYTASHPLDPSERISGAEYGIPVNIGRNVWIGGSAVINPGVKVGDNAVIASGAVVTKDVPDNAIVGGNPAKIIKYVDSKNTNSM

SEQ ID NO: 6321 - protein, 119 aa, Bacillus licheniformis
MKWLGKSLVASSLLAGILAVSGSPMHVQAQELSKTENLSSHAFAQGIIAPQAIVINRPMRVGQEDQYVGISNVSYSGSAITVRITSDRVYVKAVSPGKATFSYLNSLGQLVINNITVTR

SEQ ID NO: 6322 - protein, 296 aa, Bacillus licheniformis
VHYDALKTFVTLAEVKNFTKTAELLLMSQPSVSMHIKNLEKEFQTKLFERSPKYLKITPTGEILYDRAKQMITIYEQTRQDILDHHNSIKGELKIGASFTIGEYILPSLLFDLQKEYPELELKAVIGNTEEIVQSVRLYKVDIGLIEGQTNEKELSVHAFMQDELFIAASSDHPLAAKQDVTISDLQNQTWVTREVGSGTREYLNHVIRSNGLKVKSFLTISSNQGIKETLMTGIGLSLLSGSVIERDVQHGNLSVIRLKNQTFNRTLSYIYSPVMQDKKNVKTFINALNKRTSSK

SEQ ID NO: 6323 - protein, 62 aa, Bacillus licheniformis
MTCFETEKDNTHHISTIPINQIGFIDAKHLSITAFAAKKHCKRSLITSPLPRGVILLQTKYS

SEQ ID NO: 6324 - protein, 609 aa, Bacillus licheniformis
LQLQVMNSPFNQEQAELLNRLLPTLTASQKAWLSGYLAAVQTADAAAALETLPAEAPAASPAQPVSKEVTILFGSQTGNAQGLAENAAKTLTERGFQVTVSSMSDFKPNQLKKLKNLLIVVSTHGEGDPPDNALSFHEFLHGRRAPKLDDLRYSVLALGDTSYEFFCQTGKEFDQRLGELGGTRLHPRVDCDLDYDEPAAAWLDGVISSLNEGQEQGASAAPAQTAAPQAAGGVTVYSRKNPFRAEVLENLNLNGRGSNKETRHLELSLEGSGLTYEPGDALGIFPENDPELVDMLLKELKWDPNAAVAVDQGENLSLKEALTSYYEITVLTKKFIQQAAEIIENEKLRELAAPENADQLKAYIAGRDLIDFVRDFGPIAAAPQEFVSILRKIPPRLYSIASSFAANPDEVHLTIGAVRYNAHGRDRKGVCSVLCAERLQPGDTLPVFIQPNKNFKLPENPETPIIMVGPGTGVAPFRSFMQEREETGASGKSWMFFGDQHFVTDFLYQTEWQKWLSEGVLTKMDVAFSRDTEEKVYVQHRMLEHSKELFEWLEEGAAFYVCGDKNNMAKDVQNALLEIIEKEGGKSREEAEAYLAEMKKQKRYQRDVY

SEQ ID NO: 6325 - protein, 572 aa, Bacillus licheniformis
MGNEILKAPEGPPSDVERIKKESDYLRGTLKESMLEPLSAGISDDDNRLMKHHGSYLQDDRDLRNERQKQKLEPAYQFMLRVRMPGGVATPEQWLVMDELARKYGNGTLKLTTRETFQMHGILKWNMKKTIQSIHSAMLDTIAACGDVNRNVMCTSNPYQSEIHREVYEWSKKLSDDLLPRTRAYHEIWLDEEKVAGTPDADEVEPMYGPLYLPRKFKIGIAVPPSNDIDVFSQDLGFIAIVEDDKLIGFNVAIGGGMGMTHGDKATYPQLAKVIGFCKPEQLYDVAEKTITIQRDYGNRSVRKNARFKYTVDRLGLETVKNELENRLGWSLAEAKPYHFEHNGDRYGWVKGVKGRWHFTMFVEGGRVTDYDDYKLMTGLREIAKVHTGDIRLTANQNLIIANVTSQKKKKISELIEQFGLTDGKHYTALRRSSIACVALPTCGLAMAEAERYLPKLIDKIDEIVEENGLKNEEITIRMTGCPNGCARHALGEIGFIGKAPGKYNMYLGAAFDGSRLSKMYRENIGEEEILKELRNILPRYAKERNEGERFGDFVIRAGIVKETTDGTNFHD

SEQ ID NO: 6326 - protein, 295 aa, Bacillus licheniformis
LVINMNSLHIFVKVAETLNMTEAANELYISQPAVSKAVKSLETSLGVKLLIRDKQNKIKLTDAGKEIVVLARQMIVIENKIYQVADQENHLLRGKVKVGSFPAVSANILPQAIASFRSKYPLVQIELLEGTSDQIKQWVETRMVDLGIVASPFDGFESQVLFQDRMTAVIPEQYHHLKDAPFIDLKKYQNELIFCKGGHEIAVSQIFQKHRLELKENLTVQNAETLVNMVHNNLGIGLISSFSLSSVSHRLIKKDISPQIIREVGMITPSFEEATPAAAEFMKMIIESETVRAFS

SEQ ID NO: 6327 - protein, 299 aa, Bacillus licheniformis
MFKVLLGIISVTLIWGYTWVTMKIAITDIPPVLFSALRLFIGAVPLFVILLIKGRKRSIGKENIKHYLVMSLLMGLGYMGVLTYGMQFVDSGKTSVLVYTMPIFVTVISHFKLNEKINVYKMLGLFSGLIGLLFILGGGILHVDQNVIFGELCVLIAALSWGVANVYSKLKFKNTDMIHMNAWQLLTGAVMLLIFSFILEPSRPIHWSNEAILSLLFNGLFSTALTFVIWFWILNQIEASKASMALMFVPVLGLLFGWLQLHEPVTFSILIGAFMICIGIFMNTYQFKKVVKKGRGSIW

SEQ ID NO: 6328 - protein, 125 aa, Bacillus licheniformis
MKIEHIAIWTNNLEEMKDFYTRFFHGKTNEKYVNPKKHFESYFIQFESGTRLELMRRPDLAKGEENASGYAHMAFSLGSRQEVDEMTSRFEKEGYQVAGKPRVTGDGYYESVILDPDGNIVELTV

SEQ ID NO: 6329 - protein, 182 aa, Bacillus licheniformis
LKKLIVCLLAVLLILPAGASLAAKNQTSGNLTIKQVMQLTLQAREHFWNTMSGHNPKAKNSTCPSKTFEYRGLPYTYMCSEFSTKAKLTDYLTPVFTKDAIKKGLEKYNIISYKGKMAVPVGDGDNLLGWDKAKIKLISQKNNTRTYEFSVPALDGSVTAKRKITFVKENNKWKINQLDAAI

SEQ ID NO: 6330 - protein, 41 aa, Bacillus licheniformis
VILFPAPGEVPDRILFQYKILFQHEASMFMRREIRETNQWT

SEQ ID NO: 6331 - protein, 244 aa, Bacillus licheniformis
MKKTIMSLAAAAAMSATAFGATASAKEIEVQKGDTLWGISQNYGMNLKDLKKWNQLSSDLIFPGQKLNISSQEEKSEEKQYTVQPGDTLSKIAKEFGVTVSDLQKRNNLKSDLIIAGQTIAINGEAAAAAAPVKQESAPKQNDQPVNVQKEITVTATAYTANDGGISGITKTGVDLNANRNAKVIAVDPSVIPLGTKVYVEGYGEATAEDTGGAIKGHKIDVFIPDKKDAFNWGVKTVKVKILN

SEQ ID NO: 6332 - protein, 474 aa, Bacillus licheniformis
MEQARKGSFMIIAILIVGNFLALINETVMNVALPKIIDDFGISANTAQWLSTGYMLMIGIAVPITAFLMQRFTTRQLFLSAMTLFTAGTLLAGIAPVFPLVLAGRIIQGSGTGLILPLVMNVILTLIPPQKRGTMTGILTLVILFAPAIGPVISGYIVEHYSWRVVFFMMLPVSVFMIFYAAFRLKNVTELTYPKIDILSILLSTVGFGGIVFGFSNAGEAAGWSSPKVIIGLAAGVIGLILFVMRQLRLEVPMLDMRPFRSKIFSISVILMWIVMMLQFSMMLILPLYFQMALELSPLYTGILMLPGGLVLAMTSLVAGRLFDKLGFKPLLITGLIIVIAVLSLFTNISSDTPMAVGMMLYAGFTLGVGLTMAPIMTLGLNQVPKPLYPHGSAIMNTVNQVSGAIGPALYTTILTTVSNRFIAHSSGGSRQELHMQGMTEGVHMVYFVAIAFAAAALAISVFVKSRRAEQHAA

SEQ ID NO: 6333 - protein, 192 aa, Bacillus licheniformis
MAEKMSSRDKILRTASRLFRKQGYHATGLSQITAESGAPRGSLYYYFPGGKEELAQEAIQLTGERIKAYISSAISGEADPVKAFQSYIQMMADGIEEYIIEENDDIPIVSVAAETWSFSERLRQTCEQVYQDWQLVYQEKLLQSGYAPETAETLSVAIQAMIEGAYVLSVTKKNGRPLSAAAEQIPFLLKRS

SEQ ID NO: 6334 - protein, 88 aa, Bacillus licheniformis
MFGYVFLAVYLTALALYTINSAFVHFISDSLLSILAAIAVAPAACRLSEAFSGFPLNRIWTNRPYFKTGLQKRSFFSLKLYRPISIKS

SEQ ID NO: 6335 - protein, 137 aa, Bacillus licheniformis
MIKKTLGTMFAVTMIFLLILTVFTLFFGSYYFGVAGFFAIFGVTYESPWSLFWYILLSFGLGALFEIPEKILSFMIGHKAATFMIECFFTWLAIHLADELMDSITIPLDVEIIACLFLFVIHLAFEDNKERNRTYED

SEQ ID NO: 6336 - protein, 77 aa, Bacillus licheniformis
MKTLDVQALHKAIDQTVEQLKQQSEEIVNIKKSVEGITSLNDALKGKGGDAIRNFYKECHTPFLQFFETFIEEINQH

SEQ ID NO: 6337 - protein, 215 aa, Bacillus licheniformis
MKRALTDQYGSFTEMAENEIEGTDYSVAARDAGSALLVMAPHGGGIEPGISEIVKAFAEGASVYLLEGLKRRGNKSLHVTSAHFDCPLALRMAAGHRYILAFHGYEEPAHRHTLIGGTDRRRALMFKETLERHGFSAELAAERGYLSGTNPASINNRCQTGLSVQFEISTAQRKAMFEQFTLKGRRTSQNEVFSRYVKALKEGACIAYGPSAAGS

SEQ ID NO: 6338 - protein, 218 aa, Bacillus licheniformis
LKFYLSHLEEYVKNMYQKFGFFEPHQIDMNRIAAHFNIWIHYENVNSMMIKHDGMYSIILNSSLSKEKQWEDFAHELCHVLKHAGNQLYMNQMFRELQEFQANQFMYHFCVPTFMLLKMDFPQLRCQAAKMIADLFKVTESFAVKRIELFEKRQAGIQFHEAWMASLSQESESANAPRLEEVDELARYRRETRRTYAAVNGLGKMVAAESRPAYMLRK

SEQ ID NO: 6339 - protein, 117 aa, Bacillus licheniformis
MLGGRLKSLRGKRTQEEVAKQIGVSRARYSHYENGRSEPDYETLKKLADYYKVTIDYLLTGTEKKKNIEDEIADPDLQIAYRDMQEFSPESRQQAIEFIQYLKEKEKKRKPGDKQNG

SEQ ID NO: 6340 - protein, 86 aa, Bacillus licheniformis
VRKRLIEERSKRGWTQKQVSERLGLSEVYVRKIERGTRNPGRETMLKFETLYSVPDRLLFPDLFQVFIDTYCIKENLHKRRRCHES

SEQ ID NO: 6341 - protein, 39 aa, Bacillus licheniformis
VTIGCSRFMTSPSFMQVFFDTICIYKDLKKIGKQQTIRH

SEQ ID NO: 6342 - protein, 98 aa, Bacillus licheniformis
MNLEHPMVTRIRTHGYPKEADREQMRSHGGLAGYPKGGSMGKIVISYSSDRFDQWRLGEAGGFIAFTKDGKPVFQFDHKGQYERYLRLNRKRQKEGGR

SEQ ID NO: 6343 - protein, 276 aa, Bacillus licheniformis
MSRPPDQSYPFSVYSGLLTPVHYEKIGNAIWLFLWCISSTTKEIERDGETWGIVLGNKPLKAAELALQFGVNEKTIRRWLALLERNGYIAVTRAPYGMILSVRHSKKFAYASHVRTELPDRTEETGSADKLVQSNKDITQINTKHNMSSIKTIAERFAALRSMQEGKPVHPSSKDYQAIARIVARGVSLPQTIKWLEQCFEEYEARRRSRHETIKVFSYCEKYIIGRLAEAEAKTKTTVRRENNAQKNNRRGHGRTEKQEPSITGGQTGRIRRKTV

SEQ ID NO: 6344 - protein, 266 aa, Bacillus licheniformis
MPKRTIEEVMDELRNRSRQSQGGKPEESAAKRYDCPKCKDELGFIERRGTMEVWVSCVCREWRKAQKLLKTSEITEQFKNLNFAQFKTEGKHQSVKEAYECAVEYVQAYRDIQESRRNSIALLGRPGSGKTHLLTAAANELMRKLFVPVLYFPFVEGFNDLKQDFSLLENKLNRMKQVEVLFLDDLFKPVAGRPRATEWQIEQTYAVVNYRYLNHKPIMLSSELSVEEIVSIDEALGTRLVEMCGDFLVVLNGSSFGINHRLEGMV

SEQ ID NO: 6345 - protein, 56 aa, Bacillus licheniformis
MCRLCNGRKSIHQDARVGTIFRACPNCCTESGGLTDVIKHLEALIAKMKTRVTQGA

SEQ ID NO: 6346 - protein, 113 aa, Bacillus licheniformis
VKNESEAYSPSPWRVVRTNTDVYIYSAYSKAEKKRFPYSNGRVIAKVADYSAYSKEKNARLIAAAPELLTAVKLTLAYLKRKRPVHSDSVENQLKNILEKVVAKAEFEEEETR

SEQ ID NO: 6347 - protein, 67 aa, Bacillus licheniformis
MNHPAKLTDINDTTVASRIKKGKVTVIVLDGMNGTAWQAEAPEHGKTVIETRKGDLARIEFEIGYKL

SEQ ID NO: 6348 - protein, 167 aa, Bacillus licheniformis
MEDLLFEYKRALKNTKKLYKPYQDEQGLTAEQLNDKKLIRNMMTDLEYVIDWLENGREPGIRRAIDRRDSYKRMLLKDPRIIDTFSEQSAFEPAQEVSAYDKARIESALSALTAREKEIFILHKVEQFSYERIAAMLGIKKSTVQTNVKRAQLKIAKQIEKPLDCMA

SEQ ID NO: 6349 - protein, 266 aa, Bacillus licheniformis
MPRKRDPKRDEAFRLYQKYGGNITNLAIARELGVSNKKISVWKTRDRWQEALAGDDANRGKADIHNEGLNERQRLFCIYYVKSFNATQAAVKAGYSPASAHVTGCRLLKNEKVADEIRRIKKEMVGEIFVEAMDVLQVYVKIAFADMTDYVTFGKKEVQAVGKSGPLFDEENNPVMKEVSFVDVKHSDLVDGTVITEAKLGKEGIAIKLADKMKALDKLSQYFDLFPDSFKRKIENEKLKLARQKADKDAETGPVEVVIARKCDQA

SEQ ID NO: 6350 - protein, 432 aa, Bacillus licheniformis
LIIKEVNPHFEDYLFNWDQTFQFLVGGYGSSKSYHTALKVVLKLLQEKRTALVVREVFETHRDSTFSLFASIIDELGVQKAAQAVSSPMHIRFANGSRIIFKGMDNPAKLKSVNNISLIWIEECSEVKYEGFKELIGRLRHPYHRLYMMLTTNPVSQSNWTYRHFFKDERNKRFILDDEVLYKKRVAVVGDTYYHHSTADDNLFLPKSYLKQLDDMKAYDPDLYRIARKGRFGVNGTRVLPQFEVMEHEEVMRQISAISNPLKRTGMDFGFEESYNAVVRAAVDPDKKYLYIYWEYYKNKMTDDKTAEELHEFAVTKELIKADPAEPKSIQFFRQNGFNMTAARKFQGSRLQYTKKIKRFKKIFCSDRCANTIYELQPLTYATDQDGNLKEDQFTIDPHTLSALWYALDDYEVTDLKAEPEVRKRPNRKRGR

SEQ ID NO: 6351 - protein, 504 aa, Bacillus licheniformis
MSTQQTVRAKVMKSRFHGPVTKQIYEDQFSEIYGDDIIAPPYNLKELKAIAEYSSILQQCIDAYKTNIAGFGLDVEYAFDFNGADVTPDRKKAAESDWTRLEDFCRHLHFDESAETILSHMIEDREKTGNGFLEVLRNGAGQPAGIEYLDVKNMRVCGLTEPIEVEFAYMENGSLKNIKREKRFRKYVQMIDGRKVYFKEYGDPRVMDMTTGEFDRQTPPERSANEAIHFKIGSGVYGVPRWIGNIVNLYGARKAEELNYMYFRQGRHVPAVITVENGMLSEASYRELQEYMNDLEGVENAHKFLLIEAEGIAQEKDIHGSQDITPVKVDIKSLAEILQEDALFLEYDEKTRNKIRSSFRLPPLYTGDAHEYNRATADTARKITEEQVFEPERKILIGKLNTLFLRDLNIFHARLQLKGPDFRDPLEIAKVLGPFIQAGAVSANDLRDLAGRVLGKTLDEWPEEEFSRPLVYQESSKRAEAEAGALLPELQEAVETLKQITERR

SEQ ID NO: 6352 - protein, 282 aa, Bacillus licheniformis
VPRELKNAKINFVSYVDKAANKKKFFMTKSSEPPTFQKEVKLIAKAEDEKKLVYGVVYEPDIQDAHGDFMTAEEIQKAAHGFLKNARKIDKDHNFQGGVGEVVESYVAPADFEVNGETIVKGSWVLVTKAGDEIWEQIKKGSITGYSMAGTAETVEHAPQADSETDEPGSFFQLFKQFFAGDKQKTGEEEKKMKRSEVQGTIEAVLAPLLKRLDDLEGDKAADEKEQQTDQDAHVKEIVEDMLAPLIARIEALEKMRGASKQAAAEKDGEEEVKKSIWSGLL

SEQ ID NO: 6353 - protein, 311 aa, Bacillus licheniformis
MRNQEIIRKAEMSLATLKSGGLMNPAQASAFIRMVQNTPTIFSESRVIQMENDSQKFEKIGFGQRILRAADEGKALAKDQLTAPVTSTVELNAKEVIAEVNITYDTLENNIEKDGLQQTLMQMLAERAAVDIEELIVNGDVASSDPYLAQLDGIRKQSVSHIVDAGGEQISRQLFKQGLKAVPAKYMRVPQEFRFFTSLGQEIEWKDRVAERQTTLGDAAVQGGLSTAFGVPVKGVSNIQPYAYGEGDAAAEASDIILTHPKNIILGFSRNIRIEVDKDIRARKFIIVLTAKLDSKFEEEDAVAKIINVKE

SEQ ID NO: 6354 - protein, 124 aa, Bacillus licheniformis
MLITPDDIIQYSVIEAVKNRPQELLRQDILEAEAEAEQITGHRFTDEKYDPLPEKARLALLQLAQYFALKNGDESLLKGYKSEKLGDYSYTLSRSGGLVKPDVYKLLEEFILDYESVRFKVRPL

SEQ ID NO: 6355 - protein, 118 aa, Bacillus licheniformis
MSYKRLLSDRCDIYHLKEDQAEEARYGIPARDLQPIRTYGETPDLQNVPCYFTEKNQSIVQQDPEQVIYHSYLAHFPAEADVRLHDKAVWNGVAYTLQQPRNIKGHHLEVLAVRDEKL

SEQ ID NO: 6356 - protein, 162 aa, Bacillus licheniformis
MKIKGLKQLSQTLEKAGQSGFRNEAAKWLEQAGTDFLDLVCDEIVRAGSIDTGSLLRSFKRGAEGNRWEIEKGGLTLEVGTELEYASFVNDGHWTGGKDEVRWVPGQWHGGRFQYDPGSSSGMALKRQWVKGTGYWEHALYIFERLFEKRLNERLQKWLNSL

SEQ ID NO: 6357 - protein, 146 aa, Bacillus licheniformis
LNDETGSVMNFFYQVFPVVCYEKEIPDHFQIPSLYFPPPSVFDENDTVSTFKKVFTLNVKLFHHDSQQAHDHAERIADAVREARHIIPLIDRSGKGTGDSLRISRIETRIGDSGTASIIIQWNSRYWYKRESELSLETIDFTNGVK

SEQ ID NO: 6358 - protein, 74 aa, Bacillus licheniformis
LAVSKKTNTEAKKAPQEEREALFYIEDLREHAKELFGIKPEVLDGALFHVKEEQISKPEASQLIQTFLAKEVMN

SEQ ID NO: 6359 - protein, 448 aa, Bacillus licheniformis
MNGGTFTPGKEKDRAGIYFNFKTTAEERVSIGDRGTVALPVVMSWGEPKTFVSISSIEDLNKKVGLNIDDPSLLLFREAKKNAQTVLLYRLNTGAPAKAQIGETLSVTAKYGGEKGNDISIRISENVLDSKKFDVTTFVGTDEADRQTVKTAEELTANAYVAFQGEGALELTAGTKLSGGENGTASVADYTAFLDAAETEYFNTIALPVADNEQLKATFAAFIKRLRDKQGQKVQGVVADYAGDYEGIINVTGGVVLEDGTEITPEKATAWVAGASAGATFNQSLTFVEYEGAVDVLNRLDEDQVIERLKKGEFLFTFDARDQSVSVEKDINSLTSFTADKNKKFSKNKIIRVLDGVNNDLTRELKALIKARKASGSDIPASDDGLQYVKTLIIQYMTALQEAGGITGFDSESDIAITLNEDRDGFLIDLAVQPVDAAEKFYFNVEVK

SEQ ID NO: 6360 - protein, 147 aa, Bacillus licheniformis
MALKAQNTISGKEGRLFLDGQEMAHIKTFEANVEKNKAEVNIMGRRMTGHKTTGANGTGTATFYKVTSQFVTLMMNYVKKGDDPYFTLQAVLDDQSSGRGTERVTLYDVNFDSAKIAGLDVDSEALEEEVPFTFEDFDVPEKLKDTF

SEQ ID NO: 6361 - protein, 149 aa, Bacillus licheniformis
MSEKQEEKVYDLSFFMPGQTVEAEEIKVPISKRFVDKKGNVIPFVFKPITTERIDELEKENTTYKNIKGRGRVKDLDTQRFYARIAIESTIYPDFRSKELREAYKTADPVEVAKRVLSVGGEYANWLNKAIEINGFEDDLEDLEEEAKN

SEQ ID NO: 6362 - protein, 1260 aa, Bacillus licheniformis
MAKLTARFELEDRVSKKLRRIQKGFAILEKRAERLNRQIKINIKTEDQAFFRLKKLNNYLMRKFIHSVNIGVNINDQASAQLIEIQRRLKRIPPETTVKLTLADNVSQKLTKIKRMLSKREYSLSISAEDRVTLTVKKIIGYLKNNLKKGYSVQLYVLDKVTKTASRIASLLKKLEKTYIVTIDLNDKATNKIKNKKVSGETSEAKHDKKGSFFEQGKDLLGEWWKKSGWPWIKDTGKEIGKAFVDRFKDRLMEKLNSDIFDKIIDKILGPQSTKGSQSKSSGPGHGQCCCCLYPQKEPPNSAGNRQNVSVSGSSEEHKGWNLKSLSRGILPAAKILFYLKSLRPNKEPGKLAKLLEPLKPMIEKLKPLGKKLSPLGKLLPLTDLIGINKDNAGEKIGSVGGRMLGTFGGEAAGMAIGGLVGGPPGAMIGGVVGGFAGGMGGEKAGGSLGKMFDTSQLKEDLMNTLFNGDWWSEQWDSLSQTATNTFLNGDWWGEKWGSLKETATNTFLNGNWWAEQAGYLYGTLEAAFLGPLSNVWGTIAGTISETIFNGDWWSEKWNNAVTWAQNTWDGAVSVWESITGTIKDTVFNGDWWSEKWNNAVTWAQNTWDGAVSVWESITGTIKDTVFNGDWWGEQWDNAVTWAQNAWDGAVSVWESITGTIKDTVFNGDWWSNQWNSALERGKSIFEGAKSWVGEKVEYFQKGRERAHKDHGFEGYATGGYITKPTISWIGEAGNEFVIPTENNRGRGKMLLAQAATKLGMRVVDDMGAAAGDGGASSPVSSTASYSASVSPAVGVGSIAAEAQAFGREFTGGFDKGIGSNAPSLDQWKQKNISKPFSSLPAESSNYGKQTVAGFASGQNASATGTGGFLQAKVNAPYQTTVKTSSSWGANTVKNFATGQNATPTGTSQYVDKNINKPFLDSKQSAAGWGSGMVGHFISGMNGKGSEVSQAAKNLAKKVEKAFREELDIHSPSRVMMSLGRFASVGIVKGLSSVDVKSFAEKQAGSLAAAFSGIGAVGGNVKSWLMQAIMATGSPVSWLQPLSVIAQKESGGNPRAYNGWDINAKRGDPSRGLMQTIGQTFNAYKGKGMNDIFNPVHNAVAAINYIKSRYGSPFNTPGIKSMARGGAYKGYANGGLITSEQIARVGEGGKREWIIPEERGIRGRYLLQRAAGALGMEVQDPAEGSGSISSAQAAAATTGGTRSRQPAENGAKEVNIYITGDNHYHSERDQETLIAKIKRALVDELERDIHIGTKGSVAYD

SEQ ID NO: 6363 - protein, 218 aa, Bacillus licheniformis
MTKSVYEFWLTQGKEKLRLPVLPEQLDVSNNLANESVKVSKFGEVTFINEPGAKTISFSSHFPKKYSPLSEYKGFLSPENAILKIEKWMKAKKPVQFLVTGTKINFTCSIENFSHREGEKDIGDRDFDLTLKEYQTASPRKIKQKKKTKKKRPSKPAPKMYTVKKGDTLWHIAGRFYGNSQEWRKIWNANKQAMIKRSKRNIKQPGHWIFPGQKLKIP

SEQ ID NO: 6364 - protein, 326 aa, Bacillus licheniformis
MIELFVIKESEWYELVTESVTLEGERYQAPRSIEASIVIKQGSHKYYSVQEGDTVLFKWKGKELFRGIVFSRVPKEYTLTFKAYDMLQYLVKNQDVYVFSNKTAADIVKRIANDFQIPKGSIANTGHTIKSLVFKDNTSLYDIILKALRETKKQTGKNYQLYAEKGKLCLRAWPEPEDIWVLETGVNITDYAYSTSIDETATRVKLRKQKDNKTYTASASDEAGMKRFGVLQYTETVSDDINEAQLRDRAKKIQAEKKGVKKELKSIQAIGIPEVQSGLPVYISIPEAGIKETYWVDKDKHDFTGTKHVMTIDVVAKNTIPEGASS

SEQ ID NO: 6365 - protein, 102 aa, Bacillus licheniformis
MKLSDAIKELALGAVNAESPVDVMPAEVVSASPLKLKLRNHDKLVIPSDLLVVARHLTEHTEQIRIDGEDKTIRFYNQLHAGDHVMIAAMPGGQSFFVIDRV

SEQ ID NO: 6366 - protein, 141 aa, Bacillus licheniformis
MALSPEVSFEDIEDDSDVIETSKTYKIDFETGRMTGDMISGLEAVEQMVCMALRTERYAYAVYSHNIGNELQEVLSDHETTDAYKEMEIPRLIEEALIYDDRISAVTDFEIERQGDAFHVSFSVETDEGTLEIEEVIGEDV

SEQ ID NO: 6367 - protein, 347 aa, Bacillus licheniformis
MFEDQTFEEIMERMLERVSDEIDKRENSVIWNALAPAAAELALSYIWLDQVLNLVYADTAEGEYLDRRAAEAGLERYRASKAIWSAAFTDGVSVPPGTRFFLEDLYFTMLEDGKLECETAGTKGNANFSGRPLLPLDTIPGLEKAVMGSLEIPGRDEETDESLYERYLIRVRREAVSANQLHYKQWAEEVDGVGKAKVFPLWNGEGTVKVVITNAKMEPATDALIERVKQYIDPDPGKGEGMAPIGAYTAVESAVWKDVSISAKIIPESGRTIGEAKQEIAEKITELFKEMAFKESVIRLSQINNMIYQSSSVSDYSEVFINGEAKNLQLTETEIPKLGQVTIIEQD

SEQ ID NO: 6368 - protein, 306 aa, Bacillus licheniformis
LSKIDEMAFHLPPYLMEIREIQEITTAEAPEFERQNQEIFDMTDQLFVTTATWGLDRWEKILNVRREASDGVDIRRARLLTKMSNIPPITSRSIERAVNAFLKQPSASVRLTAGRYHFLLSVNGEDLQFIPSIIQTVNHMKPAHLAYTFRGGFHYECRPPKSIHDRLVLRSKNGFFGTIPVYLDGQYLLDDAFYLNGFREIDGLPRRFKQQLTLRHKKRQYIRSASSFTIKTAAENRRKQQTKAGMKTGITNQNKKVQSFKISCKCEHEFKQAGALEMREKWWTLNGAFLLDGTKQLAAAAQKIAL

SEQ ID NO: 6369 - protein, 128 aa, Bacillus licheniformis
MAQQLTVTTLYARQQMAKARAEGGKLTKITKMAFGNGGTNDKGEPVPLQGNEQALKNELLQKDIDGFAFMEPAKVRYTCTLGESELAGETINELALVDEAGKFTAVRTMTDKQKDGDIEFVFEIDDIY

SEQ ID NO: 6370 - protein, 272 aa, Bacillus licheniformis
VDIQKPRRFETTDRAHADLFNEAIDQLNVNDERIAKRAEEAEERAKTYTDAHAAKKNNPHAVTKSQVGLSNVINEKQATKAEFDSHSNDNERHITASERSKWDGSQIFNITTENGQGKVYIGVADDFHEVLPQYTGLIHFTAAGGASNSPGNAVRGIWTCNATGEYGQVIAFDNANRTYRKTVADGKWSDWIELASAADAQLYKITGDNGRRTKLADGTDLLTMPTGFYYAIGHVVQNNPVENDSSWFNYDVIETGAGRKTIHAWRSYDNTL

SEQ ID NO: 6371 - protein, 122 aa, Bacillus licheniformis
MQVFLYDDDFYYKRPEIIVDPGSMPENSTAVKPKDGLWRAKFIPSLNDWVEGADQEYINGLKKDQFVEKNPVSEQLSALGRQLADEKLARKQAEIANKALGEHLVSLKLELLNIKGGKEIET

SEQ ID NO: 6372 - protein, 55 aa, Bacillus licheniformis
LKLNFWVHALSYNWATAEMVKEAIAYDDCTIDDLRKGVETGYITQDEFQELTSEL

SEQ ID NO: 6373 - protein, 425 aa, Bacillus licheniformis
LVLKKPRRFETTDRAHADLFNNVVDQLNKNDELIAELVKEAEINSKTYTDSHTNNATIHINDVDRTRWNSGQLFKLTENNGKVFYKGSAETTDYNTLTETGMYLIYNEGINSPPASNRVFLLVMSFGNTLVQCAYESYKGVQSYFRFRKSDSVTWTSWQTQETTIGAQAKVDAHEQKSNLHINETERAKWNNGQLYKITDDNGKRTKLENGTDLLTLPTGFYYAAGHVVQNNPVENDSSWFNYDVIETGSGRKTIQAWRSYDNSLWLGTLHTDGIFKGWKKVMTVEDFNKRTYVDTYDHENSSVSAEENVPTKLVFGVTRADHLEEYNISNSEITLKNSGLYLIRLYVTSKNITVNSENILSCYVGGKEYQRLGIWYPATTGNTCVFFLQQKFTAGDKVTFYITPRSTGKTVTIATAYVTMSQIG

SEQ ID NO: 6374 - protein, 89 aa, Bacillus licheniformis
LTILNETNIFENELNGIKADQKSLEQRVSTLERTSDRHDQQIISINEKLNKIEENTTWIKRSITGAIITAVSTGIIGGAIAVFYNLLQK

SEQ ID NO: 6375 - protein, 88 aa, Bacillus licheniformis
MKHIDKGTVVRTVLLFIALVNQTLIMFGKQVLPIGEDQINTLADALYVAGSAAFTITASLIAWYKNNYITSRGRRQKETLKEQGILKK

SEQ ID NO: 6376 - protein, 354 aa, Bacillus licheniformis
LIEKDLKISNIKGLLIFLVVFGHLIELYKANYYQIFVLIYAFHMPLFIFISGFLAKRATVSKIINFIILYIIFQSFFDWYLYFIGDYKTLQFHFGKPQFHLWYIVSMIFWYALAWGIHRLRPRKVGKTIIFLIVFALSFYSRWYTEPVVEFIKEIYPNFTSYTLSFQRTISFAPFFFAGFFISKNKLRMIYESIPERIAKGLLAITAAAVILYIQYTSNLESLFRGSFGMERFLNEGESYHAKIMLHYLLSGWLCLLILTSVKGEKSVLTKWGDHSIAIFLFHPVFVFLLRRTEFMANWKADTQFTVYFAIAILISALLGSNFFSKFSAFVTSPLTTLKKLSGVVSQKKKYNTD

SEQ ID NO: 6377 - protein, 354 aa, Bacillus licheniformis
LVKVINNFVKVNQYTRPGLKLAAVKGIVMHWTATPGASALNERNYFNGTCIADKRYASAHYFVDRHEAQHIIPDHEVAYHAHDQNRCYVSFLKPNANTTALGVEMCVEKDGTIHEETIRNAAELVADLCKTYGLSTDRIVRHYDVTNKGCPTPWVRDAGQLSAFRKRVDSLLGRKTVSVSAASTSQTSSSSGIILKKGMSGSHVKKLQTRLVAAGFSLPKYGADGSYGDETVHAVVSLQKKAGIKADGIYGPSTEKALSAAEASAAGKSKTWTLPDGIYKVKNPLMKGTAVTQIQTALAALYYYPDKGAKNNGIDGYYGMKTANAVKRFQLMYGLGADGIYGPKTKAKMLSLLK

SEQ ID NO: 6378 - protein, 225 aa, Bacillus licheniformis
MKMKQLNPRSVRDQIYQVLKEEIMKFRLVPGEQISEKEISERYEVSRTPVREAFLQLSKEGLLEVYPQKGTRVSLIDLDLVEEARFMRENLEKAVAELACEDFPQEAMFKLEQNVKMQELSIAQKNYESLFELDEAFHQTIFEGCGKANVWAAIQQMNVPFQRIRFLRLAADFNWNTIHQQHAALTEAIRTKQKAKAKEIAEEHLQLVIVDKQMLIDEFPGYFKK

SEQ ID NO: 6379 - protein, 338 aa, Bacillus licheniformis
VKAAVMTKPYSIEFHDIPRPEPASGEVLVKIKAAGICGSDVHFYDGSNPYAQYPQIFGHELAGIIEKTGAGVRGRSAGERVVIEPAIPCGGCYPCRKGRTNACMNIDMIGSVRRGGFADFIIVPETHVHPIPEQMDFATAALCEPFSIGAQAVRRADIQTGETIVILGMGPIGLTILAQVKKRFDVRVIAVDPVRERLELAEAFGADAVIQPGEEDAEQMILKLTGGEGAGIVFEAAGIPATIEQSVRLAAAAGRIVIVGLTGRNVTIPGLLLTKKDIEIYGTKHSVNQFPGVIQFLNENPEIARAFVTEIMPFMEIEEALKKAKNCPHQVTKIILSY

SEQ ID NO: 6380 - protein, 365 aa, Bacillus licheniformis
MKMVFRWYGEGNDSVTLEQIRQIPGVEGIVWALHHQPPGEEWPLEEILEVKRQCEQHGFHIEVVESVNIHEDIKLGLPTRDLYIEKYKRTIENLAKAGVKVICYNFMPVFDWLRTDLYKKAPDGSTALFYEHAKVHTIDPFALVDQIAKHPEFTMPGWEPERLEHLTRLFEAYQNVTEEDLWSHLHYFLERIIPTAARCGIKMAIHPDDPPWPVFGLPRIMTSGESIGRLLQLVDHPANGVTLCSGSLGANPENDISAMIHAYADRIPFAHIRNVKVYENGDFIETSHRTKDGTVDICGIVKAYHETGFSGYVRPDHGRHIWDEKCRPGYGLYDRALGIMYLWGIWDSLNREKQEASKCLKSMKI

SEQ ID NO: 6381 - protein, 282 aa, Bacillus licheniformis
MLEIHENLAGKTAVITGGSGVLCGAMARELGRQGMNVAILNRTVEKGELVAEAIRKAGGAAIAVECDVISQRSVEQAKRVVADRFGGCDLLVNGAGGNHPNGTTSDETFNSEHIFQDNIKTLFDLNCDDVGSVLNLNFLGSFIPTQQFAKMMLNQKGASVINISSMSAQTPMTKVPAYSAAKAGIDNFTKWLAVYLAETGIRVNAIAPGFFLTNQNERLLLDQNGEFTDRAKKIISHTPMRRFGKPEDLLGTLLWLADEKMSGFVTGITVPVDGGFTAYAGV

SEQ ID NO: 6382 - protein, 337 aa, Bacillus licheniformis
MKQIVCEKPYRFKMTDVKMPELKDGEALVRIKRIGICGTDFHAYCGRQPFFSYPRVLGHELSGEIVSIDNSGGTLKPGDQVSIIPYLECGACIACRNGRPNCCVNLNVLGVHTDGGMREYINVPADHLLKTEGLTLSEAAVVECLSIGAHAAERANIKKGETVLVVGAGPIGLSVMKFAKLKGAKVIAMDVRKERLTFSRRWAEADEVVLGGEHAADKIKRLTNGDFPTAVFDATGHPASMNSAYQYAAHGGRLIYVGLVNDHLAMPDPEIHMRELTILSSRNALRRDFETVMKAIMDDGADANRFVTGQMAFHDVVDGFQSALAPETNPVKVLIHL

SEQ ID NO: 6383 - protein, 423 aa, Bacillus licheniformis
MFSNGRGFVIVMLFLAGVINYLDRSALSVAAPFIQEDLNIRPAQMGMLFSSFFIGYAVFNFIGGWASDKYGAKHTLSAAMVVWSVFSGAIALTYNFVSLFIIRVIFGMGEGPLSAATSKSVNNWFPQKERARALGMTMCGTPLGGAVSGPIVGLIAIHWGWKASFVLIMIIGLVWTCFWMKFMKDKPADSGSLSPEKEARPKKDTGIPLSFYLKQPTVLFTAFAFFSYNYILFFFLTWFPSYLTTARGLSIHDMSVATIIPWVVGFLGLALGGFISDYLFKLTGKQMFSRKAVLVCCLLAAAVCIGFAGLVTTAFGAVALVALSVFFLYLTGITYWAIIQDIVHPDRVGGVSGFMHFLANTFGIIGPTVTGYIVEYTGAFTSAFLLAGGLAVAGSICVALFVKPIRSERLPQSVGEGGQGHPL

SEQ ID NO: 6384 - protein, 43 aa, Bacillus licheniformis
VKKLKKQVKHVDFAKFGLSDYTSLLRRRSEKIIKTLNRRKNKP

SEQ ID NO: 6385 - protein, 57 aa, Bacillus licheniformis
MEPAFQQDQESVKKRLAFKMFKRQSKTNIAKYEVSPQTERIFRQNERLIGEYKRKKA

SEQ ID NO: 6386 - protein, 212 aa, Bacillus licheniformis
MLLFYQFLVWLIVLALALYVAAVWRFEKQLAEKTVAIRKTWYLLYVIGAVIYWTHDPQSIFTNPLHYLIVAVFFTLTDAFIFLNAYFKKLGSSELATDTRMLLEENNDLLHTYQNRLKTFQYLLKNEPIHIYYGNIEAYAEGIEKLIKRFAEKMNISAALCEYNSEESKDHLLEHMENRFDVQESLTAKTFIMKKTEKWSSFLFPSTILTMS

SEQ ID NO: 6387 - protein, 332 aa, Bacillus licheniformis
MDLLFVLTILIVIFALAFDFINGFHDTANAIATSVSTKALKPRHAIIMAAVMNFAGAMTFTGVAKTITSDIADPFKLENGSVVILAALIAGITWNLVTWYFGIPSSSSHAIIGAIAGAVIASEGFAAIKYHGFIKIIEALILSPILAFVLGYLIYSIVKVIFKNSNLAKTNKRFRRVQIATAAIQSYTHGTNDAQKAMGIITMALIAGNLHSTTDIPFWVQFACAMAMGLGTSVGGWKIIKTVGGKIMKIRPVNGVSADLTGALIIFGATIVHLPVSTTHVISSSILGVGASHRVKGVNWGTAKRMLITWVITLPISATIGAFAYFILDLFF

SEQ ID NO: 6388 - protein, 205 aa, Bacillus licheniformis
MLKRKKDKFSVLLTEIAKNLDETAEYFVNYKVTNQTTLKEFADTLKEYETKGDNYVHTMIKELNKAFITPIEREDILQLTNSLDDVLDGIEHFSAMMEIFSITSSDEHIDKFSGYIRECAKEILVTIELLAENRLKEIQPHAIKIKEYEHNCDNLHRKSLKNLFGKETDPIKVIQYREIYETLEEIADSCQSVANNLETIIMKNA

SEQ ID NO: 6389 - protein, 585 aa, Bacillus licheniformis
MRRLAFLVVAFCLAVGCFFSPVSKAEGVMSGGGGDKVAVGKDGMVATAHPLASKIGAEVLKKGGNAIDAAIAIQYALNVTEPMMSGIGGGGFMMVYDGETKETSIINSRERAPEGAKPDMFLDGDGKVIPFSERSRHGNAVGVPGTLKGLEAAHKKWGTKKMEDLISPSIKLAEEGFPIDSVLADAIKDHQDKLSKTAAKDIFLPDGEPLKEGDILVQKDLAKTFKLIRKEGSKAFYDGEIGRAIADVVQDFGGSMTPDDLSRYEVTTDKPIWGEYHGYDIASMPPPSSGGVFMLQMLKLIDDFHLSQYDPKSFEKYHLLAETMHLSYADRAAYAGDPEFVDVPLRGLLDPDYIKERQKLISLDSMNRDVKEGDPWKYEEGEPNYEIVPQPEDKTIGETTHFTVTDQWGNVVSYTTTIEQLFGTGILVPGYGLFLNNELTDFDAVPGGANEVQPNKRPLSSMTPTIVFKDEKPVLTVGSPGGTTIIASVFQTILNYFEYGMSLQDAIEEPRIYTNSLTSYRYESGMPEDVRRKLNDFGHKFGANPVDIGNVQSIFIDRENKTFMGVADSSRNGTAVGVNIKTSAK

SEQ ID NO: 6390 - protein, 214 aa, Bacillus licheniformis
MIHTLANGFYRFCEWVMRLAYLNLLWIGFTLAGAVIFGLAPATAAMFAVTRQWTLGKTDVPVFQTFFRAFKKKWAKSSVLGLILGLVGLLLFVDFQIAAVYFHDQPVFLSLFISLFIIYAIILLYAFSIDVHYDLKRIAVLKYSFIIGFSRPLTSFFMLISAFGMILLALFHVTFLLFFSGSALSFILTKLSFQAFRAIDGRRTDKQAAAPRLK

SEQ ID NO: 6391 - protein, 578 aa, Bacillus licheniformis
VNRYQHLKIKDQLFILISLIMAVSLILILSGIQYAFRVYDQQIYRKSSQVLMLSSKSIEDELKKIEDVSYQITTDADIQANLLKAGRGQNKYGRYRIKSKIWDKLAEYTGSKRYIKSIHLFDASGTEYSAGANLTEALREQKNALIERASRQKGSNMWEPMPGETGELLSVREIRSYERLNLDHLGTVVIVADLKRVIGDLPKDWGEGAGKIAMSDGRELFFSEMLFSQTDGLRLSSHAENGYDIVEENGQRFFVSYVKSAYKNWTYWSLIPFDAMFSKISAMKTILISLFILFFLIAVLFGRKMARGITSPIEKLVAAMKNVQNGDFKLAPLTRAPLDRQDEVSVLNRNFFTMVERINELIAENYKKQLMLKETEFKALQAQINPHFLYNTLESINWLAKTNRQPQISKMTESLGFLLRNAINMKTDVLTIEEEVEIVRHYFTIQRFRFEERLVFELDIEPAVKKCRVPKLVLQPLAENAITYCLEPFIEPCHIQIKAYKKEELVYLTVADNGPGMDEDFLEKARKELVRTTGRGIGLQNIDERIQLMFGKGYGLTISSEKNKGTVMMIKIPFQSGV

SEQ ID NO: 6392 - protein, 388 aa, Bacillus licheniformis
MYKVLLADDERIILDGISSMIEWNSFGTSLIGAAQNGIDAYRLIMEKRPDIVISDIKMPGMGGLELIEKVSRDHPSIRFILLTGFGQFEYAKKAMSYGVRHYLLKPCNESHITDSLQSVIGELKKEESAQKVKTDLEMMKPHLMKQMLKELITGGRIEDEACLRFFSEQKAIRLILFSVRDGEDKDYAQGVESIADEVLNGAVIASARVQQLLVCAVDGTLASAVLEEKMKSVQELSRRLLRFEPEASLSESGNISEASEMYEKAYRKIVQDDGGTSVLIGRVLDLIEKEASNPKLSLKWAARNMLYMNPDYLGKLFKQETGEKFSSYVAKVRIEKAIAKMKKSKNTAIGTLAEELGFGHNPKYFSLVFKKYTGLTPSEFRKKEDNTF

SEQ ID NO: 6393 - protein, 431 aa, Bacillus licheniformis
MRRFVFVSLCILLTLGLFGCSSNTEEAAGADGKKKVTLRVAWWGGQPRHDYTSKIIELYEKEHPHVKIEAEFANWDDYWKKLAPMSAAGQLPDVIQMDMAYLSQYGKKGQLEDLTPYVKDGTINTESIDEKTIKGGKIGDQLYGFPLGVNVLSVITNDDLLKEAGVEIDDGSWTWTDFENLALEVEEKTGQYGSNGMHPPDVFFPYYLRTKGERFYKEDGTGLAYSDDKLFVDYFKRQVKLVDEKASPTPDESAQVKGMEDDFIVKGRTAATWNYSNQFAAFAQLTDAPLSLKLPPEQAKEKALFLRPSMLFSIPKSSEQKKEAAAFIDFFINNEKANALIKGERGVPVSSKIAETVKSELSEEEKKIFEYVERATAYAGEAEPPEPIGSAEVIKLLKDTSDQILFKKITPEEGAAKFRKEADAILKRNQQ

SEQ ID NO: 6394 - protein, 299 aa, Bacillus licheniformis
VKRKKRIDNLAGYAFISPFIIGFLCFTVIPMGASLFLSFTSYDLFTPPKWVGFDNYKAMLTDDEKYWGSLKVTFYYVLAGVPLRLAFALFIAVILNRAEKGVGIYRTLFYLPSIIGGSVAVAIMWRNVFGNDGVINALLFFLGFDKKIFWYQDPTSALWTLILLSVWQFGSSMLIFLAGLKNIPPMYQEAASVDGANRFQRFFLITLPLLSPIIFFNLVMQTISAFMTFTPAYIISKGEGGPLDGTLLYSLYLFQRAFNFFQMGYASAMAWVMLILIGLVTFILFKTSSLWVHYESKEG

SEQ ID NO: 6395 - protein, 297 aa, Bacillus licheniformis
VKPVKDISWRAAPAPLPAGNRKKRAGRLVFHITTAGLAIILLYPVIWLIASSFKESASIFATSHSLIPDPLILSNYTEGWKGIAGQPFITFIKNSLIIVGLSTAGAVLSSAFIAYGFARIPFKGKAFWFSCMMVTMMLPHEVLMIPQYIIFAKLDWLNSFKPIVVPQFFGHAFFIFLMIQFIRTIPVELDEAAKIDGCSRLGIFFRIILPLIAPALATSAIFSFYWKWEELINPLLYLNKPELYPVSLALKLFLDTETASNWGAMFAMSVVSLVPVILVFFVFQKSIVQGISMSGLK

SEQ ID NO: 6396 - protein, 344 aa, Bacillus licheniformis
MTKLVFDEEKLNEVIDRIVKRTFEMDFEWDWPGGVAFYGVAEAYEATENDEYLELLKNWTDEKLEDGLPKLSINGVSIGHTLISLYQATGDDRYLDAARQMADYVLHEAPRFADGVLQHTVNSEKHVFPEQAWVDTMMMAGLFLLRIGKLVGSEEYFEDGLRQYHGHEEFLQDMETNLYYHAWDHVAKNNLSGIFWGRGNGWAALTMAKALPLIDVTHPSYMIIDGSLRDLLSALVRLQHPSGLWHTVLTDPDSYLEVSGSAGIASGLLSRGSLYHKSVQKALSAITDAVAPDGRVERVSAGTAVMRDAQGYKDVPYKRIQGWGQGLALTFLADVVRSKSRAFQ

SEQ ID NO: 6397 - protein, 760 aa, Bacillus licheniformis
MKKLHQRYVSRRKGRFFKKSFVMILLIACIPGLLTGAGVYLFSAAKIEKELQHLHENQVKRQISQIDDKLEGLEIMLSQLAYDPRLMNGLADADLQTDFQTTYKLSKSLFLLQDQNPLIHKVELFIQGKEPILLNPEYSGLTDRKILKAYHSLLEGGQNVYWKDMSGASSGMALVHKIPGGISEPFGALILTLDERELGRLLESLSPYSKGTALLFHHNQKPVSWSNRGKTNFESALKERLEKQKNPQGSFVMDWSGGAYSVSYGRMDRLNQEWTYVSASPMSAITAPVLFLSKLIASVSIAGIVLAFILAWYASHKIYSPVARLIKLCSGEGKAAYFPDEFHWLEKRWEDLSEESGRLKKELPHAANVFFQRLLSGYFADESERNLRDRLKRWGWEAKDNVFTIIDVQLTGLYEGNGSFTKKDESLAGFLLGNITRELAGRTFNHIYMTDVRSLSLAVLLASGRNTAFKEEIAQFVRELTDVIYSISKLHVTVTVSKTADKLKDTPGIYEEVKEGRHYRQFENASQVIDLSRREDMPPAESYYPFALEKEVVRALRLEERDEVERRIRLFIRELSEKGKTEIRIQPGMMQLFAKIQEEIFHSGLHPYELFSRKNLLQELSELREPERAVGWMMERCISPYLKEMEGRKNRQQKRLVEQVLEMIHQDYMNDISLESCADRAGTNSYTLSKAFKQVTGINFIDYVTRLRIEKAKELLLETNKKIHDVSEEVGYRHSYFNRIFKKQVGIPPSRYRQIHQESS

SEQ ID NO: 6398 - protein, 238 aa, Bacillus licheniformis
MKRTDKKPKVTVYLAGDSTVADCPPHEAPMAGWGQMLPLFFSDEAAVVNMAKGGASSNSFIDEGRLDDITERLAPGDYVLIQFGHNDQKPYGTDPYTTYQEHLVRYVEAVHEKQATPVLITSAERRRFDQNGKPADTLGDFPKAMKALADSFDVPLIDLWSKTKALYESLGIEGSKRLFVHFQPHEHPHYPNGIEDNTHFSEAGARQVARLVTEGIRELGLPLSAYLLCERSDFRAGV

SEQ ID NO: 6399 - protein, 230 aa, Bacillus licheniformis
VPECNGREGSLIYQNPLSSPEDLRGWVMEGKGIVRFQNGRLHMENELDAEQYGDDAHFVYWCPETFPDGIVVKWDFYPVREPGLCMIFFAAAGMNGEDLFDGRLAERTGKYPQYHSGDINTLHLSYFRHKHADERAFRTCNLRKSRGFHLVCEGADPLPPAADALPPYRMKLIKDGAYVRFSINELPILEWTDDGRRFGPVYGAGKIGFRQMAPLEAAYANFEVRRLLRG

SEQ ID NO: 6400 - protein, 203 aa, Bacillus licheniformis
MRDKGVMAMMYGACEAIMKIAWLNGIWVLFTLGGGIVFGWAPSTAAMFTVVRKWLLGRTDAPLFKTFYQTYKKEFFKANGLGLILITAGTILFVNYQFFRVRADLFSIMISYATLVAGLIYLVVFIYIFPLYVHVQLPFVRYFSQAALIGLVRPLTTAGMAAAGCLVVYVLLTVPGLIPFYGVSLFALVSMFIAHRCFLRLEG

SEQ ID NO: 6401 - protein, 622 aa, Bacillus licheniformis
MKKGKKRWKNLLAASSLLLITLVTGFSEQAEADGRTAAQARQMESLNRGLVAVKTGNGVFVSWRLLGTEPSSVSFNVYRNGKKLNGSPITSSTNYQDAGGDLNAVYQVRAVLNGREQAPSESVGVLNKQYKSVPLQKPAGGKTPDGVSYTYSANDASVGDLDGDGQYEIILKWDPSNSKDNSQDGYTGDVLIDAYKLDGTMMWRINLGKNIRAGAHYTQFLVYDFDGDGKAEIAMKTADGTKDGKGKVIGNANADYRNAQGRILSGPEYLTVFKGDTGAELTTVNYEPARGNVADWGDSYGNRVDRFLAGVAYLDGERPSFVMARGYYTRTVLVAYNFRGGKLTKLWTFDSDAPGNGAYAGQGNHSLSVADVDGDGKDEIIYGAMAVDHDGKGLYSTGWGHGDAMHTGNLDPSRPGLEVFQVHENSNSPYGLSFRDAKTGKIIWGVHAGKDVGRGMAADIDPRYEGAEVWANGSLYTAKGVKIGNTLPSSTNFGIWWDGDLQRELLDSNRIDKWDYQNSRTVNLLTASGASANNGTKATPSLQADILGDWREEVVWRAEDSSELRIYTTTDVTEHRMYTLMHDAVYRLGIAWQNVGYNQPPHTGFYLGEGMQTPEKPNIYTR

SEQ ID NO: 6402 - protein, 52 aa, Bacillus licheniformis
MKRYVRCLWVIPLLFFFIMGMGDLRSRKPLPRITVRIFFCSILEKVPLRRIM

SEQ ID NO: 6403 - protein, 102 aa, Bacillus licheniformis
VNESSVYQNGAGYGFSQAGSAVCKKTQKKEALKKDYCIVNRTAFLADLSPGKYRVTVFASSSGELKLYAEGEKMGTIPAGAKGSSAEKAFTVSVEDGRLDLE

SEQ ID NO: 6404 - protein, 421 aa, Bacillus licheniformis
MPKEKKWGRSRPEQREAQPKKRSPFRWKTGASIWSEGASAKGVCHRNFEVYQFDFGDGPLASGFIPVGAASAYTPLKGYGFDDAAKVSCTDRGTADPLRSDFCIPDGTAFTVDLPDGQYQVQIITGDARAKTNMDVRANGMLQLYSFGAEAGGYNEKTFPIHISGGHLSIQALTARTMPRLNALVITKTAYHVTDDNTTVFLAGDSTVSDYEPGYAPMAGWGQFLGGYFSDEIVIDNQAKRARSAKSFVDERSLATILNRMKRGDYLLIQFGINDAGQDPARHTDPYTTFQEYLRTYINKAREKGGRHVLVTSQSKRTYDEKGVFYNSIGEYPNAMRQLGREMNVPVIDLNKKSIEYYNEIGVEATKNVFMFLEPGESPNYPEGIQDRVHFHEFGANQLARLVTGEISDLNIYPLKHSLKK

SEQ ID NO: 6405 - protein, 628 aa, Bacillus licheniformis
MGEKDRHAAADRVRPVKTAAKPKQMEHLNRGLVAVKTKKGVFLSWRLLGTDPEETAFNLYRNGQRINSTPISSSTNFLDKHGNGKSLYYVSKVLGDKEVETSPKTAVWQKPYLEVPLNKPDGGTTPDGAPYTYSANDASIGDLDGDGEYEIVLKWDPSNSKDNAHNGYTGEVIIDAYKLDGTFMWRIHLGKNIRAGAHYTQLMVYDLDGDGKAEIAMKTADGTVDGTGRVIGDQAADYRNEDGRILAGPEYLSIFHGETGRELATVDYDPPRGRLEDWGDGYGNRMDRFLAGIAYLDGERPSLVMARGYYTRTVLVAYNFRDGKLTKLWTFDSDKPGNEGYAGQGNHSLSVADVDGDGKDEIIYGAMAVDHDGTGLYTTGLGHGDAMHVSDLDPDRPGLEVFQVHEDPRLPYGLSFRDAGTGEILWGVPADTDVGRGIAAHIDPRYKGALVWAIDPPGNEGKSYGLYMSKGEKLSDAAPASANFAIWWDGDLLRELLDHDWKEPAGIPKIDKWDYHSGRLVNLLTADGTLSNNWTKGTPVLQANLFGDWREDVVFRTVRSDALRIYTTTEPTEHRFYTFMHDPVYRLGVAWQNVAYNQPPHPGFYVGTGMDKPPRPNIYTVPCKRNEE

SEQ ID NO: 6406 - protein, 330 aa, Bacillus licheniformis
MGYQASDVRYENMKYNLCGHSGLKLPALSLGLWHNFGEAASLQNAKALLRKAFDLGITHFDLANNYGPPPGSAEETFGKALKTDFAGYRDEMVISTKAGYTMWPGPYGDWGSKKYLVASLDQSLKRMGIDYVDIFYSHRPDPHTPLEETMGALAHIVRQGKALYVGLSNYSAEQTEKAADILQEYGIPLLIHQPKYSMFHREPEKGLLQVLQKKGAGAIAFTPLAQGLLTTKYLTGIPAGSRAADANSPFLQAEGITEDVLGKVRKLNQVAAERGQSLPQMAIAWLLKDPRVTSVLIGASKTEQIEENAAALKSARFSAEELDTIDKILS

SEQ ID NO: 6407 - protein, 214 aa, Bacillus licheniformis
MTISIYLAGDSTVQHYKADSPQGGWGEFLQSYLSGNVQVINRAIGGRSSKTFVEEGRLASILDVIKQDDWLFVQMGHNDASKDKPERYTEPYTTYKQYLKMYVDGARQKGASPLLITPVARLHYKDGVFLNDFPDYCIAMKQVASEENVRLIDLMDKSLQHFAEKGYNEVFKYFMISENVNDYTHFTKKGAREMAKLVSEGIRELGLPFVKETV

SEQ ID NO: 6408 - protein, 665 aa, Bacillus licheniformis
MKMNGKLYHGACFYPELWDEDVLDEDIRMMERIGINVVRIGEFAWSRMEPEKGRIDVGFFADVIRKLRDNKIETVMCTPTATPPIWLTHGHPERMHVNEKGETMGHGSRQHACTNHPYFRERARLIIKHIAKEIGELPGLIGWQLDNEFKCHVAECICETCRTLWHKWLEDRYQTIDRLNEAWGTGVWSETYQCFEQVPQPGPTPFLHNSSLRTMYQLFSMDKISEFAREQAEVIRAYSDAPITHNSSVMFGVDHEDLFKSLDFASFDTYASQENSQAFLFNCDLWRNIKKGRPFWIMETSPSYSASLESYAAPHQNGYLKAEAVSSYALGGAAFCYWLWRQQRAGSEQPHGSVLSAWGEPDVGYENVLEAGRARREVEHIMLATAPLQAETAVVYSDRAKVFLKTEPHRGLHYRTLITEFYDRLLKMGIHRDVILEGSPLDGYKLLFTPFIHYLPPAFIKKAEAFAQSGGIWIAGPLTGGRTEHHTIHTDCGLGPLEKCSGVKTLFTFPMDERNSSGTAFGVKAPLSLWSAVFEAGGTKAVGMIEKGPASGKAFITEHKCGKGKIVMLGSMPAGEAGDIMMKKLISHYAEEAGVEQKTDVTPGTVVAPRKGADGLVWVVINMDGKGGAVTLDGNGTDLLSGRPVTGRVTLGPHDYRVILLSENK

SEQ ID NO: 6409 - protein, 863 aa, Bacillus licheniformis
VKAQAELKWLNRAPASFGGVTWGVPWAKGVLQKGETAVIASENAPHLQTWPLAYWPDGSIKWTGHAAVFPEESGRRFTLQKGKPSAPKTVVRVSEQKDEITVNTGAIVCKLGKSGPALIRSISISGEMMAKEGRLIALKEKRSGSDTQSMYYIERFESLVKRAAIEQNGPVKTVIKIEGVHRGGGIDVWLPFTVRLSFYAGVPSIRIVHTIFIDCNAETEWIKGLGLEMSAVLSGAPRNRHIRYAADGGIYGEASQLLVTRRFNETNGFYERQIAGQPVPEESEVVRDAEKNAVWNDFKLIQDSPVHWRLKKRTGKDCAWVDAIHGGRAKGLMYAGGENGGIALGLRNFFEKYPSSLEAQGLASGETKLTAWFWPPEAEAMDFRHYSKGTHVESAYEGFAEMRSTAVGIANTSEVNLACFSNPPSNEELNRAADEWQNPPLLICEPDYYYDTRALGVWSLKDKRRPLSAVLEDQLDEALKFYMNEVEQRGWYGYWHYGDVMHTYDAVRHVWRYDLGGYAWQNTELVPNLWLWQSFFRSGREDIFRMAEAMTRHTSEIDCYHFGDYKGLGSRHNVLHWGCGCKEARISMAGLHKPYYFLTADERTGEVLTEVKDADRALEMLDPMRAYYPEKEFPAHARVGPDWAAFCSNWLTEWERTGDEAYLDKINRGIGRLKALPLRLLSGPTFGYDPKASDLLHMGDGNHGGYHMVIAFGAPQTWMELAELLEDNEWKEMLGEFGEFYLLADEEKRKRSGGKLHDDLFHWPMFSAAMAAYAARLHQDRKLAEKAWRLLLDEKQSHTPLPIAPKQVHAWNTITEIPWVTTNCVSQWCLNTIAVLELLKDMPPDQDMQEKIIKAMKDHPARV

SEQ ID NO: 6410 - protein, 507 aa, Bacillus licheniformis
MARLKLKGNKWLAAPAVFLLLIGCSANETSNQDGKGKEKDAIHIMAPLLSPESPGENSPSLKALEKYTKKQIKVTWVPNSSYNDKFNIVMASGDLPQAIVVTDKSPGFIKSVKSGAFWELSPYLKDYPNLGKADEKVMKNSSINGEIYGIYRARDLIRASIIIRTDWLENVGLEMPKTIDEFYDVLKAFKEKDPDGNGKDDTYGMVVPKWMGLGNGSPWDIMQTWFGAPNRYGVDEKGELIPDFTTEEYMEALRFFKKLYDEGLINKDFAVMDSAKWNDPVVKGKAGVIVDTGSRASQIQSAMEEADPGNKDVIDVIGTVKGPKGTYTFPTSGYAGMIAIPKASVKTEKELKEVLGFLDKMNDEEAQIIANNGVKGRNYKLENGAYTSLEKNNKKLLYEHEGLAQFSMGIPEQRYYVEKQELKLFKHREQIRKEGEKIAVFNPAESLVSDVYTQKGAQLDNIILDAKTQFIIGDIDEKGFQDAVELWYKSGGEDLMKELNKRYKETK

SEQ ID NO: 6411 - protein, 317 aa, Bacillus licheniformis
MEITAKTGKPAVKTEKKPTGLEAVKRDKWLYLLLVPGVLYFLIFKYWPMWGVLIAFKDYSPYLGFWQSEWVGFEYFKDFFMNPDFFRLLRNTLMLAALDLIFAFPAPLIVALLLNELRHAIYKRCIQTFIYVPHFVSWTIVVSITFVFFTVDTGVMNKVLQSITGREIAFLSDPEWFRPMIVLQSIWKETGWGTILFLAALASVDQEQYEAAVMDGAGRLRRMWHITLPAIRSTIVVLLILRIGSFLNIGFEQIFLMTNSLNRSVAEIFDTYVYVVGITQGAYSYSTAVGLFKSVVGIILIFCANYIAKKFDQDGLF

SEQ ID NO: 6412 - protein, 294 aa, Bacillus licheniformis
MSGAETIHNTKAGRVFDWFNVIFLGCCGLITVLPFLYIIAGSFATEAELAERSFFIFPETFSLDAYRYIFSTPTFIRSMGVSVLITVVGTIVQLFFTFTMAYPLAKRHIKGRNLLLNLVIFAMLFSGGMIPTYIVVKSLGLLDSYWALILPMAINPFNLIIIKNFFQQLPKELEESAKIDGCSEIGVFLRIALPLSKPIIATFALFYAVGIWNDFFHALLYINDSAKWPLQMVLRQVTILSDLTGTTNDMMETVPPEQSIKLAVIVIATLPILAVYPFLQKHFAKGILIGSVKG

SEQ ID NO: 6413 - protein, 442 aa, Bacillus licheniformis
MNAEANGLKKEIGLLFALSLVIGTIIGSGVFMKPGSVLSYSGNAQIALFAWLLGGILTLAGGLTIAELGAQIPKTGGLYTYLEEIYGEFWGFLCGWVQIIIYGPAIIGALGLYFGSLVANLFSWDKSWTALIGIITVAFLCIVNIVGTKYGGAVQTITTIGKLIPIVCIIVFGLWQGDEYIFSSVTESIASQNFGAAVLATLFAYDGWILLAALGGEMKNPEKVLPKAMTGGILIVTACYLFINLALLHILPADQIVKLGENATSTAATMLFGPLGGKLISIGIIVSIFGCLNGKVLSFPRVIFAMAEKKQLPFSRWISHVHPAFHTPWIAVIVQMIIAVILMIISNPEKLSEVSIFMIYIFYVMAFFAVFILRRRKNGQGRSYSVPLYPYLPVAAILGSLFVLVSTLITDFYSCLWSILIGLVGLPVYFWMKKRNKNGSAA

SEQ ID NO: 6414 - protein, 49 aa, Bacillus licheniformis
MIFDILLVFIGEGGRPDREDGLVDFSNQIAYFGERINLEFEIFNWEMIE

SEQ ID NO: 6415 - protein, 317 aa, Bacillus licheniformis
MNVNGIHHVSALTANAQHNLDFYVKGLGMKLIKKSVNQDDPTMYHLFYGDEVASPGSDLTFFEIPMLARRREGTNCISAVSLRVPGEQALEFWEKRLHELGTEICGIETRAGRSILRFLDHEGQNMMFVADEKGKDHGVPVKNGVIPEDAAIRGLGPVELTVRDAGPTAAVLTDILGFHKIGEEQADESGQTLHIFESGEGGAGTEVHVKQSDDGRRERPGRGSVHHVAFRVKDEEELKQWHEIISENGFSNSGIVERYYFKALYFREPNGILFELSTDGPGFAVDESIDELGQSLALPPYLEHRRKEIEARLKPIR

SEQ ID NO: 6416 - protein, 120 aa, Bacillus licheniformis
MNTVSQEIQDLSIKSLESTFNKLTNAYKSTTEKGSNTTLVKKRLNAVKIGLESLKGTWYGEDFGYNEEIILTTKKVLKGIIPSIEKQIAKAKEGSPQKTLNERRLTALKLAIESLENRLI

SEQ ID NO: 6417 - protein, 432 aa, Bacillus licheniformis
MEYNREDQLETKNELIVSDQKPDQAIKKAEQQKRRLSWMTPILSGIIGGSLVLGVTTYQHSIDETANTSVQTQTNETSNSSASSTKANTEKLSSTNSSDISTMVENVSPAIVGISNYQKQTESGMFGFESNSSSSSEQETGTGSGVIYKKANGKAYIITNNHVVEGASKLTVSLSNGKEVEGKLLGSDSLTDLAVVEISADHVEKVASFGDSSSLKAGESVIAIGNPLGKDLSRTVTQGIISGVDRTVSVDTSAGQTEMNVIQTDAAINPGNSGGALLNTKGEVIGINSMKISESGVEGIGFAIPSNDVKPIAEELMSKGKIERPFIGIGMMDLEQVPENYQTGTLGLSGSQLNKGVYIRQVASGSPAEKAGLKENDVIVSFNGKETDTGSALRNLLYNDAKIGDTVKVTLIRNGKTMTKQITLDQKESASS

SEQ ID NO: 6418 - protein, 270 aa, Bacillus licheniformis
LNKIGFIGYGSMARMIAVKLLDQGKIRDDMVVVSSRNDGKTEELKKLYPNVACQSADELAKQCGLIFICVPPMAVKETLEKIQPFLQEDVHIVSIAAGVELDRLHDWTSGQVTRYIPTLTSEAGIGVSLVVHGERVAEADKSRLEEYLSAFSTVKQINERDIDAASNLTSSSPGFIASIFEEFAQAAVRNSSLTEEEAFQFLIHSLLGTGKLLMEKDMTFAQTLDRVATKGGITAEGAEVIQDAMPEVFDELFARTMKKYEVIKDAVRRQ

SEQ ID NO: 6419 - protein, 274 aa, Bacillus licheniformis
VKLYMSVDMEGISGLPDDTFVDSSKPNYERGRKIMTDEANHVIDEAFKNGCREVIVNDSHSKMNNLLIERLHPEARLISGDVKPFSMVQGLDDTYDGAVFVGYHARASMRGVMSHSMIFGVRHFYINDQAVGELGFNAYVAGYYGVPVIMAAGDSEAAAEAEELIPNVTTAAVKETVSRSAVKCLTPEKAGRLLRERMAYAIQNRGQVKPLTPPDRPVLRIEFANYGQAEWASLMPGAEIEPQTTTVRYQAKDILEAYQAMLVMTELAMRTTFS

SEQ ID NO: 6420 - protein, 308 aa, Bacillus licheniformis
MAGYIMKRLLWMLATILVITTLTFVMMKVIPGSPFNEERNTNEAVQRNLEAYYQLDEPLFVQYLYYVKSIVTFDFGPSIKQPSQSVNDLLSRGFPVSFELGMTALIVAVISGIALGIFAALRQNGIIDYIAMTIAVLGISVPNFIMATLLIQQFAVNWNIFPPSTWTSPLHMVLPTAALAMGPLAIIARLTRSSMIEVLTQDYIRTARAKGLSPFKIVMKHALKNALMPVVTILGTLTAAILTGSFVIEKIFAIPGMGKYFVESINSRDYPVIMGTTVFYSIILIIMLFLVDMAYGILDPRIKLHKKG

SEQ ID NO: 6421 - protein, 319 aa, Bacillus licheniformis
MSLPVRTEKEASSGSDIPVEWFAPLKQKQDERESVARPSLSYWQNAWRILRKNKLAMAGLGVLIFLFFMAALGPVLSPHSVTQQTLSEQNLPPSTEHWFGTDELGRDVFTRTWYGARISLFVGVMAALIDFAIGVIYGGIAGYKGGKTDHAMMRVIEVLHGLPYLLVVILLMVMMGPGLGTILVALTVTGWVGMARIVRGQVLKVKHDEHVLASKTFGAKTVRIIRRNLLPNMMGAIIVQMTLTVPSAIFAEAFLSFLGLGIQAPFASWGVMANDGLPVILSGHWWRLFSPAFFISLTMFAFNVVGDGLQDALDPKLRR

SEQ ID NO: 6422 - protein, 343 aa, Bacillus licheniformis
LRKKVLEVENLHVSFTTYGGTVKAVRGVSFELYEGETFAIVGESGCGKSVTSQSIMRLLPKFRQRSQDGAIRFKGKDLRHLSEKEMRKIRGAEISMIFQDPMTALNPTLTVGDQLAEALLEHRPVSKTDARKAVISMLELVGIPNPKERLRQYPHQFSGGMRQRIVIAMALICEPEILIADEPTTALDVTIQAQILELFKDIQRKTGVSIILITHDLGVVAQTADRIAVMYAGKIAETGARRDIFYRPQHPYTKGLLHSVPRLDLEDADLVPIDGTPPDLFSPPEGCPFTARCSRAMEVCGKIHPAVTEVSAGHRVCCWLQDERAKRALLTHNHKIDFSNGGI

SEQ ID NO: 6423 - protein, 541 aa, Bacillus licheniformis
MKRLTSVLASAFAVILLFGCTANEQAGQETKKKAKETAGEQVLRLNNENEPTSFDPPIGFNNVSWQALNNLMEGLTRLGADHEPEAASAEKWNISDDGKTYTFTIRDDAKWSNGDPLTAGDFEYAWKRLLDPKTGSSAAFLGYFIEGGEAFNSGKGSKDDVKVKAVDEKTLKVTLESPQQSFLSIVANPAFFPVPQKIAEDNPKWHEEAATFVGNGPFKLAEWKHDESFTMVKSDTYWDRDTVKLDKVTWAMVDDRNTDYQMFESNELDTAYVPAEMSEKLMGSDEVKVFDQAGLYFYRFNVNKEPFQNEKIRKAFAMAVDQQEIVDYVTKNGEKPARGFVSPGIKGPNGKDFREEGGDLLKYNADEAKQLLEKGMKEENYEKLPAVTLTYSTKPEHKKMAEAVQQKLKSTLGVDVKLANMEWNTFLEEQKALKFQFSQSSFLADYADPINFLESFQTGNAMNRTGWGNSEYDELIKAAKNEADEEKRTELLHQAEELLFEGMPIIPIHFYNQVHLEKENVKGIVRHPVGYIELKWAEKTS

SEQ ID NO: 6424 - protein, 307 aa, Bacillus licheniformis
LNIAPQRLMKGDTVGVIAPASPPVPEKLDRAVRFLKELGLEVKVGRSAAERHGYLAGSDEERLGDLHDMFEDRSVKAVICACGGYGTARIAGKIDYRLIKSRPKIFWGYSDITFLHTAIRQNTGLITFHGPMLSSDIGKDDVHPLTRRSFQQLFQKMTLSYTEELSPLETLVHGAAEGELVGGNLALLVTTLGTPYEIDTKGKLLFIEDVDEEPYRIDRMLNQLKMAGKLSDAAGILLCDFHNCIPKKRDKSLTLKEVFQDYIASEGKPALSGFKIGHCSPNIAVPVGVKAVLDAGKKRLTIEPGIS

SEQ ID NO: 6425 - protein, 365 aa, Bacillus licheniformis
MKIAEITTNRIAVPLKKPFKTALRTVRTAEAVIVKVTAENGMTGWGEAPPTAVITGETLDSIEGAVNTILAPALTGCNLRMAEAIFHDIDKLIVGNTSAKAAVETAVYDCLAQLCGLPLYQLLGGYRREIETDFTVSVNDPEEMGKDAARYVQEGFRTLKIKVGKNDMATDLERIREIRKQAGPAVRIRVDANQGWTAKQAVKAIRKMEDEGLSIELVEQPVHRLDLEGLKQVTDAVDTPIMADESVFTPRDAFHVLKTRSADLINIKLMKAGGIRQALKINAMAEACGVECMAGSMIETRLGITAAVHFAASQKNVTKFDFDAPLMLKEDIVEGGIRYHAGTITIPDAPGLGITKVCHEGGEDK

SEQ ID NO: 6426 - protein, 295 aa, Bacillus licheniformis
MSLYTTAVSVANVWTSPEAPRTIDRMMLSNPVHVRSWLDELSYEERLELCTANLVQTQVLFGEDVQLIKERGDWAFVIIPGQPSAKDKRGYPGWIPKDCLVEKSPAKSETSAVIQKPTAFLYDDKKTKVIELSFLTKLPVLSSGGVWFEVDTPLGRKWLKKEDADLETPVKGSGDDIVQTGQAFLNLPYLWGGMSGFGYDCSGFVFNMLKANGRSAPRDAGDQAKGGKEVSFSSPKRGDLLFFAYEEGRGRVHHVGIYCGNGEMLHSPKTGKSIEVISLKGTIYEKELCAIRRYF

SEQ ID NO: 6427 - protein, 337 aa, Bacillus licheniformis
MQTGALLKVSRLKMHFDAGRGKTVKAVDGISFDIKEGETFGLVGESGCGKSTSGRVLMRLYQPTEGEVTYRGKNIHHLSDDESFQYNRKIQMIFQDPYASLNPRLTVREIMTEPMEIHGLYGGKKARLEKADELLEAVGLHKSFANRYPHEFSGGQRQRIGIARALALEPEFIVADEPISALDVSVQAQVVNLLKKLQKEKGLTFLFIAHDLSMVKHISDRIGVMYLGHMVEITDSGRLYQEPLHPYTQALLSAIPIPDPDVEDKRRRIILKGELPSPIDPPSGCVFRTRCPAAMDICAAKKPMLKEADDGHFVACHLYDGDARKEEAGLKVTLQAR

SEQ ID NO: 6428 - protein, 295 aa, Bacillus licheniformis
MDSALSKKNRGAGCTSEYDVLKKVVLCRPEYMEIAEVINETQKYFQKDNIDKTLAVRQHNTLIKELESRGIEVVILPALSQFPEQVFTRDIGFTIGGTVFSAQLSADIRQGEENVLQEWLAKEQISWTAFNEGYQIEGGDILVDQNTIYAGISHRTTFSAVQELKRRLPSYEVIPVPFEETFLHLDCVFNILSPTEALVYPKALGESEYDVLKKRYEMIEITDDEQFQLGTNVLSIGNKTVISLPVNRHVNQELRKRGYTVIEIDLSEIIKSGGSFRCCTLPIERTSTECYKGGA

SEQ ID NO: 6429 - protein, 172 aa, Bacillus licheniformis
MNGPEKRYCKESKVVKTSRVFPLDTNNHNTLFGGKLMSYIDDIASISAARHSRCETVTASMDSVDFLEPIRQEDSVCLESYVTWVGRTSMEVFVKVIKEHLLTGERKLAATSFLTFVALDQDGNPQAVPQVVPQSEEEIMLHETARQRAEERKNHRKHSKALAQALAVDKPW

SEQ ID NO: 6430 - protein, 244 aa, Bacillus licheniformis
MLEFVWTFLAKPALVFSIAYILFRIAGKKAVSQMTNFDLLLTFAIGTIISEPILTSKISMSIYYALTFLIFYLLIEKLSLHNKWRWFLVVSPTVLIRNGNIDKGGLKRERLTVNELLGKLREKGYADPKDIDLALIEESGQISVIPKSEARPVQPRDLNLETKRNFVPIPLILDGEIIEHNLKYLKKTKEWLFQKLEDKGIEQAMLPTITLGTLNEKNEIIIDTEDPGSPLTHDPYLYKPGQDH

SEQ ID NO: 6431 - protein, 37 aa, Bacillus licheniformis
MVSQKIGGKYVVFCIFIAYISFCEKILMVGAIDEKVF

SEQ ID NO: 6432 - protein, 435 aa, Bacillus licheniformis
MKRFFSVIILGALLLLGTSAPIEAADYGRDVLGSKDGWGAYGKGTTGGADASSDQVYTVKNRKQLVEALGGDNKKNSENDTPKIIYVKGTINLSVDDDNNPLGYEDYKDPEYSIEAYLKAYDPKKWGKKEPTGKLEEARLRSKDNQKERVLIRVGSNTTIIGLGDDAKIVGGGLYVKNAENVIIRNIEFENAYDFFPGWDPTDGSSGNWNSEYDNLLIEMSKNIWIDHCSFNDGDQPDELTETHFGREFQHHDGLLDIKKQSDFITVSYSIFSGHSKNTIIGSSDSYKADNGHLRVTFHHNLYENIKERAPRVRYGKVHIYNNYFKSTKDSYNYSWGVGYSSKIYAEDNYFDLPEGTKPQKLMKVFKGDALYEKDTIVNNQKSVAKIDVVSTYNKANNASIKKSAGWKPTLFEKIDDAEDVPAIVEAHAGAGKLK

SEQ ID NO: 6433 - protein, 110 aa, Bacillus licheniformis
MSSTQMLKGILEGCLLAVISEGEIYGYEMTKVLAGYGFSDISEGSIYPILLRMQKEKWVETELKRSASGPKRKYYRLTPLGEAELQSFIDRWKALSGNVNALLEKKLKEK

SEQ ID NO: 6434 - protein, 249 aa, Bacillus licheniformis
VLSKDMQNVLDEMRIYLMSSGKSDKEIEGIMNELTVHAWEGEKDGKTVRQIFGDSPKSYVQALSKELSSRPGEIAKLFFAILIGAISYFIFSDAVNDSLDYSVYTLAGYPLYILLAAAMLPLLGRITAFKGKNTAFMYTMVYAALTFFPILAIIFIDRQFGTPVFSFDGGSRWLIMALSFLVIVCLSFRLKAGALSILPLLLAGTHFLFQYMNWDSAGAMMAETYIPYIGLLLVMFIETKRARNTAQYE

SEQ ID NO: 6435 - protein, 166 aa, Bacillus licheniformis
MDMMWGYVLVFILAAIPWFEVIGVVPLAIIAGLKPVPSAIIALLGNLLTVLLLIFLIDKVKVWLERRRGERRAETDKFSKRKSRAKKIWLTYGIPGLSFVGPFFIGSHLTAFMCMGFGAKRRQTALWMTGSLAVWTTASAVAAYYGFSFLAPENEGLLKNIFKQEE

SEQ ID NO: 6436 - protein, 173 aa, Bacillus licheniformis
MPFLKDLSPDEEMAPTVGLLFSAVNENIERLKSIVSGISREELEYKGEHGDKNSIAQLIYHLINVDVRWVYRLKESEIPRELEEKYGPMTDENGRLPEVTGVPLTVLIEWHEEVLEMLKHTAKGFSEKDLLKKVPYEGGFSTIRWGIWHMSDHNRYHQAHIQACLKEFRMQNS

SEQ ID NO: 6437 - protein, 109 aa, Bacillus licheniformis
MRWGSVILAALFEIGWVMGLKHADSALEWICTAAAVVMSFYILVKAGEKLPVGTVYAVFTGLGTAGTVVCEIALFNEPANIAKLALIGVLLCGVIGLKLVTNEEKGEAS

SEQ ID NO: 6438 - protein, 104 aa, Bacillus licheniformis
MEWICLIAAGLLEMLGVTMMNQFHKDKRVRWIFLLIIGFAASFFLLSLAMETLPMGTAYAVWTGIGTVGGALVGILFYGEPKDGKRIFFIALILGSAVGLKLIS

SEQ ID NO: 6439 - protein, 300 aa, Bacillus licheniformis
MNAYMKQQLSQYQEINNDKARLLVSCPDQPGIVAAVSSFLFENGANIIESNQYTTDPEGGRFFLRIEFEVQGIREKIEQMKAAFASVAESFQMTWSMNLASELKRVAIFVSKELHCLHELLWEWQSGNLMAEIAAVISNHEDARETVESLNIPFLYMKANKDIRQEVEKQQLKWLEEYRADVIVLARYMQILTPDFVSAHPNKIINIHHSFLPAFIGANPYKRAYERGVKLIGATSHYVTNELDEGPIIEQDIERVDHRDNVEALKNIGRTIERSVLARAVKWHLEDRIIVHGNKTIVFN

SEQ ID NO: 6440 - protein, 45 aa, Bacillus licheniformis
VKWHAETFHHMKPAEPASESQGENLGAYPGVKGERGVRFIFSRIQ

SEQ ID NO: 6441 - protein, 365 aa, Bacillus licheniformis
VKKQRIVIKIGSSSLTNSKGSIDEEKINDHVRAIAALKKEGHEVIFISSGAVAAGFLQLGYPARPVTLKGKQAAAAVGQSLLMQTYIEHFADHDIKPAQILLTRNDFAKRERYRNAYATIMELIERGLVPIINENDSVSVEELTFGDNDMLSALVSGLIHADKLIILTDINGLYDSNPAEHPDARRFDYIPEITDELLGCAASAGSKVGTGGMKSKLLAAKTALSLGVNVFIGAGEGDDKLIQILKGNGDGTYIGQSDLSSVNNHRQWIAFHSPVSGKITVDEGAELAITENGGSLLPAGVTAISGDFPKGAVVEVYGPNGLAGKGQTLYSAAELEEVKGKRSDEFHHEEGIEVIHRNDWVSIKE

SEQ ID NO: 6442 - protein, 415 aa, Bacillus licheniformis
MSEVIEKAKKAKVAKEELVHQPTERKNEALSFIAEAIRFKQDEILAENEKDIVRGKEKGFSPALLDRLALTPERLNDIADAVMLLTKLEDPVGETLETIRKDNGLFIENVRVPLGVVGMIYEARPNVTVDAATLCLKTGNAVILRGSSSAINSNKALVRVIREALVRSALPEDAVQLIEDTSKETAKQLFTLNDGLDVLIPRGGKNLIDMVVRESTVPVLETGAGNCHIFIDESAQPDMAEQVVINAKTQRPSVCNAIETVLIHKGWAEEHTKALLQKLEEAGVEIRGDEAVCTMLPSAVPARETDWGTEFLAPVVSIKTVAGIDEAIRHIRQYGTRHSEAILTENQENARYFLTSVDAAAVYHNASTRFTDGFEFGYGAEIGISTQKLHARGPMGLKALTSSKYIIKGNGQIRI

SEQ ID NO: 6443 - protein, 140 aa, Bacillus licheniformis
MKPLFTSQATANGGRDGQVTSSDRVLELELAMPGTPKAKENENATNPEQLFAAGYAACFDSALQLTAQKARLRMETEVTANVSLLKDEADGGYKLSVTLQVKGTGVEQRELEKLVHHAHTVCPYSKAISGNVDVNLEVIS

SEQ ID NO: 6444 - protein, 150 aa, Bacillus licheniformis
MANEFEHMRLDRQLCFLLYASSREMTKLYKPLLDELNITYPQYLALLLLWEHGELSVKTMGKLLYLDSGTLTPMLKRMEQHGLLTRERSPEDERSVIVRLTAGGQALQEKASSIPQHMIAQTDLSAGELKNLKQTLESLLASLTKKTDVL

SEQ ID NO: 6445 - protein, 70 aa, Bacillus licheniformis
VTFAVNNAVILIPPYVFSSTLYISQNEFFKHPFLFFRVFSRSMGKERKILYNKKEHKKELVKRWQTNLNI

SEQ ID NO: 6446 - protein, 137 aa, Bacillus licheniformis
MTALFTAKVTAKGGRSGHVKSDDGVLDHNIVMPNEKKEGESGTNPEQLFAAGYAACFGGALEHVAKQKGIDIDSEVEGHVSLLKDESDGGFKIGVKLIVTAGGVEKEKAKELVEAAHDFCPYSKATRGNIDVNLEVK

SEQ ID NO: 6447 - protein, 221 aa, Bacillus licheniformis
MAYLKKALVFSVLSLAIVLAGCGTGAAEKNNGNQSPADTAKQKAPDLKTYSLDKNIRSEEDFDLIGKYVHAEDDQITLEIKDKELIVPKSSRFHSEEDHDDLIGKLVKVEVDGKTQEAEEAELMPQSKADQNGVYEEEKDGSRKIIATFVSESEQNITIKTKAGEKTYQKTADFERDVAEAPEKLKGKIVRLEIEKDGKAESLDLESEDQKLEWYEPSASK

SEQ ID NO: 6448 - protein, 156 aa, Bacillus licheniformis
MNHEAFLQRAIDLAVESVKSGTGGPFGAVIVKDGQIIAEGKNNVTTSNDPTAHAEVTAIRLACEALGDYQLNDCILYTSCEPCPMCLGAIYWARPKEVYFAAQHSDAASAGFDDSFIYEEITKTKSERKIPFYKMDLQAKLEPFLTWEKTDQKVEY

SEQ ID NO: 6449 - protein, 210 aa, Bacillus licheniformis
LLTLYIARHGQTEWNIEKRMQGWEDSNLTALGLANANALGERLKDVQFQAAYSSPSGRAVDSARAMLQNRSIPFITDDRLKEISIGRWEGKTYDEIKQSDPDLLEAYFNTPETYMPDESESFYDFERRVSQAYQFILRRHREGNVLIVSHSVFILMLLNLIKKRPVGELWNSSYVHDTALAVVTVSEDGSAAIEREGDGEHRVEAKNATW

SEQ ID NO: 6450 - protein, 237 aa, Bacillus licheniformis
MTIRLNINDLHALARQFRYSHQRISDLIRLLNRHFHVLFSSVKTARTCGIDQAQSEMEHELKGFLHTLDDLQHLLHFTEIRMKKTDQMLAEKLFHSGGHLAGYLPIMSSLAAAKCSPDSYKLTAPPLSEPLALMKQIKQNGLSGLITKKRAAAYIQFDEEGQQQLWSARRMISRTIADNLCILAYQQIAKGPLSLTVLLFGKKAEADAADVKTVCLSKNKTITADTLHSFSAKIYSG

SEQ ID NO: 6451 - protein, 104 aa, Bacillus licheniformis
LIDDGIALERKIKRKIYQEDIHSLQLYVKDVNAAIDELRQESSSILKAHQTYINGWRGQAREMYDALLDDLDRAESRVYDKLRTIKEQADEEIERLQLKAEELI

SEQ ID NO: 6452 - protein, 762 aa, Bacillus licheniformis
MTNVKTSSLGFPRIGLNREWKKSLEAYWKGNTDRETFLKEMDEQFLAALQTQLDQQIDIIPVSDFTMYDHVLDTAVMFNWIPDRFKDINDPLDTYFAMARGTKDAVSSEMTKWFNTNYHYIVPEYEKGAQYRVTRNKPLQDYQRAKAALGTETKPVILGLYTFVALAKGYEQQDIKDIYNQMTPLYIQVLKELEQEGVKWVQIDEPALVTASPEEAAAVKEIYQTITEEVSELNILLQTYFDSVDAYEELISFPVAGIGLDFVHDKGKNFEHLKAHGFPKDKVLAAGILDGRNIWKANLEERLDLTLELIQRAGVDEVWIQPSNSLLHVPVAKHPGEHLADDLLNGLSFAKEKLLELTLLKNGLVSGKAAIQAEIDEAHGHLQDLKQYGAATNSAFAEERGKLTEEDFKRPTAFEERLRIQNDSLGLPLLPTTTIGSFPQTADVRSARQKWRKKEWSDDQYEAFIQEETKKWIDIQEDLGLDVLVHGEFERTDMVEYFGEKLGGFAFTKYAWVQSYGSRCVRPPVIYGDVEFKEPMTVKETVYAQSLTSKKVKGMLTGPVTILNWSFARYDLPRKEIAFQIACALRKEVEALEKAGIQIIQVDEPALREGLPLKERDWDEYLKWAAEAFRLSTSSVEDTTQIHTHMCYSNFEDIVDAIEDLDADVITIEHSRSHGGFLDYLEQHPYLKGLGLGVYDIHSPRVPSSDEMLTIIEDALKVCPADRFWVNPDCGLKTRQPEETIAALKNMVEAAKQARGKLAQTV

SEQ ID NO: 6453 - protein, 317 aa, Bacillus licheniformis
MQMRLIPYVTDTKLMDVNELPEGIDAIKAPELWSQGFKGKDITVAVLDTGCDATHPDLADRIIGGRNFTDDDNGKEDQFHDYNGHGTHVAGTIAANDQNGGISGVAPEANLLIVKVLGGEDGSGDYEWIINGINYAVEQKADIISMSLGGPADVPELKEAVTNAVKSGVLVVCAAGNEGDGNDRTEEYSYPAAYNEVIAVGSVSLTRESSEFSNANKEIDLVAPGEEILSTLPDHQYGKLTGTSMATPHVSGALALIKSAEEEAFKRKLTEPELYAQLIRRTLPLDYSKALIGNGFLYLSAPEVLAEKAGEAKLLSL

SEQ ID NO: 6454 - protein, 51 aa, Bacillus licheniformis
VKEQEDEKRDELSIEQAEFVPHPKYEGEYALLLHENYHLLSKDDLEQESEK

SEQ ID NO: 6455 - protein, 451 aa, Bacillus licheniformis
MVKNMTYDELILRIIILLRDGKRKEFQSVLEELQPYDMAILFKEMPEKHRGRYLSFLTVEDITDLMGELDREEQLVVLNKVGKEKAIHVMNKMDNDDLAALFEEMDPELKDQLLSSMEAEESEAVRVLMNYPPETAGRIMTNRYVWIPQHYTVKEAVVKLKSFAEIAESINYLYVINEQKQLVGVISYRDLILAEPDEKVQELMFTRVISADALQDQEEVARLIERYDFLAIPVVEKNHELVGIVTVDDIIDIVIQEANEDYEKFAASGKAITFDTKSYVAAYRRLPWLILLLFIGLISGSIMSYFEDTLQQVVALAFFMPMIAGMTGNTGTQSLAVVIRGLSKEELNKKTIFRLIFRELRAGIIIGVVCAIVITGIAIVWQGNLLLGFVVGTSLFATLIIGTMAGTIVPIILHKCNVDPAIASGPLITTLNDILSLLIYFGIATAFIHSL

SEQ ID NO: 6456 - protein, 118 aa, Bacillus licheniformis
MRRIAAVLICLAVALIVAGCQNEDEGKDRRLVAVEDMLEAILDDDLSKMKRLYVEGANPSPETILKDKQKWGISGLHADDFKFLKRASMCFMPLTRWKIPVSPERLRFGYAMIPIKAL

SEQ ID NO: 6457 - protein, 110 aa, Bacillus licheniformis
MTVEDLSYKDKKVISIGIVSELTGLSVRQIRYYEERKLIYPQRSTRGTRKYSFADVERLMEIANKREDGVQTAEILKDMRKKEQRLKNDQQLRKKMLEGQLNAHFKYKNR

SEQ ID NO: 6458 - protein, 51 aa, Bacillus licheniformis
MKEHKAVLLAKEIVALDNKRDELLETLMNLAGKDAFPLLRAVQNGFYQKSS

SEQ ID NO: 6459 - protein, 59 aa, Bacillus licheniformis
MSRLLKNALEKERNHYLKKLISLGEHNREVLQRMTITELRNEYFYFFRKNKARVQNRPF

SEQ ID NO: 6460 - protein, 153 aa, Bacillus licheniformis
MRLSFNEEEVHRAMSLYKVFARAFKSVSEHSIRDSKEHGFNPTEFAVLELLYTRGAQKLQQIGSRLLLVSGNVTYVIDKLEKNGFIKREQDPKDKRSVYANLTEKGKAYLDEIYPIHSLRIARAFSGLTKEEQEQLMVLLKKAGIHSQHLLFR

SEQ ID NO: 6461 - protein, 612 aa, Bacillus licheniformis
MQPVLTTSAPSGGNWRYEVKYDGYRGLLKIAATGEVSLISRNSQPLENTFPEISEFAKSMIETLKEHLPITIDGEIVSLTNRFRSRFEYVQKRGLSKKAELIAQAAAKKPCQYLAFDLLVFNGESLTSLPYTERKRMLFDLMKELGLPMAPDPMAHARIQYIPDTSDFHDLWKAVKRFDGEGIVAKKKDSRWAENKKTAEWLKLKNYKKAAVFMTGYNMANRYLTIAVYDRGQIKEVGSVSHGLGEQERNAILSIVKQYGTETKPGEYTIDPSICMTVHYLTIHYGTLREVSFVSFEFDMAWENCTYNRLLLHSRNVHPDLQLTSLDKVIFPKSDKTKADYIGYLNEIGDFLLPFLDNRALTVIRYPHGSGGESFFQKNKPDYAPEFITSIRDDEHEHIICSDYSVLLWLANQLALEFHIPFQTVDTAHPTEIVFDLDPPSKSEFPLAVRAAKELHRLFDQLGLLSFPKLSGNKGIQIYIPISKNAFTYEETRLFTSFAASYCVSLFPDLFTTERLIKNRGGKLYIDYVQHAPGKTIICPYSTRGNELGTVAAPLFWDEVHSDLSPLNFTMEAVVKRTKELGCPFESFFRQPQDKQIKAILDHLKENNRSEN

SEQ ID NO: 6462 - protein, 290 aa, Bacillus licheniformis
MHTMWKGSISFGLVNIPIKLFAATEDKDIKLRSLHKECRAPIQYEKKCTNCHQEIAPDDIVKGYEYVKGKYVVLSDDELKQLKEEQEDKAVEIVDFVQLKEIDPIYFNRSYFVGPGDNGVKAYSLLREALRKTEKIGIAHMTIRSKKQLAILRVYENCILMESIHYPDEVRNAAHVPGVPEETAVNEKELQTAISLIDELTTTFAPEQYEDTYRIALMDKIKEKIDHNEGVTPNAGAAAPREDVIDLVSALQASIERTKGPDREAAKAPAAKGTAEKKKKTSRKKASEAK

SEQ ID NO: 6463 - protein, 550 aa, Bacillus licheniformis
VTEVLGEYNGWLVLLSYFTAVLAAYTALDLSERVVHTKGRKNIGWLLAGSLTMGLGIWSMHFIGMVSFQTAEEMKYDLKFVLLSIVAAFAGSLISFYVVNEKKPTNGRLAAGSLAMGCAIASMHFIGMEAMENMTIVYHPVLYAASFAIAIFASFAALKLSVVFAKKTGSFRILFIKIGSALLMGGAISGMHYTGMAAATLFMADSVDTGYEGIDTVELGIMIVLVSLMLQCFLIFGAFNDKRLLLHIEKVKDNEERFQSLINHNIDPIYVFSLEGKLLSANSSGYSLLEKMGIEPERLSSVFRQEDHDRLLGWFLQVQNEKQAINRDTAIAIAEKRFDLNVTLIPVYVRKQLDSIYVICKDMTNQREAERKIHRMAHYDALTDLPNRRYAVDRLANVLKRQETGTAVLFLDLNRFKVFNDALGHDVGDLLLVAAAQRLAHCVPNEGFIARLGGDEFIIVAPLQGIDQLTRQLISQFETPFRIKEHRLKTSVSIGIAVSPDDGTDGDELMRKADMAMYAAKHKSVSRYRYFSSSLARKNRPSFQKEIELN

SEQ ID NO: 6464 - protein, 43 aa, Bacillus licheniformis
MILTQFEKIEEQNGKSSLKRTGGYHFLLANFIIYSIIHELYRN

SEQ ID NO: 6465 - protein, 213 aa, Bacillus licheniformis
VVDIEEFILSMAEAFKSLSYLGIFLALCIEFVPAEIVLPLAGYWVYQGDMSMFGVVAAGSLGGVAGPLTLYWLGRYGGRPFLERYGKYFFIKPEALEKSDRFFEKHGGFVAFSGRFIPGIRTLISIPCGLAKMNVWVFCIYTFLAITPITFVYVYLGFYLGENWSKVGSLLDGYLLPVGIGFIVLFVLYLWLKGRRNKIKSQSVSAFINKNKD

SEQ ID NO: 6466 - protein, 255 aa, Bacillus licheniformis
MDAALLLEYGWVLLILVGLEGILAADNALVMAVMVKHLPEKDRKKALFYGLAGAFVMRFGALFAISFLVNVWQLQAIGAVYLLYISVHHILKTHVFKKDEKVKETKQSGFWPTVIKVELADIAFAVDSILAAVALAVTLPATNLPQIGGLDGGQFMVILAGGIIGLIIMRFAASQFVNLLKKRPSLETAAFLIVGWVGVKLTLYTLAHPQINIVSEHFIHSGTWKFIFWAVLIAIALGGWFMTNPNKHENKAAEE

SEQ ID NO: 6467 - protein, 251 aa, Bacillus licheniformis
VKPVLSLLFKTGKRKQSLEESVISIQKGNQQLQNELIDQYKPFVAKTVSSVCKRYIDEKDDEFSIGLIAFNEAIEKYSSDKGNSLLAFAELIIKRKVIDYIRKEARNAQNINMDMQEGEEQESSQSMIEAELSIHEFNRMLEQEQRREEILHFKERLKSFGLSFSDLLEHSPKHTDARQNAIKVAYTLVEHEELKKILFEKKQLPVKQLEKLVAVSRKTVERNRKYIIAMAIIITGDYVYLKDYLKGVLNS

SEQ ID NO: 6468 - protein, 363 aa, Bacillus licheniformis
MRRGIIVEKNKKFVTLLTPDGQFLKAKSTEEDYEIGQEIAFPAETRMSRRRAGFFDLLSLRPLKAGVFSIAAIMLLAFMIIPDVLNNKAYAYMTIDINPSFELTLNKNCEVIDLVPLNEDGKALMDSIKNWEKSDFKEVISEIVEDSDKSGYVTESKEVLIATVYENNEDDTYKATVKSEIDDVAKKYEQQNYKMEAVESDLDTRAKAQKEGISTGRYIRSHKDELEDKNKDDDNENKKDDQNQEENTGEKEKAVKEEDQPEQHTDDKEADTEDHPDGEKPSDEDQSQPDQEMEKEKESNSPNTKNPQEHNHNDKDGQQTEEGTPKSGSGSNQESSKSPPYQKEKKPSDQTNKQEYPPSGPGE

SEQ ID NO: 6469 - protein, 65 aa, Bacillus licheniformis
MARTNKLLVPGAEQVLDQFKYEIAQEFGVQLGSDSVARSNGSVGGEMTKRLVQQAQAQLNGHNDK

SEQ ID NO: 6470 - protein, 239 aa, Bacillus licheniformis
MKPFKLTRLEMAKLMYALKGQLDVSPLAILLRSADLAPDEPEDNLDIPEFIARYERKKQKTEHGLSTNEIVELGNLCELTSLKSTAIQNWIKRDIKDLMGHPELGKKYSIDQAVILLIVRDLKSVYDFETIRPILTTIFNTITDRSDDVVSPLRFYEGYARVLDHVYQIKDYTLNKSALEKIVIEQTGQLRDFYKDLADPEWNKARDITAVTVLSVIASHIQATAHSIIDSVFLKYEMK

SEQ ID NO: 6471 - protein, 297 aa, Bacillus licheniformis
MGKRIFLFLLSNILVITTIGIVLSIIGSLTGVGTYFTANGGIDIVALLVFSAVVGFVGSFMSLLMSRWMAKMAMGVQVLNPDKQTLSYEEQQLVDRVYKLSRAAGLTKMPEVGIYNSREVNAFATGPSKNRSLVAVSTGLLQEMDDDAVEGVLAHEVAHIANGDMVTMTLLQGIVNTFVVFFARIAAWAVSRVVREELAPIVHFIAVIVFQIVFSILGSLVVFAYSRHREYHADRGGADLAGKDKMIHALRSLEQYTSRVKEEQASVATLKINGKKHTSLFSTHPDLSDRIRRLEAK

SEQ ID NO: 6472 - protein, 449 aa, Bacillus licheniformis
MKVLLRKLLRVLSPVQLIALYYFLAVTVSVVLLSLPVAHKNNVEWSFIDALFTAVSAVSVTGLTVVDTADTFSTAGIWILAFVLQFGGIGVMALGTFVWLIFGKRIGLKERRLIMTDQNQSNLSGLVKLMKHVLGLILLIELFGGLILGTYFLKYFETPGEAFMHGFFTSISATTNGGFDITGNSLIPFQHDYFVQFIVMMLIILGAIGFPVLIEVKDFLLSKERKFSFSLFTKLTSVTFFLLVIGGAIGIFAMEARFAFSGKSWHEVFFFSLFQSTTTRSGGLATIDISQFTHTTILFMCMLMFIGASPSSVGGGIRTTTFALNLLALFHFARGNKSVKVFKRELHQADLMKSLIVTLMAVILVFVSTLILTVTEKHSLLELLFEVCSAFGTTGLSMGITPDLSTIGKSVIILLMFIGRIGIVTLLYLFGRKEIEANYHYPKERIIIG

SEQ ID NO: 6473 - protein, 666 aa, Bacillus licheniformis
MKKRVIHLFIAAGFLLLAGACSNEPTAKESMDQYVDKWNEQKFEEMYEQLSAEAQKSISKDDFIKRNQSIYEQIGVSDLKVSTVDNDEDEKNKEKNDSVTIPYKVSMKTLAGPVSFQGKAKLVKEKKDGDTSWKVNWNQSFIFSQLKKGETIRITAKEPTRGIIYDRNGKALATNATVPEIGVVPGQLGDDKDGVIKKLANMLDMEKEDIEKQLSASWVTDDSFVPLKKVKPGSTELLKKATSLPGVLKQDTQSRYYPYGEKAAHLTGYIRPITEEELKQNKEGYSEHSLLGIVGLEHIYEKELRGEIGWTISIPESGATVASKDAKDGKDIHTTIDIKKQEELYSQLKDDSGAAVALEPQTGETLALVSAPSYDPNGFLFGWKKGEWEKLNKDASAPFTSKFNKTYAPGSTIKPITASIGLKNDAIKADEPKKIEGKEWQKDSSWGGYKVTRVSDRLSDVNLENALITSDNIYFAQTALDTGKDQFVEGLKSFGFEEKLDYEFPTKSSSISNEGIDSDILLADSGYGQGQMLMSPIHLAASYTPFLNDGNLIKPHLIKKDGEEKEIWHKNVLPTGGAEAITKGLKGVVEDPRGSAYKPVVKGLTIAGKTGTAELKTKKDEKGKENGWFTAYDYKNKNLLITMMIEDVSDRGGSSYVVNKVKKVFK

SEQ ID NO: 6474 - protein, 53 aa, Bacillus licheniformis
MKRKVARNEAALNNKTPAESMHDHQYMTQYDAENGDRGANRNSKHGKQGESHQ

SEQ ID NO: 6475 - protein, 62 aa, Bacillus licheniformis
MKKHQKSKDMQNHKKPMNPDVLQEEFSNELGDVNAFKFIDVIENNKKKNKKADGQKRDKDKE

SEQ ID NO: 6476 - protein, 341 aa, Bacillus licheniformis
MANSRDSYFDNAKFLLIFLVVFGHIIRSYIHDNDALLHIYKFIYTFHMPAFILISGYFAKGFNRPGYVKKIAWKLIVPYLIFQGIYTLFYSFIDDQSLTAANPFEPQWSLWFLLSLFFWNLLLFPFTKLPAKWAFAASFAIAVLVGYIDMISNTLSLSRTFVFFPVFLAGYYLQKDHFKMLKGWKGKQAALAVLSATFVFYFFADFDYSWLFGSKPYSEFGDVGIKSGLNRVALLVITFASTFAFMALVPERRYFFTLWGTRTFYVYLLHGFIIKSFRKTGAEEWLADYQSLTLLFIATAILTFCLSSGFVKTVAQPFIELKMTNLIRLLKKDNGYNPYLK

SEQ ID NO: 6477 - protein, 736 aa, Bacillus licheniformis
MEETLDLNESLNLQNQLNRLKKENAKLKADLYQYELLFNGTLDAIFILDKQMNIIKANDAACKILQSQKKNLLNRSALDFLHAVPPDELNQNIHRFLERGYAKKEVAIRLDNGSVKYIEFTASKGIGEDCFFVVMRDISSKKILERERTINEKLFKDLFHRAVEGIVIFDKQGCFIDANHSFCQSFEIEKSELSKLKLSQFVSPENKGRLDKIWNALFRRGKAKGELPVRLRSGEDRLFELTITSNILNGFYMSIMRDITEKRSMEKQLFKSEERFREVFENAMDAIILMNNDGRIVKANQSACKIFELPMDQLLNKKMTDFIDRTDQRYHAIQKQYDQKGEIRAELLFRMANGQYKELEFTSKRIMFDSQDLTILRNVSDRKRMEQELRESELKFRKVFNGSMDGIVLFNNQYDIIDANPLAGKILSIPLEQLKTSNLLDVISGYHIENAASPAKTISFEEMDNDIPFLLSDQKRILEFSFKRNIIQNMNLAMLRDVTERKELEERLRKSNTLHVVGELAAGIAHEIRNPMTALKGFIQLLKGSIQNEDHALYFNVITSELKRIESIITEFLILAKPQAIMYEEKNIVKIMQDTMDLLHAQANLDNVQMHLKCEDGIPLIYCEPNQLKQVFINILKNAIEVMPDGGNVYVSIKPKGDDHIIVSLADEGIGMTEDKLKRLGEPFYTTKERGTGLGLMVSYKIIEEHKGKIEVESEEGRGTTFHLTLPIRQQHEEEA

SEQ ID NO: 6478 - protein, 165 aa, Bacillus licheniformis
VGFYIEMTSPFGQAYIVEENNHITHLLFEKEELKQLQQDGLELRPAETELLKEAKRQLEEYFQGERKTFTLPLRQDGTPFQKKVWEALQSIPYGESRSYLDIACAVGNPKAVRAIGQANKRNALPILIPCHRVIGKNRSLTGYSGNETDKKAVLLDIENIAYKGK

SEQ ID NO: 6479 - protein, 37 aa, Bacillus licheniformis
VKTNRPKKIAGYAELFVKLHVLTEEQKKDIIKSIKIR

SEQ ID NO: 6480 - protein, 353 aa, Bacillus licheniformis
MPEQFAVPRSVEWEETSVKILNQQKLPEKTEYLHLTTKEDIYDAIQTLKVRGAPAIGITAAFGLALCAQSIDTFDVSAFLRELRKIKDELNQARPTAVNLSWALNRLLKSAEGAKSVNEAKTNLVHEAIQIQVEDEETCRQIGQNALHLFKSGDSIMTICNAGSIATSRYGTALSPFYLAKTKDLDLHIYACETRPVLQGARLTAWELMQGGIDVTLITDSMAAHTMKEKNISAVIVGADRIARNGDTANKIGTFGLAILAKAFQIPFFIAAPLSTFDVSISCGDDIPIEERDPDEVRRINGTQIAPQEVPVFNPAFDITPHDLISGIITEKGIITDRFEEEIEALFSAEALT

SEQ ID NO: 6481 - protein, 398 aa, Bacillus licheniformis
MTVTKTAAYETLTESSAAALAVRLGLFPSKSTLTCREIGDGNLNLVFRVYDKEQQRGLVIKQAVPYAKVVGESWPLTLDRARIESSALIRQAEHVPHLVPKVYYSDTELAVTVLEDLSHLEIARNGLIDGKDYPHLSEDIGEFLGKTHFYSSEYALDPTVKERLVKQFTNPDLCDITESLVFTDPFFDHETNNFEEELRDEAEVLWGNEALKIEAAKLKQRFLSAEETLIHGDLHTGSIFAGEDGETKIIDPEFAFFGPIGFDIGQFIANLLLNALSREENRRAPLYRHVETVWNTFSRTFSEAWENDAVETCKHENGRLESVLRQAFEDAAGFAGCEMIRRTIGLAHVADLDTIVPFSRRISQKKLALKIGAAFIEKRSGFRTPKDMIEAFRNALKE

SEQ ID NO: 6482 - protein, 259 aa, Bacillus licheniformis
VKLTISCLQFDIAYGKPSENFKKAEQLIEQESRKADILLLPELWTTGYDLKNLGSIADEEGRQTKRWLQETAKANRIHIVCGSVAVKKKSGVYNIMYIADKNGHLIKEYSKAHLFQLMDEHLYLSAGSGDGRFELEGMPAAGFICYDIRFPEWIRKHTSEGAGIIFVSAEWPLARLDHWQSLLKARAIENQCFVAACNRSGKDPANEFAGHSTVIDPLGCTLAEAGRGEAVIRAEIDLRDIEKARGQIPVFEDIRKDLY

SEQ ID NO: 6483 - protein, 396 aa, Bacillus licheniformis
MKFEHSDVLKQLPEQFFASLVKKVNEKIAAGHDVINLGQGNPDQPTPEHIVDTMAQAVRNPENHRYSSFRGSRSLKEAAAAFYQREYGVELDPEREVAVLFGGKAGLVELPQCLLNPGDTVLVPDPGYPDYWSGVELARANMETMPLTADNQFLPDYSRIPKEVKEKAKLMYLNYPNNPTGAQATSAFFEETVRFAKSNGICVVHDFAYGAIGYDCKRPVSFLETAGAKDAGIEIYTLSKTYNMAGWRVGFAVGNASVIEALNLYQDHMYVSLFKAIQDAAAAALLSDQACVQEQNERYEKRRNVWIRAVSDIGWHADAPQGSFFAWMPVPDGYTSEAFSDLLLEKANVVTAPGIGFGKHGEGYVRVGLLTSEERLREAASRIAELNIFKKTGHSH

SEQ ID NO: 6484 - protein, 405 aa, Bacillus licheniformis
MSELLATYILADPGCDAEKRAEQIAIGLTVGSWTDLPLLKQEQLKKHKGRVVNVEETESELGEKQATVTIAYPEANFTNDIPAVLTTVFGKLSLDGKIKLADLEFSRSFKQSLPGPKFGVYGIRKKIGEFERPLLMSIFKGVIGRDMEDLKEQLRQQALGGVDLIKDDEILFETGSAPFEKRITEGKKVLEEAFEETGRKTLYAVNLTGRTMELKAKARKAAELGADVLLLNVFAYGLDVLQSLAEDDDIPLPIMAHPAVSGALTSSPHYGFSHSLLLGKLNRYAGADFSLFPSPYGSVALPKRDALAIYDECTKEDVFKPTFAVPSAGIHPGMVPLLMKDFGIDHIINAGGGIHGHPNGAAGGGRAFRAVIDAVLEAEPVEEKAKRSPDLKLALEKWGRVEVSV

SEQ ID NO: 6485 - protein, 427 aa, Bacillus licheniformis
MRNPLIICDFDGTITTNDNIISIMKQFAPEEWTALKDGVLSKDISIRDGVGRMFNLLPASLKEDITAYVLKQAETRPGFKEFVSFLDEKGLPFYVVSGGMDFFVYPLLEGIVGKDRIYCNEAAFTGRNIEIRWPYPCDGGCGNECGCCKPSIIRRLKGRDDFVVMIGDSVTDVEAAKCSDLCIARDYLLRECEELGLKHAAFGDFHDVRRILEETAEVKEWMSEQKRQELAEVKKELAERDWFPATSGNLSIKVSEDPLRFLITASGKDKRKETEEDFLLADEEGRPAETGHALKPSAETLLHTYVYQHTNAGCCLHVHTVDNNVISELYAKEKQVTFRGQEIIKALGLWEEHAEVTVPIIENSAHIPDLAADFAGHLSGDSGAVLIRSHGITVWGKTAFEAKRMLEAYEFLFSWHLKLKTLQAYHV

SEQ ID NO: 6486 - protein, 179 aa, Bacillus licheniformis
MATIRIHDEQNTSIENQEEVEQFLKRQEVIYEKWDITKLPAGLKEKYDLTDEEKQEILDVFAAEIKDISERRGYKASDVISLSDQNPKLDELLKNFKQEHHHTDDEVRFIVSGHGIFAIEGKDGTFFDVLLNPGDLISVPENTRHYFTLQEDRKVVAVRIFVTTEGWVPIYEKESVNQS

SEQ ID NO: 6487 - protein, 109 aa, Bacillus licheniformis
MRQMMKKPVSKLRTVFAVKEAYSGLLLFFRAFRAWRKGDYPLFPKKTILLAALAFIYVLSPIDLIPDVLAGVGWLDDAAVLAFLFRQITKELDGFETHLTGRVNYNGKQ

SEQ ID NO: 6488 - protein, 80 aa, Bacillus licheniformis
MQRYIEKEALLVSISKKRQMMVEAAEIYGYTGDETIRRSQELDQLIYEYQKLSMNENAPDNLLQDFLGCIDCLPVEKYTA

SEQ ID NO: 6489 - protein, 503 aa, Bacillus licheniformis
MRNLKSIWKKIRLYLILVMIPAFIISFFVYEQERENITEKHRQTATLMLNIHRNQINYLIGETEARLSSLATALNHPVNEQHIKRILTETYKKEPRFSALYLLNEDGDVMVSTSPAKEKKALSYKSILQKAEKSKKSVITDDIHTVSDGLELNIFTPVFDSEGRTTNFLLASIRVDYLKNIMNVLSPELYIKILNQKNQIVFTAGHSPPEKPDGGTVDAFLDQIDWKLEVYPEPVQLDEIVHSLLLSFLSIFILLNIMFLLLQYVLLKRRTKQERAQNEAQKLELIGTLAASTAHEIRNPLTGISGFIQLLQKKYQSKEDQMYFSIIDQEIRRINQIVSEFLVLGKPTAEQWQLNSMNEMIDEIMPIIHSEANLYNVEVEFQDCGEDPAYVYCKKDHIKQVVLNVAKNALESMKNGGKLVIQIEHDQEKAQIIVKDIGEGIPQEMMESIFQPFVTSKEKGTGLGLVVCKRIISMYGGTIHIESERHKGTTVTITLPTSKEQDD

SEQ ID NO: 6490 - protein, 151 aa, Bacillus licheniformis
MSNREQEQSLKLFIVLSRAYRSINDHMNKHIHHHGLNPTEFAVLELLYHKGDQPLQQIGDKILLASGSITYVVDKLEQKQLITRRACTTDRRVTYAQITDKGTELLEKIFPGHAEELHNMISVLSDEEKEACIEMLKKVGLNARNIYKGKE

SEQ ID NO: 6491 - protein, 259 aa, Bacillus licheniformis
MARKKKHKKDHEEHVDESWLIPYADLLTLLLALFIVLFAMSSIDAKKFDMLSKSFNAVFTGGTGMMDYSSFTEPKTSTTEDGKSPDQAKDLSEAQKEKDKQSLKKIQEQVNRFIKEKNLQKQVNTKLTDEGLLLSIEDNIFFDSGKAEIRQQDIPLAKEVSDLLVLNPPRNIVISGHTDNVPIRNSQFKSNWHLSVMRAVNFMGLLIENPKLDAKIFSAKGYGEFKPIASNDTEEGRRKNRRVEILILPIGQENLNKKE

SEQ ID NO: 6492 - protein, 267 aa, Bacillus licheniformis
MDKTSLIGIILAIIGVGVGMVMKGVSPSVLVNPAAWLIILVGTIAAVVIAFPIRELKKVPKLFGILFKEKKMIEINELIPMFSEWAQIARREGLLALEANLNEIDDEFLKNGMSMAVDGQSADFIRDVLTEEVEAMEERHQVGAGIFTQAGTYAPTLGVLGAVVGLIAALADMSDTEALGHAISAAFVATLLGIFTGYVLWHPFANKLKRKSKQEVKVREVMIEGILSILEGQAPKVIEQKLLMYVSPSERSSIVIPDGDKGDSSNG

SEQ ID NO: 6493 - protein, 698 aa, Bacillus licheniformis
MRCQHCQKNEATIRLNMQINFTKKQMDLCEDCYKELTQPSMFSGNHFFGGGGSFFSQPSQAQTQTAAKKGLLDELAVNLTNAAKTGLIDPVIGRDDEVARVIEILNRRNKNNPVLIGEPGVGKTAVAEGLALKIAEGDVPNKLKNKELYLLDVASLVANTGIRGQFEERMKQLMKELKERKNAILFIDEIHLLVGAGSAEGSMDAGNILKPALARGELQVIGATTLKEYRQIEKDAALERRFQPIMVHEPTIEQAAAILNGLKEKYEAYHDVTYSDEAIKACVILSSRYIQDRHLPDKAIDLLDEAGSKANLKIDTVSGEQASQRLQEIEAEKAKALQEENYELAAKLRDEEEALHKKMESHEEEKRATVEAEDIQAIIEQKTGIPVGKLQHDDQKKMKELEANLSSRVIGQKEAVKKVAKAVRRSRAGLKSKNRPVGSFLFVGPTGVGKTELSKRLAEELFGTKDAIIRLDMSEYMEKHAVSKLIGSPPGYVGHEEAGQLTEKVRRNPYSIVLLDEIEKAHPDVQHMFLQIMEDGRLTDSQGRTVSFKDTVIIMTSNAGVSEKRTTVGFNREEQVMGEQSMIDSLSGYFKPEFLNRFDSIIEFQPLEKEDLVKIAALLLKELEETLKEQNMTLEVSDEAKEKIAEIGYHPAFGARPLRRTIQTAVEDQMTDLLLEEEHIKGFAVIVENDEIRVKTTR

SEQ ID NO: 6494 - protein, 34 aa, Bacillus licheniformis
MVKLQTIFSKSIGQKRSNSIKGVLANALSTLSKK

SEQ ID NO: 6495 - protein, 344 aa, Bacillus licheniformis
MSQSQGSAFQLAFVYVGTVVGAGFATGREIVEFFLRFGWPGLAGILISGLMFTFLGAKMMLIAVRINAKSYQELNKYLFGHTLGKFVNVFMLVVLLGVTSVMLSGAGAIFEEQLGFSNQAGMIATIALSLFVMMKGVKGIFGVNVIVVPLLLLFTVVVLFDSFIFRGPEIHNLAAFSANPDWILSAVSYGAFNLSLAQAVLVPIASELKSERLIIKGALIGGVLLTLVLVASFLSLSTLPDALLYEVPMAQVVFIVQHSVHIIYLFIIFGEVFTSVIGNLYGLEKQINEYIHIKSLYVFIFILLTIYLTGQIGYGKLISTIYPLFGQLSLVFIFFLIVKRVPER

SEQ ID NO: 6496 - protein, 219 aa, Bacillus licheniformis
MKQEKAIVVFSGGQDSTTCLLWALRQFQEVEAVTFQYNQRHKQEIEVAKKIAAKLGVKHHLLDMELLNQLAPNALTRDDIEIEAKEGELPSTFVPGRNLVFLSFASILAYQVGARHIITGVCETDFSGYPDCRDEFVKSCNVTVNLAMERPFVIHTPLMWLNKAETWELADELDALDFVKNETLTCYNGIIADGCGECPACKLRANGYNEYMKMKKERA

SEQ ID NO: 6497 - protein, 146 aa, Bacillus licheniformis
VLTQIYPQPSHPYSFELNKDMQMSAAHFIPREDAGACSRVHGHTYTINITIAGDELNASGFLVNFSTIKKLIHGEYDHTLLNDHQEFSGESADRIPSTEVVAKTIYDKVEAYLKDLNNRPHCVQVFVRETPTSYVVYRPKPGVQHG

SEQ ID NO: 6498 - protein, 243 aa, Bacillus licheniformis
MAKPIPVLEIFGPTVQGEGMVIGQKTMFVRTAGCDYSCSWCDSAFTWDGSAKKDIKWMTAEEVYESLKDIGGNAFSHVTISGGNPALLKQLDGLISLLKENGIRTALETQGTFYQDWFTGIDDLTISPKPPSSNMKTDFNRLDHIVDRLKEHGRAAAASLKVVIFTADDLQFAKQVHQRYPDIPFFLQVGNDDVHTEDQERLVERLLQKYEQLVEAVTRDPELNRVRVLPQLHTLIWGNKRGV

SEQ ID NO: 6499 - protein, 165 aa, Bacillus licheniformis
MTTRKDSELEGVTLLGNQGTNYLFDYSPEVLESFPNKHENRDYFVKFNCPEFTSLCPKTGQPDFATIYISYIPDKKMVESKSLKLYLFSFRNHGDFHEDCMNIIMNDLIELMDPRYIEVWGKFTPRGGISIDPYTNYGKPGTKYEKMAEYRMMNHDLYPETIDNR

SEQ ID NO: 6500 - protein, 352 aa, Bacillus licheniformis
MYMRGRRRPAIKHSEKNTYESKTLSDVCKQICNVKMSEGLTKETIDRYRRVCESVEEFAEIKGLSTSVESIDVEFARQYMTYILHEKKTFKGHRYKPESVKTPGCSPKYANDHLKTMRAVFTFCIKENMISENPFQKINKVKQPEPVIQILSVEEMKQLLKTPNKRKFSEFRDYVVMMCLINSMCRIGEIVTLEIENINFELSYIILEAQKTKTRKGRMIPLDKNTMRLLKKLLLRNTRFKPSKYVFITEEGTRLTTDNFRKRLADYAHQAGINKRVHPHLFRHTAASMFLQAGGDLRHLQTIIGHKDLRMVLRYTHLSLESLARQQSEYSLINQVVDGLNKPRKTKRKYGR

SEQ ID NO: 6501 - protein, 325 aa, Bacillus licheniformis
VTQKKKIFSVEESLPDLSGMFNNISASPNPKQITIEKALTIILRQMEVSGNRVRTISDYHLHVSHFKESEELTYLHEITYKSIHSWLGNMDVSAQTRLTRLKCLKAFLSRCFDNGWFESKFWKNVKVKVDNNVKEGATDQEIKILLSLLDLTDFVQLRDATALLLMYKTGMRVGTLANLKEEHVDFNGELLRLSGEIVKNREPLLLPFDETLAQLLSVLVNKNAEIRRAYKKDNKFVFLTKYGNQIATGPSNNNIQKRLNRYAREYGLKNINPHALRRGFAKSLLEKGANLTDISRALGHSDLSVTTKYLYLDKNEVAENLRRFL

SEQ ID NO: 6502 - protein, 110 aa, Bacillus licheniformis
MENFNKLASLNNLNGDQEDTLLIRRNQLQMLKTGMRVTAATKLEGIKTTLRPKFKIDDIQKEMNSVYSSLLYSFEGKAQEALAQRISQSAQQLIATDKDGESFVNGFKTR

SEQ ID NO: 6503 - protein, 476 aa, Bacillus licheniformis
MSDKIKVPKITDKTYYTLSQESYNRERLDDKLKTGKPIQTDQKTYWYVEKIKRDSDTGLDAVVFSQGQKTKDGKWVKSNSPKNVVVAFAGTNPKEQFFQDVIDADGGNVVMGIDPKKKEHYIVEKDAKDTSKTLGKYNGTPSQDARLSTGDYKLVTKTSQIDQADQLVREVKQKYKGTSTVISTTGHSLGGAEAEYSAVNNNVYAVAFNSPSIVKLHSEEQQKKINNGEYDRSIKSIINPDDMVGAGWWNEYDRHNGTTIYTKDPELSNAVREARMQGDVFQQIGQNAGYFFQTAILGMPDTHWVGSNNFTFDKNGNVQNIEGDELVYDKNLKAMLPPEVASGSGAIKVTPEVAKQLAQKVNAIINDLRTMKREAENAYQEHDAEINDLKHDTYRQVGHGLYDKLTLEDVNNTLKNLAQSFDKKGNPLFYDVHAEKAYIASLKNTISDLEDISGYLAQIAKDFKSKDKMLANWLKL

SEQ ID NO: 6504 - protein, 114 aa, Bacillus licheniformis
LKKKKYIIILILIIIAVGGLFMKHQHDQKEKEIALFEEAQNHMEKFLTTNYKDVKDIHFSEDYYINPMGGITVKGYTNGEKEFEGLYDPANKEILSYTVDAEPKEECKDKLCTR

SEQ ID NO: 6505 - protein, 57 aa, Bacillus licheniformis
MDYETKGYDTTIVYDYKEYPDVHYGRCDNCDYTLFKSSVKDGIFLRECRRCGMKKSI

SEQ ID NO: 6506 - protein, 49 aa, Bacillus licheniformis
VINSTPFMKRRKPQQAVFRLEPVLASCLTNDTLSDRSFLDRVHIAKQAR

SEQ ID NO: 6507 - protein, 110 aa, Bacillus licheniformis
MNKTKLLTVVLGLSIAGNAALGLYTAKLNEDVDVAYRVADDMAAEAEDAQETIEREYIVEGKDYAVSADDGGFSFDPQATDAKPGDRISVTFTKDQYKNGSGFKAIKVIE

SEQ ID NO: 6508 - protein, 66 aa, Bacillus licheniformis
MTLYIKRLWSDTPPLKPQQADQLLDLYQRPVTSFKDAGKAYQIGFNTALTCLGYLIANKYGGNDDE

SEQ ID NO: 6509 - protein, 44 aa, Bacillus licheniformis
LLIVVLLAWIADMNFGRLSVLDCVGLGSAVVFIALLFFKSRRNR

SEQ ID NO: 6510 - protein, 72 aa, Bacillus licheniformis
MKITVRPRLSEVMNAKGWRQIPLSEASGVPQGSISRFDKNERHLDWHVFALARTLGVNVEELFEVKIEDADE

SEQ ID NO: 6511 - protein, 120 aa, Bacillus licheniformis
MKIKKIDWLSKEALEAEVVVTDGESEIICFAHPLNYNVDSRLEGPIYCFDVAELVKMDKKSFIIEKLDGHFEYRFTGQLIDKQLETVKVGQFLLELDTDWPGDIKDGDFVSFISKRLDIM

SEQ ID NO: 6512 - protein, 507 aa, Bacillus licheniformis
MKTLDVQSLHNAIDQTLEQLKHQSDEFAKVKKAIEGITSLDDALKGKGGDAIRAFYEECHTPFLQFYDTFIEEYSSALKKMKSALNSLEPNQNGFISQSFLEHQLENGLNAADRTTKHLVSKTNATIAKVSHIVDLPDLNDSGFHEQYHKALKEISTTLEKLHAFDREQTNALTMAENDLETMQRYIARLEKMYTGPKIEITGYQKGAILKPDEMDTLSGNQETAMGAMLKKVGDKEDADVNTLADPDRLKKLATQKVSKKEYTQEELNKLKKDYRVFNDTLYRAYIDGDTIVKIEPAYTLPENVEKSDFAEYFDTAMEFTGVYDAVRVAFGYDLATGKIVKGNGDRLMAGLSVTPFGKAFKYGKRGFKLFKGEEVGKKVAKVDKSTKAAKDVEKVEQGAKNSKLIKFKGDEDIRHFEKHAQEVKDAMGKKQYNLKNYLEDANYVIKNGKYVPELNGYVKLIGGKGSAKYGFVGLNRNTGHITTFHVKTVKELAKKAPSLGLKTKKK

SEQ ID NO: 6513 - protein, 74 aa, Bacillus licheniformis
LKKLIVRSRLNEVMKEKGIQSQKELAELVGTTEATISRFKTNTRYDITTLFIISRGLNVPIEDLFYVEEIDEGK

SEQ ID NO: 6514 - protein, 116 aa, Bacillus licheniformis
MKALKDQIIKNRHFELLIVDYVLYDPKTGAVDYREPTEVLHLGDDIALEVNEAHLTLYRMRGKEGEWEIGEKCEVLYDLPLEFPVGFNFGLTTEEIAKMSVLDFMLFLAQKKEETL

SEQ ID NO: 6515 - protein, 112 aa, Bacillus licheniformis
MSKLTWVDAGEQPKKMSVDFVVIYSDTGEESRERVEVLNVGRDYVLYIDEEWLNLYRLYHGPHGLEIGQRAELIYDLPYVSDSEMDLETIANMNTIELLAHLGGQLKEVVGV

SEQ ID NO: 6516 - protein, 65 aa, Bacillus licheniformis
MNVYYRKTVVGWWNVYPAGSDEYINLNPEEFTALLPQVSRRAFAGCAEISVTAARELFGEEVQSA

SEQ ID NO: 6517 - protein, 115 aa, Bacillus licheniformis
MMDTFQPQAVKLHYHGETFDTKQEIHEISDAWLIAADVIGTCSDDGLVFYDTDRLEKRSDGYHLYENNYPRFFMVDTSKVDADLRKIDVSELANMSFTDFVRIGFKLGRSSYESY

SEQ ID NO: 6518 - protein, 131 aa, Bacillus licheniformis
MSRIEHLFRKEEDNRSLAEIHFERLTAVAADIERDFDRLRGAQSEIDRELSDKYHEIEKGNFDVVRGYYLAKGLQNILQRRRTIKGELCRLNSLKDSLELDRVGERLQAKIKQDERLREQLNSSLRLSDII

SEQ ID NO: 6519 - protein, 75 aa, Bacillus licheniformis
MVYISKELFVIIRIYKGMTQEQFSKFLGISKQTVSAIERGERPVSKRTHRMVIEKVEITDEFLRFKEKHEKLIKI

SEQ ID NO: 6520 - protein, 123 aa, Bacillus licheniformis
MGSATNRPDQHRRYDAEYKLNDAEGIRTLLRDYDKLFQRRFEGDTAASDILLDLEDAIDAAELTALQNEAIRLIYMEDLTQQMAAERLGIERSVVSKHLTAGVNKIVKIYAYWANRGEGYCAS

SEQ ID NO: 6521 - protein, 111 aa, Bacillus licheniformis
MKKFTELERNLITVILDGRRSDFKKEQDFERVFGRNANIDLVEGRNYLLEEALFGEVAEVPDIIGDLLYETEAGNIHYDVMIDALEAAVNGDWANVPSEEGAIEMSEGLKK

SEQ ID NO: 6522 - protein, 90 aa, Bacillus licheniformis
MEENNGVGVSLTREGKTLMISNNPYYYNQMIELKADGPTKQAVPLPRFMRYLVDIFGYDAIKKAVDEFPQEIRYKTTLERMNDEGRDPDY

SEQ ID NO: 6523 - protein, 62 aa, Bacillus licheniformis
VNRLFYCYSTTLIHFLKANGRRYKFTRLHPRTNNRMWVFDRDAGLSALLDEYDERKANMKAR

SEQ ID NO: 6524 - protein, 148 aa, Bacillus licheniformis
MGKQFEKLAEEALQRKKYAMEKDNGLSGNAPIPHDLWRRLVPIAREYEKGNGSMAQLYTYLLAHVNGHPDNDRYMSAFPSTDKIAEETGIGRNRIARLANVLEAVGLLKTAYDYTLSRRNKLYFPQYYSDLSDEEIRRRLDELYSQSP

SEQ ID NO: 6525 - protein, 48 aa, Bacillus licheniformis
MNYEEELRNSNGTASALADDIHPLRKSFLLATAKIDSVLIAVGKWIDE

SEQ ID NO: 6526 - protein, 89 aa, Bacillus licheniformis
VAVQCDECLKDFEVQPKERPLNNSGVEETYFECPHCSKHYTVIITDRETRKLIRKVKRLRQTDDSVKEADEVQRQITAKVDALKEEYRK

SEQ ID NO: 6527 - protein, 50 aa, Bacillus licheniformis
MAKLTEEEKAYLRELFEKLIEQDCVNFSVNIGVGGLFGERDTTLTLRSKG

SEQ ID NO: 6528 - protein, 95 aa, Bacillus licheniformis
MLLSILVSARPTCPDCGTYSKDGNPATLDTCSFCQDMNVLNINTRRLKVGQRSFSEGKTGYNPSVRPFLLLLSGYTPYRSIKRSERSPLISRGFQ

SEQ ID NO: 6529 - protein, 46 aa, Bacillus licheniformis
MNALASKNSFKPLDKKKKALLKKFVGSSSSKLDLNKVRDSWKYDKD

SEQ ID NO: 6530 - protein, 170 aa, Bacillus licheniformis
LLDTGIILALANEYDAWHNTVNNLFETHILSDEDDENSKAIFLFVNPLIINEVTHLAGRPLESYRRKKPKEDFSNINPEKVVDETISNIEELIDNEVFLVIDGNREAVMEQFKLYKDLGSADAANVAIANQHSLNFLTVDSRLAENIYLKRNQLTNIHKVYTTSGKYRTY

SEQ ID NO: 6531 - protein, 267 aa, Bacillus licheniformis
MAESKRESIDRVVGGIYYSGTNDFTSAVIEVFKSDGSVNVIHRSWITKRCLTCEDLTFGKESEFTKSGELEVVDSDFVHYLPVVDWFVEQSQKYDIESIGIDPFGGRVVAECLESRDFETVNIRQGALTLNNPFRNLMALENDRKLEKGAMLDWYFGNVEICTDHNGNQIPTSQSRAYSIAGFRALLNAHAASTMSNSSNGNLFVKVNVDVSEAITGLKALQREAKAATKALAEFQDLAERLGEKPLADGWETARVLREVFKKAPKA

SEQ ID NO: 6532 - protein, 114 aa, Bacillus licheniformis
MANEVFPIKSKRDYNKFIKALKPGRDQWLAQLGTAFGLRISDLRLLKIGQLRGQKSITLWEKKRKKKRVITFSSSVLKIVSQLEGDDDDYVLCQPQRWRADQPRPGLPHSKRRS

SEQ ID NO: 6533 - protein, 584 aa, Bacillus licheniformis
LAYVDGKWLDREERQERIDLMTERVRKLVALIKAGKATEYHIDTFRKDKAELTKLKRVHKAEVDIAYFTYEYLSDGSNPDNEDNVVRNADDGTPHDGIENIAKIHEEFFDLCNYVNNEKRNARLAIAAARGHSKSGMFSNALPLHQAAFRKRKYILIISETDSLSKKLIGWVNKQMKYNQKLREDFGPMMHESASRNEKDNEEAFITTTNILIESSSSGKQLRGKRHGAVRPDLVIIDDPSSSNNEGTKEAREKLVHWFNSVVVPIGSKATAIILVGTMVSATGLLNHVLKRKDFKSSFHGAIISEPSNPQLWEKYCEIYARSESMEEVDEFYEQNKEVLEEGVELAWPWRWTYRELMHEKVNMGTRAYNSEFRNLAFSEDEQFFFPENYAYYHYYHENGVAYVVYNELKIPIRDLTISGAWDIAQGKNARSCYNSVITLGKHEPTGYIFVLDEYASKEPAHVYIDIIVKKIKQYRHRIFNVETINAQHEFYRQLQEAVRKEGLYTCRVNDVKSHRSSKDERIQSLEPMLHNKTLILNDRHTMLLDQMAQYPFGDYVDSLDALQQAIEGVFRPKTRLVAKPNWI

SEQ ID NO: 6534 - protein, 142 aa, Bacillus licheniformis
MSRLKELEAKLTLQQRKAALLLVENELMAEARKTQEELAKEIGADRVTVYRWRTQNKAFIEYMNLLADDMLSGHRAEVYAQLMKLIRSSQPSVKAIDLFLKRHGLLTDRQVTATENESGTASNEDIAKEIEDIDELLNDGNE

SEQ ID NO: 6535 - protein, 535 aa, Bacillus licheniformis
MNLFNRKHDEADEFTYVKTYGIIRKGAQFPPQDSIERLAKYKRAKKWFDGKQRDVYERATAILKDSPFSSQLEKLYIAINLADILVTKPADLLVGEPVRFESGKADDSEEQRALNRYVEENDVNQLIHESATANGYRGDAWFKVRYGYRQDYSELKKMGLIEGDAPEGVEMEPIIEHVNASWVFPETSAGNVKQTKAINIAQVEWVETEKTEIPFLNVERHIPGYIMYSRHRLHGNGVDTSTGTPVQLFTIGEQVPTGREEDVEVTNLPHIPVFHIPYKSVDDSYFGIGLIEKLETVLAAINDRLVQIDYILWKHSDPTAYGPDLETTNGAVQFGGKYIPVNKDDPTPGYMVWQAQLDAAFKELDVLFSNVFQMAETPQWLFGTTVSGDNSGGTGTSHTDGVAIRARFMPILSKVKRIRAHYDKAIRDALWTCMLFEKEFGDLSVSDPVYPKAIWNDGIPRNEKEAAEIASIRTGGKPTLDVRSAIKELDEVDDDKAEETIRRIEEDEKSVSGFVDGSVFNETEVKEEVVEEDDE

SEQ ID NO: 6536 - protein, 274 aa, Bacillus licheniformis
MRVPEPKYSYQTDQLATYYKDAVQDILIELDRVDIDNFRRANANATLASISEILSELDDKSKAWVEKNIPKAARDGVINTIVSLGVAETIDKASQIASFSRLNKEMVAAAVADTQADLLAVTQNIDRKTKVAVRKAVSDSMRYHMTRGTNGRRTIASDIRNTLQQSVKTGIIDAAGRRWRPEVYADMATRTKMMETYREATTNEALRRNVYYAKISSHGAKDACRFYEGRIMKLTEDAPGNYPTYDQLKASGEIFHPNCKHVYSPIRNPEGALF

SEQ ID NO: 6537 - protein, 184 aa, Bacillus licheniformis
LNVNNKMRVGISNDSRGISKVVDESLDGTKAIPVVFVQKTAEGSFSYRSDPEEGTALDNEMSYPVETDPAGSAEVVDEDVDGLKAVPIVPVTKNAEGKFVYASIGGGDKAVDWSEIQNKPENFPPSSHTHPISQITNLQTTLNSKLTAKQAAAQADSTAEDIAGLVADFNALLSALRAAKIMAE

SEQ ID NO: 6538 - protein, 243 aa, Bacillus licheniformis
MELSKSLLSLDLQHFAEETKDQAEPPAAEPKNTDTPEPPKDEVKTIPYDRFKQVNDDLKAFKSTFEELGIDGVDSLKTLVEDYNAKKTAEEERKRSEMTELERLQNDLKAKEEAEKTLAQQLEEEKKAREREKIRNEFIKVATSNDIAYIDDAIALADLSAVKVEDGKVVGVEDVVKTLVDNKPFLVKKKAPKPIGQSSNGNATLASEKTAEQLLKEAAEKARQSVRPEDKMAYAKLKRELSK

SEQ ID NO: 6539 - protein, 363 aa, Bacillus licheniformis
MSKILSGELVGKRESVVDEILLLNEHQTPLLNLLGFSDPVTQVEHQWFEDEMFADKSTTTVAKTAEDTKITVEDIEPFMANQVIEIGEELIKVVSIYNKTLTVERGYAGTTPAEIPAGAVVEVQFVEGQEGADARDARYKPRKRVSNITQIFDETISITGTAAVVSNYGIDDLYEYEKQKRQLELALQLEKAAINGIKYESTDGIVRQMEGMRQFIQTNVIDAQNGALTDEKINDAMQKIYERGGFTTGGIFKIMVGAKQKRAISNFDKSKINLTRADNGRGQVVDHFVSDFGQAEIVLNNNLKGDELFIFDANRTKIKPLKDRGFFHEYLGRKGDRFEGQIVGEYTLEFLQEKAHARIKGLA

SEQ ID NO: 6540 - protein, 71 aa, Bacillus licheniformis
MMAEFKSKYPELGFYVGDVFKSFKNGVFKTEDEDEIKVLSDLADVTRIDKPTEEDAPKPAAKKQTRKSSAK

SEQ ID NO: 6541 - protein, 82 aa, Bacillus licheniformis
MTVSVEGADEYINSFTVDNEDWNDSDHERRQRILNVADDVLVRKFPDYKIPADAVYEFANVLAIAYNDTNRLNKTKELRRSL

SEQ ID NO: 6542 - protein, 136 aa, Bacillus licheniformis
LSFDFDASDFLNRLNRTEHGAEQAAVRAMEDNTDDLARIAQNIAPIDKATLRRGMQKKVKLSRDRLIGEVSFRAVENGFNYAIWTHEADYNLGPTSAQAGGTDGYTVGNKYLERPLKGEAEKYIRNVAEAVREELR

SEQ ID NO: 6543 - protein, 72 aa, Bacillus licheniformis
MLAAAKKLVIKPTAPSTTPNDYITIPLAGAVADPEYTYDSDNERIANLTFVAYPDTDNDGDLFIMGDESAAE

SEQ ID NO: 6544 - protein, 122 aa, Bacillus licheniformis
MKLFTKKDPEQLYFGDYPVEIPKLTPKKWKQLFGAVDKLPGIIVQVLSAPPQDFYSYVVTGLEVGLDEIVGIVSALSDVDADYISENVGADEMFEYLALTVKKNRLSSMAKNVKSLLPNLGK

SEQ ID NO: 6545 - protein, 938 aa, Bacillus licheniformis
MAGATVGEIRARLILDMADWSKKSDQAKSDMSEMGKSSKNLSKDMGQIQKASLAVGGAVVAGIGASVKTAADFEAAMSNVKAISGATGQEFEDLKNIASKMGAETKFTAVEAAEGLQFLAMAGFSVKEQVGSLPAVLNLASASNESLGRSADIVSNIMTGFGIKAEESGRAVDVLVKTMTTANTDLGQLGDAMKFVAPVATSLGYSIEDTATAVAKMSDAGIQGSMAGTALRASLLHLANPVGQSAKAIKNYNLEIQDANGNLKPLPELIGHIAERFDGMTSSQKTAAAAQLVGTEAASGFVTLLSVGEKELRKYSSTLKEAGGTADRVAKTQMDNLNGSFEKFRSALDGLGIKIGNEFLPTFRKIVDEGTKILDFLNKLNPGIITTGLEMAGTAAAIALVAASAVKLGIALKGLFVSMGPAGWVIAGLSILGGLLVGVAEGYDAMNTVSLEAAETKQKEIESIESLAVEFDKLKNKTKLTADEFARYLDINDQLKTETDPDVIKRLKDEQADLKKNSGLTNNEFDRFLKLNDEVIKKSPDTEAAISSQGNAVAKNTNALKALNAEKAEELRLELEKQKNLAEKNYDKNLEKQKNIQKEINDLAKERQKIEADVQAQLDIVESTEKKIAQAKLDGNKKEAESQETVLDVQKGTLATLRGQLDTIYGKISAKNTELNKVNEELGKLDTIKQKMVDLELRQVGLNAKKGEGVNVLKKEIANLKDAKANLENNTTAADKKTKEYRDAVKAIDKEIAQLQSAKSKVQEITNEAENMNEKLARRINKKIHVTYSMDGSEIEESAETFKKTHGKGGQEVPFHVGGIVGRGQINKLHTGGLASKFENAPMSHEVDIRALRNEMVLTEAQQANLMRMIDAGHTAAVGSQVGASPEVLAALTSIERAIRNSDGQVIVMNDEVVGRLVEPYVSRQQAEEIGVLSAFNN

SEQ ID NO: 6546 - protein, 280 aa, Bacillus licheniformis
VEKIPITDSNFKIVYDNGSTVDMARDLSVLVRSFVPGAPSPNIYYEKIEGTNGSIRTGKDFGIRSIKAECRLFAEDTDDFFLLLNKIVAALYKQSQFYIITESEPYKRWKVEVSSSFDVDRIGTTGDFNIQFDCADGFAESLGTTLDPFTFDADRWLLGEGLTDTVPSYTHKTASFSIYNAGDIPVDPIEMPLIIAYKGGSSNLAITNQTTGDVWKYSGTTSSGDTIVLNRVRSTKNNISIFGNTNRKLITLAPGWNHFKLSGTSGSFEVSFNFRFYYAS

SEQ ID NO: 6547 - protein, 456 aa, Bacillus licheniformis
LKELYVRSILGQEEALTKYTVTRKCGLNSEKYIDVTVIKHETNEHSFPLVQPENYLIYEGEEYVIRPINASVRSVKVKGIHRMFIDLADVYIYEVEEKEKEYTIEEALNIALKGTGYNYKVDKTGLPSTIKVSNFGDNFSIDLLKTIASEFGAEFDCTGRTIYIAKQIARYTDHQIRHRLNAANPSKEIDTSQLKTFIKGFGKKDEKTGTYAVTAEYTSPLASIYGIRHATPVRDDKYTEKNKDQLIAQMKKELHDQIDISITLTYVELSELGVQDIRLGDYVWCILDPLDIDVQIRVVEVEDYSDPLKSPKFTFGSIVRNAPSIVASFKKTQKTLSKIVDPQTGKIREGSIKIGSGTSFDPGYDPTLINIPQYGLASANSDGLMSSADFVKLANILVGPDGQVVVALASDTNDGLMSAADFAKLKRIKTPVSGDVDMQSILDRLAALEQEVVGQG

SEQ ID NO: 6548 - protein, 518 aa, Bacillus licheniformis
MPNYPYKKAGNALDRDFRNSYNDNLEYIADDISGSYAKLNSHIKGRAAHMSTQISHSSGLTVAQEIEVEKSRIRNLVLNADGTNIKEVVDARVDNDGFVYPVLKERLDADKGEITAQLEEAYRTVELITNSQDALSYLNNVEAMTTFKAREEALFWPQSANINERTNEVYVASQENEGTELRIEIRDLDTGDFKERKSIPIESGAYTEGLSFFYNEKDELCFIVKATKTPGYNIFNYDNGELSGLIAANVSSKYAANGYYFVSVTVNQDSIHAYVYTWESIKAGSPVLYTEFPVDYMPNIEKIQGVALNNGYLFMSHGKSYGRPAISVYNLVGELLNYYIYTKDSLASAINKKFPDFIPNIHNYHFENESCCVYKGDLVAVQVVNNADVVLVRHNRMLGYPLTVNANQSRKDTGWMSVELLNGANTYVPDRPPRIRRIGNKIRLEAELKGITTMDTEYISYHPDWSPSRVLAFSTPTSGGYNATCQIQPNGKVKILSTRHPSPDENSWYPINFEWYLN

SEQ ID NO: 6549 - protein, 407 aa, Bacillus licheniformis
MIYKDTDIHFSINSQIKRSIAANIQFSTQDIDTAKLTFSLTKDGIPLPISQATHGKLFMRFADGSKFYVNTEVQDALGGVIFYVLKPDQVTHYGTVQAELYVNYDNGQKLSVHKFSFEIDRALVDQDIVPVAEYYIEDFEDLKAVIVEMSDEAELMLTELQKKFETLDNIETKEGAQEKADAAEADAKAYTDEHAAKTDNPHKVTKAQVGLANVDNVKQASKTEFDSHVNDTSNPHDVTKAQVGLSNVDDVQQASKIEFDAHDDDTTRHITADERIAWNAKETTNGAQEKADKALADAKTYVSNFSWVVATMQNGWSHYNDGEDVMFGIDATKTVYVRGEAKGGAVGTTVFTLPANMRPPRSMGCIQIASGSAQVARIAFKSTGEVIVESVSSNTSYIKFDFSFKAL

SEQ ID NO: 6550 - protein, 97 aa, Bacillus licheniformis
MKQIYKYDSKMNYVLSENMIINDGEEIPEGYTDIPPVNPDGAGMYKPVFDKDKSEWRETATQEYIDSLQPPDPGPSEMEVLRKQVADLYYLIALGGS

SEQ ID NO: 6551 - protein, 64 aa, Bacillus licheniformis
MPIDWYTYIKGFYEDGLWTKKQVHDVVAAGRITPEQYEEITGDPYDPDSPPNEDENVTNSEQEA

SEQ ID NO: 6552 - protein, 87 aa, Bacillus licheniformis
LGEPSNNELHGKIADIREWLVRIDTKVDYFNEVKHTADRAHEKADEALALAKESRADISDMKANTKWLWGVILTVVGLAISGIALFL

SEQ ID NO: 6553 - protein, 326 aa, Bacillus licheniformis
MAISVKKNLVASSKYHVKCPYSMDAKYITFHNTANDASAANEIAYMIRNNNQVSYHFAVDDKEVVQGIPTNRNAWHCGDGNGPGNRSSIGVEVCYSKSGGAKYKAAEKLAIKFIAQLLKERGWGVDRVKKHQDWSGKYCPHRVLDEGRWDAVKAAIATELKALGGQASKPSGTTYTVKKGDTLSAIAKANGVSVANLQSWNNIKDPNKISVGQVLKITGTSKPAAAPKPSGSSKKTFTLPGGVLKVTNPLTKGTKVTQVQTALAAVYFYPDKGAKNNGIDGYYGSKTANAVKRFQSMHGLSQDGIYGPNTKAKLAAALKKAGYSVN

SEQ ID NO: 6554 - protein, 76 aa, Bacillus licheniformis
MNVKTIENISAGTVARFVLLALALVNQALTMTGHSPIPVDEEGVQQFISLAFMGVTSLWAYWKNNDVTKKARTKGE

SEQ ID NO: 6555 - protein, 381 aa, Bacillus licheniformis
LTSIKKDKRTGKYYFVYSGGFHPVTGKRIQKKRKGIHSLKEAKEELKRVIIEVEQEKNSYKADKSSFGNFAEKWFESKKVRLRSSTIVNYREQLDYNILPYLGTFKIKDITEEVLQHYINRLHNERKLAPATIRTAYGIVAEILKKASRKGAFDLAILDDINLPPENRVSKVWTEKNVQTFLATRNCIVSLTRYFIGMVLSVITGMRMGEVLGLRWSDIDFEKGLLTIRQTLAKIDDEGNYGLVPEVKTTAGFRTVHLPKFFIEYLIEHKKMVKREKEILGEDYIDYDLVVCTKRGKWVHPNNYRRAFTRLIAQLELPKIPPKNLRHTHATYLISIGISPKIVQERLGHAHIKTTLGTYSHVLPSMQAELVGKLDDLIEKV

SEQ ID NO: 6556 - protein, 65 aa, Bacillus licheniformis
MNIIMNDLIELMDPRYIEVWCKFTPRGGISIDPYTNYGKPGTKYEKMAEYRMMNHDLYPETIDNR

SEQ ID NO: 6557 - protein, 41 aa, Bacillus licheniformis
MSIKKLVIPILAAALLTMGISVVSATDQSDGVYQIATRKQT

SEQ ID NO: 6558 - protein, 135 aa, Bacillus licheniformis
VKQLIPSSKVGVKIHEWYKMIREFSVPDAEALKEEVEKEINQMEEDQDLLLYYQLMCFRHQLMLEYLEPTNKRKQGQSINKLLAQIEEPRRDLNGLLSYYSFFFRGMYEFEKKQYIKAIESYRNAEKQLALITML

SEQ ID NO: 6559 - protein, 50 aa, Bacillus licheniformis
VKKFSVCRNKISNKKTPAKTPESLYALFQAAPAVFSKGNFVHRDLEGFTI

SEQ ID NO: 6560 - protein, 263 aa, Bacillus licheniformis
MRALKQLVRFGWEQSLSCVFPVVIFASLAVTQIIPLPFLPRYDLLLIICVLMQWWMVRSGLETRDELKVITLFHIIGLALELFKVQMGSWSYPEEGYSKIFGVPLYSGFMYASVASYLCQAWRRLKVELVKWPPFYVVVPLAAAIYLNFFLHHFWIDVRFWLSGLVIIVFWKSWVIYEVNGIRYRMPLALSFVLIGFFIWIAENIATFFGAWTYPNQTSTWSLVHVGKVSSWLLLVIVSFLIVATLKQVKGKDSTRVDAGQFL

SEQ ID NO: 6561 - protein, 73 aa, Bacillus licheniformis
MAIIINIDVMLAKRKMSVTELSEKVGITMANLSILKNGKAKAIRLSTLEAICKALECQPGDILEYRSDEDTQD

SEQ ID NO: 6562 - protein, 160 aa, Bacillus licheniformis
MKRGSTLFLKIAVILIGIPVLALCIFFVPIIANFAAELYPGISYLKYLVYADLYAAAIPFYFALYQAFKLLSYIDQNKAFSELSVRALKNIKYCAITISILFAAGMPLFYLIAEMDDAPGIILIGLVLIFASMVIAVFAAVLQRLLQEAIDIKSENDLTV

SEQ ID NO: 6563 - protein, 40 aa, Bacillus licheniformis
MCVYSADVSALFPQVTPSCLKIKRSVHNNNKIINFNIFLL

SEQ ID NO: 6564 - protein, 81 aa, Bacillus licheniformis
MLKTGMRVTAATKLEGIKTTLRPKFKIDDIQKEMNSVYSSLLYSFEGKAQQALAQRISQSAQQLIATEKDGESFVNGFKTR

SEQ ID NO: 6565 - protein, 131 aa, Bacillus licheniformis
MYFFIKPSFPRYILHSLRDIPKLTDKEYYFLSQNTYSTDKMKEAFKERTPIESKSNKAFFVDKIKRDSDTGLDAYVFVQAKKKDGKWVKQNVVVAFAGTNPKEQFFQDVIDADGGNVVMGLDPKKKSQYII

SEQ ID NO: 6566 - protein, 114 aa, Bacillus licheniformis
MKKYIIILLALVIITSGGIFMKQQNNNREKEELYNLAKERMTDFIKTNYKDIKSIDYYDDYEVNPMGGIDIKGYLNDDKKKKIWGIYDKANDEVGSFTVDAERKPEYKDKICDY

SEQ ID NO: 6567 - protein, 39 aa, Bacillus licheniformis
MPLKGIGVQRCTPAQYEYLFIIMNLDGFEGNFPITNYAY

SEQ ID NO: 6568 - protein, 126 aa, Bacillus licheniformis
MQYELEDTFLKYKKAAALGIGLLLFIGGCQKSGEAEISVQDYTGQDFHIHSRGYQKETAEIAEAHRDEVEKTVKDYFLDQYRTKVKVHNIVGGHGFVTVYAESVGNLHFYTSAKIEIDLDKKRGAG

SEQ ID NO: 6569 - protein, 56 aa, Bacillus licheniformis
VRCFKRHPEHIKLLRDDAGDRGKNRRTKVAGGFPFVEKLVEIKLRGNPEFFAVKGG

SEQ ID NO: 6570 - protein, 62 aa, Bacillus licheniformis
LKIAKVGNVIEFKNGLTGIVEKVNENSVIVDVTIMENYRDLELDSLTVVNHKNYKIIKDSLH

SEQ ID NO: 6571 - protein, 64 aa, Bacillus licheniformis
LTEQNAIDQIEQLRSGSIHELRVKKEDFLSFRAILTKQEDFKHFRGIAQHGGDIIFQYMKEARS

SEQ ID NO: 6572 - protein, 46 aa, Bacillus licheniformis
LQTAGGFHAKNTKISRNIWLHTNKKSFLSLSEKAFFSFLPLSYIEI

SEQ ID NO: 6573 - protein, 203 aa, Bacillus licheniformis
MKSKFAALAAFLICMLPAARIEHAQAVMLFSKKDKQEMERLMESLKQEENPAFSQLTDEKSFIEAAHLSAEEEEEIEEAEEETTDLTHKEKDLLSRLVHAEAKGESFEGKVAVANVVLNRVKDSRFPDSVKSVIYQRNAFEPVLNGSIEKKADRESVEAVEEAVDQNKKETEALFFYNPDIASDDWIKTRKVVKRIGNHVFAI

SEQ ID NO: 6574 - protein, 446 aa, Bacillus licheniformis
MNRFVKGIVLLSLAAFFAECLEFVINMILARELGEHGMGLYMSVLPSIFLVVVIASLELPVSISKFIAESNPKLHESMLKHALRMTAVCTVFSTAAAVIILPFIPVFDSYHPLIRGLVIGMIPTVAFTSIARGYFMGVQQMGKIATANALKKIFQLIGLFLFFQWYSFELDTSLLISLFVLVASEVVVFVYLFSQFVLVRRAAQKGQQIHLRRNDVLKRLLTVSIPTTGLRVFHAVTNAVEPFLVKGTLLAAGVSRTSAIDQFGMLSGVAMTIGFFPAFIAHSLMVVMIPSISESYAYGQYERVIKRIKQAIFITLFYGIPSVMVMYHFAEPLTHLFFDSVKASFYLKMLWPYFLFHFFAMPFQACLIGMGLAKDAFYHNVWASVLSFLMMYVLGSMQTLQMTGIILAMNTGMILLTALHYVTICKELGVTLFLTNKSRSPRIESR

SEQ ID NO: 6575 - protein, 163 aa, Bacillus licheniformis
MRRISLIYPLILLFFTGLFVFQPQASAKQASPAVMQMNTVEGQRVVIPAEGQKTIVHFWTTWCPPCREELPRFQSYYESKQSGVKLVTVNLLNAEKNEQKVKQFIKANKLTFPIVFDKKGEMMKAYKVMTIPTTFFFNEKGELEKTFVGPITVEQMKEWAGKS

SEQ ID NO: 6576 - protein, 635 aa, Bacillus licheniformis
MQLEIGKQSQQNRHTLQFENWRQHGELIAALLSGLLILAGWLLSGNETLSVVLFYLAFCIGGFAKAKEGIQETLSEKTLNVELLMIFAAVGSALIGYWAEGAVLIFIFSLSGALETYTLNKSKRDLTSLMKLEPEEAVLLEKEGTRTVAAADLQAGDLILVKPGERIAADGEIETGKTSIDESALTGESIPAEKTLGDAVFAGTVNLSGSLTVRVTKANEDSLFKKIIRLVESAQNSVSPSQAFIERFENIYVKGVLLAVGLLLFLPHFLLGWSWSETFYRAMVFMVVASPCALVASIMPAALSLISNGARNGLLVKGSVFLEKLGNSKIVALDKTGTITNGKPGVEDMLLAADIEERECLEAAAAIEKQSGHPLAKAIVEYAEAKGIKPAANVSIEETSGFGVQARYNGETWLIGKAGFVGEEAAGQFLTAAVQELAKQGKTIVFMKKGEKIAGCFALKDQIRPEAKAVVEELNALGVQTAMLTGDQPETAAAIAREAGLKIVVSECLPDRKVEEAKKLKKTYGTIVMVGDGINDAPALAAADVGIAMGGGTDVALETADVVLMKNELTGLTKMIRLSRKMNTIIKQNVIFSLAVICLLICSNFLQILDLPLGVIGHEGSTLLVILNGLRLLKS

SEQ ID NO: 6577 - protein, 364 aa, Bacillus licheniformis
MERIEQISSWLKEKNISSAFIHSKENVFYLTGFYTEPHERLMGVFIFQDEEPFFVCPQMEAGQARAAGWAYEIIGYGDHQNPWELISSALQKRNGQCLKVAVEKETLALSRAEMLQAVTNGAELVSAEERLNQIRVIKDEKEISILREAAKLADYGVEAGAAALKEGIAEIDVVAKIEYELKKKGVQGMSFSTMVLFGEKSGQPHGNPGSRTLKPGDFVLFDLGVIIDGYCSDITRTLVYQNVSEKQKEIYNTVLQAETEALKMSKPGVRIGDLDLKARGIIEKAGYGDYFPHRLGHGLGISPHEYPSMSHNNDELLKQGMVYTIEPGIYVPEIGGVRIEDDVLVTADGAEALTKYPKELTVIS

SEQ ID NO: 6578 - protein, 44 aa, Bacillus licheniformis
MGIFILILLCIVIVLSSKAAMKPLKEKHEIKPFRSFDDFFISKD

SEQ ID NO: 6579 - protein, 39 aa, Bacillus licheniformis
VFSTGAVFILNYETLSISSPKSIKETSDAKGFWNILTIA

SEQ ID NO: 6580 - protein, 241 aa, Bacillus licheniformis
VKKLGFVLFMSMFAFVSVVSAAEAKVIDHDKVQGFSEVTPVTVSQKAAKRFQPYLKVASGCVPFPAVDAQGNTSGGLEPTGAPEGHCSKSVGQVYSRSAWYNGVWAIMYAWYFPKDSPLPLKAFGHRHDWEGIVVWIDNPANQNPKVLSIAYSQHGKFQKTAPNNNIMEGDHPKIRYDAPQPPINHSLYVDSAKGGTQPLIGWEDLTPAARNALNTTDFGSANVPFNDHNFTNNLGKAWFR

SEQ ID NO: 6581 - protein, 323 aa, Bacillus licheniformis
MANIREIAEAAGVSITTVSRVLNGHPYVKEEKRQKVLETIERLEYARNMHAVHLSKGFSNMIGVVLPTISLPYFGELLEGIAEEAAKEGVHFSLYQTNYQLEKEIFALEQLKQRQVDGLIFCSKAMSDEALLDWRETGPFILCQDSGEQHFATVSIPHKEAFRLGLDFLIEKGHTKIAIGLARKNGMNSHFRLKAYKEALAAIGEPYREEWVFERSLTITDGQKLFSEWKGMEEKPTAVFVANDQVSAGIFLEAQRHQVDIPGSLAILSCDNQPISEVLGISTIEINIKEMGKRAFRLLQKRIGGAGPEKLTVPYKLIKRATV

SEQ ID NO: 6582 - protein, 281 aa, Bacillus licheniformis
VNRSFTVEKVLNNNVLIALHDDYREVVLIGKGIGFGKKRGDLIEHENYEKMFILENDKEQSQYKKLLTYVDEKMVDIANDVIYHIAQKIGQPLNEHIHVALTDHIAFAVKRLEKGFDMKNPFLLETESLYPKEYEVAKEAVDMINEKSDIQLPEGEIGFIALHIHSAMTNRPLSEVNQHSQLISRLVQVIEDSFQMQVNRESVNYLRLIRHLRFTIDRIKRDEPIQEPEKLMLLLKTEYPLCYNTAWKMIKILQQALKKPVHEAEAVYLTLHLYRLTNKIS

SEQ ID NO: 6583 - protein, 698 aa, Bacillus licheniformis
MFKSLFGVLQKIGRALMLPVAILPAAGILLALGNAMQNPQMTKVAPFLTNSTVQLVAKVMESSGDVVFTNLALLFAVGVAIGLANGDGVAGIAAIIGYLVMNVTMSAVLLQNGSIPSDAVERAQFFTQNHPEYTTMLGIPTLATGVFGGIIVGVLAAAMYNRFYTIELPQYLGFFAGKRFVPIITSICALLLGLVMLFIWPPIQGALNSFSTNLLAANEAVAALIFGMIERALIPFGLHHIFYSPFWYEFFSYTNQAGEIVRGDQRIFMAQIKDGVELTAGTFMTGKYPFMMFGLPAAALAIYHEAKPQNKKLVAGIMGSAALTSFLTGITEPIEFSFLFVAPILFAIHCVFAGLSFMMMDILNVKIGMTFSGGLIDYFLFGILPNRTAWWLVIPVGLVLAVIYYFGFRFAIRKFNLKTPGREDAAAEPADEGKEAAGDLPYQILEAMGDQENIKHLDACITRLRVTVNDQKKVDKERLKKLGASGVLEVGNNIQAIFGPRSDNLKSQMQDIMSGRTPRPEKAPNAAEEVEQQIEEAMVEPLQNESGEEVFVSPLAGELHPIADVPDQVFSGKMMGDGFAILPAEGTVVSPVRGKVLNVFPTKHAIGLQSDGGREILIHFGIDTVSLKGEGFTSFVSEGDRVEPGQKLLEVDIEKVKDNVPSLMTPIVFTNLQEGESVSLQAEGNVSLTQDDIVRIEK

SEQ ID NO: 6584 - protein, 88 aa, Bacillus licheniformis
MAQKTFKVTADSGIHARPATVLVQTASKYDADINLEYNGKTVNLKSIMGVMSLGIAKGAEITISASGADENDALSEFEETMKSEGLGE

SEQ ID NO: 6585 - protein, 572 aa, Bacillus licheniformis
MLELKGIGASAGIAIAKAYRLEEPDLTVEKKNISDSDAEVNRFEDAIERSKKELETIKNHALKELGEDKAEIFSAHLLVLSDPELLNPIKDKIKSDSVNAEFALKETADMFVTMFESMDNEYMKERAADIRDVTKRVTGHLLGVEIPNPSLISEEVIIVAEDLTPSDTAQLNRNFVKGFTTDIGGRTSHSAIMARSLEIPAVVGTKAATKGIQNGVTVIVDGINGDVIVDPSQETISEYEEKHQAFLAQKAEWAKLVNEPTVTSDGHHVELAANIGTPDDVKGVLENGGEAVGLYRTEFLYMGRDQLPTEEEQFDAYKTVLERMEGKSVVVRTLDIGGDKELPYLELPKEMNPFLGYRAIRLCLDEQEIFRTQLRALLRASTYGNLKIMFPMIATVNEFKAAKAILLEEKEKLKAEGQQVSDDIEVGMMVEIPSTAVIADQFAKEVDFFSIGTNDLIQYTMAADRMNERVSYLYQPYNPAILRLITLVIEAAHKEGKWVGMCGEMAGDEIAIPILLGLGLDEFSMSATSILPARTQISKLSKKETESFKEQILSMSTTEEVVQFVKETFNLA

SEQ ID NO: 6586 - protein, 77 aa, Bacillus licheniformis
MPRQPFKLGDEVYVIYRNPHAANVAHIKEAEVVDHPLHEGELALFMYDTYHAFAEDDAVFSSYEEAERLYRELFDGI

SEQ ID NO: 6587 - protein, 342 aa, Bacillus licheniformis
MVKPFVPQLVYIEPRALEYPLGKELRDKFSNMGLEIRETTSHNQVRNIPGEGHLQKYRNAKSTLVIGVRKTLKFDSSKPSAEYAIPFATGCMGHCHYCYLQTTMGSKPYIRTYVNVEEILEQADQYIKERAPEDTRFEASCTSDIVGIDHLTHTLKRAIEHFGQTDHGKLRFVTKFHHVDHLLDAKHNGKTRFRFSVNAEYVIKSFEPGTSPLDKRIEAAVKVAEAGYPLGFIIAPIYIHDGWQEGYRVLLEKLDRALPQHARRDITFEMIQHRFTKPAKRVIEKNYPKTKLELDEEKRRYKWGRYGIGKYIYQKDEEAELRSALESYIDNYFPEAKIEYFT

SEQ ID NO: 6588 - protein, 222 aa, Bacillus licheniformis
LAIYKQFYVDNGTSYQQVDIRNYSKKDIPGLIALQRECFPPPFPEDLLWNEEQLHSHIERFPDGALCAVSEGRIIGSMTALMADFDPHHPHHSWDEVTDNGYIGTHQNDGNSLYVVDISVSPDYRKLGIGMRLMQSMYELTVFKGLKRLIGGGRIPHYHKSAEEMTPEQYVQAVLDGEKRDPVLSFLLHCGRSPVCVIPGYIEDEESLDYAVLMEWKNPFLT

SEQ ID NO: 6589 - protein, 655 aa, Bacillus licheniformis
LFKKLHVKIAGFVAVLLVLTVIVLQFSTTHLLKSMLEDEAKESTSSLLGSIKRNIELQLEHYEISLNRISDGEMAHSFLKDGDNKIIKIVNDELKQLKEKNEYVNLAYIGTKKKEMFTFPKTTFDDDYNPAERPWYTSAAKTPDKVVWTEPYKDAVSGDMTVTAAKAIVVNNKVEGVVSIDLSLNSLNKIIENQKMPYDGYAFILDQNGTMLAHPSKQGDDISNDKTYRDIPSSKDGIKVGKDTVIAYQTVGGTGWKVGTQFDTAKLMWVAQEMNKMVIIVSIIALAAAIILSYFLAKTITGPIKQLIAKTKAVAGGNLTVQTAAASKDEIGILTKDFNKMVEHMKEMIVQVRSSSGKVSDTTDQLSAVSEETVSASDEIAKAIEEVATGATEQAAEVENVNEQSERLSVKIKEIEHHADSIKKLSRTSEEASYTGIDALGQLLAKSNEANSETKKVEHMLFQLEEKTKNIEDVVTAISAISDQTNLLALNASIEAARAGESGRGFAVVAEEVRKLAEQSAVSSQHISETVKQIQMETKEAVSAMTEASKMNEVQNGMIHETGEALSKITAEMQALVNSIDHIYSEISDMSGEQQKMSDSIQSISAISQQSAAAAEEVSASANEQLTALESIAKSAEALSEANQELLNAINKFNV

SEQ ID NO: 6590 - protein, 261 aa, Bacillus licheniformis
VDLKMNGKTALVAASSKGLGNAIAKAIAKEGANVMLSGRHEADLKKAAEELNGLGGGTVSYQVCDLADADGIKALVQKTADTFGTIDMLVNNVGGPKGGSLLDLTDDDWTSSFELHLLSYVRLIREAFPYLKKDGGRIVNIASSSVKQPIPGLLLSNTFRMGIVGLTKSIAEELAEHRILINTLAPGRIATDRVAELDRLKAEKTGLSEQQVKESYEKEIPLGSYGKPDDFAQYASFLLSECNTYMTGQTLLIDGGMVKAI

SEQ ID NO: 6591 - protein, 290 aa, Bacillus licheniformis
MKKTVGFIGLGVMGNSMASHILAAGYPVSAYTRTKHKADSLVEKGAEWKSSVKALAQSSDVIITMVGYPKDVEEVYFGSEGIIENAKKGSYLIDMTTSKPSLAKQIETAAKEKGLYALDAPVSGGDVGARNGTLAIMVGGERKAYDECYPLFSIMGENIQYQGPAGSGQHTKMCNQIAIAAGMIGVAEAMAYAEKSGLDPDNVLKSITTGAAGSWSLSNLAPRMLKGDFEPGFYVKHFVKDMGIALEEAELMGEKMPGLELAKSLYDTLVEKGEENSGTQSLYKLWTEYK

SEQ ID NO: 6592 - protein, 253 aa, Bacillus licheniformis
MKKAFLLSAAAAATLFTFSGVQHADAKEQQQVQVKTVHSINVTDLAGKLNIQNMNQLSKADQEKIQSLLHSYMKQATQQPKASAPKASAPKASKPESTQTQKQEASKPAASKEQTSQQKQNTAPASSSVSAYEKEVVELTNAERKKQGLKPLTLDEKLSKVARTKSQDMKDNNYFDHNSPTYGSPFDMMKKFGITYRTAGENIAKGQKTPQEVVKAWMNSEGHRKNIMNPNFTHIGVGYVKDGNYWTQQFIGK

SEQ ID NO: 6593 - protein, 702 aa, Bacillus licheniformis
VTESQHDPAEIKKSRRSRLWRINLYFFAVFTLFAALIVKLGLVQIVNGEAYEQEASKTEAKIASYPAPRGKMYDRYGRVVVDNQSVPAITYTMMTSTKTEEKISTAKKLAELIDIDTSFLKERDLKDYWLARHPKKAAALLKDSEKTLKSDQTYKLQVDRVPAEEIKALEKDKDELKVAAIFRRFSGGYAYEPQIVKAMSPKTAGKNDAQLLDEKASKQMPANDLTYEEVSRVSEHLEELPGVDVIMDWTRKYPYEKTLYSIFGGVTTPEQGLIKDREDFYLTRGYARNDRVGKSYLEYQYEEYLNPKKAKVQYTENRSGKVISQETVDEGRRGYDLQLTFDMELQKKVEEAIEEELNKFRGSNYMLDRAFVVMMDPNNGDILSMAGKRIVDGKITDYAIGAFTTQYEMGSAVKGATVLAGYQDGMPHGQSYLDQELSFAGGVKKGSYRGNTIGWANEVRALEKSSNVYMFYVAMRMAGITYVPNGPLPANLEDLKKMRYYFNQFGLGVKTGIDLPQESAGMQTNPKIVGGLLLDEAIGQFDTYTPLQLAQYVSTIANGGYRLQPRVVKSIHQPESEKLGPVIEERSANVLNRINNSQSDIAIVKQGFKRVTQTGTAAGAFGSLDVSGKTGTAQTQYYGTNRNWWGTRTYNITFAGYYPSENPQVAFSVVVPNVDDKTKMNKNIAAKIVKAYVDLQKKYSKD

SEQ ID NO: 6594 - protein, 603 aa, Bacillus licheniformis
MEQKTKRFEQYKPHMNLQAVLSANGRFIYISANCKELLSYEQNELIGTYLKDYLHEDDLFLVESYFYNEHHLLPCTFRFVKKDYTMIWIEASIDFVTTHVGEKEREIVLKMKVFEDRPSKKSSSIKEEDAPEEASRLPAKEEFEAIIEGLPNPLCISVQGEIVYVNDAMVNLLEAEHKRQIIGKYSYDFIEKEYHDIVKNRIKRMQQGLDVGMIEQTWHKLDGTQIHLEVKAAPTIYQNQKAELLLLIDISSRKKFQTILQKSRERYQLLIQNSIDTIAVIHKGRWVFMNESGIRLFEAKTYEDLIGKDIYEHLHPCDHEDVKARLKRITDRQSESEIIKQTWYTFEKRLIYTEMVCIPTTFFGETAVQVILRDISERKQTEELMVRSEKLSIAGQLAAGIAHEIRNPLTAIKGFLQLMKPTMEENEHYFNIIFSELSRIELILSELLMLAKPQQNALKEKLDLIRLIREVTALLETQANLNGILINTILTDDKIYIKGDQNQLKQVFINLIKNAVESMPNGGTVHLTVRETDDSVVVEVEDEGEGIPEHVLKRIGEPFLTTKEKGTGLGLMVTFNIIENHNGTIEVDSKAEKGTTFKILFPK

SEQ ID NO: 6595 - protein, 389 aa, Bacillus licheniformis
MEHLLNPNVKEIEISGIRKFSNLVSQYENVISLTIGQPDFFTPHHVKQAAKKAIDENQTSYTHNAGYPELRQAVQLYMKKKADLNYEAESEIIVTTGASQAIDSAFRTILSPGDEVILPGPVYPGYEPIIKMCGASPLIIDTTSHGFKLTAKLIEEALTPKTKCVVLPYPSNPTGMTLSEEELKDIASLLKGRNVFVLSDEIYSELTFDRPHHSIATVLRDQTIVIGGLSKSHSMTGWRIGFLFAPKEIAKHILKVHQYNVSCASSISQKAALEAVTNGVDDALIMREQYKKRLDYVYDRLVTMGLDVIKPSGAFYIFPSIKSFGMSSFDFCMSLLEEEGLAIVPGSSFSEYGEGYVRISYAYSPDTLREGLDRLESFVFNKRQSIQTT

SEQ ID NO: 6596 - protein, 51 aa, Bacillus licheniformis
MGTIVAIKNHEMTILEEVSRAVYTEMLKEASDSEEQIYISWKEDFDSDYGY

SEQ ID NO: 6597 - protein, 174 aa, Bacillus licheniformis
LELELDKHETAPERSEYAGIGARFVASLLDGLILGIPAYIFTYVLTATLMLGNSDIMLMMETDPEYLSDQEVFTFIISMFKTVAIVGSITFIVYFLYYTLMESSKWQGTLGKKIMNVQVAKAEGGRISFGRAAGRFLAKSFLSPILMIGYIMAFFTERRQALHDMLAGTIVVKK

SEQ ID NO: 6598 - protein, 440 aa, Bacillus licheniformis
MDTQPEREQAVKRAQRTGIKLFLTLPILSWALYDFANTIFSSNIVTIFFPFYLQEAVGENASMNQVASTFISYSNAAASFLLVIFTPLFGVLIDRTGRKKKYIGLFTMICVSCTILMGVFAGASFQKDIYGLPLSLILVVIMFVTAKFFYHSSLVFYDTILADLGTKEEIPLLSGFGIAIGYIGTLAGLTVYLLVGNQDFHRAFIPSALLFLLFSLPYLLFTKEKRKPEPKEKKSFFSGYWEIVQTFKDIRLYKPVFLFMIAYFFLNDALATAIAMMAVYSKTVIGFTTGQFVLLYLVSTVSSIIGSFLLGFVTKRIGAKHAVSLVAAIMITALTIGACTTSTLLFWIAGSLFGISLGGTWVASRTLIIELTPEHKRGEFFGLFALSGKISSIFGPVLYGSITLLFRDLGNMASRMAFGSLVLLAAIGLIIHQKSVKAKA

SEQ ID NO: 6599 - protein, 305 aa, Bacillus licheniformis
VSSNQQEILLSSGTNELEIVKFEVGLNIFGINVMKVREIIQPVEITKVPHSHKHMEGMITLRGEILPVIDLFSFFGVEHGDDEHQEKYIVTEFNKRKIVFHTGAVSQIHRVSWEEIEKPTALNQGMDRHLTGIIKLGGTMIFLPDYEKIIFDLESESGMDPYQMKNEKFDQRRTDKKLIIVEDSPLLLRLLVEKLNEAGYNNIVSFENGKDAYEHALQLMEDGTALHEKVDLMITDIEMPQMDGHRLTKLLKDNPLSTELPILIFSSLITDDLRHKGEQVGADEQISKPELNELIEKLDKYIFKN

SEQ ID NO: 6600 - protein, 153 aa, Bacillus licheniformis
MDDHNHTKELKPTVENLSKAIYTVNRHAKTATNPKYLYLLKKKALQKLLNEGKGKKVGLHFSKNPRFSQQQSDVLISLGDYFFHMPPTKEDFANLPHLGTLNHSYRNPKAHMSLNIAKQLLQNYTGIKEKPLVTNRKRPASKPVFKKLGESYF

SEQ ID NO: 6601 - protein, 404 aa, Bacillus licheniformis
MDLFKNRNFVRLFFAAFASQMGTTVGNMAFAFFLLDRFSSQPAYTTIAELMYSLPTVFVFFIVGVVADRFDRKKVAENCDWIRAGLTVVLFFVLYLQIIPLVFLVLFIRSAVTKFFYPAEASLVQAILRKDQYAKAAGLNQMLFSLFLLFGVGIGAFMYKTIGLHGAIALDFVSFIVSGFLIRSCDIPLAARKPNGNKGWKNMTVKDSMRDFKEGIVYILKNKLLASLVFGYFIFGLVSGGLSVLPMFKMKYELSPDSYEWHTSLFTIVLGIGLLTGIAVAALLEKKVEAGIHDVSPDFYRGCLYHPAWLYRSIARILLGCISCRDMHRADQHSSWRLDSQNRPSKADGKGQRVDRSADNAGAILSAWHDRCPIPGNHRRCGLYILRLGGNYSAGGAVLLYRPA

SEQ ID NO: 6602 - protein, 165 aa, Bacillus licheniformis
LLMYQVKPGETLESIAADFRTTRQALLQANPGLNGGQVSAGQSIIIPGIRNPDTIPYRIAVSLNGRTLRLYERDRLVKTYPIAVGKILTQTPRGEFVIVNRQPNPGGPFGAYWLSLSKQHYGIHGTNNPSSIGKAVSRGCIRMHNRDVLELASIVPNGTRVSITP

SEQ ID NO: 6603 - protein, 56 aa, Bacillus licheniformis
LAQNKRHLHTLSKNIPAPFHPIPIKKTKLPQPLSVYILAAEKALFSFLKRRCADYC

SEQ ID NO: 6604 - protein, 285 aa, Bacillus licheniformis
MKNPSRRQFLKGFLGLAAAGLFTAAGGLGYARYLEPHMLETNFIPIRHRLIPKGFDQFRIVQFSDTHLSEYFTADELSNVVSQVNALSPDLIVFSGDLIDKPHRYREHERAVSALKKLSAPYGKLAIFGNHDHGGYGTKVYQTLMASAGFRVLRNDLLKLELIDGSVIEIASLDDLMLGRPDYEGILSKLSKKAFSILLVHEPDAALTANQYPVNLQISGHTHGGQIQIPVFGPLITPPYGEIYTEGMYETAGMKIYVNRGIGTTRLPLRFLSKPEITVFQLESI

SEQ ID NO: 6605 - protein, 254 aa, Bacillus licheniformis
MDRKVVIVTGGSSGMGKAIAKKQAEEGWNVMITGRTQETLEAAKEEIETFAGQVAVCRMDVRSVEDVEQMITEAAGRFGTIDALVNNAAGNFICPAEKLSVNGWKAVIDIVLNGTFYCSQAAGRYWIKEKKRGQILNMVATYAWGAGAGVVHSAAAKAGVLSLTRTLAVEWGSAYGIRCNAIAPGPIERTGGAEKLFESEEAAHATIKSVPLKRLGTPEEIAGLAAFLLSEQAGYVNGECVTMDGGQWLNPRPF

SEQ ID NO: 6606 - protein, 406 aa, Bacillus licheniformis
MLDPLDILTNIEDVIPYYQPIFSAEEQKVIGYEVLGRIKVETEVKSLGPFFSDPTIPEEYKKEVDLKVIRQALDHFLDSGRDLLIFVNQDANVLMMDHGESFLDLLMEYQDKGLELSRFVIEITEQKFEGDIEQLHHLLTYYRTYGIKVAVDNIGKESSNLDRIALLSPDLLKIDLQPLKLSSPSPSYEYVLYSISLLARKIGAALLYEDIEASFQLQYAWRNGGRYFQGQYLELPKDKFIERDVLKDRLQAEFHQFITHEKKKLTILYDHSEQFYKRVHQLVTSLKKTAQSDDEFLFNLGKELTDCSFRIYMCDEDGIQLTKNVFKHDGAWIFQPEYIGKNWSWRPYFLENIMRMRTMRKGFFSDLYSDIETGEMIRTFSYPMDEELYLFIDLSYSYLYEQDGLI

SEQ ID NO: 6607 - protein, 37 aa, Bacillus licheniformis
MIHPFLAFIFSHFPLYTRNKPLGIHFFKKKKRRKAAA

SEQ ID NO: 6608 - protein, 208 aa, Bacillus licheniformis
MKNVWSSLLCALLAAALVFFDADFAKAGEKPTRASLFETLQSVSDVHFQLTEKERTKTDMISLLEPYMEHAMAVKYVEANAFPEQAGWIFYGTDAPEVAIPFFSYDEDTKVAEKDGSYTVYEFVGDQNDGPVSYQKNYQTVTLKNTGGSFKVTDIGQSDTKPAGEEIMSKQPDEKETSSNFADKGEGDQAAFPLFATDVNWTLAGIFS

SEQ ID NO: 6609 - protein, 50 aa, Bacillus licheniformis
VVQIDSSAVKKIFFMYDMKKENSNYEKAVFLFHDQKGKMSSADTLWYDAL

SEQ ID NO: 6610 - protein, 80 aa, Bacillus licheniformis
MSQLMGIITRLQSLQETAEAAGEPTQRNFEVNGEKICSVKYFEKNQTFELTVYQKGDKPTTFPFDNIDMISIEIFELLQQ

SEQ ID NO: 6611 - protein, 49 aa, Bacillus licheniformis
MKAFPSVICPHCKTTEHMDQVLTAQSNQNVIYRCESCGFSLKNIPTKKG

SEQ ID NO: 6612 - protein, 172 aa, Bacillus licheniformis
MADSFLFYNLSEDQMTFPEVIGRLKSFIRQDPRASYLLSVGTDSQIHQNCTKFITAIHLHRKGKGAWGCLKNTVVNRPIHSLREKISLETAYSQEIAAYLLNDYFNEIMDLLLPFTDEGADLTLEVHLDIGKKGMTKDLIQEMTGRITSMGICAKIKPDSYTASSYANRYTK

SEQ ID NO: 6613 - protein, 59 aa, Bacillus licheniformis
MERFSEEERKLLLNVLLDHEYAVELLSSEINDIETGTKNVDSLTYKKLVTLYDRVRSEN

SEQ ID NO: 6614 - protein, 147 aa, Bacillus licheniformis
MISLQSDELLETTVGQFMIDADKVAHVQVGNNLEHALLVLTKTGYTAIPVLDASFRLHGLIGTNMIMDKIFGLERIEFEKLDKIHVEEVMLTDIPRLKIDDPILKGFGLVINNAFVCVENEEQVFEGIFTRRVVLKQLNKHLRTLNK

SEQ ID NO: 6615 - protein, 291 aa, Bacillus licheniformis
MQLQELHMLVVLAEELNMRKAAERLFVSQPALSQRLQTIEKSWGTKIFLRSQKGLTVTSAGEKIIQFAKDVTLEQEKVRENIDELEGEIHGTLKLAAASIIGQHWLPNVLKTYVKQYPNVKISLVTGWSSEMLKSLYEDHVHIGIIRGNPEWKGPKHYLMRDELYLVDTEIRNIEDIAKTERPFIQFKSDSTYYQEIQHWWHQKFKTSPKQTIIVDQIETCKQMAFHGIGYAILPSVTLHGSGSHVHQIPLLDAKGKAIGRDTWLLGYEPAFQLKQVQAFVEVVKECTAME

SEQ ID NO: 6616 - protein, 159 aa, Bacillus licheniformis
LSKALIAYASMSGNTEDIAMIIKDTLREYGFDVTIQEMDDVDTDSLAEYDLLLIGTYTWGDGDLPYEAESFYEEVSSLDLKGKKAACFGSGDYAYPRFCEAVNTFYTMLERTGADLYQETLKIELAPETDEDAECCKEFAEGFIRWAEQQKRRAEIHVS

SEQ ID NO: 6617 - protein, 297 aa, Bacillus licheniformis
MFHKGATAVASAKHSGYFVAVKREGIFHYSLEQGWKRLFQLKSKICSITYIGDYLFVAGERGTIIRSSDQGATWSISSFPTNATIWSITGRTDGFVCAHGKHCIYISDDFGVSWKVVKPFSGLSHPPVIRSLCLHEECLYIGTQIHEVHGGVWAYDLASESAFMIKKETGRMTASMIAFEGEWLVCAMGSKKGNHGAVDLVNIHTNDEIQIRRGLVENEESFLDVSEDNGIIYVTSAQDRDGFSRIYQLDFFERELKWFDTIKGHGFRVANQKENFFCAGLYECKFVRPYEQPAAAH

SEQ ID NO: 6618 - protein, 122 aa, Bacillus licheniformis
MGKVLLVYASMSGNTEAMADLIEKGLLEGGAEVDRHEAMDVDAALFNDYQHMIFGAYTWGDGELPDEFLDIYDDMEGMDFTGKTFAVFGSGDTSYFAVPSTFLKIKSRSSAGTWCFRPSKSK

SEQ ID NO: 6619 - protein, 236 aa, Bacillus licheniformis
MKMMDANEIISFIQNSKKSTPVKVYVKGDLEGIDFGASAKPFITGNTGVVFGEWAEIQAALEANKGKIEDYVIENDRRNSAIPTLDLKNIKARIEPGAIIRDQVEIGDNAVIMMGASINIGSVIGEGTMIDMNVVLGGRATVGKNCHIGAGSVLAGVIEPPSAKPVVIEDDVVIGANAVVLEGVTVGKGAVVAAGAIVVEDVEPYTVVAGTPAKKIKDIDEKTKGKTEIKQELRQL

SEQ ID NO: 6620 - protein, 374 aa, Bacillus licheniformis
MKLDELAAIRRDLHQIPELGFQEYKTQAYLLNHLAKHPEGRIEIEKWRTGLFVKVKGTAPEKILAYRADMDGLSIREDTGYSFSSVHQDRMHACGHDFHMTIALGIIDHFVRHPVKQDLLFLFQPAEEGPGGAEPMLESDLFKKWEPSMITALHIAPELPVGTIGTKSGLLFANTSELVIELEGKGGHAAYPHLAEDMVVAASSLVTQMQSIVARNVDPLDSAVITIGTITGGSAQNIIAQEARLEGTIRTLSPASMEQVKKRIEAMVRGLETAYQCSGKVSYPAAYYQVCNSSDLVEDFMQFVSENGLAEVVRSKEAMTGEDFGYMLKKYPGFMFWLGVDSPYGLHHAKLQPKEEALETAVRVMTAYFSSKAN

SEQ ID NO: 6621 - protein, 81 aa, Bacillus licheniformis
MSKKIGIEQSLSDVEAALKEKGYEVVTMKTEDDAKGCDCCVVTGLDTDMLGISDTMTGASVIQATGLTADEICQQVEQKLQ

SEQ ID NO: 6622 - protein, 180 aa, Bacillus licheniformis
MAERMVGKQAPRFEMEAVLANKEFGKVSLEENMKNDKWTVLFFYPMDFTFVCPTEITAMSDRYDEFEDLDAEVIGVSTDTIHTHLAWINTDRKDNGLGQLKYPLAADTNHEVSREYGVLIEEEGVALRGLFIINPEGELQYQTVFHNNIGRDVDETLRVLQALQTGGLCPANWKPGQATL

SEQ ID NO: 6623 - protein, 152 aa, Bacillus licheniformis
MKLRQPMPELTGAKEWLNGEVTKEQLIGEKPTLIHFWSISCHLCKEAMPQVNEFRDRYSDKLNVVAVHMPRSEDDLDLNKIKEVAAEHDITQPIFVDSDHKLTDAFENEYVPAYYVFDKTGQLRHFQAGGSGMKMLEKRVNRVLAETEQSAE

SEQ ID NO: 6624 - protein, 196 aa, Bacillus licheniformis
MFNEREALRLRLEQLNEAEVKVIREYQIERDNIYAKLRELDRPSSFNDTKKDFRPERKTESLPVLAELAAQEMKSYQQQQQQQPQASQKNQQQTSPQTSSLPAGIPDGTTRRRRGTARPGSKAAKLREAAIKTLKRHNAAIKSSELQKEIEKESGLEIPNMTTFMQSLIKMYPEVKKPYRGQYILEGEISTETEQQ

SEQ ID NO: 6625 - protein, 185 aa, Bacillus licheniformis
MKKTSGSLPYFQDLSQENLFLKAELARSHQLIHELEASYFHQKNHKLSRENAAMKQQLQQLSFELERISANKEDKSAETLNRIKSELLSKIVVLQELLQKETYARKQEIEEKHRLHLTNVKAEEEKKSLHSQIEYEKLHAEREKTLREKKEQELKNAAYENARLKKMNFMLKVFSSNKSKLMLRY

SEQ ID NO: 6626 - protein, 95 aa, Bacillus licheniformis
MKEIHVILSGGLSRRFGEPKAFARWKGKPLYQWCKQALGDDVLILSRPGLTERFIELGEKSGAGRYRTVQRERAACRYVHSHGAGGRGMLYFFGL

SEQ ID NO: 6627 - protein, 337 aa, Bacillus licheniformis
MHERYSRQIRYQNIGQAGQDRIRQSHVLIVGAGALGTSAAEGLVRAGIGALSIIDRDYVEWSNLQRQQLYTEKDAEERLPKAAAAKERLSEINTGVELRTYVADGTVETLRPLIEEADAVIDATDNFETRMIINDLAQETGTPWVYGACVSSQGMYMTIIPQKTPCLACLFEDVPIGGATCDTSGIISPAVQMVSAYQQAEILKILTGQQEALQTAFVTFDLWANTHYRMQIGRNEKCPSCGETPVYPFLSNMSQKKADVLCGRETVQIRSEMLKRLPKEELMKKLSVIGKVDANDYLLHVQYEAFRIVIFNDGRALVHGTNDIKEANSILARVIGM

SEQ ID NO: 6628 - protein, 430 aa, Bacillus licheniformis
MIEKRTPIPVFEAAARVSQHQKLGDAEWIHLEESLHRFLAEDVKADHDVPAFDRSPYDGFAVRACDTAGASGENPLQFEVVDHIGAGAVSDKKLGSFQAVRIMTGAQIPEGADAVVMLELTKTFSEDGKNYMVLKRSLQPGENISKTGEDARKGSVLVKKGTRITPGVVALLATFGYAAVPAVKKPVVGIIATGTELLNVSDPLVPGKIRNSNAGMAAAQVEESGGKPLYLGKISDQFDESFAAVEKALDKVDFLITTGGVSVGDFDFLPAIYEKLGAEVLFNKVAMRPGSVTTVAQLNGKLLFGLSGNPSACFVGFELFVKPSLRTWLHHPKPYSLCAEAVLAKDFPKPNPFTRFVRSFVSIQDGALQAEPVGLDKSSAVTSLADANALMVLPGGTRGFEAGARVHVLLYRDENGSEQLWPHIFQSSRS

SEQ ID NO: 6629 - protein, 175 aa, Bacillus licheniformis
VAAHFPILQIVGYQNSGKTTFVEKLAGKLDQLGVNVGCLKHHGHGGEPDAFAEGKDSDRFFRAGAAASGVEGAGVFQLTARGEWTLDQLIAAYGVLAVECLLIEGFKHAPYQKVVMVRNEADCRLLKELDGIIAVIYQQSEPKTDVPSFHIEDPGALAFILNHLKEEGVCLNDLS

SEQ ID NO: 6630 - protein, 164 aa, Bacillus licheniformis
LSERFIITKDPIVIEDVVKKVERREAGAVTTFIGTVREWTNGKKTLYLEYEAYVPMAVSMLAQIGKEINEKWPGTAAAITHRIGRLDISDAAVVIAVSSPHRKAAYEANEYAIERIKQIVPIWKKEHWEDGETWIGDQLETTEYPEGKPDIEEAASGRERGADH

SEQ ID NO: 6631 - protein, 77 aa, Bacillus licheniformis
LIKILLFAQLAEQAGAQSIDIDEEKTTTDEIRQFLKETYNLQGTDRAMIAVNEVYRRGNSEVESGDTVAFIPPVSGG

SEQ ID NO: 6632 - protein, 125 aa, Bacillus licheniformis
MSKREALKKRLLLLGELEQKIWKDFRKEREGIYARLGELDRQIQRHRRSNKEYYAAHCVDIIKQQKGEIVTTKELKMKLKERTNFNVHRISELYDLIQKLEPNISKERRGCFLYIENGSKKNVGR

SEQ ID NO: 6633 - protein, 585 aa, Bacillus licheniformis
MESLKKLKDFYWPYKKMFLWSIASMLLMTAITVVYPIILQMTIDEVILGGKYGLVIWISLGFIAVMAAKGAATFFHQYLGDMFGIRSVYRLRKELYAKLQRLPFKYYDSAKTGDLMSRLTADVEGIRFFLSFGFAEAIRFILLVTFSLSVMFSYSVPLTLVTIASLPFLGAAVYRFDKKVHPAFRNIRKSFARLNTKVQENISGMNTVKSLSKEDFEIQNFTHSNAHFRTKNLNASFIMSKFFPLMEFIGNICLVALLSFGGWLVMQNSLKPGELVAFFSLVNYLMWPIMNLGYVINLFSQAKASGERLLEILDAEEEITDTEQAVKSGRLNGDVVFSDVSLQYTKENAEALHGVSFQAERGKTIGLIGATGSGKSSIIQLLSRFYEPTSGRITIDGKPLEHYSLKMLRSNIGVVPQESFLFSSTIRSNISYGKPDASMDEIIESAKRAQAHDFIMELPNQYDTMLGERGLGLSGGQKQRIAIARAICMNPGILILDDSTSAVDMETEHRIQLALREVMRDRTTFIIAHRISSLKHADEILVLDKGVVKERGTHEQLMEANGLYKRIFDLQYKDQNVLNEPHFAG

SEQ ID NO: 6634 - protein, 606 aa, Bacillus licheniformis
MENQAKKQTLMNRFFYTSDQIIEKPFNWAQMWRLLKYLKPYRKNLLPLSFLTVMISAAIRLAVPILIGVYALDQAIAGRDMNLLVILISVISGLYLVNYVSNVLRIRWMNKLGQHVIYDLRQHLFTHVQRLSHRFFDERSAGSILVRIMNDINSLQELFTSGVINLLMDILLLFGIVVILFSLSPELTIAIMVTLPVMFFISTNLRRKIRRSWQKVRLKQSKLNSHLNESIQGIRVTQAFTQEKENMMYFEGVNSENFEAWREATKKNATFRPLVEMTNAVGTAILIWYGSSLIINETITIGVFVSFAFYLGMFWEPISRLGQVYNQLLMGMASSERIFEFLDEKPSVADKEDAVKIKELKGRIEFEQVEFSYDGNRKALHSISFEIPAGSSLALVGHTGSGKTTIANLISRFYDATGGAVKVDGIPITDISLSDLRSQISIVLQDTFIFSGTIMENIRFGRPNAADEEVIEAAKAVGADSFISALPNGYATEVEERGNVLSAGERQLISFARALLADPRILILDEATASIDTETEVKIQAALKTLLHGRTAIMIAHRLSTIRDADKILVLDHGRKIEEGNHQELIGKRGMYYELVKAQYQMFQRN

SEQ ID NO: 6635 - protein, 226 aa, Bacillus licheniformis
METNLETEKVKNPSLLGLITRPGEQFERMREKPAFWFPLVIVLILSVAGAYMLSEKTALSTDLSEMPDAEAFQAAMKGIGIIGGIFGFVIALLISALIYWLIVKIGRGTTNFVHMFSLSVFTYFIAAIGQFIGGLVIYYSNIDPTIVVTSLNGIIPADEPLKSVLGVFDIFTIWSLSLVALGLQKVGGISKKAAWTGVIILFVISILLALIGGMAINFFDSFEGAM

SEQ ID NO: 6636 - protein, 378 aa, Bacillus licheniformis
MKKIWIGIVIVGAAALFIGLNLYRSVQTSGGAEEAVQTVKLEEKEISSEVMVPGTLQFANEQYEYFEPGKGEIADIKVKEGDKVKKGDVLFTYTNEEIRLEKEQNALSIQSKDLQLEQVKRKISSLKSKEDELKAELGAEKAKRQIDEERSQLEMEEKSLQLELKQADLQKETLEKKSAALQVKSGIDGTVITVDKQAAAKQSDIQKPVIHIGNEDKLVVKGVLSEYDTLKVKKGQNVTITSDVIQNKEWRGRVSQVGLVPKEEASAGAAGTKEQAVQYPFEVKIKGERPKAKSGFNMILKIQTDKRIVQALPEDAVKQDGDQSYVFAVRDGKAKRINVKTGEKADGLVEITGGLTNKDPVIANPAEDMKSGTEVKLQ

SEQ ID NO: 6637 - protein, 230 aa, Bacillus licheniformis
MIELSKVKKSYQIGGETIDVLREIDMKIEPGEYLSIMGPSGSGKSTIMNIIGCLDRPTSGIYRLDGEDISSYGERELAGVRNRLIGFVFQQFQLLPRLNAIKNVELPMIYGGVPRKERRERAERALEKVGLKDRMRHMPNELSGGQKQRVAIARAIVNEPKLILADEPTGALDTKTSRDIMEQFTELNEEGTTVVLVTHEPEIADYTSRTIMVRDGVIVSPETERRGTVQ

SEQ ID NO: 6638 - protein, 397 aa, Bacillus licheniformis
MNLIENLRMALSSILSHKLRSILTMLGIIIGVGSVIVVVAAGQGGEQMLKQTISGPGNTVEIYYQPSNEELTANPNAYLDAGFTEEDIRSLKSLEGVKHVVAKTTESMNARFRDENTDAAVNGINDGYISINSMEIEKGREFSEEDYLAGSRVAIISPKLAEELFSQQSPLGRVVWINSQPVEIIGVLKEETGLLALGMNEMYVPFSMLKSSFGISDYDSVSVQAESADDLQAVGKRAAAAVNKNHGTSDSYEVMNMEAIAAGISQITTIMTMFIGSIAGISLLVGGIGVMNIMLVSVTERTREIGIRKSLGATRGQILMQFLIESSLITLIGGVFGIGLGYGGAALVSFFAGWPPLVSWQVVLGGVLFSMAIGIIFGLIPANKAARLHPIDALRYE

SEQ ID NO: 6639 - protein, 251 aa, Bacillus licheniformis
VLTPERHQLIIDEIEKHDVVKIQYLMNLTNASESTIRRDLSTLEARGYLKRVHGGASRLSDIRTEPDMLEKSSKNLHEKRKIAQEAASLLEEGDCIYLDAGTTTLQMIDFINPEMDIIVVTNGVMHIEALGKKGITFYLLGGYVKYKTGAIVGGSALSAISQYRFDKSFIGVNGIHKEAGFTTPDPEEALLKTKAVNQAKKAFILADVSKFGEISFSAFAGLDEATIITAGSAKHSFDNYQEKTVVKVVKT

SEQ ID NO: 6640 - protein, 303 aa, Bacillus licheniformis
MIYTVTLNPSVDYIVHVEEFSVGGLNRSVYDTKYPGGKGINVSRVLNRHHVPSKVLGFIGGFTGGYIKSFLEEEKLETAFHEVNGDTRINVKLKTGDETEINGQGPVISEEDFAAFLDQFSAMKEGDIVVLAGSIPSSLPQDTYEKIAEKCKEQNVRVVVDISGEALLKAAEMKPLLMKPNHHELGEMFGTTITSAEEAVPYGKKLVERGAENAIVSMAGEGALLCTKDGVYHANVPKGKLVNSVGAGDSVVAGFLAGIEKQLGIKEAFRLGVASGSATAFSEELGTEELVHKLLPEVQVKAI

SEQ ID NO: 6641 - protein, 631 aa, Bacillus licheniformis
MKITELLTKHTIKLNLESSQKENVIEELVSVLDQAGKLNDKEGYKEAVINREKQSSTGIGEGIAIPHAKTASVKEPAIAFGRSKGGVDYESLDGQPSHLVFMIAATDGANNTHLEALSRLSTLLMREEIRKQLLEASSEDEIIDIINQHDKDDDEEEEQAEEAPAPSAKGKILAVTACPTGIAHTFMAADALKEKAKELGVDIKVETNGSSGIKNGLTAQEIEDAVAIIVAADKQVEMERFQGKHVIEVPVTAGIRRPQELIEQALKQDAPIYQGKGGGATASEDGAAKGKGGGFYKHLMSGVSNMLPFVVGGGILVAISFFWGINATKPGDPTYNEFAAVLNNIGGTNALGLIVAVLAGFIAMSIADRPGFAPGMVGGFMATQAGAGFLGGLIAGFLAGYIVVLLKKVFAGLPQVLDGLKPVLLYPLFGIFLTGIIMQYVVNTPVKYIMDGMTHWLEGLGTGNLVVMGIVLGGMMAIDMGGPINKAAFTFGIAMIEAGNFGPHAAIMAGGMVPPLGIALATTFFKNKFSKRDREAGITNYVMGLSFITEGAIPFAAADPARVIPACIIGSAVAGGLSQFFHVTLQAPHGGIFVLFFTTNHALLYLLSILIGAVVTALILGVLKKPVPTEK

SEQ ID NO: 6642 - protein, 186 aa, Bacillus licheniformis
LTEEKSTNKKNSLFEWVKAIIIAVVLALLIRAFLFEPYLVEGTSMDPTLHDGERLFVYKTVRYVGEFKRGDIVIIDGDEKNVHYVKRLIGLPGDTVQMKDDTLYINGKKVSEPYLSENRKEAEAVGVKLTGDFGPVKVPEGKYFVMGDNRQRSMDSRNGLGLIDKKRVAGTSQFVFFPFNEIRKTD

SEQ ID NO: 6643 - protein, 89 aa, Bacillus licheniformis
MKLITLTEYCMFIFFAGVYLAITGFTARDLGLYIGIAMIYVFVHIAAKRMLSKRGKEAAEIRILYSVLLIMASVFVTVLFIAVLASLSA

SEQ ID NO: 6644 - protein, 80 aa, Bacillus licheniformis
MKLKDDPDIIRWINSRPRQALFASVAMVISTMSIGLFKGFDMWTADFFIFSCLLIGFGLLVGWLQKIYYKKVIFEENSDR

SEQ ID NO: 6645 - protein, 539 aa, Bacillus licheniformis
MIAVQNVSLRFADRKLFEDVNIKFAPGNCYGLIGANGAGKSTFLKILSGEIEPQTGEVHMSPGERLAVLKQNHFEYEEHEVLKVVIMGHRRLYEVMQEKDAIYMKPDFSDEDGIRAAELEGEFAELNGWEAEGEAAILLKGLGIPEELHTKKMADLGGSEKVKVLLAQALFGKPDVLLLDEPTNHLDIQAIQWLEEFLINFENTVIVVSHDRHFLNKVCTHIADLDFNKIQIYVGNYDFWYESSQLALKMAQEANKKKEEQIKQLQEFVARFSANASKSKQATSRKKLLEKITLDDIKPSSRKYPYVHFAPEREIGNDVLVVKDLSKTIDGVKVLDSVSFMMNKEDKIAFTGRNELAATTLFKILAGEMEPDSGSFKWGVTTSQAFFPKDNSKYFENSDLNLVDWLRQFSPHDQSESFLRGFLGRMLFSGEEVLKKASVLSGGEKVRCMLSKMMLSGANVLMLDEPTNHLDLESITALNNGLISFKGAMLFTSHDHQFVQTIANRIIEITPNGIVDKQMSYDEFLEDKTVQDKLAELYA

SEQ ID NO: 6646 - protein, 124 aa, Bacillus licheniformis
VSCRKALEQYIQATNTHEFENVKALLDPGAVYWFSDQTCSGFEEIQRYFENAWKQIENEVYSAGHVSWITETDEQAVCLYTYEWKGLYRGEPVQGAGRATNVFVKDESGRWKLKHEHLSSLPKR

SEQ ID NO: 6647 - protein, 410 aa, Bacillus licheniformis
MNSFTDKLSKYAKLVAEVGVNVQKGQQVVINASTEVRDFARLLVKSAYQRGAKNVTVRWQDDEVTRLKYELAPAEAFEEFPEWEAKGLETLAKEGAAFISIVSSSPDLLKGIDSKKISAQQKAAGKAMHTYRQMIQSDKVSWTVVAAPSPAWAKKVFPEADEETAVQKLWNEIFKTTRVDREDPVQAWKDHDQTLRDKVSVLNDKHYHALHYQAKGTDLTIELPEKHLWVGAGSTNENGVEFMANMPTEEVFTAPKKDGVNGTVSSTKPLSYGGNLIDGFTLTFKNGRITDVKAEQGEEILKELIETDEGSHYLGEIALVAHDSPISKSNILFYNTLFDENASNHLAIGSAYAFNIEGGKQMSREELAKEGLNESITHVDFMIGSGEMNIDGITADGKREPIFRNGNWAI

SEQ ID NO: 6648 - protein, 43 aa, Bacillus licheniformis
MLRDMGRRLAITVILSGIILGGMSISLANMPSSPPGQTAKINR

SEQ ID NO: 6649 - protein, 335 aa, Bacillus licheniformis
MFQTTEIGIDLGTANILVYSKNKGIILNEPSVVAVDTETKSVLAVGTEAKNMIGKTPGKIVAVRPMKDGVIADYDMTTDLLKQIMKKAGKNIGFTFRKPSVVVCTPSGSTAVERRAISDAVKNCGAKQVHLIEEPVAAAIGADLPVDEPVANVVVDIGGGTTEVAIISFGGVVSCHSIRIGGDQLDEDIVSFVRKKYNLLIGERTAEEVKIEIGYVLIDHETKTMEVRGRDLVTGLPKTITLESKEIQKAMRESLLHIIEAIRATLEDCPPELSGDIVDRGVILTGGGALLNGIKEWLSQEIVVPVHVAANPLESVAIGTGRSLEVIDKLQKAAK

SEQ ID NO: 6650 - protein, 37 aa, Bacillus licheniformis
MMRKLFHFYDRIFVEETLDKGNLFQSSFVYRYAKTIS

SEQ ID NO: 6651 - protein, 95 aa, Bacillus licheniformis
LKAIGVVRKVDELGRIVMPIELRRALDISIKDSIEFFVDQDKIVLKKYKPHGVCLMTGEITSENREYGNGKITLSPEGAELLLEEIKAALNGVKA

SEQ ID NO: 6652 - protein, 445 aa, Bacillus licheniformis
MKRYQGRIIATVLAMTFIMFWNFLFYGVLGNKINWTVDLLFTLVTLISVWWLTLYIDESNQLVYKLKESEKKYKELSSETNRIMDNLQEIVFQTDRIGYITFLNQAWTTLTGYSVEESLGTMYNDYFDHEERISNHLIAQLKNKEPEGRIEVLYHRKDGSKFWGEVHYKLYYKNGQFTGSLGTLTDVTERKKAEMELFKSNQRLAMQSQKLAMAGQLAAGIAHEVRNPLTSVNGFLQLMKAEYPDRKDYFDIIFSEIKRIDSVLGELLVLAKPHQVQFKKIKINSVLQQVATLLETNAVLSHIKIEKAFQHGEEWEINGDENQIKQVFINLIKNGIEAMPDGGKITISSKAEGDYVKISIKDEGGGISQADLAKLGEPFFSTKEEGTGLGLTICLNIIGAHNGEMKIDSKLGEGSTFHILLPVDKGAASEENDIQQGCCSRATIK

SEQ ID NO: 6653 - protein, 220 aa, Bacillus licheniformis
MKKEFAVIGLGRFGGSICKALSEEGLEVMAIDRDEDRVNEYAKIATHAVIGDTTDESVLKNLGLRNFDHVIVAIGENIQASILTTLILKELGVKMITVKAQNDYHEKVLSKIGADRIVHPEREMGKRIAHNIVSNNVLDYLELSDEHSLVEIAANGKLAGNTLLDLDIRARYGINIVAIKRGKEVIVSPLATEEIQKDDILIVIGSNPDIERFRKKVFQH

SEQ ID NO: 6654 - protein, 38 aa, Bacillus licheniformis
LKQSMKRSKKPRAVGFPRLIGGILMLKDFFSKSLNVRI

SEQ ID NO: 6655 - protein, 573 aa, Bacillus licheniformis
LDKEMFIRRLGAASHRKKAETVIKNGKIMDVFNQEWLETDIAITDGAIVGLGEYEGKNIIDAEGQMIVPGFIDGHVHIESSMVTPPEFAKAVIPHGVTTVVTDPHEIANVSGVKGLEFMLEQAEMTRLNIYFMLPSCVPAAPFEKSGAILNAADLHPFYSREEVLGLAEVMDYVAVEAGEQDMVQKLIDADKAGKRIDGHLAGLSAGFVNVYRAAGVLTDHEVTTPEEALKRVRRGMYVMLREGSAAKNTRHVLPAVNEKNVRRFFFCTDDKHLDELVDEGSINYQVKLAIQEGLDPFLAYQMGSLNAAECFGLKTKGAVAPGYDADLLFISDFENVSITKTMINGVIWSGTEQSQSTGGKAASGLLQSVHLSDLHEDDLQIPIVQENDIRVIDIIPNQLETKLSLAKPKSGAFFQPDLESDLLKIAVVERHRGVKEIGLGVVRGFGLKEGAIATTISHDSHNLIAVGTNDQDILKAIERLGEIGGGLTIAKGGKELQSVALPIAGLLSDKPLETVNESLKSLHAAITETGFSGAFNPFLTLSFLALPVIPDIKMTTEGLFDVKAFRHIPVQP

SEQ ID NO: 6656 - protein, 555 aa, Bacillus licheniformis
MKFVKNDQTAVFALGGLGEIGKNTYGVQFQDEIVLIDAGIKFPEDELLGIDYVIPDYTYLVKNEEKIKGLFITHGHEDHIGGIPYLLKQVNIPVYGGQLAIGLLRKKLEEHGLLRQTKLHIIEEDDIVKFRKTSVSFFRTTHSIPDSYGIVVKTPQGNIVHTGDFKFDFTPVGEPANLTKMAEIGKEGVLCLLSDSTNSEIPDFTMSERKVGESIDDIFRKVEGRIIFATFASNIHRLQQVIEAAVANGRKVAVFGRSMESAIEIGQTLGYIKCPKNTFVEANEINRLPAGKVTILCTGSQGEPMAALSRIANGTHRQISINPGDTVVFSSSPIPGNTISVSRTINQLYRAGADVIHGAVTNIHTSGHGGQEEQKLMLRLIKPKFFMPIHGEYRMQKMHVKLATDCGIPEENCFIMDNGEVLALTSEEASVAGKIPSGNVYIDGSGIGDIGNIVLRDRRILSEEGLVIVVVSINMKEFKVSAGPDLISRGFVYMRESGDLINDAQELIAGHLKKVMERKTTQWSEIKNEITDTLAPFLYEKTKRRPMILPIIMEV

SEQ ID NO: 6657 - protein, 69 aa, Bacillus licheniformis
MIYKVFYQASNDEVPVREKTDSIFVEAQSEREVRSKLKPYNYNIEFIQQVEGAFLEYEKQSENFKVLEL

SEQ ID NO: 6658 - protein, 23 aa, Bacillus licheniformis
MLRRLRKKLKKQLNGMMRRKSIA

SEQ ID NO: 6659 - protein, 258 aa, Bacillus licheniformis
MDKKLIFFDIDGTIYDHDKRIPATAKQAVSDLKAHGHHVFIASGRAPFMVRPVLEELGIDSFVSYNGQYVVFEGEVIYKNPIAEQSLEALLAHSDSCGHPLVFMGEEGMRSTTAAHPFVDEGIGSLKVNPPEEDRTYFKGRDIFQVLLFCTQDEEERYSRFKEFDLVRWHERSTDVLPSGGSKAEGIKKVIEKLPFDREDTYAFGDGLNDLQMIEFAGTGVAMGNAVPELKKIADFITKPVDEDGIQYAVEALGLLKS

SEQ ID NO: 6660 - protein, 184 aa, Bacillus licheniformis
LITMENIVRDGHPALRTVAEEVQLPASEEEIKQLSEMIEFVKNSQDPEIAKKYNLRPGVGLAAPQININKRMIAVHAESEDGTLYSYALFNPKIVSHSVQRCYLTSGEGCLSVDEPIPGYVPRYERIRVKGTTLEGENIDIRLKGYPAIVFQHEIDHLNGIMFYDHIDKENPLKQPENATPVGR

SEQ ID NO: 6661 - protein, 43 aa, Bacillus licheniformis
MYGYCCPGYGYGGGYGYGYGRTFALIVVLFILLIIVGAAYLGC

SEQ ID NO: 6662 - protein, 222 aa, Bacillus licheniformis
VKFSNMRVPAGIVVFCTAAFVLTGCLWKDPVESFHGSLEKIVELEEPFKQEQGSLKSLEKAESKLYEEMIRLNMDDFDRIAALSDKALKTAGKREKHLNSEKESIDEAKQEFEANKASAEKIDDQKVRKKAENAASYMEKRYKAYDSLYGAYQNAIGLDKELYKLLKNKGLKLDDLEEQLKKINQSYDKVLKESKHFNEYTKDYNKARKDFYKAAGFEMKEG

SEQ ID NO: 6663 - protein, 371 aa, Bacillus licheniformis
MAAKTKKAIVDSKKQFDAIKKQFETFQILNEEGEVVNEAAMPDLSDDQLKELMRRMVYTRILDQRSISLNRQGRLGFYAPTAGQEASQIATHFALEKEDFVLPGYRDVPQLIWHGLPLYQAFLFSRGHFRGNQMPDDVNALSPQIIIGAQYIQTAGVALGLKKRGKQAVAITYTGDGGASQGDFYEGINFAGAYKAPAIFVVQNNRYAISTPVEKQSAAQTIAQKAAAAGIVGVQVDGMDALAVYAATREARERAVNGEGPTLIETLCFRYGPHTMAGDDPTKYRTKEIENEWEQKDPLVRFRKFLENKGLWSEEEENKVIEEAKEEIKQAIKKADEEPKQKVTDLIDIMYEELPYNLVEQKEIYKEKESK

SEQ ID NO: 6664 - protein, 325 aa, Bacillus licheniformis
MAQMTMIQAITDALRTELKNDENVLVFGEDVGVNGGVFRATEGLQKEFGEDRVFDTPLAESGIGGLALGLGLQGFRPVMEIQFFGFVYEVMDSVSGQMARMRYRSGGRWNSPVTIRSPFGGGVHTPELHADSLEGLVAQQPGLKVVIPSTPYDAKGLLISAIRDNDPVVFLEHMKLYRSFRQEVPEEEYTIEIGKADVKREGKDLSIITYGAMVHESLKAAEELEKEGVSAEVVDLRTVSPLDIDTIIASVEKTGRAIVVQEAQKQAGVAANVVAEINDRAILSLEAPVLRVTAPDTVFAFSQAESVWLPNHKDVLETAKKVLEF

SEQ ID NO: 6665 - protein, 430 aa, Bacillus licheniformis
VAFEFKLPDIGEGIHEGEIVKWFVKPNDEVNEDDVLAEVQNDKAVVEIPSPVKGKVLELKVEEGTVATVGQTIITFDAPGYEDLQFKGDESGEAKAEEAEKQETDAPAEAAEANEQADADPNKRVIAMPSVRKYAREKGVDIVNVSGSGKNGRVLKEDIDSFLNGGTAGDAKAAQAEEKAEPAAQQPAAAVQVPEGEFPETREKMSGIRKAIAKAMVNSKHTAPHVTLMDEVDVTNLVAHRKQFKQVAADQGIKLTYLPYVVKALTSALKKYPVLNTSIDDNTDEVIQKHYYNIGIAADTEKGLLVPVVKNADRKAIFEISNEINELATKAREGKLAPAEMKGASCTITNIGSAGGQWFTPVINHPEVAILGIGRIAEKAVVRDGEIVAAPVLALSLSFDHRMIDGATAQNALNHIKRLLNDPQLILMEA

SEQ ID NO: 6666 - protein, 470 aa, Bacillus licheniformis
MVVGDFPIETDTLVIGAGPGGYVAAIRAAQLGQKVTIVEKGNLGGVCLNVGCIPSKALINAGHRYENAKHSEEMGITAENVKVDFTKVQEWKASVVNKLTGGVEGLLKGNKVDIVKGEAYFVDSNSVRVMDENSAQTYTFKNAIIATGSRPIELPNFKYSDRVLNSTGALALKEIPKKLVVIGGGYIGTELGTAYANFGTEVVILEGGEEILPGFEKQMSSLVKRNLKKKGNVEIHTKAMAKGVEEKADGVTVTFEVKGEEQTIDADYVLVTVGRVANTDELGLEQVGVEMTDRGIIKTDKQCRTNIPNIYAIGDIIEGPPLAHKASYEGKIAAEAIAGEAAEIDYLGIPAVVFSEPELASVGYTEAQAKEEGLSVTAAKFPFAANGRALSLNETDGFLKLVTRKEDGLVIGAQIAGASASDMISELSLAIEAGMTAEDIAMTIHAHPTLGEITMEAAEVAIGMPIHVVK

SEQ ID NO: 6667 - protein, 27 aa, Bacillus licheniformis
MWFRAIFTAAICFLFLYEWMFFISHHA

SEQ ID NO: 6668 - protein, 39 aa, Bacillus licheniformis
MGTIVCQDCNETIQHFEDEKVTILYGTCGQCNCHLKEEE

SEQ ID NO: 6669 - protein, 496 aa, Bacillus licheniformis
MKVGKQLLQHETPLYTGLKKHAGKNPIQFHIPGHKKGSGMDPEFREFIGENALSIDLINIEPLDDLHAPKGIIKQAQDLAAEAFGADYTFFSVQGTSGAIMTMVMAVCGPGDKIIVPRNVHKSVMSAIVFSGAVPIFIHPEIDDELGISHGITPESAKKALLEHPDAKGLLVINPTYFGIAADLKSIVELAHSFHVPVLVDEAHGVHIHFHEDLPLSAMQAGADMAATSVHKLGGSLTQSSILNMKEGLVSKERVQSILSMLTTTSTSYLLLASLDVARKRLATEGHELIEQTIKLANETRERINDINGISCVGREILGSKAAFDYDPTKLIISVKDLGLTGHDVEKWLRESCQIEVELSDLYNILCIFTPGDRKEDADALIKGLTEIAQQAASSAENRRKPEVLLPNIPALAMTPRDAFYANTEIIPFKKAAGRMIAEFVMVYPPGIPIFIPGEIITEDNINYIEKNLEAGLPVQGPEDDTLHMIRVIKEQQAIL

SEQ ID NO: 6670 - protein, 60 aa, Bacillus licheniformis
VLQQLFSHLHDKPAISLKTNLYQKSLSYFAFLLDGIKQMNYIMFLKECKEHFIIFPVRGF

SEQ ID NO: 6671 - protein, 91 aa, Bacillus licheniformis
MEEGYQYPMNEDWSTEEAIDVISFFQAVELAYEKGVKRDVLMSAYRRFKEIVPGKAEEKKLCSQFEEASDYSPYQAVKKAKEQTEDTKIKM

SEQ ID NO: 6672 - protein, 211 aa, Bacillus licheniformis
MSSLRFTEEDFRTFTIEGLDARMSVLKDTVRPKLQGLGDHFAPVLSALTGDEMFVHVAKHARRSVNPPDDSWVAFANNKRGYKKLPHFQIGLWETHVFVWFALIYESPLKQEYGQLFKKHLPDIESSIPSRFFWSADHTKPDAKRQSEMNEKDLENLFERLVNVKKAEALCGIQLSKDEVLHMSEEAFLSEIEAAFEKLAFLYRLTQKVSV

SEQ ID NO: 6673 - protein, 8 aa, Bacillus licheniformis
MKPIVKQG

SEQ ID NO: 6674 - protein, 264 aa, Bacillus licheniformis
MTNWKEIDRLAKSWVKEAGQRIKQSMKEKMTIETKSNPNDLVTNIDKETERFFIEKIQSVFPDHHILGEEGQGDKLTSLDGVVWIIDPIDGTMNFIHQKRNFAISIGIFENGKGKIGLIYDVTHDELYHAFQGEGAYINNTKLGKMKEVPLEESILAINATWITENRRIDPSVLSPLVRRVRGTRSYGSAALELAYVAAGRMDVYVTMRLAPWDYAAGCILLDEVGGTYTTIDGKPLNFLENHSIVAGNPAAHRAIFDEYLPHE

SEQ ID NO: 6675 - protein, 155 aa, Bacillus licheniformis
MNSRSFSSSDLAFFEELAEASPGWVKEELDGSSLERYMSAYAMYNGEWLVWEDGGLPAALSFHLEWAPSNGKPWLGTLLVHPDFRKKGRAKEVIKTIGKRLREKGHKALFAAVPYEKDEWLNMLARSGFEQLKTEKDEKGKRYLIMVLPLPLRLQ

SEQ ID NO: 6676 - protein, 640 aa, Bacillus licheniformis
LIELFSDYVLHFERYFVLSRQSMLVIQWCVTGLVLLYAVSFHPKVCRRRLFFYAGIVLRLILVGALSFELAHQMKAAEFSNLYIDEQDALLPFMQFLLFGYILLVSFHYMMTLAEKGGKGLFFAFDIAVMAMPLFQSLFSFAAYLKEFGAEELEELPLVLLLIVGIPGLMICLFFQLYWKRNRYVLLLIFYIVTIGGFFIKKLGYEFFPLNVLTMIGFLMTYHLLNDSRKPLLMVKRVLAAGTAVFFTLHLNPFYNLADAAFTISHPEVSDVVDANFRPVSVKEAKQTVSSFFPTESFIYLSATNQDFHNVYHFKTKDYDADVDGWTGMITNYHNQKKPSGNILSGQAYIKRSKQFLREHGRELDKQIKAKVSRDDGEATVEFYRECEDPELSTMWFTWRKETLMGFHEDASVYSLESVNQARVSGEDIERGVEAVYRKLGIPVSSYRLTDIDLLFPFSLNSASINIKTSDGMGMEFHPVTGALTAISIKSESALPYRGQELEKRLLSLFDQDISNLKRVELEKDLIEFQKKESDAVLNTVWTMTKHEEGAYLTVRKNFQKADEKPPYTYADGEKAFQKVSERYQKGLVYHKRTKLVIVSDGDQKSRYAWLVIIQPFGSNEHDAYLVDAETDEVKHFDDK

SEQ ID NO: 6677 - protein, 133 aa, Bacillus licheniformis
MTNEEKKAVFIDLYELYQESELEEETMIWMKEHEQFFQDQAEAAAAGNRELPGMQKTDDHQKLLHIKIFVYSLYGAFLLLSIWMTVWFFSKWLTIKNRRLKNCTGNIIMTSCTICTGEPISLRRRKTWRRIRF

SEQ ID NO: 6678 - protein, 171 aa, Bacillus licheniformis
MAHNKKQTIEELYREYYHDIMYYLYRRTHQLETAKDLAQDTFLKAFAGLKSFRGHSSIKTWLYTIAHHTFINWYRKDKKIQFSDVAACGDMEQHTFEMPERHLANAIMQEELKHHIDRLKEDYQTVLILREFQELSYEEIAEVLNWKLSKVKTNLHRARLELKKSLEGREV

SEQ ID NO: 6679 - protein, 98 aa, Bacillus licheniformis
MKCHLVRDLLPLYIEGDCSRKTERLVAAHIKTCEDCREMYDMMREPVNFHDDGGLPKEAEEAEEQKFRKAYYQRLILKGAALFGGGYLLMLLIYLFFL

SEQ ID NO: 6680 - protein, 62 aa, Bacillus licheniformis
VKQIKWIFLLFALAAVISIMMIGVAVAEKSAAGVAIAIAILIVIMGSGFTLKKRMREKGLLE

SEQ ID NO: 6681 - protein, 612 aa, Bacillus licheniformis
VKLREDLRNIAIIAHVDHGKTTLVDQLLHQAGTFRANENVAERAMDSNDLERERGITILAKNTAINYKDTRINILDTPGHADFGGEVERIMKMVDGVLLVVDAYEGCMPQTRFVLKKALEQNLTPIVVVNKIDRDFARPEEVVDEVLDLFIELDANEEQLEFPVVYASAINGTASADPKQQDENMEALFEAIVNHIPCPVDNHEEPLQFQVALLDYNDYVGRIGIGRVFRGTMKVGQQVALMKLDGSVKPFRVTKIFGFQGLKRVEIEEAKAGDLVAVSGMEDINVGETVCPIEHQEALPVLRIDEPTLQMTFAVNNSPFAGREGKYVTARKIEERLEQQLQTDVSLRVDPTPSPDAWIVSGRGELHLSILIENMRREGFELQVSKPEVIIKEIDGVRCEPVERVQIDVPEEHTGSVMESMGARKGEMIDMINNGNGQVRLIFNVPSRGLIGYSTEFLSLTRGFGILNHTFDSYQPVEPGQVGGRRQGVLVSMDTGKASAYGIQGVEERGVIFVEPGTEVYEGMIVGEHNRENDLVVNINKMKQQTNVRSATKDQTVSMKKPRIMSLEESLEYLNEDEYCEVTPESIRLRKKILDKNEREKAAKKKKLAGLS

SEQ ID NO: 6682 - protein, 106 aa, Bacillus licheniformis
LTDVSERLSFFAALYKVDQNPEAGMWWLYATIFVLSAVVFKLGFAKRLPLLKTAIIYFFLALGCTFLTFFGVFLPVGEGLIVAVLILSIYKIRLHRSKKEQTGANT

SEQ ID NO: 6683 - protein, 168 aa, Bacillus licheniformis
MEHLTHAKQEIFYLYIRLIHQQEQQETVMKERISAEMKKMEREFGAEMRLNMSDIHTISCIGDHEPINVTSISEKMEFSKATVSRITAKLTEKGLVSKTQLSDNKKEIYFRLSHKGRSIHHLHQREHDKIEQRFKRFLSRYSFDEILFARALFRDLLTADFLADTEKT

SEQ ID NO: 6684 - protein, 493 aa, Bacillus licheniformis
MDFDVLIAGGGPVGLLTASELALAGVRTCIVERLNEPSPFSKALTLHPRSIEILEMRGLGERFKEIGKPLGSGHFAGLKTGLDFSALDTRANFTLFIPQYETEKVLEEHARNLGVCILRGHEVLAVREHEDTAELVVQGPDGLSLLTASYIVGADGAGSTIRKQARIAFSGTDANITAMLGDVSLENPPESHFYTCVNREGGVVIVPLDGGIFRVLITAPHMPQALLHEPVTLEELKKELSRICGTDFGINSPVWMSRFGNASKLAEHYRSGRIFLAGDAAHIHFPAGGQGLNVGLQDAMNLGWKLAAKINGRCPGWLLDSYHHERHPVGKALIVNTQIQTKLIDFTREGLYLRELLSGILGFSDVNRYLAEQIAALSVQYEADEKMPEHELNGKRLPDIDLTLSDGTVKRLYTFHRDGRFLLAAFGKEPKEFSRLPHVRLMQLKAIDGRPEWNGVKAALIRPDGHIAWAVDESLENAEQLIADGIRRWCGNA

SEQ ID NO: 6685 - protein, 68 aa, Bacillus licheniformis
VRVKCSLCDKIEKIDDDTLIAKRLRNRPIHTYMCHECSERIKIKTENRMKTGRFKLYPHRKDKEQIKS

SEQ ID NO: 6686 - protein, 204 aa, Bacillus licheniformis
VRIFFLILIQTVMLLSACGIQNNARNEANELPGNRPIHVKNSAQEPVNREDGQAISRRLVKITESVPGVNDATAVVLGRLAVVGIDVKDNLERSKVESIKYSVAEALQNDPYGANAAVVADPDTVNRLRAMGREIQAGRPVKGILDELAAIVGRVLPEVPNDATDNQQTNPTKSNNDQLNERNQKQLEKKQNNQSNKHMKNRQQ

SEQ ID NO: 6687 - protein, 442 aa, Bacillus licheniformis
LSKIYVLDTNVLLQDPNSIFSFEDNEVVIPAVVLEEVDSKKRYMDEIGRNARRVSKLIDDLRLKGKLYENVPLPNGGSLRIELNHRSFQQLQEIFIEKTSDNRILAVAKNLSLEEETKEGGRPVILVSKDMLIRVKADAIGLMSEDFLHDRVVDNDDIYSGYTDVYIRSDQMNSFFEHHYLQLDEISEEPLCPNQFVVMKDALGGSSSAVGIVDQSGKAVKKLVFDQEQVWGIRSRNVQQTMALELLLRQDIPLVTLIGKAGTGKTLLALAAGLLQTEDLGNFKKLVVTRPIVPVGKDLGYLPGEKEEKLRPWVQPIFDNLEYLFNAKKPGELDDILAGMGSIQVEALTYIRGRSIPDQFIIIDEAQNLTKHEVKTLLTRVGEGSKIVLMGDTEQIDHPYLDAMNNGLAYVVERFKDQKISGNVKLLKGERSRLARLAADLL

SEQ ID NO: 6688 - protein, 160 aa, Bacillus licheniformis
MSIVTITGNVKYPITLDPSVWIFDDRKFDLEQFFSHFGEVQDEDDDLVIDRERQIREGAVSPPTLKSEKKYEKEKLLDGTFGIKLEPFLKNAEVSGSAVKCLFKTEGEDVSVPIEEAGGMILCFSNKGKPLGEDGPVHVYFPDGSNKMNPVKRVKEIHII

SEQ ID NO: 6689 - protein, 309 aa, Bacillus licheniformis
LNCRHNKELEYFVTEAKKVTDKGKVASYIPALAELSEDDLSAAVYFTDGTCISAGDVEKAFTLQSISKVLSLALVLIDHGPEKVFHYVGQEPTGDPFNSIIKLETVNPGKPLNPMINAGALVVTSMIKGETNADKIGRLLDFIKKLANNRSITVCGKVAESEFETSMVNRAMCYYMKEHGIFQAEVEDVMDVYTKQCAIEMNSLDLAKIGSVFALNGKHPETGEQIIPKDIARICKTFMVTCGMYNASGEFAIKIGIPAKSGVSGGIMGLSPYRFGIGIFGPSLDEKGNSIAGIRLLELLSANYSLSIF

SEQ ID NO: 6690 - protein, 93 aa, Bacillus licheniformis
LASEIVVDHREKALALLKRDADKILKLIQVQMDNLTMPQCPLYEEVLDTQMFGLSREIDFAVRLGLVDEEEGKELLYRLERELSALHDAFTKK

SEQ ID NO: 6691 - protein, 41 aa, Bacillus licheniformis
MRLRLFGVNSGHSFINWRFLSHSIIKKACRQFVSIETSSTS

SEQ ID NO: 6692 - protein, 403 aa, Bacillus licheniformis
MIKRMLKSYDYSLIFAVFLLCGFGLVMVYSSSMITAVTRYGQNSSYFFDRQLMFLALGTVIFLCAALFPYKAFANQKFQKFLLLISVVALFGLFVVGHVAGNAQSWFRVSNYGIQPGEFVKLTVILYLSSVYAKKQSYIDNLGAGIAPPAIITLFICALVAAQPDVGTAFIIALIALCIILCSGFSGKTLLKLVLLAGIVLVLVSPLIYFNWDSILTEGRMKRFESYQNPFKDAGDSGFQVVNSYLAIGSGGLFGLGLGESVQKYGYLPETHTDFIMAIIAEELGIFGVLFVVLLLSFIVLKGFYIARKCDDPFGSLLAIGISSMIAIQSFVNLGGISGLIPLTGVTLPFISYGGSSLILLMASAGILVNISMFNEYFDRFKRKQPVNTTKTKENQYKKSINF

SEQ ID NO: 6693 - protein, 1147 aa, Bacillus licheniformis
MSQQSIQKVLVANRGEIAIRVFRACTELNIRTVAIYSKEDSGSYHRYKADEAYLVGEGKKPIDAYLDIEGIIEIAKRNHVDAIHPGYGFLSENIQFAKRCEEEGIIFIGPTSEHLDMFGDKVKAREQAEKAGIPVIPGSDGPVADIAEVKQFAEKFGYPFIIKASLGGGGRGMRIVRDESELEESYNRAKSEAKAAFGNDEVYVEKLIEKPKHIEVQVIGDKEGNVVHLYDRDCSVQRRHQKVIEVAPSVSLSESLREKICDAAVKLAKNVDYVNAGTVEFLVANDEFFFIEVNPRVQVEHTITEMVTGVDIVQTQILIAAGLSLDSSEISIPNQDAITLHGYAIQSRVTTEDPSNNFMPDTGKIMAYRSGGGFGVRLDTGNSFQGAVITPYYDSLLVKLSTWALTFEQAAAKMVRNLQEFRIRGIKTNIPFLENVAKHEKFLTGQYDTSFIDTTPELFVFPKQRDRGTKMLTYIGDVTVNGFPGIDKKKKPEFDKPQIVKTDVDQPIASGTKQILDERGAEGLVKWVKDQEEVLLTDTTFRDAHQSLLATRVRTHDLKKIANPTAALWPELFSLEMWGGATFDVAYRFLKEDPWKRLEELRKEIPNTMFQMLLRSSNAVGYTNYPDNLIKKFVSESAAAGIDVFRIFDSLNWVKGMTLAIDAVRESGKLAEAAICYTGDILDPNRSKYNLEYYTSMAKELEAAGAHILGIKDMAGLLRPQAAYELVSALKETIDIPIHLHTHDTSGNGIFMYAKAIEAGVDIVDVAVSSMAGLTSQPSASSLYHALEGDKRRPQFNVDAVESLSQYWESVRKYYSEFESGMIAPHTEIYKHEMPGGQYSNLQQQAKGVGLGDRWNEVKEMYSRVNHLFGDIVKVTPSSKVVGDMALYMVQNNLTEDDIYERGESLDFPDSVVELFKGYIGQPHGGFPEKLQKLILKGQEPITVRPGELLEPVSFDAIKAEFLEKHGMELSDQDAVAYALYPKVFTEYVKTAELYGDISVLDTPTFLYGMTLGEEIEVEIERGKTLIVKLVSIGEPRPDATRVVYFELNGQPREVVIKDESIKSSVHQKVKADRSNPNHIAASMPGTVIKLLVSKGDQVKKGDHLMINEAMKMETTVQAPFSGTVENIHVTNGEAIQTGDLLIELKK

SEQ ID NO: 6694 - protein, 302 aa, Bacillus licheniformis
MNKALKGLGIITTIAMLFVLIGGALVTKTGSGMGCGRSWPLCNGSIFPALTLESIIEWSHRFVSGTSGVLVLALAIWTWKKIGHIRETKFLAVMSVVFLILQALLGAAAVVFGSSALIMALHFGISLISFASVLLLTLLVFEADSKQKSESFYIGKTMQFHMIGIIIYTYVVVYTGAYVRHTSSSLACLDFPMCSTENGWLPGKFHEWVQMGHRAAALLLFAWIIAAAVHAARQYKNQKRIYWGWMISLILIILQAASGIAVVYSRLDLGFALAHAFFISCLFGILCYFLLLVARYRRQVQK

SEQ ID NO: 6695 - protein, 308 aa, Bacillus licheniformis
MAETRITADTAMNGQIEETTAWKDFLALIKVGIVYSNLITTFTGMWLAFYFSNLSFLGNLDIVLFTLAGSSLIIAGSCVINNFYDRDIDQLMQRTRTRPTVTGKIQPSQALWFGILLTALGFIMLLMTNLTAAAVGFVGVFTYVFLYTMWSKRRYTVNTIIGSVSGAVPPLIGWTAVQGSIGVEAWVLFLIMFIWQIPHFLALAIKKTEEYRAANIPMLPVVHGFEVTKRQIIIWIACLMPLPFFLGGLGLPIVILGTVLNIGWLVCGLVGYRSKNIMKWATLMFVYSLNYLTIFFVAMVVFTLFKIG

SEQ ID NO: 6696 - protein, 355 aa, Bacillus licheniformis
MLKKWRLMSLFTILALVLAGCGEPFISTLQPAGEVADQQYFLMILSTLIMVVVVVVVSFIFVFVIVKYRRSKLGDDHIPKQVEGNRNLEILWTVIPIILLLILVVPVVAQTFDLADTKPMDKKNRDPEKTLVVNVRANLYWWEFEYPDYGVITSQELVVPTDERIYFKLKASDVKHSFWIPSVGGKVDTNTDNENKFYLTIDSKRAEKAGDYFYGKCAELCGPSHALMDFKVKAVSKDEFKKWMSDMENNKAEAKTDLAVEGEKVFKEKNCLSCHATDSKDQRAEAARTAPNLATFGDRSTIAGVKEFNDENLKAWLKDPESIKPGNKMTGTYPDLSDKELDALTEYLKGLKTED

SEQ ID NO: 6697 - protein, 622 aa, Bacillus licheniformis
VSTLKKKQGFGAVLWDYLTTVDHKKIAILYLLGGGFFFVLGGIEAMLIRVQLMIPNNDIMSGGVYNEIMTMHGTTMIFLAAMPLLFALMNAVVPLQIGARDVAFPFLNSLGFWLFLFGGIFLNLSWFLGGAPDAGWTSYASLSLHSEGHGIDFYVLGLQIAGIGTLIAGINFLATIINMRAPGMTYMRLPLFTWTTFVASALILFAFPPLTVGIALLMLDRLFGTSFFNPELGGNTIIWEHLFWIFGHPEVYILVLPAFGIFSEIIPVFARKRLFGYSSMVFATVLIGFLGFMVWAHHMFTTGLGPVANAIFAVATMAIAVPTGIKIFNWLLTAWGGSIKFTTPMLYAISFIPTFVMGGVTGVMLAAAPADYQFHDTYFVVAHFHYVIIGGVVFAILAGAHYWWPKMFGKMLSEALGKITFVLFFIGFHLTFFIQHWLGLWGMPRRVFTYLPNQGFDMANLISSIGAVFMAAAVIILVINIIVTTAKGEKVGSDPWHDGRTLEWAVSSPPPEYNFKQLPLVRGLDALWIEKRAGKQSMTAAEPLQDIHMPNGSILPFIMSLGLFISAFGFMYRTEFAWGLPVILIGLGITLFMMLLRSVIDDHGYHIHKEDLMDDDDKGVKA

SEQ ID NO: 6698 - protein, 207 aa, Bacillus licheniformis
MHTEEKLTAETFPASPEKATLEGKNKFIGFWLFLGGETVLFASLFATYLALKNSNAGGPKTTEMFDMGLVFLATMLLLTSSLTSVYAMYHMKNFAFKKMQVWLGITVLLGAGFLALEIYEFTHYIHEYGFTIQSSALGSAFYTLVGTHGAHVTFGLLWILSLMIRNAGRGLSLYNAPKFFVASLYWHFIDVVWVFIFTVVYLMGMVG

SEQ ID NO: 6699 - protein, 109 aa, Bacillus licheniformis
MVNNENRGNPKTDLAYRKKKNAEDMRYQVISFGLMIGLTIVAFLTVASGAGVWFTVPFILLLAVIQVAFQLYYFMHMSQRGHEAPTLFLYSGVLVAFVTVLAFVTLIWW

SEQ ID NO: 6700 - protein, 299 aa, Bacillus licheniformis
LGSLEIFGFRALWSPYFLGAVVFITALYFFLMKRLGSEGERASRKEIGLFLTAMILLYASKGSPVDLLGHIMFSAHMAQMAVLYLIVPPLIILGIPPWFWKKVIFLPIVKPLFRFFSKPLIAIIVFNGLFSMYHIPLVFDFIKTDAVYHAAITVLIFIAAFFMWWPLVHKVEELPQMSGLLKLGYIMADGILLTPACALIMFSDTALYSTYSDPSAWAEAMKLCVPLDTLSGMTLTGPEMFSSMPVLEDQQLGAIVMKILQEIVYGTFLAIIFFGWARKERAKDEKDLEEESYSPSTVH

SEQ ID NO: 6701 - protein, 119 aa, Bacillus licheniformis
MKFEESGIEGLTADLNRLDDIMENEGFVRAGQWDYERVTYDRKFDMVEGRFYLRVFGYAIEGDVGARRAVIKLMTPLLGKYYYPHGVEYGEDEHFPPQLLKTSKTVLNSIKEKVSALEV

SEQ ID NO: 6702 - protein, 148 aa, Bacillus licheniformis
LTRVKDIMTKETLYCTVLDNVYEAAVKMKDGDVGAIPVVLDDGLELVGIVTDRDLVLRGIAAKKPNSQKITNVMTTDLITVSEDDSIEKAVDLMGDYQIRRVPVTRGKTLAGIITLGDVSTHNKSNRQAGDALTFISENEERPGDFLH

SEQ ID NO: 6703 - protein, 347 aa, Bacillus licheniformis
LKNILRAVVILLIVAASYTLFIQYGSTPEKIAKEDKPQVSNEDAKKEKPLNIPDSGLLSFIGESAETIEKKLGKPDRVDPSAYDYEWWVYNQGKKQYVQIGLLGGKAVTLFATGDGVNTAPFKIGRPSREVFKTTQIAPYVNVQYKGSSYRFEFSEEDMNTRPTVKVGDIYVQLYMDKFEGTLSSIRAFDAPTLIKQRPYEVVYRGTLIEPKALTESDWKKIEKANEKQIFDITNVIRARHGLSELTWDEGVSKVAYGHSSDMKEHHYFSHVSETEGTLKDRLEKGKVNFEQAGENIALNYVDGPAAVEGWLNSEGHRKALLNADYTHLGVGVDEKYYTQNFIKEWQ

SEQ ID NO: 6704 - protein, 131 aa, Bacillus licheniformis
LANQNAQSSINEFKQFIKRHPKLISEVRKQEKSWQEVYENWVLLGEDDSIWDPYREEASAEKEPDAGGKNDFISKMVTAVRKMDANQMNEQINKMSQSISSLQSLLSQFSGGSQKQQKQSGGEHPFSFRKD

SEQ ID NO: 6705 - protein, 79 aa, Bacillus licheniformis
MRKEVQEYVFADEERRRFIREQPVWYRKLSRNPNDLSAFHLDMMNFYEKTIPHRVNQLSGSIQMAQMMLQMFHAMRTQD

SEQ ID NO: 6706 - protein, 56 aa, Bacillus licheniformis
MPPPNYNFPKTSLSQAESRQSDKPLGFGLWVAQPASKRHRKITSQHFFITDQLLHT

SEQ ID NO: 6707 - protein, 149 aa, Bacillus licheniformis
MFATMESLRLQNEAYDLANMILQSEAAEHYRKCYKRLREDEEAGRIIASFTKIKEQYEDVQRFGKYHPDYKEITKKMREIKRELDLHDTVAEFKKAETELQSILDEVSVEIGHAVSKHIKVPTGNPYFDNLSSCGGGCGSGGSCGCKVS

SEQ ID NO: 6708 - protein, 90 aa, Bacillus licheniformis
LEIRRQGLIVWLHSLKQAKMLRKFGNVHYVSKRLKYVVVYCNMEDAERIIAKIRSYSFVKQVDLSYKPFLKMEFESKQDKAKEYDYKAGL

SEQ ID NO: 6709 - protein, 188 aa, Bacillus licheniformis
MRVISGTYKGRALKAVPGTSTRPTTDKVKESIFNMVGPYFEGGTGLDLYAGSGGLGIEALSRGFDRFIFVDRDFKAIQTVKGNLKTLGLEKCAEVYINDAERALHALVKRGASFDAVFLDPPYREQKLEALLSIIDEADMLTERGFIVAEHAKEVMLPDAAGGLQLARQEIYGLTGVTIYRKRGNGDG

SEQ ID NO: 6710 - protein, 164 aa, Bacillus licheniformis
MASIAVCPGSFDPVTFGHLDIIRRGAKVFDKVYVCVLNNSSKKPLFTVEERCGLLREVTQDIPNVQVESFQGLLIDYAKSKQANVILRGLRAVSDFEYEMQGTSMNKVLDENIETFFMMTNNQYSFLSSSIVKEVAKYKGSVAELVPEAVEAALEKKFAKNERP

SEQ ID NO: 6711 - protein, 40 aa, Bacillus licheniformis
MRRVPIVRSGPISAKVFHISRKKGSVFPAVRKEKTGSVGE

SEQ ID NO: 6712 - protein, 361 aa, Bacillus licheniformis
MDMSKVKTLMIAVLLLSFTAAVITHPQESFDASKSGLAMWWEVVFPSLLPFFILSELLIGFGVVRFVGLLLEPFMRPVFRVPGVGGFVLAMGMASGNPAGAKLTSRLRQERQISRVEAERLASFTNSSNPLFIFGAVAVGFFHNPSLGVVLAAAHYLGNFAVGLTMRTYGRKEENRTAVRKKLPVPSIKEALKALHQARLEEKRPLGKLLSDAVISSVQTLLMVGGFIILFSVFNNILSVMHITDILSHATRMILTALQLPGDFDKPLLSGLFEITLGSKLVSATDAALLQQAVIVSFILGFSGFCVQAQVAGILAETDIRFSRFLSLASSREFMQRSLFLFFGSLFTHRSILRRSRSSPF

SEQ ID NO: 6713 - protein, 42 aa, Bacillus licheniformis
MKQMNRKLFKRAETLLLDEHQKKAFHTSVNSCRLKIRSRIKM

SEQ ID NO: 6714 - protein, 340 aa, Bacillus licheniformis
MLKKRIIRIALLLVIIVAALSFVKLPYYITEPGEATELNPLIKVDNGYPEKGSFSLMTVKVGPANPLTYIWAKMRPYHEILPEENFKQEGESDQEYMKRQLQMMRDSQENAMIAAYKRAGKEVSYTFNGVYAMSVVSGMPAEGKIQVGDKIKKADGKSFRSAESFVRYIESKKAGDRVKIVVERDKEEKTYEMKLKTFKEDPKRAGLGVSLITDRNVKVKPEVDMDIENIGGPSAGLMMSMEIYNQLTKEDETKGHHIAGTGTIDDEGKVGPIGGISQKVVAADKAGADIFFAPNEGGKKGSNYEEAVKTAKDIKTDMKIVPVDTMDDAIHYLEDKVKNT

SEQ ID NO: 6715 - protein, 416 aa, Bacillus licheniformis
MKAVGLVVEYNPFHNGHLYHIKEAKSETRSEVAVAVMSGSFLQRGEPAIVSKWARTKMALASFADVVVELPYIFAVQKAETFAEGAVSILNELGCSSLFFGSEHGDIEAFLNTVAHTIEHEDRLNEEARKQIAFGLSYPQAMAKAFRSVTREGGNIVDLSKPNNILGFHYVKAIMQKQLSMKPETVKRRSSGYHDSTFPEADRIASATSIRKSIFETGSLADSRFYLPKTTVDELDEYARTFGMWHSPEDYFPFLKYSLHTMDTEELKGIYEVEEGLEHRVKKAIRKAGSFKEYMELLKTKRYTWTRLQRMNTHILTKTKKADVKRMLNETHPAYIRLLGMTKKGQAYLAEKKKSLSAPLITKTGSFSHPSLQLDIKAGQVYSAPLKEPVRTMLTEQEYSLSPIRYDEDSRIFLRK

SEQ ID NO: 6716 - protein, 171 aa, Bacillus licheniformis
MKWTIHQLNQMPKKDFEFDETVDLSELSQSSEIRSISPVRVKGRAEIRSKQAAFDFTISGEMILPCSRTLVDVRYPFSISTKELFIFHKTEEMEDEDIHIVEDDLIDLTPVVKEEILLEIPMQIFCESVQKEEGAPQEGKDWQVITEDDRKDRIDPRLAGLGKLLKQEDES

SEQ ID NO: 6717 - protein, 57 aa, Bacillus licheniformis
MAVPFRRTSKTKKRLRRTHFKLQVPGMVECPNCGEMKLSHRVCKACGSYKGKDVKSN

SEQ ID NO: 6718 - protein, 199 aa, Bacillus licheniformis
LTITRQDAWTQDEDILLAEVVLRHIREGGTQLSAFEEVGKALSRTAAACGFRWNSFVRKQYQSGIELAKKQRKELRKKIGIHSANLPGSVKTVSESKAENLTLDDVIEYLEKLKEAPVQKDFIDEKKKLAEEINELKQEVEKLRSENQSLKKKLELTEEDYKALIEIMERARKMVVLQGDERNKKAMLQPEPNENLGEA

SEQ ID NO: 6719 - protein, 159 aa, Bacillus licheniformis
MVKVERLLINYKTLEEFKKFREYGIQELSMLEDLESNMIENDSNSPFYGIYYGNRLVARMSLYKVDGKSNQYFEEGQDYLELWKLEVLPGYQRNGYGTMLVEFAKSFGLPIRTSPRVKSSDFWNKMGFTPVKYDMARDKGENPLVWHPASEPSQSSESA

SEQ ID NO: 6720 - protein, 293 aa, Bacillus licheniformis
VKIGVIGGGSVGLLFAYYFSFGHEVTVIARRKEQAEAIEEKGIRLLEDGKEMTVNARGVTELDPDCDLLFVAVKEHQLGAVLSELEQAAPLDIMFLQNGMAHIPVLEKWQTGHRIYTGSVEHGAVRVDDRTFRHTGKGAVKWSAFRSQSAARLKKELASVHEAFPFIWCEDWYKPLAEKLIVNACINPLTALLRVKNGALLEEPMYGAYMKFVFEEASRILELEDRQAAWDHVLSVCRRTKSNTSSMLADVLAERKTEADAIIGYLLKRAKESGEPAPHLTFLYRSIKALENE

SEQ ID NO: 6721 - protein, 538 aa, Bacillus licheniformis
MQLTELSIQSQNPFVRDYINGKKEIEPFFDYGLSNESWSVRLDDLSSRTYDRDALADYLLDYHRKFQSATMNETIERLRDPKSVVVVGGQQAGLLTGPLYTIHKIVSILLLAKQKEQELNVPVIPVFWVAGEDHDLEEINHVYISDGGKVKKHKLPQSHWKKSQAAKTALDAEKAEKWLDGIFASFEETEYTNDLLGHLRRCLRQSLSFTDFFEFLVADMFEQDGLILLNSGDPGIRNLEARFFRQLLDKNDELTDSVKRQQELMKQLGYTPIIEGAAQHANIFYERDGERFLIEKENGAFFIKELHLQWSEAELCDLICQNPEAFSNNVVTRPLMQEYLLPTLAFIAGPGEINYWGELKGAFQVMGYKMPPVVPRLQVTFLERHIEKKLDERGIELRESIEKGARAKKEQYFQDKVPNGFTDSVKQAKEKIENIHSAVRAEALEIDGSLGPLLEKNAGFIQDQLQFLEKTVIRRIEEKENYILRDFDKIQTSIKPLDAPQERIWNIVYYLNKYGPDFLEKYKDLPYSFQNMHQVVKL

SEQ ID NO: 6722 - protein, 143 aa, Bacillus licheniformis
MFMGEYQHTIDSKGRMIVPAKFREGLGEQFVLTRGLDQCLFGYPMSEWKLIEEKLKALPLTKKDARAFTRFFFSGATECELDKQGRINIASPLLNYAKLEKECVVIGVSNRIELWSKEIWEQYVEEQEDSFAEIAENMIGFDI

SEQ ID NO: 6723 - protein, 312 aa, Bacillus licheniformis
MFEHTTVLLKETVDGLNVKEDGTYVDCTLGGAGHSEYLLSQLSEKGKLVAFDQDETALRHAKEKLADYEGQVVFIKSNFRYLKDRLNEIGITKVDGVLFDLGVSSPQLDTPERGFSYHHDAPLDMRMDQSAGLSAKEVVNEWPYEDLVKIFFKYGEEKFSKQIARKIEKAREQSPIETTGQLVDIIKEAIPAPARRSGGHPAKRIFQAIRIAVNDELRVFEEALLQAIEVLKPGGRVSVITFHSLEDRICKSTFKDMSSPPELPHGLPVIPKEFEPKLKLVNRKPITASEEELEHNNRARSAKLRIAEKARE

SEQ ID NO: 6724 - protein, 117 aa, Bacillus licheniformis
MSNLAYKVEKQQRQTDSAEQFVIIRRRASITLGEKVLIVLFALAVLSASLFMISKAFAAYQTNIEIQKLEKKVETESSRVDDLEKEADMLKEPDRIMDIARKKGLKLGDKKVKDIQE

SEQ ID NO: 6725 - protein, 711 aa, Bacillus licheniformis
MPKKNKFMNRGAAILSICFALFFFVIVGRFAFIQATGKVNGEVLAQKANEQYEKKRTIEAHRGSILDRNGKVLAEDATTYKLVAIMSEKMKPQYVKDKQLTAEKLAPILGMDEGKVLDILNKKGAFQVEFGSAGRDLTYAQKEKIEKLKLPGIVFTRDTKRYYPNGIFASNLIGYSQINEKTGEMQGMMGLEKTLNDYLKETDGYMTYDTDRTGWRLPNSNEKIKAPNNGDNVYLTIDQKIQAFLEDSMTTVQKEYKPKKIMAAVVDPKTGKVLAMGQRPSFNPNVRDVTNYYNDLVSYSFEPGSTMKIFTLAAAIQEGVYNGGEQYKSGSYSVSKKDKPIKDHNGGNGWGPITFNEGVERSSNVAFAILANDKLGTDRFNQYLRKFHFYDKTGIDLPGEANSKINFEYLRDKVSTAFGQSSAVTPIQQLQAATAIANNGKMMKPYVIDHVVDSDKNKTIYQNKPEQVGQPISAKTAKEVRELLGKVVTSEKGTGQPYKIEGFDVAGKTGTAQIAGEDGRYLTGRENYVFSFMGIGPKDDPQLLVYVAVQQPQLKATETGSAPVSKIFNPVMKNSLHYLNITPKETEKEEKQEEKQLKMPDFSGKRAESAAKEAQGSSLVPVTIGDGLAVKEQYPKAGEAVLPNQRVFLKTDGNITLPDMTGWSKRDALRFGAMAGIHIETSGQGYVKSQNVKAGKELKANSVVKVRLKNE

SEQ ID NO: 6726 - protein, 44 aa, Bacillus licheniformis
LETRKRPFTPYLGLFHFMPRSVLIERPDFSSIQGGRVQTEGYRL

SEQ ID NO: 6727 - protein, 644 aa, Bacillus licheniformis
LRVSNVTVRKRLIFVLLFGVIIFLIIDTRLGYVQFVLGDKLTTLAKDSWSRNLPFEPERGEILDRNGVKLATNQSAPSVLVVPKQVENPIKTSRLLASVLNMSEEKAYKHVTKKTSIERINPEGRKISHEKAKEVRDLNLKGVYIAEDSIRHYPFGSYLSHVLGFAGIDNQGLLGLEAFYDKELKGEKGYVKFYSDAKGKRMPGEADDYTPPKDGLDMKLTIDSKVQTIMEREFDIAEAKYNPDGMVGVAMNPKNGEILAMVSRPDFDPANYQSIDPKVYNRNLPVWSTYEPGSTFKIITLAAALEENKVNLQKDQFYDKGSVEVDGARLKCWKRGGHGAQSFLEVVQNSCNPGFVELGQRLGKEKLFTYIKSFGFGQKTGIDLQGEGTGILFPLDRVGPVEQATTAFGQGVSVTPIQQVTAVSAAVNGGTLYTPYIAKEWIDPVTKQTVKKQTPIAKRKVISEETSKQIRYALESVVAQGTGRNAFVDGYRVGGKTGTAQKVKDGKYLKNNHIVSFIGTAPSDDPSIVVYVAVDNPKGTIQFGGTVAAPIVGNIMRDSLPQLGVKKRKDQIEREYQWLDKKLIEVPNLIGLSVTELEPLLINLRLKASGEGDVVVQQSPKPGEKVKEGSTIRIYLDSDDGASD

SEQ ID NO: 6728 - protein, 46 aa, Bacillus licheniformis
MSGAVPPKKYIDFKGLAGCILFFTLKYELYVCTKLVRRINMTTNEE

SEQ ID NO: 6729 - protein, 488 aa, Bacillus licheniformis
MKLTKLLTYLKNAPSYAGQEDPDITSIEMDSREVKTGSLFVCIKGYTVDGHDYARQAAEKGAAAIVAEREVDADVPVIIIRHTKRALAVLSDAFYGQPTKQLRLIGITGTNGKTSTSHMVEEIFRKAGSRTGLIGTMYTKIHDETFEAKNTTPESVTLQKTFRKMVDQGVDTAVMEVSSHALHMGRVHGCDYDIAAFTNLTQDHLDYHETMEEYKHAKSLLFSQLGGSFNHETPKWAVLNADDPASAYFAQVTSAHLLTYGIQNDADVMAENIKMAPKGTTFDLVTPKGSAQVTIPLVGLFNVYNVLTAAAIAIAADIPFATITEGIEGLKGVRGRFELVDAGQDFPVIVDYAHTPDSLENVLNTCRGLTEGKLFVVVGCGGDRDKTKRPKMAKIAVDLADEPVFTADNPRSENPLAILNDMEEGVKGAYYHSIVNREQAIFFAIANAKKGDVVLIAGKGHETYQQIGGQTFDFDDAEVAKRAILELK

SEQ ID NO: 6730 - protein, 324 aa, Bacillus licheniformis
MLEQVILFTIIMGFLISVLLSPIFIPFLRRLKFGQSIREEGPKSHQKKSGTPTMGGVMIILSIIATTIVMTMKFSEVSMNMILLLFVTVGYGLLGFLDDYIKVVMKRNLGLTSKQKLIGQIVIALVFYAVYHFQGMPTDIRIPGTELSFDFGWIYPVLVIFMLVGGSNAVNLTDGLDGLLSGTAAIAFGAFAILAWNQSQYDVAIFAVAVVGAVLGFLVFNAHPAKVFMGDTGSLALGGAIVTIAILTKLEILLVIIGGVFVIETLSVILQVISFKTTGKRIFKMSPLHHHYELVGWSEWRVVVTFWTAGLLLAVLGIYIEVWL

SEQ ID NO: 6731 - protein, 451 aa, Bacillus licheniformis
VDTQDLLQNQNVLVLGLAKSGYAAASILHEKGVKVVVNDQLPFEENEPARILAEKGVEVVCGSHPTELFDLHSIDILIKNPGIRYENVMVEEALKRGIPVWTEVELAYHLTDAPFIGITGSNGKTTTTTLVYEMLKADSKKALVAGNIGTAASEVANQASGDEWIVTELSSFQLMGTYQFRPKIGLLLNVFDAHLDYHHSRKNYELAKQQVYRNQSETDVAVVNLDDETVVRLAECSKAEKVYFSVRRTLERGACVKDGAIMFNGEPVMPLEDVVLPGEHNLENILAALCIVKTAGVSDAAVRKVLTSFTGVKHRMQYVATIKNRLFYNDSKATNILATKKALSAFQKPVILLAGGLDRGNEFDELKPHMSFVKAVITFGETAPKFEKLAEEMGIQQVKRVDNVEQAATAAFSLSDEGDVILLSPACASWDQYKTFEERGDMFVNAVHMLK

SEQ ID NO: 6732 - protein, 366 aa, Bacillus licheniformis
LQTKKTSPDFLLVIITLLLLTIGLIMVYSASAVWATYKYDDSFFFAKRQLLFAGIGVIAMFFIMNVDYWTWRTYAKILIIVCFFLLIIVLVPGIGMERNGSRSWIGVGAFSIQPSEFMKLAMIAFLAKFLSEKQKNITSFRKGFVPALGIVFSAFLIIMMQPDLGTGTVMVGTCIIMIFVAGARISHFVFLGLIGLSGFVGLVLSAPYRIKRITSYLNPWEDPLGSGFQIIQSLYAVGPGGLFGLGLGQSRQKFFYLPEPQTDFIFAILSEELGFIGGSLILLLFSVLLWRGIRIALGAPDLYGSFVAVGVISMIAIQVMINIGVVTGLIPVTGITLPFLSYGGSSLTLMLMAVGVLLNVSRYSRY

SEQ ID NO: 6733 - protein, 366 aa, Bacillus licheniformis
MRIVVSGGGTGGHIYPALAFIKEVKRHHEDVEFLYIGTEKGLEKNIVEREGIPFKAIEITGFKRKLSFENVKTVMRFLKGVKECKEELKRFKPDAVIGTGGYVCGPVVYAASKLGIPTIIHEQNSLPGLTNKFLSKYVDKVAICFDEAKTHFPAEKVVFTGNPRASEVVSIKGGRSLTALGLAEGKKTVLIFGGSRGAAPINEAVIAMQNELKKRDYQVLYVTGEVHYDKVTAALEKEGAAPNMVVQPFLHQMPEYLKAFDVVVGRAGATTIAEITALGIPSVLIPSPYVTANHQEVNARSLGEQNAAVVLKESELNGDRLIQAIDHILQDEKTLEEMKIRAKSLGVPDAAERLYNVLKELKHHAK

SEQ ID NO: 6734 - protein, 303 aa, Bacillus licheniformis
MDKVIQELKELEVGKVLENEPLSNHTTIKIGGPADVLVIPKDIQAVKDTMKVVKKHGVKWTAIGRGSNLLVLDEGIRGVVIKLGQGLDHMEIDGEQVTVGGGYSVVRLATGISKKGLSGLEFAAGIPGSVGGAVYMNAGAHGSDISKVLVKALILFEDGTIEWLTNEEMAFSYRTSILQNKRPGICLEAVLQLEQKERDQIVAQMQKNKDYRKETQPVSNPCAGSIFRNPLPEHAGRLVEEAGLKGHQIGGAKVSEMHGNFIVNAGGATAKDVLDLIAFIQKTIKEKYDIDMHTEVEIIGEKR

SEQ ID NO: 6735 - protein, 262 aa, Bacillus licheniformis
VKPGIDKEKVVNIEERIPKIKEQRKQKANRRLITFILLFFTMMLIIIYLQTPISKVSKVEIKGNKNVSKEQIISLSSIHKGQTEFWSLSKQKAAEKIEQNKLIKKAEISKQLTNKIAISIEEYKSIAFLQKHNVYYSVLENGTVLPEEVTPTDIGPTLNNWEEDEKLVQMAKQLNKLSDSVKKSISEINYTPQKSNPWLIKLYMNDGYIVTASLKTFGQKMNSYPAIVKELPKGEKGIIHMEVATYFEPLKKTDESKKGDGN

SEQ ID NO: 6736 - protein, 230 aa, Bacillus licheniformis
LKRHTVNLSLAMLVLGFLLSFSYQFARENKDHEETAENWKEEYSLRDRLISQEKQNKKLEQELYKKQQEVQKTETALKKEKKEYYNIVEDVERYRMFVGEIGVQGEGIKVTLKDASYIPEGENVNNYIVHESHIFRLLNELWISGAAAVSINGQRVTHHSYISCNGPVITVDGNQYPAPFVISAIGDADVLMPALNIAGGLVDQLSRDHISVSIEKQDNIEMEPLLKQGE

SEQ ID NO: 6737 - protein, 241 aa, Bacillus licheniformis
LKKNNRFISLSILMLIFGIMLSVQFNSLKAPKVRDTRDIWDLREDLKEEQKKQLDLISEIDKYEKMLNTYSHQEETSRTKALNETLQNLKKQAGFTDVTGNGIIITISQLFSEELTGESIQNPPPDLLKKLINELNMYEAEEISINDRRVVNTTVIRDINGTTKIDGYPLDNYPITVKVIGKNADKLYSRMNASSLQDLFAGENLDLQIKRPEKQIKIKAYEGSMQVAPLKPLEKSKGENS

SEQ ID NO: 6738 - protein, 117 aa, Bacillus licheniformis
MWLPVLGLLLGITIGFSTNFTIPDEYSNYLSLAILASLDTLIGGIRAHLESVYDELVFVTGFFFNIILAISLAFLGVHLGVDLYLVGMFAFGVRLFQNIAVIRRILLAKWTASRRKN

SEQ ID NO: 6739 - protein, 432 aa, Bacillus licheniformis
MNNNELYVSLDIGTSNIKVIVGEMSDDSLNIIGVGNVPSEGLKKGSIVDIDETVHSIKKAFEQAERMIGFPLTHAIVGVNGNYIHIQDTNGVVAVSSENKEIHVEDVRRVMEAAQVVSIPPEQLIVDVIPRQFIVDGRGDITDPKKMLGVRLEVEGSLITGSKTILHNLLRCVERAGIEITDICLQPLAAGSVALSKDEKNLGVALIDIGGGSTTVAVFEDGHLLATRVIPLGGENITKDISIGLRTSTDEAERVKKQFGHAFYEEASEEETFEVAVIGTDQKQTFTQREVADIIEARLEEIFLFVAEELRNMGIKELPGGFVLTGGQAGMPGVLSLAQDVLQNNVRVASPNYIGVREPQYMTGVGLIQFAYRNAKIQGRKVGFKMPKQAVQEVAATHQKEVQQRPKPKSKRQAQAEKKPSKMKKIFNFFWE

SEQ ID NO: 6740 - protein, 377 aa, Bacillus licheniformis
MLEFETNIDGLASIKVIGVGGGGNNAVNRMIENDVQGVEFIAVNTDAQALNLSKAETKMQIGAKLTRGLGAGANPEVGKKAAEESKEQIEEALKGADMVFVTAGMGGGTGTGAAPVIAQIAKDLGALTVGVVTRPFTFEGRKRQLQAAGGISAMKEAVDTLIVIPNDRLLEIVDKNTPMLEAFREADNVLRQGVQGISDLIATPGLINLDFADVKTIMSNKGSALMGIGVATGENRAAEAAKKAVSSPLLETAIDGAQGVLMNITGGTNLSLYEVQEAADIVAAASDQDVNMIFGSVINENLKDEIVVTVIATGFIEQDQDSSKPQRPLNQGLKQHHQPAPKREPKREEPSMPHRSPSQPAEDTLDIPTFLRNRNKR

SEQ ID NO: 6741 - protein, 64 aa, Bacillus licheniformis
MTRKKENLYIREKRERLDARLLREPLPSRRQLMLLEGKEHRLLFQRAKKAADFLSAAFQCIVDV

SEQ ID NO: 6742 - protein, 187 aa, Bacillus licheniformis
VKKKPLFRTFMCAALIGSLLAPVAVQADTGTAAKTKEQSKISSALYKRFEKEGKVTFLIKMKSQANLQQAATAAEKRAKASVMTVKKAKEIKRSAVLTSLRTKAERTQKDLKSFLEKEEKKGTAKKVESFYIVNGIAVTATKDVMEKAASFPEVEKVLPNQKIKLGNTEKPTVESKTTADPHPCFQH

SEQ ID NO: 6743 - protein, 1432 aa, Bacillus licheniformis
LKRKLRKKAFSTILSGLLIGSLFMPAVSDAAAKPALTSMKEQAAAGKGKISKTLVKQFKKEDQVTFLIKLKDQVDTPKVAKQAEKNAKKKSLSAAKTEYQKRSAVVSALRVKADESQSDLKRYLKKQEKQGNVKKIRSYYIVNGMAVHATKEVMEQVAAFPEVEKVLPNEKRQLIKPTKQSVKKSAAKDEKEIEWNINRVDAPKAWKLGYDGSGTVVASIDTGVQWDHPALKEKYRGYDPKHPDQPNHEFSWYDAVSGASEPFDDLEHGTHVTGTMVGSEPDGQNQIGVAPGAKWIAVKAFSDDGGTDEDLIAAGEWILAPKDKDGNPHPEMAPDVVNNSWSGGAGIDEFYRDIVKAWRAAGIFPEFSAGNVDFANPGGPASIANPANYPEAFATGATDIDNRLADFSLQGPSPYDETKPEISAPGVNIRSSVPGSGYQDGWDGTSMAGPHVAAAAALIKQADSSITVDETEKILMETATPLTDSKFTESPNNGYGHGLVNVFDAVSAVTGGLGRAEGQVGKEGEDKSPPALNHQEITEIYSGSKTPLKVDVEDDVSIISVKLSYKTDDADWETIAAKQTSGDYKKGTYEVAVTVSEGKTLSYKWIVTDFGGNKTESKVYEVPISPAVTTGYKQDFENSASGWLTSGVKNSWERGIPQSGPNAAASGKNVFATNLTGPYESSANMNLLMPPVSVPKNQKLYLTYKYWHDIEEDFDYGFVYVQPEGKGEWIPAAEYSGKTSEWKDGQIDLSEYGGQTIKVMFNLQSDDSIEGDGLYIDDVALVKEVKSAGTKKRLGVEKQPAKMKDKKTKKRMIDPKKAKPAEALQEKTETKKAAPAVLPVRAQVSVLETGKSTYSNQATGAYSLAHAPGTYTLKAEAYGYESNAQTVKIESDKTTTADFVLKELKKGTLTGTIKNKKTGEPVRHAKLYIVEDAAVKPVQTDDDGSYSLTAYEGSYTVKVSANGYYSSEFSVDLKGDVSKDIDLDPFIGYPGEIGYDDGTGENAWAFYESGNGLAVKMTLENGQEKAMLKGGLFKFWDTEFPDPGGTDFAVEVYDASGEKGSPGKKIAGPFKAEALRTGEWTTVDLGDEGIIVGKDFYLVYVQKEDLANSPGLATDEDGEYSGRNWQYTDGSWSKAPSDQGNFMIRALVDYELSVPVITFPKDGFITNQKNAVIEGTSSPNTTVHLFNGDEEAGTAETAADGTFSKEIPLNKGENVITAKSSSASGTTDASEPVRIVLDQKKPKLTIDTPESGSKLNKETVTVKGTVSDDHLESVHVNGKKAAVDNGEYSARIMLDNGKNEIKVTASDAAGNKTTKKVTVDVNFEAPQITGLKPTEDLELKTGETVKIEFESAADLDAVFLIRMPLTNFKTAAQNVTELPIREVSKGKYEGYWTATSTAKAKGAEIEVIVRDDYGNETRQTAKGKLYINEKLK

SEQ ID NO: 6744 - protein, 309 aa, Bacillus licheniformis
VEIYLDAIWLLNFCFDLLLLMMTAFILKRRVKKRRLILGAFVASSIVLFMFTPFSPYVLHPAGKLSFSVVIVLVAFGFKRFRFFLQNLFSFYFATFLMGGGIIGAHSLLETDSIMENGVFMTNWSGFGDPVSWLFVCVGFAAVWLFSKKRFEDAEAKKIQYEERVRLEACIGEHTLHFTGLIDSGNQLYDPITKTPVMIVNIEKLKVVLGEEASVTIKEMSPLDAVGKLDEALPYIGRIRLIPYCGVGHQHQFLLCLKPDHVLVCTEREVIEAPKCLIGISTSPLSADGEFDAIVHPKMLAGNPVKHVS

SEQ ID NO: 6745 - protein, 239 aa, Bacillus licheniformis
MKKLKLRLTYLWYKLLMKLGLKSDEIYYIGGSEALPPPLSKDEEQVLLHKLPDGDQAARAILIERNLRLVVYIARKFENTGINIEDLISIGTIGLIKAVNTFNPEKKIKLATYASRCIENEILMYLRRNNKIRSEVSFDEPLNIDWDGNELLLSDVLGTENDIITKDIEANVDKKLLKKALEQLNDREKQIMELRFGLVGGEEKTQKDVADMLGISQSYISRLEKRIIKRLRKEFNKMV

SEQ ID NO: 6746 - protein, 259 aa, Bacillus licheniformis
VSRNKVEICGVDTSKLPVLKNEEMRKLFKQMQDEGDTTAREKLVNGNLRLVLSVIQRFNNRGEYVDDLFQVGCIGLMKSIDNFDLSHNVKFSTYAVPMIIGEIRRYLRDNNPIRVSRSLRDIAYKALQVRERLISETSREPTAQEIAKELEVSHEEIVFALDAIQDPVSLFEPIYNDGGDPIYVMDQISDERNKDSQWIEELALKEGMRRLNEREKMILRKRFFQGKTQMEVADEIGISQAQVSRLEKAAIKQMNKNIH

SEQ ID NO: 6747 - protein, 265 aa, Bacillus licheniformis
VVLQLEHASLKRNGEWILKDIDWTVEKGEHWALYGLNGAGKTALLNMLCAYYFPTTGKVTVLGREFGKTELGEKLRRKIGLVSAALQQKLYPEDSAFEIVLSGAFASIGLYESPSQSVREKAVALLEEFGSIRYADRRYETLSQGEKQKVLIARALMADPELLILDEPVTGLDFIAREQVLDTVEQIAKKDSAPSMLYVTHHAEEILPAFSQTLLLKKGEVFALGKTREMMSGEVLSEFFDMPVQAVWTEDRPYLSKKKTANLNV

SEQ ID NO: 6748 - protein, 284 aa, Bacillus licheniformis
MKEHETMFQCPLCAANMAISELKSLICSNRHTFDIAKGGYVNVATHSPSVKYDIDLFDARRMLAAAGFFEPMRGALTDRLKQAGLPFCNFVRILDAGCGEGSHLTRIAETLEARFGTPVLGVGLDLAKAGIVSAAKQEREAIWCVADLAAAPFRNRSFDAILNILSPSNYAEFERLLSDDGIVLKVIPRSGHLKELRRFLYDGSDKQAYTSEDTAERFASHFDLIDRTEIAYSKRLDRIQLPPLIKMTPLSWRARKERINAFLKKESAVMTVHLDILAGRKKTK

SEQ ID NO: 6749 - protein, 77 aa, Bacillus licheniformis
MMNISDFQIKDVVNVSNGKKLGSIGDIDINVTTGKIQAIVIGGTGKVSDFSEKKRKSSFRGEILLNWRRCDSCAFKL

SEQ ID NO: 6750 - protein, 279 aa, Bacillus licheniformis
MNTYNPFRLDAPSMLLIEEWNQTAETGGAVTAGFTTKNGGESEPPFHSLNTGLHVQDHEQHVINNRKKVADILKTDLHDWVFADQTHEDRIHKVTDGDRASGAFRYDTALKATDGLYTDRPNLFLALCFADCVPVYFYDPVRSLVGIAHAGLKGTALGIAASMVDMWIRREGSNPADIRAVIGPAIGSCCYTVDDHVIDKIRNLPLQQEDKAFLTIKEGEYRLELKEVNRQLLVHAGIPNGQIEVSSLCTSCERSLFFSHRRDRGKTGRMMSFIGLKEV

SEQ ID NO: 6751 - protein, 231 aa, Bacillus licheniformis
VDVKSNLRHINDRINEACIKAGRTPDEISVIAVTKYVSPERAQAALDAGIRHLGENRDTGLLHKLDVLKDSEPVWHFIGTLQTRKVKAIIDHVSYIHSLDRLSLADEIQKRAKKPIDCFVQVNTSLEPSKHGMAKEEVLPFVKKLSGYENIRIAGLMTMAPFTDDEKAIRSCFRLLRELRDEVRGLDQWNAPCSELSMGMSNDYAIAVEEGATFVRIGSSLVGNETGGGQS

SEQ ID NO: 6752 - protein, 138 aa, Bacillus licheniformis
LDDEEYEYEYIETDREEIPEEHESKDRTAYQSKAAGKQNVVSLQSVQKSSKVVLSEPRVYAEAQEIADHIKNRRAVVVNLQRIQHDQAKRIVDFLSGTVYALGGDIQRIGADIFLCTPENVDVSGTISELIEEEHQRW

SEQ ID NO: 6753 - protein, 89 aa, Bacillus licheniformis
MILLYQILSTLLTVYSFALIIYIFMSWVPNARESSFGRVLASLCEPYLEPFRRIIPPLGMIDISPIVAIFVLKFADAGLLAVFRMLGAF

SEQ ID NO: 6754 - protein, 258 aa, Bacillus licheniformis
MSDIYQHFRKDEEPFIDQALEWKRIVAEQYWMKLTDFLDPREQVILQSVIGQSDEVRLEFFGGFPEAERKRAVLFPEYAEPSAEDFQLQAWEVIYPQKFASIEHRELLGSLMGIGLKRQKFGDLIFSDGTWQFICSEEVADFVFTQLTQIGKVKVSLEKIPLSKLKVPEQDVEIRDDTVSSLRLDAICSAMSRQSRQKAQVLVKNGLVKVNWKVIEDPSYALAEGDMVSIRGFGRFRMKNIDGKTKKGKWRLTFEKQK

SEQ ID NO: 6755 - protein, 164 aa, Bacillus licheniformis
MPLTPNDIHNKTFTKAFRGYDEDEVNEFLAQVRKDYEIILRKKNELETKVNELDERLGHFSTIEETLNKSILVAQEAAEDVKRNSEKEAKLIIREAEKNADRIINESLSKSRKIAMEIEELKKQSKVFRTRFQMLIEAQLDLLKNDDWDHLLEYEVDAVMDEKE

SEQ ID NO: 6756 - protein, 922 aa, Bacillus licheniformis
MDYKDTLLMPKTDFPMRGNLPNREPEIQGKWEDMDIYSLVQKRTEGRPMFVLHDGPPYANGDIHMGHALNKVLKDFIVRSRSMSGYHAPYVPGWDTHGLPIETALTKNKKVKRKEMTVAEFRKLCEEYAWQQIEGQKAQFKRLGVRGDWENPYVTLKPEFEAQQIKVFGEMAKKGYIYKGKKPVYWSPSSESALAEAEIEYHDKRSPSIYVAFDVKDGKGVLTNGEKIVIWTTTPWTIPANLGIAVHPELEYSVVAAGGARYVMASALIESVAKAIGFEDHEVVQTVKGKDLEHIVAVHPLYGRDSLVMLGEHVTTDAGTGCVHTAPGHGEDDFIIGQKYGLDVLCPVDEKGHMTSEAPGFEGLFYDQANKPITEQLEEKGALLKLDFITHSYPHDWRTKKPTIFRATAQWFASIKDFRGELLEAVKETKWVPEWGETRLYNMIRDRGDWCISRQRAWGVPIPVFYAENGEPIITDETINHVSELFREHGSNIWFEKEANELLPEGFTHPGSPNGKFTKEQDIMDVWFDSGSSHQAVLEEREGLVRPADLYLEGSDQYRGWFNSSISTAVAVTGKAPYKGVLSHGFALDGEGRKMSKSLGNVVVPAKIMNQFGADILRLWVASVDYQADVRVSDAILKQVAEVYRKIRNTFRFLHGNIADFDPAKDAIAVEDLREVDQYILIKLNSLIEKVKKAYEEYDFAVIYHAVHNFCAIELSSFYMDFAKDVVYIEHADHKDRRSMQTVFYETLLALVKLIAPILPHTADEMWSHFTFVSEKSVQLTDMPETRDIPNAKETEEKFDSFMKLRDDVLKALETARNEKIIGKSSVASLTLYPNEEAKALLSSIKEDVKQLFIVSELAIGGTEADAPEDAQSFETGKIVVAQAEGETCERCRMVSKEIGEDPDHPELCPRCAGIVKTYYQN

SEQ ID NO: 6757 - protein, 121 aa, Bacillus licheniformis
VNEQLAAIHTELLQMKEELEARLFEYSFFQQDSQGISSYQQATLMYHVKEELQDVLLALSKIENGTYGICEETNQAIPLAKMAILPTARTANDFLYHAQFEKKTLPIWAETDETFNRALYS

SEQ ID NO: 6758 - protein, 41 aa, Bacillus licheniformis
MKRSTGRSTHNILQEGRAFALLQDVNEYSFTPFLFLVKMLK

SEQ ID NO: 6759 - protein, 153 aa, Bacillus licheniformis
VPYYIIALLIIGIDQFTKWLVVSKMEYGESIPVIDGFFQITSHRNTGAAWGILAGQMWFFYIITTVVIIGIVYYIQKHAKGQILLGIALGLMLGGAVGNFIDRVFRQEVVDFIHVTIVNYHYPIFNIADSSLCIGVLLLFIQMLLDGKKKKEL

SEQ ID NO: 6760 - protein, 304 aa, Bacillus licheniformis
MEHYDMTVHEEHKGERIDKYLTAVEADWSRTQVQQWIKEDRVLVNGNAVKANYKVQEGDAVSVQVPEPEPLDVTAEPMDLDIYYEDQDVLVVNKPRGMVVHPAPGHLTGTLVNGLMAHCDDLSGINGVMRPGIVHRIDKDTSGLLMVAKNDMAHESLVNQLVNKTVTRKYTALVHGVIPHDHGTIDAPIGRDKKDRQSMTVTRENGKHAVTHFEVIERFDDFTVVECQLETGRTHQIRVHMKYIGFPLAGDPKYGPKKTVDFNGQVLHAGVLGFDHPRTGEYVEFEAPLPDDMKNLLDKIRNKR

SEQ ID NO: 6761 - protein, 182 aa, Bacillus licheniformis
MQEQEKAVVLDEQAIRRALTRIAHEMIERNKGMNNCILVGIKTRGIYLAKRLAERIEQIEGNKVTVGELDITLYRDDLSKKTSNEEPLVKGADIPADITDQKVILVDDVLYTGRTVRAAMDALVDVGRPSSIQLAVLVDRGHRELPIRADFIGKNIPTSKTEKVMVQLEEVDGRDLAAIYKK

SEQ ID NO: 6762 - protein, 44 aa, Bacillus licheniformis
MHSSEFAKRDGTKESRLTVRRSLSASLRNLSKEAFLMGINHFRI

SEQ ID NO: 6763 - protein, 434 aa, Bacillus licheniformis
MSQKKVNLGVREVPKPLNWISFSLQHLFAMFGATILVPKLVGLSPGVALITSGLGTLAYLLITKGQIPAYLGSSFAFIAPIIAAKAAGGPGAAMIGAFMAGIAYGLIALLIQQLGTDWLMRLLPPVVVGPVIIVIGLGLASTAVNMAMYEDSGAKVLVYSAKHFGVAGFTLALTIICAIFLRGFFSLIPVLIGIIGGYLFALTQGIVDFQMVLDAKWFAVPDFVLPFVDYTPSAAAVGIGIAMVPVAFVTMSEHIGHQMVLSKVVGQDFIKKPGLHRSIFGDSVATMLASCIGGPPTTTYGENIGVLAITRVFSVFVIGGAAVIALCFGFIGKISALISSVPSAVMGGVSFLLFGIIASSGLRMLIDNKIDLENKRNLIISSVILVIGVGGAFIKISGFELSSMALAAIVGVVLNLVLPESKGDQDGIEIEEHI

SEQ ID NO: 6764 - protein, 306 aa, Bacillus licheniformis
MKHLTAMNELSLEDIHELIEEARELKKGKSDSVLSGKFAANLFFEPSTRTRFSFEVAEKKLGMNVLNLDGVSTSVQKGESLYDTVKTLESIGADVCVIRHSHDHYYDELIGHVGIPVINAGDGCGQHPTQSLLDLMTIHEEWGRFAGLTVSIHGDIKHSRVARSNAEVLTRLGAKVLFSGPDEWRDEDNPYGTYVSPDEAVAHSDVVMLLRIQHERHEKKAAERDYLETFGLSLKRAELLKKDAVIMHPAPVNRGVEIDSALVESGRSRIFKQMENGVYIRMAVLKRALLNGENKKRGDQAYVLFN

SEQ ID NO: 6765 - protein, 428 aa, Bacillus licheniformis
MSYLIKNGFMLDEKGEKVQRDIRVEGDAISEIGSLEAASGETVIDADGLFVSPGLVDLHVHFREPGGEKKETIETGAKAAARGGFTTVAAMPNTRPVPDTKEQMEWLVNRIDETASVRVLPYASITIRQTGREMTDFEGLKDAGAFAFTDDGVGVQTAGMMYEAMKKAASINKAIVAHCEDNSLIYGGSVHDGEFAKANGLNGIPSVCEAVHIARDVLLAEAAGCHYHVCHISTKESVRVVRDAKKAGIRVTAEVTPHHLLLSDSDIPGLDTNYKMNPPLRSPEDREALLEGLRDGTIDFIATDHAPHTEEEKQQTMSLAPFGIVGLETAFPLLYTHFVKTGKWTLKQLHDYMTVKPCEAFGLPYGKLEAGRSADITLIDLEREEKIDKSTFLSKGKNTPFDGISCFGWPAMTMAKGKLVYQEGRLVK

SEQ ID NO: 6766 - protein, 364 aa, Bacillus licheniformis
MKRRLILENGTIFEGEAFGSLENTMGEVVFNTGMTGYQEILSDPSYCGQIVTLTYPLIGNYGINRDDFESITPYVKGFIVKELCQLPSNWRSAYTLDEYLKMKNIPGLSGIDTRKLTRMIRTAGTLKGVFAGPEEDAGALVQKLKETNLPTDQVSQVSTKTAYPSPGRGKRIVLVDFGMKHGILRELNKRKCDVIVVPHNITAEEVMQLKPDGVMLSNGPGDPTDVPEAIAMIQNILGKVPLFGICLGHQLFALACGAKTEKMKFGHRGSNHPVKELETGRVSITAQNHGYTVSSVENTPLEVTHVAINDDTIEGLKHKHEPAFTVQYHPEASPGPEDANHLFDQFLDMIETTEKEGEAVCLNA

SEQ ID NO: 6767 - protein, 1070 aa, Bacillus licheniformis
MPKRVDIKKILVIGSGPIIIGQAAEFDYAGTQACLALKEEGYEVILVNSNPATIMTDTEMADRVYIEPLTLEFLTRIIRKERPDAILPTLGGQTGLNLAVELSEHGILAECGVEVLGTKLSAIQKAEDRDLFRSLMNELNEPVPESEIIHSLGEAREFVERIGFPVIVRPAYTLGGTGGGICSNEDELKEIVENGLKMSPVHQCLLEKSIAGYKEIEYEVMRDSSDHAIVVCNMENIDPVGIHTGDSIVVAPSQTLSDREYQMLRNVSLKIIRALEIEGGCNVQLALDPDSFQYYIIEVNPRVSRSSALASKATGYPIAKLAAKIAVGLSLDEMMNPVTGKTYASFEPALDYVVSKIPRWPFDKFESANRRLGTQMKATGEVMAIGRTWEESLLKAVRSLEADVYHLELKDAGEISNEVLEKRIKKAGDERLFYLAEAFRRGYTVSDLHEFSAIDLFFLHKLEGIIRFEEKLKAGRGDLGLLKEAKELGFSDRFISLLWEMPERKLYDLRKEAGITPVYKMVDTCAAEFESETPYFYSTYEEENESVRTDKNSVIVLGSGPIRIGQGVEFDYATVHSVWAIKEAGYEAIIINNNPETVSTDFSISDKLYFEPLTVEDVMHIIDLEQPKGVVVQFGGQTAINLADELAERGVAILGTSLEDLDRAEDRDKFEQTLEMLQVPQPLGKTATSVEGAVEIAANIGYPVLVRPSYVLGGRAMEIVYYEAELLHYMENAVKINPQHPVLIDKYLTGKEIEVDAISDGETVVIPGIMEHIERAGVHSGDSIAVYPPQSLSEDIKKKLEAYTIKLAKGLNIVGLLNIQFVLSKDEVYVLEVNPRSSRTVPFLSKITGIPMANLATKVILGGKLADMGYTEGLQKEQEGVYVKVPVFSFAKLRRVDITLGPEMKSTGEVMGKDSTLEKALYKGLIASGIQIPNYGSVLLTVADKDKEEGLLIAKRFHAIGYKILATEGTAGYLRDASVPVKTVGKIGEEGTNLLDVIRNGEAQFVVNTLTKGKQPARDGFRIRRESVENGVACLTSLDTAEAILRVLESMSFRADHMPAIKIAQKAAVR

SEQ ID NO: 6768 - protein, 258 aa, Bacillus licheniformis
MRKGYMTVRSNKCIADHIYQMVLEGEIAEVCGAPGQFLHIKVSDSLTPLLRRPISIADINKAARQVTIIFRKDGEGTRLLSLKQEGDQLDVLGPLGNGFPAESLEQGKTALLVGGGIGVPPLYELSKQLTNRGVHAIHVLGFASAKDVFYEQEFSRFGRVYVATADGTRGSKGFVTDVIENEGLQCQFDCIMACGPTPMLKALKQRYPDKEVYLSMEERMGCGIGACFACVCHTEESETSYVKVCLDGPVFKAQEVLL

SEQ ID NO: 6769 - protein, 312 aa, Bacillus licheniformis
MMLEINLPGLQLKNPIMPASGCFGFGREFANFYDLSRLGAIMIKATTSEPRFGNPTPRVAETQAGMLNAIGLQNPGLKAVMERELPWLEQFDTPIIANVAGSQIEDYVEVAEEISKAPNVHALELNISCPNVKTGGIAFGTQPEMAGELTKAVKEVASVPVYVKLSPNVANITDIALAIEEAGADGLTMINTLIGMRLDLKTGKPILANKTGGLSGPAVKPVAIRMVHEVSQKVSIPIIGMGGVQSAEDVLEFLLAGASAVAVGTANFVNPFACPDIIDDLPRVLEKYGYRSLNECIGRSWKDEQYAAHHRA

SEQ ID NO: 6770 - protein, 239 aa, Bacillus licheniformis
MNNTPPIIALDFASAQETYAFLDRFQGEELFVKVGMELFYQEGPAILENLQERGCRIFLDLKCHDIPTTVYKAMKRLAGFGVSLVNVHAAGGKQMMESALEGLEAGTPGGQKRPSLIAVTQLTSTSSEMLQRELLIETPLLDTVVHYSRLAEESGLDGVVCSVHEAEHIYRAVSVDFLTVTPGIRMADDKNNDQVRVATPGYAREKGVSAIVVGRSITQAEDPVSAYRRIGHEWEGTKA

SEQ ID NO: 6771 - protein, 209 aa, Bacillus licheniformis
MKTDIANHLLKIKAVFLRPNEPFTWASGILSPIYCDNRLTLSYPEVRDDIASGLAGLIQDKFPGAEMIAGTATAGIPHAALAADRLSLPMCYVRSKPKAHGKGNQIEGAVVKGQKVVVIEDLISTGGSVLEAAAALTEAGCEVLGVAAIFTYGLPKAAAAFSEAGVEYHTLTDYDTLTEAALAGGYITEQDAAKLKEWKADPESKSWMN

SEQ ID NO: 6772 - protein, 47 aa, Bacillus licheniformis
VKTDEQLEKVIIKMKDMLKDMNYGSITFVVQDGKVIQIEKNEKIRLK

SEQ ID NO: 6773 - protein, 180 aa, Bacillus licheniformis
LIYKVKKDAVIVFLDTGLHFKETYETIDAVKERYPGLQIIMKKPELTVEEQAKEYGDELWKTAPNSCCEMRKVIPLRETLSGYPAWLSGLRREQSPGRSKTNFLNKDEKFKSIKVCPLIHWTWKDIWRYVTKHDLPYNPLHDQGYPSIGCAPCTSPAFTMDDLRSGRWNGSAKTECGLHE

SEQ ID NO: 6774 - protein, 354 aa, Bacillus licheniformis
MELAAILFSMFFAMNIGASGAAASMGIAYGSEAVKKKFHALLICAAGVLSGAVIGGGNVVKTISSGIIPERVISLEIVCIIIGSAALSLFIANVLGIPLSTSEVTVGSVVGVGVAYQVLYVKSLLVIVSFWVIVPIVAFAFTFAMAKIMKKTIKRPASGKKAKVLAVILLITGFFEAFSAGMNNVANAVGPLVAAHVLTVGEGTLYGGLFVALGALLLGRRVLETNGKKITRFSKGEGIILSGTGAGLVITSSIFGLPVPLAQVTSSSIIGMGMAKNGGNVFHKQVVKTMLKVWVVSPFLSLSLSYMLVSLLLKGDYYALIVVTSVLLASVGTISLMRAVKKEHSSVHEQGGGI

SEQ ID NO: 6775 - protein, 378 aa, Bacillus licheniformis
MSLAPHGGVLVNRVNEAYDFQHIAHEIELDVMAFSDLELIGIGAYSPLQGFMTEKDYLSVVENMRLSSGEVWTLPITLPVDEQKALSLKAGDTVRLTYNGETYGVIEIEDIYTPDKKTEAVNIYKTDELEHPGVKKLFDRGSVYVGGPITLIKRSVKQFPAHTFEPLETRKKFAELGWKTIVGFQTRNPVHRAHEYIQKTALETVDGLFLNPLVGETKSDDIPADVRMESYQVLLDGYYPKDRVFLGVFPAAMRYAGPKEAIFHALVRKNYGCTHFIVGRDHAGVGDYYGTYEAQELFDQFAPEEIGITPLKFEHSFYCNVCGSMATAKTCPHGKEHHVILSGTKVRAMLRSGEFPPSTFSRPEVIQTLIKGLAAGVS

SEQ ID NO: 6776 - protein, 197 aa, Bacillus licheniformis
LVNKDIVWHEASITKREYHEKNQHKSSIIWLTGLSGSGKSTIANAAARELFAQGYQVTVLDGDNVRHGLNKDLGFSDEDRKENIRRIGEVAKLFVEQGTIVITAFISPFKEDRGLVRQLVEEDEFHEVYVKCDLATCEERDPKGLYKKARNGEIPFFTGIDSPYEEPETPELVLDTGAHNREECKNQLVQYVKDQTK

SEQ ID NO: 6777 - protein, 257 aa, Bacillus licheniformis
MGKVYIVGAGPGDPDLLTIKALKAIQTADVILYDRLVNKQILQHAKEGADLIYCGKLPDYHMMKQETINHFLVKYAKKGKTVVRLKGGDPFVFGRGGEEAQTLAEHGVAFEIVPGITSGIAAAAYAGIPVTHREASSNVAFVTGHYQKEENFEEKWKALATGIDTLVIYMGIKNVKQIERLLIENGRDPSTPAAFIHWGTTDKQKTVLCTVETLAGTVESEKIENPSLIVIGDVVQFSSQLSWFEPELKDPALSEAL

SEQ ID NO: 6778 - protein, 261 aa, Bacillus licheniformis
MKQAILYIGHGSRLKRAQTEAAAFLESCKENMSAPIQEISFLELAAPDIETGFKACVEKGATHIAAVPLLLLTAAHAKRDIPEELARASSQYPSVSVAYGKPIGVDQEVVKAVFTRIEETGTPYEHARVVLIGRGSSDPDVKRDVYDICERLRDLTPVDEVIPCFMTACEPHYLDVFKQLKERDGKTTFIVPYLLFTGMLMNEIERETAKLKETNPNVVLTDYLGFHPHVKNAFLHRVEEAVINKAGRFDFTGASDAAAAH

SEQ ID NO: 6779 - protein, 164 aa, Bacillus licheniformis
MLPLHINMKGKAAVIAGGGKIAARRLKTVLAEGASATVISPEASEEMLGLINEHGIEWKKKKAEPGDFKNAFLIILATDDHEANKRLAASAAPEQLVNVASEAELGNVYVPKIINRGNITISVSTNGASPRHTIRLAGQIDDLIDDELVQEIDELFRKRRGLNP

SEQ ID NO: 6780 - protein, 577 aa, Bacillus licheniformis
MSFDGIFTYGMIEELNEAIRGGRIAKIHQPFKHELVFHIRANGKNRKLLLSAHPSYARVHLTNETYDNPSTPPMFCMLLRKHLEGGFIDQVEQIGMDRMMVFHIRSRNEIGDTLTRKLMVEIMGRHSNIVLTDGEKDVIIDSLKHLSPAMNSYRTVLPGYDYILPPAQNKLSPLEAETEDILRHLNFQEGKLDRQIVDTFSGVSPLFAKEAVFRAGLANRATLPNVLTEMFSEIKSRRFQPQLVTTEDGKEYFYLLELTHIKGDNRPFHTLSELLDRYYFGKAERDRVKQQAHDLERFAANEKKKNENKIKKLKKTLEQSEHAQDYQLYGELLTANLYQLEKKGTKEAKVINYYDENGGKITIPLNPNKTPSENAQSYFTKYQKAKNSVEVVKEQIKLAEEEIAYFDQLIQQLSSASPKDITEIREELAEGKYLRAKQQGGQKKQKKQAPTLEAYESSSGETILVGKNNKQNEYLTMKLAARDHIWLHTKDIPGSHVVIQSTDPDEQTILEAAQIAAYYSKAKNSASVPVDYTKIRHVKKPNGAKPGFVTYDSQQTVFVTPDEDLIIKLKKIIMPKA

SEQ ID NO: 6781 - protein, 893 aa, Bacillus licheniformis
MKWHEMGQTELLNITKTSIDKGLTEKEAGKRLERHGTNELQEGEKTSAVALFFSQFKDFMVLVLLAATLISGFLGEYIDAIAIIAIIAIIFVNGILGFFQERRAERSLEALKELSAPQVAVLREGNWVKIPSKELVPGDVVRFASGDRIGADLRLVETKSLEIEESALTGESLPVSKQADAFQASDVSLGDLKNMAFMGTLVTRGSGIGVVIGTGMNSAMGKIADMLESAGNTATPLQRRLEELGKILIVAALFLTLLVVAAGVIQGHDLYSMFLAGVSLAVAAIPEGLPAIVTVALSLGVQRMIRQKSIVRKLPAVETLGCASIICSDKTGTMTQNKMTVTHVWSGGKIWNVSGIGYEPEGSFSMNGRDVQAKHHKPLQQVLLFGALCNSSSIIEKDGEFRLDGDPTEGALLTAARKAGFTDKYVDEHFKIIEEFPFDSTRKMMSVIVEDKSGKRFVITKGAPDVLMKRSSHTLTEEKREIFTKERLAETSAALETLASQALRTIAVAYKPIKDTENPPLEKAESGLTFIGLLGMIDPPRPEVKTAIKECREAGIKTVMITGDHVITATAIAKDLGLLPPRGKVMDGQMLNELSQEELAEIVDDVYVFARVSPEHKLKIVTAYQENGHIVAMTGDGVNDAPAIKQADIGISMGITGTDVAKEASSLILVDDNFATIKSAIKEGRNIYENIRKFIRYLLASNVGEILVMLFAMLLALPLPLVPIQILWVNLVTDGLPAMALGMDQPEDDVMQRKPRSPKEGVFARGLGWKVVSRGFLIGIATLGAFMFIYNRNPEALEYAQTVAFATLVLAQLIHVFDCRSERSIFDRNPFENIYLLGAVLSSILLMLVVIYYPPLQPIFHTVPILMADWLLIVGMSAIPTFLLAGSLLTRKK

SEQ ID NO: 6782 - protein, 291 aa, Bacillus licheniformis
MIRSMTGFGSASKTKDGLTAAVELKSVNYRFKEVNARMPRPLLYLEDKIKQTIFKHIQRGRLELFVSVDDEALVTRKIQVDWPLLEEYQKAAREMKDRCGLSGDITLQDAFQFEHVIQVEEEPIQNDKLEEVLLEAVEAAVLELCSMREAEGLRLKDDCLQHIERLEKLTDDIAELAPKVVDHYRERLEARLEEWSTDGLDESRLLTEVALFADRSDITEEVTRLKSHFRQFRDICKAGGAAGRKLDFLVQELNREANTIGSKANDHQITKHVVEMKSSIEKIKEQVQNIE

SEQ ID NO: 6783 - protein, 89 aa, Bacillus licheniformis
MTIKLINIGFGNIISANRLISIVSPESAPIKRMIQDARDRGMLIDATYGRRTRAVVIMDSDHIILSAVQPETVAQRLSVKEEIMDEGQG

SEQ ID NO: 6784 - protein, 204 aa, Bacillus licheniformis
MKERGLLIVLSGPSGVGKGTVRQALFAQEDTKFEYSISVTTRKPRQGERDGVDYFFKTREEFEEMIENNKLLEWAEYVGNYYGTPVDYVEQTLESGRDVFLEIEVQGALQVRKAFPEGLFIFLAPPSLAELKNRIVTRGTETEALIENRMKAAKEEIELMDAYDYVVENDSIELACERIKAIVLAEHLRRDRVAPRYKKMLEVE

SEQ ID NO: 6785 - protein, 66 aa, Bacillus licheniformis
MLDPSIDSLMNKLDSKYTLVTVSARRAREMQMNKDTQIENPKSHKFVGKALEEIDAGLLTFEKENR

SEQ ID NO: 6786 - protein, 405 aa, Bacillus licheniformis
MLKNRNILLGVSGGIAVYKAAALTSKLVQAGANVKVIMTKSACEFVSPLTFQALSRNEVYTNTFEEPNPRVIAHIDAADWADLVIVAPATANVIGKLASGIADDMLTTTLLATTAPVWIAPAMNVHMYDHPAVQRNISVLYKDGYRFIEPSEGYLACGYIGKGRLEEPERIVQLAESYFSSEKSGLLEGKRVVITAGPTREQVDPVRFFSNRSTGKMGYAFAEEAARMGAHVTLIAGPTSLDDPAGVDVIHVESAEDMYQAALSVFDESDIVIKTAAVADYRPKHVHDQKMKKKDGGLVIELERTKDILKALGERKTKQILVGFAAETQHVEDYAKQKLETKNLDMIVANNITAEGAGFGTETNIVTVFHRDGKKTAHPLMSKREVAAAVLKEAAELAGRSGTSS

SEQ ID NO: 6787 - protein, 805 aa, Bacillus licheniformis
MNFAEVIVDVTTKNIDRPFDYRIPDKFKGMIKKGMRVIVPFGARKIQGFVTSVKESSELAGRSVKDIEDILDLAPVLTEELLELSDWLTEKTLSFKITALQAMLPAAMKAKYGKEIKVIGDKPLPEPLKTLFSQKETLSYSDINDHGTLKLIQRQVQEGNLEVAYKVKQKTNKKMRRMIAPLCAKEHLKEALAGLSPQAVKQKAILQFFIDRKEGGAVPAKDLIDKTGGSSASLKALIDKGLLKESEEEVYRDPYQDRMFKKTEPLPLTEEQAQAYEAIADAIEEKRHDVFLLHGVTGSGKTEVYLQSIEKVLEAGKEAIVLVPEISLTPQMVNRFKGRFGSQVAVLHSGLSTGEKYDEWRKIHRKEVRLVVGARSAIFAPFENLGMIIIDEEHETSYKQEEMPRYHAKEAAIQRAEYHQCPVVLGSATPTLESFARAKKGVYKLLSLKHRVNHQVMPDVSLVDMREELRSGNRSMFSKDLMAGLEETLEKGEQAVLFLNKRGYSSFVMCRDCGYVIQCPHCEISLTYHRYGQRLKCHYCGYETGMPSSCPECGSEHIRYFGTGTQRVEEELTKVLPAARVIRMDVDTTSRKGAHEKLLTSFGRGEADILLGTQMIAKGLDFENVTLVGVLSADTMLHIPDFRAAEKTFQLMTQVSGRAGRHEKPGKVIIQTYTPSHYSIQLTKTHDYETFFRQEMLHRREQAYPPYYYLALVSVSHEEVTKAALVTEKIATYLKKNISSEAKILGPVASPIARIKDRYRYQCVIKYKQENQLTSLLKNIMDHYKRDIEQKQLAISIDMNPYMMM

SEQ ID NO: 6788 - protein, 160 aa, Bacillus licheniformis
LAVKPIVTYPAEVLETPAEPVASFDKSLKKLLDNMYDTMLELDGVGLAAPQIGVSKRAAVVDIGDDTGRIELVNPEVIEESGEQTGPEGCLSFPDLYGEVKRSDYVKVKAFDRRGKPFTIEAEGFLARALLHEIDHLDGILFTSKVTRYYDAEELEEMEG

SEQ ID NO: 6789 - protein, 316 aa, Bacillus licheniformis
MTRIVFMGTPDFSVPVLGTLIDDGYEVVGVVTQPDRPKGRKKVMTPPPVKEEALRRGIPVLQPEKVREEAETDKILALEPDLIVTAAFGQILPKKLLDYPKYGCINVHASLLPELRGGAPIHYAILEGKEKTGVTIMYMVEKLDAGDMLAKVEVDIEETDNVGTLHDKLSKAGAALLSETVPRIIDGSVTPEKQDEQKATYAPNIKREQELIDWSKPGEVLYNQVRGLNPWPVAYTVLNGQTLKVWAAKKCQALKQAEPGEIVTVEKDGIVVATGNDTALKLTEVQPAGKKRMKAEDFVRGAGLQAGMKLGHDDEK

SEQ ID NO: 6790 - protein, 448 aa, Bacillus licheniformis
MKNNVREVALDALIKLDQNQAYSNLLLQSAMKANDLSDKDRGLLTELVYGTLQNKLALDYMLKPFIKKPEKVKDWVIHLLRMSLYQMEYLEKIPDRAALFEAVEIAKRRGHKGISSFVNGVLRSVQREGVPSFADIADPIERLAVETSHPEWLVREWTDAYGFEAAEQICRIHMIPPKQTIRVNRLKNDRDTLLSRLNEAGIEAEEGDLSKDAVKLLKGTIASTPFFKEGEVTIQDESSMLVARALGPERGETVLDACAAPGGKSTHIGELLEDTGKVVSLDLHQHKVKLIKEAAGRIGLSNIEARALDARKAGEVFEPEQFDRILVDAPCSGFGVIRRKPDLKYSKTPEDSARLAGIQLAILNEIAPLLKTGGTLVYSTCTMDPTENEQVMHAFLEEHDEFEADPTLAERLPEKAAPYVKDGSIQILPHYFGTDGFFICSMRKKGSQ

SEQ ID NO: 6791 - protein, 361 aa, Bacillus licheniformis
MESKQKVRKELRTERPSIYSFEIEELKSWLSENGEKPFRAAQIFEWLYEKRVTSFEKMTNLSKELRTKLNEHFVLTTLKTAVKQTSQDGTMKFLFELHDGYTIETVLMRHEYGNSVCVTTQVGCRIGCTFCASTLGGLKRNLEAGEIVAQVVKVQQALDETDERVSSIVIMGIGEPFDNFQEMLAFLKIVNHDKGLNIGARHITVSTSGIIPKIYEFADEKLQINFAISLHAPNTEIRSRLMPINRAYKLPDLMKAVDYYIKKTGRRVTFEYGLFGGVNDQVEHAEELAELLKGIKCHVNLIPVNYVPERDYVRTPKEQIFAFEKTLKSHGVNVTIRREQGHDIDAACGQLRAKERQEETR

SEQ ID NO: 6792 - protein, 254 aa, Bacillus licheniformis
LKTALKTDRGKIRQHNEDDAGIFTEKNGLVLAVVCDGMGGHLAGDVASRMAVSALRDIWEETEEVPASPAESEAWLKEQISAVNQKLFDHSRAHEECQGMGTTVVCALYTGKTLTVAHIGDSRCYLLQGGSFIQLTEDHSLVNELVRTGGISKEDAEHHPRKNVLTKALGTDPEVKVEAHTFEIEPGDQVLLCSDGLTNKVDDETLKDMLTTLSSAEEKADQLVQLANDNGGEDNITVALLELPSQIEEGEDKC

SEQ ID NO: 6793 - protein, 657 aa, Bacillus licheniformis
VLIGRRISGRYEILRAIGGGGMANVYLALDIILDREVAIKVLRFDFVHDADFIRRFRREAQSAASLDHPNIVSIYDVGEEDDIYYIVMEYVEGMTLKEYINRTGPLHPKEAVQIMEQIVSAIAHAHDNQIVHRDIKPHNILIDHMGHIKVTDFGIAMALSSTTITHTNSVLGSVHYLSPEQARGGLSTKKSDIYSLGIVLFELLTARMPFEGESAVSIALKHLQSETPSVKRWNPAVPQSIENVVLKAMAKDPFHRYEAAEEMENDLKTAFDPDRLNEKRFTIPSDDEMTKAVPIIKNLPENGSSSQSGGGEEEAAPLSKKEKKKQAKANKKKKRKKWPLILLTVFFVLAASAVLALTVFPSLFIPKDVAVPDVAGLEYEEAVIKLEDEGFEVDPNAEDIADDKIEEGLIVKTDPAAGDIVKEGSTVKLYKSSGKEKTEVDDVVGQKVDVAKKLLEQKGFKNIKTEEVHDEEEAGTIIEQDPAAGTEIVAADDEVKLTVSLGPEAITLRDLKTYSKQAASGYLDDHQLVLVEKEAHSEDVPEGQVIKQKPEAGASVKPGDKVEVTFSLGPKQKPVKTVTEKIDIPYEPGAAGEEQNVQISIDDEEHSISDVYENFKITAPAERTIKFRIAPGQKGYYQVTINDKVVRSKTIEYPEDE

SEQ ID NO: 6794 - protein, 294 aa, Bacillus licheniformis
MPEGKIIKALSGFYYVLDGDQVIQCRGRGVFRKNKVTPLVGDDVVYQADNDKEGYILEIKDRFNELVRPPISNVDQAVLVFSAKEPTFSTSLLDRFLVLVEAGDIRPIICITKMDLVDDDALKEQIHQYAEDYRNIGYSVYLTSMKSGRGIEDIIPHFQDKITVFAGQSGVGKSSLLNAISPDLELKTAGISAHLGRGKHTTRHVELIDINGGLVADTPGFSSLEFAGIEAEDLGQTFLEIGEKSAECKFRGCLHIKEPNCAVKRAVENGEIAQYRYNHYVEFLTEIKDRKPRY

SEQ ID NO: 6795 - protein, 218 aa, Bacillus licheniformis
MVYVAPSILSADFARLGEEIRDVEQGGADFIHIDVMDGHFVPNLTIGPLVVEAVRPITELPLDVHLMIEAPDRYIPAFAKAGADILSVHVEACPHLHRTIQLIKEQGVKAGVVLNPHTPVQQIEHVLEDLDLVLLMTVNPGFGGQSFISSVLPKIRQVKEMAEQKGLADLLIEVDGGVNKNTARQCIEAGANLLVAGSAVYNEKDRKKAISDIKGALG

SEQ ID NO: 6796 - protein, 214 aa, Bacillus licheniformis
MKTINIVAGGPDHLIPDLLQYQAGDALWVGVDRGAVTLLDAGIVPDEAFGDFDSITDEQKKAIEKAAPRLHIYQAEKDQTDLDLALSWAVGQRPSFIRMFGISGGRADHFLGNLHLLYTAMKQNVKTVMIDRQNTISMHPPGSYTVMHDQTKPYISFLPFAETVKNLSLEGFKYSLNKCHIALGSTLCISNELIHSQGAFSFSEGILIMIRSTD

SEQ ID NO: 6797 - protein, 26 aa, Bacillus licheniformis
MKFYTIKLPKFLGGIVRAMLGSFRKD

SEQ ID NO: 6798 - protein, 62 aa, Bacillus licheniformis
MARKCVITGRKSRSGNSRSHAMNASKRTWGANVQKVRILVNGKPKKVYVSARALKSGKVERV

SEQ ID NO: 6799 - protein, 120 aa, Bacillus licheniformis
VSIEFRTKYGQIDISNEVVAMVAGGAAIDCYGIVGMASKNQIKDGLTEILRKENFARGVIVRQEEDRIHIDMYIIVSYGTKISEVAHNVQTKVKYTLDHTVGLAVDSVNIYVQGVRVTNP

SEQ ID NO: 6800 - protein, 556 aa, Bacillus licheniformis
VSIRNLDGKAFADMILYGAHHLSQNANVVDALNVFPVPDGDTGTNMNLSMTSGAKEVEQIDTANIGKVAQSLSRGLLMGARGNSGVILSQLFRGFGKSIEQKSEINAKEFAAAFQAGVDTAYKAVMKPVEGTILTVAKDAAKKAVLAAQTETDIIKVMEAVVNQAEASLERTPELLPVLKEVGVVDSGGKGLLYVYEGFLASLKGEKLSDKAAALPSLDDLVSAEHHKNAQSHMNTEDIEFGYCTEFMVKLDSGKRNFNEDAFRQDLSRFGDSLLVVSDENIAKVHIHAEYPGEVMTYAQKYGSLINMKIENMREQHSAILSQNKQETAPAEKAPADKQPYGIVTVAMGEGIAELFESIGATKIIEGGQTMNPSTEDIVQAIKDANADTVVILPNNSNIVMAANQAADVAGQHVIVIPTKTVPQGMAALLAFNPALSADENEAAMLGAIGEVKSGQITYAVRDTNIDGIDIKKGDFMGILNGKIVETASDQLTAAKKLIAGMIDEDSEIVTVIKGEDAPEEEAEELAAYISETYEDVEVEVHDGKQPLYSYILAVE

SEQ ID NO: 6801 - protein, 220 aa, Bacillus licheniformis
MKYRSVFDIIGPVMIGPSSSHTAGAARIGRVARSVFGREPKQIIVSLYGSFAETYKGHGTDVAIIGGLLDFDTFDERIKDSIRLAEEKGIAIEFREEEAVPKHPNTARILISDDEGSLELAGISIGGGKIEIIELNGFELRLSGNHPAILVVHNDRYGTIAGVANVLAKFAINIGHMEVARKDVGQEALMTIEVDQTIDPAVFDELRALPNIIEVTQIAD

SEQ ID NO: 6802 - protein, 300 aa, Bacillus licheniformis
MFRNVKELIQLTKEKNVSISEIMITQEIEVTGRTREDIFKQMEANLAVMEDAVQKGIEGVVSHSGLTGGDAVKLQAYLKSGKGLSGAVILDAVSKAVATNEVNAAMGTICATPTAGSAGVVPGTLFAVKEKLHPTKEQMVRFLFTSGAFGFVVANNASISGAAGGCQAEVGSASGMAAAAIVEMAGGTPEQCAEAMAIALKNVLGLVCDPVAGLVEVPCVKRNAMGAANAMVAADMALAGITSRIPCDEVIDAMYKIGQTMPTALRETGRGGLAATPTGKELEKKIFGGASAARGTQSAT

SEQ ID NO: 6803 - protein, 682 aa, Bacillus licheniformis
VEHNLQLSISVIKGVGTETEKTLNELGIYTVLDLLNYFPYRYDDYELRDLEDVAHDERVTVEGKVHSEPSLAYYGKKRSRLTFRLLVGNYLITAVCFNRPYLKKKLAIGSIVTVTGKWDKHRQSVMVQELKNGPHQGDQSIEPVYSVKENITVKTMRKLIQEAVRSHLPFAEDPLPEKLRTAYKLLSYQEAVKAMHKPESREALKHARRRFVYEEFLLFQLKMQALRKFEREASDGISHTFRLEDVNSFVKSLPFPLTNAQAKALDDILRDMASGYKMNRLLQGDVGSGKTAVAAIALYASLLSGFQGAMMVPTEILAEQHADSLVSLFEQHDVNVALLTSSVKGKRRRELLERLKEGEIDILVGTHALIQDDVHFKQLGLVITDEQHRFGVEQRKKLRSKGKDPDVLFMTATPIPRTLAITVFGEMDVSVIDEMPAGRKRIETYWVKHDMLERILAFIDKELKKGRQAYVICPLIEESDKLDVQNAIDVHSMLTHAFRGRWQIGLMHGKLSNDEKEQVMRQFSKNECQILVSTTVVEVGVNVPNATVMLIYDADRFGLSQLHQLRGRVGRGDHQSYCILMADPKSETGKERMSIMSETTDGFELSEKDLELRGPGDFFGKKQSGMPEFKVADMVHDYRALETARRDAAELVSSKAFWTDAEYKSLREHLQNSGVMDGEKLS

SEQ ID NO: 6804 - protein, 188 aa, Bacillus licheniformis
MRKSKRERQELLQQTIRTTPFITDEELAEKFNVSIQTIRLDRLELSIPELRERIKSVAEKSLEDEVKSLPLDEVIGEIIDLELDEHAISILEIRREHVFSRNQIARGHHLFAQANSLAVALIDDELALTAKADIRFTRQVKQGERVVAKAKVVKLDKDKGRTVVEVNSYVAEEPVFSGEFVMYRSKQS

SEQ ID NO: 6805 - protein, 330 aa, Bacillus licheniformis
MKIAVDAMGGDNAPKAVIEGVMKAVEDFEDLEITLIGDREKIAAHLTEHGRITVKHAEEVIEATDEPVRAVRRKKNSSMVLMAGEVAEGRADACISAGNTGALMTAGLFIVGRIEGIERPALAPTLPTVSGDGFLLLDVGANVDAKPEHLVQYAIMGSVYGEQVLGVKNPRIGLLNVGTEDKKGNELAKQTFQKLKETDLNFIGNVEARDMLDGVADVIVTDGFTGNVALKTVEGAALSIFKMLRTTLTSSFTAKLAASALKPKLKEMKTKMDYSEYGGAGLFGLKAPVIKAHGSSDGRAVYHAIRQAREMVSQNVAAFIEEKIQQKADE

SEQ ID NO: 6806 - protein, 319 aa, Bacillus licheniformis
MGKIAFLFPGQGSQHIGMGHELYEKEPNAKKIFEEADQTLETKLSTLMFEGDAKELTLTYNAQPSLLTASIAALEKLKEYGIKADYAAGHSLGEYSALVAAGALSFKDAVYAVRKRGEFMNEAVPAGEGAMAAILGMDSQALKEVTDKISEEGNLVQLANLNCPGQIVISGTAKGVELASELAKEKGAKRAIPLEVSGPFHSELMKLAADKLREVLDACTINDAAIPVVSNVTADFVTDKDDIKNKLIEQLYSPVRFEETISRLIDEGVTTFIEIGPGKVLSGLVKKVNRRVKTIAVSDPNTIELAVQTLKEENENAGK

SEQ ID NO: 6807 - protein, 247 aa, Bacillus licheniformis
MLENKTAVVTGASRGIGRAIALDLAKNGANVVVNYAGNEAKANEVVDEIKALGRDAFAFKADVSNADEVQAMMKEAVGRFGTLDILVNNAGITKDNLFMRMKEDEWDDVININLKGVFNCSKAVTRQMMKQRSGRIINITSVVGVVGNAGQANYVAAKSGVIGLTKTLAKELASRNITVNAIAPGFISTEMTDKLTKDIQDEMLKQIPLARFGEPSDISSAVVFLASDHASYMTGQTLNINGGMAMV

SEQ ID NO: 6808 - protein, 77 aa, Bacillus licheniformis
MADALERVTKIIVDRLGVDEADVTLEASFKEDLGADSLDVVELVMELEDEFDMEISDEDAEKIATVGDAVNYINSKQ

SEQ ID NO: 6809 - protein, 249 aa, Bacillus licheniformis
MSKHSHFRDKKMFQKKAEQFKKFQERISVQFQNEKLLYQAFTHSSYVNEHRKKPYEDNERLEFLGDAVLELTISQFLYAKYPAMSEGDLTKLRAAIVCEPSLVSLAHELSFGELVLLGKGEEMTGGRKRPALLADVFEAFIGALYLDQGLEAVVTFLKAYVFPKIDDGAFSHVMDFKSQLQEFVQRDGRGILEYKILQEKGPAHNREFEANVSLKGEVLGVGSGRSKKEAEQHAAQEALAKLQKHHMKQ

SEQ ID NO: 6810 - protein, 1186 aa, Bacillus licheniformis
MFLKRLDVIGFKSFAERISVDFVKGVTAVVGPNGSGKSNITDAIRWVLGEQSAKSLRGGKMEDIIFAGSDSRKKLNLAEVTLTLDNDDRFLPIDFHEVSVTRRVYRSGESEFLINNQPCRLKDIIDLFMDSGLGKEAFSIISQGKVEEILSSKAEERRSIFEEAAGVLKYKTRKKKAENKLFETQDNLNRVEDILHELEGQVEPLKVQASIAKDYLEKKDELEKIEIALTAYDIEELHGKWEALQQKVEKAKDEEMSSSAAIQAKEAKIEEARDKIQALDESVDELQQVLLLTSEELEKLEGRKEVLKERKKNATQNRAQLEEAIVQRSEKERTLKEKIAAQKLVFEKLETEAKELARQVKEKNQALSGYSENVEEEIEQLKSDYFELLNEQASVRNELQFLEDQMTQSAAQQKRLAQNNEKYLSERKEIADQKMKTEHEFSLVDERLHSQIQAFRDAQKSYEQKKSQYEKKESALYQAYQYVQQARSKKEMLEAMQEDFSGFYQGVKEVLKAKSELPGIRGAIAELLKTDERYETAIEIALGATAQHVVTEDEDAARRAIQYLKKHSFGRATFLPLSVIKERRIQPRDIETAKENPSFIGIASELVSFDPAYRSVVQNLLGTVLITEHLKGANDLAKRLGHRYRIVTLEGDVVNPGGSMTGGAVKKKSSSLLGRNRELEAQTKRLAEMEEKTELLEKEVKALKQTIQELDAKLQSLREDGERLRSEQQEIKGRLYELEIAEKNVNSHLELYDQEKSALLEGDEDKKRRKEELEEKLASIAGELQRLDSEIEAMTERKQTQTSTKEALQSELTDLKVVLAKTEQSCANEREKLARLEEEYAENAEALKVAEEDLSFLTTEMSSNSSGEEKLEEAAKKKLNDKNKTAELIASRREQRMKLQKGLETEELELKEMKRQYKQMAGLLKDEEVKLGRMEVELDNLLSFLREEYGLSFEGAREKYPLELSPEEARKRVKLIKLAIEELGTVNLGSIEEFERVNERYLFLSEQKDDLLEAKNTLFKVIEEMDEEMTKRFAETFAQISSHFEDVFRALFGGGRAELKLTDPNDLLQSGVDIIAQPPGKKLQNLSLLSGGERALTAIALLFSILKVRPVPFCVLDEVEAALDEANVFRFAQYLKKYSHETQFIVITHRKGTMEEADVLYGVTMQESGVSKLVSVKLEETKELVQ

SEQ ID NO: 6811 - protein, 328 aa, Bacillus licheniformis
MSFFKKLKEKITQQTDSVSGKFKEGLAKTRNTFQERVNELVSRYRKVDEDFFEELEEVLIGADVGVATVMELIDELKSEVKRRNIQDPKEVQSVISEKLVEIYEGGEQEASELRVEDGRLNIILFVGVNGVGKTTTIGKLAHQFIKEGKNVVLAAGDTFRAGAIDQLEVWGERVGAHVVKQAEGSDPAAVIYDAVQAAKARGADVLLCDTAGRLQNKVNLMKELEKVKRVIQREVPDAPHEVLLVLDATTGQNAMTQAREFSKATDVSGIVLTKLDGTAKGGIVLAIRHELQIPVKFVGLGEKMDDLQPFEAESYVYGLFSDLIEKEE

SEQ ID NO: 6812 - protein, 107 aa, Bacillus licheniformis
MTLEKTTRMNYLFDFYQSLLTSKQKSYMSLYYLDDFSLGEIAEEYHVSRQAVYDNIKRTEAMLEQYEEKLLLFKKFQERKKIFEALRKLTDGQPEAESLIDALEKLD

SEQ ID NO: 6813 - protein, 446 aa, Bacillus licheniformis
MAFEGLADRLQQTISKIRGKGKVTEQDVKEMMREVRLALLEADVNFKVVKDFVKKVSERAVGQDVMKSLTPGQQVIKVVKEELTELMGGEESKIAAAKRPPTVIMMVGLQGAGKTTSTGKLANLLRKKHNRNPLLVAADIYRPAAIKQLETLGKQLDMPVFSLGDKVSPVEIAKQAIEKAKEDHHDYVLIDTAGRLHIDEELMDELEQVKETAQPEEIFLVVDSMTGQDAVNVAKSFNEQLGVTGVVLTKLDGDTRGGAALSIRAVTNTPIKFAGMGEKLDALEPFHPERMASRILGMGDVLTLIEKAQANVDEEKAKELEQKMKNMSFTLDDFLEQLGQVRNMGPLEDLIQMMPGAGKMKGLKNVKVDEKQLSHIEAIIKSMTGKEKEQPEIINASRRKRIAKGSGTSVQEVNRLLKQFEEMKKMMKQMTNMTKGKKKGFKLPFM

SEQ ID NO: 6814 - protein, 90 aa, Bacillus licheniformis
MAVKIRLKRMGAKKSPFYRIVVADSRSPRDGRFIETVGTYNPLAKPAEVKIDEELALKWLQTGAKPSDTVRNLFSKEGIMEKFHNAKQSK

SEQ ID NO: 6815 - protein, 76 aa, Bacillus licheniformis
LEELIVSLVKPLVDHPDDVQVFKEENPERIMFRLSVNREDTGKIIGKKGRTARAIRSVVFAAGAQSSKKVQLEIAD

SEQ ID NO: 6816 - protein, 128 aa, Bacillus licheniformis
MQIIQRVTVMQVLTENSKKKLLASFEERKEILERECNQLYFQLRKHEKEHHNPAATESFKKEIEKRQDKIKMIVFQINQIHTLPLGSEVKEKEIDALMDIEVGDNWHDMTAGKTIVIKDGIVIEIRPR

SEQ ID NO: 6817 - protein, 174 aa, Bacillus licheniformis
MLKQWFNVGKIVNTHGVKGEVRVISRTDFPEERYKPGNALYLFLEGKDEPVQVTVSAHRLHKQFHLLQFKEVETLTEAEKLKNALIKVPEDQLSQLAEDEYYFHEIIGCDVFSEDGDLIGKVKEILTPGANDVWVVARPGKKDALIPYIDAVVKEINVADKTIKIHIMEGLLDE

SEQ ID NO: 6818 - protein, 243 aa, Bacillus licheniformis
MKIDFLTLFPEMFEGVLGSSILQKAQDKDAVRFRVVNFRAYSDNKHQTVDDYPYGGGAGMVLKPQPVFDAVEKLTAEAGGSPRIILVCPQGERYTQQKAEELAREEHLMFICGHYEGYDERIREHLSTDEISIGDFVLTGGELPAMMIADSVVRLLPGVLGKEESHLEDSFSTGLLEHPHYTRPADYKGLKVPDVLTSGNHAKIKEWRRKESLRRTFLRRPDLLENYPLSEEERKWISEWKNR

SEQ ID NO: 6819 - protein, 38 aa, Bacillus licheniformis
VRNCSFVISSINFCIVFNSFQQMLLRELTGTAEHRFQT

SEQ ID NO: 6820 - protein, 115 aa, Bacillus licheniformis
MQKLIEEITKEQLRTDLPAFRPGDTLRVHVKVVEGNRERIQVFEGVVIKRRGGGISETFTVRKISYGVGVERTFPLHTPKIAKIEVVRHGKVRRAKLYYLRELRGKAARIKEIRR

SEQ ID NO: 6821 - protein, 38 aa, Bacillus licheniformis
VEKRLVLKKSDDNDNERKELVNHNKLFFCQTSINASHH

SEQ ID NO: 6822 - protein, 283 aa, Bacillus licheniformis
MVIQWFPGHMAKARREVTEKLKLIDIVYELVDARIPMSSRNPMIEDILKNKPRIMLLNKADKADSSVTKAWKQHFEKDGIPTLAINSVNGQGLNQILPASKELLKEKFDKMKAKGVKPRAIRALIVGIPNVGKSTLINRLAKKNIAKTGDRPGVTTAQQWVKVGKELELLDTPGILWPKFEDELVGLRLAATGAIKDSIINLQDVAVYGLRFLEENYPERLKKRYDLEEIPEEIAALFDEIGKKRGCLMAGGEINYDKTTEVIIRDIRTEKFGPLSFEKPEDM

SEQ ID NO: 6823 - protein, 255 aa, Bacillus licheniformis
VKTLTVKEIKEHLQSVSDEKDPFIEQCKNDERKSVQALVDAWLKKNERLSAMREEWQAMTSFERSLRARGYQYIAGIDEAGRGPLAGPVVAAAVILKEDCEILGLTDSKKLSKQKREDYYSYIMEEAAAVGVGIADAHEIDELNIYEASKAAMLKAVQALDVAPDYLLIDAMSLAVDREQSSIIKGDAKSASIAAGACIAKVTRDRLMDEYAEKYPLYGFEKHKGYGTKEHLNALAKYGPSPIHRRSFAPVKAHE

SEQ ID NO: 6824 - protein, 562 aa, Bacillus licheniformis
MMLNDVHNSLRKQFEQADSLQRISGTETDQKRLMLGKVLRFISEQFAEIQIGNTKWQGKLEAPLKAGAHYWFSYEKKPDEATGRLQVVEAFDKNPKTVQDAAFKLLNGLSLKRTKEAVFLVGALLKEQQPIRENDLRAAIKWLENLPKSDAQKGADAVMFALKRELPVHPGVLDSIMAVKSPVPLNEQIARTLDMIANAAQPSPGMEKLKQALLPVLQAETEVHAERLIQKLAEHIRSLEKGELQAVLPLKPQVQSEGGKPPQKADAGGAYGQEAKAAQHNPQIAAAKDVFAKLAAQAETNGTHIAREAAGVIRALESRGALGQAPAVLEGFTPKETELLQHIMKETAPALTNKADVLSVLLKIKDVLGVRDELSLLRAMENGAVLKEQGLQSLKLVLNEMRHASDLPAPVKQEADQIFHRLNGQLFLQNDQPAQSQLFLSYPLFSKNGVQDLNVFLKGQKKDDGKIDPSQCRLMFYLQLEALEETVIDCLIQQNVMTVTIETKFDLESLIEPLVPALKENLKELGYSLSGVSAKKRENMKLAPFLESRFEQITESAVDVKI

SEQ ID NO: 6825 - protein, 93 aa, Bacillus licheniformis
MKESVPLRRAVALHYDEMKDKAPKVVAKGSGYTAEKIIEEAQKAGVPIQEDATLVELMRHLELDDHIPEALYEIVAEIFSFVYTLDEKMKKRE

SEQ ID NO: 6826 - protein, 386 aa, Bacillus licheniformis
MNIHEYQGKEVLRKYGVAVPEGKVAFTADEAVKAAEALSSSVYVVKAQIHAGGRGKAGGVKIAKSKEEVKAYAEELLGKTLVTHQTGPDGQQIKRLLIEEGCDIKKEYYVGLVLDRATSRIVLMASEEGGTEIEEVAEKTPEKIVKEVIDPAVGLQSYQARKIAFAINIPKELVGQAVKFMMGLYKAFTEKDCSIAEINPLVVTGDGKVMALDAKLNFDSNALYRQKDILEYRDLDEEDPKEIEASKYDLSYISLDGNIGCMVNGAGLAMSTMDIIKHYGGEPANFLDVGGGATAEKVTEAFKIILSDQNVKGIFVNIFGGIMKCDVIAEGVVEATKQVGLTLPLVVRLEGTNVDLGKKILDDSGLNITSAESMADGAQKIVSLVK

SEQ ID NO: 6827 - protein, 300 aa, Bacillus licheniformis
MSVFINKDTKVIVQGITGSTALFHTKQMLEYGTKIVGGVTPGKGGTEVEGVPVFNTVEEAVKQTGANASVIYVPAAFAADAIMEATDAELDLVICITEHIPVLDMVKVKRYMEGKKTRLIGPNCPGVITPEECKIGIMPGYIHKKGHVGVVSRSGTLTYEAVHQLSEAGVGQSTAVGIGGDPVNGTNFIDVLKAFNEDPDTHAVIMIGEIGGTAEEEAAEWVKANMTKPVVGFIGGKTAPPGKRMGHAGAIISGGKGTADEKIKTMNACGIQVAETPSVMGETLIKVLKEKGLYETCKTH

SEQ ID NO: 6828 - protein, 300 aa, Bacillus licheniformis
MNDSSELLILLRLRGTLSPSLLTKWWKQDPSLSLTGEKNHLLTKLSLKRSDLCSIRKLAEQELSNVKRLIRSYEAAGVRMTAISSPDYPASLKTIHDPPPVLFLKGNKKLLHEQRLIGIVGTRCPSLYGKRAAVQLVRELCKNSWTIVSGLAKGIDGLAHQESIRSKGRTIGVIAGGFNSIYPREHRQLAGQMAESHLLVSEHPPHIKPQIWHFPMRNRLISGLTEGIVVVQGKEKSGSLITAYQALEQGREVFAVPGPIFDANSFGPSRLIQEGAKLVLTIEDILNELPPSNAQYTEPV

SEQ ID NO: 6829 - protein, 691 aa, Bacillus licheniformis
MSEYLVIVESPAKAKTIERYLGKKYKVKASMGHVRDLPKSQMGVDIEQNFEPKYITIRGKGPVLKELKTAAKKAKKVYLAADPDREGEAIAWHLAHSLDLDLNSDCRVVFNEITKDAIKESFKHPRMINMDLVDAQQARRILDRLVGYKISPILWKKVKKGLSAGRVQSVALRLIIDREKEINDFIPEEYWTIEGSFLKGKETFEASFFGINGEKHQLKSEDDVKQILSRIKGNKFEVKKVTKKERKRNPALPFTTSTLQQEAARKLNFRAKKTMMIAQQLYEGIDLGKEGTVGLITYMRTDSTRISNTAQEEAASFIGEQYGKEFLGSKRKPAKKNENAQDAHEAIRPTSVLRKPSDLKAVLGRDQLRLYKLIWERFVASQMAPATLDTMSVDLENNGLTFRANGSKVKFSGFMKVYVEGKDDQMEEKNKMLPDLAEGDTVLSKDIEPEQHFTQPPPRYTEARLVKTLEELGIGRPSTYAPTLDTIQKRGYVALDNKRFIPTELGEIVLDLIMEFFPEIINVEFTAKMEKELDDVEDGNIQWVQIIDSFYKDFEKRVEKAEAEMQEVEIEPEYAGVDCEACGHPMVYKMGRYGKFMACSNFPDCRNTKPIVKEIGVKCPSCKTGNIVERKSKKRRIFYGCDRYPECEFVSWDKPLERKCPKCEDMLVEKKLKKGVQVQCVNCDYKEEQQK

SEQ ID NO: 6830 - protein, 434 aa, Bacillus licheniformis
MNQTVNVIGAGLAGSEAAWQLAKRGINVRLYEMRPVKQTPAHHTDKFAELVCSNSLRANSLTNAVGVLKEEMRVLDSAIIAAADECSVPAGGALAVDRHEFAANVTEKVKNHPNVTVLHEEVTEIPEGPTIIATGPLTSEALSAKLRELTGEDYLYFYDAAAPIVEKDSLDMDKVYLKSRYDKGEAAYLNCPMTEEEFDRFYDALVSAETVPLKEFEKEIFFEGCMPIEVMAKRGKKTMLFGPMKPVGLEDPKTGKRPYAVVQLRQDDAAGTLYNIVGFQTHLKWGDQKEVLRLIPGLEQAEIVRYGVMHRNTFINSPSLLKATYQFKKRDDLFFAGQMTGVEGYVESAASGLVAGINAARLIQGKEPVTFSNETAIGSMAHYITETNKKNFQPMNANFGLFKELGVKIKNKQERNEQYASRALETIRNISKTL

SEQ ID NO: 6831 - protein, 304 aa, Bacillus licheniformis
MANVKNFLTLFIEYLQIEKNYSKYTIVGYISSIEDFERFLHVQGIKGFEDVTYPDVRIFLTEAHEKGLTRRTISKKISALRSFYKFLLREKLVKENPFLLVSLPKQDKRIPKFLYEKELEELFEVSDLSTPLGQRNQALLEFLYATGMRVSELCSLKESDLDLFLDTVLVHGKGRKQRYIPFGSFAREALDLYLQNGRRILLLKAKEPRPFIFLNQRGGPLTPRGVRYILGELVKKTSGTLHIHPHMLRHTFATHLLNEGADLRSVQELLGHSNLSSTQVYTHVSKDMLRKTYMSHHPRAHKGK

SEQ ID NO: 6832 - protein, 181 aa, Bacillus licheniformis
MSSFHATTIFAVQHNGKSAMAGDGQVTFGQAVVMKHTARKVRKLFNGKVIAGFAGSVADAFTLFEMFEAKLEEYNGNLQRAAVELAKEWRSDKVLRKLEAMLIVMNADSMLLVSGTGEVIEPDDGILAIGSGGNYALAAGRALKRHAGSQLDAKAIARASLETAGEICVYTNDQIIVEELE

SEQ ID NO: 6833 - protein, 467 aa, Bacillus licheniformis
MEKKPLTPRQIVERLDQYIVGQLNAKKAVAVALRNRYRRSLLDEKLREEIVPKNILMMGPTGVGKTEIARRIAKLVGAPFVKIEATKFTEVGYVGRDVESMVRDLVETSVRLVKEEKMNEVKGIAEENANKRLVRLLVPGRKKQTGAKNPFEMLFGGNQDQETGEAEKQEDADIENNRKRIAHQLALGELEDHYVTVEVEEQQPSMFDMLQGSGMEQMGMNMQDALSSLMPKKKKRRKLTVREARKVLTNEEAAKLIDMDEAAQEAVQRAEQSGIIFIDEIDKIAKKSGASSSADVSREGVQRDILPIVEGSTVMTKYGAVKTDHVLFIAAGAFHMAKPSDLIPELQGRFPIRVELQKLSIDDFVKILTEPDNALLKQYKALLKTEGISLEFSDDAIRKIAEVAYHVNQDTDNIGARRLHTILERLLEELSFEAPDVTMEEVVITPQYVEEKLGSIAKNKDLSQFIL

SEQ ID NO: 6834 - protein, 259 aa, Bacillus licheniformis
MALLQKTRKINAMLQNAAGKPVNFKEMAETLRDVIDSNIFVVSRRGKLLGFSINQQIENDRMKKMLEERQFPEDYTKSLFNIPETSSNLDINSEYTAFPVENRDLFQAGLTTVVPIIGGGERLGTLILSRLQEKFEDDDLILAEYGATVVGMEILREKAEEIEEEARSKAVVQMAISSLSYSELEAIEHIFEELDGNEGLLVASKIADRVGITRSVIVNALRKLESAGVIESRSLGMKGTYIKVLNNKFLMELEKLKSH

SEQ ID NO: 6835 - protein, 129 aa, Bacillus licheniformis
VDIFSGTIHRLEGALNQANIKQKVITNNLANVDTPNYKAKKVSFKNVLNEESSRINAIKTDYRHIDFKGNESNYSVVSRKNTTYQENGNNVDVDQEMSEMAKNQIQYQALVERISGKFNSLRTAITGGK

SEQ ID NO: 6836 - protein, 39 aa, Bacillus licheniformis
MGVFNSINISASALTAQRVRMDTVSSNLANMDTTESEAG

SEQ ID NO: 6837 - protein, 105 aa, Bacillus licheniformis
MVNGISPFGVQSVQAGTNATNQIKNKQDGSENQVSFSNVLKDSINALNQSQNESDKLTNALALGQDVNLDEVMIAAQKANITLTAATEFRNKAVEAYQEIMRMQM

SEQ ID NO: 6838 - protein, 533 aa, Bacillus licheniformis
MNRNLLQIKTKITDFWKNRSKLQKILLIGIVALAVILSIIIGIVASSNKMVPLYKDLSAEETGQIKQVLDEKGIPSEVATDGSVIKVPEEKVDELKVDLAAEGLPKSGSIDYSFFGENAGFGMTDNEFDVLKVKATQTELSNLIKGIDGIKDSKVMINLPKESVFVGEEKPEASASIVLQVKPGHTLDQNEINGLYHLVSKSVPNLDPKNIVIMDQNSTYYDQTGKESGSYADSYSSQREVKAQIEKDLQRQIQTMLGTMMGQDKVVVSVTSDIDFTKENRTEDLVEPVDKENMEGITVSAERVSETYSGQGAQAGGVNGTGENDVTNYAETEGGTGNGDYEKSEERINNEVNRIHKEIAESPYKIRDLGVQVMVEPPDANNPQSLPAEREDDIKKILSTIVKTSIDKNYEEEPLTDEDVENKIVVSVQSFDGKQTIDEGTETGGIPMWAYIAGGAALVAVIGLIIWLVRRRKNRDDEYEEEWYETPQEPIRVADVNNEKETEETVRRKQLEKMAKDKPEEFAKLLRSWLTED

SEQ ID NO: 6839 - protein, 338 aa, Bacillus licheniformis
MAKMKQDRLTGKQKAAILMISLGLDVSASVYKHLTDEEIERLTLEISNVRAVSPEKKDEIIQEFHETAIAQEYISQGGIHYAKQVLDKALGEDKAASIINRLTSSLQVRPFDFARKADPEQILNFIQHEHPQTIALILSYLDPVQSGQILSELNQDVQAEVARRIAVMDRTSPEIINEVEQILEQKLSSTFTQDYTQTGGIEAVVEVLNGVDRGTEKTILDALEIQDPELADEIKKRMFVFEDIVTLDNRAIQRVIRDVENDDLLLSLKVASEEVKDIVFSNMSQRMAETFKEEMEFMGPVRLRDVEEAQSRIVSVIRRLEEAGEIVIARGGGDDIIV

SEQ ID NO: 6840 - protein, 252 aa, Bacillus licheniformis
LSNIIKQRLSSIPQKERRTISLKEVKLPETETELDTGQDPEYLLDHARQEAGKIYEKASAELEQVRRQIEEERSSWETEREALIDQAKQEGFQAGFEEGKAEARSAYQAYLDEANAIVRAARRDYEEKIEQSSEEIVELAVSLAKKVWNQKADDKEAFTALVKQVLSEMKEFDDIAIYVDPEYYTEVQSHKNELEQLLQYGAHIAIYADEKAPKGTCYVETAFGRIDAGIDTQLQQLKQKLLSLLETAGVVR

SEQ ID NO: 6841 - protein, 437 aa, Bacillus licheniformis
MLKQLLECIETADSYKRYGKVKQAVGLMIESKGPECSIGDVCKIYTKGDGPKAIKAEVVGFKDQNILLMPYLEAANIAPGSIVEATGESLRVKVGSGLIGQVVDAFGNPLDGSVLPKGLAQVSTDQAPPNPMKRPPIREKMAVGVRSIDSLLTVGKGQRVGIFAGSGVGKSTLMGMIARETAADLNVIALVGERGREVREFIEKDLGEEGLKRTIVVVATSDQPALMRLKAAYTATAIAEYFRDKGQNVMFMMDSVTRVAMAQREIGLATGEPPTTKGYTPSVFAILPKLLERTGTTESGSITAFYTVLVDGDDMNEPIADTVRGILDGHIVLDRALANKGQFPAVNILKSISRVMSNIAEKDHIRAANRFREMLSTYQNSEDLINIGAYKKGSSREIDEAIQFHPKLISFLKQEVDEAASLEESISLLKSLTGRED

SEQ ID NO: 6842 - protein, 147 aa, Bacillus licheniformis
MAYSFKFQKLLELKENEKDQSFAEYQHSVSEFEKVAEKLYESMSQKETLEKNKEIKMQTGMSVQEMRHYQQFVTNLETTIYHYQKLVMMKRNEMNEKQHDLTEKNIELKKFEKMKEKQFEMYSLQNKANELKEMDDISIAQYITQGS

SEQ ID NO: 6843 - protein, 203 aa, Bacillus licheniformis
MTEEKKAGKFQTFLFVIVIPLIFLIVVAFVGMWLLGVNFQDVASKIPVVKELVKNGEDQDIDHATKQQENKAEKLQKTIDEQKSEIETLTSDLKTSDQEIKRLKQKISSLEKTEKDEKEQDKKNAEGQGDGKVVKIYESMQSNKAAKILSELKEEEAINILDSLSKKKVTEILSKMSPDKAAVFTEKLVKNEAKNEAKKEGGE

SEQ ID NO: 6844 - protein, 459 aa, Bacillus licheniformis
LRLFDVISFDAKPAVDTAPAKTSRTPLGALFQNVLQKENSSLSPFQKGEEPSQDTPLEGLLHELKQWLSNKEDSSFNEDWLNSLQQLEELNASPDELALAEQLLQQIKELLEKAALPEQSGKTADAKALPADESGTEEPKKPDLQILGQIQQLLAAIVNENQPSLKTSQIAELLKQAPEFLAALQTKAGAEGLIDELKRQFFTKDPSQSQLLSMSNTELKSLKSLMEQMMNANAEPDQKEWKMAESELKAMLMSKKTDVSLSEKPLSFVLNRREIQTEGKQGQKEQPIQSSVLANHRTGTALIQGLQPSAAEEASAQPKSFSEQILSSWKQMKYTPFGRSTGSFTIRLNPENLGFITIKLVKQHGMFSSKIIASTQSAKELLEHNLAHLKQALPNMSVQIDRFGVPLQNSDQTFGQLADDEKNQHQPKQDQQSKQENEDFQEFLDELIETRSQDSEEEI

SEQ ID NO: 6845 - protein, 155 aa, Bacillus licheniformis
MSDTSIDTRTALGTTNTKSTTSDFLSEAKKAEKAGSGSNLGKDEFLKLLMKQLQYQDPLNPMEDREFIAQMATFSSLEQLTNLNTTMSTFVGLQDPMTMYVSWIGKEVTYEGEDSEEKTALVKSVKSSDGQYLLVLDDGTEVNPWNVTAVSHSDK

SEQ ID NO: 6846 - protein, 263 aa, Bacillus licheniformis
MLRSLYSGISGMKNFQTKLDVVANNISNINTAGYKKSRVTFKDIVSQQLSGASSSTANRGSVNGQQVGLGATIGSIDIIHTNAAPSTTGRQLDMTITGDGYFRVGSGDEVYYTRSGNFYRSDEGDLVTVDGLFVLTANNGRINIPQDAQSFSIAPDGTVSYVDQNNENQTAGQISLATFSNTSGLSKAGDNLYRETLSSGDPQVVVPGEGGSGKIQTSALEMSNVDLSEEFSEMIIAQRGFQSNAKIITTSDEILQELVNLKR

SEQ ID NO: 6847 - protein, 71 aa, Bacillus licheniformis
MIKVTRLNGQPFILNALFIEQIECFPDTTITLSNGKKFVVKEDEDTVVDTIVSFYQKIQILSCDQRIEESE

SEQ ID NO: 6848 - protein, 143 aa, Bacillus licheniformis
MNKKLLGIMMTIILAIAVLGTAAFFVIKGSASEKDQNAEPSIDEVVESSVEVAEITTNLKSDNVVRLSIKLETDSKEAKEELEKRDFQIKDSVISLLANTNADELEGQKGKEKFKEQLKEKLNTNYMKEGKVKTVYITSFNLQ

SEQ ID NO: 6849 - protein, 332 aa, Bacillus licheniformis
MAGEVLSQNEIDALLSAISTGEMDADELKKEESVKKVKVYDFKRALRFSKDQIRSLTRIHDNFARLLTTYFSAQLRTYIQISVSSVDQVPYEEFIRSIPNMTILNLFEVRPLEGRIMMEINPTIAYTMMDRVMGGIGSSHNKIDSMTEIETKIMSNLFESCLTNYKDAWESITEIEPEMSDFEVNPQFVQMVSPNETVVVISLNTQIGDISGVINLCIPHVVLEPIIPKLSVHYWMQSDRIEPKPEETKSIEKRILTAQIPIVAELGSSELTIEEFLNLEIGDCITLDKSVAEPLTVLVGDKPKFLAQAGRMNRKTAIQILDHDIRGEEYGE

SEQ ID NO: 6850 - protein, 377 aa, Bacillus licheniformis
MENNNRLSQDEIDALLKGGDDTAQEQPESGLSLMEQDTIGEIGNISFGSSATALSTLLNQKVEITTPTVSVIEKSHLNDEFPHPYVSIGVSYTEGFSGNNLLVIKQEDAAIIADLMMGGDGTNADPSLGEIHLSAVQEAMNQMMGSAATSMSTVFSKKIDISPPEVDLLDVKEGEGTEQIPKEDPLVKVSFRLKVGDLIDSHIMQLYPLTFAKDLIDELTNQDGGEEPVKTEEVQTPVQEKPAPNPNSAPAQTQRQEPAPKRQGTAKVSEPVQVAPAEFQSFAPQTEAQPHLQNLDMLMDIPLSVTVELGRTNRSVKEVLELSTGSIIELDKLAGEPVDILVNQRVVAKGEVVVIDENFGVRVTDILSQAERISKLR

SEQ ID NO: 6851 - protein, 120 aa, Bacillus licheniformis
MAYKILVVDDAAFMRMMIKDILVKNGFEVVAEAQDGAQAVEKYKEHSPDLVTMDITMPEKDGITALKEIKEIDPQAKIIMCSAMGQQSMVIDAIQAGAKDFIVKPFQADRVMEAINKTLS

SEQ ID NO: 6852 - protein, 224 aa, Bacillus licheniformis
LFKKPLIFIAGLCLCAFLALPYAPALAEESGDQTVDHLFEQKGAGKEKEKAKDKDKTEEKSSLKEEAETEPPSPSVSIFDFVKMIGALLFVIFLIYALVKFMNKRNRLLKPFQYVENIGGTSLGQNKSVQLIKVGNRVLVVGVGENIQLLKEIDDEKEYKEILTQHEAAMNSKIEWQKWMDQVKVPGVQKQSGTASFSESLKAQLAELKQNRAEGRKKGQNQHE

SEQ ID NO: 6853 - protein, 221 aa, Bacillus licheniformis
MNEFMDLFNSSDAANVSASVRLLLLLTVFSIAPGILILMTCFTRVVIVLSFVRTSLATQSMPPNQVLIGLALFLTFFIMGPTFSEINKEALTPLMNNKITLDEAYTKAEAPIKTFMSKHTRQKDLALFMNYAKMETPESINDIPLSTMVPAFVISELKTAFQMGFMIFIPFLIIDMVVASVLMSMGMMMLPPVMISLPFKILLFVLVDGWYLIVKSLLQSF

SEQ ID NO: 6854 - protein, 89 aa, Bacillus licheniformis
MNSEFVISMAERAVYVTLLISGPLLALALLVGLIVSVFQATTQIQEQTLAFIPKIVAVLVGLVVFGPWMLSTILSFATELFSNLNRFAG

SEQ ID NO: 6855 - protein, 258 aa, Bacillus licheniformis
MSIIESFPAFLLVFVRITAFYVTVPLFSYRTIPAVHKIGFAFFLALVSFQAIEKPPHLDVDGIYMMLAMKEALIGLLLGLIAYMMISAVQIAGSFIDFQMGFAVANVIDPQTGAQSPLVGQFLYTMALLLMLSLNAHHLLLDGIYYSYQYIPVDKMALSFGSEEFAEFIAKSFNTMFITAFQLSAPVVACLFLVDLALGIVARTVPQLNVFVVGLPLKIAITFIMLIICMAVMFSMMQHVFEFAIRTMRDLLTLLGVA

SEQ ID NO: 6856 - protein, 359 aa, Bacillus licheniformis
MKLTLDLQFFAGEKTEKATPKKRRESRKKGQVAKSADVNTAVTLLIVFLSFLFIGPFMRDRLLGLIEKYYKELITMKVSVANIPGLFQSVVLESGLIMAPLLLTAVVSGVLSNYMQVGFLFAPEAIKPDLKKLDPLNGFKRIYSIRAIVELLKSILKIVIVGGVTFAVLWLNFDKILRIPALSAGEALSYVGWLTFLMGVSAAVALIFLAVLDYLYQKFDYEKNIRMSKQDIKDEYKKTEGDPLIKSKIKQKQKEMAMRRMMQEVPKADVIITNPTHYAVALKYDENKMDAPFIIAKGVDLMALKIRQIAKEHDVMTVENRPLARALYDQVEIDQAVPEEFFKAVAEILAYVYKTKQKI

SEQ ID NO: 6857 - protein, 678 aa, Bacillus licheniformis
MSARDLSILSGVVLIVAMLIIPFPTWMLSILIIVNISLALIVLLTTMNMQEPLQFSIFPSLLLLLTLFRLGLNVSTTRSILSNGDAGKVVETFGSFVVGGNVLVGLVVFIILIIIQFIVITKGAERVSEVAARFTLDAMPGKQMSIDADLNAGMVTEQEAKVRREKVAREADFYGAMDGASKFVKGDAIAGIIIVLINVIFGIVIGMLQKQMSIQEAASHFTLLSVGDGIVSQLPALLISTATGIVVTRAASDGNLGHDITGQLFAYPKLLYVTAGTIFLLGIFTPIGILLTGPLALLLAAGGYMLSKAGEEKEKVEDILEEEAEVDELKSPESVVHLLDIDPIEFEFGYGLIPLADANQGGDLLDRIVMIRRQLALELGLVIPVVRIRDNIALQPNEYRLKIKGNEVAKGELLLDHFLAMSPTGEDDQIEGIDTIEPSFGLPAKWIPESQKDQAEMLGYTVVDPASVVSTHITEQVKKHAHELIGRQETKQLIDYLKESYPVLVEEVSPNPLSVGDIQKVLAKLLKEKVSIRNLVTIFETLADYGKLTTDSDMLTEYVRQALAKQITAQYAKENETLKVVTCSGRVEKAVAEGIQQTEHGNFLSLEPTLSENIIQSVAREIEQLSLRQEVPILLCSPPVRMYVKQLLERYFPDLPVLSYNELEANVEVQSIGVVDIQ

SEQ ID NO: 6858 - protein, 370 aa, Bacillus licheniformis
MKIKKFVAGSMQEATKQIIQELGNDAVILNSKKIQKRKFLGFVKKTGVEVIAVVDQDFSDARKQERQKPVFREQSPSPVPQPDHLDLASQVKELKELLEMRHHEQPVDVLPEPLKKADQLLAKKGVSPAIRTKALGRLISTSLRDGEEWTDEKTLAHLTDALADLLPDNLEQDVAIHSQYVVLFGSTGVGKTTTLAKLAASSVLEKQKKIAFITTDTYRIAAVEQLRTYAELLNAPLEVCYTKEEFKAAQQKFADFDHVFIDTAGRNFKDGQYVRELKEIIPFERKIQAFLVMSATSKYEDMKELIKQFSSIPIDQLIFTKVDETDSLGSVMNLLAESRIGLGYITNGQNVPEDIRYLSNAAFVRLLTGC

SEQ ID NO: 6859 - protein, 295 aa, Bacillus licheniformis
MDQAESLRRRMGQRFAEPPAAIAHPKAKTLAVMSGKGGVGKSNVSLNTALAILEKGKSVLLIDLDVSMGNIDILIGRQSLYTVMDLLQQKMPFERALSAGPRGLQYISGGTGLDAMFELNRENWAFFLKELTRALTSFDYVIFDMGAGLSKDQLPFVLSADEILVVTTPEPTSIMDAYSAIKHLALTGRDLQLKVVVNRCTTQKDGISAFLRLSNTVNAFLQQKLAYAGPIPEDPLVSRAVVEQQPFLIKSPRSKPSRAVYLLAESLLHNGRTEMGENRSFIEKLSSFLRRGNTL

SEQ ID NO: 6860 - protein, 357 aa, Bacillus licheniformis
MIRVLVVDDSAFMRNMITKFVTSNHEIAVAGTARNGEEALQKIKELRPDVITLDIEMPVMNGKETLKRIMASDPLPVVMVSSLTQQGADITIECLELGAIDFVAKPSGSISIDLYKVRDMLIEKVLTAGRVKLKGRQVPISKPAIETAKQPIVGGSDSVRFRAGKQLICIGTSTGGPRALQRVLPKLPKTLKAPVFIVQHMPKGFTASLANRLNHLSEVTVKEAENGERAKDGWVYIAPGGKNMAVGLEKGELVITLDDRDTESRHKPSVDYLFQSLASLREFEKIAVIMTGMGSDGTEGVKGLLKHGSGTVIAEAAESSVVFGMPKSVINNGLANDIKHVDEIAAAIMTYMKKERA

SEQ ID NO: 6861 - protein, 673 aa, Bacillus licheniformis
MDMNQYLDVFIEESREHLQTCNEKLLELEKNPTDLQLVHDIFRAAHTLKGMSATMGYEDMAHLTHSLENVLDAIRNEEMTITSEWMDVMFEALDDLEAIVLSIIEGGDGKRDVSEVCAKLDVTGANKEAAAAAEAPEAASSETKWSYDEFQRTVIAEAEEQGFKCFEIKVALKEDCLLKGVRVYMVFEQLNEVGEVVKTIPETEVLESEDFDSEFVICFLSKHGKEEIFNKINGVSEIEKIEVTELKNDFSAQEEAKPAASEKETAPKEAEKKPAKQPDGKKDAAKPAAGGGTKTIRVNIDRLDSLMNLFEELVIDRGRLEQIAKELEHSELTETVERMTRISGDLQSIILNMRMVPVETVFNRFPRMVRQLTKELNKKIELSIFGAETELDRTVIDEIGDPLVHLLRNSLDHGIEAPEVRVKNGKPETGQVRLKAYHSGNHVFIEVEDDGAGINRKKVLEKALERNVITEREAETIEDHEIDALIFAPGFSTADQISDISGRGVGLDVVKSKLESLGGSVSIKSSEGEGSLFSIQLPLTLSIISVLLVKLENETFAIPISSIIETAVIDKKDILQTHDREVIDFRGHIVPVVYLKEQFNVEDSSDDLDQLHVIVVKKGDKLTAFVVDSFIGQQEVVLKSLGDYLTNVFAISGATILGDGQVALIIDCNALIK

SEQ ID NO: 6862 - protein, 158 aa, Bacillus licheniformis
LTTQTTTGEKMIVFKVNHKEYAISVSEVMSIEKWQQPTRVPGVEPYICGVINLRGVVTPVIDLRKRIEAPGDTITDETRIIIITHQDIEVGWVVDEANDVITVEEEEIESAPETVGKDGRQWIKGIVKQGSRLLNLIDSEAVLNRKSSLAAASENVKK

SEQ ID NO: 6863 - protein, 209 aa, Bacillus licheniformis
MSVFNGIREEHLDILREVGNIGAGHSASALALLLNRKIEMEVPFVKLMSFDELVNLFGGADLPVASIFLRMEGDFPGSMFVIMPFSEAEQLIRELVGNPEFEIDSMTPNDIGASALHELGNIMAGSYLTALADLTNRQMYPSVPELTLDMFGAVISEGLIELSQVGDQVIVIDNSIFDEEHNRKVKAHLFLLPDYDSFEKLFHALGAAL

SEQ ID NO: 6864 - protein, 168 aa, Bacillus licheniformis
MKILEKETSIIRVGIADVKIVRTPDKIRTSGLGSCVGLVLYDLEAKTAGLVHVMLPDSSLSKTPDINVAKYADTAVEATVKMLLEAGCRKYALKAKMAGGAEMFKFKMTNDLMKVGPRNVLAIKKHLSLLNIPIVSEDTGGNSGRTIEFDPQSAELVIRTVKQGVTTI

SEQ ID NO: 6865 - protein, 254 aa, Bacillus licheniformis
MQSLNYEDQMLWSRWKEWKDPQAGDDLIRRYMPLVTYHVGRIAVGLPKSVHKDDLVSLGMLGLYDALEKFDPGRDLKFDTYASFRIRGAIIDGLRKEDWLPRTSREKTKKVEAAIEKLEQRYLRNVSPSEIAAELGMSEQDVVTTINEGFFANLLSIDEKLHDHEDGENVQVMIRDDKTSTPEEKMLKDELISQLAEKINELSEKEQLVISLFYKEELTLTEIGQVLNLSTSRISQIHSKALLKLKHLLDKVVQ

SEQ ID NO: 6866 - protein, 170 aa, Bacillus licheniformis
MSTILWLVSFTLHGILIYFVIILNTRLSAFKAAEKEQKQLLEETENTLTAFLMELKDENEKLVQEIRANAEKEPQRPETQPEIPAQTPVLPEADESRDLPLHIEAMINEVEQEEDELNQKEQEASISYEEEALALYEKGLSPEEIARQLKSGKTEIELFLKFRGKLKNDS

SEQ ID NO: 6867 - protein, 246 aa, Bacillus licheniformis
MSVISMKQLLEAGVHFGHQTRRWNPKMKRYIFTERNGIYIIDLQKTVKKVEEAYNFTKNLAADGGKILFVGTKKQAQDSVKEEAERSGMYYVNQRWLGGTLTNFETIQKRIKRLKDIEKMQENGTFDVLPKKEVVQLKKELERLEKFLGGIKEMKELPDALFIIDPRKERIAVAEARKLNIPIIGIVDTNCDPDEIDVVIPANDDAIRAVKLLTSKMADAILEAKQGEESVETEAKEAETTETTTA

SEQ ID NO: 6868 - protein, 293 aa, Bacillus licheniformis
MAITAQMVKELREKTGAGMMDCKKALTETDGNMDKAIDLLREKGIAKAAKKADRIAAEGLTLIKTDGNTGVILEVNSETDFVAKNEGFKELLNDLADHILAEKPESVEAAMGQKMANGSTVEEYITSAVAKIGEKITLRRFAVLTKGDDAAFGAYLHMGGKIGVLTVLNGTTDEETARDIAMHVAAVNPRFISRDQVSEEEANREREILTQQALQEGKPENIVAKMVEGRLNKYFEEICLLDQAFVKNPDEKVKQVVAAKNATVETFVRYEVGEGIEKRQENFAEEVMNQVKK

SEQ ID NO: 6869 - protein, 240 aa, Bacillus licheniformis
MEKPKYNRIVLKLSGEALAGEQGNGINPTVIQSIAKQVKEIAELDVEVAVVVGGGNLWRGKTGSDLGMDRATADYMGMLATVMNSLALQDSLETLGIQSRVQTSIEMRQVAEPYIRRKAIRHLEKKRVVIFAAGTGNPYFSTDTTAALRAAEIEADVILMAKNNVDGVYNADPRTDETAVKYEKLSYLDVLKDGLAVMDSTASSLCMDNDIPLIVFSIMEEGNIKKAVLGEQIGTIVRGK

SEQ ID NO: 6870 - protein, 185 aa, Bacillus licheniformis
VSTQVMNETKERMQKAISAYQRELATVRAGRANPSLLDKVAVEYYGAQTPLNQIASITVPEARMLVITPYDKTALGDIEKAIQKADLGVTPSNDGNIIRITIPPLTEERRKELAKLVKKYSEDAKVAVRNIRRDANDDLKKLEKNGEMTEDELRSSTEDVQKLTDEYVSKIDEITKDKEKEIMEV

SEQ ID NO: 6871 - protein, 260 aa, Bacillus licheniformis
MLNILKNWKNQHSAASNMECYTKENILKGEIPEHIAIIMDGNGRWAKKRAMPRIAGHHEGMKVVRQTTKLANELGVKALTLYAFSTENWKRPKLEVDFLMKLPEEFLGTYLPELVEENVRVRMTGDREGLPPHTIRAVEKAIRDTENNDGLILNFALNYGGRAEIVRAAKKIAEEAKKGTLNTEEIDEKLFSDYLMTETLQDPDLLIRTSGEIRLSNFMLWQLAYSEFLFTDVLWPDFKDVHLLQAIGEYQRRGRRFGGI

SEQ ID NO: 6872 - protein, 267 aa, Bacillus licheniformis
MKQRILTGVIAAAVFLPLVIFGELPFTLLVYAIGILALFELLRMKGLKLISAPGIISMLLLAVLLCPSQYAEDAGLGITKGEVVFLAVLLLLAYTVLSKNSFTFDEAAFVALAAVYIGFGFYYFIEIRNIGLSYVFFAIGVVWSTDSGAYFIGKAFGKRKLWPEISPNKTVEGFWGGILTAVVFSAIYQAATGFPHAYLFVLIITVLLSIVGQIGDLAESAFKRHYQVKDSGRILPGHGGMLDRFDSFLFVMPVLYFLLVLFQPFGL

SEQ ID NO: 6873 - protein, 383 aa, Bacillus licheniformis
LKNICLLGATGSIGEQTLDVIKAHDDKFRLTAMTFGKNAEKAAEIIETFKPKYVGVGDEHTYETLKQHSFSYTFKTGIGEEALIEAAVIPEADIVVNALVGSVGLLPTLKAMEHKKTIALANKETLVTAGHIVKEHAQKYDVPLLPVDSEHSAIFQALQGENPKHIKRLIVTASGGSFRDRTRRELEGVTVEEALNHPNWSMGAKITIDSATMMNKGLEVIEAHWLFDLPYDQIDVLLHKESIIHSMVEFHDRSVIAQLGTPDMRVPIQYALSHPERLPFNEAKSLDLWEVGQLNFAQADFERFRCLQFAYESGKIGGTMPTVLNAANEEAVAAFLSGRISFLGIEDIIEKALERHQVIAKPSLQEIREVDKDARKFVQTLLT

SEQ ID NO: 6874 - protein, 421 aa, Bacillus licheniformis
MFVNTVIAFILIFGTLVFFHELGHLILAQRAGILCREFAIGFGPKIFSFKKNETVYTIRLLPIGGFVRMAGEDPEMIEVKPGYTVGLLFDSENKVEKIIINQKEKYPDALVIEVEQADLEHQMRITGYEHGNEDHLSSFSVSETSFFIVDGEEVQIAPYNRQFHSKTVWQRIKAIAAGPIMNFILAYVILVMLGLMQGVPSDEPVLGKLIDNGRAAEAGLQEGDRIQTINGENMRSWTDIVNTVREHPEKELKIVLMRDNVKLTKYVTPEAVKAGDETVGRFGAYNPVKTGVLTSISYGATETATVAQSIVTNLGKLVTGQFSIDMLAGPVGIYDMTDQVAKTGVINLLKLAAFLSINLGIVNLLPIPALDGGRLLFLFIEAIRGKPINREKEAFVVFIGVAFLMLLMLVVTWNDIQRLFL

SEQ ID NO: 6875 - protein, 572 aa, Bacillus licheniformis
MRQSRTLIPTLREVPADAEAKSHQLLLRAGFIRQNTSGVYSYMPLANKVIHKIQSIVREEMEKINAVEMLMPALQQAETWQESGRWYTYGPELMRLKDRHGREFALGATHEEVITSIVRDEVKSYKRLPLTLYQIQSKFRDEKRPRFGLLRGREFIMKDAYSFHSSAESLDETYNDMYQAYTNVFTRCGLNFRPVIADSGAMGGKDTHEFMALSDVGEDTIAYSDQSSYAANIEMAEVKETDAGEQAEMKELQEVHTPSVKTIEEVAAFLGISPSDCIKSMLMKADGRFVLVLTRGDHEVNDVKVKNLLQAEIIEFASAEEVAEITGTEPGFVGPVGLDREIEIFADFAVKAMANAAAGANKTDYHYQNVNISRDAHNVTFADLRFIQEGDPSPDGKGTIRFAKGIEVGQVFKLGTRYSEAMDATYLDENGRAQPMLMGCYGIGISRTLSAIVEQHHDDKGLIWPLEVTPYDLHILALNMKNDAQVQLAEKLYEEFKANGYDVLFDDRAERAGVKFADSDLIGLPIRITVGKRADEGVVEVKIRKTGESFEIAADELFDFIEKQVKSLSSHS

SEQ ID NO: 6876 - protein, 1438 aa, Bacillus licheniformis
LEDQLSVNRRQFQILLQQLNVTEDTMIRHLEGGQIIKLTVHKNKKTWHFHFKLRNVLPYQIFERFHSQLTRTFSHIAQVTCSIEAENPSIDEQLVQDYWTRCIQELDGISPPILALLNDQKPKLTGNKILLKTKTDTEASALKKKYSSLIQSSYRTFGFPELQLDTEIFVSDQEIQKFREQKMAEDQERALQALIEMEKQDKEAQDDEAPAGPLQIGYQIKDSEEIRTLDSIMDEERRITVQGYVFDAETRELKSGRTLCIFKITDYTNSILVKMFAREKEDAVLMKSLKKGMWVKARGSIQNDTFVRDLVMIANDVNEIKAKTREDTAPEDEKRVELHLHSPMSQMDAVSSIGKLVEQAKKWGHPAIALTDHAVVQSFPDAFAASKKHGVKMIYGLEANLVDDGVPIAYNPVHRLLEEETYVVFDVETTGLSAVYDTIIELAAVKVKGGEIIERFERFANPHRPLSATIIELTGITDDMLKDAPEVEEVIRDFKEWVGDHTLVAHNASFDIGFINVAYKRLLNSEKVQNPVIDTLELGRFLYPEFKNHRLNTLCKKFDIELTQHHRAIYDTEATGYLLVKMLKDAAEKNILYHDQLNENMGQSNAYQHSRPYHATLLAVNETGLKNLFKLVSLSHIHYFYRVPRIPRSQLEKYREGLLIGSACDKGEVFEGMMQKSPEEVEDIASFYDYLEVMPPEVYRHLLQLELVRDEKALKEIIANITKLGEKLNIPVVATGNVHYLNPEDKIYRKILVSSQGGANPLNRHELPNVHFRSTDEMLEAFSFLGEEKAKEIVVKNTRMISERIEEIKPIKDDLYTPKIEGADDEIRRMSYEKARSIYGEDLPEIVEKRIEKELKSIIGHGFAVIYLISHKLVKRSLDDGYLVGSRGSVGSSLVATLTEITEVNPLPPHYVCPDCRHSEFFNDGSVGSGFDLPDKDCPKCGAAYRKDGHDIPFETFLGFKGDKVPDIDLNFSGEYQPHAHNYTKILFGEDNVYRAGTIGTVAEKTAYGYVKGYANDNNLHMRGAEIDRLVQGCTGVKRTTGQHPGGIIVVPDYMDIYDFSPIQFPADATDSEWKTTHFDFHSIHDNLLKLDILGHDDPTVIRMLQDLSGIDPKTIPTDDPEVMKIFQGTESLGVTEEQIGCKTGTLGIPEFGTRFVRQMLEDTKPTTFSELVQISGLSHGTDVWLGNAQELIHNNICELSEVIGCRDDIMVYLIYQGLEPSLAFKIMEFVRKGKGLTPEWEEEMKNNNVPDWYIDSCKKIKYMFPKAHAAAYVLMAVRIAYFKVHHPLLYYAAYFTVRADDFDIETMIKGSTAIRAVMDDINSKGLDASPKEKSLLTVLELALEMCERGFSFQKVDLYRSSASEFIIDGNSLIPPFNSIPGLGTNAALNIVKAREEGEFLSKEDLQKRGKVSKTIMEYLERHGCLESLPDQNQLSLF

SEQ ID NO: 6877 - protein, 46 aa, Bacillus licheniformis
LSTDLTALYFFVIISPLAFVTQFRKNALYAVKQIKKLPALSRQFLE

SEQ ID NO: 6878 - protein, 661 aa, Bacillus licheniformis
MMGRKQYVKQKVFLKMKALCLALLVIFSMSIASFSEKTRAASAEEYPHNYAELLQKSLLFYEAQRSGRLPENSRLNWRGDSGLEDGKDVGLDLTGGWYDAGDHVKFGLPMAYSAAILSWSVYEYRDAYKESGQLDAALDNIKWATDYFLKAHTAPYELWGQVGNGALDHAWWGPAEVMPMKRPAYKIDAGCPGSDLAGGTAAALASASIIFKPTDSSYSEKLLAHAKQLYDFADRYRGKYSDCITDAQQYYNSWSGYKDELTWGAVWLYLATEEQQYLDKALASVSDWGDPANWPYRWTLSWDDVTYGAQLLLARLTNDSRFVKSVERNLDYWSTGYSHNGSIERITYTPGGLAWLEQWGSLRYASNAAFLAFVYSDWVDTEKAKRYRDFAVRQTEYMLGDNPQQRSFVVGYGKNPPKHPHHRTAHGSWANQMNVPENHRHTLYGALVGGPGRDDSYRDDITDYASNEVAIDYNAAFTGNVAKMFQLFGKGHVPLPDFPEKETPEDEYFAEASINSSGNSYTEIRAQLNNRSGWPAKKTDQLSFRYYVDLTEAVEAGYSAEDIKVTAGYNEGASVSELKPHDASKHIYYTEVSFSGVLIYPGGQSAHKKEVQFRLSAPDGTSFWNPENDHSYQGLSHALLKTRYIPVYDDGRLVFGHEPGY

SEQ ID NO: 6879 - protein, 704 aa, Bacillus licheniformis
MDNKTRFMQLYEQIKNPNNGYFSPEGIPYHSVETLICEAPDYGHMTTSEAYSYWLWLEAMYGRYTQDWSKLEAAWDNMEKYIIPVNEGDGNEEQPTMNYYNPSSPATYAAEHPYPDLYPSALTGQYPAGNDPLDAELKATYGSNETYLMHWLLDVDNWYGFGNLLNPSHTAVYVNTYQRGEQESVWETVPHPSQDNQTFGKPNEGFMSLFTKENQAPAPQWRYTNATDADARAVQAMFWARQWGYSNTNYLEKAKKMGDFLRYGMYDKYFQEIGSAADGSPSRGAGKNACHYLMAWYTAWGGGLGQYANWAWRIGASHVHQGYQNPVASYALSTAEGGLIPNSSTARSDWEKALKRQLELYTWLLSSEGAVAGGATNSWNGNYSAYPQNVSTFYEMAYTEAPVYHDPPSNNWFGMQVWPLERVAELYYIFAEKGDKSSENFHMAKHVIEKWIAYSLDYVFVGERPVTDEEGYYLNDAGERVLGGQNPQIAVQSDPGEFWIPANLEWSGQPDPWKGFDSFTGNPGLHVTTKNPSQDVGVLGSYIKTLVFFAAGTKAETGGFTALGNKAKNLAKELLDAAWSKNDGIGIAAEEEHEDYIRYFTKEIYFPNGWSGRNGQGNTIPGPNTVPSDPAKGGNGVYISHAELRPKIKNDPMWPYLENKYQTSWNPNTGKWENGLPTFVYHRFWSQVDMATAYAEYDRLIGNA

SEQ ID NO: 6880 - protein, 560 aa, Bacillus licheniformis
LREKWLALCLKSIILFVLIMGTVLLSAVPKASGTSGPAKQEKQSIITPADLLENMSPGWNLGNTLDAVPTEGSWNNPPVREHTFDDIRDAGFKSVRIPVTWDSHIGSAPEYPIDTDWMNRVEEVTDWALEREFYVVLNIHHDSWLWISRMGNSQQETLDKLGKVWKQIAERFKNKSERLLFEIVNEPTGMSAYQMNLLNREMLNIIRSTGGKNGQRLVIVGGLEDNKDELLHSFEPPDDDRIVLTYHYYSPWEYVSNWWGRTTWGSAAEISEMEEDIKPVYEKFVREGYPVIIGEYGTLGANEKHSKWLYHDTFVRLAHKYQMVPMWWDNGNDQFDRAERQWRDPVVKEIVIQAGRGVPNAIIKPADLFIKKGQSISDQTVDIQLNGNVLTGIYQKSEPLKEGSDYTVDNAGKTVSIKASCLAKLLNGAGQPGVKAQLTFTFHKGASQVMDIILYDDPKLEKSEFTISQSAISGDLKIPASLNGTKLATVKGVVDSTGRPVLEEVWSWTPYLNYDEDFYEKDGDLYLKERVLKYLKSDSTFTFELWPKGVEAVVKVKVTP

SEQ ID NO: 6881 - protein, 312 aa, Bacillus licheniformis
MMTKKGLLTVLMPFLLALSAIQFGNPRPALAASPFVETAGTSFTLNGKEFYFAGTNNYYFHYKSKKMVDDVFEDMKAMNLKVIRIWGFLDGQPQENTVMQPRPGIYDESGFSKLDYAIYKAGQTGIKLVIPFVNNWDDFGGMNQYVRWFQADGHDAFYTHPDIKEAYKNYVSYMLNRVNTYNGVKYKDDPAIMAWELANEPRVQSDRTGNTLVEWADEMSEFIKSIDQNHLVAVGDEGFYHIEGHPDWHYNGGEGVDWKRLTALKHIDYGTYHLYPDHWGKTAEWGNQWITDHICDGKEIGKPVVLEEYGYQ

SEQ ID NO: 6882 - protein, 48 aa, Bacillus licheniformis
VQAPIHQLPRKNPASKAGDFRKNDEHVETKLPVQYKRAGFPTLRLGYR

SEQ ID NO: 6883 - protein, 157 aa, Bacillus licheniformis
MSNKVIDTVSEMVQPILDNLQLELVDIEFVKEGQSWFLRVFIDSDDGVDIEECAKVSEALSEKLDEADPIKQNYFLEVSSPGAERPLKKEADFMKALGKNVYIKTYEPIEGNKEFEGELSAFDGENVEVTVMIKTRRKTINIPYDKVAKARLAVSFN

SEQ ID NO: 6884 - protein, 372 aa, Bacillus licheniformis
MSSELLDALTVLEKEKGISKDIIIEAIEAALISAYKRNFNQAQNVRVDLNRDTGSIRVFARKDVVDEVYDPRLEISIEDAVNINPNYIVGDVVEIEVTPKDFGRIAAQTAKQVVTQRVREAERGVIYSEFIDREEDIMTGIVQRIDNKFIYVSLGKIEALLPVAEQMPNEVYKPHDRIKVFITKVEKTTKGPQIYVSRTHPGLLKRLFEIEVPEIYDGTVELKSVAREAGDRSKISVRTDNPDIDPVGACVGPKGQRVQAIVNELKGEKIDIVHWSNDPVEFVANALSPSKVLDVIVNEEDKATTVVVPDYQLSLAIGKRGQNARLAAKLTSWKIDIKSETDARELGIYPRELEEEEPEELFLESETPESDE

SEQ ID NO: 6885 - protein, 91 aa, Bacillus licheniformis
VKSRKKIPLRKCVVTGEMKPKKELIRVVRSKEGEVSVDPTGKKNGRGAYLTLDKDVILTAKKRNSLANQLQAQIDDQIFDELLELAEKENR

SEQ ID NO: 6886 - protein, 100 aa, Bacillus licheniformis
MSESEWFSLLGLANRARKVVSGEDLVVKEIRHSRAKLVLLADDASANTEKKVTDKCRHYDVPVKKVGDRVLLGRSIGKESRVVVAVTDQGFANTLLRKLD

SEQ ID NO: 6887 - protein, 716 aa, Bacillus licheniformis
MAKMRVYEYAKAINVSSKDIIAVLKDMNIEVNNHMAMIEENAIKQLDQKFKKSAKPAGNKKDAGTGGQKPQQEAAKQNAGSKPNKNRDGKKNNVQNTQFNNKNKKKNNNNKKNKRGKNHQSPQEKQFKPKKELPEKIEFTNSMSVGALAEELGKEPSEIIKKLMLLGIMATINQDLDKDTVELIASEYGVEVEEVIVHEETEFEKYEEPDNEEDLEIRPPVVTIMGHVDHGKTTLLDSIRKTKVVEGEAGGITQHIGAYQIEENGKKITFLDTPGHAAFTTMRARGAEVTDITILVVAADDGVMPQTVEAINHAKAAEVPIIVAVNKIDKPTANPDRVMQELTEHGLVPEAWGGETIFVPLSALSGEGIDELIEMILLVSEVEELKANPNRRAKGTVIEAELDKGKGSVATLLVQNGTLHVGDPIVVGNTFGRVRAMVNDVGRRVKSAGPSTPVEITGLNEVPNAGDQFLVFKDEKTARSVGEARATKQLEEQRSDKAKLSLDDLFEQIKQGDVKEINLVVKADVQGSVEALAAALQKIEVEGVRVKIIHTGVGAITESDIILASASNAIVIGFNVRPDGNAKSTAEAENVDIRLHRIIYKVIDEIEAAMKGMLDPEYEEKVIGMVEVRQTFKVSKIGTIAGGYVTEGTITRDSGIRLIRDGVVIFEGEVDVLKRFKDDVKEVSQGYECGITIKKYNDIREGDMIEAYVMQEIERK

SEQ ID NO: 6888 - protein, 92 aa, Bacillus licheniformis
VIGFVECECIIYDASSLKEKRAVLKRIITRIRAKFNVSVSEIDYQDTWQRTSFGIAAVSSSRVQTEKELQRVLAFIDSFPEIERTITRTEWF

SEQ ID NO: 6889 - protein, 117 aa, Bacillus licheniformis
MTMRATRVGEQMKKELGDIIGRKLKDPRIGFLTVTDVRVSGDLQIAKVYISVLGDEKKREETLKGLAKAKGFIRSELGNRIRLRKTPEIHFEFDESIDYGNRIETLIHELNANKEES

SEQ ID NO: 6890 - protein, 309 aa, Bacillus licheniformis
MYNGVLLLHKPVGMTSHDCVMKIRKLLKTKKVGHTGTLDPEVSGVLPICVGRATKIVEYLTEKSKTYDAEVTLGCSTETEDQTGEVTEKKPVLAPPDEQTVQSVLRSLEGTIEQVPPMYSAVKVGGKKLYEYARAGIEVERPKRTITIHHIELTSEIRHEGDKARFRFVVTCSKGTYVRTLAVTIGEKLGYPAHMSNLVRTASGPFTLDECLTFEDVEGLIADGTLSEKLVPIERALDHLPKWIISDTLAKKVENGAVLETPGSFSHLTSEDRIAVFTEAGRCTAVYYPHPTKTGLLKPAKVLVQKSEQ

SEQ ID NO: 6891 - protein, 319 aa, Bacillus licheniformis
LKTIHISHPHDLKREDFPTSVMALGYFDGVHLGHQQVILTAKNTAAREGVKTSVMTFHPHPSAVLKKGREPKDLITPLQDKISIIEDLGVDFLYVVTFTPEFASLSPEEFIDQYILGFHVTHVVAGFDFTFGKFGKGTMENFQEYAKGRVKSTSVAKYSNQDQKVSSTRIRSVLGAGDVEYAAELLGRPYHVKGFVIHGDKRGRTIGFPTANIGLKDTYIVPPTGVYAVKAEIGGAVYNGVCNVGYKPTFYEKRPGQPSIEVNLFDFDRDIYGSEIKVEWYKRLRSEKKFGSVDELVEQISRDKEEAIRFFRERKPAGI

SEQ ID NO: 6892 - protein, 89 aa, Bacillus licheniformis
MAITQERKTQLINEFKTHESDTGSPEVQIAILTDQINNLNEHLRTHKKDHHSRRGLLKMVGKRRNLLTYLRNKDVTRYRELINKLGLRR

SEQ ID NO: 6893 - protein, 705 aa, Bacillus licheniformis
MGQEKHVFSIDWAGRKLTVETGQLAKQANGAVMVRYGDTAVLSTATASKEPKTVDFFPLTVNYEERLYAVGKIPGGFIKREGRPSEKAILASRLIDRPIRPLFADGFRNEVQVVSIVMSVDQDCSSEMAAMFGSSLALCVSDIPFEGPIAGVTVGRVDNKFIINPTLEQLEKSDIHLVVAGTKDAINMVEAGADEVPEEIMLEAIMFGHEEIKRLIAFQEEIVAAVGKEKSEITLYEIDSDLKEKVRGMAESNLLKAIQVHEKHAREDAISEVKNEVLAKFEEEEHDEETLKQVKDILSQLVKNEVRRLITEEKVRPDGRAVDEIRPLSSEVGLLPRTHGSGLFTRGQTQALSICTLGALGDVQILDGLGVEESKRFMHHYNFPQFSVGETGPMRGPGRREIGHGALGERALEPIVPSEKDFPYTIRLVSEVLESNGSTSQASICASTLAMMDAGVPIKAPVAGIAMGLVKSGDNYTVLTDIQGMEDHLGDMDFKVAGTSKGVTALQMDIKIAGLSREILEEALQQAKKGRMEILESMLSTLAESRKELSPYAPKILTMSINPDKIRDVIGPSGKQINKIIEDTGVKIDIEQDGTIFISSTDESMNQKAKKIIEDLVREVEVGQLYLGKVKRIEKFGAFVELFSGKDGLVHISELALERVGKVEDVVKIGDELLVKVTEIDKQGRVNLSRKAVLREQKEKEEQKS

SEQ ID NO: 6894 - protein, 320 aa, Bacillus licheniformis
LKGTIVRISVFFFLLLMSYQMMNRPYSQHYIDAMKKDAVTVAAQKDDLYQELLQKAPEYEVKAQNAKIDHIWKAMPGYNGLKVNIEKSYKKMKQAGEFDEKLLVYDQVKPDVHLESLKPEPIYRGHPDKPMVSFIINVAWGNEYLEEMLPVLQQHRIKATFFLEGRWVKHHPELAKAIQNGGHEIGNHSYNHPDMSKLTRERISEQLRMTNEQIQETLGVKPKWFAPPSGSFRKEVVDQAHKMGMGTIMWTVDTIDWQKPQPAVLQQRVLSKVHNGAMILMHPTDPTAKSLAVLIQNLHEKGYQIGTVSQLMNEKRLVEE

SEQ ID NO: 6895 - protein, 409 aa, Bacillus licheniformis
LIKRYTCQNGVRIVFENNPTVRSVAIGVWIGTGSRHETPEINGISHFLEHMFFKGTKTRTARDIAESFDRIGGQVNAFTSKEYTCYYAKVLDEHASYALEVLSDMFFHSSFDEEELKKEKNVVYEEIKMYEDTPDDIVHDLLSKASYGSHSLGYPILGTEETLAEFDGDSLRKYMNEYYTPDRVVISIAGNVPETFIKEAEKHFGSYEAKGKRTGMTKPDFHHEKMTRKKETEQAHLCLGFNGLEAGHPEIYDLIVLNNILGGSMSSRLFQDVREDKGLAYSVFSYHTSYEDSGMMTIYAGTGANQLQLLSETIHETLRALKSDGITPKELENSKEQMKGSLMLSLESTNSKMSRNGKNELLLGKHRTLDEIIEKLNAVSLERVNNLANRIFTDDYSSALISPSGELPK

SEQ ID NO: 6896 - protein, 86 aa, Bacillus licheniformis
MRLSELSGKEIVDVKRAERLGVLGQTDLEINEQDGQITALIIPSVKWFGLGRKQGNDIKVPWSQIQKIGSDMIILDVPESSVTKEE

SEQ ID NO: 6897 - protein, 41 aa, Bacillus licheniformis
VETRPSHGGGLFVFLDFNSPLFPFCHMMKLAYELDPYQKRR

SEQ ID NO: 6898 - protein, 299 aa, Bacillus licheniformis
MLTGLTIAIIGGDARQLEIIRKLTEQDAKVFLIGFDQLDHGFTGATKLKLNELDFGTIDSIILPVSGTSMEGTVATVFSNEKVVLKQEHLEKTKPHCAIYSGISNQYLDGMAKGANRRLIKLFERDDIAIYNSIPTVEGAIMMAIQHTDFTIHGSNVMVLGLGRTGMSISRTFSALGARVKVGARDSAHLARIMEMGLTPFHTNELAEHVENIDICINTIPSLILDKHVLSRMTPRTLILDLATRPGGTDFDFAEKQGIKALLAPGLPGIVAPKTAGQIIANVLCNLLSELTTDRKGLS

SEQ ID NO: 6899 - protein, 196 aa, Bacillus licheniformis
MSIKGKRIGFGLTGSHCTYDAVFPQIEALINKGAEVRPVVTHTVKSTDTRFGEGEEWVRRIEELTGFEVIDSIPKAEPLGPKTPLDCMVVAPLTGNSMSKLANAQTDSPVLMAAKATMRNSRPVVLGISTNDALGLNGVNLMRLMAAKNVYFIPFGQDDPYKKPNSLVAKMDLLVPAVEEALSHKQIQPILVHNDQ

SEQ ID NO: 6900 - protein, 346 aa, Bacillus licheniformis
LGRGLHVAVVGATGAVGQQMLKTLEDRNFELDKLTLLSSKRSAGTKLTFKGEEYTVEEARPESFEGVNIALFSAGGSVSQALAHEAVKRGAIVIDNTSAFRMDQNTPLVVPEVNEEDLHKHNGIIANPNCSTIQMVVALEPIRKAFGLNKIIVSTYQAVSGAGNEAVKELYGQTEAILNDKPFEPEIMPVKSDEKHYQIAFNAIPQIDKFQENGFTFEEMKMINETKKIMHMPELQVSATCVRLPIATGHSESVYIETDRDDVTAEDIKNLLKEAPGVVLQDDPAKQVYPMPADAVGKRDVFVGRVRKDLDRPNGFHLWIVSDNLLKGAAWNSVQIAESLKALNLV

SEQ ID NO: 6901 - protein, 404 aa, Bacillus licheniformis
VKIIVQKFGGTSVKDDRGRKLALNHIKEAVNEGYKAVVVVSAMGRKGDPYATDSLLDLLYGGQDTITEREQDMLLSCGETISSVVFASMLLENGIKAAALTGAQAGFLTDNNHTNAKILEMKPERLVSMLADHDAVVVAGFQGATAKGDITTIGRGGSDTSAAALGAALDAEFIDIYTDVEGVMTADPRIVEKAKPLPVITYTEICNLAYQGAKVIHPRAVEIAMQAKVPIRVRSTYSNETGTLVTSHHNSKAGSDVFERLITGIAHVKDVTQFKVPAKEGQYNVQTEVFKAMANAGISVDFFNITPSEIVYTVAGNMTDRAHSILKELGYEPAVTRNCAKVSAVGAGIMGVPGVTSKIVTALSEKGIPILQSADSHTTIWVLVHEKNMATAVNALHEVFELSK

SEQ ID NO: 6902 - protein, 289 aa, Bacillus licheniformis
MNFGNIATAMVTPFDKNENIDFQKLSKLIDYLLNNGTDSLVVAGTTGESPTLSEEEKVALIQYSVKEAAGRAPIIAGTGSNNTKASIKLTKKAEEAGADAVMLVTPYYNKPSQEGMYRHFRAIAEETSLPVMLYNVPGRTAASLAPETTIRLAEIPNIIAIKEASGDLDAITKIVAETPEDFAVYSGDDSLTLPALSVGARGIVSVASHIIGPEMQEMIKHYTEGNTAQAALIHQKLLPLMKGLFAAPNPSPLKTALQLKGLDVGSVRLPLIPLNEDERLRLSSLMNGL

SEQ ID NO: 6903 - protein, 554 aa, Bacillus licheniformis
LKKNTENIRIIALGGVGEIGKNLYVIEIDSDIFVVDAGLMHPENEMLGIDVVIPDISYLIERSDRVKAIFLTHGHEENIGGVFYCLNKLSVPVYGTKLTLALLKETLKQYGVNKKPDLREIHSKSVITFESTKVSFFKTNHSIPDSVGVSFKTSLGSIVCTGDFKFDQTPVLNQTSDIGEIAKIGNSGVLCLLSDSANAEKPGYTPSEALVGGEISDVMYNAENRVIIAVFASNFNRIQQVIDAALQNGRKLAVSGKNISAILQLAMKLGYVTADEDMFIPVQEVKKYPKREVAILTGDNHGEPLAALTRIAKQGHKQLDIEEGDTVLIASSPIPGQELVYSKAVDLLTRAGAQVVFAQKRVHVSGHGCQEELKLMLNLLKPKYLIPVNGEYRMQKAHSKLAEEIGMKRSDIFLIEKGDVVEFRGQNVKIGDKVHSGNILIDGLGVGDIGNIVLRDRRLLSQDGILIVVITLDKKKKHLVSGPEIITRGFVYVRESEQLIVEATELVRELVNESTENAVVEWSALKQTMREALNQFLYEKTKRKPMIIPIIMEV

SEQ ID NO: 6904 - protein, 248 aa, Bacillus licheniformis
MDSNRIQNGDSQGEQPAKQDAKDSLVNKIQQLGETTLPQMGQDTNIHCLTIIGQIEGHVQLPPQNKTTKYEHVIPQIVAVEQNPKIEGLLIILNTVGGDVEAGLAIAEMLASLSKPTVSIVLGGGHSIGVPIAVSCDHSYIAETATMTIHPVRLTGLVIGVPQTFEYLDKMQERVINFVTSHSNISEEKFKELMFSKGNLTRDIGTNVVGNDAVKYGLIDETGGVGQAIQKLNELIEQNKGAQEGMIQ

SEQ ID NO: 6905 - protein, 71 aa, Bacillus licheniformis
MILYTTMPQEIVFAGQAENSNLKQIDVNGVPLLVEMNGEEARVVQVLSTNPMDFLKQETAPGQTLKLTFYK

SEQ ID NO: 6906 - protein, 781 aa, Bacillus licheniformis
MAKRKRKSTKKQKQGKKRIHLKFELYGLICIAISIIAVLQLGVAGQTFIYMFRFFAGEWFILCLLGLFLTGLSLFWKKKTPSFLTRRKAGLYCIIASMLLLSHVQLFQHLTERGMVQSPSVIQNTWELFLMDVKGETGSPDLGGGMIGALLFAASYFLFASAGSKIIAVFLILIGLLLITDRSLQETLIKWMTPVASFMKNQWQAFLADLKQLKNSSPKKKSGKKQKTQRKPKVSEEPVQEADLDPDPVIQSEPIISSFSDRDEKPEVQAYEAPAAPAEPPAEPEIGEEMQASGAPEITFTELENKDYQLPSIQLLDDPKHTGQQADKKNIYDNARKLERTFQSFGVKAKVTQVHLGPAVTKYEVYPDVGVKVSKIVNLSDDLALALAAKDIRIEAPIPGKSAIGIEVPNAEVAMVSLKEVLESKLNDRPDAKLMIGLGRNISGEAVLAELNKMPHLLVAGATGSGKSVCVNGIITSILMRAKPHEVKMMMIDPKMVELNVYNGIPHLLAPVVTDPKKASQALKKVVNEMERRYELFSHTGTRNIEGYNDYIKRMNAAEEAKQPELPYIIVIVDELADLMMVASSDVEDSITRLSQMARAAGIHLIIATQRPSVDVITGVIKANIPSRIAFSVSSQTDSRTILDMGGAEKLLGRGDMLFLPVGANKPLRVQGAFLSDEEVEKVVDHVISQQKAQYQEEMIPEETQETVSEVTDDLYDEAVALVVSMQTASVSMLQRRFRIGYTRAARLIDAMEERGIVGPYEGSKPREVLLSKEQYEELSS

SEQ ID NO: 6907 - protein, 241 aa, Bacillus licheniformis
MSIKADNQRLCLKVIDRIKDDIQNGVFCENERLPSEFELSKMLGVSRTALREALRILEEENVIIRRHGVGHFVNARPLFLSGIEQLNSVTKMIEQASMTPGTIFMSSQVTAPTEEDMLRFQYAEETEIFLLERVRTANGMPVVYCLDKIPVDILPEGFSHEQESMFEWLENKSGAVISYAVADIVPIGYHDTISQILECDPETSLLLLKQTHYDQNDKPVLYSLNYFRADKFRFHVVRKRF

SEQ ID NO: 6908 - protein, 401 aa, Bacillus licheniformis
MKSIFALSSVPLVMTLGNSMLIPVLPVIEKKLNISSFQVSLIITVYSIVAIVCIPITGYMSDRFGRKKIMLPCLLIAGAGGALAGLASTFFNDPFAMILAGRVLQGIGSAGAAPIVMPFIGDLFQNDEEISAGLGDIETANTAGKVLSPILGAFLASWVWYMPFWFIPVVSLASFFLVLFFVPKPKDKDDEKQTLKNFAKSVQEIFKREGRWLVSTFVIGGIIMFLLFGVLFYLSDTLEKKHQIDGIAKGALLSIPLLFLSVSSYLAGKLIGNDKIRMRICVLFGMILLALSFAGLWWNHSFYPLFLFMSIGGIGIGIALPSLDALITEGIEKEERGTISSFYNSMRFIGVALGPPVFAYMMTNAGWLIFIVSLLCSLAALALVLFNIDPKEDESEAAKTV

SEQ ID NO: 6909 - protein, 426 aa, Bacillus licheniformis
MTYLNEIKGKHRGLTSHIVKTEKFKTVSIIFKMLAPLTKEDVTKRALFPHVLLRGTSTRPKTAELRSYLDELYGTSVSCDLSKKGEMHVITFRLDIANEKFLKDQTPLLEKGLELLSEIIFSPALEDGAFLPLYVSQEKRTLKQRIQAVYNDKMRYSNLRLIQEMCKDEPYALHVNGELDDVDGITPQSLYEAYQKAVSEDQLDIYVVGDVDEQQVDSYISKYFEANERELRPVPELEQTRTREPQEVIEDADVKQGKLNMGFRTGTHFTDDDYPALQLFNGLFGGFSHSKLFINVREKASLAYYAASRIESFKGLLMVMSGIEVGNYQKAVDIIKEQFQEMKKGSFTEEAIDQTKAVIKNQILETLDTPYGLVEFIYQQAAAQTEFSLEDWLGRIDNVTKEDIIEVGKKIDLDTTYFLKGTEGAS

SEQ ID NO: 6910 - protein, 410 aa, Bacillus licheniformis
MPGGLDVYVLPKEGFNKTYAVFTTKYGSIDNQFVPLGKDEMVRVPDGIAHFLEHKLFEKEDGDVFQQFSRQGASANAFTSFTRTAYLFSSTSNVEENLETLVDFVQDPYFTEKTVEKEKGIIGQEINMYDDNPDWRLFFGLIENMYQEHPVRIDIAGTIESISHITKDLLYECYETFYHPSNMLLFVVGPVDPEAIIRQVRENQQKKPYTDQPEIVRKEVKEPGAVFKKEQEIKMNVQSSKCLVGLKSAHPMNTGEALLKHELTINLILECLFGKSSSDYERIYEKGYIDETFSYDYTEEHGFGFVSVGGDTPEPDKLAEELKQVLFKAKETITAEKLELARKKKIGNFLKSMNSPEYIANQFTRYAFLETSLFDIVTVLESITLDDVHRVIEEEVEEDRITVCKVVPKS

SEQ ID NO: 6911 - protein, 243 aa, Bacillus licheniformis
MTKLALITGASGGIGQSISEKLAQNGYDLLLHYHTNEKAAASLAERLSHTYGIHAEIIHGDLSDPGGAKAVSASIGGRALDGIVLNSGQSFRGLVTDMTDEAVQDMVQLHVSSPFLLTRNLLPAMIRKKSGAIVAVSSIWGETGASCEVLYSMTKGAQNVFVKALAKELAPSGIRVNAVSPGAVKTKMMSSFSKEEEEMIADEIPMGRLAEAEEVADAVLFLLSAKASYITGQILSVNGGWHC

SEQ ID NO: 6912 - protein, 85 aa, Bacillus licheniformis
MSVLDNWDQWKNFLGDRLNYAQEQGMSKETISDLAYEIGDYLAGEVDSKNHQERVLADLWSVASEEEQRAIANVMVKLVENNSSH

SEQ ID NO: 6913 - protein, 58 aa, Bacillus licheniformis
VFTLSFFIGAGFCPAAPLLSFAFRPDRVNSIQAPIQQVFPDFGKRTFFLFNHNILLSN

SEQ ID NO: 6914 - protein, 263 aa, Bacillus licheniformis
LAKLEWYLEYEIQVNRPGLLGDISSLLGMLSINIVTINGVDTQRRGLLLKCRHIDQIKRLESILNTMDTIKVTKLREPKLRDRLAVRHGRYIQRDADDKKTFRFERDELGLLVDFMAELFKKDGHKLIGIRGMPRVGKTESIVASSVCASKRWLFVSSTLLKQTIRSQLIADEYSPENVFILDGIVSTRRGSERHLQLVSEIMRLPATKVVEHPDIFVQNTEYTMDDFDYIIELRNSPDEVITYEHAEEPQMFDHSGFSGFDF

SEQ ID NO: 6915 - protein, 303 aa, Bacillus licheniformis
VFVVTELGNRLKEAREEKGMSLDDLQAATKIQKRYLTALEEGNYDIIPGKFYVRAFIKQYAEAVGLDSEHLFEEFKKDIPNSYNDEVSEKLSSIKPQRELPKSASKALELLPTLLVAAGVIVVIAIIYVIVQAVNGGGNQQAEGPKTEESQSKYDVSKDSPLTKENQQNTDAQKDSAESDKEKKDQQSDENDKLTIKATASEGSSTTYEVSGSDKLELEVKASENSWVRVRDEKGSSLKEGMMKKGETFQKNITDQSQIDLRIGYAPGVEIKINGEVLSYKLDPKTVMTQNITIQNKKEEKSS

SEQ ID NO: 6916 - protein, 193 aa, Bacillus licheniformis
MFNLPNKITLSRIALIPVFMVIMLVPFQWGAVSFGSESIPVTHLIGALLFIFASVTDWVDGYYARKLNLVTNFGKFLDPLADKLLVSSALIILVHYHLAPAWMAIVIISREFAVTGLRLVLAGTGEVVAANMLGKVKTWAQIIAISALLLHNLPFELVSFPFGSLALWVAVFFTVVSGWDYFAKNWDALKTSN

SEQ ID NO: 6917 - protein, 416 aa, Bacillus licheniformis
MKLERKAEIIAVGSELLLGQIVNTNAQFISRHLAEIGINVFYHTAVGDNPARLKQVIQTAQQRSDFIIFSGGLGPTKDDLTKETIAEVVGRPLKLDDEAFESIQDYFKKTNREMSPNNRKQALILEGSDVLPNRFGMAPGMLLEHESRFYMLLPGPPKELEPMFENEAKPLILEKLGSREKIVSRVLRFFGIGESQLETDLEDLIDAQTNPTIAPLAADGEVTLRLTAKHADPEETNRLLKETEDRILERVGEFFYGYDDTSLAEELAKACRSKGMTLAAAESFTGGLFSSWLTEMSGASEYFKGGAVCYTNELKVSAAGVSEDTLQRYGAVSAQCAKELAAGIRVKTGSDIGISFTGVAGPNTQEGHPAGKVFIGISVKDQAEEAFEFQFAGSRSAVRKRSAKYGCHLLLKMMEK

SEQ ID NO: 6918 - protein, 348 aa, Bacillus licheniformis
MSDRQAALDMALKQIEKQFGKGSIMKLGEQTETRISTVPSGSLALDAALGVGGYPRGRIIEVYGPESSGKTTVALHAIAEVQQQGGQAAFIDAEHALDPVYAQKLGVNIDELLLSQPDTGEQALEIAEALVRSGAVDIVVIDSVAALVPKAEIEGDMGDSHVGLQARLMSQALRKLSGAINKSKTIAIFINQIREKVGVMFGNPETTPGGRALKFYSSVRLEVRRAEQLKQGNDVMGNKTKIKVVKNKVAPPFRTAEVDIMYGEGISKEGEIIDLGTELDIVQKSGAWYSYQEERLGQGRENAKQFLKENKDILLMIQEQIREHYGLDTGGAAPAQEDEAQAQEELEF

SEQ ID NO: 6919 - protein, 37 aa, Bacillus licheniformis
MKRVKGCRPDRQPFTLFFAFRRFSSIHSLNEGSLKGV

SEQ ID NO: 6920 - protein, 519 aa, Bacillus licheniformis
MSPLAILISILLSLFCLVVGYYVRKIIAEAKISGARNAAEQILGDAKRDAEALKKEALLEAKDEIHTLRIEAEQEVRERRNELQKQENRLLQKEENLDRKDESLDKREAMLEKKDHSLNERQQHIEEMESKVDEMIRMQQSELERISSLTRDEAKQIILERVENELSHDIAIMMKESENRAKEEADKKAKNILSLALQRCAADHVAETTVSVVNLPNDEMKGRIIGREGRNIRTLETLTGIDLIIDDTPEAVILSGFDPIRRETARIALDKLVQDGRIHPARIEEMVEKSRREVDDYIREMGEQTTFEVGVHGLHPDLIKILGRLKFRTSYGQNVLKHSMEVAFLTGLMASELGEDVTLAKRAGLLHDIGKAIDHEVEGSHVEIGVELATKYKEHPVVINSIASHHGDQEPTSIIAVLVAAADALSAARPGARSETLENYIRRLEKLEEISESYEGVEKSFAIQAGREVRIMVKPDSINDLEAHRLARDIRKRIEDELDYPGHIKVTVIRETRAVEYAK

SEQ ID NO: 6921 - protein, 265 aa, Bacillus licheniformis
MRILFIGDVVGSPGRDMIKTYLPKLKLKYKPNAVIVNGENAAHGKGITEKIYHQLIQAGADVLTMGNHTWDKREIFDFIDDAPQIVRPANFPEGTPGKGITYIKTNGSKELAVINLQGRTFLPAIDCPFRKADELIEEASKRTPFIFIDFHAEATSEKQAIGWYTDGRVSAVVGTHTHVQTADNRILPKGTAYITDVGMTGPYDGILGVDRETIIKRFKTSLPVRFEIAEGRTTLSGVVIDIDEQSKKAVKIDRILINDDHMFFE

SEQ ID NO: 6922 - protein, 86 aa, Bacillus licheniformis
MEILKVSAKSNPNSVAGALAGVLRERGAAEIQAIGAGALNQAVKAVAIARGFVAPSGVDLICIPAFTDIQIDGEERTAIKLIVEPR

SEQ ID NO: 6923 - protein, 38 aa, Bacillus licheniformis
VGIKNLHVDPLPADFSKTDKPKTTRLRKSKQVEAFEKE

SEQ ID NO: 6924 - protein, 306 aa, Bacillus licheniformis
MKIFDAHSDLLLKLWKNPKLNEYSDPSLQTPVQALLNGKAKVQCLAIFLPETVPDTIRLEMALVQIQLFHEKIAKYKRIKLIKNKADIDKLKSDETGIILTMEGCEPIAKNLRLFDIFFQLGVRSFGLTWNWANTFADGALEERNAGLTSYGERLIRKANKNRAWTDLSHLSEKSFWGAIETAAYPIASHSNAHSLCPHPRNLKDDQIKALIDKNGVIGLTFVPEFVRNGKTPVIKDILSHIDHVCSLGGERHIGFGSDFDGIDRVIPNLEAHKDYGNLIEALQRSYTPSQVDGFLFQNFISRIPF

SEQ ID NO: 6925 - protein, 346 aa, Bacillus licheniformis
LDGNMKALIKKPGEPGASFELVPIPKIDKHEVLIKVKAASICGTDVHIYNWDEWAKSRVKPPYVFGHEFSGEVVQVGENVTTVKEGEYVSAETHIVCGKCLPCLTGKEHVCKKTLILGVDTDGCFAEYVKMPAANIWKNPAGMPEDLASIQEPLGNAVHTVLTGMTAGVKVAVVGCGPIGLMAVAVAKASGAAQVIAIDKNEYRLDLALQMGATDIISVEKEDPLKNVSALTNGEGADLVCEMSGHPTAIRQSLKMAANGGRVHVLSLPEHPVCIDMTNDIVFKGLTVQGITGRKMFETWRQVSGLLQSGTIQIKPVITHRFPMEEFEKGFELMRKGQCGKVVLIP

SEQ ID NO: 6926 - protein, 391 aa, Bacillus licheniformis
MKEFNFLASELNTMKENGTFQELPIIESMQGSTVKMKGKDIIQLSSNNYLGLTSHPRLQKAAEEAVKRYGAGTGSVRTIAGTFTMHDELEKKLASFKNTEAALVFQSGFTANQGILSSILTKDDLVISDELNHASIIDGIRLTKAGKKVYQHADMEDLEKILKKSMNYRMRLIVTDGVFSMDGDIAPLPEIVRLAEQYDAFVMVDDAHASGVLGENGRGTVHHFGLDGKVHIQVGTLSKAIGVLGGYAAGSKVLIDYLKHKGRPFLFSTSHPPAVTAACIEAVNVLMEEPSLIKKLWDNTAYFKKELEKIGLPLIKSETPITPILIGDEAAACRFSNTLFELGLFAQAIVFPTVPKGKARIRTIMTAQHSKEELDKALEIIQTGAKKAGLL

SEQ ID NO: 6927 - protein, 509 aa, Bacillus licheniformis
MNEKQRIESGQVNPSDKKSEKDYSKYFEAVYVPPSLKDAKKRGKEEVKYHNDFKISEQFRGMGEGRKFYIRTYGCQMNEHDTEVMAGIFMALGYEPTDSTEDANVILLNTCAIRENAENKVFGEIGHLKALKKDNPDLILGVCGCMSQEESVVNRILKKHPFVDLIFGTHNIHRLPELLSEAYLSKEMVIEVWSKEGDVIENLPKVRTGKIKGWVNIMYGCDKFCTYCIVPYTRGKERSRRPEDIIQEVRRLAAEGYKEITLLGQNVNAYGKDFEDMEYGLGHLMDELRKIDIPRIRFTTSHPRDFDDHLIEVLAKGGNLLDHIHLPVQSGSSDVLKLMARKYDRERYLELVAKIKKAMPNASLTTDIIVGFPNETDEQFEETLSLYREVEFDSAYTFIYSPREGTPAAKMKDNVPMRVKKERLQRLNEVVNEISAKKMKEYEGQVVEVLVEGESKNNPDILAGYTRKNKLVNFKGPKEAIGQLVNVKIHQAKTWSLDGEMVGEAIEVK

SEQ ID NO: 6928 - protein, 143 aa, Bacillus licheniformis
VTLYTKKEIVAKARELAKMIAETEEVDFFKKAEAQINENAKITGIINQIKALQKQAVNFKHYEKHEALKQTEAKIDALQEELDEIPIIQEFRDSQMEVNDLLQLVAHTISNQVTNEIITSTGGDLLKGETGSKVKNSSPSCSL

SEQ ID NO: 6929 - protein, 182 aa, Bacillus licheniformis
MSEYREIITKAVVAKGRKFTQSTHTISPSQKPTSILGGWIINHKYDAEKIGKTVEIEGTYDINVWYSYADNTKTEVVTERVSYVDVIKLRYRDKNYLDDEHEVIAKVLQQPNCLEVTISPNGNKVVVQAEREFLAEVVGETKVVVEVNSDWTESDEEEAWEEELDEELEDINPEFLVGDPEE

SEQ ID NO: 6930 - protein, 869 aa, Bacillus licheniformis
MAGYTPMIQQYLKIKAEYQDAFLFFRLGDFYEMFFEDAKKASQELEITLTSRDGGSSERIPMCGVPYHSCSSYIEQLIKKGYKVAICEQVEDPKSAKGVVKREVVQLITPGTVMDGKGIHENENNFIASVSKFQHTYGLAFSDLTTGENLVTAIERLDDVVSEIYSVGAREIVVSRNLDEKDVAMLKERCGATISFEDEQADEVPGIVNGLGSKELVDTFMRLYVYLKRTQKRSLDHLQNVQAYELEEAMKIDLYSKRNLELTETIRSKNKKGSLLWLLDETKTAMGGRLLKQWIDRPLIRKGQIEERQEIVETLIAHLFEREDLRERLKEVYDLERLAGRVAYGNVNARDLIQLKESLKQVPAIKQLVGSLDHPKAKARAEKIDPCGDLLNLLEDALYENPPLSLKEGNLIKDGYHAKLDEYRDASKNGKDWIARLEQQEREYTGIRSLKVGFNKVFGYYIEVTKANIHLLEEGRYERKQTLTNAERYITPELKEKEALILEAENNICELEYELFSELRSKVKEYIPRLQQLAKMMSELDVLQCFATISENRHYVKPEFSDDVVQVIDGRHPVVEKVMDSQSYVPNSCEMGKGRQMLLITGPNMSGKSTYMRQMALISILAQIGCFVPAKKAVLPIFDQIFTRIGAADDLISGQSTFMVEMLEAKNAIVHATKNSLILFDEIGRGTSTYDGMALAQAIIEYVHEHIGAKTLFSTHYHELTSLEEKLDDLKNVHVRAEEYEGKVVFLHQIKEGAADKSYGIHVAQLAELPDGLISRAKTILKELESGAKEAAPSTAPNMVKEAAEEAAATVADQPAQLSFFETDKPIEKETKLSKKEQAVLAEFKAMDLLDMTPIQVMNELYRLQKKLK

SEQ ID NO: 6931 - protein, 636 aa, Bacillus licheniformis
LAKIVQLPDDLSNKIAAGEVVERPASVVKELVENAIDANSSVIEIDVEEAGLASIKVLDDGEGMDAEDCRTAFLRHATSKIKDENDLFRVRTLGFRGEALPSIASVSHLSIKTSTGEGAGTHLTLQGGRIISEQKAPSRRGTEITVTNLFFNTPARLKYMKTIHTELGNITDVVNRIALAHPEVSIRLRHQGKTLLQTNGNGDVRHVLAAIYGTAVAKKMLPLEARSLDFEVKGYIALPEITRASRNYMSSVVNGRYIKNFPLVKAIHEGYHTLLPIGRHPITFIEINMDPLLVDVNVHPSKLEVRLSKETELHELIRDAIKDVFKQQQLIPSVQVPKKTAPLINKPEQQKLDFDQVREPAPLSDSDVEREYKPEPSFSAMKLSSLVKDPPPSAPEEREENVMQDTEPEWPGAEEYTPEAAPAVQAEPEQAGENVQDEETPKERVPIMYPIGQMHGTYILAQNENGLYIIDQHAAQERIKYEYFREKVGEVESEVQDLLVPLTFHYSKNEALTIDQHLDDLAKVGVFLESFGAGSYIVRCHPTWFPKGEETTIIEDIIQQVLDDRTIDIKKLREEAAIMMSCKGSIKANHHLRDDEITALLDELRRTSDPFTCPHGRPIIIHYSTYEMEKMFKRVM

SEQ ID NO: 6932 - protein, 93 aa, Bacillus licheniformis
MHYITACLNIISDKDLNEIMKEFKTLEEKTNKEEGCIQFHAYPLEPSERKIMLWEIWENEEAVKAHFTKKHTKDVQNQQLTEVEWLIKSNVND

SEQ ID NO: 6933 - protein, 175 aa, Bacillus licheniformis
MKGYKKLGSVDVTDEIGTGKDFIGGSYMLYSNGQIVRKYISGGEVKYELVSRIPESRVKKSNIEKALDWAKDTVGELSGGYDGYRAITGVDPVTGEKLTVTDRILSGVSVIPATKVVKVGKYAFKATKGAKTAKRVSNAERSANATPKINRKQALNQAKDLAGNNLHVNGRLAMI

SEQ ID NO: 6934 - protein, 49 aa, Bacillus licheniformis
VVVTHTNDNRLHAHAGKPDKEANQFNYDFKKERYTNIYGPNGDHHIYYK

SEQ ID NO: 6935 - protein, 159 aa, Bacillus licheniformis
MSSRNEIIKQKKAIMNARKSMKEFTCLELLDFEEFDSPWIDLFEPLLKQFRRIDSKPTYYKLIGDSKENNILWIENSLSFLKQKKEWFIVVPKCLQPVWANVRVLDYSKAIHELWEMSEPDNFLIADKSTGMIAKIFFEEQQYEIHIGKCSLDNIKKNN

SEQ ID NO: 6936 - protein, 328 aa, Bacillus licheniformis
MPITKKKIPVAILTGYLGAGKTTLLNRILTEKHNQKIAVIVNEYGEVGIDNQLVVDSEEEILEMNNGCICCTVRGDLIRILRTLVFSMYQGKVAFDRVLIETTGLAHPAPVAQTFFMDELLSEIFEVDSIVTVVDSKHVTRHLDDQDEAQEQIAFADVIILNKTDLVSNNELKSLEQRLVNINPTAKRLHARDCKVNLRDILGINTFDVNRKIEIDPHFLEDHHHHHHDDKVSSIAFREEKPLDLAKVDHWMSYLVREKGEDLLRYKGILYIKGEEYRIVFQGLHMLFSGRPDRKWNENEKKQSELVFIGKDLDKEELERQFKNCIAK

SEQ ID NO: 6937 - protein, 128 aa, Bacillus licheniformis
MATWDLSNMKHHIFICNGSSCNRAGAEELTQVILQEISDRELDDVIHTTRTRCNGRCQDKCVAIHYPRGTWYRDLIPEDVPLLIDSLCTNEDYKEKASHLYDGQRFERSSGLISVVPKEKVIKVSKKF

SEQ ID NO: 6938 - protein, 164 aa, Bacillus licheniformis
MHNINIRKAISADLPFILTIYNQGIEDRIATLEQDLKEMSDIEIWFQEHQGRYSVLVAESKGEIVGWASLNPYSHRCAYQGVADLSVYVDRACRGKGIGGLLLQALEKTAKENSFYKIVLFTFPFNELGQNLYNKMGYRQVGIFKNQGILDGRFIDVMAMEKLL

SEQ ID NO: 6939 - protein, 215 aa, Bacillus licheniformis
MFKTKFKKTIGIGLVAAACLISASTASAASQNESDVKVKLDDQQRNQYTVKSFHYLTVDGKNVDSPAQANAKSVRDVKVTMVLPKQNKNGDLLAYGFTSKVTLEAFIAKDKQRLEKQFKPSASGPCCTDFYEYKNKGGQYIYWRDGFKNLPSSWNDRISSLSTASPSSSYSTTLWEHTSTQGYGKGVLFRHSDWYGKTANMASDWDNKASAIDIK

SEQ ID NO: 6940 - protein, 36 aa, Bacillus licheniformis
MSGGYGHGSGFALIVVLFILLIIIGASWFGGGYGGY

SEQ ID NO: 6941 - protein, 313 aa, Bacillus licheniformis
LNFQLTEKDMLRIIRNGLQTAQYPKHMMIVGAGLSGLIAASLLKNAGHRVTIVEANDRAGGRVFTSRAPFSEGLYFNAGPMRIPDIHTLTMEYIKKFNLPVNVFINRTPMDILYVNGVKTRLHEFEKNPGVLRFPVAPHEQGKTAEQLMLSALQPILNFISQDPARNWRIVEKQYRNESLGSFLNTHFSSGSIDMIGVLLDMEAYMGLSLVEVLRESIFFTSPTRFYEITGGMDLLTQAFLPQLKWNILFRQKLMKMSQTKNSVTAHCIHQQSAEHSAVTGDFAIVTIPFSALRFVAFEPFESFSYQKRRAIR

SEQ ID NO: 6942 - protein, 62 aa, Bacillus licheniformis
MKFLKTCFYEWKHFLLLRKQKQIYLPSEGGVYWKIRLFNSIKTNKPLFNSDSSPSPKIGSFY

SEQ ID NO: 6943 - protein, 225 aa, Bacillus licheniformis
LNAARDRNIMLLLLCLTAGIVDVIGYLSIGHVFTANMTGNIVLLGLSIGNSLHATAVYSLIALFGFIIGVIISAAIVGKQEKSFWPTGVTIALAVEAAVLLLFACLTFFESSPHLLILLLSIAMGLQTTAARKLGIAGISTTVLTGTLANFFEDVTKRFLSNNNQKVIHKDAWLRALTIVLYCLGAVIAALAEPEHPFVVIWIPIVIIIGIIAVAGTRFHGKSEG

SEQ ID NO: 6944 - protein, 489 aa, Bacillus licheniformis
LEHINMEQFILLAALLLIIGVLTTKFSTRLGVPALVLFLIVGMIMGSDGLGIIYFNNPELAQLIGIIALVVILFEGGLQTKWSSVKAVAVPSLSLATIGVLLTTCVVAVAAKLIFNVSWMEGFLFGAIVGSTDAAAIFAVLKGQNIRDRLSSTLEAESGTNDPMAMFLTLSLIQLLTADHSSYFMLVISFFWQMGMGLLLGYLLGRFASFAINKINLDSSGLYPIFALAFALLTYSLTDVIGASGLLAVYIAALVIGNQDLTYRHSIFRFNEGFAWMMQILMFIILGLLVFPAQFLSFDIIFKGFLLSLILIFIARPVAVFLSTIKMGFNFNEKIFLSWAGLKGAVPIVLATFPMTMGLENSQLIFNVVFFVVLTSALIQGSTISVFAEKLKLNGPQKVEAPHSLELVSIGKANAEIIEFEVDDQAAITRQMLKDISFPKDALINAIIRNGDLVTPHGETKIKPGDILYILVSKKQKKELKKFLNREFD

SEQ ID NO: 6945 - protein, 456 aa, Bacillus licheniformis
LKNSKIQTFKHQKKAFWWLSFVAFFSVMNETVFNVALPDIKNQFGVSPAAANWVNTSFIISFAAGSVVYSRLSDMYGVRKLFVAGLFIYGGGSFMGLLAQAYFPAVIFARFVQGSGASAVPALILVIITRYVRPEGRGKAFGIVGSLVAMGEGIGPAIGGMIVHYIHWSFLFILPMAVLMAIPFFFRNMPDEAAAKANLDIIGIGLLTISIVMFAVYISLYHVFYLLAGIFCLIGAAVHTRHAEHPFIDRSLIKNRRYIGVVLAGCTVLGSVAGIVSVVPYMMRVLFSLNADTIGSGILLPGTVGVIFFGVAGGALTDRFGSRFVFTLGWLLILSTMAAASQVGDRTPWLMTIMLVFIFGGLSFVKTAISNSTAESLEEKAAGAGMGMLNFACFLSEGIGVALAGGLMAVHGFGYSALPAMNDAWSAVFSRSFAIFTVFVLAGGLLYLLTCKRKKS

SEQ ID NO: 6946 - protein, 287 aa, Bacillus licheniformis
MKRSIGTFEIDGLTIEYSRVGEGKPILVMHGGHSNCREEFGYRDLYESRFSIITPSRAGYGRTSKEIGDSLELACYYYMKLLDHLNIKKVHVVAVSAGGPSGICFASKYSERVESLILQSAVTKQWLTAKDIEYKVGQIIFRPPVEKAVWKLISALNNRFPEWIFKKMLSSFTTLPADQAMLKVTEGDIEEMRKMNNRQRSSRGFLLDLKNIDDLSFHHLKEISCPVLIMHCRYDRVVPAEHAFHAKKLIPFSEVYQADSWGHLIWLGTEGKSVSQKVISFLKTTSS

SEQ ID NO: 6947 - protein, 43 aa, Bacillus licheniformis
VLRKPAREDFSFILFASLVRRSSVLFGKIILLLIKKLHYFICG

SEQ ID NO: 6948 - protein, 38 aa, Bacillus licheniformis
MIIVTTDTIANQNIVEVKGLSQAASFSRGISEKIFCQG

SEQ ID NO: 6949 - protein, 216 aa, Bacillus licheniformis
MIRKLFTIIIMASIIAVGFVCKDSWLDVIRDGGVYSVLFSMLLVAACVFFPIVPFALIAGLNGALFGIANGVLITLTGSMLGTMLLFFLSRYGFRDMARRHLTKYPKMSEYEAYFNQNAFTAVLLGRLIPVIPAVVMNIVCGLSKVKWAVFFAASTLGKVPNVLVVSIAGANFSENKLLSVGVYGLYMAIIAFVIYRKYPHLTQKHKETKQTGKPS

SEQ ID NO: 6950 - protein, 338 aa, Bacillus licheniformis
LVYTAEHLDDYLMEQASNNHFHGSILLADSNGILLSKGYGYANCKDKVKNEPSTRYQIASLTKQFTAIAVMQLQEKGLLRTDDPVQNYLEGYPNGDSITIKHLLSHTSGIPDFLEEELLDIELERAPLDQFIRRFIDKPLEFRPGQRFNYSNSGYILLTKIIETITNEAYGDVIQQLIFDPLGMKNSGFFSSPEDISPTVGYLCLNREMIKAPIVYGYGESGLYSTVEDLYLWDRALYTEKLVSKDALKEALYSRVKKQAFAAEGPSPALIQNNSIGYGWFINHQNKYKIWHDGEIHGFISSINRYMDEKKVLIMLSNCNLSKTDEILAHLEEALLQM

SEQ ID NO: 6951 - protein, 47 aa, Bacillus licheniformis
MKLPYFKFSLNYSANDGKYKKIFIMLFWSRFLLHFLSKLSFIVFFLS

SEQ ID NO: 6952 - protein, 396 aa, Bacillus licheniformis
MGQKHIAIFNIPAHGHINPTLALTASLVKRGYRVTYPVTDEFVKAVEETGAEPLNYRSTLNIDPQQIRELMKNKKDMSQAPLMFIKEMEEVLPQLEALYENDKPDLILFDFMAMAGKLLAEKFGIEAVRLCSTYAQNEHFTFRSISEEFKIELTPEQEDALKNSNLPSFNFEDMFEPAKLNIVFMPRAFQPYGETFDERFSFVGPSLAKRKFQEKETPIISDSGRPVMLISLGTAFNAWPEFYHMCIEAFRDTKWQVIMAVGTTIDPESFDDIPENFSIHQRVPQLEILKKGELFITHGGMNSTMEGLNAGVPLVAVPQMPEQEITARRVEELGLGKHLQPEDTTAASLREAVSQTDGDPHVLKRIQDMQKHIKQAGGAEKAADEIEAFLAPAGVK

SEQ ID NO: 6953 - protein, 525 aa, Bacillus licheniformis
LSNQGNFKKTISLLDLILIGMGAIFGSAWLFAVSNVASKAGPAGSFSWIIGGVIILLIGLVYAELGAALPRTGGIIRYPVYTHGHLVGYLISFITIVAYTSLISIEVTAVRQYVAYWFPGLTIKGSESPTIIGWLLQFALLCLFFLLNYWSVKAFAKSNLIISVFKYFVPLTIIIVLIFHFKSANFAGEFAPFGFGGVQTSISTGGVMFAYLGLHPIVSVAGEVKNPQRNIPVALLICIIVSACVYTILQVVFIGAIPTDMLNDGWKAIGREFSLPFKDIAVLLGMGWLATLVVLDAILSPGGNGNIFMNTTSRLVYAWARNGTLFKIFAKVNKPTGIPRPSLWLSFALAVFWTLPFPSWDALVNVCSVALILSYAIAPVSAAALNVNAKQLKKPLQIKGMAVIAPVSFIFASYIVYWSGWNTVSWLLGSQLVMFAVYCACKKYVPQDDVSFAQQLKSSWWIVGYYVMLLILSFLGSFGNGLGLLRTPVDLILIALGSIAVFYWAKYTALPKAVIDYDEKKEETV

SEQ ID NO: 6954 - protein, 99 aa, Bacillus licheniformis
MNEFIQNMTGMGAMTEQVIATDFLISAKTGVKNIATAITETSSPEVRETLKQYLNDAIDTHEQITNYMISKGYYHPANLSEQIQIDTKAAETAKDLPQL

SEQ ID NO: 6955 - protein, 66 aa, Bacillus licheniformis
LNNAIHETLELHELLMFKNLCLTKSSTMTGMVQDQELRDILERDASQTKHQIEHLQGLLSVRGETV

SEQ ID NO: 6956 - protein, 419 aa, Bacillus licheniformis
LFIYTVQPGDSLFVIGAKFGISIDQIRLANGLIATNIVPGQALLIPLYTYTVQPGDSYYTIARRTFVSVEALQKANPSVTPSNMRPGIKVMIPELPKKPITALGYYTLRNPRLDQELIHNFAPCATYLAFFEYHISSDGSLSELNDSPAVQTAWRRRVPPLMTVTNLTESGFSPSLAHRVLNQPAVRNRLIDNIVQTISRKGYSGVNIDFEQILEEDRDLFSGFLRLLKERLKPSGYVLTIAVPPKTNENIAWLKGYDYGGIGAVSDLIFIMAYDWHHGTSEPGPIAPINEVRQTIQFALRHVPKEKIVLGFPLYGYNWTLPYQPGAVYPGIANQDAVQLAMKHQAPIQYDTNSESPFFRYTDEQGRRHVVWFEDARSIGKKLQLITEYGLDGGGVWQLTLSFPQGTWLLTKFFRVRKV

SEQ ID NO: 6957 - protein, 194 aa, Bacillus licheniformis
LGRSKEFDTALVLHKAMEVFGQFGYEGASMQELLSRLGIARQSLYNAFGTKRDLFIAALTRYLDDKNAQVIAMLESPGSVKQSVRQIFQESLNVLKDPERSKACYIINSAIEQIPRDPEVAEYFDKQTKQLETAFYKALVRAQSQGELKKGLHDLSAVARFLNQTRLSLTFQAKLTGDFDALQDLIDVSLSILD

SEQ ID NO: 6958 - protein, 38 aa, Bacillus licheniformis
MSACLFLIDILFVMGRWAAARFYHYFRLIGQKRMEERK

SEQ ID NO: 6959 - protein, 139 aa, Bacillus licheniformis
MTRAITDVMELFLQSMLEKDMEKWIQLWDQDAVFEHPYAPPGFPKKIEGKSAIYDYIKDFPEKIDIVRFTAPTIHQTAKSGYSAVEFECEGIVCETGLPYNQQYISLVNLKAGKIVHYKDYWNPLTVVKSFGGQLQTFL

SEQ ID NO: 6960 - protein, 287 aa, Bacillus licheniformis
LTRSDESGKKILITGGTGTTGSRIAKRLVHLGAGVRIASRRIPAITGAEHVYFDWNDQTTYKDALKNTDSLYLVAPVGVYEPSPIVLPFLEMASAFGVRRIVLLSAAIIDEDGPVFGKLHHAVRRYVPEWAVLKPSYFMQNFDHQHGASIREKNEIVTASGDGKVGFIDADDIAEVAVRALLDQKPHNTSHILTGPEALSYAEAAAIIGRAAGRDIRHVNVEVSALRTRYIKAGLSPDYAGFMSELDEKIKNGKENRITDTVERITGKKPRSLADFANEHAGRWRLF

SEQ ID NO: 6961 - protein, 101 aa, Bacillus licheniformis
MENAEHLQQTAVPEQHTHIPQYQHPETALHHIKCPLFPHLKHKTLCTVAPFVHYGLNEAQATSYHHAMEEVAAMAYLMGMGMNPHLAYCTVESWEINETFY

SEQ ID NO: 6962 - protein, 151 aa, Bacillus licheniformis
MAKHHFYLQADWPGKRNDIGRIESGNLKTEISIPKEMDGPGAGTNPDEMLLGAAATCYIITLAAMMERSGLEKESLTMESEAVVDVTGGVFTYEKIIHRPLIRLPKEAAQKEAELAERLAKKAETSCMISRAVQGNVAIELEPKIVVSKAD

SEQ ID NO: 6963 - protein, 119 aa, Bacillus licheniformis
MKGMIFLAAAILSEVFGSTMLKLSEGFSAPLPAAGVIIGFAASFTFLSFSLKTLPLSAAYATWAGTGTALTAAIGHFIFQEPFNLKTLIGLTLIIGGVFLLNSKRTEAADQKAQLTIEI

SEQ ID NO: 6964 - protein, 105 aa, Bacillus licheniformis
MIAGYIFLLIAILSEAAAAAMLKISDGFARWQPSVLVVIGYGLAFYMMSLTLQVIPLSLSYATWSGAGTVLTAIIGVLWFQEKLNRRNIAGIICLVSGVVLINLS

SEQ ID NO: 6965 - protein, 87 aa, Bacillus licheniformis
MLVRYHFIIGGIFLCIISTMLLYIRRQPANHWQAFLWRTFWAAVFRPASIFRSGPLLRRIFGRPYCRSASRPLGISVSAVSLLSLFL

SEQ ID NO: 6966 - protein, 133 aa, Bacillus licheniformis
MTLYQSDWSKAPPHAHAYRARTTTAEGHYHLIEGFSQPANGSNTDGHVHFYSGITSFDDGHYHRYYAITGPAIPRADGTHYHEIEGTTYLAYSAAPPVRYGGVVYVSDGMKERHRHPFKGYTREIVGNEPIGW

SEQ ID NO: 6967 - protein, 314 aa, Bacillus licheniformis
VNKTKPPVIVLIGPTAVGKTKLSVMLAERLNAEIISGDSMQIYKRMDIGTAKIREEEMNGVPHHLIDIKEPTESFSVAEYQEIVRQKIAEIDRRGKLPMIVGGTGLYIQSVLYDYSFTEEAGDPEFRAEMEAFSAKRGAEYVHDLLKERDPEAARAIHPNNKRRVIRALEILHTTGKTMSEHMEGQRKELLYTTALIGLTMEREVLYDRINSRVDQMMDEGLLDEVKLLYDENVRNCQSVQAIGYKELYAHLEGRASLEEAVETLKRNSRRYAKRQLTWFRNQMDVAWFDMTPPVNIEQKKQEIFTYIAGKLEL

SEQ ID NO: 6968 - protein, 73 aa, Bacillus licheniformis
MKSINIQDQFLNQIRKENTFVTVFLLNGFQLRGQVKGFDNFTVLIESEGKQQLIYKHAISTFAPQKNVQLELE

SEQ ID NO: 6969 - protein, 69 aa, Bacillus licheniformis
LHGFFRLPDKILKQVTVLGFFVFRATLQSPAAVAGLSEEKNFGNLSKTPPSSRPVKVRGIQIYKAASSR

SEQ ID NO: 6970 - protein, 70 aa, Bacillus licheniformis
MKPKIVINHWEETCEDDSCYEYGTSILVNGKELVREASIMTAVQSVLKELGIEADIKEVCENKCCDAYKK

SEQ ID NO: 6971 - protein, 131 aa, Bacillus licheniformis
MIQIVFDSKTGNVQRFVDKTPFRNKRKVSTEEYLDEPFVLITYTTGFGEVPKTTEMFLEKNAHLLLGVAASGNRVWGDNFAKSAEKISKQYQVPILGKFELSGTAKDVELFTQEVERVVTKSSAKMDPVKQ

SEQ ID NO: 6972 - protein, 700 aa, Bacillus licheniformis
LSQNQVPKWIQLNNEIMIQKDGKFQFDKDKEAVHSYFVDYINQNTVFFHDLKEKIDYLIKNDYYEEEFLSRYTFEEIKEVFKEAYAKKFRFPSFMSAFKFYNDYALKTNDKKKILERYEDRISIVALFFANGDKEKAKEFVRMMINQEYQPSTPTFLNAGRKRRGELVSCFLLEVNDSLNDISRAIDISMQLSKLGGGVSLNLSKLRAKGEAIKDVENATKGVVGVMKLLDNAFRYADQMGQRQGSGAAYLNIFHRDINDFLDTKKISADEDVRVKTLSIGVVIPDKFIELAREDKAAYVFYPHTVYKAYGEHLDEMDMNEMYDRLVEDPRVKKEKIHPRKMLEKLAMLRSESGYPYIMFQDNVNNVHANNHISKVKFSNLCSEVLQASQVSSYTDYGQEDEIGLDISCNLGSLNILNVMKNKSLEQTVKLATDSLTHVSETTNITNAPAVKKANKAMKSIGLGAMNLHGFLAQNNIAYESEEARDFANTFFMMMNFYSIERSAEIAKEKGGTYHGYEGSAYATGEYFEKYVTQDFSPKFEKVAKLFEGMHIPTKEDWKQLKQFVKEHGLYHSYRLCIAPTGSISYVQSSTASVMPIMERIEERTYGNSKTYYPMPGLAPSNWFYYKEAYDMDMFRVVDMISTIQQHVDQGISFTLFLKDTMTTRDLNRIDLYAHHKGIKTLYYARTKDTGQEGCLSCVV

SEQ ID NO: 6973 - protein, 325 aa, Bacillus licheniformis
VTKIYDAANWSKHEDDFTQMFYNQNVKQFWLPEEIALNGDLLTWKYLGKNEQDTYMKVLAGLTLLDTEQGNTGMPLVAEHVEGHQRKAVLNFMAMMENAVHAKSYSNIFMTLAPTETINEVFEWVKQNKYLQKKAQIIVGLYEKIRQGDKISLFKAMVASVYLESFLFYSGFYYPLYFYGQGKLMQSGEIINLILRDEAIHGVYVGLLAQEIYNQQTPEKKEELYAFSIDLLKELYENELEYTEDLYDQVGLSHDVKKFIRYNANKALMNLGFEAYFEEEEINPIVLNGLNTKTKSHDFFSMKGNGYKKATVEPLKDDDFYFDDN

SEQ ID NO: 6974 - protein, 205 aa, Bacillus licheniformis
MGKMDEMILVVPRENVFANETLTFQGVNSDGETIGKIMAHIERHFSEMRRGDAEEDPAFKQPIPYVVIKREDEIFVYERLEGGGEARLHNKLSLGFGGHMNFAEGLDFPDILKLNTDRELDEELLIEESAKEKMVTLGLINDDENSVGKVHIGILSALELKPGAHVEVKEKEQIAGRWMKASDLKEKSVYDRLESWSQFVVDILV

SEQ ID NO: 6975 - protein, 266 aa, Bacillus licheniformis
MKEPYRMQLESFQMTILSDGAFRVSRDFFLAGGDSKETERYPEEFEAALNFACLETNGKRILIDTGFGETGGQESGHLLHHLKQAGIKPDSIDYVILSHSHLDHTGGLLKNGEPAFPNAVHLLSEAEWLYAKQTPASPQFHILSAVRPLLKLLTEDTELLPGLKLIHTPGHTPGHLTIELHTKDGVCQIINDVFHIPESISNPKLRVSLEHDPIEGEKTRRLLARQAYNGQFLLHGCHFPYPGFGLIEKHGSFFQWKPVLYEKKTR

SEQ ID NO: 6976 - protein, 143 aa, Bacillus licheniformis
MPTLEELYRSVIMDHARYRRNFRKIDKRDAYYVHYKNPTCGDVMTLFIDIKNEKIEDAAFIGDGCDISMASSSIMTELIKGKTLKEAGLMREAMEGMIRKGEEPADDLIGDAVSLMGVHPLRARHNCALMPWQAFDQIKENVH

SEQ ID NO: 6977 - protein, 68 aa, Bacillus licheniformis
MEIKTKVKQEAMAQLKRKGIRITPQRLAIYHYFLADRNHPTIADIQQPPEGSLSCRQYSDDIQHHPLF

SEQ ID NO: 6978 - protein, 240 aa, Bacillus licheniformis
MKSNLFLLVRKTKNRYIGFMMKNNIKRIKRISLREEVYQTLKRAIVHLELKPEERLHDQELAEQFGISRTPVREALKRLEDEGLVEAVPGSATRVSPLNREEAEHAFTVTAALHALAVRLSLPFLTDSDFDQLEAHNKTLQQAIQKEDIIEAIESDAAFHDVFLQASKNPEITRALERISSKIYRLEMSQFSSIGSLKSVEQHQSIIDACRRGDRDAAIRLAEENWLSLGDRLAGHQEKE

SEQ ID NO: 6979 - protein, 322 aa, Bacillus licheniformis
VRPIILGVFAAFFFAFTFVLNRAMELEGGSWIWSASLRFIFMAPLLFAIVWLRGNVKELFQEIKKAPGIWVRWSIIGFGLFYAPLCFAAAYGPGWLIAGTWQITIISGSLLAPLFYETIQTKTGPVQMRGKIPYKGLTMSFIILIGVALMQAEHAAQLSLHEMLLYVAPVMLASFAYPLGNRKMMEACAGRLDAYQRVLGMTLASLPFWLILSLYGLASAGAPSRGQVIQSGLVAVFSGICATVLFFAATDLVKGDMRKLGAVEATQSFEVLFAAAGEILILSSPLPGAISWSGMALVIIGMVLNSHASNQKPAVQSKAAKA

SEQ ID NO: 6980 - protein, 253 aa, Bacillus licheniformis
VVKIFIDPGHGGTDPGASANGLQEKQLTLQIALALRNILLNEYQNVTVQLSRTSDQTVSLTQRTNAANSWGADYFLSIHINAGGGTGFEDYIYPGVGAPTTTYRDIMHEEILKVVDFRDRGKKTANFHVLRETAMPALLTENGFVDNTSDAEKLKSSAFIQSIARGHANGLARAFNLSKKSTALFKVQIGAFRDKANADSLAAQAKAKGFDAIVIDRDSLYKVQIGAFSSKENAEALVQQAKNAGFDAFIYQE

SEQ ID NO: 6981 - protein, 44 aa, Bacillus licheniformis
LHLLPAGIHALISYYAIRFKMNKKAETALYFKFHSNLVYIKFLL

SEQ ID NO: 6982 - protein, 160 aa, Bacillus licheniformis
MKNKSMYVFLFMMLGLFAGMAFPIQTSINSELRNAIHSPFIASLISFLVGMLVLLFLTSFIEHRRLFLNNLQTAKTFVTSSPWWLWTGGILGVVFITSNILLLPIVGASLTVVLALSGQMIIALVIDHFGWFGIPKHRLNVQRILGIVLMITGIMIIQHF

SEQ ID NO: 6983 - protein, 150 aa, Bacillus licheniformis
MMIILILIAGILAGMAIPVQTSINSRLGMKIGSPYGAAAISFFVGTLLLLIVALVTERHFLSIIGLVPSIPWWILIGGGCLGVFYLTSNILLLPRLGSALTVVVTLLGQMIMALAIDHFGWFHVPVHELNFPRIIGILFIISGVFIIKKY

SEQ ID NO: 6984 - protein, 79 aa, Bacillus licheniformis
LNFNVQDAMAKVAKEKTKVSFTMTGIPKVFVWRIVKIKVIVPLGCSTDLRYLIHKGALSTLSRRGDHNKQSFHQSTLAS

SEQ ID NO: 6985 - protein, 61 aa, Bacillus licheniformis
LIFTIRHTKTFGIPVIVKLTFVFSFATFAIASCTLKFKANTFLNSRFISTYHFYICIKNQV

SEQ ID NO: 6986 - protein, 67 aa, Bacillus licheniformis
VFNEREALRLRLEQLNNAEIQIIRELQSERKDIYSRLRKLDRQKVSSSHHKKTLLELVDETVNLLKK

SEQ ID NO: 6987 - protein, 207 aa, Bacillus licheniformis
MGNTDTREELLHIALELFATKGYHAAKISDIVKQAGVAQGTFYWHFKSKEEIAKEIIGRGKDNLLAAIHQGYRQTFALADDMIQSTTALMKRIFTFAQENRNLMTFLLVKGQGADPEIREAIEEALISVEQAFKKNIQRATELGMLNSSHNTDLQATMLTSLVLGTLSKWLFGPKHDLNYVPKFSVDEMTEELVHFEFFGLIGQRGN

SEQ ID NO: 6988 - protein, 128 aa, Bacillus licheniformis
LSTIQKTNGEFGIFHEAGMQAKGSFTPNSDGLSPIELLEASLGMCITISLQKMFERDGIEVLEDEFSVSVSAAKAPEGPSRVEKCSVSVKLPEHLPTDYKKKLITSAERACTIGNTLKRGVTIDTNMV

SEQ ID NO: 6989 - protein, 449 aa, Bacillus licheniformis
MENNSKKPSYTNADDFAVTSVPENKRKSIFNITITSCAWIISLSTIVTGGALIQGLNFAHAVLAAVLGMLILAVYGFFQGVMGAKYGISTTVLARQAFGRYGSSLFGIVLALTLGIGWFGWQVAFFGTTISEMFPGVWLAKPEVAIVWGGILMILTAFIGYRGLAALSFIAVPLVVIFSIWGIISAVNYSGSWHNLLTFHPTGDPLTIFAGITIVVGNAALGAVVFPDVTRYAKGAVSGGIGASVGYFLGGVFCLVAGAAMAIAANVPDIGSTPNIPAAMSKLGLGFLAFLIIVFAQWTTNDNNLYTGSLGLRNVVNIPKKALVAIMGVIGIIIALLGVQNMFVPFLTFLGLYVPPIAGVMIADHWITAPVIKKKQYQFGAGTTYSKLNVAAILSVIIGGFTASKITFGIGPINSTILAFLIYIIFTFIFTKLNLRYEIGEATEESSGF

SEQ ID NO: 6990 - protein, 701 aa, Bacillus licheniformis
MMNEKNQWVFGIDVGGTFTDLVAVNKDGKMVSTKTPSTPDQSDGVMNGIKKMAEIIGIDVKDLLANSPLVVHGTTVATNALLEYNGAKVGLLTTEGFRDEIEFRRAYKESVFSPRLEAPYQIVPRRYRVGIPERLDHTGNVVTKLDEEAVRRAVRGFIQEGVEAVAVCFLFSFMNPSHEIRVKEIIQEEAPGMFVSLSYEVLPQIREFERVSTTIVNAFTGPSMQSYLNHLDERLREDGFTGELFVMQSNGGVQNVIQSGKFAAGGLLSGPAGGVTAASFIGEKSGYENVITVDMGGTSYDVSVIEKLNPAITTENWISRYRVALPMMDIHTIGSGGGSIAWIDSGGALQVGPRSAGSNPGPACYGRGGEEPTVTDVNVFLGYINPDNFLGGEMKLDRSLAEKAIRTRIAEPLGISTVEAALAISQIVNSDMSNAVHFVTTQRGHDPRNFALMAVGGAGAIHAGKQAEDLGIKTVIVPSLAPVFCALGDVAANLKVTELRTRFESLKNVDLQAMNADFEKMEQTAREKLGGQSVTNQYETRRFIDMRYAGEVHEVTVPVKSRTRRITELNLEATAADFHDLHERMFAHKDPEHDIEILNLRLDLVGVREPLKLKEEQFEQEDPSKAKTGERDMYFDIEPAKTPIFNGSMLEPGNLIVGPAIIEQWGTTIVVYPGHEALIDSYRNCVIEVKHAQQATRGGNA

SEQ ID NO: 6991 - protein, 492 aa, Bacillus licheniformis
MIQAQILYRKLQAIGREVGDNLQRISRSPVLSQDRAFAAAIFTNELKIAVQHQYEPEHLFALKESVENLFDYFSFDIADGDVLLVADPYSGGTKGQSLTMAAPLFLEGELVLFPAIRAQMIDLAGEYPGGFHPDAFEVWQENIRITPVKLYKQGVLQTDILRFLLSNSRVPASFKADLEAMYTCLHGAKQQLKTFLGSYGQKTVAASIKSMFEYSQKRVEHHVSHLPETEMSAVQEFEVTKGHKSTIHVQISKKENAVEIDLSGSSEQSVKPVNSPAALTKAFAVWPFLARIADEIPINEGTLQPFQTKTRPGTILDPEFPAATALAPSITGHFVAAAVFKAIQNGQGTSEEFPPIYGPGPQAVFYPELGTGAETKSIVLAPGYPSASKGFGPPALFGQRMLVSAEELELYHGFKMVSREWTDNGEEMEVSLLNQEDDIYFNLLLPFSERGKYGSLSRTGDHDETFYESTVHQHVKKGDLLVFTYSQKEEQL

SEQ ID NO: 6992 - protein, 579 aa, Bacillus licheniformis
MINQDFILSQVVGGSLDAVAREMSATVTRTARSPLFNEAHDFTTGVFDLSGKKSRLVAQAPGCTLHLYAVVGAVDHLLDAFRYDLHPGDILLVNDPYHGGSHSLDWTIVMPVFYNRKPILLPAVRSHMADNGGPVAGGYNPRSKDIWHDGLRIPPLKIYERGEKRRDVFDLIVANNRLSHWLEGDLNAMIGACKVAASRIQTMLDKYGAEKVITAIDNRIQYTENRVRDEISSWPDGTYVGETFADHDFQGNRDIKVRATVTVKGSDLHIDFTGSSPQVKGFINSPLSNTTSFAFVGISTCCDEDIPINEGYMNPVTVTAPIGTVVNPQLPAPCGHATACVGAEIAEAVLQAISQCAPKRVGVNAHKLPLAYSHGKYDDGKPWVNLNFYGYTGGAGAAYETDGWGLYPPVMTGVILPSIEMTEVQYPSRVLKHEYTSDFTGAGRWRGTPGLDVQIQHLKESRTSVMMAGGRNTTKGFCGAGDSPSNKVIVGYGTDEAREIDETAFEVKMPAGGIIQFYRAGGGGWGNPLEREPEKVLDDVLNEFVSIESALQDYGVVIDPETLAINEAETKRVRASRLP

SEQ ID NO: 6993 - protein, 144 aa, Bacillus licheniformis
MKNKKAFWGPFLFGVGIIAMIDGIIFHQLLQWHSVYMDTDRSHQIMSDGLFHLFSLVILFIGGILLWNRGELGSSRPQHIFWGASLLGAGWFNFLEGIINHHLLQIHHVNQLSPNRLLFDFAYDASGLLIILAGWLIYRKGKQG

SEQ ID NO: 6994 - protein, 41 aa, Bacillus licheniformis
LSAQLPEYNKKIFLGKAQVSTRPALFLSKFEEIKNPHFKKM

SEQ ID NO: 6995 - protein, 37 aa, Bacillus licheniformis
MSVKRYEHLFSTEYLFLIPFLLEVNSCTLPHFKNLFT

SEQ ID NO: 6996 - protein, 56 aa, Bacillus licheniformis
MLSVLLPNLLIFSAIILFLYYMIVLVKENKINRKQNEETQQLLREILKEVKNKDSK

SEQ ID NO: 6997 - protein, 113 aa, Bacillus licheniformis
LDKKDIKFLEELLYNTDKDDLVRVTRNIENPVILQVFAANYNWNSGFDVPKAILENENCDYGTGLLMFHYADGYRMLESPDNVSASALEEWKDFLIQTYQKLINLQFKSQNIS

SEQ ID NO: 6998 - protein, 64 aa, Bacillus licheniformis
VMKNISKYVVLFFGVALFLYFYDMFMPKSVLYFVVGIPALYISTVLIMKTLKLQKIQKINPELK

SEQ ID NO: 6999 - protein, 41 aa, Bacillus licheniformis
MNIKKGKIEFLKYMYKKLDCDFFKPQTIWLGCDYSKITVLF

SEQ ID NO: 7000 - protein, 232 aa, Bacillus licheniformis
MVNVLNNILKNDRLDAYPLFKKFCSLKEKGLRKKSFTALSSFIDEAKKWDDIAQQNFACWLFALFETSDDIHHVLVHPLEKELLQPLLERWMKSDPEDSRPYRWYGVFLNPENRVDYLNNALRLGGGNEQLSLLTLIDINLNALWYSFHHISEDLYLGDIKEDTALLAKSRQLNNKVECEQTRKNNNEALNYYQDLLDDWVMFKKERSKGFVEWCENKGRTYYWVKAYYYER

SEQ ID NO: 7001 - protein, 320 aa, Bacillus licheniformis
LERAVTYKNNGQINIILNGQKQVLANSEAEAEYQAALQKNEAKHSILKEIEREMNTLVGMEEMKRNIKEIYAWIFVNKKREEQGLKAGKQALHMMFKGNPGTGKTTVARLIGRLFYEMNVLSKGHLIEAERADLVGEYIGHTAQKTRDLIKKAMGGILFIDEAYSLARGGEKDFGKEAIDTLVKHMEDKRNEFILILAGYSREMDHFLSLNPGLQSRFPISIDFPDYSVSQLMDIAKRMMAEREYQFSPEAEWKLKDHLMAVKSTVSPAKFSNGRFVRNLIEKSIRSQAMRLLMGDCYLKNDLITIKSQDLDLKEDAPHV

SEQ ID NO: 7002 - protein, 420 aa, Bacillus licheniformis
LNEQEVMKEKAILVGCQLPHVSDERFSYSMEELAALTKTADGTVVSTVTQKRNRVDAATYIGKGKVDELAVLCEELSPDVLIFNDELSPSQLKALVTTLDVKIIDRTQLILDIFAKRARTREGKLQIELAQLQYALPRLSGQGINLSRQGGGIGTRGPGETKLETDRRHIRNRIHEINVQLSTVIRHRSRYRERRKKNGVLQIALVGYTNAGKSTWFNRLTDADSYEENLLFATLDPMTRKMMLPSGYSVLLSDTVGFIQDLPTTLIAAFRSTLEEVKEADLILHMIDSSHEDYEGHEETVKRLLEELEADDIPVLTVYNKRDRKRPDFIPSSGRGHIMTSAKIDGDLPLFKQAVEDYLKKELLVPYDVRIPASEGRLLSRIKSETMTNSTVFDEDREAYEVEGYILPDQNILGELKKYM

SEQ ID NO: 7003 - protein, 421 aa, Bacillus licheniformis
MFETLKHGDLLKKTAVEAETDIAQIHKTIDEISERNEWRVLESYRKHKVSDTHFTPSTGYGYDDIGRDTLEKIYADVFGGEAALVRPQIISGTHAISIALFGVLRPGEELLYITGKPYDTLEEIVGVRGEENSGSLKDFQIGYSHVELTEEGAVDFDRVAASITPQTKVVGIQRSKGYADRPSFTIDEIEKMIRFVKEINENIIVFVDNCYGEFVEEREPCHVGADLMAGSLIKNPGGGLAKTGGYITGKEKWVKACSYRMTSPGIGSEAGASLYTLQEMYQGFFLAPHVVSQALKGAVFTARFLEKLGFRTNPSWGSKRTDLIQSVEFSTPEQMIAFCQAIQYASPINAHVTPYPSYMPGYEDDVIMAAGTFVQGASIELSADGPIRPPYVAYVQGGLTYSHVKNAICSAVDALMKQGLM

SEQ ID NO: 7004 - protein, 135 aa, Bacillus licheniformis
MSDKIRRSMPLFPIGIVMQLTELSARQIRYYEENGLVFPARSEGNRRLFSFHDVDKLLEIKDLIEQGVNMAGIKQIFAKTENEQKEDKQDKPKKAEKHNLSDEELRKLLKNELIQAGRFQRGTTFRQGDMSRFFH

SEQ ID NO: 7005 - protein, 444 aa, Bacillus licheniformis
MAKYTRDDIVKLVNEENVKYIRLQFTDILGTIKNVEIPVSQLEKALDNKVMFDGSSIEGFVRIEESDMYLYPDLDTFVIFPWTAEKGKVARFICDIYNPDGTPFEGDPRNNLKRILKEMEDMGFSDFNLGPEPEFFLFKLDEKGEPTLELNDKGGYFDLAPTDLGENCRRDIVLELEEMGFEIEASHHEVAPGQHEIDFKYAGAIRACDDIQTFKLVVKTIARKHGLHATFMPKPLFGVNGSGMHCNLSLFRNGANAFFDKDADLQLSETAKQFIAGIVKHATSFTAVTNPTVNSYKRLVPGYEAPCYVAWSAQNRSPLIRIPASRGISTRVEVRSVDPSANPYLALSVLLAAGLDGIKNKLEAPAPIDRNIYVMTKEERLENGIVDLPATLADALEEFKSNEVMVKALGDHLFEHFVEAKEIEWDMFRTQVHPWEREQYMSQY

SEQ ID NO: 7006 - protein, 67 aa, Bacillus licheniformis
MLELDRNINKVNGLKEEHAKGILKIICGKLDNLKHAGDQYTEKEFVEDIRSIIENFPELDNKEENNE

SEQ ID NO: 7007 - protein, 55 aa, Bacillus licheniformis
MSIIILASMLLWGALIYELSKSSKKQNNRKIVSLISLGSLSTLVITISLFQNLPF

SEQ ID NO: 7008 - protein, 155 aa, Bacillus licheniformis
MNLSRFLNSIQLSPQSKPMMELLELNEKTKEHGLILTPSDIKMLIVYRNKVLHDHGRIELGIEVLKELIEVFAASPYMDEDNYVETLIELQEIFYYLRNETEDKIGDMKLIHQMMECFNGPSAGSLEILRSKMEELAESFRRDTMRSESLYKGDE

SEQ ID NO: 7009 - protein, 478 aa, Bacillus licheniformis
MDKENTLNRYDLVSNFTIDKSKLKQSQYMLSLLKEGQSVGVITSEKAYKIQVEIMQILQRLVGQYTKGESMSVTTETAEGIMVSLMYAIDAYALHFEKPEEFIVHLHSDSIKNIYTNGVALLHCYFEEAKQLYQDVKKIKLDVPVDAYTLTIDESLPVFMNHYNVIFEAQNTMASIDYPLAIDNMELQGVFYIKQYLERLLIETRFCHFFNHHDLMYVLANFGRICHFNYRIELFNIFELMINNAVFSLLSGGEANQVRISEVQYDRLSRLLSDCHADKRANLINNAFDRLQRDLKTDQTISDYINLYRNEFIQRVNNAAEIDGFKMLIIREIEEREKPIALMLNENDRMSDIELRKLVDCIMERKNTAEKILLIRDHFVSLHDYLDLLNSGCLFDDEYDALFATFGNFELAIFAKIVFYEELRGGILNFIDIVADCSEAKSEWETYYMKFIKQLEDERIATIGHLINDIDYEEISFY

SEQ ID NO: 7010 - protein, 105 aa, Bacillus licheniformis
MFIKYNEYDLLELFESEPVSIADDPEAGELIYTFKDNQNFKLILTLDVYQLTCSLDITYKDFLVFTGVFQNITSIKKVEDFMVISIGEEKRIKVKFTKQIGVELL

SEQ ID NO: 7011 - protein, 142 aa, Bacillus licheniformis
MNSEIDKCIFCEIVSRKISSFEVYKTDYVTAFLDINPVTNGHTLIIPNKHIERLDHINDPHLSNEIMDSLIKVPQLLIQSGICDDYTILSDNGHFAQQDIKHLHFHVIPRHMNEKFEFKLNTDFTAAKKSNLLSIWKKIVGR

SEQ ID NO: 7012 - protein, 100 aa, Bacillus licheniformis
MNFDPEKLRKFLNCASNPSSPKNTKIKNYCVNQECQEFVAFDIDFENVDIALRIAGMLGKSATKFTINHFLFPGTNKIDYIQFIIFEINDSELLAFLEQL

SEQ ID NO: 7013 - protein, 325 aa, Bacillus licheniformis
VFFAKIIDRLALYDLHRKRSKDEHFSAFSLNPIDRDEFYKAKAADVAIMLYESRKNHLAGHFSYESLIPSGDPVNDALKGEVFLNKNDIDQPNVIFVHGWRMDSYDRIKKIFHDRIMNELGWNLYYYSLPYHFEREPEHSLYSGELMISANLNRTVDSTRQAIVDLRALIHWIKANKNGPVIIVGVSLGGWMTNLLATLETQIDIVVSIFYANRLSYAIWNTIPGKFIREELEQHGVTYEDLKTYWEITDPSQAAPKINKDNILLISAVHDQYVHLEDADKLWESWGKPERHLYNCGHAGIVLCRKKLALDTISFIRKKLKQLHK

SEQ ID NO: 7014 - protein, 80 aa, Bacillus licheniformis
MYFVSGFVSVLLGLVMLFTLRLLSVAIPHVITDAAGNDEASAYFQSSVLFYPVLLLILGVVLIIVHLRTNDKEKDSFKGE

SEQ ID NO: 7015 - protein, 159 aa, Bacillus licheniformis
LFRSKHNIPKVKFDYKFTSDESDIPMKMRKGPSVAMRVEGELEIKINEITYFKENIALLEFYVSLNEWIKKNKKKNKVTEYRYYTMEYEKGEPIISLIPFDYKARLTTIWKTQQLYNVFDLDYITEQMEISHKKLGRDIEHHYRISLKSFVGKIPLRKY

SEQ ID NO: 7016 - protein, 198 aa, Bacillus licheniformis
MNFWHKRFQDENYVYGTEPNAFLADSQKKLQLSGDALAIAEGEGRNAVFLAEQGMNVTSWDYAESGLKKTQKLAETRHVSVKTELVDLNEASWNQDQWDEIVCIFGHFPEELRRKTLLGVKKAVKPGGFFVTEVYSTHQIPYKSGGPQDPELLYTPEEFLQIFSDWRTVHFFMGEVVRHEGDSHNGLSHVIQFIGQKQ

SEQ ID NO: 7017 - protein, 159 aa, Bacillus licheniformis
MKNNIRLKRLLMISAILLLIVGGYVSAMIFGKKVVYEGTGESGLWHASIEKSDKTSIGPNYFLNLYWNGTEEDAKRTIVKTITLYIDGKKYDDRGEYDLSEYTGEEMDGGGHMEDHIATFDFMPEEDVIGHALSVKVEWKTGDEENAETMKLNKIPWYK

SEQ ID NO: 7018 - protein, 191 aa, Bacillus licheniformis
MNDIEIRRPRIDDVEELNQFFRIVVEDTFAKEGIADLLDDKESEIESKRQYLKADLDSKGNSRHFFIASDQRLNKIIGTIEYGPASELIGICTDGALKDLYEVGTVFVHPDYQRRGIGTLLLNVMFLTFLNQGVNEFCLDSGYPGAQRIWKKKFGEPDYVLKDYWGKGYDHMIWRRRTKDMPIDTRTSVMP

SEQ ID NO: 7019 - protein, 158 aa, Bacillus licheniformis
MFNEREALRLRLEQLGDAEIQVMRELRKEREGIYSKLRELDRESEPAINKKSSLIDLASAAAEELKQSQHAADKHPPIKTPSHTIFQSKTTIQREAAINILSRYEEGLKGIKLKTEIEKETGFPIKNMTTFMKSLMKHRPDIKKPARGHYILHKEKDL

SEQ ID NO: 7020 - protein, 57 aa, Bacillus licheniformis
MLDKKKYFMIMVPALILGFLFQFFVPSEQRYLGIVFILAGGVIYYLWVHIEKDKQKD

SEQ ID NO: 7021 - protein, 206 aa, Bacillus licheniformis
MELTITRALSELKMLDKRIKRAVNEATFGGLMIGKKLPNGFRTTEDLESRAKADYQSIEALIKRRNAIKSAIVVSNATTKIEVAGVKMTVAEAIERKTSISYDIQLLDKLKEVYADLVGEAENVNQKVTERLDKHLETLFGKDGKVKAAENQEIVKSFLAENEAKIIDPLNLKEKIDCLSKKIEDFEMEVDFALSESNTLTKITID

SEQ ID NO: 7022 - protein, 37 aa, Bacillus licheniformis
MNIAFPLKQNREISKKFNMLDNEDWYQNIANRLGTFQ

SEQ ID NO: 7023 - protein, 39 aa, Bacillus licheniformis
MELILLKPLIKLACGAASLIAAVLAVCFAVKRTKTNNRN

SEQ ID NO: 7024 - protein, 194 aa, Bacillus licheniformis
MSKQTSGKYEKILQAAIEVISEKGLDKASISDIVKKAGTAQGTFYLYFSSKNALIPAIAENLLTHSLDHIKSKVDGTMSFWTALDIMIDETFNMTELHQDIIVLCYSGLAFDHSMEKWEAIYQPYYSWLEGLIEKAVEKNEVIPDINVRWTARTIINFVENTAERYYIGAENDEELSVFKKEIFTFLKRSIGTK

SEQ ID NO: 7025 - protein, 111 aa, Bacillus licheniformis
LSWLLVIAAGFLEVVWASGLKHADSFVDWLMIFVLIAVSFIMLIRSYRNIPMASAYTVFVGIGTAGTYVTGIFMGETFSGGQIFFLIVLLGGIIGMKMFTKENNAQSGGDE

SEQ ID NO: 7026 - protein, 105 aa, Bacillus licheniformis
MPWMFLVISGIEEVIAAIAMKYVDGTRKKWPIIVMVLGFGLSFFCLSKAMQMLSAGVAYAVWTGIGSIGITAVSLFWFKERIRAPQLISLGFIIIGVIGLRLTSS

SEQ ID NO: 7027 - protein, 180 aa, Bacillus licheniformis
MINQLKLRPLEREDLPFVHRLNNDAKIMSYWFEEPYETFVELQDLFDKHIHDQSERRFIIEKETEMIGLVELVEIDYIHRRAEFQIIIDPEHQGNGYSSSATYLAMNYAFSVLNLHKLYLIVDEDNAKAIHLYKKAGFTIESELQDEFFVDGYYRNAIRMCIFQDEFLSLKKSKEEGMQG

SEQ ID NO: 7028 - protein, 118 aa, Bacillus licheniformis
VKNHIPWISLMIIFAAFLSGCNLNRVGTDEYYVHITGNGEEDTSKFDDGEEYSVFKYELAGFDEDGQEKTMEFTADKNLRIGAFLRLFYSENKGVKSWEEVDKDDIPAKAKEQLGVKN

SEQ ID NO: 7029 - protein, 144 aa, Bacillus licheniformis
MKKIVCLMVFSIMTAFGIHIQPAEAAVIKDEKKMTMTMTEDHVGFFMADSTNVNYYPTWLYYKLTIFNAEGCTLNIKLQRITLTGHAVTLSEKEYTGNHLHLSAADKVSGSPHRNHFLDITKVSGCGDVGITGFYGFEHQMPGY

SEQ ID NO: 7030 - protein, 48 aa, Bacillus licheniformis
LLLCSAAGYALYQHVAGGRNEQAGAVLHQQALHFKLSTLEGGDIELKK

SEQ ID NO: 7031 - protein, 406 aa, Bacillus licheniformis
MQKAYDRFKGDGFEIIAVNVRESKGAVKSFVDRHGLTFPVAWINRLKFTVLGKCIICLQVYSLIGKGERSECMSEECLSGKLICGLQTFLAIHRNSFKRHRQTPIVLIVHKVAQERSDLMFFHIKELQYHAKPDKPDPLFAKKLQEILGGQFGEISVALQYLFQGWSVRGNGKYKDLLMDTGAEELAHIEMLATMIARLLDGAPVGDLEKAAKDPVIGAILGGMNPQHAIVSGLGAMPADSVGNRWTADYIIASGNLLADFRANLNAESQGRLQAVRLYEETTDRGVKDMLSWLIARDTMHQNQWLAAIKELEAKENVVVPSTFPRNLEKREVSHVLFNFSRGNESAAGRWAKGPSMDGEGVFQYVEHPQPLAKKPVLRPAPPYIHDTPPSVIQHHRDDVLPPNLY

SEQ ID NO: 7032 - protein, 266 aa, Bacillus licheniformis
LKTYKETAVFEHTFWLQVLGDHARFILDSLAEREKNDIQKAKQFKQAFDVLLKKVNASPDLYSLTLEAEEYALQFRKFKLFIIKRHLTGDIKIHLSPTFINHMVNELEEYLLVLKYLKKREAPPVFHELHHHMLWLMDAAGHAGAIADDLDAVEKRLKEKSREFVKHFEQFYIKSVELTGYLRANVESFPALRRMNKDVKLEIELFRTFLKEVEELELTDQMLGTFSALMADHMMREECYYLMKIAESTNTQEPACDPAKPRLLEK

SEQ ID NO: 7033 - protein, 172 aa, Bacillus licheniformis
VQVRKIKDSDAKSYLKLCETIDEESEFMLFEPGERKLHAQRQIKQIESGMCEVFVCAADDGSLIGYVAAAKGQVQRARHRAHVVIGIRQAYIGQGIGVKLFQALEKWACEEKIHRLELTVMTHNTAAVRLYKKTGFIIEGTKKHALKVKGQYVDEYVMSKLINEQQREVSNE

SEQ ID NO: 7034 - protein, 100 aa, Bacillus licheniformis
MNDGCHQAIAAVSYYKTERTIDFNRQTYTKKQNQMYLYNDKILTASRQYRLEHVYDVSYRPFSEAGLLYLHTNQGVFAYEVNVDPGYFIEAFKKQKNPIK

SEQ ID NO: 7035 - protein, 198 aa, Bacillus licheniformis
MKKKTQNTVQKIVEAGYRLFAQNGYSATSVDEIMKEAGFSKATFYLYFKSKEMLFLHIMNEQMEDRFQTSMNCFRKKTLRGLLAGIEHLIQTSNKEHSTALFLEFMANSHRYPEIQRKVALLYEQWREFFVEMIEQLQEEGIVQKQLHPKVMASTLIAIFNGYNHQHHADPSINKQEQLQSIIFLLNPKLHLQIKDKL

SEQ ID NO: 7036 - protein, 151 aa, Bacillus licheniformis
MGSQDMERYEEELSLKAFIVLSRALQSIKKRVEEDIKCLGLNPTEFAVLELIYNKGDQPIQKIGEKVLIASSSITYVIDKLEKKSLIVRRPCPKDRRITYAALTNEGTALMNNLFPKHKAAMKGIFGGLDIKEKEVLIEKLKKLGFHAQSM

SEQ ID NO: 7037 - protein, 207 aa, Bacillus licheniformis
MTEFLELVKERRSASNFLPGYSISEQELNEIFEIVKLAPSAFNLQHTNYIAVLDKEKKNMLHEAANGQYKILSSSAVIIVLGDKKAFHQAKEIYEGLKLLGVLNKQEYDDMVHDTVSFYQSRGEAFQRDEAIRNGSLSSMLFMMAAKEKGWDTCPMIGFDPQKVKEVLNINEQYEVVMMITLGKEKLESRKPRGFRKPVNEFVTYIS

SEQ ID NO: 7038 - protein, 312 aa, Bacillus licheniformis
MKKKTSGIHHITAIVGHPQENVDFYAGVLGLRLVKKTVNFDDPGTYHLYFGNEGGKPGTIITFFPWVGARRGVIGDGQVGVTSYVVPKGAMAFWENRLAKFNLPYTKMNRFGEEYLEFDDPHGLHLEIVEREEGEKNSWKIGEITPDKAIKGFGGATLLSKQPEKTAELLEKVMGLEKVGEEGDFVRFRSSGDIGNIIDLKLTTIGSGQMGIGTVHHIAWRAIDDNDQLEWQKYVAENGYRVTPVQDRNYFNAIYFREHGEILFEIATDPPGFAHDESHQTMGEQLMLPAQYEHYREQLERRLIPITVKALD

SEQ ID NO: 7039 - protein, 202 aa, Bacillus licheniformis
MLSIDPLTKTERENYKFLIGSIIPRPVAFVTSLSEEGVLNGAPFSYFNIVSSNPPMISLSIQRSEGSQKDTARNILKSKEFVVHIVDEQNVEKVNATAASLPPSQSEIQLAELTPVESVKVSVPGVKEAKVRMECVLEYSLELGDKHSPGCDFMIGQVVQYHIESGIYENGKIDPRGLGAISRLAGHDYAKIGEIFTRERPK

SEQ ID NO: 7040 - protein, 219 aa, Bacillus licheniformis
MGFLDKLFRKSKEMDHMSNVKLAVVFYSMGGTNYQLAKWAAEGAKEAGADVKVLKVQELAPQSVIEGNEVWKATVDATKDIPVVTSEDIEWADAIIFSTPTRFGNMASQMKQFLDTQGGLWANGKTVNKVVSAMSSAQNPHGGQEATILSLYTSMMHWGAIIASPGYTDPVLFGAGGNPYGTSVTVDQDGKMIEDVEAAVKHQAKRTVTVAEWVKKGNQ

SEQ ID NO: 7041 - protein, 46 aa, Bacillus licheniformis
VKVMIGSIILLLIIGFGVWLMLSPLFKKVGSGATKIKKTLEDDKDE

SEQ ID NO: 7042 - protein, 277 aa, Bacillus licheniformis
MNEKQPKKNKNKTLLGGIIVAAALIIGGFTASLFIEKIPNGYVGVVYSPNGGVKSETLDQGWHLVGLFDKVTRYPVRMQTVNNQDIQVATSDGKNISMDIAYNYVVQPDKVVELFNKFGAVDIESIENSYLKTRLWDAARKSISKYSVIDTYGQKSSDAAAEIQKTFADDMKGLGFVIDDLTLGVPKPDKATQEAIDARVKSSQELERTQTELKIAEAEAKKKKIEAQGIAEYNEIIKKSMSDEMIKYQWIQKWDGKMPKATGSNSLIQIPTDEKGK

SEQ ID NO: 7043 - protein, 253 aa, Bacillus licheniformis
MLFAPEAILRTWRKFDSFPMETLTKAWFYHQAGDGRQREVSMMKEHYQEYGIAGNCFDLSIWLLDEFTKEGVEAFPIGRSFKTERAHAAVIALDERGRRFLCDLGDQWLHPILIDCESEDYTNEKLGGFFPAAQVQVMPTAGGVEVLYHRPNGKVSTQVYNTDPIDMSVFLKAAEYSQAALKPAPLLECRIPFQHEIAHWEFSGWDIYLSTSKGLYREAKPDTIEGWTEKIHDISGYDKNVLKKALEIYQTRA

SEQ ID NO: 7044 - protein, 279 aa, Bacillus licheniformis
MSHYDQQYNAIIQKIIESGISDEEYQVRTKWDSDGTPAHTLSIMSEKMRFDNSEVPILTTKKVAWKTAIKELLWIWQLKSNDVQVLNDMGVHIWDQWRLEDGTIGAAYGYQLGKKNRTVNGQKVDQVDYLLHQLKHNPSSRRHLTMLWNPDDLDGMALTPCVYETQWYVKEGKLSLEVRARSNDMALGNPFNVFQYNVLQRMIAQVLGYELGEYIFNIGDCHIYTRHIDNLNIQMKREQYEAPKLWINPDIKNFYDFTIDDFKLIDYKHGDKLTFEVAV

SEQ ID NO: 7045 - protein, 142 aa, Bacillus licheniformis
MIKKWAVHLLFSALVLLGLSGGAAYSPQHAEGAARYDDILYFPASRYPETGAHISDAIKAGHSDVCTIERSGADKRRQESLKGIPTKPGFDRDEWPMAMCEEGGKGASVRYVSSSDNRGAGSWVGNRLSGFADGTRILFIVQ

SEQ ID NO: 7046 - protein, 46 aa, Bacillus licheniformis
VGDNGNVSILSFPLFQVRILHCRMDVNLFFRAKKPPTGGFADESVF

SEQ ID NO: 7047 - protein, 207 aa, Bacillus licheniformis
MTKLSKRQLDILRFIKEEVKRKGYPPSVREIGEAVGLASSSTVHGHLARLETKGLIRRDPTKPRAIEILDTEEEIHIPKNQVVNVPVIGKVTAGTPITAVENIEEYFPLPERLAPPDEHVFMLEIMGESMIDAGILDQDYVIVKQQNTANNGDIVVAMTEDDEATVKRFFKEETHIRLQPENPTMEPIILQNVTILGKVIGVFRTVH

SEQ ID NO: 7048 - protein, 103 aa, Bacillus licheniformis
MKKESLIFVSLFTAVISCCILFVSFAGKIEERKQYVKIEVQEGDTLWELADRIKGGKTADKHKFIEWVADKNNLPTSVIKPGDVLILPVAKQHSDQYQLAVVE

SEQ ID NO: 7049 - protein, 215 aa, Bacillus licheniformis
MNAIIYTRVSTAKEQQETSLKRQEEELKSLAAEHGMNVVSVISEQASGYEMDRDGVFDLLEEIKTSDIDAVLIQDDTRLGRGNAKIALLHCLYKEGVQIYTLAHRGKLELSEADSMVLEIVGIVEEYQRKIHNLKIKRGMKKAVENGYRPERNLKHRNEGGGRERIEAPLSEIVRLRENKLTFAEIAAVLRGFGYSISKATVHRRYQEYKDGLAD

SEQ ID NO: 7050 - protein, 77 aa, Bacillus licheniformis
MISKEKIARINELAKKAKSGSLTDEEKAEQQKLRQEYLQGVRASMKNTLKTVTIVDPEGNDVTPEKLKQEKRNRRLH

SEQ ID NO: 7051 - protein, 667 aa, Bacillus licheniformis
MKTIELKSVATIRTLSIDAIEKAKSGHPGMPMGTAPMAYALWTKMMNVSPENPNWFNRDRFVLSAGHGSMLLYSMLHLSGYDVSIEDLKNFRQWGSKTPGHPEFGHTPGVDATTGPLGQGIGMAVGMALAERHLAETYNRDDYRVVDHYTYSICGDGDLMEGISSEAASLAGHLNLGRLIVLYDSNDISLDGELNRSFSENVKQRFEAMNWEVLYVEDGNNIAEITAAIEKAKQNEKQPTLIEVKTTIGFGSPNRAGTSGVHGAPLGSEEAKLTKEAYEWTYEEDFYVPSEVYEHFNETVKEAGKKKEAEWNELFSAYKKAHPELAEELELAIKGELPEGWDQKVPVYEKGSSLASRASSGEVLNGIAQQVPFFFGGSADLAGSNKTTIKNGGDVSAKDYAGRNIWFGVREFAMGAALNGMALHGGLRVFGGTFFVFSDYLRPAIRLAALMGLPVTYVFTHDSIAVGEDGPTHEPIEQLASLRALPNLSVIRPADGNETAAAWKLALQSKDQPTALVLTRQNLPTIDQSAETAYEGVKKGAYVVSKSQNEKPEAILLASGSEVGLALDAQSELQKEGIDVSVVSVPSWDRFDKQPAEYKNAVLPTDVTKRLAIEWDRRSDGRDIQALDGDILGIDQFGASAPGETIMKEYGFTPANVVDRVKKLLNR

SEQ ID NO: 7052 - protein, 145 aa, Bacillus licheniformis
MERHYYTYLIEEEFASHYFGRESVMFKLFYDYHWTSPDQKSQLAAKQIEFITKPIPAAHIHKRMKMNLCREDYTQVDYVYRLIVPKGSASFIIKDRHIEILAKGPFDAETVFFEVLRKVSPCFLAMDFNMKRYGWLNPVKERNFV

SEQ ID NO: 7053 - protein, 72 aa, Bacillus licheniformis
MDLWVVILVGVLALLAGVALGFFIARKYMMNYLKKNPPINEQMLRMMMMQMGMKPSQKKINQMMKAMENQTK

SEQ ID NO: 7054 - protein, 54 aa, Bacillus licheniformis
VMKENLLHEIEEKRKELLKIVMTNGMTSHITIQHSQQLDILLLEYQKLSLGNTQ

SEQ ID NO: 7055 - protein, 235 aa, Bacillus licheniformis
MADINYILAFGAGFLSFISPCCLPLYPAFLSYITGVSMSEIHSDKLMFQKRSLVHTVFFLIGFSMIFVALGYSTSLVGSFFKDYHQLIRQLGAVFIIFFGFVTLGVFKPEFLMKERRLQFKNRPGGLLGSIGIGMAFAAGWTPCTGPILAAVIALAGTNPMSAVPYMVLYALGFSLPFLLLSFFITKMKWLRKHQLIIMKIGGVAMIVVGILLFFDWMTKIIIVLSSLFGDFRGF

SEQ ID NO: 7056 - protein, 123 aa, Bacillus licheniformis
MTRVLIVDDAKFMRDKIREILETEDLQVAGEAENGEEAVLLYQELQPDLVIMDITMPVKNGIEALKDMIQLNPKVKVIMCTAMRQKRIVVEAIEAGAKDFIVKPFEETKVVEAIRHVLGNACS

SEQ ID NO: 7057 - protein, 161 aa, Bacillus licheniformis
MMIVVSSILAIVMAIIVMAVRIKSSEKPATAKKIILPPIFMSTGALMFLFPVFHVTGAEFLEALTVGMIFSIFLIKTSKFEIRDDKIYIKRSKSFVFILIALLVIRIVMKSILSTTIDYGALSGMFWILAFGMIVPWRVAMYLSFRKLSSQIEASNHIQVN

SEQ ID NO: 7058 - protein, 142 aa, Bacillus licheniformis
MLEGWFLWLMLAWIVIMIVLLSIGGFFMFRKFLKRLPKEDGKSELDWQDYYIEQTRHLWNDEEKELLEELVSPVPELFRDVAKAKIAGKIGELALKEKAGAIDRDLIIRGYIMATPKRDHKFLVKRLKEKNIDHSTYQELFK

SEQ ID NO: 7059 - protein, 135 aa, Bacillus licheniformis
MTNTKRFDSADFDKEWMKQFVDDPFLLYDETLPIDLYETSTEYIIEADLSHLNVRHLDLTFSGYDFKLAVKTDEQLYEKSLMLPFFLNDKQIEAECENNILAVKINKESSKDDISLSINIPFISNLHNKQNPDSA

SEQ ID NO: 7060 - protein, 48 aa, Bacillus licheniformis
LTNKNDGKDMRKNAPKGAQPGQPEPLSGSKKVKNRNHTRQKHNSSHDM

SEQ ID NO: 7061 - protein, 48 aa, Bacillus licheniformis
LAKRKANHVINGMNNAKRQGNGAGYIENDQHILTEAERQNNKKRKTNQ

SEQ ID NO: 7062 - protein, 908 aa, Bacillus licheniformis
MANQQQIAKKDAFQSRKTFTVQGKTYSYYSLKALEDQGIGNVSKLPYSIKVLLESVLRQVDGRVITEEHVENLAKWGTAELKDIDVPFKPSRVILQDFTGVPAVVDLASLRKAMASVGGDPDKINPEIPVDLVIDHSVQVDKAGTEDALTVNMDLEFQRNAERYKFLSWAKKAFNNYQAVPPATGIVHQVNLEYLANVVHAVEEDGEIVTYPDTLVGTDSHTTMINGIGVLGWGVGGIEAEAGMLGQPSYFPVPEVIGAKLVGKLPNGTTATDLALKVTQVLREKGVVGKFVEFFGPGVAELPLADRATIANMAPEYGATCGFFPVDEEALEYMRLTGRDEEHINVVKEYCRQNGLFYTPDQEDPVFTDIVEIDLSKVEANLSGPKRPQDLIPLTDMKETFHKHLASPAGNQGFGLNASEADKEIKFKLENGEEAVMKTGAIAIAAITSCTNTSNPYVLIGAGLVAKKAVELGLKVPNYVKTSLAPGSKVVTGYLVNSGLLPYMRELGFNIVGYGCTTCIGNSGPLAPEIEKAVAENDLLITSVLSGNRNFEGRIHPLVKGNYLASPPLVVAYALAGTVDIDLKNEPIGVGKDGQNVYFNDIWPTMDEINSVVKQTVTPELFRKEYERVFDDNERWNAIETTDEALYKWDEESTYIQNPPFFENMSVEPGTVEPLKGLRIVGKFGDSVTTDHISPAGAIGKDTPAGKYLQEKGVSPRDFNSYGSRRGNHEVMMRGTFANIRIKNQIAPGTEGGYTTYWPTGEVMSIYDACMKYKEDGTGLVVIAGKDYGMGSSRDWAAKGTNLLGIKTVIAESFERIHRSNLVLMGVLPLQFKEGENAETLGLTGKETIEVDVSETVRPRDLVQVKAIAEDGTVKSFEAVVRFDSEVEIDYYRHGGILQMVLRNKMKQ

SEQ ID NO: 7063 - protein, 167 aa, Bacillus licheniformis
MKKVLAAAFLLVLAGLAVWNFTGQKEAEIGIEKGDKAPDFTLPSLKNGNDVSLSDFKGKKVLLNFWATWCRPCETEMPAMEELQNENQDIAVLAVNFTSSEKNEKTVKAFAERHGLHFPIVLDRTGINAKYEIFSYPTTFIIDENGIIKDIVLGTMSKKNMEEKLGL

SEQ ID NO: 7064 - protein, 41 aa, Bacillus licheniformis
MKKAKRRTFEELVSENKKELMTNQEFLDRLEDKLEEKFKLK

SEQ ID NO: 7065 - protein, 47 aa, Bacillus licheniformis
MPREHDKQSKFAPSHLGTKPVEYKRNKGKKMHDKSGETPIIMQTKGE

SEQ ID NO: 7066 - protein, 78 aa, Bacillus licheniformis
MTHQKHHPDDRSDNVEKLQDMVQNTIENIEESEEQLSFASEAEQEQIREKNERRNESIEAMRNEIHDEAEARKNGYHQ

SEQ ID NO: 7067 - protein, 138 aa, Bacillus licheniformis
LYVSKKEIEVRYAETDQMGVVYHANYLIWMEVGRTALIKELGFSYAEMEKDGILSPVVDINVRYVKPLRYGETATVHTWIEDYNGFKTVYGYEIFNSAGETAVKGTSSHICVDGDSFKPVQFRKLYPKWHEAYEEAKK

SEQ ID NO: 7068 - protein, 100 aa, Bacillus licheniformis
MAFGIKRNELNEWKRAVLNGEVAFLTHYWLDDRYPDVKTVTKAGCANIEKLAEWGKQYGLKKEWIDKRSEFPHFDLLGEKQIMILKQEKLSSHIKRFRLE

SEQ ID NO: 7069 - protein, 45 aa, Bacillus licheniformis
VIETDDDNITETKDTFLLIKMKQARTMLACFKDVRVSLKHRIIQA

SEQ ID NO: 7070 - protein, 119 aa, Bacillus licheniformis
MKWFLGILTAGLIILVGGYFLYSGYYSTEDYYVKITTDPKVVKEKASDGYTYINYNYDVTGYDKDGKSKNLKLSSQEKIQKGQYYIIHWKDRREIISSKEKASEKQIDKDILHKLDNQN

SEQ ID NO: 7071 - protein, 54 aa, Bacillus licheniformis
MFSKQKDIFPAKMSFENIHHYLLGLPSIYLCTLVGDDCNRKCAIRTNQNLKTHF

SEQ ID NO: 7072 - protein, 343 aa, Bacillus licheniformis
MVYGVTTFILLAVFLIFYLTDRRRIINGFLFNLFFCSFLVLSYYLAYVVGIGFFRLFVIVPLLIFFFILTFGLFALMIGLFLNARILIKREGRRLSNCLTLISGLGIIIFFLLSVIDPARFLSPNVQPLFAGSSLIAVYFFFHLTNFLTAYFLYQFNRPKLNQDYIIVLGSGLINDTVPPLLASRIDKAVDFYRKQAAVAPPPKIIFSGGQGPDENLSEAEAMQRYALKKGIPEEHTFKEDRSVNTYQNMLFSKQLMDSLSDGKYNSIFTTNNFHLFRASLYAKRAGLKSQGIGSKTAFYYWPNAMIREYIAVVVMNRKRHSIVVGTILGFSIILTALNFFID

SEQ ID NO: 7073 - protein, 42 aa, Bacillus licheniformis
LNISKISFFTACRESPVFLQVFLFFFVIEVPKKSLQNLGWLA

SEQ ID NO: 7074 - protein, 95 aa, Bacillus licheniformis
VNLKINEEALKWYKNELDLKEGDQVRFFVRYGGCSNVQKGFSLGVSKDEPQQIGVSAEKDGITFFVEESDVWYFDGHDLLVTYNESAEEPVFEYQ

SEQ ID NO: 7075 - protein, 197 aa, Bacillus licheniformis
MLIALLFILAYLLGSIPSGLIVGKAAKGIDIREHGSGNLGATNAFRTLGVKAGSIVVAADILKGTLAAFLPAILHIGVHPLLAGVAAVIGHMFPVFAKFKGGKAVATSGGVLLCYQPLLFLTMVAVFFLFLYITKYVSLSSILTGLYTTVYSLFTKDLLLVAVVAFLTAFVVYRHRTNIKRIIDKTEPKIKWMSGKR

SEQ ID NO: 7076 - protein, 137 aa, Bacillus licheniformis
VENPSKQEIKTILENSRRIAVVGLSDNPERTSYMVSKAMQDAGYDIIPVNPTIDEALGVKAVASLKDIEGHVDIVNVFRRSEHLPDVAKEFLEIDADVFWAQQGLVNEEAYQLLSEKGYTVIMDLCIKVAHSLTKSA

SEQ ID NO: 7077 - protein, 655 aa, Bacillus licheniformis
LVKKQQVDYNDDSIQVLEGLEAVRKRPGMYIGSTDSRGLHHLVYEIVDNSVDEVLAGHGDHIIVKIHKDNSISVQDRGRGMPTGMHKLGKPTPEIILTVLHAGGKFGQGGYKTSGGLHGVGASVVNALSEWLTVTIERDGNVYRQRFENGGKPVTSLDKIGTTKKTGTLIHFKPDPAMFSTTTFNFETLSERLRESAFLLKGLKIELIDERDQTKETFLYENGIEAFVAYLNEEKDALSEVVSFEGEHNGIEVDFAFQFNDGYSENILSFVNNVRTKDGGTHESGAKTAMTRAFNEYARKVALLKEKDKNLEGTDIREGLSAIVSVRIPEELLQFEGQTKGKLGTSEARSAVDAIVSEQLAYFLEENRETATLLVKKAIKASQAREAARKAREEARSGKKRKKSEATLSGKLTPAQSRNPSKNELYLVEGDSAGGSAKQGRDRKFQAVLPLRGKVINTEKAKLADIFKNEEINTIIHAIGGGVGADFDIEDINYDKVIIMTDADTDGAHIQVLLLTFFYRYMKPLIEHGKVFIALPPLYKVSKGSGKKEIIEYAWSDEEMDDVLKKVGKGYTIQRYKGLGEMNADQLWETTMNPESRTLVRVKIDDAARVERRVTTLMGDKVEPRRKWIEKNVAFGLDEESNILENENLSVAEEV

SEQ ID NO: 7078 - protein, 807 aa, Bacillus licheniformis
MAQPEIYHDLPLEDVIGDRFGRYSKYIIQDRALPDARDGLKPVQRRILYAMHAEGNTHDKNFRKAAKTVGNVIGNYHPHGDSSVYEAMVRMSQDWKVRNVLIEMHGNNGSIDGDPPAAMRYTEARLAAIASELLRDIDKETVEFVPNFDDTSKEPVVLPAMFPNLLVNGSTGISAGYATDIPPHHLGEVIDAVIKRIDSPNCSVDDLMEFVKGPDFPTGGIIQGKEGIKKAYETGKGKIIIRGKAEIETIRGGRQQIVITEIPFEVNKANLVKKMDEFRIERKVEGISEVRDETDRTGLRIVIELKKEADAQGILNFLYKNTDLQIPYNFNMVAIHNRRPMLMNLTSILDAYIGHQKEVITNRSQYELKKAKERHHIVEGLMKALSILDEVIATIRSSNDKRDAKNNLIEKFAFTEPQAEAIVSLQLYRLTNTDITALEEEAKELDQKIKELEEILSNDKKLLKVIKDSLKKVKNTYAGQRRSVIEEKIEEIKINLEVMVASEDVYVTVTKDGYIKRTSQRSFAASNGQDFGMKDTDRLLCQLEMNTTDVLLLFTNKGSYVYCPVHQLPDIRWKDLGQHITNIISIDSDESIVKAIPVREFTESEYLLFFTKNGMAKRTQLMQYKAQRYSKALVALNLKGDDEVVDVHVTDGTKDLFIATHSGYGLWFTEDEVSVVGARAAGVKGVNLKDGDFVASGQVLEEKDVLVLVTQRGSIKRMNRSEFEKTSRAKRGVLMLRELKKKPHRIAGLLACSYHDQITLQTEKGITEEMLVKEIKLHDRYSNGSFIIDEDEAGEVTDVWISKHELE

SEQ ID NO: 7079 - protein, 44 aa, Bacillus licheniformis
MYGSANMSWSEIEQHAVDHSISRGVTTCLSSRFNAQKKSMPDKP

SEQ ID NO: 7080 - protein, 39 aa, Bacillus licheniformis
MFTKGANTDWVVLLWYQLSKEMLNQKNGRKSHRREKISL

SEQ ID NO: 7081 - protein, 363 aa, Bacillus licheniformis
MKPKYKVIINDIKSKILSGVYRAGDQIPTESAIQEEYKVSRHTVRKAILELSNEGFLRSEKGSGTYVSNQYQSKAGGNSNNKIIGVITTYISDYIFPSIIRGIEGRLNEANYSLLLASTNNDVEQEKKALEMMLSFGVDGLIVEPTKSNLYNPNIAYYLSFKEQDIPFIMINAYYEELDVPFLCLDDVQSSYLATKELISKGHTQIGLISKMDDLQGKYRMKGYIKALGEAKLRFYPEHVLSYNTETKLDLYTDLKKFLNEKRDVLTAIVCYNDEVGLEVANVCRQLNISIPDKLSIIGHDNSYIAKNANIKLTTLTHPQEQMGHDAADWVIKKLQGKKDLPNETYYQPVLVEGETVKELEIQ

SEQ ID NO: 7082 - protein, 535 aa, Bacillus licheniformis
VKANRVNIKQAITEGETSLGIEFGSTRIKAVLIDSSFETIASGSYEWENLLEDGFWTYNLVDIITGLQTAYSEMKNEVERNYGITIRKIGSIGISAMMHGYMAFDKTGELLVPFRTWRNSTTGAAAKELTDQFQFNIPERWSIAHLYQAILNEEKHLPRIDYITTLAGYIHWLLTGNKAIGIGDASGMFPIDESTQNYNESMVKQFDELISNKGYPRKLKDILPKVYISGEQAGELTEIGAKILDQSKNLQPGIPICPPEGDAGTGMVATNSVRKRTGNISVGTSVFAMIVLEKELSKVYPEIDLVTTPNGSPVGMVHANNCSSDINAWLGLFREFFEAMGQKIETNKLFEVMLNKALEADSDGGGLLSYGYFSGENITGLEKGRPLFVRSPESRFNLANFMRTHLFTAFAALKIGMDILTKEEKIEIDSILAHGGLFKTPLVGQKIVAAAMNTPVSVMETAGEGGAWGMAILASYMMNKGQEESLEDFLDKKVFEEDAGQEIYPDQLDVEGFEAFIERYKKGLMIEQAAVDHLI

SEQ ID NO: 7083 - protein, 231 aa, Bacillus licheniformis
VLEQLKEEVLQANLDLPKYGLVKYTWGNASAIDRETGLFVIKPSGVDYETMKASDMVVVDLDGNVVEGELRPSSDTATHAVLYKRYPEIGGIVHTHSTWATIWAQAGLDVPAMGTTHADTFYGSVPCARYLTQEEIDRGYEAETGHVIIETFEERGLDILAVPGVLLHGHGPFTWGKDVKSAVLNSVVLEEVAKMNLFTRELNLFAKELPQRILDKHYLRKHGKNAYYGQK

SEQ ID NO: 7084 - protein, 474 aa, Bacillus licheniformis
MLTTGKKEFWFVVGSQHLYGEETLAEVRAHAQAMTDALNESAVLPYPLVLQDLAVNADKITSIMKEVNYRDEVAGVITWMHTFSPAKMWIRGTKLLQKPLLHLATQFNESIPWPTIDMDFMNLNQSAHGDREYGFINARLKKQNKVVVGYWERPEVQQQIAEWMDVAVAYNESFNIKVARFGDNMRNVAVTEGDKIEAQIQFGWTVDYFGIGDLVQYVNAVTDEEINRLFAEYADLYEFDYGTYSREDWEKSVKVQASYEIAIKRFLDDGGYNAFTTNFEDLYGMKQLPGLAVQRLMAQGYGFAGEGDWKTAALDRLLKVMSRNQSTGFMEDYTYELAAGQESILQSHMLEVDPSLASNKPKIIVSPLGIGDREDPARLVFDGKAGDGVVVSMADFGTHYKLLINEVSAFEPTVPAPNLPVARVLWEVKPNFQDGVKAWLENGGGHHTVVSLNLTTDQMITYAKLVDLEYVVIK

SEQ ID NO: 7085 - protein, 464 aa, Bacillus licheniformis
MVNEKKISSGFIYFFGAFAGILFGYDIGVMTGALPFLQNDWNLQDNAGVIGWITSSVMLGAIFGGALAGQLSDRLGRRKMILISAIIFVVGSILSGIAPHNGILFLIVSRVLLGLAVGAASALVPAYMSEMAPARLRGRLSGINQTMICSGMLLSYIVDFLLKDLPETMAWRLMLGLAAVPALILYVGMLKLPESPRFLIKNNKLDEARKVLSYILSNKGEIDSEITQIQETAREEAKANQNASWATLLSNKYRFLLIAGVGVAAFQQFQGANAIFYYIPLIVEKATGNAASSALMWPIIQGVILVLGSLIFLVIADKFNRRTLLTVGGTIMGLSFILPAILNILIPNANPMMMVVFLSIYVALYSFTWAPLTWVIVGEIFPLVIRGRASGLASSFNWIGSFLVGLLFPVMTASMSQEAVFAIFGVICLLGVVFIRTRVPETRGRSLEEIEKNGENKRVDGKSA

SEQ ID NO: 7086 - protein, 41 aa, Bacillus licheniformis
MIAQVPLSVEGRLHHLGYNEAGQLSGNDTNKRLILIKKRPK

SEQ ID NO: 7087 - protein, 260 aa, Bacillus licheniformis
MSKVSGKIAFVTGGGQGIGEAICKRLAEDGFAVAVADYNVETATQVAEDINKLNGKAIAVKVDVADRDDVFKAVDETVKRLGGLDVVINNAGLGPTTPIESITYEDYRKVYDVNVGGTYWGIQAAVKAFKELGHGGKIINASSQAGQVGNPGLAVYGGTKFAVRGITQTAAKDLAELGITVNAFCPGIVKTPMMMGIAQQTADEAGKPFEWGMEQFAKNIALKRLSEPEDVAACVSYLAGPDSDYMTGQALIIDGGMVFN

SEQ ID NO: 7088 - protein, 41 aa, Bacillus licheniformis
MLFIIRMVIIGLFSLTAINLFVFQGIEFMHAITDLFNRQDS

SEQ ID NO: 7089 - protein, 114 aa, Bacillus licheniformis
MKKTLFLQLSIFFLVIASLHSFSMPQMPANHHAQKAAVSGDELHELTVGKYGEEKAKSLWNSLGFGAESVLLLILAAASGQAFMMNRRKEHLKAFMLAVFYHSSYFDKAHVLKP

SEQ ID NO: 7090 - protein, 470 aa, Bacillus licheniformis
MEEILSEIINVPSGFIWTYLVYILIGIGLFFTFKLKFVQFRYFFEMFRIVGQKEEKGKGVSSLQAFFISAASRVGTGNLTGVALAVATGGPGAVFWMWVVALVGMASSFVESTLAQVYKVKDGDHFRGGPAYYMEKALGARWMGIIFAVLITITFGLIFNAVQANTIVGSMQGAFNLDKTVVGIILAAITGFIIFGGLKRVVTVSQLIVPVMAIIYLGLALFVVLTNISQIPAVFAMIVKDAFGIEQIAGGTLGSIIIIGAKRGLFSNEAGMGSAPNAAATANVSHPAKQGFIQTLGVFFDTMVICSATAFMILLFNLTPGKELDGIQITQAAMQHHIGSWAPAFVAVAIFLFAFSSIVGNYYYGETNIEFIKKSKTALAVYRTAVVAMVIFGSVSGFQLVWDMADLFMGLMAIINLIAILLLSGIAAKVLKDYTEQRKAGKNPVFKASSIPGLKNTEAWEDEKETLQSK

SEQ ID NO: 7091 - protein, 114 aa, Bacillus licheniformis
LYPYDPSLYDPYRQQFPPGPPPGAGGQQQQQLLPPPPSQFPQDSGPSVFAVDPGGIRRCLFRYTFIRLRNGSRFWFYPVFVGRRSIAGYRWRPRQFRWVYFGIDLNEITSFSCQ

SEQ ID NO: 7092 - protein, 228 aa, Bacillus licheniformis
MIEQILWVILPYIVITIFIGGHIYRYQHDQFGWTAKSSEMLEKKKLALGSSLFHWGIFFVIGGHVMGILIPESLYEALGVSEHMYHKIAIGFGLPAGIAALSGLLILTYRRFTDKRIRKTSSAGDLITLVALLFVMTTGLAATFLNIDSKGFDYRTTIGTWFRNIFLFKPDAGLMASVPLWFKLHIIMGYVIFIVWPFTRLVHVFSMPLKYLTRSYVVYRKRAPRKSM

SEQ ID NO: 7093 - protein, 180 aa, Bacillus licheniformis
MDGTDKQTVFAALSYLLSYPDEEWRKERSEWQQIIGEIEHEALKGHLLAFLESAASYSSEELIETYVYTFDFGKKTNLYVTYFNSGEQRERGIELLQLKDLYQQSGFQPTDKELPDYLPLMLEFAAVADQEKAAAVFQKYAANLEELRSQLSENESIYTPLLDGLMLILEEIGVERNVQP

SEQ ID NO: 7094 - protein, 489 aa, Bacillus licheniformis
LKIKAQIGMVMNLDKCIGCHTCSVTCKNTWTNRSGAEYMYFNNVETKPGIGYPKQWENQDKYKGGWELKKGKLQLKSGAKATRLMNLFYNPYQPTIDDYYEPWNYDYETLTNSPEKKHQPVARPKSSITGDFMNLEWGPNWEDDLAGGHITGLQDPNVKKMEESIKTEFEDVFMMYLPRICEHCINPSCVSSCPSGAMYKREEDGIVLVDQNACRSWRHCVSSCPYKKVYFNWQTNKAEKCTLCFPRLEAGLPTICSETCVGRIRYLGVMLYDAEKVEEAASAENEKDLYHSQLEIFLDPNDPAVAEEAKAQGIPLEWIEAAQKSPIYKMIIDWKIALPLHPEYRTLPMVWYIPPLSPIMNMFEGKGTAQSAEDIFPAIDEMRIPIEYLANLLTAGDTHHIRTTLKKMSVMRMHMRATQTNKQIDSSLIQDTGLTEEQIEDMYRLLAIAKYDDRFVIPQTHREEVADLYMEQGSCGLSFAGGPGSCQNI

SEQ ID NO: 7095 - protein, 1228 aa, Bacillus licheniformis
MKKKKKSPIFRRLNYFSPIERHSNQHSQTTYEDRDWEDVYRNRWQHDKVVRSTHGVNCTGSCSWNIYVKNGIVTWEGQRLDYPSTGPDMPDFEPRGCPRGASFSWYIYSPLRVKYPYVRGVLIQMWREALNSSKNPLEAWKSIVENPEKAKAYKQARGKGGFVRAEWSEVLKLISASLLYTIAKYGPDRNVGFSPIPAMSMLSHAAGSRFMSLIGGPMLSFYDWYADLPPASPQIWGDQTDVPESSDWYNSGYIMTWGSNVPLTRTPDAHFLAEARYKGAKVISISPDFAESSKFSDDWLSIRQGTDGALAMAMGHVILQDFYVNQKTERFIDYAKQYTDFPFLVTLKEENGTFTAGRFLHAKDIGRATEHDEWKPAVWDEDTDGFAIPQGTMGSRWDGKGKWNLRMVDEDSEKPITPRLSMLGYEDMIGTVNIPYFSHDGNKVLERPLPIKKVILNGEEVFVSTVFDLTLANYGVNRGIGGQTPASFDDPEPFTPAWQEPITGIKSEMVIKIAREFAQNAIDTEGRSMIIVGAGINHWFNSDTIYRAVLNLVLLVGAQGVNGGGWAHYVGQEKLRPAEGWQTIAMAKDWGGPAKLQNGTSFFYFATDQWRYEDQEISGLASPIAKTSRYKHHADYNVLAARLGWLPSYPTFEKNGIDLYKEAEKAGAENAQQVGIYIARQLEEKKLKFSIEDPDNEKNFPRNLFVWRANLISSSGKGHEYFLKHLLGTTNGLMNDDQDSIRPEEITWRDKAPEGKLDLLINLDFRMAGTALYSDIVLPAATWYEKHDLSSTDMHPFIHPFNPAISAPWEAKSDWDIFKALAKAVSDLAEEVDMEPVKEAVATPLLHDTPQEMAQPLGKIKDWSKGDCPAVPGKTMPQIHVVERDYKQIFNKMTSLGPNVVKQPFGTKGMNWSVEAEYNSLKKTLGVVKDDTIAKGCPDISDARQAAEAVLTLSSTSNGKVAVKAWESLEKITNLELKDLAEEREEECFTFEQISAQPKTVITSPAFSGSEKGGRRYSPFTTNVEKLIPWRTLTGRQSFYLDHEMMTEFGENMATFKPILIHRPFLNKRPDQEGKEIVLNYLTPHNKWSVHSMYFDSLPMLTLFRGGPTVWMNKDDAEETDIQDNDWIECFNRNGVVVARAVTSHRIPKGMAFMHHAQDRHINVPGTKLTNNRGGTHNSPTRIHVKPTQMIGGYGQLSYGFNYYGPTGNQRDLNVVIRKLKEVDWLED

SEQ ID NO: 7096 - protein, 43 aa, Bacillus licheniformis
MVSAFHKFVTFSGGGRGRTKKQPAWKRAVEWFNRSCSKFSFPR

SEQ ID NO: 7097 - protein, 413 aa, Bacillus licheniformis
MSEIINNRETQQGLPEEKKQLLKEIIIDLHKGKPLADVKKRFEKAFGSVNAEEIAQLEQALMKEEGITPEEIQELCSVHAAVFKGSIEDIHRADADKQPGHPVHTFMKENKEIDLLLNFKMQLHLERFEKEDHRDNILKLLADLNLLADVDKHYSRKENLLFPYLEKYGITGPSQVMWAVDDFIRKSIKEVKRLLEEYTPDKKDEVIRELTFIIQEGTEMIYKEENILLPMALRTLTEDEWLKIAAESDEIGYCLTAPETVWKPERHQIKTSEEAADGYVRLPTGILSVDQLEHMMNHLPVDITFIDENDVVRYFSHGKERIFARTKAVIGRTVQNCHPPASVHIVNKLLDDFKSGKKDVEDFWIKFKDKYVFIRYFAVRDENGRYIGTLEFTQNIAPIQEINGEKRILNTSD

SEQ ID NO: 7098 - protein, 80 aa, Bacillus licheniformis
LHKKIDLDDSVYKLCTLHPELKAVMKDAGFQNITKPGMLETAGRIMTIPKGARMMQIEWNHVLDILKAHGFDPVWKGEKQ

SEQ ID NO: 7099 - protein, 367 aa, Bacillus licheniformis
MILCDFDKSPFIVIWELTRACELKCLHCRASAQNKRDPRELSLKEGKDLIDQIHAMDNPLLVLTGGDPLMRDDVFAIIEYAVQKGVRVSMTPSATPNVTREAIQSAKEIGLSRWAFSLDGPTREIHDHFRGTDGSFDLTMKAIRYIHECQLPLQINTVISSYNIDYLDEMAKLIKELNCVLWSVFFLVPTGRAKREDMISPVDHEKVFLWLSRLAKEAPFDIKTTAAQHYRRVVIQQKMREAKDPHMKIRYEHALQKGKMDAIGGLGRAPKGVNDGNGFMFISHIGDVYPSGLLPVKAGNIREQPLAEIYRESPIFKDLRNPDGFKGKCGVCEFRHVCGGSRSRAYALTGDYLESDPSCIYIPKALR

SEQ ID NO: 7100 - protein, 49 aa, Bacillus licheniformis
MKALELASPCQLPNDDKRRLVEIAKYHLSSVLSFAFMCIVAEMQEKKVK

SEQ ID NO: 7101 - protein, 155 aa, Bacillus licheniformis
MDRFDYLLFLKNLPMFFGVPLPIIKKLLKNGKVIDIQPSQHSRSFLHSQSVYFVLKGEVHFSDRRLPEESRTIAEWEKGDVFPIDQKGEPFLSPFISVNTASETAVLEIPFHNFKKMMTYNRQLQTNFLMLLQQNLFFHTSFFCATSTPPQKTTC

SEQ ID NO: 7102 - protein, 240 aa, Bacillus licheniformis
MKVFIPKQHGAWAMLVIPFILGMFAGGADVKHIPLFCGWLFLYLAASPAMMMVKKKNIVYYQKWVLIYGIPAVVFLLISVLLEPQLVYLGLPLFPLFLINLYYAKRNNDRALLNDIAAILVFSAGGLASFWMGAGKLDGEASFVFIQSALFFTGSAFYVKSMIREKKNNRFKLYSWGYHVFLPFVSLAAGAGWAVIGVVPSSLRAWFFHGRKLSIKTIGISELVNACIFMAVLIVFLLQT

SEQ ID NO: 7103 - protein, 237 aa, Bacillus licheniformis
MNISVRKSDTDLLSDDLHHLLESISTRRKIRQDTFLFQEGMDAEELYLIQSGLVQIGKLTSDGKELTLRMCKKNDIVGELTLFTEDAKYMLSAKILSDGEVLVINKDKLEKELIQNGALTFEFMKWMSTHLRKIQSKIRDLLLNGKKGALYSTLIRLANSYGITRSDGILINIVLTNQDLAKFCAAARESITRMLSDLRKNGVISIEDSGKIVIHQINYLKREIDCENCPLEICNID

SEQ ID NO: 7104 - protein, 394 aa, Bacillus licheniformis
MANRQKIQLPLQSFSLVAGFMVWVLISSLMPHIKQDIALTDSEVSLVTAIPVILGSLLRIPLGYYTNRFGARITFMISFLLLLFPVFWISTADSLFDLILGGFFLGIGGAVFSIGVTSLPKYYPKEKHGFVNGIYGAGNVGTAITTFAAPVVAKTAGWENTVRMYIVLVAVFALLNFILGDRKETKVTVSVTEQMKAVYRNQTLWFLSLFYFITFGSFVAFTIYLPNFLVNHFGLDPVDSGLRTAGFIAVATFLRPVGGWLADKFNPLKLLMYVFAGCTLSGILLAFSPSLGLYGFGVLTVAVCAGLGNGIIFKLVPLYFSNQAGIVNGIVSAMGGLGGFFPPLILSSVFQATGHYAIGFMALSEAALASFVIVVWMYFQEVNKTSSKTKANHL

SEQ ID NO: 7105 - protein, 37 aa, Bacillus licheniformis
LLLSKGKMNKSISMFILQKVFLKHCELRHTVIRLFRV

SEQ ID NO: 7106 - protein, 79 aa, Bacillus licheniformis
MFIKLTQEEKQAIIDEIKRFYVEERGEEVGDIAAIQMFEFVKEKLGPYFYNQALKDSRRVVEEKAAAIEEELFALERRL

SEQ ID NO: 7107 - protein, 222 aa, Bacillus licheniformis
MEFLKQFMIFSGLNDEEFKQIEQIAAKRTYQPRMFVFMEGEEREAVFFIKSGLVKAFKIDEDGNEQVISILQNGDMFPHVGFFDLSPYPATAEAVQETELIVIRIADFNELLMKFPEMTIKVMQIMGKKILDLQERIQGFISKDVQHRLTHVLMKLAAEHGIPQEKGVYISLPITNQDFANMVGTSRETINRTLNELKKKNLLTADRSGIFIHDTDWLNGCN

SEQ ID NO: 7108 - protein, 784 aa, Bacillus licheniformis
MEVQRKTVPVKKASKNGFLKSILVFTLIVSFSVLLLGGYWIFKGLAPRPVEVSGPNGEVLMTKSSISGGQAVFQKYALMDYGTILGHGSYMGPDYTAEALKIYTEGMQDFKAEAQYGKRFKQLSDEKQSTIRNHVIREMRKNRYDRPSDTLKLTDAQVYGLHQVRDHYRKVFTKGDGWGLEPGLIKESHMPERNRAWVDSEDQITQVSDFIFWTAWLSSTLRPGDDITYTNNWPYDEDAGNTMSFAAVWWSGASVTILILFVGIILFVFYRYKLGMKEAYQEGAFPVFDLDKQPLTASQVKTGKYFAVVSLLFFVQAMFGALLAHYYIEPDSFFGIDWIRELLPFSISKGFHLQLAIFWIATSWLGMGIYAAPLVGGREPKRQGLLVDILFWALIVLVGGSMVGEWLGAKGFLGNNWFLFGHQGMEYIELGRFWQVILALGMLIWLFIVFRGIKSGLKREPDKGGLIHLLFYSSIAIPLFYGAAFFFNPGTNITMSDFWRWWIIHLWVEGIFEVFAVVVIGFLLVQMNLVTKKSTVRTLYFQLTILLGSGVIGIGHHYYYNGSSEVWIGLGSVFSCLEVIPLTLLVLEAYEQYKMMKDGGHHFPYKATFWFLISTAIWNLVGAGVLGFLINLPAVSYFEHGQFLTPAHGHGAMMGVYGMFAIAVWLYTLRNIAKKEAWNDKWLKIACWSLNIGLFGMVFINLLPVGFLQLKKAFEDGYWSSRAPEFLQQDAVQTLLTWRAVPDTIFLAGIVILVVFSIRALFHLRKPTHREGEALPVKDIASDE

SEQ ID NO: 7109 - protein, 237 aa, Bacillus licheniformis
MEAVFDQNTKTGDIVTRFPRASRLLKEYRIDFCCGGNRPIGEAIKEQDLNEEEILARINTLYQETKALNAKETNWSEAPYSQLIDHVIHTHHAYLYEVLPELSGFVTKVYRVHGIHHPELAQVHQLFHQLKTELEHHLFQEEEHIFPKVMAYEETRSMDRLAEAVQTIDVLEQEHEAAGSILKELRRVTNDYTLPEGACTTYTLTYLKLDELETDLFQHIHLENNILFPRLEAEANQ

SEQ ID NO: 7110 - protein, 123 aa, Bacillus licheniformis
MEHISWLTFTMLILASYRLTHLIVFDKITEFIRKPFMKKKQTIDEQGHVETKKVPKSNFGYLLNCYWCAGIWCALIIAVGYLIAPKAIFPLILILSVAGGQAILETFVGVATKLVGFFSDLKK

SEQ ID NO: 7111 - protein, 43 aa, Bacillus licheniformis
LALKKSIYFLFSYKMGGLNTSDRKLLKQMAGDFAHPFSLNSKF

SEQ ID NO: 7112 - protein, 534 aa, Bacillus licheniformis
MAAEKVFSKNKIIGGKRMSYMKRSISVFIACFMVAALGISGIIAPKAAAASKTPVAVNGQLTLKGTQLVNQNGKAVQLKGISSHGLQWYGDYVNKDSLKWLRDDWGINVFRAAMYTAEGGYIDNPSVKNKVKEAVEAAKELGIYVIIDWHILSDGNPNQNKAKAKEFFNEMSRLYGKTPNVIFEIANEPNGDVNWNRDIKPYAEEILSVIRKNSPKNIVIVGTGTWSQDVNDAADNQLKDGNVMYALHFYAGTHGQSLRDKADYALSKGAPIFVTEWGTSDASGNGGVYLDQSREWLKYLDSKKISWVNWNLSDKQESSAALNPGASKNGGWSQSDLSPSGKFVRDNIRSGSNGSSGDSGSNSKGSDQKDQKKDQDKPGQDSGAAANTIAVQYRAGDNNVNGNQIRPQLNIKNNSKKTVSLNRITVRYWYKTNRKGKNFDCDYAQIGCSKITHKFVQLKKAVNGADTYLEVGFKNGTLAPGASTGEIQIRLHNDGWSNYAQSGDYSFLNSNTFKNTKKITLYENGKLIWGTEPK

SEQ ID NO: 7113 - protein, 85 aa, Bacillus licheniformis
MNETLQQYMMLVKEHYDTINGPDYTGKEEDIEKRKEQIELYAKTLQQGFSTDDDYDEFADAVIKCAYGDLTMEELETVYRELTSP

SEQ ID NO: 7114 - protein, 168 aa, Bacillus licheniformis
MKDMIMKTDRLILRKMRHDDAENLLEIFSDPAAMEYYPSTKNEKQTLQWIDWTLENYEKHGTGLWIAEHKQTSEFLGQCGIVPQEVEGSNEMEIGYLFKRSVWKNGYATEAASACKQYGFESFHLKKIASLPDAKNLPSRKVAERIGMTLEKTIHKWGKEIAVYSVYR

SEQ ID NO: 7115 - protein, 81 aa, Bacillus licheniformis
LTRENIKRAAVRQFNELGYEGVKMSHIAKELGIRKQSLAYHFSYKKRAADGNIPRDCRRGNFIYQRILRFKKTYACKESNI

SEQ ID NO: 7116 - protein, 281 aa, Bacillus licheniformis
MREKKNKNRGSQMELNVEKIHTAKMWSLSFVFVTLANAFLFMVFEMLLPTLPLFVTAIGGGAKQVGYVTGIFMVSAIAVRPFAGALALRFNKKYLLIFGLAISAFSTGAYYLASDVSALLLIRLIHGAGFGLATTYFATIAAEIIPKERRGEGIGYFGVGETIAVSVGPMIGIATLELYDFQRLFLGGMSVLLLAALMAVFVRRQPETTGTGGKGTVKLKVLERRVLFPSILILFVGVAASGIMSFFSLYAIEKGFQSVGMFFFLIAGASFFYTAYFRQGI

SEQ ID NO: 7117 - protein, 468 aa, Bacillus licheniformis
MRKWYFIISACILVSVIIAFAYDKTGAKEAEPANCLFVSPDGNDQNEGTKEKPFRTLKQAAKKAVPGTTVMIREGTYHETLDVRESGSAEKPITFQNYENEKVVISGESVKDAEYETPLIQIHNQQYITISGLTIQDLSVSSEEATAMGIYVSGSSSHITIKNNHVRDIKTTADDGNAHGIAVYGSGSMKDIKIEDNTVEKLTLGASEAVVLNGNIDGFAIRGNVVRDNNNIGIDLIGYEGTAAQNDFVRNGIVENNTVYDNSTYGNPAYGDDYSAGGIYVDGGQSIDIKKNTVYGNDIGIEATSEHKGKYADDIQITDNTVYENAYTGISIGGYDQKRGGTSHSVISHNIVYRNDTKGLDGGQLLLQYDTKNNTIEKNIITASDSRIFIANDFTKNEGNKVNHNVYHKETGKDGLWIWKKNEYDSFTPYQNATNQDQDSIYADPMYRDEKSYDFTLDPDSPAWPVVK

SEQ ID NO: 7118 - protein, 433 aa, Bacillus licheniformis
MLFALFFGAGNLIFPPMLGQMAGENVWTANAGFLVTGVGLPLLAITAFVFSGKNDLQSLASRVHPLFGIVFTTVLYLAIGPFFAIPRSGNVSFEIGVKPFLSNDAGPVALIIFTVLFFTVACLLSLNPTKIIDVIGKFLTPIKLTFIGLLVVTAIIHPIGSFQAPSEGYASHVFFKGFKEGYFTLDALVAFVFGIIIVNAMKEKGAASKKQLMIVCAKSTAIAAALLALIYSALSYMGASSVEKLGLLENGAEVLAKVSSYYFGPYGSVFLGLMITVACLTTSVGLITACSSFFHGLFPNISYKKIAVILSMFSTLVANIGLTQLINVSMPVLTTLYPIAISLIFLTFLHPLFKGKRDVYQGSLILTFIISLFDGLNAAGFKIAAINQFFTQFLPMYDIGLGWVLPAIVGGIGGYLVHRLRKKSHIRYAEKLN

SEQ ID NO: 7119 - protein, 352 aa, Bacillus licheniformis
MCNLHKTISTRVLSAPRAKAKFEQTTIERRELQPNDVLIDIKYSGICHSDIHSAYDEWGGGIFPMVPGHEIAGIVKAVGTSVKKFAVGDRVGVGCFVDSCGECEYCQSGEEQFCTKGVIQTYNCLDYDGNPTYGGYSQYIVVKEDFVVRIPDSLNLDVASPLLCAGITTYSPLKHWNAGPGKKVAVVGMGGLGHVAIQFAHAMGAEVTVLSRSLNKQEEALRFGADHYFATGDPAVFTELAGRFDLILNTVSANLDVDAYLSLLRADGTLVNVGAPAERDQYSVFSLIMGRRSIAGSLVGGIRETQEMLDFAAEHGLAPQIEVIGADQVDEAYERVLTSDVRYRFVIDVSTL

SEQ ID NO: 7120 - protein, 131 aa, Bacillus licheniformis
MGYSIKEVAEKVGLPTHTLRYYEKEGLLPFIKRDANGNRIFEEKDLSWLELVICLRKTDIALSELREIVNLTKEGDWTISKRKQILEKHKEKMLEKQRVLERAFLKIDEKIMYYDGLEKKNQAMSLKADEK

SEQ ID NO: 7121 - protein, 85 aa, Bacillus licheniformis
VSNKSTVRLPRGLQARHTTLFVRKAISFKSEIVLAKNGQTANGKDLMEILQLGVQEGDEITLMVYGTDEQAAKETLEKFLLNVVP

SEQ ID NO: 7122 - protein, 366 aa, Bacillus licheniformis
MMFLFIFIIILAAAVLLFINLHPVFGGNPSKEQKKLYQSFDNYADGKFLNQTQEKMDMGGISGVFSMMRDAVSGGKERNPSDQIPVSEIDWNIVKSNEDSLTWFGHSAFLLSIDRKKILVDPMLGPIASPVSFIGSRRYSEDILHTVNDMPPIDAVLITHDHYDHLDYPSILKLKEKAGHFFVPYGISAHLIRWGIEKEKITELNWWDETEFQGLTIALTPSKHFSGRGLLNRNTTLWGGWVILGKHTRFYTSGDGGYDEHFKEIGKKYGPFDITLMEGGQYDRRWSGIHMTPEQSVQAHKDVKGKNMMLIHWGAFTLAYHGWKEPIERALKEAEKKGANMIAPAIGETVPLNSQYSLPETFWWDI

SEQ ID NO: 7123 - protein, 147 aa, Bacillus licheniformis
MYTDNIWLEVDNMNIGKLSKYFLSLAIALATILSFHAVSANAASVGTIKPSECSTHIFTVYDETVGIGGSGRAHFYCGSINGGPQIEFSDEDLEVAVDDPFILHAYANPSMNSVDYEGRQKGDAEVTIYWKNKPEGTKYTFLLVQIK

SEQ ID NO: 7124 - protein, 353 aa, Bacillus licheniformis
MSDDVLFSVNQNGAAAIVLNRPKALNSLTYDMVRLIGEKLNEWETDQNVSIVVIKGAGPKGLCAGGDIKALYEARSSKQALQDAERFFETEYEVDMAVHRFSKPIIACLDGIVMGGGVGLTYGASHRIVTERTKWAMPEMNIGFFPDVGAAYFLNKAPGRLGRYLGLTASVIHAADVLYINGADAYMESGALERLLQAVEQTDWRLASVEEKLDQLIRESKTEPSQESTLARDQQAIDRHFKYDKLEEILQSLESEGSTFSSNVKKTMLSKSPFSLKITLKQLADGRQKTLEECFATDLVLAKNFLKHNDFFEGVRSVLIDRDQSPNYKYRHVSDVTDEAVDRFFQPSESVRF

SEQ ID NO: 7125 - protein, 261 aa, Bacillus licheniformis
LNLKYATLKTEHGITTVTLNNPPANTLSSSCIAELRSLFRELARDEETKAIIITGEGRFFVAGADIKEFVSKLGDQKQGLALAQGGQALCDEIEASKKPIIAAINGPALGGGLELAMSCHFRIVSDDATVGLPELKLGLIPAFGGTQRLRNITDTATALDLILTGRSLSAQEAVELKIAQMAVKGEELMKTAAAVASSFIEGKSMTSVRRAVECVVQGASESMEQALERERNRFAELFVTSDAKEGIHAFVEKRKPNFHHS

SEQ ID NO: 7126 - protein, 484 aa, Bacillus licheniformis
MITTNAKKMMNHIDGEWVNSLGAESEEVVNPANGNVIAYAPLSVRADVDRAVQAAKHAYQTWSLVPVPNRARLLYKYLQLLQEQKEQLADIITTENGKTLKDARGEVQRGIEVVELATATPTLMMGESLPAIAGGIDGSIWRYPLGVVAGITPFNFPMMVPLWMFPLAIACGNTFVLKPSERTPNLAGKLVELFYEAGFPKGVLNLVHGGKDVVNGILENDDIKAVSFVGSEPVAKYVYQTGTANGKRVQALAGAKNHAIVMPDCHLEKTVQGIIGAAFGSSGERCMACSVAAVVDDIADDFMEMLVSETRKLKTGDGRSEDHFVGPLIREVHKQRVLDYIDSGIKEGAALAVDGRNPDVREGYFVGATIFDHVTPEMKIWQDEIFAPVLSVVRVQDLDEGIELANQSKFANGAVIYTSSGKSAQQFRDKIDAGMIGVNVNVPAPMAFFSFAGNKASFYGDLGTNGKDGVQFYTRKKVVTERWF

SEQ ID NO: 7127 - protein, 295 aa, Bacillus licheniformis
LKKIGFIGLGNMGLPMSKNLLQENFTVYGMDLNKEAELALHHAGGTIGISVEKMVEECDAILTSLPSSKAAEEVFLGKKGLVHLAEPGVLLIDTSTVAPELNIRIAEEAKSKGIDFLAAPVSGGVIGAVNRTLTFMVGGPKSVFDKALPVFNALGENIFHVNENIDSGTNTKLINNLLIGFYTAGVSEALHLAKNSNLDLDQLFEMLNVSYGQSRIYERNYKSFIADENYKPGFSLKLLLKDLGFALDLAEKNNVELPVSKILFGIYEEADQNGYGEKDMSVLYKKISEQKTTYQ

SEQ ID NO: 7128 - protein, 571 aa, Bacillus licheniformis
MGKAKLRWNEPLISQHESAAEGFTPEDFTEEDRLISKTTESFVKNEVMPLLESIDQQDHESVKKLFQKAGELGLLSIEVPEDCGGLSLSKKLSGLVAEKMGAGGSFSVSFNIHAGVGTLPYIYYGTEEQKQKYLPKLASGEWIGAYALTEPGAGSDALNAKTTAVLNREGTAWILNGEKQWITNAQVADVYVVFAKTAEGMTAFIVERSFKGVSIGPEEKKMGIKGSSTATLILEEVEVPSDNVLGHIGKGHHVALNILNMARLKLAFSNIGTAKQALNLAVSYAKQRKQFNKPIIGFSMIQEKIADMAVSIFGAESAAYRTADCLDNVLDSALPLDDRLRKLTNYASECAINKVYCSEILGRIADEAVQIHGGYGYMQEYEVERLYRDARISRIFEGTNEINRLTIAKLLMKEVQQNGISEPEAQLGSEGNRNRRFIQLSNRLFGKTLKALIRSRVNTQEDQEYARLLADMKKEIYVMESSARRTEKARQIYGGEKARLKEMMTNVICEEGYRRIEEMAVTALSSIASDEAERKLAFEEARSLSLPLFSNLFTQKREIAEKIAAHEKYTV

SEQ ID NO: 7129 - protein, 38 aa, Bacillus licheniformis
MIRISKNVSGFIVFLSRFITLFSGSEEVSNGESKTSME

SEQ ID NO: 7130 - protein, 56 aa, Bacillus licheniformis
LFHEAAVPRKVPGSAADERYEAFNISLSNNWKISKCFFGLLYFTCESLGICIVSPL

SEQ ID NO: 7131 - protein, 317 aa, Bacillus licheniformis
MTEPLFFEPVFKERIWGGTALASFGYDIPSEQTGECWAFAAHQNGQSVVKNGLYKGLTLSELWDEHRHLFGHIKGDRFPLLTKILDADQDLSVQVHPNDEYAKLHENGELGKTECWYIIDCKEDAEIIYGHHAKTREELVSMIENGKWNELLRRVKVKPGDFFYVPSGTVHAIGKGILILETQQNSDTTYRLYDYDRKDTEGNLRELHLQKSIEVIDVPSSPDRETVQYETSGDVKTAALIDCPYFSVEKWDVKGSACFKQDKPFLLASVIEGEGRIASGGHNFSFKKGDHMLLPWGFGEFTLAGHAECIVSSLSIE

SEQ ID NO: 7132 - protein, 647 aa, Bacillus licheniformis
MKLLAITSCPNGIAHTYMAAENLQKAADRMGVQMKVETQGGIGVENELTEQEIREADAIIIAADRSVNKDRFIGKKLLAVGVQEGIRKPEELIQKAIGGDIPVYRSAVKTEASAQTEKKQNPIYRHLMNGVSFMVPFIVVGGLLIAVALTLGGEKTPKGLVIPDDSFWKTIEQIGAASFSFMIPILAGYIAYSIADKPGLVPGMIGGYIAATGSFYGSGSGAGFLGGIIAGFLAGYAALAIKKLKVPKAIQPIMPIIVIPVVSSLIVGLAFVLLIGAPVAQIFESLTVWLAGMQGSSSILLALILGAMISFDMGGPVNKVAFLFGSAMIGEGNYEIMGPIAVAICIPPIGLGIATFLGKRKFQAQEREMGKAAFTMGLFGITEGAIPFAAQDPLRVIPSIMAGSMTGSVIAMIGNVGDRVAHGGPIVAVLGAVDHVLMFFIAVIAGSLVTALLVNVLKKEVTAAPAGISEAAAGNDIPQPNIEIEAESKKIEKPEITKLTDIIDTDLIEPHLSGDTRDDIIDEMIQKLSRKGVLHSESEFKQAIINRELEGTTAIGMNIAIPHGKSDAVKKPSVAFGIKRSGVDWRSLDGTDAKLIFMIAVPKESGGNEHLKLLQMLSRKLMDDTYRDKLLSAQTKEEAYKLLDEII

SEQ ID NO: 7133 - protein, 58 aa, Bacillus licheniformis
MFTPPRQISAPYCNTAHFFQIQSHMFLQVAAHCSPALKKPIFPEPAVKINAFTRTFLL

SEQ ID NO: 7134 - protein, 113 aa, Bacillus licheniformis
MMRLLISFIFGALGAVIMYNVKSNFSFPVTTIVLVVFVAACLHFDLVKRKKSKDQNDKKYEFIWWIATILMVLVMTLNTVFVKIDPKYNIIVVLIHILFMVIIKSRWKKAKTD

SEQ ID NO: 7135 - protein, 56 aa, Bacillus licheniformis
LDNQVLQAIYEMQKEMKEDFKSVNERLDTINKTLTRIEENDPEKVISMLKLINKKH

SEQ ID NO: 7136 - protein, 90 aa, Bacillus licheniformis
MNYDEAQHLHISYNKKGLDLEAVGLKRLDIDVWDVYFNFQDHGIDEPPLSFSKIDPFGCNILSITSKDLKINEATQYFELWIKHELYKDL

SEQ ID NO: 7137 - protein, 647 aa, Bacillus licheniformis
MNTRQKDILNLLLSEPDDYLVVQDFADRVKCSEKTIRNDLKTIEDYLNQRSDAQLIRKPGLGVYLNIEDQERVRLSRQLYTEHHAAQQLPDEERMLQIAYQLLMNPKPVSAKEMAAEHFLNKSSIKRDLNKIDVWLKRFGLTLVSKQRLGLKIEGSEKNKRKALARISELIDNPEFTSRFIKSKFLSHEVEFVKSEIRSLQRRHSLYFTDETFENLLLHTLLMIRRIKMKQPITISPGEIDAVKNKKEFQWTFACLKRLEAVFAIRFPEEEAVYLTLHILGGKVRYPFGKEGDSGLENPLLPKVVEYLINRVSELKMMDFREDRVLINGLKVHLNTVLNRLSYDLSVSNPMLNDIKKMYPYLFHIVIDALEDINQTFSLSIPEEEAAYLTLHFQAAIERFSYGKDKHKKAIIVCHMGIGMSQLLRTKIERKFHQIAVMDCIAKADLADYTARYKDIELVISTVSLEDLSIPHIVVSPLLESADEKKLSDFMDQLGESTRQKQKTFKVLNDTTPFLVFLQQESEHRYKLIEQLAIALYEKGYVEKEYAVHAVLREKMSATNIGAGIAIPHANAKLIKQSAIAIATLKEPLDWGSEKVSLVFMLAVKHEDQNMTKQLFQELSSLSEQPAFIQKLTKETNVMKFLSYLDY

SEQ ID NO: 7138 - protein, 62 aa, Bacillus licheniformis
LILFPLLRTVRLFSFCRLLFSFPSLSSIIKNSYKRKISELIKSIFSGSFGKKRNFWPFYFTV

SEQ ID NO: 7139 - protein, 218 aa, Bacillus licheniformis
VYHLIKKDILMQKRAMKLSLLLMIFFTFTLSQLELVGYTVAVLAVTYQLALGASSLEDKNNSDKILISLPIKRNIIVLSKYVSVYVYAAYAILFYSLINAVGHLLHLPLDFPLTFSRAMGAVVAVTLFSSISFPLIFKYGYLKSKMANILIFFFIIFGGTAFFKFIDADENLALSQKLTAFLSGMSNAGTFILLVGVLLVMISVSYAISLSFYNKREF

SEQ ID NO: 7140 - protein, 292 aa, Bacillus licheniformis
VTSILELKNVTKHYQDFSLKNINFSLEKGYIMGFIGPNGAGKSTTIKLIMNLIKKDEGNISIFGLDNEKHNIEIKQRIGFVYDENHFYEELTPNEMKGIIRPFYKKWDEAVFQRYAKDFQLPLNKQIKNLSKGMKMKFSLAVALSHHAELLIMDEPTSGLDPLVRSELLDVLQTLLQDENKSIFFSTHITSDLEKVADYITFIHNGRLVLSKTKDELLEEYCIVKGDLDTLRKGNEDALIAIKKNRYGFEALSRDKREVVQHFGDSVMIEKPTLEDILVFSTGRSDHRVSSY

SEQ ID NO: 7141 - protein, 124 aa, Bacillus licheniformis
LNIIISNSSDEPIYLQIVNQLKDQIVKGELSESEALPSIRNLAKELKISVITTKRAYDELEREGFIVTVAGKGSYVAAINKDMLRETKVKLIEEHIAEAVTEAKQIGFTYEELQEMLKLVYEEW

SEQ ID NO: 7142 - protein, 231 aa, Bacillus licheniformis
VQIPFHVNLKDKVAVVTGGSGILCSCFAKALAQCGAKVAVVSRRAESADRVAKEIQENGGEALALTANVLDKQSLEQAKQLINRTFGRCNILINGAGGNHPKGTTDKEYLYKKDLNTKELTTFFDLEIEGVRSVFDLNFLGTLLTTQVFAKDMADHDGSVIVNISSMNAYTPLTKIPAYSGAKAAVSNFTQWLAVHMSKVGIRVNAIAPGFFLTAQNRSLLRWIDLGFRKI

SEQ ID NO: 7143 - protein, 351 aa, Bacillus licheniformis
MQMTFRWYGDSDPVTLEYIRQIPGVTGIVSAIYDIPVGEAWPYEKIVELKEKIENHGLSLSVIESVPVHEDIKLGLPTRDQYIENYKTTIRNLAKAGVKIVCYNFMPVFDWTRSSLDYALEDGSTALIYEEEKVRQMNPLHGELKLPGWDTSYEDGQLKNLFQQYQHMTEEDLWENLSYFIKAVIPVAENERVKMAIHPDDPPWPIFELPRIITNKKNLERLIHLYDSSFNGLCLCSGSLGVNSTNDIPELIRYFGKKGKVNFVHLRNIKIIGEKSFQESSHRSEDGSLDMYEIVRALRDIDFAGPARPDHGRMIWGETGKPGYGLYDRALGAVYLNGMWDIDERKKADSF

SEQ ID NO: 7144 - protein, 255 aa, Bacillus licheniformis
MAIAAGLILSAVFFILLFLGVPISVSIAAASIVTMLTIFPFDVAIFTSAQKMVTGIDSFSLLAVPFFILSGIIMNNGGIAMRLINFAKLISGRLPGSLAHTNVVGNMLFGSISGSSVAAAAAIGGVMSPLQEKEGYDRTYSAAVNIASAPTGLLIPPSGLLIIFSLVSGGTSAAALFMAGYLPGILWGLATMVVACMIAKKKKYPVAPNEYTHTFAFIHVDMETTEDGIKLSIQKEGTYDLESKNGAFSYSLPCD

SEQ ID NO: 7145 - protein, 171 aa, Bacillus licheniformis
MLALKKAVNKTIECLTCTLMAIMVFVAIWQVFTRYMLNSPSTFSEEFLRYSLIWISMLGGAYAFWKKKHLAIEFIVRKLPIKAAVFVHTFIQILLIAFALIVLVLGGSKAVITTMEQSSAALGIPVGFVYLSLPVAGILIIGYSLAGLYESLHEFNSKQKSGDDVKKAEKM

SEQ ID NO: 7146 - protein, 336 aa, Bacillus licheniformis
MRKMLSVFFVCALIFGMLTGCKSSDVIGVDKTVTLRLAHNHNEEHPIHKSLLKFSKDVEKKTNGTVKVQVYPNAQLGSEREVIELTQTGAVDLAKVSASALESFSEVYSIFSLPYLFDSKHHFYEAMDSDIAKEMYDTTKNIGFIGLTYYDAGSRNFYTKNKPIMHPNDLKGLKIRVQPSATAIRMVELMGGAPTPMAYGEVYTALQSSVIDGTENNEMALTSSNHGDVAKEYSYSEHAIVPDILIMNLDKKDQLSEEQQNAVIEAAKESTEYHKIVWAEETENAVEKAKEMGVKFHKPDKTPFRDAVSPLHDEFAKKELIGKYYREIRAKAKKVK

SEQ ID NO: 7147 - protein, 336 aa, Bacillus licheniformis
MTVTIKDIANASGVSYSTVSKALRNSPLVKPDTKKKVLQVAEQLGYSPNFAARSLASKKSQTIGLVWPTIERIALSALVTKINEVVEKNNYSMILSVNRAKEAVDLFKSFRVDGIMIFEEGGETQLSDDTGLTIPILSYGVSGEHTHPIIDVNHKKAIYKAVAYLYQLGHKNISYVGDLSPADKRQVEKSKGFEEVMMEAGLKLSRNSILNTNGLSWYNGYTAAKKLLQQTPKPTAIISGSYDISVGILRAVKEQQLSIPEDLSLISYDNIPQMASLETPLTSVGVPIDQLAHKMVDSLLSLIREPGSIPLTQKMDPELNVRMSCASPAVLGEENK

SEQ ID NO: 7148 - protein, 49 aa, Bacillus licheniformis
LHLLETYKNTSATYIFYKERTSPKACGRSCKNSEINVPRNSVKSIAISF

SEQ ID NO: 7149 - protein, 139 aa, Bacillus licheniformis
MSKKTIYFLCTGNSCRSQMAEGWAKKHLGDEWNVYSAGIEAHGLNPNAVKAMREAGIDISEQTSDIIDPDILHNADLVITLCGDAADKCPMTPPHVKREHWGFDDPAKAEGTEEEKWAFFQRVRDEIGERIKRFAETGE

SEQ ID NO: 7150 - protein, 431 aa, Bacillus licheniformis
MTTVLATLIFLLTLTLVIWQPKNLSIGWSACGGAVLALIAGVVNFQDVLDVTGIVWNATLAFVAIIIISLILDEIGFFEWAALHMAKAAKGNGIRMFVYVTLLGAVVAALFANDGAALILTPIVLAMVRALNFQEKLVFPFIIASGFIADTTSLPLVVSNLVNIVSADFFNIGFIEYATRMIVPNLFSLIASIIVLFLFFRKSIPRHYDMTNVKQPAEAIRDRKIFRLSWLILAVLLAGYFISELFSIPVSIIAGVIAVIFLITAKNSPAVQTKKVLKGAPWAIVFFSIGMYVVVYGLRNAGLTDVLSQVIQTVSDQGLFAGTMGMGFIAAILSSLMNNMPTVMIDALAIQNTDTHGILREALIYANVIGSDLGPKITPIGSLATLLWLHVLSLKGVKISWGTYFKTGVILTIPTLFITLAGLYVWLLIIH

SEQ ID NO: 7151 - protein, 115 aa, Bacillus licheniformis
MSVQTKLDSKSTVSCMKILSDSTRLLILKLLQEKPYCVCQLVDMFETSQPAISQHLRKLKSANMIKEQRREQWRFYSLHDDFPERELVLAVLNQIDAHDEVLQTVKRKERPVSCS

SEQ ID NO: 7152 - protein, 70 aa, Bacillus licheniformis
LKEPIAKRTYVYFIVFGHYHLGILHVWLFHWELLATETGFFIWGCSILMGLILYLSGRKNAVTRRFLPQL

SEQ ID NO: 7153 - protein, 197 aa, Bacillus licheniformis
MTNSRTNPKVDEFLSKAEKWKEEFKKLRQIVLECELNEDFKWKHPCYTFENKNIVLIHGFKEYCALLFHKGALLKDPNGILIQQTENVQAARQVRFTNVQEIAEMETILKAYINEAIDVEKAGLQVDFKQAAEYTIPEELQKKFAEIPALKAAFEALTPGRQRAYILYFSKPKQSKTRESRIEKYTQQILDGKGLND

SEQ ID NO: 7154 - protein, 241 aa, Bacillus licheniformis
MKFSIMTFNIHHGKGRDRRVDLGRTAGVIAQSGCDIIGLNEVDRHFSNRSDYEDQIGRLAEQLNMHYAYCPSLSLSSGDSSEKRQYGNALLTRFPIKKERHHSFNFVKGLIEGRSLLEADVRIGDRLFRVFVTHLSLNPWLHGKQTDFLIEKVQESDLPVIVTGDFNMKPYSRGWKKVAEKLADLWDESQYGQGFTHPSHRPRRRLDYIFLSPSFHVSAAEIVAVDPNASDHLPLKGSITY

SEQ ID NO: 7155 - protein, 285 aa, Bacillus licheniformis
MDIFLAILPAIFWGSIVLFNVKLGGGPYSQVLGTTFGALIFSIGIYFVVQPELSPRIFAVGVVSGLFWALGQTNQLKSIDLIGVSKTMPISTGLQLVSTSLFGVLVFHEWATTISIVLGVLALIFIIVGIVLTSLEDRSQKTEEKTGDMKKGIVILLISTFGYLVYVVVVRLFDVSGWAALFPQAVGMVAGGLILTFRHKPFNFYVIKNIIPGLIWAAGNMFLFISQPRVGVATSFSLSQMGIVISTLGGIILLGEKKTKRQLIGIAIGIILIVAAGVLLGIAKA

SEQ ID NO: 7156 - protein, 395 aa, Bacillus licheniformis
MKEKSAGCETKEFRAVWIATVTNIDWPSKKGLTIEEQKTEYVKLLDDVTAMGMNAVVVQIKPAADAFYPSAYGPWSEYLTGIQGKDPGYDPLAFLLEETHRRKLEFHAWFNPYRITMNHTDLNRLSQDHPARTHPDWVVAYGRQLYYNPGIPEAQEFIVQGIAEVVKNYPVDAVHMDDYFYPYKIAGVEFPDLSTYEQYGKDRFSNIEDWRRDNVNQLVKQINDAVKKERASVKFGISPFGVWRNIADDPTGSNTAAGMTNYDDLYADTREWIRQGYIDYIAPQIYWSIGFAPASYDILVDWWKNEVSHRPVHLYIGQAAYKINQNSDPAWSDPEEYPRQIALNRASNVMGSIHFSLKDLNRNPLGIKDRLIQDLYKKPAAVPDMPWLGSVNSEN

SEQ ID NO: 7157 - protein, 39 aa, Bacillus licheniformis
MSWPVFSYTKKNIRHIITESSDFSKRGDVHERKERRLRN

SEQ ID NO: 7158 - protein, 400 aa, Bacillus licheniformis
MYHLYSHNDLDGVGCGILAKVAFGERVEVRYNSVTGLDMQVGRFLERTKGKEKQHEGLFITDLSVHQENEERLDQYAEAGGKVKLIDHHKTALHLNERPWGMIKVQYEDGRLASATSLFYEYLIDNGHIRETKAMDQFVELVRLYDTWEWEQTGALEAKRLNDLFFMVSIDEFEEKMIRRLKESDAFSFDEFEEKILDMEEEKIERYIRRKRREIVQTFINAHCVGIVHAESYHSEVGNELGKTYPHLDYIAILNMGGKKVSLRTIHDETDVSEIAGTFGGGGHAKAAGCPLTDEAFKLYVTEPFPLEPLRADAFKNVYNVKKSDYGSLYVNRDEDQFFLFPSANGWNIQLNGVAQHETFTSFEEAERFIKRNYAAWLARDEAFVQYLMQQVKLALQTTG

SEQ ID NO: 7159 - protein, 252 aa, Bacillus licheniformis
MDGNIHSIETFGTVDGPGIRYVVFTQGCLMRCQFCHNADTWEIGTGKQMTVSEIVQDVQHYLPFIQSSGGGITVSGGEPLLQLPFLIELFKACKSLGIHTALDSSGGCYSAAPAFQEQIKELIQYTDLVLLDLKHHNRKKHINLTGMPNDHILEFARFLAEHQVPVWIRHVLVPGISDIDADLTALGTFIGTLANVQKVEVLPYHKLGVYKWEALGLDYPLKGVEPPSADRAENAYRLLTAHLQGGSLLQET

SEQ ID NO: 7160 - protein, 686 aa, Bacillus licheniformis
MEQWKGFTTNVWQKEVNVRDFILSNFEPYQGDESFLEPPTEATSALWDHVMDLTKKERENGGVLDMDTEIVSTITSHGPGYLNKDLEKVVGVQTDEPFKRSLQPFGGIRMAKQACESYGFELNEEVERIFTDYRKTHNQGVFDAYTDEMKLARKVGIITGLPDAYGRGRIIGDYRRVALYGVDFLIDEKKKDAAGTSRVMSEENIRLREELSEQIRALNELKALAKSYGFDISKPAANAREAFQWLYFAYLAAIKEQNGAAMSLGRVSTFLDIYIERDLKTGVLTEREAQELVDHFVMKLRLVKFARTPDYNELFSGDPTWVTESIGGMAHDGRALVTKNSFRFLHTLDNLGPAPEPNLTVLWSVRLPQKFKNYCAKMSIKTSSIQYENDDIMRPEYGDDYGIACCVSAMAIGKQMQFFGARANLAKALLYAINGGKDEKHKMQVGPEMPPVASDVLDYDEVMHKFDQTMEWLAGLYINTLNVIHYMHDKYCYERIEMALHDTEILRTMATGIAGLSVVADSLSAIKYAKVSVVRDENGIAVDFETEGDFPKYGNNDERVDAIAVDIVKRFMKKLRKHQTYRQSVQTMSILRSRQTSFTERKPEIRRMDAARENRLLQVRIRCTAAILKGRLHRCLQWQSCLTAMRSTAFPTPFQSSRKRLAKTKRAAPPICQASLTDMPQKQDIT

SEQ ID NO: 7161 - protein, 72 aa, Bacillus licheniformis
LSSPSGNASSLRSVKKRHAIAVSSKDCYVCHQLPKHHRIIRQSDCIDRLMINISLCKPAILPAFLYNSFRYL

SEQ ID NO: 7162 - protein, 489 aa, Bacillus licheniformis
MKKHMKLCLCMMMIFVLTLAGSMDGLGAEEKGGLKEQIDQLLKTEPDLKGALAGISVRSAESGKMIYGHMGDTRMRPASNLKLLTAAAAYSVLGEDYTFPTEVMADGARAAGTLKGSLYIKGKGDPTLLTADFQQMAKALRKQGITVIRGDLVGDDSWYDEIRYSQDLSWTDEDAYYGAQISALTVSPNEDYDAGTVIIDVNPAGKTGKKPAVLLTPQTNHVKIKNDAKTVAADGKKDITIKRKHGGNTIQIKGTIPQGASRVRQWVAVWEPSEYALDLFKQALHQQGIRILGKTKIGKAPKTAHRITTHQSMPLSELMIPFMKLSNNGHGETLIKEMGRAARREGSWDQGLEVLNTELQRFGLDTEKIVLRDGSGISHINLISAHQITKLLYSVQDEKWFPSFARSLPVAGESDRMVGGTLRNRLKDPALKGKVRAKTGSLSTVSSLSGYVDTASGKTLIFSILLNQLVDDEKGKDIEDKIVQILASS

SEQ ID NO: 7163 - protein, 182 aa, Bacillus licheniformis
VLVLGDFLGNNIYEDKVGIFHFLYAIGLWTFLMLGIEFMTLKNKSTRSLLLGNPNIIIRDGVMDRKLLTKNKLDVNQVLSILRQNNVFSVREVKYGILEANGQISLLLKSKYQKPDLNLPESPVDLPTSLIIDGEILWDNLHELGFDQQWLDNQLTTNGYDNVKRILYADWRESEGIHVSPK

SEQ ID NO: 7164 - protein, 497 aa, Bacillus licheniformis
LEWIFYLYLLNTFFILFIAIWEVRRPAKALNWIIIVLFLPVIGFWLYLSISNPKFIHRKRLTCSKNESNKLPETFGASASVIANALRHFTVNGLRMGQVQVFNNGIAKYDQLLVSLQKAQKTIDLEYFIYRNDQIGNRITELLIEKALNGVQVRFMRDSLGSYKFPREKIRQMVEAGIECRTIFPLRFPWILSNWNYRDHCKIVTIDRKESFTGGMNVGYEYTGLKPDVGFWRDTHLQIIGEATGDLQTVFDVHWEIAVPERIKSKTNLKTKSEVTKINSIGRADHSKWSAELGSELSTLDDKEMDISGKTRTLHKAYIHTLEGNPGIPTPVIRQAYFICITQATKTIDLTTPYFVPETDIIMALKTAVTRGVRVRLLVPRHNNQKIVGLASRTYYGELIEAGVQIYQYDKGMIHAKVLTIDEEIAAVGSANYDMRSFRLNYEVCQVVYSADVARELTEQFERDLTDSVPLRIEDLVQRSLTERIVEQGARVLSPLL

SEQ ID NO: 7165 - protein, 224 aa, Bacillus licheniformis
VSIFLVKVIFIYIVFIVAVKILGKSALAQLTPHDFGAILFLSYLAFGSIKVNGVMEGIIGIIVITCIHLFISKLSLLNKLNPFIIGKPTILIKHGKIIYRNLKESRYPLPELLSNLRTSGYPDIHDIEYAILEATGEISIFPRKELVPITPKDLHMKVEYRGLPIAVVIEGKVQKRNLKLINKNEKWLKEELKAKGYLQIKDFFYAAVRDTDHSLTINKKDVND

SEQ ID NO: 7166 - protein, 286 aa, Bacillus licheniformis
VPEWLEVVIRSLLFVVVLFLITKWLGKKQLSELSFFEYVVGITIGSIGAEVITGLERNMFNGIIGIVVFAAIPFLAGLLSLKSKGFRNFIEGKATVFIKDGKIMEDNLKKERYTTDELLELLRKKDVFKVADVEFAVLEPTGDLSVMLKKENQPLTPKDVNLTVASVKEPQTVIMDGEILDEPLSTIGRSRGWLKTELEKQGVTIENVFIGQVDSYGQLTIDLFDDKLQVPSPQEKPLILSTMKKCQADLESFALGTESKEAKQMYRLNSEKLQEAIDKVTPILKG

SEQ ID NO: 7167 - protein, 68 aa, Bacillus licheniformis
MTVGSDVKQCFASLKGVEASLSSLALRTLDDESKRTLHEAMMVVHEVTKDLKKRVGELEGEELQYKGF

SEQ ID NO: 7168 - protein, 116 aa, Bacillus licheniformis
MIYFWAFVVGGLICIIGQIMFDVFKLTPGHTLSALVVIGALLDGFGLYEPLIDFAGAGATVPITNFGNSLVHGAMQEAEKHGLVGVLTGMFEVTSSGITASIVFGMIGALIFKPKG

SEQ ID NO: 7169 - protein, 339 aa, Bacillus licheniformis
MLAGHRTWIFEQKPVIISTGTVGGPFEANGAIPDDFDTLHADLWLGQDSYEKAHKILFEEACQKAMEKGGIQKDQVQFILAGDLINQITPTSFASRTIGAPYFGLFGACSTSMEGLALGAYIVNTKGAKYLLTGASSHDTAVEKQFRYPTEYGGQKPPTAQWTVTGAGAALLSDSGEGPHVTSATIGRVIDMGLTDPFNMGGAMAPAAVDTIEAHLKERNVEPSYYDLIVTGDLGQIGQEVSMDLFKKHGTPISEEQYQDCGLMIYREGQPVLAGASGAGCSATVVYGHLLNRMKNGEFKRMLVVATGALLSPLSFQQNETIPCIAHAVSIEYGGEQLT

SEQ ID NO: 7170 - protein, 159 aa, Bacillus licheniformis
MSNNQKKQLTPVQQEYQKLQKQREIKRPVVKNCIKAFLTGGLICLIGQLISDFYIYYFDFTEQTAGNPTVGTLIFITMLLTGFGVYDRMAQFGGAGTAVPVTGFGNAVISPAIEHRTEGFVLGVGGNMFKLAGAVILFGVFSAFVIALIKTTLIQWGGL

SEQ ID NO: 7171 - protein, 157 aa, Bacillus licheniformis
LKDKITTLKNLLFIIMVIGFASGCNGNQNEFIQGNSTFGISQVHTSKPIDQSVANHAKEKIIAKEDITDVKAVNTDKELMAAIKVENFDRFRLKSIEKSVKSDLEKKYPDYKVFVSTDKKIFWELEKVEQRLKKNDMNKKNLKNDLNKLKSLMKEQT

SEQ ID NO: 7172 - protein, 68 aa, Bacillus licheniformis
MTVINDVKTALAGLKSAQASFETFALSTDNQQAKQLYQDAAKQTQSVVDSIEPRVQQIEQEEPQYKQQ

SEQ ID NO: 7173 - protein, 89 aa, Bacillus licheniformis
LIKGIPWAGKGFITKLEISIDGGITWLNAMLESAKNAGYGWRSWSYEWTVLDKGEYKIMTKATDSYDRTQPTLPFWNRKGYGYNAIDEI

SEQ ID NO: 7174 - protein, 296 aa, Bacillus licheniformis
MMKRVNKIAIELPYPEHGDMNAAAAVQELMGGKFGEMSTLNNYMFQSFNFRGKKKLKPFYDLIASITAEEFGHVELVANAINLLSIGNTIPGNPDTAPLQNGKDARYSTHFTTTAQTAFPGDGMGRPWNGSYVNNSGTLVEDLLANYLLEIGARNHKMRVYEMTTHPTALEMTGYLLVRGGTHIIAYAKALEVATGVDVGKMLPVPSLDNNKFDYAKKFMDQGLYNVLYTWGEADYRDINQIWKGANPETGERLHVIDGMPEGAPVPDFPELPEQFAPGIDLDDYYRILKRLKSNM

SEQ ID NO: 7175 - protein, 68 aa, Bacillus licheniformis
MSEKWKLSDPYVYQALMGLHNQSLAVQTTHGSVRGVLREVMPDHIVIMMGGTPFYVRTAQIIWFHPTM

SEQ ID NO: 7176 - protein, 271 aa, Bacillus licheniformis
MEPTKALFPLMGYTGRADFTVNCMLNGRVALIVDGTPAALIAPANLFLLVKAPEDIHFTALAATFGQTLRLLGLSVSLLLPAFFVAILSYHQDQLPYYLLATLGINRLGIPFDVAVEMFIALLFLEILREAGIRLPSAVGSTVTVVGGLILGDAAIRAGFLSPGIVVIGAITQIFGSTLSSLSLAGTISTLRFFLFILSATLGIYGFFLGLFIVLSHLASLRSCGLPYLAPISPPFKDLANALFRLPWPWRNTRPDMLKTRDSTRQGDRHK

SEQ ID NO: 7177 - protein, 100 aa, Bacillus licheniformis
MFKLYLDPGHGRMDPGSIGNGMQEKEITLNISHSIRNLLENHYEGLQIKMSRTADITRSLKERTDDANAFGTGAKGWICGRSGSQCGVNSETNQINQHGL

SEQ ID NO: 7178 - protein, 150 aa, Bacillus licheniformis
LKIPKTAKVSIPFPSVWGIDASIAGRSIIRGILTIDSIVDNKVVGTVNFRGIPIPINGYWDESAKQISFDSPYASFFGNLTIIDETAISIRHFILSGRFIMKPPSLLAGEYGNWIATTFTTRLGPPIYTNVLPPVGAFSVSSMLLGQQLF

SEQ ID NO: 7179 - protein, 191 aa, Bacillus licheniformis
LQKIGYVRVSSTSQNPSRQFRQLNEIGMDIIYEEKISGATKDREQLQKMLEDLQEGDIIYVTVLTRITRSTQDLFELIDLIRNKKASLKSLKDTWLDLSEDNPYSQFLITVMAGVNQLERDLIRMRQREGIELAKKEGKFKGRLKKYHKNHAGMNYAVKLYKEGNMTVNQICEITNVSRASLYRKLSEGKK

SEQ ID NO: 7180 - protein, 531 aa, Bacillus licheniformis
MKIARGRELLTLEQRQDFMQIPEDEWILGTYFTFSKRDLEIVNKRRREENRLGFAVQLAVLRYPGWPYTHIKSIPESVIHYISKQIGATPSSISLYPQRENTLWDHLKELRSEYDFVTFTLREYRIAFKHLHQLAFENGDAIHLLHECIDFLKKNKIILPAITTLERMVWEARAMAEKKLFNTVSQSLTNEQKGKLEEIITSQHPSESNKTILGWLKEPPGHPSPETFLKVIERFEYIRGMELETVQISHLHRNRLFQLSRLGSRYEPYAFRDFQENKRYSILTVYLLHLTQELTDKAFEIHDRQILSLLSKGRKAQEEIQKQNGKKLNEKVIHFTNIGQALIKAKKEKLDVFEVLESVIEWNSFVSSVEEAQELARPDDYDYLDLLQKRFYSLRKYTPTLLRVLEFHSTKANEPLLQAVEIIRGMNESGKRKVPDNSPVDFISKRWKKHLYEDDGTTINRHYYEMAVLTELREHVRAGDVSIVGSRQYRDFEEYLFSEDTWNQTKENTRLSVSLSFEDYMTERTSSLNKR

SEQ ID NO: 7181 - protein, 392 aa, Bacillus licheniformis
MSKHIVILGAGYGGLLSALTVRKHYTKEEAKVTVVNQYPTHQIITELHRLAAGNVSEQAVAMPLAKLFKGKDIDLKIAKVNSFSVDKKEVALSDGSTLTYDALVVGLGSVTAYFGIPGLEENSMVLKSANDANKIFKHVEERVREYAKTKNEADATILIGGGGLTGVELVGELADIMPSLARSYGVDPTEIKLKLVEAGPKILPVLPDELIERATKSLEKRGVEFLTGLPVTNVEGNVVDLKDGQKIVTNTFVWTGGVQGNPLIGESGLEVNRGRATVNDFLQSTSHEDVFVAGDSAVVFGPDGRPYPPTAQIAWQMGELIGYNLYAYLENKSMATFSPVNSGTLASLGRKDAVAVIGANSTSLKGLPASLMKEASNVRYLSHIKGLFSLAY

SEQ ID NO: 7182 - protein, 144 aa, Bacillus licheniformis
MPETIDQTADQTNESVSQSQRDLIDQLLKPEVQESLTVLVDQLPKLTELVNILTKSYDFAQSVATDEVLKNDTVGAITEILEPVKDTAKEIAATAIEAKDRADESNEVIGLFGLLKMLKDPQAQKLFRFVQSYLQIMSEREKQK

SEQ ID NO: 7183 - protein, 107 aa, Bacillus licheniformis
MKEALYIKFSMILFHFRNNHVHFLFKKCYHLVVKNTACFEIAGFREFQTENSKTNTKGESLFADLFVHKFTNYKKGLPSKNSTSLIEKENWLCRKQSIKQLIKQTNL

SEQ ID NO: 7184 - protein, 76 aa, Bacillus licheniformis
MYLTIKETAEYLTLSEAYVEQLVREKKIRTVFDGQQHLINKEQFNTHMEQMEKYKEWAESFLNEPIPEDPDVKDED

SEQ ID NO: 7185 - protein, 74 aa, Bacillus licheniformis
MYSKWNSETSYPPSAPQMHTGQSSQQMNQRLKNLEDQMELLIKLMESNNQLLRSIEEQQNRVCTAGGGSVIVRM

SEQ ID NO: 7186 - protein, 650 aa, Bacillus licheniformis
MAEKAVWQPDPEFVKTTRLFQWMTALGFSDYDDFLKASTNDIAWFWEEAEKALGISWYKRYSQTLNLDKGIKWPQWFTGGRLNAVYNAVEKWARRPDTAGRTALIWESEDGKTEQITYSSLHQQVARAAAGFKKQGISKGDVIAIYMPMIPETVIAMLAAAKIGAVFSPVFSGYGAHAAAARLTAAGAKILVTADAFLRRGKKVCMKKEADKAADRSPTVQKVVVCKLHGGDQGWNYKRDIDWNELMKNEPMQNTEEMDSSDPLMLLYTSGTTGQPKGAVHTHAGFPLKAAFDAGFGMDVKQGDTFFWFTDMGWMMGPFLIFGGLINGAAVLLFDGAPDYPAPDRLWELVSRHRVTHLGVSPTLIRSLMQHGEDFLYQYNLNSLKAIGSTGEPWNYEPWMWLFLHVGKERIPIFNYSGGTEISGGILGNVLLRPITPMTFNSPLPGMAANVFNEKGEEVVNEVGELVLTKPWVGMTNGFWKEPSRYEEAYWSRWTDVWVHGDWAKRDENGYWTISGRSDDVINAAGKRIGPAEIESVLVGHPAVAEAGVIGVPDKLKGQAAVCFVVLRQSEKPSEELKDDLLNLASDAIGKAVKPKAVYFVSGLPKTRNAKVMRRLIRAAYMNEPAGDLSTLENRETYDEIAGLSVRKNL

SEQ ID NO: 7187 - protein, 509 aa, Bacillus licheniformis
MPAEKELYERIRRIQEGGAEKYHEANKKKGKLFVRDRLKLLLDEGLDLEDAFFANCMADGLPADGVVTGIGKIGGRTVCVMANDSTVKAGSWGARTVEKIIRIQETAEKLNCPLLYLVDSAGARITDQVDMFPGRRGAGRIFYQQVKLSGRIPQICLLFGPSAAGGAYIPAFCDIVIMVEGNASMYLGSPRMAEMVIGEKVSLEEMGGARMHCSVSGCGDILADTEEDAIKSARRYLSYFPSNYTEKAPVIEAKSARPFDRSLEDIIPKNQNAPFQMMDLIDRIIDEASFYEIKKLFAPELITGLARIHGQPVGIIANQPRVKGGVLFHDSADKAAKFINLCDAYHIPLLFLADIPGFMIGTKVERAGIIRHGAKMISAMAEATVPKISVIVRKAYGAGLYAMAGPAFEPDCFLALPTAQIAVMGPEAAVNAVYAKKIAELPEEERSAFIAEKRKEYQKDIDIYRLASEMIVDGIIPADSLRTELIKRLNAYMTKYMTFTDRKHPVYPV

SEQ ID NO: 7188 - protein, 260 aa, Bacillus licheniformis
MEPNVLYSINEQSVAVLTLNRPQAANALSLGLLDDFQRILRDIRSNPAVRCVIITGKGDRTFCAGADLKERARMSQTEAKQAVSLIQRVVSETEKLPQPVIASLNGSALGGGLELALACDIRIAAEHIELGLPETTLAIIPGAGGTQRLPRLIGRGKAKEMIFTGCRISAEEAQKISLVEHVVPLSKLKEASESIAANIAANGPVAVRQAKFAINQGLETAIETGLAIEQKAYELTIPTKDRTEGLKAFAEKRKPDYTGE

SEQ ID NO: 7189 - protein, 303 aa, Bacillus licheniformis
MDVPKNIFIKEVGPRDGLQNEQTALSTADKITWIDMLSATGLSYIEITSFVHPKWIPALSDALDVAKGINRKPGVTYAALIPNRKGLERALEGGIDEASVFMSASETHNRKNINKSIGETLPVLKEVIGAAKQASLTARAYLSTVFGCPYEHHVPLEQIIRTSETLFDMGINELSLGDTIGAANPVQVQRVLEVLLKRFPKENIALHFHDTRGMALANMIAAMDMGITVFDSSCGGLGGCPYAAGATGNLATDDLIYMCAQMGIETGVDLSKLLSAAKWIEDKTGRELPSRNLQAAKSKNCFH

SEQ ID NO: 7190 - protein, 70 aa, Bacillus licheniformis
MNTVVTNMAGNVWKILVKAGDKIEKGQEVAILESMKMEIPIVAETAGTVKTVRKNEGDFADEGDVLLELQ

SEQ ID NO: 7191 - protein, 446 aa, Bacillus licheniformis
LFKKVLIANRGEIALRIIRTCQRLGIQTAAVYSEADAESLHVKAADEAWLIGKPRVSESYLNIEKIIETAKKAGVCAIHPGYGLLSENSRFAERCLKENITFIGPPPDVIAKMGSKIEARQAMEQAGIPVVPGVTKSLAGLNEAKALAESIGYPVMLKASFGGGGIGMQLIRNEGELEKAYEGSQKRAADFFGDGAMYIEKYIEDARHIEIQILTDEYGNAVYLWERDCSIQRRQQKIIEEAPAPLFDENMRAKLGEAAVKAALSIGYANAGTIEFLVDKENHFYFLEMNTRLQVEHPVTEEITGLDLVEEQLNIAAGKPLSHKQKDIRRDGHAIEVRICAEDPKTFFPSPGRITDLKLPEQPNVRHECAAAPGMTITPYYDPMIAKMIVKGSSREEAICTLAEALSQYQVKGIKTNIPLLEDIVSSDEFRKGGVQTDFISRYQSK

SEQ ID NO: 7192 - protein, 545 aa, Bacillus licheniformis
LAELLHLTIGKLLEKTAADAPDHEAVVYPDRGLRYTYREFDQLCRKVAKGLMALGIDKGEHVAIWASNTPEWLTAQFASAKAGAVLVTANTNYQLSELEYVLKQSDATTLILMESYRGTSYIDILCKLIPELKEGEPGRLASERLPFLKNIILLGDQRHPGMYLWDDLLKLSGSVSEKALDRRMERLKEHDVINMQYTSGTTGFPKGVMLTHSNLANNAANIAECMNLSKKDRMCIPVPFFHCFGCVLGTLACVTAGATMVPVQEFSPKEVLSAVETEKCTALHGVPTMFIAELNDPDFASYDLSSLRTGIMAGSNCPIEVMKKVIDNMGMSEITIAYGQTEASPVITQTRVNDSLKRRVETVGRALPNVEVKITEPGTNREVERGVQGELCTRGYHVMKGYYKNPEATAAVIDEDGFLHTGDLAVMDEEGYCRITGRLKDMIIRGGENIYPREIEEFLYKHPDILDVQIVGVPDETFGEEVSAWIKLKSGASMTADELKEYCKGKIARYKIPRYIAFVEEFPMTASGKVQKFKLREQALEHFQL

SEQ ID NO: 7193 - protein, 386 aa, Bacillus licheniformis
MNFELTREQQMIRELARDFAKQEIAPHAEHVDRTGEFPIETFKKMGELGLLGIPFPESYGGSGGDTISYALSVEEIGKACGSTGLSYAAAVSLGAAPIYYFGTEEQKQEYLVPLATGRALGAFGLTEPNAGSDAGGTRTKARSEGDSYVISGEKCWITNAGFARTVIVTAVTGIDDNGKNIISAIIVPTDSEGFTIKSEYDKMGVRGSNTSQLILDNVRVPKQNLLGSPEKGFKQFLNTLDGGRISIAALAVGIAQGAFEAALTYARERKQFGRPISYFQAIQFKLADMAMEIELARNMVLKAAWLKDQGRPFTKEAAFAKLYASEMAFRTCNQSIQIHGGYGYMKEYGVERMLRDAKLMEIGEGTSEIQRLVIARQLGIGKQALK

SEQ ID NO: 7194 - protein, 186 aa, Bacillus licheniformis
LKTLVIVAHPNLETSVVHKRWVEELKKYPEKYTVHELSDVYPDGNIDAEKEQKLVESHGNLVLQFPIYWFNCPPLLKKWLDDVLAYGWAYGSNGGDRLNNRKVALGVSAGIKEEDYRENGRYRYTLEQILVPFETTFRYCRADYRSFFAFYGKEKEPGGNEEEENEPGAGELEKSARDYLHFIDHM

SEQ ID NO: 7195 - protein, 26 aa, Bacillus licheniformis
MQIPSGKTCVPTGVELKTPALAIRCH

SEQ ID NO: 7196 - protein, 423 aa, Bacillus licheniformis
MTATSESISAQIEEKAIKAKTAAKSLRLATEKEKNEALAALADHLKQNMSYILTENAKDIEAGRKKGYDAAYIDRLSLNEDRVLDFADGLLEVAELDDPVGETLSSWTLDNGLKAEKVSVPLGVIGMIYEARPNVTVDATGLALKSGNAIVLKGGSSAIHSNTAIVSVMHQALDSTNIPRDAVQFIESTDRSATKQLFKMKEHIDVLIPRGGGALIQEVVENATVPVLETGVGNCHIYIDREADPEKAIDVMINAKTDRPAVCNALETLIVHEKWLEENSAALINALNEHGIQVHGDEKAVQMIPGARPAGEADWQNEYLSLDLAVKVAGSLEEACDHIETYGTKHSEAIITENPETAKAFLNTVDAAALYHNASTRFTDGGALGFGAEIGISTQKLHARGPMGLKELTTCKYIMRGDGHIRR

SEQ ID NO: 7197 - protein, 373 aa, Bacillus licheniformis
MTSNQQRVVVKVGSSSLTSLHGEISSKKLEKLVEQIVRLKDEGHEVLLVSSGAVAAGYRKLGFINRPDTLPEKQASASVGQGLLIEAYSKLFLSHGYIASQILITKSDFSDEKRYNNVRNTMNVLLKRGIIPIINENDTVTVNRLKFGDNDTLSAKVAGLIDADLLTILSDIDGLYDANPRKTPDAALVQEVTEITPEIEASAGDAGSEVGTGGMKSKLDAFKITMASGIKGFLGRADTPGILHEAICGTARGTYFIPNADSHALNHKKQWIAFNSGPEGDIVVHNESKEFIIDRKKSLYPSSIYDINGRFSNGSVVRILDQEGEEIGLGVVNFSSSQLRKWKKDTNQETAASSQAVVDREAFVCHLELSVPL

SEQ ID NO: 7198 - protein, 283 aa, Bacillus licheniformis
MLKIFNQKNVAFIGAGSMAEGMISGIVQSKKLPASQIYVTNHTNHRRLEELQQKYGIQGVKKEQLDYQNIDCFILAMKPKDAEGALNSMKPHIKPHQLIVSVLAGISISFIENALNDMQPVIRIMPNTSSAIGASATAMAEGSHVTADLSKTAKQLLQCMGEVYSIEESKMDIFTGIAGSGPAYFYYLMEHIEKAGAEAGLSQKLTREIGAQTLLGAAKMLLESPEDTAVLKDNITSPNGTTAAGLKALEESGGGEAIEQAVKQAAKRSKTISLELEQLVAAK

SEQ ID NO: 7199 - protein, 33 aa, Bacillus licheniformis
LKKKRKKKKEAEGRFFIFMCTFCRLSSGHLKAV

SEQ ID NO: 7200 - protein, 62 aa, Bacillus licheniformis
VMRGSFTSQHIDVGRRGFDKLRTRAFSIAFTRLEEHTFLPVRKAVDLQKIPLNHSNGLQMAG

SEQ ID NO: 7201 - protein, 225 aa, Bacillus licheniformis
MEYVHLVVELTIGFAALFLMTKILGKTQFAQITPFDFISALILGEMVGNAIFDEDVTIWKILFAILIWAVLIYSIKVLSQKVQNIRGFLEGRPSIVINKGKIDYNALKKNKLDLNQLQTLAREKGCFSLHEIQYAILETDGSISVLPKHKYGMPTKDDLNIPYKPVQLPVPVILDGQLEKNNLHKAGFDELWLQNQLSSQGITQYQEVLYAEWRGDEGQLYITTY

SEQ ID NO: 7202 - protein, 64 aa, Bacillus licheniformis
MELKRCRTARNQIQVCQCSAPFQQCITSGKGARAAVSVSLPEVIVQKPRAVTALNSRLTEEELG

SEQ ID NO: 7203 - protein, 378 aa, Bacillus licheniformis
MTITILAFIIALFFAMNIGASGAAASMGIAYGAGAVRKRQAALWISGIGVFLGAMIGGGEVVKTIGSGIIPASILNVHIVVIILGSSAISLFIANIAGIPLSTSEVTVGSIVGVGVAFQAVFTDKLLVIVMYWLTIPIAAFFLAFLIGQLLKKTEAKLRWLKQQKWARLLTALVILTGFLEAFSAGMNNVANSVGPLVGAGLLSVGSGTFLGGLFVAIGAICLGSRVIETNGKKITEFSLLQGSCVSGLGASLVIGASLFGIPVPQTQITTCSIIGIGLSEKGRAIFRKSVILKLMKVWVVSPVFSLVISYSLVKIFLDFDLYSVAVVLCVFLATLGSISLMKYARQKQSDVRRNRDHLKSIVGGRGRKREPAVWRDF

SEQ ID NO: 7204 - protein, 236 aa, Bacillus licheniformis
MNDVLTYSTWDEKASEEVMDTFSGEMDVLKWAYSTYQKIVYACSFGAEGIVLIDLISKVVKEADIVFLDTGLHFPETYELINEVKDRYPGLSIHFLKPGLSVEEQEKRYGSELWKRQPDQCCHLRKIEPLREHLSGMEAWITGLRREQSETRKHVRYINKDDNFKLIKICPLIHWTWEDVWTYIKLNQLTYHKLHDQDYPSIGCEVCTLPVTDCGNLRAGRWAHQEKTECGLHQFR

SEQ ID NO: 7205 - protein, 254 aa, Bacillus licheniformis
MISSELILPDRQLKPRKKGITILIDNGVPLSFFKDTIHGAADYIDFVKFGWGTSLITKYLEEKIDSLRQNDVQFFFGGTLFEKFLSQDKIEDYYRYCKLYGCRYVEISNGTVRLSNKDKASFISDFSKEFHVFSEVGSKDSTLSSELESAEWIDYILEDLEAGAEKVITETRESGTSGLCKSDGEMRSQLIEEILHSGIASGDLIFEAPTKQLQTCFIEKIGPDANLANIPFQDAIPLETLRLGLRSDTFYLFD

SEQ ID NO: 7206 - protein, 207 aa, Bacillus licheniformis
MGRKLKIVHAIVLGSVLQGLGMALFLFPNHIPSGGAAGIAVLLNFWFQVPHGLTVWAVNFSLLLTAVKWLEPVTVFGTMGAITMTSVSVQIFESCMPVMTTNNIWLDLFYGSVLLGAGVGLLYKYNISNGGFGALALMISIYRGGKPGTALFIMNAFIFLLTASVIAWGIVIQALICQWISTRIIDAIYQIRFRPLLMPIAGFRNKK

SEQ ID NO: 7207 - protein, 368 aa, Bacillus licheniformis
MRIEKVDTFPLFHKLSSPYGDANGLKSYRTCYLIRITTASGLTGWGECADWLPALDAGFKKRIIPYLIGKEASNRTELITVIKKWHQRAASAVSMALTDITAKKAGLSVCELWGGKLREQIPVYASFQSYSDRPDWSRHSLRLIEKAVRAGFKAVKLKAGGKMFSEDLAHIQAFQEMTGQSTGLILDANQSYDQAAARKWETWFSGWQNVLWFEEPMPFDDLAEYRMLRSALSVPVAGGENVKGAKPFLPIFLENAVDIAQPDVMHCEGTDEFQTVLKLARHFGKRVSPHSYDGGLSRIYAAFGQACLPHWTKMDGEDIEPLEWDAMENPFAQIVPVSIKDGCIQVPDKIEIDTELVEAYVWDGSSYI

SEQ ID NO: 7208 - protein, 414 aa, Bacillus licheniformis
MAEKQNSGMTVVAIGSIPLIMTLGNSMLIPILPKMKSELNLSQFQVSLVITVFSITAALFIPLLGYLADRFSRKVVIIPCLFLYGAGGILAGFASTTFANAFPWVLFGRGLQGLGAAGTAPIAMALTGDLFKGADESRVLGLVEASNGFGKVLSPILGSLIALIAWFWVFFAFPAFCIAPIIMTWIFIKEKDKKKDPPPLGKYVKGLTSVFKHEGRWLFTAYLAGAVCLFTLFGILFYLSDVLEKEYHTDGVKKGLILAIPLLVMCTTSYITGSKIGQNQRLMKKMMVIGLALITVSYGTLSFFSALIPFISILVISSIGTGFVLPCVNSFITGAVGKERRGFVTSLYGSVRFLGVAIGPPIFGRLMEWSKLGMFMSIAGLTLIVGVLVLTMIHVKKEDTTKKGDKGLQPADAR

SEQ ID NO: 7209 - protein, 335 aa, Bacillus licheniformis
LNLQQPLLTIVVPCYNEEDVFAETAKQLTAVLDDLTADKLISSESKLLFVDDGSTDRTWPLIAMESTKNRYVTGLKLARNSGHQKALLAGLDKAKQKSDCVISIDADLQDDISAIRRFIEKYHEGYEIVYGVRRSRQTDTWFKRTTAGWYYKIMNKLGIQLVDNHADFRLLNKRALEELSRYAEANVFLRGLVPLIGLRSAKVYYDRKERMAGETKYPLKKMLSFAFHGITSFSVAPIRFFTLIGFFLFFLSCIAGIYAMIQKLLGYTNAGWASLIISIWFLGGLQLMGIGIIGEYIGTIFTEVKRRPRYAVDIDLYTERLGRREPEKRPETKLS

SEQ ID NO: 7210 - protein, 566 aa, Bacillus licheniformis
VSLFVKKLSREKRYLIFAFSVILLYVLPLYILNEDAHIREHDNLDSNIAWYKVLAESGQLLGGVKAVIPQIINGLPRDAYGTEWSGIVWLHALFPSMTAYALSQTITRVFAFVGMYLLLKSHVIRDEKAYFIRIAVSLAFALTPFWPSGMLSTLGHPLALWAFLNIRAGNDSWKEWSTLALLPLYSSFVLGFFFFLAAVSLIWLYDLVTKRSFNLGFLGSIALMTGIFLAIEYRLVYSVFASGETMHRVEFISSRHDILHSFRLSFKNFVLGHNHVMTVHTAVILPLIVLTFGLVVARQRKKRPSEEKLFIFLFILNYALSLWYALWFNKLWALPKEKISLLSAFNFARFHFLRPLVIYASFAVACYILWKMGKRWRRFVYAALIAQLLVLIPFHEELTYGAYHHAPSFREFYASDQFKQIKRFIGRPTDSYRVASIGLHPAIAQYNGFYTLDTYANIYPLKYKYQFRKIIAKELDKNPALKRYFDEWGSRCYLFVDELGKHYAFKKSTKKKITNLELNTEAFKKMGGQYIFSSVPIMNAEQNKLAFLKRFSHPQSAWNIYVYEAK

SEQ ID NO: 7211 - protein, 54 aa, Bacillus licheniformis
MTLNAKIKYRFSLLNFLTNNDTNTTSILFSFGNIESFYHIAVIIRGSVLKNSSK

SEQ ID NO: 7212 - protein, 37 aa, Bacillus licheniformis
LGGSPKISQKAKALNQKNKTACPVNLKIRSRDRLSFI

SEQ ID NO: 7213 - protein, 493 aa, Bacillus licheniformis
MGKVTGFMEFKREKPAERDPLTRINDWNEYSSPFSEEASKRQGARCMDCGTPFCQIGMDIRGYTSGCPIHNLIPEWNDLVYKGRWKEALDRLLKTNNFPEFTGRVCPAPCEGSCTVAISDPAVSIKGIERTIIDKGFENGWIQPRIPKKRSGKKIAIVGSGPAGLASADQLNQAGHSVTVYERSDRPGGLLMYGIPSMKLEKSVVERRIKLLTQEGVDFVTNTEIGKDITADELKEQYDAIILCTGAQKQRDLLIEGREAKGVHFAMDYLTGTIKSMLDSNFKDKQFINTKNKDVIVIGGGDTGADCVATALRQKARSVVQFGKHPKLPDTRTAENMWPEQPHVHTLDYAYEEAQAVFGNDPRQYSIQTKKLVADKNGHLKELHTIQMKKVKNDQGKFEFHEIPGTEKVWPAQYVFIAIGFEGTEQPLLEQFGVNTVRNKVDAAYGEFKTNVDGVFAAGDARRGQSLIVWAIHEGREVAREVDKYLMGSSVLP

SEQ ID NO: 7214 - protein, 1521 aa, Bacillus licheniformis
MTYNQLPKAQGLYRPEFEHDACGIGLYAHLKGLPTHDIVKKGLQMLCQLDHRGGQGSDPHTGDGAGIMMQIPDAFFKKVCADFNLPEKGRYGVGMIFFSKDDSGREKSEARINELIEQEGQTVLGWRTAPVNVGKIGTVAQESAPVVRQVFIGANEALKDNLAFERKLYIIRKQAENWAKEHEKTFYFVSLSSNTIVYKGLLTPEQVDAFYEDLQDEDFVSAFALVHSRFSTNTFPSWERAHPNRYLIHNGEINTLRGNMNWMKAREQQFVSEAFGEDLPKVLPILDENGSDSSILDNAFEFFVLAGRKPAHAAMMLIPEPWNENPYMSKEKKAFYEYHSSLMEPWDGPTAISFTNGKQIGAILDRNGLRPARYYVTKDDYLIFSSEVGVIDVEQENILYKDRLDPGKMLLVDLEEGRIISDEEVKSEIAGEFPYQEWLSKELVHVSNDIEETEEKSVPDLLTRQKAFGFTYEDIHKYLIPVITEGKDPLGSMGHDVPLAVLSDRPQSLFNYFKQLFAQVTNPPIDAIREQIVTSTLTWLGAEGDILHPNESSCRRIKLYTPVLTNAQFNSLKGLVHKDFKSKTIHTLFTDDLKSGLEDMFKEADRAIAEGVTLLILSDRKMDGQKAPIPALLAVSALHQYLVRAGKRTKVSIIAQSGEAREVHHFAALIGYGADAIHPYLTYATYKQAIEDGALTISYEEAVTKYSKSVTEGVVKVMSKMGISTVQSYRGAQIFEAVGISKDVIDSYFTGTASQLGGIGLDTIAEEAKRRHREAYEDTFSETLDSGSDFQWRKGGEHHAFNPKTIHTLQWACRKGDYSLFKQYSKAADEERIGFLRNLFSFDENRKPLPLEEVESAESIVRRFKTGAMSFGSLSKEAHEALAIAMNRLGGKSNSGEGGEDPARFTPDANGDNRRSAIKQIASGRFGVKSHYLVNADELQIKMAQGAKPGEGGQLPGNKVYPWVANVRGSTPGVGLISPPPHHDIYSIEDLAQLIHDLKNANRDARISVKLVAKAGVGTIAAGVAKATADVIVISGYDGGTGASPKTSIKHTGLPWELGLAEAHQTLMMNGLRERVVLETDGKLMTGRDVVMAALLGAEEFGFATAPLVVLGCVMMRACHLDTCPVGVATQNPELRKKFMGDPDHIVNYMLFVAEEVRELMAQLGFRTVDEMVGRTDVLRVSERAKAHWKAGQLDLSSLLYQPEGTRTFRTPQNHKIDESLDVTQILPAVQSAVENGTPVEASFEIRNINRVTGAITGSEISKRYGEEGLPEDTITLRFTGSAGQSFGAFVPKGMTMYLTGDANDYIGKGLSGGKIAVKAPDEFNPAFRENVIVGNVAFYGATSGEAYINGLAGERFAVRNSGVSVVVEGIGDHGCEYMTGGRVAILGDVGKNFAAGMSGGIAYVYAEDKKAFKRKCNPEMIEFETLEAPEEIAELKTMIENHYKYTESSKAASILDHWEEAVGRFVKVIPKDFKQMIERIKEQKEAGLSDEEALMYAFEAGTKQKIEPSAAASSKEAVAQ

SEQ ID NO: 7215 - protein, 300 aa, Bacillus licheniformis
MELRQLHYFMEVAEREHVSEAAMHLHVAQSAISRQIANLEEELGVDLFEREGRNVKLTPIGRQFLDHIKTAMKAIDFAKEQIDEYLDPNRGTVKIGFPTSLAGQFLPTVISAFKEEHPNVAFLLRQGSYKFLIEAVKNRDIDLAFLGPVPSNIAEIKGDILFSESLLALVPVNHPLSGQKSLHLGDLRNDQYVLFPDGYILRKMAVDACKQVGYTPKISSEGEDLDAIKGLVSADMGVTLLPESAFNETAPRFTKKIPIDYPQVKRTVGIITPKNRELSPSAKVFYQFVKKFFSRLQQYQ

SEQ ID NO: 7216 - protein, 70 aa, Bacillus licheniformis
MYVHPCFIKWFALLYIALNAAHEGLLSWNGHAAPAAAVAGLGLVKTAEAKGGLHPRCSVTRTEKAIIFRV

SEQ ID NO: 7217 - protein, 641 aa, Bacillus licheniformis
MNKHKWLAAIAIIAILAVIGYFTVRHLEPEYAYMPPKEKVISKEKRLHGYDLWGAFTPDKPASAGEGAVKVDDRLLDLGRETFYKETFGNEVFLTDIVGLLDGPITAANMTKAIAGLKGKGTTNLRIELAETVKVGGKTFKKGEKIDTGIDVAKGAYAPLGMPFKYADGKIKAGISCAACHATVDSKTMKVMEGVTNSDLNTGLMLALATNSAAYFTHAEIHNIKQFMNDKSPVITARNGKKERLPDPDRLEDAVDRIFLKWPRGFFDSTIDMKSNPTQIPDAYTLGDHPYSWSGVAMAGPFKGLTVFSNNVHAQNSDSLSQSPASRALFGMSEDVYIGTILQRAPASTYRYQPKKGESPTAFFKKADPTPGVPGVNQMVKPPSFPKITLAAPDGVHVSSPGRNVNEENNAVSAWQNTLRPPEPRQKTDGQTIRRGRRVFEQAGCISCHAGRYLTNNKVISAETIGTEPTRAQSFKKAESIFGKSLVHSPDTPVPLPRKPEVLKVPTAGFDPEQIKLSWAQGDSKGGYKVPSLIGVYWRAPYLHDGGVAVGISLKETGIPKTIIKGKPANPYNSLLAMIDRDLRQKVIKSNSESPDLKAVRVTGKGHEFWIDAKSGFSKQEQKALIHYLIHADMPEKQEIK

SEQ ID NO: 7218 - protein, 524 aa, Bacillus licheniformis
LKKLSIVLVIFICALVSFIIWLNAGDEKLGLSDEEAEAVKPSKKPVIVLIIDSLMDQPLKKAIQEGRAPALKFFLENGHYEPEVASAYPTMSVAIDSTLLTGTYPNIHRVPGLVWYNQDEQRIVNYGSDKKEIAALGLKQTIEDGIYSLNHRHLNRKVTTVHEDLQKQGKQSASINGLIYRGPDRRELNIPPPLKKLRLMPEHMTVNGPALFSYGRFAQLDPDNSYHHIWQGYGVNDKFTAQEMAYLIKKRKLPALTVAYLPDFDHDAHKKGPKDMEGLEKMDRQLQRILNAYDSWRDAAEKAVWVVMGDGGQTSIGRDKDKAAIRLHSLFKGYRIAKINEGPDRKDQLLFAVNDRMAYIYVTYQNTSLQDAVNELKKDGRIAFTAWKKDGWIYVDSKRSLKPLRFRPQGGYQDPYGQSWTISGDFSLLDIKTDGASIMYGDYPDALARLYSAMHSHRGRFVIADAKPGFQFAGEKSPLHFGGGGHGSLYKTDSLAPMIIVGSEEVPAHLRHLELKDFLMKLVQ

SEQ ID NO: 7219 - protein, 157 aa, Bacillus licheniformis
MKQDKVGRETVEQLIEAFNRLRYAEMKQSFPSVEWKKTEAKALMFLNEANGEGKMASEISRALHVTSPFVTQLLNRMEKKGLVLRRIDEDDRRIVRIFLTDEGKKAADDALKGLNRWFLQLSRFLGEAESRHFADLIHKLSEFIEQGEKTSEKKVEK

SEQ ID NO: 7220 - protein, 575 aa, Bacillus licheniformis
MISLLKYLKPYKLQVILVAVFTLLSSVLELYLPTLMADVVDVGIVNSDMPFILKTGGWMIACSLLAIMMTVGKAFFASKTALGFGRDIRRKLFVKVEHHSMDEFGKIGSASLITRTTNDVKQVQDVLNMMLSLMTRAPLMLVGGIVLAVSRDAKLSIIFLAALPILAGLIFLITRKAVPLFGVLQKKTDRLNLVLREGLTGVRVIRAFNRVDQEKVRFQKANEEFRDTGIAVNRIMAFLFPVMMIMMNFTNIAIIWFGGIRIDQGSMQVGNLMAFLQYASMILIALIMLAMTFVMIPRAQASAGRINEVLLTEPSITDPKEPQKDSGLRGYVEFQNVTFRYAGAEKPVLEDISFKAKPGETTAIIGSTGAGKTTILQLIPRFFDIEKGTVLVNGTDVRKMAQKELRAKIGYVPQKASIFSGTIKDNIRFGKEDATDEEILEALETAQAAEFVEGKENGIESEIEQAGANLSGGQKQRLSIARALVRKPEIYLFDDSFSALDYKTDQKLRKALKKTTADDAVIIVAQRVSTITDADQIIVLNEGKIAGIGTHQQLLAENGIYQEIVASQQAEEESA

SEQ ID NO: 7221 - protein, 607 aa, Bacillus licheniformis
MSQQPKHHGSIPKGMHKTKPKEFKKTLLRLARYLKPRTFQLVLVVFAAILATLFNVISPKLLGDATSSLFASFTEGTGVQFGFLGRITLILAGLYLLSALFTFLQHYLMAGVAQKTIYEMRQEVNEKLTRLPLKYYDKHSHGDTLSRAVNDIDNINTSLQQALTQMITSVITIVGIIVMMLLISPVLTLVVFITVPLSMLAVRFIASFSQKHFAAQQKELGDINGHVEEMFTGHQEVKAFGHEEKAIQQFDEVNERLYQSGWKAQFISGLMMPMMTFIGNLGYVFVSITGGIFVLNGTLLIGGVQAFIQYTQQFSQPLVQAAGIANTIQSAIASAERVFSLLDEEEETGETPASIDTGKLKGDVSFEHVAFGYDKNVPVIRDLSLHAKEGQTIAIVGPTGAGKTTIINLLMRFYELNKGSIKVGGTDISELSREQARSMFAMVLQDTWLFNGTIRENIAYGREGATEEDIIRAAKGAYADDFIRTLPDGYDTVLGEDAQNISQGQRQLLTIARAILADPKILILDEATSSVDTRTEMNIQKAMNKLMANRTSFVIAHRLSTIKDADMILVMKNGDIIEKGSHEELLRKNGFYADLYNSQFSREEAVS

SEQ ID NO: 7222 - protein, 28 aa, Bacillus licheniformis
MLKKAGISAKEMDEKKRPHLIRCGLNVS

SEQ ID NO: 7223 - protein, 404 aa, Bacillus licheniformis
VANSNSLQSSKHYANWIPMKEISSSNDRLFPFPIYNRIRKTSPVRYDDERKCFDIFSYEDVQFVLKNPKLFSSKRGGNMEGKSILTMDPPRHTKMRAIVNKAFTPKAVKELEPHIEEVTAFLFNEAKQKELFDVVDDLAAPLPVIIIAELLGVPAEDRLMFKHYSDILVAGAEDRSAEAAERMYKRREEGNRFLADYFKNIIKQRKKEPKDDLISLLLRAEVDGKSLTEEELLHFCIILLVAGNETTTNLIANSVRYLTEDKITQEAVRQDPSLVPVFVEEMLRYYPPVQAIGRTAAEDVDIGGVRIAKGSTVISWVASANRDELKFDDPDSFKLDRKSNPHMSFGFGIHFCLGAPLARLEAKVALDYLLRRAYMERDSSKELEAIQSPFVFGVRHLPVQLSQK

SEQ ID NO: 7224 - protein, 238 aa, Bacillus licheniformis
MQSLQNKTALITGGGRGIGRATAIALAKEGVHIGLIGRTAANLEKAAEELKAFGVKVSVAAADVKDLTAVERAVQSVKEELGQIDILINNAGIGGFAGFLEQSPEEWENIIQVNLMGVYNVTRAVLPEMIERKAGDIINISSTAGQRGAAGTSAYSASKFAVLGLTESLMQEVRKHNIRVSALTPSTVATDLAIDSKLTDGNPERVMQPEDLAEYMVAQLKLHPRIFIKSAGMWSTNP

SEQ ID NO: 7225 - protein, 864 aa, Bacillus licheniformis
MSHLVLGFHEMEKTQLPLVGGKGLHLGELSKIQGIQVPDGFCVTTAGFQKAIKQNKSFQALLDQLTMLKVEDRDQIGEISRKIRHTIMEIEIPSNVVKEVARYLSLLGDEHAYAVRSSATAEDLPHASFAGQQDTYLNIIGKDAILQHISKCWASLFTDRAVIYRMQNGFDHRQVYSSVIIQRMVFPQASGILFTADPITSNRKLLSIDAGFGLGEALVSGLVSADCYKVQNGQIVDKRIAAKKLAIYGRKQGGTETKRITPDQQKTQALTDGQILQLAHIGRQIEAHFGQPQDIEWCLDRDTFYIVQSRPITTLYPIPEANDQENHVYLSVGHQQIMTDPIKPLGLSFYLFITPAPMRKAGGRLFVDVAPRLTTRIGRETLLNTVGSDPLIKGALMTVIERDYIKLSPNDQTAPIPDRGNTDMLAQFENDPTIVSDLIKRSETSIEELKQNIQAKSGSDLFDFILEDIRQLKKILFDPQSTAVFMAAINATSWINENMNEWLGEKNAADTLSLSVPGNITSEMGLALMDVADVIRPYPEVIDYLQHAKDDNFLDELVKVDGGQEARGAIYAYLDKYGMRCAGEIDITRARWSEKPMTLVPMILNNMKNFEPNAGNRKFEQGRRVALEKEQELIERLKPLRDGEQKAKETKRMIDLIRNFIGYREYPKYGMVSRFFIYKQALLKEADQLVQAGVIHEKEDIYYLTFEEFHEAVRTKKIDDKIISIRKDEYKLYEKLTPPRVITSDGEIITGEYKRESLPANAIVGLPVSSGVIEGRARVILNMENADLEDGDILVTSFTDPGWTPLFVSIKGLVTEVGGLMTHGAVIAREYGLPAVVGVENATQLIKDGQRIRVHGTEGYIELL

SEQ ID NO: 7226 - protein, 36 aa, Bacillus licheniformis
MHEKNSSDLESSSLFIHQEKDSGMILFSQNIRRRNR

SEQ ID NO: 7227 - protein, 474 aa, Bacillus licheniformis
MEKKFNSKAILVTFMIGAFFAILNETLLNIALTELMDVFHVDAPTVQWLATGFMLVMGVLMPISALLIQWFTTRQMFIGVMSIFLLGTVIAACAVNFPMLLTGRMIQAVGTGLLIPIIMNALLLIYRPEVRGKIMGTFGLVIMFAPAIGPTLSGVIVDILGWRWLFIIVIPFAVFSILFAVKYLQNVGEATRPRADFLSIILSTIGIGGIVYGFSSAGEAQEGFQSPLIIGVIIVSLISIVLFVLRQLKLEQPLLDVRVFAYKNYTRGVCLFVIVIMAMFASEIVMPMYLQGPLGFSAKAAGLLLLPGALLNGLMSPAMGALFDKFGPRKLIIPGTIVLVGVMFFFSRINPSVPIWAFIIVYIILMLSISAIMMPAQTNALNELPKHLYPHGTAISNTLQPVAGALGVSVFVSIMSQGQKSYLAGQEAAGKQIVHEAMTHGVHHAYWFALALSSIAFFTALFIKKAVAPDFDKE

SEQ ID NO: 7228 - protein, 671 aa, Bacillus licheniformis
MESYVDQKDGIFKSVCSLDCPDQCGLLVHKKDGKNHPVTQGNICNKVRNMTERIYDPKRLKTPLKRTGPKGAGMFEPISWDEAIETIRTRWQSLIEQEGSESILPYSFYGNMGNLTAEGMDRRFFHRLGSSQLDRAICTPAGSVGYKYTMGGSIGTDPEDTTETKLFIFWGINAVSTNMHQITIAQKARKNGAKIVVIDVHKNQTGRMADWFIPIRPGTDSALALGIMHVLFKEHLADESFLKEFTVGHEELRRHVRQYDPAAVEAVTGVSRNDIIELARLYGRTSPSLIRIGNGLQHHDNGGMIVRTISCLPAITGQWTKKGGGAIKGNTAFLAYNTKALQRPDLLKGRTPRVINMNQLGKALLETEPPIRSLFVYSSNPAVVAPEANKVRKGLEREDLFTVVHDLFLTETARYADIVLPASSAFENTDFYTSYWHHYAQIQKPVIEKYGESKSNTEVFRLLAEAMGFDDEPLKDSDEEMIRQALDYPDNPWLDGIDYDSLTEKHFVKANRKTFFPDKLPTPSGKIELYSKMMEQHGYPGLPTHTPLIETDKYPFLFVPGPNHNFLNSTFSNNEKHIKLEKEPKLHLNIKDAEEKGIENGDLVKVWNDRGSCILPAAVGENVLPGVAVSQGLWADAEGKHYLVNALTPDRLADMGGGATFFSGRVQIEKI

SEQ ID NO: 7229 - protein, 27 aa, Bacillus licheniformis
LKKYEHQKRPVAAKPVFYHFVFFKVLA

SEQ ID NO: 7230 - protein, 158 aa, Bacillus licheniformis
MSRTNHIEGKGLVNELIQQLRFHSTATVFLHQAIGEKIGLNGTDHKCLEIISREGQVTAGELAAKSGLTTGAITGVIDRLEKAGYVRRIRDSSDRRRLLVELIPENLETISHIFHDLAQESAEFLSRYSEEELQTIIKFLKSSTAFAADYAKTLKKTK

SEQ ID NO: 7231 - protein, 403 aa, Bacillus licheniformis
LSQTQNQKLGFVVAGLLLAILMASMDNTIVVTAMGTIVGDLGGLDSFVWVVSAFMVAEMAGMPIFGKLSDMYGRKRFFLFGSIVFMAGSALCGTATTIEQLSIYRAIQGIGGGALIPIAFTIIFDIFPLEKRGKITGLFGAVFGLSSIFGPLIGAYVTDYISWHWIFYMNLPLGMVSFIFILLFYKETKQHEKHRIDWLGAITLVGAVVCLMFALELGGGKYAWDSNVILTLFGSAAVLLVCFLMIERKASEPIISFHMFKNRLFAGSTLVALFYGGTFISATIQIPIFVQGVYGDSATNSGLVLLPMMLGSVVSAQLGGFLTTKMSYRNIMLISGLVLVSGFSLLSTLNIDTPRLLLTMYMIVVGLGVGFSFSVLSMAAILISARSSAAQRHLRATLCALSA

SEQ ID NO: 7232 - protein, 365 aa, Bacillus licheniformis
MICSEDKITTSQAIVVLVSYIMAAGILTLPRTAVEEAGTPDVWISVLLGGLVTTAAGVVMTKLSQDYPGLTFFQYGEDIVGKWLSIVISLLFIEHFVAIAAFEARILAEVITFFLLQQTPIWAIVMSMMWVGFYSIKDGMGSLARLFEIIFPITILFFLTVVFMSFGIFELDNLRTVLGKGIMPALKGTKATTLSFISAEVMVFLLAFMKKPKDGIKVVVMGIGIAMLFYLTTIVFVIGGLSVDGVTAMTWPALDLIRSFEMPGLIFERFESLLLVIWIMQLFATFSVSFYAASLGLSQIFKKKSRPIMFGLLPVMYLLAMTPKNIDDVFSLGDMIGYIAAVLFGIVPIPLLLVSKMRKKKAVQS

SEQ ID NO: 7233 - protein, 398 aa, Bacillus licheniformis
LKKTNTIRYLTIFLLMFLLTGCWSSHEIEELGLTFAMGIDKGEETELEKKFDKAGGDYPKKDRITMIYQYVNEQAAGSKSTGGSTDQKTYINVYETGDSLQQINAEVALRQDRPVFSPHLKVIVIAADLLRTYSLAELLDQPLRDNEIRPSSMVLVTRGRARDTLELKETGEMPAFRLRKIVENEYKAKKILPPVTLAKLTGKMRSGTSYLLQNVIGTDGEVKYAGAAAINGKTNKLIGYLDEQDVEGVMWITGKGTGGTVKSYDPTEKKVTAFGVESIKSNIKPIVKGNRLSFEVNVKSEGYLAENWNTKEKAFDDKFLEKVEKTTAKTVKKSMEDITKKMKTEYKADLAGFGNELRIKHPRIWEKLKKNWDETFTDIPITFHVQIAIKEYGTVGDQ

SEQ ID NO: 7234 - protein, 186 aa, Bacillus licheniformis
MMVSQQDKITVSQTGIVITNFLLGTGILTLPRTSAEAVKAPDVWLSVAFGGLVAILAGFIMVKLSMESPDKTLYQYSRDLIGKWPGGLFTLLLICYFLATSGFQVRSVTEVMGFYLLEETPLWATAMVFLWSGIYLLTGGINPIARLYEIVFPITVLIFLIVIFMSASIFDRQFAPGSRERDHAGA

SEQ ID NO: 7235 - protein, 366 aa, Bacillus licheniformis
MMVRHEERITTLQTAVLITNFLLGTGILTLPRTSVDAVGTPDVWITLVLGGLVALTAAVIMVKLNHQYPDKSFYEYSQDIIGKWTGSLISLFFVCYLLAHSGFQVRSTLEIIRFFLLEGTPRWAIAMVFLWVGLYLIVGGLSAIARLFQIVFPITVILFLLVALMSIGIFDVDNLRPVLGEGIGPVLKGIKVTALSFSGIEIILILMPFMNQPRKAIHTIMIGIAIPLLFYMITVVMVIGALSIDGVVSRTWPTIDLMRSFEIPGLIFERFESLLLVIWIMQLFCTFVISFYGAALGLAQLFKTNIRPMMFALLPVIYLIAMIPKNINAMFAFGDFIGNSGVYLGGLTPLVLLVISKIRRRKQGIS

SEQ ID NO: 7236 - protein, 522 aa, Bacillus licheniformis
MRWWKAKTRRMIQSSNKPEKPKNEVPSVESTGYFTGDFDHDLKLAKTAMENNSDVHFREFNLGRTGIRAAIVFVEMLADQDLIDKHIMKSLMDDFSKEYKVELSSLSSNVTDLIKKQILSISGVSEVNHVNEVVPEVLSGTAMLLIDGSAEVLLLGTVKRNTRNIEEPVSESLVRGARVGFTETIGTNTALLRQHGKNQNLSMVQFQVGKRAVKNLVVAYIKDIAEPGLVEEVKKRIEKIDIDDVLESGFVEQLIEDNYLSPFPQVQSTERLDRVMSALMEGRVAILLDGTPFVLIVPVTFSMLLQSPEDYYERWLPSSLIRIMRIGAAMISLLGPALYISFISFHPGLIPSELAISITGTRVGVPFPSLIEALIMEVAIEILREAGLRLPKPIGPAMGIVGGIIIGEAAVQAGIVSPIMVIVVAVTAISSFAIPQYSAGISLRMLRFVAMFCAAVFGLYGVIMFFLMLASHAVKLKSFGVPYASPAVPYRLRDWKDFIVRMPIQIMKKRPKLLKTDDSSRQ

SEQ ID NO: 7237 - protein, 46 aa, Bacillus licheniformis
MKKGDQHVENHCFLFSGLAGPDAGFFCLFCPVCHIKSIFVASHGRG

SEQ ID NO: 7238 - protein, 575 aa, Bacillus licheniformis
MTILMKIRGLEKSFGEQTILKNIDFDISNHERIGLVGCNGAGKTTLANILSGHAEADKGTVQTDRTLKIGYLLQSIEYSVHDFNSILTGDEGGELYQLTSSLGLSKVQSWNSERLSHLSGGEKLKLALAHVWKTMPDLLILDEPTNHLDLKGISWLLEELQQYQGAVLIISHDRYFLDQSVSKILELEDGNLHTYQGNYSAYRREKKRLYEARLHQYEVQQKQKERIESQIATLQNWSQKAHRDSTKQGSQSERRQLGFKEYHRVKAKKLDNQVKSKLKRLEQELEKNKAEKPKEAASVNFQFSSGEKRGKRIIEAKGLAKAFDGRTLFKDSHFYVKHGERIALIGDNGCGKTTLVKMMLDAEPATAGTLWKSQSVKAAYLSQDVSDLRVDQTVAEVLNLSDRAEIANARTILANMGIKENRFHDGIGTFSLGERTRIKLAGMILKDYDLLILDEPTNHLDLPSREQLEQTLLEFQGTIIIVSHDLYFTDKLCEKLLVFENGRITRVETGLKDYRNRQKQPHAKSDEEERLRIENRMTAVLGELAGLTPQDPKYHELDQEFSELAKRKRAFLEKE

SEQ ID NO: 7239 - protein, 38 aa, Bacillus licheniformis
MFFVVQWNGIGLYRFHDAYFGMISSPGFRERFFVVSQK

SEQ ID NO: 7240 - protein, 661 aa, Bacillus licheniformis
MEKILDWFKHPSLSKRLAVSFLLILTLPVLVLSGVSYYTAGGSIEDEIMRSARNSVDQLNEMIDQNIEKKADAVTYFSEEIKEKTYKEKGQTSLRQKFEQYARQNRDVEAVFTGSEDGVYVQHPYTKMPDGYNPAERPWFKEVVEKKGEIIVTDPYTSAATGNTVITIAKQNKDGSGVAALSLNIDELIKATNDIKVGKDGFAFISSASKKYIAHPTIKAGTEGEGGWVDQVYGKGKGEFKYTFEGKAKQMAFTTNKLTGWKIAGTMFSDEITNATKPVLYMALIVFSGALVLGGVLIFFIVRAISKPLNQLVLSAKNISSGDLTQQIEVRSNDEFGQLGKSFNDMAESLRTLISTIQESVENVASSSEQLTASAEQTSQATEHITSAIEQFSNGAESQNEKVETSSQQLSQMNDHLSEMTEVSESITEASIKSTEIAETGGELVQKTVGQMSSIDQSVKQAESVVKGLEGKSKDITSILRVINGIADQTNLLALNAAIEAARAGESGRGFSVVAEEVRKLAAQSADSAKEIEALIQEIVKEIKHSLSMFQSVNHEVQSGLKITEKTESSFHEISGMTNEIAGKLQTLNAAVEQLSNGSQEVSGAVQEIADVSRESTAGIQDIAASAEEQLASMEEISTSSATLEQMAEDLRELTKKFKVK

SEQ ID NO: 7241 - protein, 110 aa, Bacillus licheniformis
MATIEDFLKLDIRVGTVLKAEEFPEAKIPAIKLEIDFGGEIGVKCSSAQITKRYTPEKLIGRQVTAVVNFPPRRIAGFKSEVLVLGGVPEKGDVILLTPDQEAPNGTKIS

SEQ ID NO: 7242 - protein, 442 aa, Bacillus licheniformis
MFGSYMVQMVRSNAHKLDRPLRESVLKLYKPFKWTPCFLHGFFEKILIKNKKIPVIIEFEKDCQHKGYQLVDEMIGSKRRNKIKHRFSCVNCCSAEVTPSSLQSLLSECGDIRKIYLNRKVKALLDVAVESSHAKEVVRNNQTLTGKGVTVAVIDTGIYPHEDLEGRIRAFQDFINQRTEPYDDNGHGTHCAGDACGNGAASSGQYRGPAPEAELVGVKVLDKMGSGSLETVIQGVDWCIQFNKENPDDPIDIISMSLGAEALRYENEEEDPVVKAVHAAWDAGIVVCAAAGNSGPDAQTIASPGVSSKIITVGALDDRDTVSREDDDVASYSSRGPTIYGQVKPDLLVPGTNITSLRSPGSFLDKLQKTNRVGTKYMTLSGTSMATPICAGIAALILQQAPGTEPDEVKQLLMDGTDLWKDRDPNVYGAGYINAEQSVPQD

SEQ ID NO: 7243 - protein, 136 aa, Bacillus licheniformis
MGKLTEKLGLALVFSIVVWLGATVFFMLFGSAVLTEPGQDGFMLRFLLLEAGTFALLYAVMLVYRRVDKTRFAAVKLGIVGSAVGLFLDAFSLWNHSLIFPALSDGQMIGFAVWMVFAYAMYLTIPLILEKRRSAV

SEQ ID NO: 7244 - protein, 199 aa, Bacillus licheniformis
MARPNVTSKETLIEAAKRRIAEHGLDKLTLKAVAEEAKVTQGTVYYHFRTKEQLVFEVVRDLCRASWERLKANEKPAAERIKDGLSSAKSRTLKDAYYHQLFLELAVLGFRNEKIKEQLGELLEEENAVLAEQLSDLWKRSPVDGVSFSTWGILLNALIDGLALQSLMSPGFSPEKIYRELETVLQMLTETAVKQHGGE

SEQ ID NO: 7245 - protein, 163 aa, Bacillus licheniformis
LTMSELTKQLIYDMYVKLLHLNEQKADTDLKAFLKQAAESDVKRLPGNMTTIHVISCIGHDEPINNTGIAKKMNLSKANITKISSKLLKEGLIKRFQLTDNKKEIYFRLTPSGKQVFELHEKLHQQKADQFSRFLDSFSTAEQGAILKFLQGLTFMTETDKKH

SEQ ID NO: 7246 - protein, 204 aa, Bacillus licheniformis
MNIEGIEMEVRCTGDVCSDALEFLRRHNHEKTAEHSIRVKQAAERLANRFHVPAQKAGIAGMMHDISGVIPNEKRIAAAEALGIDILPEERIFPMIIHQKLSKVMARDLFQVADEDILNAIECHTTLKKNPSQLDLVLFSADKIEWDQTGTPPYIKELHEALEISLEHGAFVYIQHLWKQKDKLKVVHPWLKDAYYHLKAKIEA

SEQ ID NO: 7247 - protein, 161 aa, Bacillus licheniformis
MLKNVLLEQFKACYNETTWFVCFQTAAADLTESQARQKGEGSENSILEIANHLIFYNERYLKRFKGIPVPAFDYTIDDTFVNKSGLGWKESRQELNTIYAEWIDALSECEEEMLKQPAQHDPHSTWAEILSCLILHNAYHLGQIVHMRKQLKIWDASKGVN

SEQ ID NO: 7248 - protein, 548 aa, Bacillus licheniformis
MKARRFFVSVLCYAVFFIGKAPDIPAAEALLLLSMLFFVPAALDLIQHENGMFRLISVCFPYAACSASLSLLFHSPLFSLVWLCYTGMIALYGALRLWEREGRSLEEASIDSGLLYLPFGGGWLCAYTLNLQVMDFSPLIVLLTAVHFHYSAFLIPIFNGMLGRKLKKKGLLYAAVTWLIMLSPLFIAIGISFSKTIDVIAVALYLSALYGSGFLASITAFKNSAARRFVIFSSFTLMITIAFSLIYSYGVFRGRTTFTIQEMIWIHGLVNAFGVIIPALTGWRLESLGPGCERRQGETMSNIYGTWKIGADFLHRHRLQTDSSYQGLADDMSAFQSKGFQPEKVSPLILDFYEHTADYSLTAEISWRPWFKPLAHMYQLISRKTGQIHLGTKTGRQTMDGEIIGVDSARDGRKNVRAWIRTNEVGETVFVALYSAHTHDHITYMNIALPLPFSNMTGILKPKAEDGCLILTSSDKRSDRGDEGIFLSTGTGTFKLPLAERFIIKGQGRKRLCAHHRMWLFGIRFLDIQYHIEKKDSAVKRAKIANES

SEQ ID NO: 7249 - protein, 70 aa, Bacillus licheniformis
LISMYERVIEDFHLLHPKLKENVFKGKGVMTEISGGSYWVRLLFKAGTVFRCFFPKGGGTFRSRLKITFG

SEQ ID NO: 7250 - protein, 299 aa, Bacillus licheniformis
MKKTPIYVEISIQTEMERLWRYTQDPTLHRQWDLRFTDITYLKRRPGEPQRFLYETRIGFGLKISGTGESAGNVFQDTGDRVSSLKFATNHPLSVIREGRGYWKYSESETGITFMTQYDYDTRYGRLGRLADMAFRPLLGWATAWSFDALKIWLEKGLHPRLLFQKTLVYWLVCLLFSFVWIYQGLVPKLIMAHPGEISMLSAFTGGRFHPETLLRLIGLAEVMVGVLWLYPVRKRKWFLLHIVLLVLLSASAGMADIASFAEPFNPVVLNAALIILSVIGYVSACGIPNAGNTIRKRR

SEQ ID NO: 7251 - protein, 190 aa, Bacillus licheniformis
LSPRIGLNKDAVLEAAAALADEEGIHEVTLASLSKRLNVKSPSLYNHIKGLNDLRKELALYGLTILYENMASAIQRAEENQAVSQMAHAYLAFAKNRPGLYEATFIAMPDEDGRLDEAGDRVLALVLSVLKDYHLDDEAAIHAVRGLRSILHGFAALRQHDAFGLPYDVEESLDLTIRVFLKGIAVYQTE

SEQ ID NO: 7252 - protein, 237 aa, Bacillus licheniformis
MRMTRFESVYQLTFFPHIFPVNCYLADEEDGLTLIDTGIPISKTGILKAADHLRKPIKRILLTHAHSDHVGSLDALYHSLPGVKVSISERDACLLKGDTKMLEGERGIIKGGVPKNIKTNPDIFLKEGDRIGSLLTVSSPGHTPGSISFFDERSGLLIVGDAYHTRSGMTVSGHLKLSFPFPALATWDKEIALESAQKLLDLKPKALAAGHGDLVHDPAQAMKKAVNEAYIKLNRKG

SEQ ID NO: 7253 - protein, 169 aa, Bacillus licheniformis
MGGGANGRRAGKMSFSHFEKQKAKLFSGVSTVTSNQNEATEKGKIPSMWSLYRERFPHKERQDMKRDTIALYSDYESEEYGAYTFSIGTFADQHEKAANVISLPASEYAVFVSRRGRIEEVVFETWQEIWTWAEKNLRTYTGDYEVYGEQAVNPENAQVAIYIAVDRKK

SEQ ID NO: 7254 - protein, 78 aa, Bacillus licheniformis
MEHYFCQSCGMPMTSELFGTEKDGGNSRDYCIYCYENGAYTHPDATLKDMIEICVPYIKEEGKPRPKRERFCRGHSLI

SEQ ID NO: 7255 - protein, 311 aa, Bacillus licheniformis
VKIDRLLAIVILLINKRQVQAKELAGMFEVSVRTIYRDIEAINQAGIPIVTSQGAGGGISIMERIRLENKLLSADELAAITTALESVSSTYEVLHHGSALEKIRFLVSEEEMPEFRKKTEKWFVDISSWGESPVIKEKIRLLDEASDSKRAVSFNYVDREGQTGKRKAEPHTLVLKGRHWYLYAFCLKRQAFRFFKLLRMKDVRMLEEKFERKEVDLSSLPWETSWYKPDNMTEVTLLIKPSGESLAREWFGSEALTYENGQCVATISYPEDQWLYGFLLQFGTHIEVLDPPRIRQKIKDLAKQIVHLYET

SEQ ID NO: 7256 - protein, 37 aa, Bacillus licheniformis
MGDEILFFVMISQNGVCYGMKIAEKKRLHKMNVRDLQ

SEQ ID NO: 7257 - protein, 165 aa, Bacillus licheniformis
LQFFIIVSIVYIKFKRSVGYQPLKPARMLFRIILFSGIFVFLLTMSALHPLSYFYDLIGIALGLILTVYALKHVSIENRGGVLYFRTHLWVELIVLFLFLYRFLYRIAEIGQLQTAVSDGGSAAYGALFAQDPATMIGFFVLAVYYVGFSFFVLKKGRTEEKRSA

SEQ ID NO: 7258 - protein, 110 aa, Bacillus licheniformis
MSEHNQETTEKQVRAELDEETLFLVSQTFKALSDPTRIKILHLLSQGEHSVNEIAEKLSLLQSTVSHQLRFLKNLRLVKSRRAGTSIFYSPEDQHVLDVLQQMIDHTQHD

SEQ ID NO: 7259 - protein, 274 aa, Bacillus licheniformis
LKNHICTTCGVQYNAASKEPAECIICNEERQYVSLSGQTWTTLEEMKQSGRFQNEITFVEERLYSLTTTPEFGIGQSAYLIQEPGFNLLWDCITYLDQRTTENIEQMGGIQAIALSHPHYYSAQAEWAEMFDAPIYIHEDDKQWVQRPSSRIVFWSGETLKLSSGLTLHRLGGHFKGGAVCHWANGNAGKGILLSGDIIQVVQDRRWVSFMYSYPNLIPLPAGKVQQMADQIKDVPFNRLYNAFRRSVEKNAGECVQRSAARYVEALQGTLFST

SEQ ID NO: 7260 - protein, 80 aa, Bacillus licheniformis
MDILRGYVEAVKRNMETMNASDYDGKEEDLRRQQEELERYEQQLKEKSASAESFDQVVNAAVDCAAGDISYSQLEQMFQP

SEQ ID NO: 7261 - protein, 445 aa, Bacillus licheniformis
LKNETALKRSLTLGPLVVIGLAYMDPLVVFDSYGVVAQLTKGHVPAAYVFTVAALLLTALSYGSMVKAYPKAGSVYTYAYESIHPHAGFLAGWTIMLDYLFLPMVNFAIGSAYLTAAFPEVPHGFWVVLLALSITVVNVLGIRLTANITGLFVAFQVIVALTFAGFMIAGLAGGLGTGELISADPFFHSDIEPSLIVSGATILCFSFLGFDAISTMSEETVNPKKNIPLAIFLTVAIGGTLFTAISYLMQQIYPSYDNFRHADSASLEIALYTGGAFLKSFFLAGTMVAVISSSLSSHASASRLLYAMGRDSSLPKRFFGYVHPTLKTPVFNILFIGLISLTAMIGELEVIYSFISFGALIGFIFVHLSVIGHYYIRRQEKGFLKTLRYLVMPFLGASFCGWLLLSISKNALIIGAGWLIAGFIYFLFRIRSLPDVTFGFDRDPR

SEQ ID NO: 7262 - protein, 216 aa, Bacillus licheniformis
LKKKKSGCLAGAGCLSFFVFVPLIIFFAISGLEQLKWLPLDTESNILERLKDYKPLVEEELDKQGLSQYTGLLLGMMYQESKGRGGDPMQSSESLGMKRNEIDDPKASIKQGVRHFTVMYQKGQKKGVDIETIIQSYNMGAGYIDYVSKHGGKHSEKLAKAFSEEQVKKNPDLYNCGGDTNNFRYPYCYGDYSYTEKVMERTKKVEEHIEGLTLEH

SEQ ID NO: 7263 - protein, 41 aa, Bacillus licheniformis
LNIDKAAGWVIFRPACPVLEERTKASPADACHACHQFAYSP

SEQ ID NO: 7264 - protein, 328 aa, Bacillus licheniformis
MFENKTIFITGGTGSWGQELILQLLASSPKKIIVFSRNEERQVQMRRQIEDPRLTFFIGDIRDRKALNTGLKGVDYVFHLAALKHVPVCEEQPLEALKTNVTGTENVIEAAIENGVKKVINVSTDKAADPANFYGMTKAIGEKLIVYANHLYSDTGFICVRGGNVLGSSGSVLQLFKDQIREKNQVAITDKRMTRFFLTKEKTIQLLLKAAESGQGGEIFIMNSPACKILDMAEVLIEAYGNEITSIAETGARPGEKLHELLISPHERQHAVSFTDDLAVVLPAIKMPELHKKYADCQPLETDNLSSKDFLISKEEVKEMLKKGGFLD

SEQ ID NO: 7265 - protein, 212 aa, Bacillus licheniformis
MNLKEIQGEYDAVFSLGHLCLTALQLRKMNKRPYAGPFDWVGTSSLPDLCRLIRNRFEGFMNPINLRVTGYSTGVATKDPFISVTDDYYCIDSAHDFKADRNTLDNLATYHEVIEKFNRRFNRFLEKTSTAKRVLFVRTSGTMQEAKELEEVLSDLVTNDFSVLLINHTNVSGIVENHWPLKNVCAVELPDQEIWQSNDPYWREMFQGITIR

SEQ ID NO: 7266 - protein, 137 aa, Bacillus licheniformis
MKSEIKKHLFELLTKEEIDVGWWDKYLELLFEFRKERVEALAEKAAQTNSAAGSEAVSNEKPAESGEALKNESSTNVNSKNEVLDELTASFEEMNNKIIESNNKVLEAIKESLPENYTLPNDTTLKFFQTQNETKTE

SEQ ID NO: 7267 - protein, 402 aa, Bacillus licheniformis
MKILLATYWSIPHVGGVWTYMVQLKESLESMGHEVDLLGYGEENEIVHIVNEDRKVKKEQLLPMIEQSVDQQSFPQLYDNQLVHFTEIQRYVYELAAIYLGLEKYDLIHAQDVISSGCLKRVKPKDTPLVATLHGSVAHEIRHQLTTIHRKSNSDIARAYFDHLERVGAVSADATIVANNWLKNLLTKEFDTPEEQISVLHYGYDIDSFLKRKDIKSAEIPQTDKKIILFTGRLVENKGVQHLLAALSHLKEVRDDWVCWIAGDGERMAGLRILCGQLGLENDVVFMKKRDDVPYLLSIADVYVLPSLLENQPLSVIEAQLAGLPIIVSDAGGLPEIVEHNVTGMVTPKGDAQAICNSINQLLEDETLRKTLGSNAHKFAMEYWNMDEAVNKVLDIYQQTLK

SEQ ID NO: 7268 - protein, 177 aa, Bacillus licheniformis
MTHSQKNKNYTGIVVALTIIINGVIALLFFMPKSDKFAHLDLTFLPLLNAVCNSFTFIFLVAALIMIKQKNIKAHKRFIFAAFTTTFIFLVSYLTYHSLMPDTHFGGEGIIRPIYFFILITHIVLSALIVPLALFTLFRGLSMQVERHRKIARWTMPLWLYVSLTGVLVYIMISPYY

SEQ ID NO: 7269 - protein, 326 aa, Bacillus licheniformis
LKKRIFSLLMLMSAFVLVLAACQQADPKGSYAAAYKKLISAKSYEFSSDIGLKVDASNLGAEDKQFADMLNDATLTISGKTNAETKQSEAVIKAKLKVQNMSLDFDIPVYMDEKKQVGYIKIDSVLDSFGIFLGTAGMNFDSVKGKYLEFPLEDDKSSSKDTDELQKQLMESIKEAADNLPADKFEKADLTDKEKEQGASQKVAFSFSDKEIKAAVVKFIEIAGKASGEAVPKSELNKIKDGLKDVTFKKFDVTSTIDDKENLLTENADISFSVDSKKAPQSFGITASTTYKNIDGDVKFEHKPNKEDIVTEEEFEKLMAQDAMNF

SEQ ID NO: 7270 - protein, 169 aa, Bacillus licheniformis
MITDEELQKDSSGLQKELNDLQFQLFRMRENMKDISKDSRVLGIDQSKDDEWMIVHSIDDGRTCKIMLSDCQSPYRGRCDFSLVASYTEEKRAIHIGDIKGPAGFGYGSICMKYLKEKAREHNIPVITGDIAKRDWDHVDRLIHFYEKHHFEVTIDPDSKSGEIQWQDL

SEQ ID NO: 7271 - protein, 529 aa, Bacillus licheniformis
LVWIIMTFLLINAGIFIFSYLRTKDIDLKTSDGYFLGGRSLTALYIGSSLLLTNLSMEQMVGLNGQSYSGTMSAMAWEVTAPLALIMLAFVFLPRYLSSGVTTIPDFLEKRYDQRTRQIVSILLLLGYATSFLPTVLYSGALVLDQVFNISSALGINTLVTVFLISLVIGAASCCYIFFGGLKAAASADAIYGVGLILGGLFIFVLGIMAIGDGSLLSGYTELTSVHKEKLNAITADNSAEVPWPTIFTGLLVNNLFYWAVNQSIVQRALGAKNLAEGQKGALLAGVFKTIGVFYLVLPGVIAYHLYGGHIQNADTVYPRLIVDLLPTALIGVFAAILFGAILSSFNGSLNSTITLFTLDLYKPLFKPEAKEEELVKTGRIFVVILAAVSIIIAPFILFAPSGLYNYLQEMFGFFNVPVLAAVVVGFFSKKVPALAVKWAIFAHIVLYTISKIYFGHIHFLYILAVLFPFSVLLMLFIGRLKPRPSEFKLEKNAKVDLQPWKHAKLASVLVICLIACIYLLFSPWGLAK

SEQ ID NO: 7272 - protein, 268 aa, Bacillus licheniformis
MKKTFMSFVAVAALSSTAFGASASAKEVTVQKGDTLWGISQKQGVNLQDLKEWNQLSSDLIIPGQKLNVSEKQTEEKKQYTIKKGDTLWKIAQKFGVSVNDLKNWNNIKSDIIYPNTSITVDGQATVQAAAAQPAETKPAVQKEAKVEKAAPAPAPKQEKEPASRSNVSQSTAKELTVTATAYTANDGGMTGVTATGIDLKANKNAKVIAVDPNVIPLGSKVYVEGYGEATAADTGGAIKGNKIDVFVPSKSAAKNWGVKTVKVKVLK

SEQ ID NO: 7273 - protein, 593 aa, Bacillus licheniformis
MLEKAEALLQHYFGYPSLRPGQKKAIQSVVSEKRDTACIMPTGGGKSICYQIPALLMEGTTIVISPLISLMKDQVDALNQLGIQAAYVNSSLGHNEIAERLSVFKEGGYKLFYVTPERLTSPEFIRAISHIHIPLVAIDEAHCISQWGHDFRPSYRHIEGFLNSLGTRPVVLALTATATPEVHEDICTQLGIEKENTVFTGFSRDNLTFKILKGENRDRFIESYVEKNRSEAGIIYTATRKEAERISSRLSQKGIAAGCYHGGMDDEERDRQQDLFLNDEISVMTATSAFGMGIDKSNIRYVIHAQIPKNMESYYQEAGRAGRDGLDSECILLFSPQDIRLQRFLIEQSTEDEDIRAQDVKKLRQMVDFCHTEGCLERFILSYFGEVPTEDCGRCGSCLDTRSITDVTKEAQMVLSCIIRMGERFGKTMVAQVLAGSKNKKVTENGFQQLSTYGILKKRSIADISDFIEFLIADEYIKMSDGTYPVLFVANKGRNVLLGREAVMRKEKMQTNQIVKDDELFERLRALRRKLAQEQGVPPFVVFSDETLREMSGKVPLTDEELLSVKGVGEQKRVKYGAVFLQELQAYKTEKEA

SEQ ID NO: 7274 - protein, 172 aa, Bacillus licheniformis
MDWLEFVSAMVQSLAWPAALMICVLLLKEPLSDRMKELIKLKYKDFELEFDKRLQELVSVREKRLSGLISVRSAQRGDNLIESAWSDVHNVLRETASTFDQDAIRLEGDELIQMLHDRGILQDDAASVLSELSALRRDASDGASIAGALAYKTLCREEAERLRLLAEQQTGI

SEQ ID NO: 7275 - protein, 44 aa, Bacillus licheniformis
MWFIIILMIILIGFAGNIVAMLRTIVKQNDRIISLFENEINKNH

SEQ ID NO: 7276 - protein, 57 aa, Bacillus licheniformis
LDIAVLSMAMSQAALYQNVQMSLTKTALDTAEQSAQQLVDMVQAPHPVSGHHIDLKG

SEQ ID NO: 7277 - protein, 117 aa, Bacillus licheniformis
MLTREDIFKHVKEKFGTSPDYPFQKFPNYAALRHETTEKWYGLVMNVLPEKLGLDGNDEIDILNLKCPPEISGSLRNGKSILPGYHMDKENWISIVLERIDSEEVYNLIEQSFNLTK

SEQ ID NO: 7278 - protein, 35 aa, Bacillus licheniformis
RFFMLRKTILNDEMAADQFDEFLRDVFQNYSRNGR

SEQ ID NO: 7279 - protein, 28 aa, Bacillus licheniformis
KINPAPYNPHLQPGASEYETLKQSMKRF

SEQ ID NO: 7280 - protein, 321 aa, Bacillus licheniformis
VSTLAIIVLLGFSGYMIWKLKETKKIHQNNLERELKNLEQTYQDHLVQAHKEASAALQQAEVMNINQKNEFLNENDFLKNKIVKMDEYINNLKKYSRNSGEVITHTILTELKEKLISEGKINENEMVIMGNVFVPYEENGETKTRQIDHLVILPSDIYIIETKYWRGTVIHGINRKNAESIANDFSFVFEQLFPKANSDTEKTIIFMKNSNIDKDSEQKNSINISYYDNPRNQVMDTMYKLRNFLITYNNKFNYVEPIVYFGYPEDKENRVIDYSTKDKNRFTSKASLCEYFKNEVLKPAKYTVDEIQQIKRIMQKVNYLS

SEQ ID NO: 7281 - protein, 69 aa, Bacillus licheniformis
MARAIKRIQKIEITEEDQRKRDMKEIEDALVENKEAILEMLHMIGHMNERGVLPLLRGLLAKEIKFLTS

SEQ ID NO: 7282 - protein, 19 aa, Bacillus licheniformis
PINESSCVSCGHCSTVCSK

SEQ ID NO: 7283 - protein, 39 aa, Bacillus licheniformis
LAFGLSRFFYIQTREKSDKKGDKIGDFFFSTLSYDRADQ

SEQ ID NO: 7284 - protein, 84 aa, Bacillus licheniformis
MDFIYVEVLNDSNITKYISLLRKTSSKPINELKQAIETGKPVIECDYYDTEELKSLVIIIEQLLSLGASIKIYENDREITLEMS

SEQ ID NO: 7285 - protein, 39 aa, Bacillus licheniformis
VTKVKLYIQQQQGNIYTDGTEGNYKNSLPGKPIKDIKDF

SEQ ID NO: 7286 - protein, 87 aa, Bacillus licheniformis
LQLSEIKVLRLFKQEYLMVKLQQEIGSKEQAQDIINNKRAKYEGKTMQGHHSYSASKFPHLSDKGEVIYPATTREHLHRWHGGKLQK

SEQ ID NO: 7287 - protein, 98 aa, Bacillus licheniformis
MKSKMKIGLGIMIIGLGFLSHFSNNDDMNTASRNITAHPPVMILLFNLKEFLEYPFSRFNSGFFLYISNPQQRFNDLIPRIHFHGLSGFINQFLSVKW

SEQ ID NO: 7288 - protein, 221 aa, Bacillus licheniformis
LLSLGNILTIEFENEIQEYVLAKSKVLSIEDNVLRVHYPVDEETGRTVIIPTNTVAIVHFINEQQVPYKFTSVIQGREIYQDIPVLNMYLPEEDQMTKIQRRQFFRVNTTIPVTVRPYGSGSMFKTYTANISAGGAALIIEETQIHEAEEDLNLSIHLPNEGHDENVIDVYAQVKRTYIDRRTNKQIMTVEFIKMDEHDEQALVHYCIKLQLEERRKLKSD

SEQ ID NO: 7289 - protein, 38 aa, Bacillus licheniformis
MDITLSILLNHYIGTMTHKFKKEKEKALRNYVNGPLLL

SEQ ID NO: 7290 - protein, 35 aa, Bacillus licheniformis
MGDTPIPELNDDKIVSLTREAVRLRNFSMLSPFLF

SEQ ID NO: 7291 - protein, 60 aa, Bacillus licheniformis
MLVFFEVGEGTYLTLDLDQEEENGICPVYYFDKIIAASLEEFSRKWMKKNQTIIFMPKLT

SEQ ID NO: 7292 - protein, 61 aa, Bacillus licheniformis
MKTLDVQALHKALEHLKHQSDEIAKVKSKKHIIYRLEYNVIEAEDRLEKIPNELREFYLRV

SEQ ID NO: 7293 - protein, 92 aa, Bacillus licheniformis
MDQEIKVNTGEVKQALSKLKHSSHSMKATIPTDIKGQNHLDATKKIEELNQTINKIASSYASAFSKQVVQTESAVEAMMDTDKQLASSMKTK

SEQ ID NO: 7294 - protein, 110 aa, Bacillus licheniformis
MKKEFLAELKACRKELEKDKTEFSDSKKTITEPQLSSHTWQGSLADSFDRIRGLMKTAYNDISGKQLSDVLSKIDERIKSLQEDIHSLSQEVRSLEKKIENAKREARDKE

SEQ ID NO: 7295 - protein, 47 aa, Bacillus licheniformis
MESKMKIGLGVLIIGLGFLSHFRFSNNNDMNTASRNTTSAPSHDFIV

SEQ ID NO: 7296 - protein, 35 aa, Bacillus licheniformis
LNSGTNLFMPVYAFLFLYDEIVVFNDAYEPIAAQP

SEQ ID NO: 7297 - protein, 95 aa, Bacillus licheniformis
VPQKNGADRPDDYKRFSSLDKEYDSQQSLDSNAKTENVNTETDNKENTTDTTDVAGKYFDPSDYEGATQLEKGLAETHEQVSDDYFEGTIDQNLD

SEQ ID NO: 7298 - protein, 400 aa, Bacillus licheniformis
MKLSTYKICFLFPIIILFLAGCWSSHEIEELGLTFAIGFDEGRETDLEKKFNKMGVDYPKKNRVTLTYQYVNPYTAGAQIAVGSGSSQQPYINVYGTGDSLQQIGSEIALRQDRPVFSSHLKVIVIAADLLRTYSLKELLDQTLRDNEIRLSTLVLVTRGRASDTLELKDGTGKIPAFHLTRIIHNDFRAKKILPPITLAKLPGMMKAGTSYLLQNIIGADGEVKYAGAVAINGKTNKLLGFLDEKDLDGIMWIKGQGVGGTVKNYDQKTKKLTAMSVDHLKSEIKPVFKGNRLSFKVNINSEAHLAENWNTTETAIDKKYLKRKEESASQTVKQLVEQITEKMQKEYKADLAGFGDEVRIHYPFLWRKLKKNWDEVFTETPIQYDVNITIKEFGSQSRH

SEQ ID NO: 7299 - protein, 48 aa, Bacillus licheniformis
LCLSSEKISIFFNSSMLQWKWKKEGILNETLFADDGVDLWIFQFCEPR

SEQ ID NO: 7300 - protein, 73 aa, Bacillus licheniformis
MKRFLLMMVLICGFFSFVSRAEAYSFPHKLNLTFTGTHVEDIPDSDLTFLTGILAISLRFSMQKTAKQRLRFR

SEQ ID NO: 7301 - protein, 85 aa, Bacillus licheniformis
MSLSIKDFEGDWPDRTAQDVITLMPRTYRLYFENSEGECKDIRIKGTYGAIPQTYDYFSAFKKTPGRTTFLPNRYEQQTDEGGRI

SEQ ID NO: 7302 - protein, 280 aa, Bacillus licheniformis
LKNFWTYEDEDPYKLKSISERDIQKAEKKLGVKLPEEYKALILEQNGGYINFNAFPSERPTSWAKDHVQFDYLLGLGKKAGILESKYIIKEWELPDNLILIHGDGHTWIALDYRETKENPPVHYFDSEFEENYKLADSFGEFLSKLYTDNPMDDDDCQLIEGVHPDIPYVYPEDAITKEEAEQILTKNSAAELHQLNYYPIESIDDLKWLLTKMKKSALKADRDTGLALAGALEAVISYYKNLTFEDEQTRRSVRDILVILEKLNDSTVDIYLSQIDDLF

SEQ ID NO: 7303 - protein, 404 aa, Bacillus licheniformis
MQKTLFQNATIVTLDPQLHTLETGDMLIEGSVILDVAESIEAGDAEIVDASNMLIMPGFVDTHRHVWESVIRGIGADWSLQTYLNRIYYGNYGSMRRPEDDWAANYLGALEALDAGVTTLLDWTMIESPDHTDQLIAGLKDAGIRAVFAFGTSGDAEYWDRDSDLSNMDEAKRVKKAYFQSKDQLLTMGLAIRGPEFSSWKTSVFEIETARELDALCSMHIAFGNWGAKDRSIEKLNQAGLLGPDLNMVHANAMSEEEMKMLAAHGSSISVTPEIEMMMGHGYPVTGLSLKNGVLTALGVDVVTSTGGDLFAQMKFALQAERAKHNDELLREGIMPGPELSISAEQILKAATIDGARALKLDHKIGSLSPGKEADFIMVKTDSVNLLPFTDAAGAIVQCTHTEM

SEQ ID NO: 7304 - protein, 41 aa, Bacillus licheniformis
MYCKHHEPHVYPTKYCEDHHYSKSVVPHIHPAYKKNRPPQV

SEQ ID NO: 7305 - protein, 69 aa, Bacillus licheniformis
MKSIQSITVHSKQYIVGERCHPPGFRDEATVMKITEKNKFYGLIRGFVVHFDTKTELHIHTEPVNVHWR

SEQ ID NO: 7306 - protein, 260 aa, Bacillus licheniformis
MGYFIEAEPSVNLYVEDINPQSGKAIVFLHGWPLSHLQFEYQFDDLSRKGYRCIGIDWRGFGRSDKPATGYNYNRLADDIRAVVEALQLNNFTLAGHSTGGAIALRYMSRYRGAGVSKLVLIDAAAPVGFTEETAAKLLQQASNDRPKMMREVTDTFFFQYITQPFSDCFFQLGLQAAGWSTKAVIEMLRDEKLYDDPEKVAAPALIIHGIQDKVIPFAQAKELSRKIRNSYLVPFQYSGHGPFWEERKMFNRILTQFIG

SEQ ID NO: 7307 - protein, 163 aa, Bacillus licheniformis
MMALLRSLAISFVLILPAAAAYAQVPYPCSVVLDPVRDIPNARGTALIAKVKKPYTEAPGSPVRERQSVGIYADWLPDPASFGDYDQFEGIARIPDQISWRFTMHQVQEDAPSWFGGSPWAGKFDEISSELTVNTQVEVRPFNSKTKKAGEAVLRGNLQGCRS

SEQ ID NO: 7308 - protein, 78 aa, Bacillus licheniformis
MSYCKPRVLPPVVHPTRYCEDHRFSKTIVPHIHPQHIKKVDHHKYEHVHYYPHSYSSYKPVYHDHSYCGKPCDRYEKY

SEQ ID NO: 7309 - protein, 207 aa, Bacillus licheniformis
MDAISIVSFLGAAVLLTLMPGPDNLFVLAQSISKGKSAGIATASGLCTGLIVHITAAAAGISAAIYQSAVAFSIVKYAGAAYLLFLAYQSFRQKSAGFNVEAKDSLNRRALYQKGVVMNLLNPKVSLFFLAFLPQFIHPGTFNVTTQMLVYGMLFLIQAFAIFVMISLFAEKVGDRLRRNPQAAKKVHLLEGSLFALIGLKIAVSQR

SEQ ID NO: 7310 - protein, 42 aa, Bacillus licheniformis
VSLRPFTNEDDGGNGKRVTFISNKIGKRCAGCIPFFSGSTFG

SEQ ID NO: 7311 - protein, 61 aa, Bacillus licheniformis
MAKTSMIVKQKREQKFKVREYTRCERCGRPHSVIRKFKLCRICFRELAYKGHIPGVKKASW

SEQ ID NO: 7312 - protein, 157 aa, Bacillus licheniformis
MSQNGIVLVASVSIFSDDKVLMIKENKPTSVNKWNFLGGRIEYGEDILYSARREVKEETGFDVNLIATTGVYNFISSTNNQVILFHFIGEVTGGSLNLEEDEISDSKWITVNDLVTFENEGLREPNVIKQITDSLLKENLHSISVYNEQLIKSFLLS

SEQ ID NO: 7313 - protein, 888 aa, Bacillus licheniformis
MEKYVLYFNEIDQFDLPSVGGKGANLGEMTKAGFPVPQGFCISTEAYRAFIQTSGIIDSLFDQLEQLKHDDLEQIRTVGKQIREHLAQISMPDEIKSAILEGIDTTGKDKAYAVRSSATAEDLPDASFAGQQDTFLNVCGKDQLLEAVKQCWSSLFTDRAISYRAKNGFDHRSVFLAVVVQEMVFPEVSGIMFTADPITGHRKTVSIDASFGLGEALVSGVVSADLYQIRSGEIVKKQLSKKELAIYSVPEGGTVQKTLSPEKQQTQALPDPRIIELAELGRKIEAHYGKEQDIEWAFAGGRFYILQSRPITSLYPVVRFFDDRPHVLINFGYIQMMTDPLKPLGVSVISQVLRFLKKDPSAQPILREAGGRVFADITGALSLKFVRSRLLKVLSGMDQLMASAVSEVVKRKEHQLYSTSRKGIFHIAGNLAPILIPAALKVAGILLMRNPDKAEKKAELIIEAIVTDTEEQLSRTSGAETIRVIQKGMGNMLQDVLSKVAVYVLSGMIAAGLLEKKLKKKLGDEKSAILLGKLYKSLPHNVTTEMGLELGDLSDQARKYPAVIDYFKRANSENFMEELLKIPGGAEMKRSLDDFLKKYGMRCVGEIDLTRPRWAEAPVQLVPSILSHIRTIAAGEHRRKFKQGETEAEEAKKEIISQFRFPEKKRVSRLVHMYRSLMGMREHHKFTLVKQMFLYKKAILKEARTLVGKGILNCEEDVFYFTLEELIALLENRGIGDIPELLADRKRQHTSNQKLTSPRVMTSEGEIITGKLRNEKSPEGALTGTPVSAGIIEGTARVAKSPEDAKLNQGDILVAPYTDPGWTPLFTSAVGLITEVGGMMTHGSVVAREYGIPAVVGIDKATEIIEDGAYIRVDGTNGFVQILDGNGS

SEQ ID NO: 7314 - protein, 40 aa, Bacillus licheniformis
MPNAAYLLYTNKINTMLINIHHVYYNCAKGERNEQSIGKC

SEQ ID NO: 7315 - protein, 201 aa, Bacillus licheniformis
MTEQKKDRRVKRTKKMIRDALSELMKNKAFEEISVTDITKKADINRGTFYLHYEDKYDLLDQSEEEIIQEINKIAKRSIHSMDVLNQDVIDHPLTFVVDIFQYIKENEVFMKAVLGPKGPGSFRLKFKSVLISNLKRLKTAIRTDPIVPEDYLISYITGAHISVMQQWLENGMKETPHDMTLILSKITGMGPAYAAGLRKK

SEQ ID NO: 7316 - protein, 41 aa, Bacillus licheniformis
MQKKGIQNSSLEQLKNDHETESAFQQDDKNNKQQQNRNALK

SEQ ID NO: 7317 - protein, 154 aa, Bacillus licheniformis
MKHVRALCLKFIVSLVLLYVVLTLFFGVPFGEMFVLTLFLGVISYLVGDLLLLPRTNNTTATMGDFGLSLVLIWVILAMQNNPPYGTLAAASIVSAIGVTVFEYFFHRYMEANVLNETENGKRENREKPGSLQYQSESSEELYPVTPSKKQDEE

SEQ ID NO: 7318 - protein, 171 aa, Bacillus licheniformis
MTHSALKHLDYHNWANQRVLTHLKSLPEELFTREIKSVFQTVSEVVTHMCVADALWLKIISGAAYEEAKETGMRLKEGLKRKKSDDFISIFHDTALQYEAFFENLEDPDGEITIAHPILGEIKTPISEILHHVVNHGTYHRGNISAMLRQMGEAGVPTDYIYYLLSLKQTT

SEQ ID NO: 7319 - protein, 208 aa, Bacillus licheniformis
MSKVLFVKANDRTAEEAVSVKLYEAFLNSYKENHPNDEIVELDLYRENPPYLGRNAINGTFKAGKGMELNEDEKAAAAVADRYLDEFVKADKVVFAFPLWNFAVPAVLHTYVDYLSRAGVTFTYTPEGPKGLMGDKKVALLNARGGFYSEGPMAAMEMSLNYMKTVMGFFGVQDLHTVVIEGHNAVPDDAQKIIENGLAEAKKLAASF

SEQ ID NO: 7320 - protein, 162 aa, Bacillus licheniformis
MPLTEEQKQHLYDKLISLKNEITGTKSEVQPMNEETGEWSNGIDNHLADHAGVYTERMRDQAFRQSDDALLKEIEDALNRMKDGTYGTCETTGKEIPYERLEAIPYARRTAEAQAEAEARQEDRTENDRQFTRQMKDLTNKETMDQKHSYVYERLDQEQDSK

SEQ ID NO: 7321 - protein, 42 aa, Bacillus licheniformis
LKFKRCYQNTYVHNLNRLFKRSFANERSFFAEKCTFSLLAIG

SEQ ID NO: 7322 - protein, 114 aa, Bacillus licheniformis
LGVFSASKTADGKKFEPLLIEGEKIESVCRLRMDQICFTNKRIIFFDNKLFSKKKVRVFLPYRSIEGFAIREVSMFNPDSSLSLMTSSKIFDLEFTKDTDMLEIQALLSKYLCA

SEQ ID NO: 7323 - protein, 69 aa, Bacillus licheniformis
MIHEKWQNNKTIKKVKCIHTDAKKYIVNRALTVGNIYEVKNETGEFLFIIDNTNKVGGYYKEYFEEVKA

SEQ ID NO: 7324 - protein, 40 aa, Bacillus licheniformis
MKPNQYSCLAKTTFADRAHCISAKKRYNGNYTRMKKETST

SEQ ID NO: 7325 - protein, 495 aa, Bacillus licheniformis
MSSLTMQVSKKLESFLQGTKKLYINGEFVASASNKTFETPNPATGETLATLYEAGPEDVDKAVKAAREAFDRGEWRTMNPAERSRLMYKLADLMEEHKTELAQLETLDNGKPISETTAGDIPLSIEHMRYYAGWATKITGQTIPVNGPYFNYTRHEPVGVVGQIIPWNFPLLMAMWKMGAALAAGCTVVLKPAEQTPLSALYLAELIDEAGFPKGVINIIPGFGETAGEALTDHALVDKLAFTGSTEIGKKIMEKAAKSVKRVTLELGGKSPNIILPDADLKKAIPGALTGVMFNQGQVCCAGSRVFIHKDQYDKVVDEMAAYSKSLRQGAGLHEDTQMGPLVSKEQHERVLSYIEKGRQEGAKIAAGGTCPYEQGYFVSPTVFTNVEDEMTIAKEEIFGPVLAAIPYETVDEVIERANRSEYGLAAGVWTENLKNAHYIADRLQAGTVWVNCYNAFDAASPFGGYKQSGLGREMGSYALDNYTEVKSVWIHTGE

SEQ ID NO: 7326 - protein, 426 aa, Bacillus licheniformis
MTIQVDWNDRIVYSSSLGITVWKQKNFRYIWASQTAQAVGSILMTIIVMVDVFKETNSVFGSGLVLALSSFGSVLGGAIAAFAIQRLDLLQTAAWSTWFRAVCALCIGLCQSLGLPSYIIYLLLFLQSFVGSWYTPAQLGLLYQAIKKRDYVAASGSIVTVNQFVQAAGWGLGGFLTVLAQTYTLTVFTAALFFISGLLIRLPDFKKAIIPRQKARAQSVWRTVYRKKTVLLLTMMDMSEGLANAVWTSAVLLAFTKEALNKGEAWWGFINAGYFLGAILGGILAVLFSNQLKKRLGLMIFFGSVSMGITTLLFAYSSNPLLSVILCIMMGPLYQVRDVSQTVILQDTLTDEERAPVTAAKNTILAAWSIITIAIMGALADLIGVRSVFIAAAVLYAGTAAATFFVRDLRTYSQSARQQTKGKIEG

SEQ ID NO: 7327 - protein, 178 aa, Bacillus licheniformis
MFKSRKVYLRPVEKGDMESFYKAVQNEDIRYMTGTTREYTMEDLYEHYERITSDETRYDFAVCLKEDDRLIGDLSIMDIDRRNRKAGFRIALHSPAYLNKGYGIEAVRLAMQLAFERLDLNPLQLEVFSHNIRALKAYEKAGFKMEGRIREALYMNEQYSDEIIMGILKREYEELMSR

SEQ ID NO: 7328 - protein, 133 aa, Bacillus licheniformis
MNIEQMLYDTAVELIKKRYPTGWGGAAAMYTEDGRILTSVAPEVINASTELCIETGAILEAHKYQAKITHSVCVARDDEHSECKVLTPCGVCQERLFYWGPDLKAAVTVPDGRLVYKTLKEIQPYHWFAAYQK

SEQ ID NO: 7329 - protein, 629 aa, Bacillus licheniformis
LRSILEDVKAFRQKTLAELQNRQRSDGSWRFCFEGPVMTDSFFILMLTSLGDQDSSLIASLAERIRSRQSEDGAFRNHPDERAGNLTATVQGYTGMLASGLYDRKAPHMQKAEAFIKDAGGLKGVHFMTKWMLAANGLYPWPRAYIPLSFLLIPSYFPLHFYHFSTYARIHFVPMAITFNRRFSLKNNQIGSLRHLDEAMSKNPLEWLNIRAFDERTFYSFNLQWKQLFQWPAYVHQLGFEAGKKYMLDRIEEDGTLYSYASATMFMIYSLLAMGISKNAPVVKKAVSGIKSLISSCGKEGAHLENSTSTVWDTALISYAMQESGVPEQHSSTSSAADYLLKRQHVKKADWAVSNPQAVPGGWGFSHINTNNPDLDDTAAALKAIPFQRRPDAWNRGLAWLLSMQNKDGGFAAFEKDVDHPLIRNLPLESAAEAAVDPSTADLTGRVLHLLGLKGRFTDNHPAVRRALRWLDHHQKADGSWYGRWGVCFIYGTWAALTGMKAVGVSANQTSVKKAISWLKSIQREDGSWGESCKSCEAKRFVPLHFGTVVQSSWALEALLQYERPDDPQIIKGIRFLIDEHESSRERLEYPTGIGLPNQFYIRYHSYPFVFSLLASSAFIKKAEMRETY

SEQ ID NO: 7330 - protein, 281 aa, Bacillus licheniformis
LNRDAYKEKISSWAKDLKDQMKDDPSLESHLEKLFQSLDDPRATEQEWYEQAEAEYQAISRSDASQAGRQPFRTVPIGGHRLPSLPYSYSALEPYISKEIMFLHHTKHHQSYVDGLNRAEKELQKARQTKQFDLVNHWERELAFHGAGHYLHTIFWYAMHPKGKRRPTGELLEMINRSFGSYSAFKEHFSEAAKKVEGVGWAILVWAPRSHRLEILIAEKHQLMSQWDVIPLLPLDVWEHAYYLQYKNEKAKYVDNWWNVVDWREPERRFASAKRVLWEPF

SEQ ID NO: 7331 - protein, 176 aa, Bacillus licheniformis
MKKMFAFFTALMLGLTCLPYLSEAKESKHTDSSVTSLPSMSIPTSLNQSLNEEKQQFKTSAIDLSISLDLLGIGNSIRDAIVQSNNRSGFVKNCMETAFYSAGQRYNVMVFNLSQGYHNGLRGVKFYGSANYHGVIYGIWVFESGQFTNQGDGGWINWAFKGWFDRNGQTVTFRKP

SEQ ID NO: 7332 - protein, 36 aa, Bacillus licheniformis
MKGGRGREKAVVFLVRNLKKLAGLPASRRGGYMDFD

SEQ ID NO: 7333 - protein, 446 aa, Bacillus licheniformis
VENKQNIWSSKLGFILASAGSAIGLGAIWKFPYVAGTSGGGAFLLMFILFTLLIGLPLLMAEFIIGRKTQKDAVESYKELAPGSLWHWVGRLGIITCFILLSFYSVVGGWIIIYIVKGLTGELSRSTDYAGLFGETIANQYLVLGSQFAFIIITILVVAKGVRSGIEKASKFMMPALFIIFLLLIVRSLTLPGSMEGLEFFLKPDLSHIKAETVLFALGQSFFSLSVGVSVMVTYSSYLSKKENLVQSAVSVTLLNVSVAILAGFAIFPAVFSFGLSPDAGPMLLFNVLPSVFHKMPLGIIFLLAFLLLFLFATLTSAFSMLEILVSSLSKGDPKKRQAFAWAGGIAIFLFGIPSALSYGVLQDVSIFNLSIFDAADYLVSNILMPLGALLIAVFVPLKIPKDELFAELKEGSKISRKWFAAWLLLIRYAAPIVIIVVFLDAIGVF

SEQ ID NO: 7334 - protein, 326 aa, Bacillus licheniformis
MSYLIKISQFAGKTFAIWVILFAILGFAFPSQFTWIVPYITILLGVIMFGMGLTLSADDFKELLRRPLHVLIGVLIQYTVMPLLAFGLAYGLALPPEIAVGVILVGCCPGGTASNVMTFLAKGNIALSVAITTLSTLLAPFLTPFLILFFAKEWLPVSPGSLFVSILQAVLLPIIAGLIVQFFFKKQVKKAVQVLPLVSVLGIVAIVSAVVGGNRENIIQSGLLIFAVVVLHNGLGLFLGFVLAKCFKMDYASQKAVSIEVGMQNSGLGAALATAHFSPLSAVPSAVFSVWHNLSGSWLATYWAKKTNKQKNDNHSPAPQMINKKL

SEQ ID NO: 7335 - protein, 426 aa, Bacillus licheniformis
MAEIKVPELAESISEGTIAQWLKQPGDYVEQGEFLLELETDKVNVELTAEQSGVLQEVLKDSGDTVQVGEIIGTISEGEGEGGKSTAPQADAQESAGASEEKAASSEKTAEPREGASDEADTAKTRTIASPAARKLAREKGIDLSEIPTGDPLGRVRKQDVESYQKNEQPPKAQPEPKRATQAPAAKQTEDAGKPVERQRMSRRRQTIAKRLVEVQHTAAMLTTFNEVDMTAVMNLRKRRKDQFLEQHDVKLGFMSFFTKAVVAALKKYPLLNAEIQGDELVIKKFYDIGIAVAAPDGLVVPVVRDADRKTFADIERDIGELAKKARNNKLSLNELQGGSFTITNGGTFGSLLSTPILNSPQVGILGMHKIQLRPVAIDEERFENRPMMYIALSYDHRIVDGKEAVGFLVTIKNLLEDPEQLLLEG

SEQ ID NO: 7336 - protein, 944 aa, Bacillus licheniformis
MFQNSMKQRMTWEEFHGPNLGYVLELYDQYVKDPESLDADLKEMFDELGAPPGDIRAASQKNEEADFTAGSIQKIASAVKLAEDIRTYGHLNASVNPLRKTQEKQELFPLAEYGLTEQDVKKIPASVICKDAPKEVTNGLEAIQYLRNTYKKSISFEFDHVHIFEERNWLMKKIESGELFTPKSKEKLVEVLRRLTEVESLEQFLHKTFVGQKRFSIEGLDALVPMLDDIIAKSVSAGTTNVNIGMAHRGRLNVLAHVLGKPYEIIFSEFQHAPNKDLVPSEGSTGINYGWTGDVKYHLGANRQIQDEHTKTARIALANNPSHLEFIDPIVEGSTRAAQETRTESGYPVQDVKKSLAILIHGDAAFPGEGIVAETLNLSQLKGYQVGGAIHIIANNMIGFTTESNESRSTKYASDLAKGFEIPIVHVNADDPEACLSAVQLAVEYRMTFNKDFLIDLIGYRRFGHNEMDEPSATQPMLYDAVRKHPTVKNIFAEKLIHKGIVDKETVGKIKDAVQKRLEEAYRKVPAKKEDMTHEIVLPEPVSNGFPDVDTSVDFETLRKINQELVSWPENFNVFDKLKRILERRAKAFEDDRKVDWSLAEAMAFASILKDGTPLRLTGQDSERGTFAHRNLVLHDSKTGDEFIALHHLADTKASFAVHNSPLSEGSVLGFEYGYNVSSPETMVIWEAQFGDFANAAQVYFDQFISAGRAKWGQKSGLVVLLPHGYEGQGPEHSSGRTERFLQLAAENNWTVANLTSAAQYFHILRRQAKMLLREEIRPLIIMTPKSLLRNPNTVSEVQELSNSSFKPVYEMSGLSHQYDKVTRLVLSSGKVSIDISDHFNKMEGEKDWLHIARVEELYPFPAKHIKAIFSKLPNLEEIVWVQEEPQNMGAWNYIEPYLREVAPKDVKVRYIGRRRRSSPAEGDPTVHKKEQERIVSDSLTRKN

SEQ ID NO: 7337 - protein, 637 aa, Bacillus licheniformis
MKFIKFNDSKIDSLLFMELTDLAKTLAKSDQVEVEYGVQSYYNPFEKKIYMSHFWKDRNHRDMVDGLKSDVYLRSIGSRYSSMKDFSRMLDSARKYQFKSLAKQLFMLFEDIRIEESIKRERPGTKQVFSNRKSMYRKHFATQLTLNLERSIFTDALFCAAYLKLTAESPLEEIPAIHESVDPMKGFIEAELARVFEARSTADIVSIVNGLMEGFEEVLEKDMLNTYFFFPELDYEQVDEEALFQDLKAKPKLSEDLTLEEKSAGDEEVHEEEMPTWHRETEAPAKSFLQFDLEHGAKSDISGGALREGEDGDQALGSVQGTAKQTKRKDYSKLESLESVQDEPNAGTAQAGKENRYAFSVMKPPEKPSNEDILDYQAQAKTIESYQKRLKQMIQKTLEHKKTLPRTDLHAGRLNNKLLRYFTERNPRLFYKKQEPSTEIDAVFTLLVDCSASMHDKMAETKRGIVLFHEALKSVAVPHQIVGFWEDTNDATETSQPNYFHTVVSFADSLKAGAGPHIMQLEPEEDNRDGYAIRQMTKMLVQRSEAQKFLIVFSDGEPAAFDYEQNGIVDTHEAVMEARKRNIEVINVFLSNSEIEESQMKTIQDMYGKYSLFVPDVDQLPDVLYPLLKKLLNKSIG

SEQ ID NO: 7338 - protein, 296 aa, Bacillus licheniformis
MKYDLHELELPEKIKERLIQSAAKPVDAEYQSLIGTPGYEAEDSAILYDAMIALSLGKNVLLKGPTGSGKTKLAETLSAYFQKPMHSVNCSVDLDAEALVGYKTIENTGGNASIEFVEGPVTKAMNNGHFLYIDEINMAKPETLPILNGVLDYRKMMTNPFTGEVVKAKEGFGVIAAINEGYVGTVPLNEALKNRFVIIDVPYIKGDLLKRVLETQSELKNQKLLDRFVTLSSDLMTQAHNGQVSEEAASIRALLDTCDLSTYIPPLRAIERGIVEKLDDEREKAAVRNIAQTLFE

SEQ ID NO: 7339 - protein, 43 aa, Bacillus licheniformis
LRSADEQRKKVNRRLEAVYIEGSASFLVYLNTEDAFRKEFYNT

SEQ ID NO: 7340 - protein, 197 aa, Bacillus licheniformis
LRTLHYILLACMSVCLAAACTQQKEIEQKNAEQEHKETFETMTQPLKVPLIKRDGTETGFIEVYESAAEGLDIRVSAHDLPPGMLAFHIHETGVCKKPDFESAGAHFNPDQKEHGFNNPKGPHAGDLPNIEVGADGKVDVIVNAPAVTLDQKSKFSLLDHDGSAFIIHEHQDDDLTNPSGNSGARMVCGALTNSGKK

SEQ ID NO: 7341 - protein, 435 aa, Bacillus licheniformis
MKKKIAAGLAASAVVGTSLAASPVEAQTIKVKSGDSLWKLSAEYNTSVSALQSANNLSSTVIYVGQTLKVPDGKSKSSSQTKSASSSSSSSAAKSTYTVKLGDSLWLIARDYKTTVQEIKNLNGLSSDMIYPGQKLVIKGSAKSAGSSSGSSSKSSGSSSGSQSASSSSSTYKVKLGDSLWKIANSLNMTVAEIKTLNNLKSDTIYPNQVLKVKGTVSSGSKPSSGSSSSSSSSKTNTGSSSKTTTYTVKPGDSLWKIANSMKVTVQSIREANQLKTDVLQVGQKLKISGASSSGSSGSPSSSSPNSSVSTGTSTSAKVERMIAEAEKHIGVPYRWGGNNPSGFDCSGFIYYTLNKVTSVSRLSAAGYWNIMSPVSQPSRGDFVFFSTYKAGPSHVGIYLGNNKFINANDSGVTVSDMNNSYWKQRYLGAKRYSF

SEQ ID NO: 7342 - protein, 22 aa, Bacillus licheniformis
MRNLVKKQKKLLKKYKIDRYKS

SEQ ID NO: 7343 - protein, 52 aa, Bacillus licheniformis
MRISVPFYCRFLFLSDQTETGRQASVHVEGVKTACSYSFIFPEIADLSSSIA

SEQ ID NO: 7344 - protein, 46 aa, Bacillus licheniformis
MAKKIHLHILKCAIKGGNMHESCGDKTEPFFTCFDSILDLLIYINE

SEQ ID NO: 7345 - protein, 452 aa, Bacillus licheniformis
MRETKDLREKARQFLTILIPILITQAGLSLITVLDTVMSGKVSAADLAGVAIGSSLWTPVYTGLAGILTAVTPMVAQLMGAKRQKDVPYTVIQSIYVAGIISLAVIVSGYFLIDPVLENLDLERKVAVIAKQYLICIGLGILPLFVYNVMRCFIDSLGKTRVTMLITLCSLPINFVLNYLFIFGNFGFPKLGGAGAGLASAITYWCICLISLYIVHKKTPFHQFRIFGTFYSFSFAESMKLLKIGIPIGFAIFFETSIFAAVTLLMSHFDTVTIASHQAAMNFASLLYMLPLSVSMTLTIVVGFEAGAKRFKDSRAYSYLGISIAVGFSLFTALIILLFREQIAGLYAADRDVLLLTKDFLLYALFFQLSDAIAAPIQGALRGYKDVNYTLVTALVSYWIIGLPVGFVIGTYTSFGAFGYWIGLITGLAAGAVGLFFRLKRIQNRYIHTQSM

SEQ ID NO: 7346 - protein, 221 aa, Bacillus licheniformis
MKKHLLVILPHPDDESFGVAGLIALNRKEDIPVTYACLTLGEMGRNMGDPLFANRETLPLLRKQELIDACREMDVQDLRMLGYRDKTLEFEDEEKLADQIEAVIDDVNPSLVVTFYPGHGVHPDHDACGAAVIRALSRKKKEDRPRVLCMAITHHREEVLGKPDVVLDIKEVADIKMNALKAHKSQTGGLLKEIEKKLANGEPVVETWFEKEAFWTYQWND

SEQ ID NO: 7347 - protein, 116 aa, Bacillus licheniformis
MKAIKKEDVQASLETFLNQPVYIHLETTTGSYSAHKDEQNMTVVAYIRNAKVACSRAKITGEGPFRAGLKTEDGWIYAEGLTDYTVDDEGRLLLAGYLPGGKLAISLQISKKPFAV

SEQ ID NO: 7348 - protein, 91 aa, Bacillus licheniformis
MADELELFQAYKTLWKNRTMEGEGREALHQAVDDELNDLGTHPRLRKTKHEKYYQSIRRIVNSQLESEMKLKLIECHTERLELLTNEESRE

SEQ ID NO: 7349 - protein, 266 aa, Bacillus licheniformis
MNHSSQTKGIIYTALSYLLWGLLPLYWKVLDQTAALDILAHRIIWSFVFMCGVLLVLRQWKNGVKAFRSLSGNRKEFVPLILSSVLISINWYVYIWAVSNGYILEASLGYYINPLVSIVLGIVFLKEKLTRMQGAAVLLAALGRAYFSFSVRVRAVHRPDARIQLRALRTGEKAHIALKCHRTYFGNDDDRSGCSDLPAVLQPSGEGSGSLREHRHDGAAVSGGGADRDSAAFICGRCKETAALSSRHFAIYRSDHYIMFRRFRLP

SEQ ID NO: 7350 - protein, 150 aa, Bacillus licheniformis
VFDWQRFFPFQQFSKDGLKNADPKDVEQYIHHMMKSVFGPGYAVQFPFRDPLSKETSAADESDPIDIFETTSHVFVKIPLTKEQLNLLKIKHTSQTLIIENYPEKGRQEKVVLPSLVRRKGTKAIFKDGILEVMFLKNEDFNLSEIDITF

SEQ ID NO: 7351 - protein, 31 aa, Bacillus licheniformis
MIQEEKKQPAFSSRPFSKRDVDFRQVKVLIF

SEQ ID NO: 7352 - protein, 232 aa, Bacillus licheniformis
MKKKISILITAMFLTILCFSPQASAAYNSLHTGYATYTGSGYSGGALLLDPIPSNMKITALNPTDMNYRGVKAALAGAYLRVEGPKGKTTVYVTDLYPEGAPGALDLSPNAFREIGDMKDGKIDIKWRIVKAPITGNFTYRIKEGSSQWWAAIQVRNHKYPVMKMEYYKDGKWINMEKTDYNHFVSTNLGTSPLKVRITDIRGKVVKDTIKKLPENGTSSAYTVPGKVQFPD

SEQ ID NO: 7353 - protein, 92 aa, Bacillus licheniformis
MNPHMLYSRSGPAGYPARFPLFWGFGAPLVGGLLGGFLGSAIFNYPRPYAYPPPYPGPYGGAPYYGYGAAPGAFPYGGVPGAAPYRGAGPGY

SEQ ID NO: 7354 - protein, 248 aa, Bacillus licheniformis
LNSKETVVITGGAKGIGRDLVAAYAQKGFIVVFADVLKEEGEQLEKELTASGARVQFAPCDVASEEDVKRLMQEASRNGRSISALINNAGRSVWKSPYDLTAEEWDGVLNTNLKGAFLCAREAAKRMKEAKTGGAIVNIASTRAFMSEPDSEAYAASKGGLIALTHALAASLSKDSIVVNSISPGWIETGDYTALWPIDHAQHLSNRVGRPQDIVKACFYLTDPDNRFVTGTNITVDGGMTKKMIYEE

SEQ ID NO: 7355 - protein, 106 aa, Bacillus licheniformis
LGFTMCPRMEAAFSLLGKRWNGLIIHVLLDGPKRFKDLTEMIPMISQKMLAERLKELEHCKIVERQVLPETPVKVIYQLTDKGTALEPVLKEIQTWAESHCDPEGS

SEQ ID NO: 7356 - protein, 206 aa, Bacillus licheniformis
MSSQENTALNILEERTSIKEYDTSVSISKEELTKLLSITTKAPSAWNLQHWHFTVFHSQESKDRLLPIAFNQKQVSQASAVVAVLGDLQANLNGEAVYGPLAEAGYMTEEIKNTLLGQINGAYQNSGFARDAAFTNASLAAMQLMIAAKAMGYDTCAMGGFDKEAFVKEFNIDERYVPVMLISVGKPVKPAHKSNRFDVSDVSTWL

SEQ ID NO: 7357 - protein, 201 aa, Bacillus licheniformis
MNYIYEKGDSDLTLLLLHGTGGNEHDLLPIGKMIDPDANLLGVRGNVLENGMPRFFRRLREGVFDEKDLIERTDELKTFLDEAAKELHFDRSRVVAIGYSNGANIAGSLLFRHEHVLKGAILHHPMVPFRNRKLPDMTGLPVFIGAGKTDPLCPPQESSELAGYFTNAGAKVLLHWEGGGHQLTHGEIEKAKIWYEKHIKA

SEQ ID NO: 7358 - protein, 39 aa, Bacillus licheniformis
LMNSWRVSFGELKLSEMIAGQLKAYFQNGKGVKGNELYI

SEQ ID NO: 7359 - protein, 67 aa, Bacillus licheniformis
VNQQIFKWVLFIIPFIGQLALLPFVNRIDPIVFGLPFFHFWLVLWIVLTPLITFAIYRFEKRNGGYE

SEQ ID NO: 7360 - protein, 493 aa, Bacillus licheniformis
MQGNLTALLITAGIILAVVCIGFIAGSNKQSRKSVEEWSVGGRRFGGLLVWFLVGADLYTAYTFLGLTSTAFTSGSVAFFAIPYSVLAYFIAYFFLPKIWKVAKVHQLTTLADYARERFSSKLLSSLVAIVGVLMLIPYICLQLSGIQDTLQVAGTGFINVNAVVIISFILVALYTFFSGIKGPTYTAIIKDILVWVMMLFMVVSLPLIHFNGWTPMIDKLANEAPHMLTIPSDGPRGIAWFITASIVSAFALFMWAHAATGVFTANSADALRKNSMFLPLYNIVLILVIFLGFIAFLVLPDDINPRFALLYLIQSSYGGVTQGFAYSTIALASLIPCSIMAIGASNLFANNLYRDLINPRVSGQKLTIITRSMVFVVIGLALLFGMLFPAALVTLQLLGVSGMVQIFPAIVISLFWKNQTKEATIIGLLIGLAVTFTVYLTGATFGIYEGFWGLAANLLTVVLLNPFFVKNVKHNSVINYLFHTKKNVQKSA

SEQ ID NO: 7361 - protein, 465 aa, Bacillus licheniformis
LKQQLKLFLAVLITAVAASALTLYLVGKGSGGSVYSASDSEKFEKLMAAYDKIKSDYYQNADDEKLTDGAIKGMLGALDDPYSTYMDKKEAKSFEESITSSFEGIGAQVEEKNGQILIVAPIKGSPAEKAGLKPHDEIQKVDGKSVKGKTVNEATAMIRGKKGTNVKLVLNREGVGQIDVTIKRDTIPIETVYSKMIDGNIGEIQITSFSENTAKELTKAIDDLSEKGAERFVLDLRGNPGGLMDQAIMMSNMFVDKGKTIMQVESKNGKKEVYKAEKERKVNKPTVVLVNGGTASAAEIMAAALHQSSGIPIVGENTFGKGTVQNAESFSDGSTVKLTIAKWLTPNGDWIHEKGIKPQYKAELPSYAKLPYLDSKKEYKEGSTGDEVKAAQQMLQALGYKLNATGAFDAQTEAAVKAFQKDQKLKTTGILTGETTISLTSKLQDKLSDNDTQLDKAIEILKKEK

SEQ ID NO: 7362 - protein, 236 aa, Bacillus licheniformis
LSDYLDMLASFGVSSAHPGGMSLSKAVLAKAGIDPEQPILDAGCGTAQTAAYLGQLLFPVTALDADPVMIDKARQRFKKEQLSIPAVRSPLEEMPFQSESFACVLTESVLSFTNIRSALQEIRRILKPGGMLVAIEVCLKEGNALTDEAKKEITEFYGFTALYDEDEWVNVLREEGFSKIDIIPVVLEDAGDPDDAVEMDLSPAISDKDYETMEKHLHYLEKYRDSLDHIIFISHL

SEQ ID NO: 7363 - protein, 84 aa, Bacillus licheniformis
VDRYYRFCHQNIGRVARITDKGGRVHVGRIVRVSPSKVYIAPMIRRGGRGFAYGYYGGWWGWGPVYGLALGLIAGVALAGLFFW

SEQ ID NO: 7364 - protein, 273 aa, Bacillus licheniformis
MNGKYKYVTIASLLSAAVLLGTGCTMTEQKQNDTAKTQNTANASKDAKDQKSDSSLEDQDFILESKYFNQIKDVDGLPTIQNPENIMALVNKEYALPGNYAPSDLTVPDVAFSFTEDIDKRYIRKEAAKALEEMFSAAKKEGYELVAVSGYRSYDRQKAIYNNEVSQKGEEKAKEAVAYPGQSEHQTGLAMDISSKSNGFALSEEFGNTKDGQWVEKNAYKYGYIIRYPKNKEDITKYKYEPWHLRYVGKKAAKAIQEHDLTLEEYFKQVKKI

SEQ ID NO: 7365 - protein, 232 aa, Bacillus licheniformis
MSVHIGAEKGQIAETVLLPGDPLRAKYIADTYLENVECYNEVRGMYGFTGTYKGKRVSVQGTGMGVPSISIYVNELIRSYDVKNLIRVGSCGAIRKDVNVRDVILAMTSSTDSQINRVAFGSIDFAPCADFGLLKAAYDAASERNIPVTAGNVFTADQFYNDDSQIEKLAKHGVLAVEMETTALYTLAAKFGRKALSILTVSDHVITGEETTAEERQTTFNDMILLALDTAL

SEQ ID NO: 7366 - protein, 51 aa, Bacillus licheniformis
VNETSLFLHPEIANRNDSFLKVCLSFFKHDKKKNDAESEQGFIFFFRDVGL

SEQ ID NO: 7367 - protein, 335 aa, Bacillus licheniformis
MFRSLNSYLIDFTGLVVIGVLICLVSAGGSLASGLPFQIPASVLQLNTIFISILIEALPFVLIGVLIAGFIQIFVTEEHIRSLFPKNRFSGVIVSCLLGACFPACECGIVPIVRRLVSKGVPIYAGVGFLLTGPLINPIVILSTYMAFGNDLRMAVLRVAVGFAAAVVIAFAISMMFRSSQLKTESRQTAAHCAHSGRPSPFSEKLFDMLKHAVDEFFDMGRFLIIGALVAALVQTYLPLKSLFVFGGGMLDSALVMMGLAYFLSLCSEADAFIGASFTNLFPSSSILAFLVYGPMLDLKNTVMMLHAFKPKFVICLSVLITVVVFVCIKVVSLL

SEQ ID NO: 7368 - protein, 290 aa, Bacillus licheniformis
MVFQLRQFLRALVLAAFSVFIFKLHYTGEIDKLINPKYDYTSLIAAGVFAFLFIIQLTRIWTVKDDRAGDCGCGHDHGESKPFLIRLMHYAVIALPLITGFTLSPAVLNSSVAANKGTMLTKTEIAPQTEGEKEHVMTPEIQQGLADSAMTKSAYDRKMDQFKQEKRIVMNDDMFADYYDEVTSNLDHYIGKEITVKGFVHKEAGLSARQLVLSRFMITHCIADASLIGFLAEWNGAEQLQPDTWIELEGTLGKASYNGSVIPIIRTKRWKEISEPEQPYVYPAAISMTD

SEQ ID NO: 7369 - protein, 43 aa, Bacillus licheniformis
MGKKQRNRVTGLKKNNHIPTKDVIAAEDAHEKEYSARKRKNTT

SEQ ID NO: 7370 - protein, 106 aa, Bacillus licheniformis
LPLMFQLFKKKLIPYDVTIFQTPCFGEDKGYEMVYRTEINGRTHEDVLERTFSTFNVYDTVPNDYKARFLATGDIVLIDEGRKGKTYYKLLSTGWSKINRILLQSS

SEQ ID NO: 7371 - protein, 239 aa, Bacillus licheniformis
METGADLLRFFLYYLPGRGAGCKMFKNNVKEALTFLMYKALFSAAVFVIMAILIRIPAVQSFDVSVIQALESVRHPVLTAVFKALTELGSSGFMLPLMLALTLVLAVYKKAAASLYLYLLFFVERTANEALKGWIARERPAINPLVHERSYSFPSGHSMNAASMYPFIAFLLLLCIPFFQKHSRAVYVWTGLLVGLIGISRMYLGVHYMTDVISGFSLGLALFFIFKKIGEKYPLVRQK

SEQ ID NO: 7372 - protein, 56 aa, Bacillus licheniformis
MKEIELMIDTEEIADFFYLELTRRGYIPNEDELFEIADITFDYLIAKCMIDEHIED

SEQ ID NO: 7373 - protein, 44 aa, Bacillus licheniformis
MIQKTLEALDGEGFDLVLGKVLKAMFALIVFGCFPYFLYLLFII

SEQ ID NO: 7374 - protein, 226 aa, Bacillus licheniformis
MKSNAPKFKVGDVVVVVMYGTVGTITKVHKIDKHFLYEVNHNEVLYFETSLQLYKDYDGVIVDTEKLDIEYEFLIGDVVYVKDYGKELFKITGHRTEIWRYVEDGWEDIIYELTRLKDGEWLETEEEDLTLVLRTYEMDQFVHQLLFVHYVGEAGQELDEPISEKVFLPFSGDYEEQDHERNMAVTVVDELLDIYNDYKVLYEMFQDAEYKDMMEFVLSCLKEYFK

SEQ ID NO: 7375 - protein, 49 aa, Bacillus licheniformis
MSFPKSPVGSNERKKTAVLNNCGFFIALFPKYIVPKPHQMSSLTINNPH

SEQ ID NO: 7376 - protein, 105 aa, Bacillus licheniformis
LPVFLRVSTGFLFVFFQTACIIEHQKRTGGETVKSFYHYLMKYRHPKPKDAISEFANHAYLDHGFPKASTHYDEISSYLELNGDYLSSMTTFDEAWERYISETKR

SEQ ID NO: 7377 - protein, 93 aa, Bacillus licheniformis
MKKCEWCNEEKAAAARTAVYWELPDGTKAIEITDTPAVECEGCGMVYQEDSVTWEIENQLLLIDTKKLPSSVSYDALMKTERILKRNYFDFSS

SEQ ID NO: 7378 - protein, 137 aa, Bacillus licheniformis
VPTFVVDAPGGGGKIAIQPNYLISQSPDKVVLRNFEGVITSYPEPENYVPGRADDYFAEIFPDVMKEKEEIGISAIYADQALSYTPDGLKRLERRESYSKRPDHETLKSRRAKRDELKEKKFLAQQKKEGEAEGHAQ

SEQ ID NO: 7379 - protein, 196 aa, Bacillus licheniformis
LAATNQGKVFEANVEKSAKDQSIFFYRIKDVNPMFLKRGTAVSKNKYDCFIHYKGYLFPVEMKSTKNKSFSFSEKIIKPQQIKYLAEAAKYPYIIPGFLFQFREPENKVYFVHIDEFLTYKHIAENQLEHTYENKVNKSSIPINICEEIGTEVRWMKKKVNYTYYLNKLCDELIKQYGHKTRFEPHTLLKRGGDAY

SEQ ID NO: 7380 - protein, 59 aa, Bacillus licheniformis
MEESNQLESLFNKIQRKLDTAKEAVSGNDYLRANRNLINLANDNEELMYQCRLAMKRVD

SEQ ID NO: 7381 - protein, 149 aa, Bacillus licheniformis
MDVIDEFKGKYYFLSNFYSALVMYQGITYQNNEAAFQAMKVTDKSIHLEFSDLPPNLAKRKGRRVKLRPDWEEVKETYMYEIVKAKFEQNDQLKNRLLQTGESTLIEGNTWGDRVWGACNGIGENKLGKILMRVRKELKEVSHGGKQST

SEQ ID NO: 7382 - protein, 75 aa, Bacillus licheniformis
MAKVYKAEFYITDMSNEFYSVDDLKEKIEESPTFRWALVHVSDVKESEEFEWDDDLKINNIAATTEDLEKYFKGR

SEQ ID NO: 7383 - protein, 118 aa, Bacillus licheniformis
MILKWIENKEKNKLMDELSTFIDNLMGERDSFAEKLRNFKKDEEISKLLKENESLRINSLHTLSEKEREEADAFREEHWKKCKGNTSFLLTGASIGTRVEVICSKCKTQKDITDISVW

SEQ ID NO: 7384 - protein, 56 aa, Bacillus licheniformis
LTVTAWILLIMFGLFALSDLNLTEDETKHIKFFIIMKFVSVFIAAIAAGVIWGGLF

SEQ ID NO: 7385 - protein, 59 aa, Bacillus licheniformis
MSWGISSNAANKEKLKAEMADYLNGLNSTGIMSYEVYSEALSVSMKLLDKMYDLGKFEK

SEQ ID NO: 7386 - protein, 275 aa, Bacillus licheniformis
MKIDYVSDLHINHWIPWSNNQLKWEKRTRKIVNRLISNGNGEVLIIAGDFTEWNQQAIWVLDEVAKQYEKVYFTYGNHDLYLLSKSQKRKYSDSLGRVNDLIKKAADMKNVTPLVKSTDTYKGKVFAGDVMWYLPKGIEGWDFFKGVSNDSNYISINGYSKEDGVRAMWKDSMDWYETLENTHVDVFVSHVPPIHNPYSPFEPNSCYMVDVPFINAKHWICGHEHLQTEFDHEGTGFHMNCIGYPYDYDKYPSVNEIPGNEVDAYKTFEVKTFEI

SEQ ID NO: 7387 - protein, 173 aa, Bacillus licheniformis
MTKYYKVDKSSDLHSDLEYVFHIKGNFLKEMNEEISQAIGIEDAYNKVVYSRSSEPVLFIESKFKNEVEESDLKKHPVCSRDKTFYEFKKRSKPYKAFLKFVKDHDLNNVITRQNLTMVVRFFHNFRGRIEINYFNEEFWIESQEEQYLDYLHEITEADYYEMKLNLAKKKTA

SEQ ID NO: 7388 - protein, 32 aa, Bacillus licheniformis
MARNNNNNELVVPNAQAAIEQMKLEIAQEFGN

SEQ ID NO: 7389 - protein, 157 aa, Bacillus licheniformis
MSEIKKYVRIKRAYSKGAWYANQIGSVFPSLGTWENAYKVNSPDRALYIRQEDAELIVTEKRPAKVGERVLIIDDFNELKYVLHDIVPVIGGGDKHGVAVRKPGEWPIYLNNEQYEVIVNNEIKNEEADGMENKLLTKMLKRFLKRRAINTSAINLV

SEQ ID NO: 7390 - protein, 69 aa, Bacillus licheniformis
MTEKKDYERMKGEIADLRCAVAGLIGENEQLKNALKLIESKSELPEKPVDLVPITELFEINLHAKEALK

SEQ ID NO: 7391 - protein, 121 aa, Bacillus licheniformis
LISEASDTHKIDLAAKKVELEKESEVLQGEILEKERDILRLETEQDKEQLDLLFEMSEVLQQIENKKWVSATIAFKIIRSNPDKYSDLFEMKDGKAYIVNKRFKELEHEFFIIKGELNEVK

SEQ ID NO: 7392 - protein, 283 aa, Bacillus licheniformis
VSNIVNTADTVLKSNLYKILSEGKSDKGQKIRPKWSDDTPAYTLKCFGVLNEYDLQKEFPIATLRPTAFKSGLKEILWIYQDKSNDVQLLEEKYGVKYWRSWANEDGNLGLAYGRQMQYEHKYKEGYFNQIDRLIWDLKNNPYSRRIITNLYNHQDLHGMTLYPCAFLTMWDYDGEFLNMTLVQRSSDYLVAGNINVTQYALLQHMIAQVCGYKPGKFHHYINNLHIYDRHIEQAKEIINRESLAAPKLVMDNSIKNFYDYKPEHFILEGYSPHSQIKLEVAL

SEQ ID NO: 7393 - protein, 95 aa, Bacillus licheniformis
MKKVDEIKQHLEKINKLEQTLVVFEESDELHLDVLHKIQGEFDEISDLALNAFRELTEKIRNVGTKTISNKIKALPNTVQKNVKENMDELINELK

SEQ ID NO: 7394 - protein, 146 aa, Bacillus licheniformis
MQTTQHPIIQGSIKDVGFENKSNFNYTYEVDKEILHVYDTLNHNSTSAINCVEEIIAVLKETLQPNKTGINKIVEAIKNTISSSSPFKKVIIYTEVNNLTKGYKNRGSFLDIQAYDPKQKDFVGWDHEELYQFYYDSQELSFTIKK

SEQ ID NO: 7395 - protein, 144 aa, Bacillus licheniformis
MTLHIKIKYADETQTRISKIEQGDWIDLRAAEDVSIPKDEFKLIPLGVAMELPEGYEAHVVPRSSTYKNFGIIQTNSMGVIDEAYKGDDDFWFFPAYALRDTEIKKGDRICQFRIMEKMPAVELVEVDHLGNKNRGGHGSTGTK

SEQ ID NO: 7396 - protein, 112 aa, Bacillus licheniformis
MSGQISFVSKQLSLQKIKVYLWFAKKLAGTMEIKRQEYFMHMKPRKYYILLEENCIKKGIIDESEWGEYEKELKKKQEAERERFCKKQEERERKKYEELKAKFENQAEPIKD

SEQ ID NO: 7397 - protein, 83 aa, Bacillus licheniformis
MKLIKLEQPSCTPCQLVSNYLKEKGIEFEAIDVTVRPEVAAEYGVMGVPVTILLDGEGKEVKRSSGFKPNELDELIFKIENCK

SEQ ID NO: 7398 - protein, 331 aa, Bacillus licheniformis
MAENNAPYTAANWSQHEDGFTQMFYEQNVKQFWLPEEISLNGDLLTWKYLGANEQDTYMKVLAGLTLLDTEQGNTGMPTIAEHVEGHQRKAVLNFMAMMENAVHAKSYSNIFMTLAPTEKITELFEWVKTNRYLQRKAAIIGGLYNAIEAGDDISLYKAMVASVYLESFLFYSGFYYPLYFYGQGKLMQCGEIINLIIRDEAIHGVYVGLLAQEIYNKKDEGTQHRLEMFALSLIEELYRNEIAYTEELYDQVGLTHDVKKFIRYNGNKALSNLGFDPYFEEEEEINPIVLNGLNTKTKSHDFFSMKGNGYKKATVEPLKDDDFYFEEAPQ

SEQ ID NO: 7399 - protein, 327 aa, Bacillus licheniformis
LIKILELFGGIGAPRKALVNLGVDHKAIDYVEIDEKAVRAYNALYDHRYKPQSVVGYDLRPDVLVHGSPCQDFSRAGQRLGGNDEDKTRSSLMWETLRIIENMGNWKPKYVIWENVKGVLDKDMIHNFNKYLSKMSDLGYTNSFEVLNAMDFGVPQRRERVFTISILGNKAFNFSKLNRKTAQHIKEFLEVNVTAPQYMINIPSMLNRIEEFNPNADEKYRYLDVIEDSCWTISTRQDRCPNAGIIRIGELKYRYLTERECWRLMGFDDSDFEEVLKEYPTKPNKRNATLYKLAGNSIVVQVLESIFEELLKEELKTEVANQSLETI

SEQ ID NO: 7400 - protein, 57 aa, Bacillus licheniformis
MRKVKIEGYVIYNEDELIHGTCVTHGIDHWLFNEDFPREWSFSAVSDEEVDYDEEDE

SEQ ID NO: 7401 - protein, 232 aa, Bacillus licheniformis
MSEARRPHNKLDIDEEFIRKNYYIMSAREIGEVLGVSREAINHRVIKMGLRKTQIPFMKREGEILVPIQELPNYGVTNHSRVVNLKRMTLVKTKIDREGYVKVTLNKNGKAVDRRVHRLVALHFIPNPNNLPQVNHIDGDKSNPSINNLEWVTEKGNAQHALKHGLIRVGEKSPNATITEKQALSILKDFQNGISEVRKAHPYASKSIVDKICQGGNTLIKRLERATTSRKA

SEQ ID NO: 7402 - protein, 131 aa, Bacillus licheniformis
VTYESMTGNVRRFVRKLEQKMQIKTMEITEDLKVDEPFIHITYTIKFGQIPEKTQKFIHNNKDFLYGVCSSGNRNWGSYYAAAADKLSQHYQVPVLLKFELSGSDSDLDKLIQEVKFIDSNQSGAKVGSTE

SEQ ID NO: 7403 - protein, 115 aa, Bacillus licheniformis
MGAAKKLYVKKDQLVSIEEAKSNMTIHTPEGYSVPVAVGELVATNPKGEQYVVPKSYRNKYVEVKQFKDASLYESMAKGYQEMAAINLEEASTGFSAENQAEEITEKFVSGSINE

SEQ ID NO: 7404 - protein, 84 aa, Bacillus licheniformis
MEKWVVVVKPDGETANGEVYNNFVTGEDVTFTDLEAAEKFAAKIEGEGRRMQATVEPLDNHVNTKRVFDDSFVATLEANRASQN

SEQ ID NO: 7405 - protein, 114 aa, Bacillus licheniformis
MDKKYGLYCMGSLVNTYDDAIEAHNDAVFAQEESGVPHEVKEIKETTNLNHFKFKLSEKIQSRSDADFSRVVFEAKRRGNADLYDVTNNMYDEAFIYTKSNVDEYIKNGDWILI

SEQ ID NO: 7406 - protein, 88 aa, Bacillus licheniformis
MKFFEVCDPYYALIKANTKERALKLYTEAVADDDGHLSDAIKEVGMLYAAVKHSRTVTEDQELSPISDVLEELQSDEERVLIMDGSLL

SEQ ID NO: 7407 - protein, 65 aa, Bacillus licheniformis
VIGCRFKHYKGGLYKVIGEVIHTETEEKLVTYEDMDGILWARPKDMFFGKVVVDGKEINRFTKIN

SEQ ID NO: 7408 - protein, 63 aa, Bacillus licheniformis
VAYDEIDGKLINPKVSDVIKALQDQLDFYGDTPVNFRIDGEEARDEIQLDPYKNVLVLHLEEV

SEQ ID NO: 7409 - protein, 106 aa, Bacillus licheniformis
MKIKNVELYRVIENKYLPNDRIGIMEFENCEMYEENQHIFLETNEEAIDYHTLYNYLDKKLFLNVSRNEVERPSVIPVKFKRDVHLAKKVTRLEFEVQEPCNITIS

SEQ ID NO: 7410 - protein, 143 aa, Bacillus licheniformis
MKRVELPNEVGKALKELVETIGEEELYKFENLLCHYKHSNKYEKKTQKQIATIVDFVRDSEKNRVEYYAALTSGFSIKTEPKKEKRSDKETEENCKNEGLAIYIKGKMVWGIPSENLNSNLEALIDGRLLINWSSFKERTFFK

SEQ ID NO: 7411 - protein, 129 aa, Bacillus licheniformis
MFDFKEVRFLNLFSRGKTSTFISGNGKVNINGVTYEGNSITITNNEVLIDGKAVESSVSGVVKVKIEGSPVKVYSDASVEVRGDVLGDVDSGGSVNCGNVKGNVDAGGSVRCGTVGGSVDAGGSVSMRR

SEQ ID NO: 7412 - protein, 39 aa, Bacillus licheniformis
MNVLVLPLLNKFKNLTSLKSNIRFCYDFLDCFNEQVQYC

SEQ ID NO: 7413 - protein, 73 aa, Bacillus licheniformis
MNYICDICKGYTAQPLCVRVSEEKVKTEEDRIEINCCKKCGDEIFYKVKNECRGMNIEKTLNHIGRNYPHKTN

SEQ ID NO: 7414 - protein, 52 aa, Bacillus licheniformis
VDHLDLIEDRLDKLYTYLENTFTHEERRAWKRVEEDLIFSLMKIKEIKNEIW

SEQ ID NO: 7415 - protein, 114 aa, Bacillus licheniformis
MKKFYKGLIVSALSISSLALPALANQASAHEPAQIKQVVKPADAIATVDFHMLRNSNVLLLNGYTRWEIVSGSHLISISPGGVVSSHSSLGTALVYAYDINDNYVIYKITVEPR

SEQ ID NO: 7416 - protein, 195 aa, Bacillus licheniformis
MLIILEGARGTGKSSVAYRLRQRLKHSTLINPTGFHEDGDEGLAKISNYYEGIFDLLYKWKARVSDYTTILDRFFPTEMVFSSLYKEYDFHQKFKSLCQLLPTLDDDIYIFFFTVSNKEVLKERLNRDKIQFGQVEESVEESLKQQDAYYKYINELKEYIDWFKNGSMKIIEIDTAYLSQDDVINFVIRRIKRSE

SEQ ID NO: 7417 - protein, 53 aa, Bacillus licheniformis
VYKVDEKVIVNLSGEKATVKTVDERYHQVEVQYEDGSYEVLGWHKVRGKVDEC

SEQ ID NO: 7418 - protein, 50 aa, Bacillus licheniformis
LRLNQKAFVDEMGTGIVSYIDYENKIVGIEFDGIGYEEYDFEDKDLILLQ

SEQ ID NO: 7419 - protein, 71 aa, Bacillus licheniformis
LPKYWTYNLNDEVEINSNAKYGMPSFVGLKGVIIDKVNSWQYDYDVLHYNGEIGRYKESELNLIHKVSDTY

SEQ ID NO: 7420 - protein, 238 aa, Bacillus licheniformis
MEIFKKLIDSNKLKVYNKYKELQIYSVIFLLGVGSTLGYKMIEEHIQQQKKVSIKEPFYKKPDFIREVKFERQVLPHLETRQEIIEKAQDKYLHIKVEEVKKNKPKSKLKENTKRKVSFKPKQKTQKRPHEQNQAIKMEATAYVPFCDTGCIGTTKTGYDVSNTIYYKGKRVIAVDPSVIPLHSLVKVSYNNDSFEAYAIDTGGDIKGNRIDLLVQSESIARDFGRRNVDVSIITKGS

SEQ ID NO: 7421 - protein, 854 aa, Bacillus licheniformis
VIGCHCHTCKSNIRLLDSTNSVKGLLETALEMNYKGLAITDHEVLSAHLEAIQTVRSMKKEGEMPQDFKLILGNEAYLVDSLEEVRDNYQPGKTKFPHFLMLAVDEKGHEQLRILSSKAWENSFYTGTMERVPTVKKDVEDLLKKDPGHIIATTACLGSEVNIYLQKIMEVEKNDGDPELIKEYKLKIHQFITWCIDVFGKDKFFIELQPALSEEQIYCNKKLVQIADGYGLKRIVTTDAHYLRPEDRAIHQAFLNAKDGEREVDSFYEACFVQNVDEIHERMNYIDKEIVEEAIQNTLLIGEMIEDYTIEHEPIIPKMELPNFKLRHLFKPAYDKYEYIRKMSESKDDQDRYLLKLIEDGFENKLLKNDLTRDEFHKILSRINVELGELWEISQKLNQSMASYYVTVREIINIIWDDECGGDSLVGAARGSAAGFLINYLLDNTQINPMQYDLPHWRHIHKSRPDLPDIDIDTEGSKREKILKALRERFGEKRVLQIATFGTEGSKSALQTACRGLGIDNDISQFLSEMIPFERGSNWPLKHCFYGDAETGRKPIKEFIREVERYPNLKETALKIEGLTNKRSSHAAGVIIFNDKYTKSNAMMKTPNGAYITQFNMGDSEAMGSVKFDLLTIEALDKIRVTLDQLIENEEIQWQGSLKETYNKYIHPDVLEYEDARLWEMAGNGEIMDLFQFSTEVGHQAVIKVQPKNLLEAAVTNSLMRLMSDGEEQPVDTYVKYKNNLSLWYEEMRKYGLSDDAIKVVEKHLKDIYGVADTQEVVMQMVMDKEIAGFDIKESNYLRKSIAKKKEDVLKEVQKLFFKKGKEIGASDNLLNYVWNVQFKRQFGLNDSPYVVNL

SEQ ID NO: 7422 - protein, 234 aa, Bacillus licheniformis
MQKHKQKKSWKTKGVLRPRVNNKSGYVQYCIVHQSKKYYMYAHRLVATYFLEENKNLQVNHKDGDKQNNHKNNLEWVTGKENMRHCFDTGLSNIPKPIVQYTLTGQKIAEYKSESEAARALNIDVRTICNGLINKEGSQACGYQWRYTNDKRKVSNISKSVKFYSRGVIQLTIEGDFVNYFSSITDAYKVLNKTDNGAISQVCKGNRNSFAGYKWVYEQDYKKSVDEDIVYSPI

SEQ ID NO: 7423 - protein, 573 aa, Bacillus licheniformis
LKYKLIGNNDFCFSPLKTILKNRGIEDIEGFLSLSEDAVNHYSNLINIDEAAECLIKHLRKKARIFIQVDSDVDGVTSSSIIINYIKRVFPEANIEWRMHEGKQHGIILETIPEGVDLVLIPDAGSNQFEEHLVLRQKGIDVIVIDHHECDKESKNAIVVNNQLSPKYKNKALTGAGMAYKLCQALDEKLGKNEAKRFIDLVSVGNIADSADSREPETRYYMNQGLKKVRNPLIKELFIKQAYSTKGKKNIQNTQFYINPLINAAIRIGSQDEKDQMMRSLLESNEEIYYKKRGKDEGELVSIHWDTARVLGNIKQRQKKMVDSAVLEIEKRIEEKGLLKNKILIVYIEGILNKNLTGLVANQLAAEYKRPVLLARELEDRTLGGSGRGYDKGAVKNFKQLLEETGKFEFVEGHAEAFGFSITPENLIQVNDILNHKLKDIVINQNEYEVDFEIAADNLTERFIKLINSYQDYWGYKVEEPLLAITDIEINKEDISHIGKKTKNTVKFKVGGIEYMKFKSDEEFYESLINRGDRLVLTVIGRAKVNEYKGKETPQIEIEEMEVVKAKKKVLVF

SEQ ID NO: 7424 - protein, 377 aa, Bacillus licheniformis
LRYDKDKLKESLSIKDIHKILQELGSETYKIDNSGNPIYRTVCHNKTKGSFKLYYYHEKQLFHCYTECGDTFDIYELVIRAKKQQGISFTFIQAIEFVVNVSGKTFGLGFTSSTKNEHIVDDWDWISKFKKRKKIETRLPAYSENVLDVFMKYPHEAWLNEGISHETITDFEIGYYFRNREEGIVIPHRDIAGRLIGIRRRSMIQEDIDNGRKYMPLTVGNMMYNHQTVMNLYGLHKTQKAIKRLKKAMIFESEKSVLKCQDFYGDLNFTCAVCSNNISNFHRDILLSLDVDEVFIALDKFRGIKEGESNDKYKEKLKNYEEKILKLAAKFTPFMRVYVLWDTKGLLDYKDSPADKGKEVLEELMSNKIEIGTREGE

SEQ ID NO: 7425 - protein, 504 aa, Bacillus licheniformis
LLQDKKAIIQVLGSILKEPSLLSDSNKYQITANDFPERFHSILFFAMYNLFHQGTEVINEIEIDGYLRDFDIQYKIFNENNGHDYVEQIQKLAVVENFDYYYTRLKKFSLLREMVGLGFNIDEIYDESIIDPKEQEAMKERFDKTSIEDILSFYEMKIVDIKEKFSTNPESIGIQGGEGVEELLKRLEDSPDIGVPMNSEMLTSIFRGSRKKKFYLRSSMTGGGKTRNMVADACRLSATELYDLKQNKWVKNDFQEKSVVISTEMISEELQSLALAYISGVEEKKILRNTTTEDEKTRVKKAAKVLKESPIWFEHLPDFNIKEIERTIEKNVIRNEVEYVYFDYIHSSVTIFAEMSKKSGVNLREDQILLLMSDKLKGLCNKYDIYMMSATQLNGDWKDAWLRGLQIDATYLRGSKAIADKTDAAMIVLPLSKKEKDAIGAILESGFYPEPNFVTHVFKNRGNEHDKVKVFSHINMGTMRIKDCFVTDVDNKLIQIEKLIIKAG

SEQ ID NO: 7426 - protein, 156 aa, Bacillus licheniformis
MARRVKCPYCETYLDKDDAIPYKKRYYHQHCFDTWKMEAEHRKELIKYICELYKIDAPTGMMLKQIKEFQEEYKYKLKGIELALRYFHETLGNPVREGDGLGIVPFIYEEAKADYLQKKAIKESVEKAKKHKPKERIVVIKKQNRKNIKIVDISTL

SEQ ID NO: 7427 - protein, 323 aa, Bacillus licheniformis
MTIDIFNPQISVVAKGLEGKVITIYGSNNLGKTKQSTRMKKPLYLPFEKGLNAIAGVPFMPINSWGDFKKVNKQLTKNPEKAKEAYQTIIVDEVDAFSKYATRYVCDQYDVDRIKDGNDGFGLWKEYETEIWEEINKLLNVGFTVVFIAHAIEDKDGKIIPKGDKRVLAPVIDNSDIVLFLSSNGVDEDNRVIKSSAWLAETKKFFARSRFDYIDTYIEEFTAENLEKAVIEAIKRQEEAEGIQAVTYEEQKQKNSSEKLDYDQLMEQIIEIGTKLSEEGRLEEVNEVTEKHLGQGARVTECTKKQTDVMSVILDDLKDLLEN

SEQ ID NO: 7428 - protein, 304 aa, Bacillus licheniformis
MSENQTVLREAENKVVLEGLLLEVRHNEWKSGEGLNIELDIETAPNEVHTVTGMSKYKKEDGSENGIAKGYKTIINDYKSVATHGKEEADKVRITQGKIGLNEYYVQDNLKSYPQLSTNFVNRLKSDEEYNPRAKFEVELFVKGVKEEKVKGEETGRVLLEGYIPLYGGKIIPFTFAVTKEGSDYVEKNYEKGNTVKVFGDIINFKEVKVTVQESAFGIDKENITYNTKREFLITGGFEPYDEDDKAAFDEAAVKAALTERELKLEEMKNDTQKSNKNEKKTGFGGKAVTGSSQSIFEDGGLPF

SEQ ID NO: 7429 - protein, 110 aa, Bacillus licheniformis
MKMLKVSEDALNYYRECVKGNKNISEDQARAKLTRNVNLVLAEAPERVLSSGLFSKVYMYHDLHITVRNGKVTKIVNHKRPRFSKKRYIELSKALGIKDIKYYRKHSATR

SEQ ID NO: 7430 - protein, 69 aa, Bacillus licheniformis
MGVFKKIIIGFLLCHVILLTLLYFNLYIIGAFDDWNNTFIYAAIIFSYIPAMALIEYFTLSYIIRRLNF

SEQ ID NO: 7431 - protein, 441 aa, Bacillus licheniformis
LNKKVLVGLTSMALVFSAQTAFAKGGELETEIISNENTITLDWNDTGDKYEVYSDGKLLWKGTDSKYVHKNLKPRSPQEYDIVSYENGKRKDMVSVDTTTLPEQRISTQDVSDEDMPDPLKAEEHIDSTINDNVLTLNLRGKIQDDFDGKIEVYKDDELIDNNAGTTFVDDKVESGKTYVYKFVVLKKLSPAEIEKVNEEFEKRNQKLSFDQFKDYYYRPYEYIKAIKVPEQKENLNSLAWEPPVGPHPNQMGIKYRTFIPTKYAPAASIFSGWIGGDKFGGDNRSFSFSGGSHRTQTEAVARFTSSGSSTYFRKDVNYTRLYDKDGNFKKQQKPTDKNITFTQGKKDKSMNYFVIKHAATVGFNDFGWTTPAIDYTAGVVIYKSGRITVSGTRDQAPSHEMYAYIPYSDAMITLFKASNKGFEYLFPPMPSAKMNIDIKP

SEQ ID NO: 7432 - protein, 50 aa, Bacillus licheniformis
MKRAFEAILYKLIKKDVLNIGILVFIFKICDIWLKIQKTRNKLVFGKVVC

SEQ ID NO: 7433 - protein, 84 aa, Bacillus licheniformis
VSVEQLCGGQCTEETIELVRKKLLQQQRGLLTKKANIEAKIRRLTDLLQLENDKLEKVKCELGKIQCELEELGCLEKAWHEEGF

SEQ ID NO: 7434 - protein, 65 aa, Bacillus licheniformis
LFSLFKPNTCEQCKFYSEYKTADVLQKDKTVTRGKMRYCKKKKDELRDMEKCELFQLRGGKNNFY

SEQ ID NO: 7435 - protein, 80 aa, Bacillus licheniformis
MSGYSQRQICPHCDHAEEEHFENLDQDSDGRVTCHWCGKDYYAMPQYEFLGFEVEKICEDCGEQESECYCEVEVKLSHNF

SEQ ID NO: 7436 - protein, 64 aa, Bacillus licheniformis
MTWIDLVRKYFPDANDKQCDFILWEKTAFPLVLAETVEKQLQEYQMMMFADRRSNRINKEAAEE

SEQ ID NO: 7437 - protein, 62 aa, Bacillus licheniformis
MKMQVTLSPEEVKQIIKNHLEKKFGNVGEVTLEVDRELRGHYTNEHYETVFKGAKCEVEAAE

SEQ ID NO: 7438 - protein, 135 aa, Bacillus licheniformis
MDIIKIRYTFRHKGSGNIEMKWYNIGQLEERAAAKLSPVFLDEYELISRDLYTGLKDENGREIYEKDIAEESYINPMTGKKVIDRYVIEWESGILKMKHIDNQKGADRYLWMRFNEVEVIGDVYRNPELMEAAEE

SEQ ID NO: 7439 - protein, 120 aa, Bacillus licheniformis
MRSNVEINELIQDRLFNGYKKRKITPDECFELLGDIVADELAFDNDGKVVNLKNFAGEMSLALQVVEKLQKGYGLNFYLSREHDFIGLEDWCAAFDEYEAWAEKPEKATCLAALKALKIR

SEQ ID NO: 7440 - protein, 74 aa, Bacillus licheniformis
MHQTSVQLKDVKVLIRGIWTKKKFTEIERGETFMIEEDGVLKKYIARTKPYWDKEFEAFVVDVMDKNKLRRGIR

SEQ ID NO: 7441 - protein, 270 aa, Bacillus licheniformis
LFIAPMLLDSAKEPFDDENYIAELKFDGIRIILSKQDGKIKLYTRHNNEVTNKFPELHDIDIPEGTVLDGEIIVTNSDGMPDFESVMERFQSSKSSHQIVYCVFDVIRLNEISIASNPLFKRKEFLRSLNLNHPNIFVIEGVQGKGKAYFEMAKEKNLEGIVLKKANSPYEINKRSENWIKVINYQYTDVLITGYTKEDIKFLLSYPDGLSAGFMEFMPFDERKYFHSIKQIEYENDDYVFIKPLLCNVKHRFKTKNGKLRIPSFNSWRD

SEQ ID NO: 7442 - protein, 82 aa, Bacillus licheniformis
VFIIQNIETEFYLKHNGSESLEHPYIEVACPGDAEAFSSLKHAKYAVTWYCDMFKKWRIIDVYEGKSYVKNKIFEFVLEEAM

SEQ ID NO: 7443 - protein, 183 aa, Bacillus licheniformis
MTKTNEKIHVLADESLGGIKREYVEVNRKAKLGEKIVIVDADPGYGDHYSNGDFFTVELYTGYGSGVATKCGHHVGNNEYCTLEATNFVYIDGERYEMVERKAEVCEKVIHLNNDKSGGRVREVTNVGVGTIDVIEYEHPDGDITCGFSHGCYRVLVPLSKEKEYQEFEDKKRGYKEVKNFYT

SEQ ID NO: 7444 - protein, 70 aa, Bacillus licheniformis
MDKISEIKECFNEDEIERDDMEWLIEQVEKAAQYKIALKNISDILEGQNVTELIEKIAYELAHSGIYDKE

SEQ ID NO: 7445 - protein, 63 aa, Bacillus licheniformis
MDLVVFKRDVFFENDHSNPIFKKGKEYEILSEDKEFIYVISKPKTNECSQVPKEEEGFIFEYK

SEQ ID NO: 7446 - protein, 46 aa, Bacillus licheniformis
MSGINTKFSYKQLYTLKRALLEYVQRKGITDDDLKSEQDLLLKLTA

SEQ ID NO: 7447 - protein, 114 aa, Bacillus licheniformis
MRKLDKTSELLNILSMYPERELIFMYPNEGSDHPYTLGYPSRILIDSYITLNDRVWLFNEEKDELFEEIADSVAEDLYTEFPLTNDQSAFVDKQAKKKIENLAWKKAIVVYIKY

SEQ ID NO: 7448 - protein, 43 aa, Bacillus licheniformis
LETAWFNLVWFKWHLGADIKVFENCSWKDYIDSKRRGIDELQS

SEQ ID NO: 7449 - protein, 222 aa, Bacillus licheniformis
MVDFKKLSDPEWIKQWEKEKRERERLYEENEALRQKTACFTGHRPDKLGGYDMKNPTMLKLKDKLLEVIEDLITRENKSRFISGGALGTDIAAFWCVHMLKKKHPFIENIVAIPFRNQDKVWSDEQKYWYQRMLESADEIVNVEEVDKYKTDDDNPGEFSLAKMQKRNEYMVDHSQSIVAVYDGGKGGTANCLNYARRCYLGHQIWRLYPKYDFELDISYAY

SEQ ID NO: 7450 - protein, 80 aa, Bacillus licheniformis
MKLRIMKCSDVSYWYKDKIGMYFDVLNRGEVAHSVDHELNTALSKAAVLKEDAIIFEDKNINKVQQLFEKLEFQLKKICL

SEQ ID NO: 7451 - protein, 56 aa, Bacillus licheniformis
MREYLCMQDWGIDSGIYFEKGKKYEGIPSKDGRSVKMFGEVGMVITFHEGSKYFKI

SEQ ID NO: 7452 - protein, 95 aa, Bacillus licheniformis
MIVKKQTKKMVIEVFHNSLDEMWETIKQLEQEGWSGNTRVSVVGMPLFEFKLRNEEEVKKFKELYQTTKVQEPEEDSLFDDCPYVLYTIHEREIE

SEQ ID NO: 7453 - protein, 387 aa, Bacillus licheniformis
LSTMQQQAVESIEDWFKGEGKAPYFLAGYAGTGKTTLVNYVIDKLKIKLSEVAFACYTGKAALVVTQKAQGKYKASTIHSLIYDTYVDKKTGDLTVKKKSKDMLSHLKLIVVDEASMVDGQIMSDLRSFGVKILFIGDTGQLPPVSQNKNEEFLQMFNNPDFTLTEIHRQAAENPIIYLSMLARTKQKIEPGAYGKNGEAVVITHSTWETMKEHFYEKADQIICGYNRTRKHLNSEIRKFLGYESDFPVEGDKMICLKNDWNKNLDGISLVNGMTGYVSKVHQVDAVRGKLKYDSTVIDFQPDFTDDFFDKIIIPNDSLTDDGFKLQPHEHKIYNSFDYGYVITCHKSQGSQWEKVVVIDEVLDRDMHHRWLYTAITRSSEKLVLVV

SEQ ID NO: 7454 - protein, 53 aa, Bacillus licheniformis
MIAAYPTRIEIKDYSKVGLVKRIREKEAAGWECIQPISKRCKEELLPTVSIVG

SEQ ID NO: 7455 - protein, 61 aa, Bacillus licheniformis
VIELELIFKKMGKILDSHTRASKNLKQSDYRRVIGDLHFVIENAQEIVYILNELIREKEEG

SEQ ID NO: 7456 - protein, 58 aa, Bacillus licheniformis
LRVLLECVKAASGIGRFFTEIKIFIFNKINTKNIGKIGLYVFVRHDKTKVAILMINNM

SEQ ID NO: 7457 - protein, 333 aa, Bacillus licheniformis
MELYNDTVKKKFIEQVKKEEQPQLLSIFRKGAELEEYLKKDIYDFNSKEILEFLTLLNRSTLSSIMSCWSHITRYIDWAIYQNITRGTTNLSRDLTIDDVKNCVDEGKKLYITLNELKEILNTLVNPRDRAMLILLFEGVQGFKCSEILNLEKSDIEKALQNDNILTVTDDKHGQRDIKVSDECLKICLEAANEPVYQKKNGYSEAFNKETILADNNFVIRNRRTNSDKDQERSSFFVIINTMRYIFSPEFFDYPYVNPTRINRSGVLYEGFKVYKEKGKLETEDYINIIQKRSERYEDIHKKVYKVKEYMNEEEIKKYYAKELGIEGTIRMR

SEQ ID NO: 7458 - protein, 458 aa, Bacillus licheniformis
MESPVIFDMEADKKLMEELIETKLKIQHDNKLMTAYRQAMMKDKFPPGKAQELFNKLSSPHARLTTGEKYFLAKNLHRITKEERISPENYFPPNRIKDIELNWEGYKTDEVSFPYTFTDVTKIASDNYFFKVKASELFKLYESQLLRYNPKAQRTDRTIHLKEVDDEIPVPELVESSVEAIAQLTEKNDLIKSVLTFNALLGSSEEGIELLFDEEERKITVTKGTRLDVIDGWHRLTGISRAFRRNPNIKDFYLKVDLYNYTMKKARKHFGQQNTINPVAKSKIAEMSENDYLSVVINFIKDNSDIGELIKVNEDSIRKGEPYITTFERCLKGLKRALNTFDYTVENLAEARKLGMYLTDVFNTVFNSYIDDFTNHSFGESKSAITTSPVILGVLALGIKMKLESKSADDVEDVLSNLDFSLDNKLWRELKLVSEDTKLNNNAIKDTFEFFSRLTTEV

SEQ ID NO: 7459 - protein, 364 aa, Bacillus licheniformis
LGAVVQSIRKYRVFDDILAFLKEKDTDSSAGNIKGYNKNKKKKSKYGLHSNTAVNYLSDIKQFFWFYCKTEIEFLKEEHLSFKRSDVLAFKHYLEHNKGAANTTINRKIAALKSLHGELKRLYPDYVEDDPFYNVKRSKEIRRTRANTSQIQAEMICDNMFIYEKQKPLLKKLFGYFLLRSSFRISAALDVRWCDIEVSNENPDWFRVTVIDKGAKLCTTGIHRVFYDQLLELRSDNTKDTDRVFEGLTEDAFRASLKRSLKSLGIPEESGISPHSFKGVGITEVFEATGNDYRAAMKQGNHSNFDTTLRYLNSETDISQTAGIIMDEELDISILQQVTKEEFLDFFEQCDKQTLRKALQFFNR

SEQ ID NO: 7460 - protein, 92 aa, Bacillus licheniformis
LKTKLKIEDDYIIDAIDTFQKGKLHIREQIIHSNSAVDLYYAKLQIDEFFKQINDSIKLIKITCSDLFEKKEMNMAALEILINIREEAKKRI

SEQ ID NO: 7461 - protein, 67 aa, Bacillus licheniformis
MIPCGKQSESNVEYFKLAYESKMKKYGEEWIFAIENKQKQVMREKKEKIRRELTKGYMALLSAQLGE

SEQ ID NO: 7462 - protein, 37 aa, Bacillus licheniformis
MKKLFVGIVVSVSLLAVGIAAAQVNSGFSVAGFTVGA

SEQ ID NO: 7463 - protein, 388 aa, Bacillus licheniformis
VKELELKNFLKNKCEEERGLEKELARIAGYSNSSGFHHFIYNEKKEMDNIQGIIDVIQKISPEYEFDLMSEYIFTLDINKSAARQGLEYLSVNQLYDTLDKHIKKMVSAKNSVSKEWGKVYAAQRELDKGNIGIEECIRLLAEIQPKSSEMKVYSRIIPMYAILPLKQFGRLKDMSDSVLIDTISNQNYVYHSFKSRYMLLLANCFFGNNEIEKAQEYARHGIENSNVKRIIFFSYLTYGSSLMLDDYEKSKSSFLKGLEVGKGNKIYEQHAIRNLCFLENLWGKENQYLNIQSNEIIDRQEVVHYLIRKGSKQQAKKMLDQLDLMEHDDNDLGLHYYLKGLLESSREYFLESVKYFKLSGDKFSCTLPIIELEKLGVEKQILEIISI

SEQ ID NO: 7464 - protein, 35 aa, Bacillus licheniformis
MDGVSNQVEFIYKFTSEEADIPKKIEKRPFSSDES

SEQ ID NO: 7465 - protein, 40 aa, Bacillus licheniformis
VNKWIKEALQSKNLSFTINDNKKLSFVITANLKKENRNKR

SEQ ID NO: 7466 - protein, 120 aa, Bacillus licheniformis
MAVEENSDEVNVTTKLEAENANIQTDMNINQETGEITVTGIRELENGEKEINHYNVLIEEIEGTDFKATFVDQKTGEHYKISTLEAQASIVPAIIVGVVAKFGIKWAIKKYGKKLIIKTI

SEQ ID NO: 7467 - protein, 75 aa, Bacillus licheniformis
VKKTLIRILIFTLVLSGVLPGFASAETIENKIENDTKTVGIEENTNKAYEVNVEKSLGLLLKKILRWLLKKIQMK

SEQ ID NO: 7468 - protein, 220 aa, Bacillus licheniformis
MKRSKIVFLFVSCLFVIFAVGLYLMCIGDISKDRSATSSTNKKEDLMWGYEIIGQEARNNDTEPVKIAILDSGINKSHKEFNNITFYEYNAIAPSKSVKDEYGHGTAIAGIIAAGGEEIKGISQNATLYDVKVLDSSGKGKVKDVVRGINWCIEQKIDIINISFGFEKDYDDLRNAINNALHNNIIITAASGNTLGLTVEYPAKYRGVLSISSFDEKLEN

SEQ ID NO: 7469 - protein, 71 aa, Bacillus licheniformis
MRDDERINRIAGVITQIWEQQHDKSFLQLIETLKSDYIMRQTGYVEKEVFIRDDEFEMFLKEHLNNVIGER

SEQ ID NO: 7470 - protein, 183 aa, Bacillus licheniformis
LTDTILAGIIGATVAGIVPFIIYLLTETKKKQERRLEALYDIHKELESFVFKSDDLKFELERASTFENLIEKIKEINEFFTTHFFDKKRKMTHSALFIDSEVYNQTLDFFEETFKELKQMQTEFAYKKTSSEQPSEKIEQYNKLYLFGLSAIGDNGEKLNDLIKNKTNYYYQKHYPAWKFWLK

SEQ ID NO: 7471 - protein, 468 aa, Bacillus licheniformis
MQDVSVFISYSWTNDELVDWVREELATRLSNDGIEVILDQWDLKEGQDVYLFMESMVNNSEINKVLVICDKGYKLKADSRQGGVGTETQIITPEIYKDAKQEKFIPVIFERDEQGNDFIPTFMSGRKYIDLSGDLFYENYEQLLRIIYERPLHRKPKKGNPPAHLFEDEQINHYKFSFILKQLLIDVSKGKSENAVSKAKQFKNEFIGTLREFSIVDIKHGQLYQEVNNKIDDMLILKNDYVEFIQLLSQYNLLNVEFLIEFFEEFHNTVMEIKAEISSYYDAQFDHFNFLIREIFLYTIASLIKTANYEILGELLHSRFFVFKDFVADGIEGTNFEVFNHYIPSQTDRNNNGLLKLNERLSKGFSKTEIANADVLLYYISALMKENSRLWFPFSYIYLKGKVTLLQKMESTRHFEKVKKIFDVSSKEEFLHKVKNFNNPMKEGYGGFNGSIPDITDNIKLEDICKYR

SEQ ID NO: 7472 - protein, 282 aa, Bacillus licheniformis
MIYRDIIYFNADKIQSILAQLNKGVVESLVETKERNHEVEGIAKTSKVLEFLGFPFSTEGNYRYNNAKGLQEEKILHDFALTELLKILPCKDASKLDRSQLGRNDRVFVKVKGKLSIYDYRDLKDTLEKVGAVAKLINSEEQSKSDLNDFAEFIGSVYSDLMTIEIRNQKEINFIGAVNSDFLRETMRNMVYKYGSKPIGDWEMICQITRLPKNRAGNLEDMFRDFGKDINTENLGKEKSLERFLNEILKEFSKINDMFASVSYPNIAVEPIAVYQEINIKK

SEQ ID NO: 7473 - protein, 39 aa, Bacillus licheniformis
LKILDHIIFISLYLVNTLVSAPLALISSKIDFTSLSFLE

SEQ ID NO: 7474 - protein, 50 aa, Bacillus licheniformis
MIYGYARKSSEIQKPMLLKILKNLIKQAQKKFIAKLLLKAERKSKPSMNL

SEQ ID NO: 7475 - protein, 51 aa, Bacillus licheniformis
MKMDEKRRELQKKYREEIKKKKNHKTYTIETIIVIAIVLLFIALNLIIDEF

SEQ ID NO: 7476 - protein, 150 aa, Bacillus licheniformis
MKLPKVKIEIEWNELNSDKRIEDIEGLMEVNKLNNNDFSYFFELHEDENAVVFVNVSGYDLEEEDIESGIGRVFQTETAIIIKKADNVKLINELRFRGDYNGDMLDELNNLLKDKPVWTLDDFEKAGVKLNVNGYDPFGYSWYDYIDDKK

SEQ ID NO: 7477 - protein, 73 aa, Bacillus licheniformis
MIKVYTIGHEIPKKIKSCISEWNYWNWIVTANTPKKNKDAKEIINKIEPDADKVAVFKNGDVDVYVSYMFPVK

SEQ ID NO: 7478 - protein, 74 aa, Bacillus licheniformis
MVKMITVWYKYDDKRSEAKLNHIEDGWINEDYPKPKDPSYSNQEAWKKSNWERKHAYLDEQYHVLNVPPANWVK

SEQ ID NO: 7479 - protein, 365 aa, Bacillus licheniformis
MTGVLKEKIKSLIELGYEGEYWDLKEKWHDDNGKLVHDILCFANTFHDHDCYIIVGVSDLGEIKGLEEHEKKKQANLIDMLRNISFAGDRPKVFLKSLLIDGKFIDVLIIPNSINVPYFLRKPYRKVKEGYIYTRTGDSNTPINQNSSISTIESLWKKRFGFNKTGLERFSHLLKDKDNWNSNDYGYYHTLSPEYAMKYKFSDSLRETISEFYSYVMYSEHTSVEQIELEVNGTVLKEIELITLDSGRYTTPSPEWGYIKFNFNDVFDFKYFIVDDLRYNLHSFFIDEESEDGMIAYKNFMEVTLTFKNSIEKEDFVNFVYHKEADFKNKLEHESKQYFKTDNEIFQRRIVTARILKQMLEEFRG

SEQ ID NO: 7480 - protein, 61 aa, Bacillus licheniformis
MLRIILNDDQTLLNDPSIGWNLSSIHAINETLNDTGRYDLYTKENGWQCLSANDIKTLQKV

SEQ ID NO: 7481 - protein, 280 aa, Bacillus licheniformis
MSKIKHENIATSSAIRIASIVNEYLYDDDIFSLEDAIDIYDINVVQRMFKPNKKTLLHYFIEMFCDPYEDIDSLHKNLDEEEALKIILPILKEYKQIDNIEGFIFDDFVISERINNDYDQFIKNMQEFITRNNKLIIDHLVHSTFQILFLDRSFLHDFHKKVSEIVKKNIVYLASTYPEHFTVKQRIKRTEYWNTWLEHAIFYRDKGHCVICRTDLTKTLSVTGTVHIDHIIPLELFGSNDSSNLQLLCESCNTSKGARTTETNNMNVPFWNYDYKDKTE

SEQ ID NO: 7482 - protein, 99 aa, Bacillus licheniformis
MDNSSTSVRSLIFSTHIERLKELLFKLHDGSITKEELRELSKIHLECMGMTAHVVGEANEFLLKSDLLPEDDAKEINELLHKIKESKKEKKDFSDQELE

SEQ ID NO: 7483 - protein, 83 aa, Bacillus licheniformis
MRLPIKQCLTNEESGHAVLQFVTNTLPKLKFILRREERRIEKGSVHALDWLIENGGDPAEFDFDNWVDALNEYLNCLYVLVTR

SEQ ID NO: 7484 - protein, 72 aa, Bacillus licheniformis
MNNLEQHLKEQTDAFLIDCFNEIEEWGKSRVLGQGKVRNLYESFNLNITQLHMISQVIYKEMASRFVESKVD

SEQ ID NO: 7485 - protein, 126 aa, Bacillus licheniformis
MDLKEEIVELEEALRKAETNTVRGVLQEAIWDRNSKIEKLRPNGFVLADISLKDGTLLNRCLVFSTNDGIGTDAVSDTEEAESILKNDEEVYLQQEYNDGNFAGDVETNTIESYKLYYENCLSEDS

SEQ ID NO: 7486 - protein, 77 aa, Bacillus licheniformis
MMKPYSTLEDALQDYKNRLQRRKIMLEKLYNKRRDIELTVKEEYKVLMLEAEKRLIEEFLHDLEEIKKEKEKCQCGH

SEQ ID NO: 7487 - protein, 68 aa, Bacillus licheniformis
MTNQFNKSFTEALEELVSGKAGFVQGEFFDKGLYLEFDKTGVLQEVDAKGTFQKNKCDYFHRDAQTKI

SEQ ID NO: 7488 - protein, 68 aa, Bacillus licheniformis
MIRSNLKAIADEAGISISRLSAEINHGKETVRKMYNDDMERFPRELLDKLCKHFNCEPGDLIKFEKDE

SEQ ID NO: 7489 - protein, 70 aa, Bacillus licheniformis
MNLHNNLFHETREQVISYLLTPESCDMVKEWGMQEQVLDELTEGYFEFKKEHHGNINEYISWRIELPYYH

SEQ ID NO: 7490 - protein, 47 aa, Bacillus licheniformis
MELKIIAKTLPAEIKFLADQWGWNDTEVGDKVLYWIAQMKAEKENQI

SEQ ID NO: 7491 - protein, 220 aa, Bacillus licheniformis
LKVLHELLLQKGVPESHIKEMKRILNFREDTFLFYYEQEETICSNIPLSKIKSLGFRGSSGLSWFDHVCGKGVNIDERRCQEAFEHLVKKPLEDFQKFYKQFPVKLIYFEDDDFYAVNGDGTHRTLWAKITGAPAISAEITIARKNYLAYEAFNKDFGATFKFKTLLQNTINIAPEKVESILLLVIRKITESEKIGKYVPEFMRMGLDLYCIEKALVYSK

SEQ ID NO: 7492 - protein, 99 aa, Bacillus licheniformis
MKTNKCALDYLKLKEELEKENMVIETVRSRRNRTQKLTYIYLKSMYIKYFIFVDGEGYYSEGEETCVNVYCGDGDTKYGAWFRNFRELVDELKKINKLG

SEQ ID NO: 7493 - protein, 86 aa, Bacillus licheniformis
MSYGGYFGKLDKKSIVYVLDNEIANLKDEVIGKERDLESLWFKYRKLHQVLYGQGDTLLSNTNKVRFESRLNTVLKKLEKLEGEKK

SEQ ID NO: 7494 - protein, 64 aa, Bacillus licheniformis
MNEMDLIHAFKSMLMVAREYEVKIDEKYEELENILLEEYDLEVVHTVDHDMMDSMEKVYQLLNK

SEQ ID NO: 7495 - protein, 70 aa, Bacillus licheniformis
MTHNEKLLNALMQFKNSAYEIRDLWEQADSITDSDLCDDYPFDNDFCEVVEKIGDWVMTQNSLLNQDKTN

SEQ ID NO: 7496 - protein, 183 aa, Bacillus licheniformis
MTKQYIIKDLQTGDFSHHTTLNDIFEDLVQDYLSNDWTDEEAGENETKFKQYTEDEKIDFVQDEYEYKLIAYPTPQQIAEWEEFTGRKWEEAKEPNRVFVVYTLHIRDRGRGGHTWGIKGLFYDRHEANKKAIAIRNEHIEEWYTSKNDNSYEVYEFMKGLNTSSVESDNSSFEISVTEEYCE

SEQ ID NO: 7497 - protein, 116 aa, Bacillus licheniformis
MRNKKLMEKVNDLGTQNLSTREHSTRVMIQIAIIMKAFGVKRDEINKPVRDYEREIILSDDEIRKEFYSELKFLNRVKEKNDIDKIKEFKNGVHYFIDAVRFFNASLADEFETYVN

SEQ ID NO: 7498 - protein, 94 aa, Bacillus licheniformis
LYKIYILNRLGAIIMAYKWEKECLQKYGKEETFHLIEEQRAYERKHKDNPCNNCGNGNQGAILEYSKGKLKGKPFLMRYGLWSNKRCEYCGRHQ

SEQ ID NO: 7499 - protein, 76 aa, Bacillus licheniformis
MSKVIIYVHGGVPYIEENDTNTSVMIIDWDNEDQQSSLADREENSVIVEVFGGVAECTHKGKGIDVEIIDFDNLTN

SEQ ID NO: 7500 - protein, 36 aa, Bacillus licheniformis
MNNLEKSGFTLTGIGLSARYVGLLGFFIKEKKSIQC

SEQ ID NO: 7501 - protein, 568 aa, Bacillus licheniformis
MALSYYDKRTAKVEIMGELKKRGWKVYGYKQDKSDPMTDYFDPASWDGIAEKDGYIILIDISKYGLGKSGKKVTKKGYTIDHAKIAKLQATINDSAASENEKETSRKIIEKMRQKEEMETVVVSQYPVFKHTNPGRTNWHIEKDGEIIAKGNRAFSFFDWNNKEESQAKLVKFIDGLENKINEQSKLIPVKKQVIKKVVKPVSIDLTIEEAQEGQTYLVIDKPLTYGVQQGYVYKLTRKQTFNGKLSVSFVRMNKKLNKELTGSSNPANTMYFSESNFKRLFEKGCFHFAELKEVEEVTEKTVYVKAKRDTAQKENLLTGESVETTNKAADENVQGTTEKETTVTYTLNEEKNGVEIRFSSKPSEEIREQMKAAGFRWSRYSKRWYAKQSDSTISLAKKLSSNDLNNQKNTFEYPEIDIDDIETYVIDQKIQDREHDAHWIFRTTKRDHTKEIQHLFNSWNDEVKNLIKTTDNKSVIYHLKKDLQRFKKRYYDLYVKYLTLRGNNLSWAVTGRAGRNMNRYNKLVDRENAVMLEFTGIPEEFKNKLSEAKDRIRHTKKEKIQKIGFED

SEQ ID NO: 7502 - protein, 409 aa, Bacillus licheniformis
VKIKVIDSIMGSGKTTFIINMINNSSEDERFIFVTPYLDEVTRIKKSCTNRKFYEPKIHNEEGETLFKLDSLHKYLAEHKDIVTTHALFSMANETTKELIYSGNYTLILDETIEVIKQVKISTDDLHMLFKNNWLINKGGKVYWNTEHEEKTNRKYDGKFRTLKRLALGNNLISYNDHVLFWTFPHEIFNQFKQVYNLTYLFDAHLQKYYFDINNIDYELYSIRRNKESCEMIKYCKAQDKLRKEQLKRLINIYDGDLNKIGDDHFALSKAWFEKKSVIHKKLRNNILNYYQHIIKTKSNNNLWTTFKDHKTKLKGKGYTKGFLPCNIKATNEYSHKTSLVYALNRFVNPVISNYFTSKGVKIDENMYALSEMIQWIWRSAIRNGELINIYVPSRRMRTLLESWLNNEI

SEQ ID NO: 7503 - protein, 288 aa, Bacillus licheniformis
MKGIYQITNKQNGKKYIGSSTNVFKRWEQHVTDLHYGLHHSHLLQKDWKKYSLNDFTFEVLEYVDDKKDLLKIEQMWIDGEEMPNLYNVMLDTSLKRKSAPVDFLNSVFFSDRMDEEIKNKLVKNLNIHEKKGNLSRYGNTKYDYSKLWFNKNSEGVKRLRLNINNYFANQVKTVHNDRAWTTFTQQYKRLSYVGNIKSFVPLTDKLEEDDRRNTLCFAANCFLNPFLKRKYEELKDLTEETYALSVLLKWIADVSNINKPIRIYVASKRMEDILKGWIKQNKKGESL

SEQ ID NO: 7504 - protein, 39 aa, Bacillus licheniformis
MTQKQIFYFNSYDVLKLSNKQWNNDIRKHYIMYNQLKND

SEQ ID NO: 7505 - protein, 92 aa, Bacillus licheniformis
MNTRKQCKKSRKRSLRFIESGKWFKEFAHAKHNKNLNVMALLRFNWGLDDSAKQWAKYRLSVVKGERQETEATQRLKELVNKRRESRKENTQ

SEQ ID NO: 7506 - protein, 110 aa, Bacillus licheniformis
MKKTEWMLNSEYRAMLDFEQRGTVLAGIIENPYASPSGLLSQIYDIVDDHLERYREDSYIYYIMDHWIVYNPIERYLGVYYKEGHHCIYDAREVTQSSDTKTFCNYAFPI

SEQ ID NO: 7507 - protein, 148 aa, Bacillus licheniformis
VKKVLKASVLFGVSMAIFLGFSPQNASAAWSSWQSFDGFKQGCKVRVYTDATTYTRNAKTVDVKAEQNGNCGTIYYNMFLSWKGYPHTGLGENTPTGSFSSVTPLKSITIIRPIGEPSTWGLVYLEMKKSSNGDVIARAQSPQLTFTE

SEQ ID NO: 7508 - protein, 29 aa, Bacillus licheniformis
VAARDLCVIYLGRGDLNRKTSNREGIENE

SEQ ID NO: 7509 - protein, 150 aa, Bacillus licheniformis
MLLHNTEGYTLTKDVQIKENGHTYIKREVLNRALNIGEAAFVGNSRNKIKRLSEEEYMFIRKEPVTSENTVVSKRLLNKLKELIEDEFRDDICLSSEEKVTHVKMIIKRNPWIEDMSFISCPSDMSNEDLHYLLDQIASYITEIELFKTN

SEQ ID NO: 7510 - protein, 925 aa, Bacillus licheniformis
LDNQQFYTYKFNSSRLKEFGYNITLSFQEAQEYNEVITLFDNQILRSIRDIKNEIIDYAYLETLNKEKEHLQKQKHSQEISKRLKEIQSEINEMLFVPEYITIKMDHNSHYRDLHKNGLILNNKRFVRFSSSAGQARVSTVVFIEEETSKRLNEILDNGRDLNKALVPSKFNAYKGLAGSATQVVSAPRFCLVPDYYSDTKVKVNFVTETDFEEDDIIEVKDIVESFNRFDGQGLISYEMAKKWAEELGLDYVPAQWCIRQNFIKGMLNTFPIHEFCEKVNNGNYRIRTSYKDSDGNPKIVDLRDIDVILTESQFKLWDSFPSIEVYENNCEKNNLKWGVSLHSPKKDKDILKMNYQFLQTLNLNHEDIEKICEKFVNWITGVNSGNIYYTILFLLGTDVTDEKITNYIEKSDNHWVKSLILNPDLINDKYIKKKIYDLMKKKIQRGCLGDIILDGNFQTLVSDPYAMMQHVCGLEVTGLLGKREYYSNYWNQKGVKHVDSMRAPLTYRSEHLILNLKQTEDMDYWYRHNYTGIIVNVHGSETMNWAGSDFDYDIIATTSDKTVLKGVYKDELPVAYTPPTSTKKVLTEEDLFNADLFSFGSIIGSITNKSTSGYALLSQLDSDSKEYLTTLNRVKMCTKLQSAQIDKAKIGREVKGIPSRWINYQKIKKDDSENVKTTKEFYNKILLDKHPYFFIYLYKGTKNKYKKHVKTYDITCKQKFGISLQELKKVKRKTKEQHEFLRLFERFNPVIESDCVMNRLCKYIESVDFGIRNIVNKDVDDEIYKIYMNDAVQFDESRYRKVAKAYQKHKKSINQSFSLGASSDADKNLYDSDLCSNFSNSLDLFKQRLNDICSNVYEAVNYLVRLFYVDEKSSNKEILWHLYGQYIFENVKAKQKSFNIPVLDQEGDINYLNKHYSLRKVCLQ

SEQ ID NO: 7511 - protein, 202 aa, Bacillus licheniformis
VLYYKKINSVLNHARKKENILINIDEIDITENELRFIDRLDINHQQKKLCFTLLALAKLYSTVHYIKHGEHSTEHYYGGNNKRYKELIDTSHTSLTANKLHQNIGELATKDIVEIRNKGFIKLSFIYGIDPGGETAIKIRSFDSIGLYYDLHTGQKKVKSCVNCQTPFRFKSNKSKYCPSCASAIAKEKTRARVRKHRNVTL

SEQ ID NO: 7512 - protein, 91 aa, Bacillus licheniformis
MNKKELIGAVAEATELTKKDVELVVDSTFDVITSALKDGEKVKVHGFGSFEVRERAARKGRNLQSGEEIEIPATKAPAFKAAKALKDAIKQ

SEQ ID NO: 7513 - protein, 49 aa, Bacillus licheniformis
LVEFNYDDLEKVILKNAKKHNITITKEQIELFFASEEEYMRSIGLISSE

SEQ ID NO: 7514 - protein, 171 aa, Bacillus licheniformis
MSKIALFEALPLRNTISKRIQELLQERDSVAYLEHDKDEPYTKPTKTIDKITTELEVARKDYRDLVVLMAEANLYAKVVWDEKELSITEALELAQQLRGEANKLKNYGRSKQTERLASYSDVVSYREAMFEPEKMKSKGLKLERMANRLSNAIEKANHNYEIEFEAANKYL

SEQ ID NO: 7515 - protein, 62 aa, Bacillus licheniformis
MAKGRSSKKVNQVNLKGFLDMDLMEITEQIKEDEYTYDLRERLYEFNGTIKEENELPVKEAE

SEQ ID NO: 7516 - protein, 405 aa, Bacillus licheniformis
MIDPIQTKRRPDENLKEWKIRICSNKDVYDLNWEEIKELINKETGENKGESAYRKWFKNFIEGVEYQKEKSVDSNAALIELEMKKLEVMEERKKLQAVKHEFHKESRIKGRTELLYENVSQAIKEIGTLPPPSFQALEKNEKKRAAVLGFGDEHFGKQFKSCNNEYNEQIYLERMNQILSETIEYIKKESLDELVVLNGADSVEGMALRVSQLTALQYGFIDQVIKYSRYKVEWLKELSKYVKIKYIHIPSANHTELRLHNSSRLEMPKEDVERIIATYIHDMLKDNERIEVPLQDEAIVDFKLLEFEIAACHGHQLKNKKNAIRDISQMKRKFYDYLYVSHFHHGNMLTVGEAATHNIQVIQLPSVMGSDDYSDGLMTGAKAGANLSIYESGKGRVIQYDYILN

SEQ ID NO: 7517 - protein, 66 aa, Bacillus licheniformis
MNNMEFVKENINKCLEKLTKLRIDGNHSAYKTVAKALREYIAMFNHPNKDEAEHLSKVIKLVLVER

SEQ ID NO: 7518 - protein, 43 aa, Bacillus licheniformis
MKLRRFLIEKLAGNRPVALNLKVNGTLDADKTKEGLFKNIKCI

SEQ ID NO: 7519 - protein, 45 aa, Bacillus licheniformis
VSSYPFAPFPSLLNFEKLEHWLRVKYYLNHHSCRLYYPVSSGHHL

SEQ ID NO: 7520 - protein, 139 aa, Bacillus licheniformis
VASWLTEKTGVEVTTNGDNLVVPSLSDVDVKESKTSADSSAIQPAGAWDCVIAVGLMIGTVGFPLSKIVKLKKAINLLGGVKKTVDRIYSKYKSLKKQRWRTVDAWKEAVKRTTNNLPKDVGEAFLDFFNISNVIRQCV

SEQ ID NO: 7521 - protein, 75 aa, Bacillus licheniformis
MKKYFPFFLAFLLAFATITPSFASAKEEGEIDAPTGSLESELLSPGSDFVKFLEGIEQLPASVEKQGPIKKWLVG

SEQ ID NO: 7522 - protein, 310 aa, Bacillus licheniformis
MATQKLMCSCCGKAQAFSQFYKSESLFNAATGKLTVCKMCLQTEYKKDPENLTHVQNILRMIDRPFIYDIWIASIDEAKTKSKNGDANVFGVYMKNIGMKDFISKNWSDSEYDFEEEQEHTKKMLLAKSDENVTQEDIDEFIQFWGRGLSIEDYLWLQNEYIDFTNRYECDSKGMELLINQICLTMLDIRKRRENGEKVDQQQKTLQDLLGSSNLKPVQESGASGVEQETFGTLIKKYENERPIPEPEHRWKDPDKIGKYIKVFFLGHLSRMLGIKNDYSNEYWDEMKKHTVEEPVDEEEDEVNENGLIQ

SEQ ID NO: 7523 - protein, 589 aa, Bacillus licheniformis
MASYSNFTTDRKKHSRGINLFNKGKNFNKKSKSERLMDGIGAWASFYRANPHRFVKEYLGITLKLFQCILIYMMVHNHYFMYLASRGQGKTWLTSVYCCVQAILFPGTKIVIASGTKGQAREVIEKIDDLRKESPNLRREIEDLKTSTNDARVEFHNGSWIKIVASNDGARSKRANLLIVDEFRMVDFEIISKVLRKFLTAPRSPKYLEKEEYAHLKERNKEIYLSSCWYKVHWSYNRFVTYFNAMMKGSKYFVCGLPYQIAIKEGLLDKDQVKDEMSEEDFDPIGWSMEMEALWFGESEKAYFKFEDLEKNRKLASPLFPPDYYDLIKDSNFKFENKKPGELRLISNDIAGMAGKDNDASVYTIFRLIPNSNGYDRHIVYMESIVGGHTGSQATRIRQLFEDYACDYIVLDTQSIGLGVYDALCQPLYDKERAKEYEPLSCINDEKMAERCTYQNAEKLIYSIKGNAQLNSEIAVLLKDGFKRGKIKIPINENEGREYLKRFKGYEALPEETKAKFISSYVQITLLINEMINLEAEYSDNGQIKLKEPKSKRKDRYSSVAYGNYVATLLERKLNKQTEYDIDDDLVYF

SEQ ID NO: 7524 - protein, 506 aa, Bacillus licheniformis
MANIKKIDIESEEYQKLLNDYSTYVSTFASGFVSNLFSQGIISEVDAKQLKEYFSNPDKFQKEIEDLAQYFYISTAEIHQLFELIEALPTLNYKIDSFVKSKSSDKHISLLNKSLHRVKHKRLTRDLLKQTATAGTLVGIWLGDEKSPYPFVFDSVEYVFPAFRRNGDWVCLINMEYFSNFKEDYRKELLNSFSPFIKNSDYENFLKDREKYRYKELPQERTFPLRTGTLKRNQGLGTSWVTPGLYDVLHKKKLKDVERAIANKIINAVAVLTIGTDKGKGEYTNLKLPRPVKQKIHSGVKAALEKNNKDGVTVVSIPDFANLEFPDVKADGLDGTKFDHINSDIQSAYGLSGSLLNGDGGNYATSSLNLDTFYKRIGVLMEEVEHEVYQKLFNLILPAGQKDNYYMNYDKDKPLTLKEKMDILIKLNDKGWSIKHVIDNIAGVSWESYLEQTLYETDELNLQDKIKPYQTSYTYTGSEAGHPVVDESTNENTIKSATSNGNSLPD

SEQ ID NO: 7525 - protein, 479 aa, Bacillus licheniformis
LTKEQKKKVFQLQLNEIKKTDDPTKLPCTFIIFDFETSHNNTVISKEVALDASPTIINKPIVAKYHEVEENNTATDALGSHEAYLGTDKHGELEVKTDTTPIGVFTSEGYIMEIDTPEGKKEVLAADAVLWSSRFSDACELLLEWYSRGININTSCEILYSNYSVKDGIEYIETPIYLEGHAILNSEKRGEHDIVLPAYDSSRLVSFNEMQKFEKLVAQAANQEKQKEGEKVDKFKKVFELSHSDIRTLIYNQLDPTLESNEGSYIADVYDTYFIVNIYSWSEDNSYDKYYKINYTKNGDTLTIDLDSKTEVFLKRNWEEVVPEEIQSQLNEKDTTISELSNQFNEIKESKSKLEEQFNAASEKLVQLNSVVEKLKPFKEKHEKAEFEKRAQEKKEFYKLKFEALNAEEKYETEEVQNLILASAKDNEEADKAVLQLNSMLVELVDHATDQDGNFIREMSSKREKLLKDDDSFESRYSS

SEQ ID NO: 7526 - protein, 200 aa, Bacillus licheniformis
MATRLQTALTEVGTHTTGNLNSLKIKTLAHGAKVSGSDIDNFMLVELGFDEEGNRIAKKLSDKKHRAYLIAAPEVRYLGESLTDFYNAEGEHGRIVILEPGYTRFDVSAFSLNEGVKEVKRGQVAHFDIKTEKYVLSDPASPHADFADSSAKFLVVNSEDDLQYTMGQKLVRLEVITGSETGLVPGTSSETQAKAVDIGD

SEQ ID NO: 7527 - protein, 338 aa, Bacillus licheniformis
MKLDTVKIKGLFSRVVNNKMEATDKSDIETYIKKVFGDGTVTPDPSMLHQFNTLVVQQADEIAKPMVTNLITLFANHEQEKPGSLKLIKIPKKNKAKVIWSANGSGVDLVRVEGRENVPAVPYTLSTGFYYEPLDLVTDSVEYFNKLVNDIANAKVRLYLDKIHQLTAAAIAKGKIPPKNVAVGSNLTLQKYNEVASVLQRYGGRPVFVGDSLLIDYFAFQQATDSTYKNLLTDGIKNELLTALNPTTIGRTTAVNLTNPFTDETNSKVELPVNKGYMFAGGVSQKPFSIVEYGGLKQLTEQDIEDERIKMKITQSASVNLLFGEAIGIIEEQAAVSI

SEQ ID NO: 7528 - protein, 156 aa, Bacillus licheniformis
MSDKVKLARYRNTSYFVGYTGDGGLKQFTWSGSKNGKAEIKEVPRDVVDWLTMNSVCFDKGELVIVDEDDSTKQIKESIVDAEAYTNNTHTKEEISKMIKTGNIAQMKNKLEKITVDSEKQFVIDVASEFSDDIPAGKLKALAEWMGVEDPSLLFD

SEQ ID NO: 7529 - protein, 132 aa, Bacillus licheniformis
MTSYDEIWEFFLLNCKTSDINLPTEESLIYKSIRNAVLRFNNRLRDKKLKCNDETETVDRVMNEDELLILVHYLRLIFLINEQTFFQTTWQPFAKDVGVTNYGTQINSLTKSIEKQTADIDRLIMNTEVDYL

SEQ ID NO: 7530 - protein, 76 aa, Bacillus licheniformis
MREKYINEGQAPSSLQEHCIRLSKKNNSVLYKVEQYLNKKMLSDTELAEIREIILDVSAEIVRLGQSLSGDLDERL

SEQ ID NO: 7531 - protein, 219 aa, Bacillus licheniformis
MKDFKNYHQIDVNKKIEHDGKLIFQAGLKGFQSETVSIDEKESVTCLITSKFSNGDGMTKYILGLPEDIYIGGVVKWDTQKWLITTFPSFNKIYKKAEIRLCNSSIQLTTNDKWIDSDKISEVTGKPIKTKVPGEVIEIPCVFERSTSINGTDLAVNLPDGQANITIPNINNDKIKIGLLLSFFGEDYLVNDIDYSKVYGDRGTIKLIAKKKVRGDGSA

SEQ ID NO: 7532 - protein, 176 aa, Bacillus licheniformis
MSNMVEHMTKIFRTLINDSELNRLLYYKDTPLSPDLPDVQDLEGYEVETTVEEDGKVRIIPPIFKTIFKRAPKTDDITESPICRVCMYLGSGLSKPSNQSYLLMDQDLHIDVYTHIETYEENEFRSLKILDRLSELLFNKNIAGFGKALAPKRMLITNPPAGYLGYKMIFTFGAMK

SEQ ID NO: 7533 - protein, 239 aa, Bacillus licheniformis
MNEISQDLFILGIPVDTPIGKCHFLKMKDYNEYAAYLDLIKMSKNEIVYRYSQLNKSGELNNLIEEMKKLPLFDIVNQLPNFNEAYSEVFKKGFQNDTVFELIDRNNFNSIRKLFLEMHCLKEEKISPNPEVQRRIEQSKRLKQQEQEPLEVYDMISSIATFAGISYKEIAEMTLYQMYMTFYRISCFKDYDTAILFATVSPEAGKNIKHWSSHVDLFEEESHALSDEQVKNLKRLFQD

SEQ ID NO: 7534 - protein, 264 aa, Bacillus licheniformis
MTKKTVIHDTADVYWRRKSDGHVISAAEAQLASISQSISEEELKGGIGNRTLYLLRTDKSIDAKVKNAFFDMEFMAMTQGVAIEENKFNVSEREDVTVQVDGTVKLQKTPVGVVSLKNSKGASIQAEYKDEAVTVPDDFAKEGDVLTAVYRIEVTGETVEINSNKFSEMYELEYHTIEYDPDTGVVYSDLYIQFDKVAPSGEFEMSLENGAAYTPELSFKVLAADSSGRYGRFARVPRTKTNTPDIPSPSPDTGTQTKAVDIGD

SEQ ID NO: 7535 - protein, 130 aa, Bacillus licheniformis
MAEQFLNESNGVFTSAENDGTGKPVTAVYLKNNSEENPLYIKGMQGEPGPKGDKGDKGEPGPKGDKGDKGDPAVIEEKSITHEMLGDNIVRSNNIGTGSVLLVNLNSEVKAKFDDLQKQIDELKGGQASN

SEQ ID NO: 7536 - protein, 121 aa, Bacillus licheniformis
VSVCDYKTLPRKVEPQITPFIFHDSVSEPSEGEKLIVGAHRTLTVEITGDCTSREVKFYSVTQDGKKIVLEGINSSNHMFGASTLGIDEIWEFDVAGKTAIQFEISKINGGSLTIKGNAVT

SEQ ID NO: 7537 - protein, 430 aa, Bacillus licheniformis
MDNLSRAQNKENEIKIENLKDRFDFFEKHTVDNKKEVTEKIEEFNELLNSHVINNENPHGVTTQQVTIIKDPTPYQDASYSGDNYPMGISTFPLLQGSVGFPSQYGECLNIKSTKYRFAQLFFHAGNREDSRIYLRHWYPSTGWTEFITVPSSSDVDDALKSAKAYTEAHANDKDNPHAVTKEQVGLSKVDNIKQAAKTEFDTHNTDNTRHITTAERTKWNGGQLYKLTDDNGSRMRIPDGTDLLTLPSGLYYGVSNKVVNSPDPKAVEWFHYDVSTNSARKTIVVTATANPRRWFGTIHTDGSFKGWHRFITDADVSVTWQSPTLLNGWKQYGTHKVQFSKNVLGEVEIIGSITGGTIGFEVPAFTLPAGYRPLQMTHFIGVASSIGTGSAPQFHRTHISTDGNVYIQSCSNTVNPNEFITFGFKFKSA

SEQ ID NO: 7538 - protein, 104 aa, Bacillus licheniformis
MKWLYKYDENFNYLPGEELQIEDDDKTPDFYCDARPPDGLYLPKFDPKKNKWFESAAQEYIDSLQPPEPEPNPIDLLKKQNALLSLQIARLQSEVSELKGGYTS

SEQ ID NO: 7539 - protein, 161 aa, Bacillus licheniformis
MATQKLTLSHIKEDNKKYNEKQRIELNDQYHTYIYPNFDSARIMKMFKSLIRDFTDIKNKKGVKTELSPGDLLYVYTIIEFSDIAEFPKKLTDKLKMFEEIAKSDFASKIYESFPKESLQRIDKTALNVAKIAQQSKEFVDSLEANEDILRKVEELTQEDS

SEQ ID NO: 7540 - protein, 139 aa, Bacillus licheniformis
MATYKDLAILVETEALKAIQQSNSSTKQTLIKTGQEHVETDVYDVYNPLVYERTHELKSSFVTENEANGLSLDNIREDEGRDVATVVETGEGYTYPDTYGYGYGRPRPFMTNTAEALKNGRLIEAVTKDINKLGHKTIK

SEQ ID NO: 7541 - protein, 333 aa, Bacillus licheniformis
MAKEIKQNMIRPRAKKLPDVTDEMWLQVDEEHRNLTEEFLDAHSFRDKTRKQYTSSLRQFFWWVHNSLNGKKLYKITKRDFIRYQSFLKNRGMSSSGIALKKAGVSSLNNYIENVVAEDDDNYKTFRNFTRGLPAIPKTITYEKVKITYEDYQTMMKALEEDENYLGMAWLATAFNVGARRAEIIQFKTEILDYPIPEGQQYVLSHKVFGKGSGEGKVLEYMINTEALKYLKLWHEKRGYDHEYLFTTTYGGQPKQMSETWADYFCSDVLSDILGRRINPHLFKASCITYLLEVKKIKIELVSKYIAQHEDVSTTIKHYDLRDFKEEKNQIFM

SEQ ID NO: 7542 - protein, 225 aa, Bacillus licheniformis
MLKPDFSKFNNLSNNIKASDSEKVWREFLLTSFNFVNHCSYKVNEDELSEITKSLQNWIQRRRFNQYKERNNIVTPQQGEIFLADLGLNFEFAYCHPVLILDEIENKLIVLPVTSSPDKVKDAFHPITNPSGLKRYRRVTPADGFESESAIVMDELRIISKGRLLNKISSLNEDIYLVGSIFQEVIETSFSLLYSLQYQKINDMEQEIAELRDEIKVLKEKNHQV

SEQ ID NO: 7543 - protein, 95 aa, Bacillus licheniformis
VLYFNYQNIGGRPLMNFDPEKFKKLLNSASNPSNPKDTKIKNYYVNQEYQEFVSFDIDFENVDIALRIAGLLGKHATNFTITTLHFPDTNKIDYI

SEQ ID NO: 7544 - protein, 153 aa, Bacillus licheniformis
MFRWWIRKRNKLKKEPEDLGEVLLTWPDEEIQKYIRDYFGYSSNKNKKIELHRIRRLDLDTIILGIARMKEIEESFDNSKTVPSFIAATVFMLTQVFNFYTDDEKFQLIFILVSYFIFFVVIFIIKNGSDHRSRAAQYRSLLEQVKSEKEKAS

SEQ ID NO: 7545 - protein, 152 aa, Bacillus licheniformis
MDSDEYYKKYLEESLIKLKTRDLIEFIKREFPEEVNYNHEIHQKKVEALKSLSKTDLSAAIARLARIQRKFDHTKLWTIGAVFIGTALVNLQILFKVNLTKISEENYINYLMYGITALTVCFVLYRAIRKDKKISDTAAYLKDLIEQVKSDK

SEQ ID NO: 7546 - protein, 246 aa, Bacillus licheniformis
MQDALYLLDEAEQALEDISKLHDKALASEDLQRTLAFKIKNFLAALNSSLDYAAYYIFEVFCLENASAVYDNIEYIKRKIYFPAYKKEKIFEEQVNKHFVGLKEDHNFLYEVFKMPQEFEIGSSWLTDFKKHCNETKHVRLTRNKKLYSGTLDYLSFPEGITMLNNKFEGVGQVLTVNDVPFDPDNPHNHPYINQYEGEFTSYFSFEGSSKPIVKTLEFYLNMVMEIVTNINDYCESQQIKPPKKN

SEQ ID NO: 7547 - protein, 153 aa, Bacillus licheniformis
LMTIGLAVAGGAISLVSALFVQCFQFKNQIKMEEIKVKREYKLKRMDVYNEILKIQNKDYVATINAEEGTCKFNYDIYLNSIKPILYQNYHLLGEKVIEAVKNIEDFLYSRNVAYDRPDITDEEVCTDFLNMINLMENEAKQFRLDLEKVEII

SEQ ID NO: 7548 - protein, 208 aa, Bacillus licheniformis
MLIIAGFIVFFGYALSEGKKQEEKQKEGKKSDRKNLDQYDLDFSPNKSYINPDGKMKIAFNSENELFKIYRVSPNGAIHEVAIPFDKIVDSEILIDDTTVMKASRGQQVAGALIGGAIAGGVGAIIGGSSPNTTGINTVKRIRLKITNEDFENPVYYIDFLPTRDKLNRRINKGWNKEDSTVSYALKKAEYWQGVLELAIRKTNQVAH

SEQ ID NO: 7549 - protein, 73 aa, Bacillus licheniformis
LKFINAKPRLNEILDERGISQLKLSQITGISQSAINRFDRNKQHLDNHLFIISRVLGITIEELFEVEEEEENK

SEQ ID NO: 7550 - protein, 82 aa, Bacillus licheniformis
MLSKKVYGTIMLTVSRQTAASSKCLAILDSYYAISDDRVDLTELTLLHKNGKVLGTVKVHNVKISWDGFKKGENIIGSNIHS

SEQ ID NO: 7551 - protein, 765 aa, Bacillus licheniformis
LAQIYTHEFVRDYFKKHGCELISEFKNVRQKLSYRCVCGEIGTTNFYSFRNSHHKKCNKCVRKKAKKPNKLDFEYVKKFFKENNCELLESMYINSSTKMAYICSCGKKDYKTWNKFRAGQRCKDCAINQSAEKQRADSSYVENFLKEHGFSIADGKYVNTNSKMLLICPCGKPTERTWSSVKQSPKCNCSIHYTKPLKRKFTKEDLINFYWKLKNDLGRYPSLEDLKKNPSCPSPSVYERKFGGWIKFLESIGVMTSDRWYVDDIETLKRMYADYSYEDINDALIKKRSKSTIQHKANSLGLKKSYKAKFGKEKFSNDYLITFLRNFYDKYNRTPVAKDFAENDLNYDTFTKRFGSWNNALKKAGLPINRERSKNLSNNELLKMKEMYEAGVDMRDIAKHFNYTHTAPIYYHLNKMNVNLTRNNRWSEKQIHYLKAHYPNAEWKDLLKNLAPFSKESITTKAYKLGIKRNSNFYTEKEEKILRKFYGKVSFHELLKMLPNRTESSVVSKVNHMGLKIREFWSEEDINMLKKHYQTSTDEELLKMFKDRSWSSIQSMATKNLNLKRTKEYYKNKKEKIRDHLIKELKEYAHALGRTPTSVEVQKNRNLQGISTYIRYFDGYRNACLKAGLDPNQSIFGRSIHCISLNGDVCLSKKEKEITDLFIENNIAYVKEVLYKDILGKNNIPNIKLDWFVNNRVIVEYFGMTDKDYYKKRANYKIEFCKKYDIPLIPLYPDDLTNNYNGLKEKFKTHGINFGNGDEQNEKIP

SEQ ID NO: 7552 - protein, 83 aa, Bacillus licheniformis
MKKYLNHLTLTIAACQTTHGNSEDEAERFTEYDLLDFGEFEELKEITLINFDGDKITLQAFNMGLEIEDTEEIDEEDELLYIK

SEQ ID NO: 7553 - protein, 464 aa, Bacillus licheniformis
LSQQLRIVVTPVADTSAQSVEQINKQLKTLQSKLNSLQLKTNIDASALKTLKEFSSAVETYQKNLKNYNQTVKETQTVIKNADGTTEKTIQQHKKNGEILQREIKTIDNRNQKIRQETQETAKLTSEIQKLGQAQKIIERQNAQGIKTGTTQKNRDGFKDITYNLDQNGNIKNSTTVTNLDQQRKAIEQLRVSLQRLKEQGQLSEVTLSSLGRKINLAQSTEQIEALRVKLKTLDDKSAAVAKTKELERQLELYRRQAQVNTQNLQNRYGSSLSNASNQQLQQYLNSVNQLTARTPNLRNQMASLNMQFREMSSNIAATTRQTMGFVEQLGVAAARIPVWFAGMTMFMGPIRGLQSMVDQVIQIDTLMTEIRRVMDEPDYKFNDMLQEAVEMGDQLSNKISDILQMTSSFGRMGFDETELGSITKTAEVLQNVSNLSVDETVNTLTSAMLNFNVAAEDSISIAD

SEQ ID NO: 7554 - protein, 253 aa, Bacillus licheniformis
MIRESLYFIFGNEKSTDMGVENVNTDGGLVEETFLATSSINETSIKGNDTPFYEGKKRDPKQFNLNFYIKDHWNQKRIANIKRWLDVDTYQPFSFSDNLDIVYYAMPVDANDLVHNASKEGYIRLTMRCDSPYAYSRTITTPWYDASKEDITVEINNKGECTIIPSFKIQKIGKGDVKIENLSYFSSPSVFTDLEDGEMITVTGEKEIVESSIYGDERYDNFNDEYLLLGYGINRIRVTGRCRILFSYRFKYR

SEQ ID NO: 7555 - protein, 879 aa, Bacillus licheniformis
VPLLFQQVTRSFNLRKPKLSLAKANKKKIANLVDISNVNLTLRLGEINELSFAVPLKIEIDKQWVKNPHLKRLKLRRLVKLSAYNFKDEWFIIKTKQKTGADNDLVTFTCMSLGHQLSYRKVRRYEVTSYNMQKVTNDCFANTNWKAGYINPLFNEKFRSFDITSSTKLDFLFKICETFEAVPVFDTIEKKVHFYTEDEVSNYKGMRLKYGQYLDSIEDTEELEEVCTRLYVTGKDDLSINAANPTGQAYIEDFTYFLYPFERDKDRKVITHSYEMSDELCHAILDFNEFIDSQTETFSSLLSRQTEEEKKLSTLNAEKAKLDLEYKIILDKIAVATEAKDPTAELIKERKAKEIEIESKKKEIEEKEKLIKDIQDKITLLKGKLTLESHLNDELKEELAEFINEQEWANDNLYDETDLYEAGLEEMKKRNTPPINITMSIVNFFGILSEHQNWDRLSIGDIVRVQHDRLGIDVKTKVIEMTFDFEANKINLTVSNSKRVETVKEKMVKLVYTVSHINNDYAIRKIDWMNTAENFKIRNDRISAPVAAPTVASDGTAITHELNDNGSVDIVLKWEYPYSDEDKYNIDGFEVYLYSSESSDEYVFGSKMSHEEMVNVKYDKRSYKFTGLASNKYYTVGVRAYRRVDADIERTGIILSDIVQSKHITENPYLPSAIAEVKGRVNGLIQAVSEERPENPDVNTVWINPKTNKQELYDGEKWIEQTVSSADSLNGYSAEIASSPNTIAVRDETGTIDASITGSATQLGGYDASAYVLKSELPSSPQYATGEYIGDGKQSRSIGLNFIPNTVKIYSTSPTDSTLIIQNSLGGYSIENGEIGSYLKGGDKTYGSLNLNYFITGSDSNTRGNKLNVKYIWEAFKQN

SEQ ID NO: 7556 - protein, 265 aa, Bacillus licheniformis
LEDTPRFYNDPILSKKRKGSIDDPYQLYNETQVIYNGKAQLTEVPNREMRVEVSGDGKLWKEIEDGELQDDYFKVDYLNGVVFFNASNEGKSLQFKYSGEGAYYFPGSRIWTERDGNEVTETLDSLTERARKATEESEKATEESKEITKWTRATTSDYENVVENTRKIYLPMVYTYKDLLDTYPNPQIGWTVTIRETGIEYRWDGFDWINISISDKFDGYNVVSSYVEPYNIRTVWLRTNTSPSKKRVKPSKDAPETNLIWIRKE

SEQ ID NO: 7557 - protein, 634 aa, Bacillus licheniformis
MSIPVNTMGYHDEELQKWIPIDAVGLKSENNRYTADDIKSLDDIKIDNDNHVYSSAKERIDSDFLKINEKVDKLDKGVDNKITNLEEIINESSSSLNKKIYFKNALSYGADPTGGKPSAEAIQKALDDIHNEGGGQLFIPGGKYLIEKRMFVYENTRVTMAQNCILLRGWAGGFFANGTPTDKFKGYLGRGNIIIEGGILDGNYANIDKYPTSAMDSIILGHAKNITIDNVTFKDTISAHAIDANGCDNLRITNSKFTGFIDLTGQRNYSEAIQLGEFIEIGLNQFGEFDATPNTNVYIAHNYFGKSKLLGGWGCAIGNHYAVYDVFQSNITIFNNVIEDCGFAGVRTFKWNNVKITNNVFIRNKECVRISQAAGGIESSKNADGVQMNRPQNGQNVLVEGNDFYDYTSSGVVAFGQIYNKEIAWNDEIRISGNYFKIKGQDIGKYNDEQAIKLVFARNIFVNNNKIYGGRRGMWIEGCYNTFISGNGISNVDTEAVYLAKSRDTSSTVTKSYHVSIDRNEINTTGRNGIFVQKCDYFDVRDNNVLNNNKEQSSERGRGGIYVENGYDGRIEGNRIRGVEKEFAILVEAEATEVNVANTKGTGRIIVLGESNFNGYYGTNKDDYIRKITTKSES

SEQ ID NO: 7558 - protein, 362 aa, Bacillus licheniformis
LVKVVKNFVKVNQYTRPGLKLSGVKGIVMHWTATPGASALNERNYFNGTCIADKRYASAHYFVDRNEAQYIIPENEMAYHAHDQNRCFVSFLKPNANQTSISVEMCVEKNGTIHDETVQNAAELVADLCKRFKLSTDKIVRHYDVTNKSCPAPWVSDSSKLAAFRKKVDGLLGNKTVSNSTAPSSKGSSSSTAASCSLKSKVNGLRFYSKPSWEDRDVVGTVNKGYGFPTVVEEVKVGSAYQYKVKNSKGATYYITASDKYVEVSGSLKTASSPSKSTASKSSSGSSSIKSVGKIKIVGVSNAAIVMDKPDRNNSKNIGTIKLGSKIDISGSVKGKNNPKGYWEVIYNGRRGYVSGQFGTRV

SEQ ID NO: 7559 - protein, 95 aa, Bacillus licheniformis
MSRLTTLMEQQIEINKDAQKQSREQFVTLTEMNNSLKNLSKSYEKLDNRVGILEQSDSNRKIDPGQFGKDLMYKVLPTVIATLVGAWLLIHFGLK

SEQ ID NO: 7560 - protein, 84 aa, Bacillus licheniformis
MNKINWKVRLKKKTFLVTIFSATLLFVQTIASAFGYDITVYSAALTEKFNAILTLLVALGIVVDPTTKGISDSNQAMEYEEPRQ

SEQ ID NO: 7561 - protein, 99 aa, Bacillus licheniformis
MKTTVTYSPYPSNFSEVHINTGEEKSIKLSLVASPPDIPPQNDSEDTEENAVEISSAILADPSLRMEINDGISTEELMTLNKEDAKVLVQVLRDFLKQM

SEQ ID NO: 7562 - protein, 368 aa, Bacillus licheniformis
LTTTEIAYEEVANKINQWYTMIKKREIEDAIKLKDEIDCLLDDMEENQNLLLYYNLLDARHKMSVDMFKSSGEILEKIRKSPEMQKTDDMLQYYFLFFSGQYMFFKKKYIDAINYYKLAEDKLVKIEDEIEKAEFYYHLAISYYYIDQYFFSLAYAEKALTIFREFEDYAHRSISSEMILGANKLDLFHYESAYEHYSHALKFAKAKQIPESEGKAYHNLGILYIRRNMLSEAKDCFKNALQLQDYIQSINGLKSIYNLTHVLYKSGQIEEAREWYDKGLKRAEKEGDKEYLAKLTLVNTLYDEYNESVLTNSLDILEKLDLWNDVAELTLEVGCYYKKSDDIKNAAKYLEKCIHARDQILKVTEELK

SEQ ID NO: 7563 - protein, 419 aa, Bacillus licheniformis
MNSDTVWQRNFTFLFCSKLVKITADCFAVNTILWFLIFEGKGAIGTALLLAVSFLPQALLGPIITPLMKVDTLKFWMFFADITRALLMLAIPICYFSGFSPLWFILLLMLIHSATGASYNPASVSLIPKIVKGNLIQKANAVMQSSEHIVRLVGVTVCGVTIVAIGAARAMLITLPLYLLSASIVLFIKYKIKGADESESDRPKQKGTYFKKLKRGFTLVRSHHILFPLAIYCVFSNLASAPWEALSAVYIAEELGGDPIIHSLLKVTTAGGAFLLGYILAKVKVNRYGLLFVTAGIVEGIAFFVTGMNSLLPLVFLAALALGATISAINVPEHTIIQISVDDEDQPQVYSVISMISYVMIPLGAIVGGYAATVFGSGRVIAVGGIVEIIAGIAILLFTKLGKAQRIDMIREKEGNLKA

SEQ ID NO: 7564 - protein, 117 aa, Bacillus licheniformis
MRPIISDELANAIHKKIIIDLCIYAMETRVNKAELIKNKKLIGYYERKLKKLLSMRKRINSYLKNENTKIQEVVICDDMFVEYPYYIRTEEGGIKEGTSRYWKAALKLHMKRMLEGL

SEQ ID NO: 7565 - protein, 160 aa, Bacillus licheniformis
MFNEREALRLRLEQLNDKEIIVMRELREEREGIYSKLRELDKNQSNPPQVRESSSLMDLVSAAAQELKQSKSSSPRIQTNNASQPFNKSITSIQREAALKILSMHKEGIRGAGLRKEIEKETGMKVKNMTTFMSGLMKHHPEIKKPGRGHYVIKREKSFE

SEQ ID NO: 7566 - protein, 152 aa, Bacillus licheniformis
MVYSKVEKFIKKNDSKHATPHDFTGGISEEKIKKIENDLQTTLPESYKWFLRNYGSGGSFGVEILGHGLVSPEVVEFTKDYRELYDLPNHIVVIVDVDAFAYCLDTQKMDNGECPVVTWIYQSGYDHQKASNFLEFLWEYLNQAKEDWYEEE

SEQ ID NO: 7567 - protein, 140 aa, Bacillus licheniformis
MNKQISKMINEYIEEGDFVGAVTNEDITNAENQLRCKFPQEYKEFIKSYGSGGICGVEVLGVEGDGYASVVEATERFRNFGLPEKYLVIENVDEFVYCLNTEENHCVIRWDDISKKEIERYSSFDEYLQDSFQEAIDNWE

SEQ ID NO: 7568 - protein, 88 aa, Bacillus licheniformis
GLSNKEQKGRAPYAVDKNGVESQIELHHILQKEAGNMVEIIATTHDEYKKILHGLIKNGDSFRNNEILDKQFNNFRRKYWVWRSQNLD

SEQ ID NO: 7569 - protein, 157 aa, Bacillus licheniformis
MDENKLNPLYQKIAETIVETIPEEWSRVFIYGEITEDVRKGFFYYYPKGQDTPVHGHDIPELFNIGRSDYRNLWRELLDNLEELWNEFRNNDHEPWTSLTMMIQNDGELNIDYNYDDLSDANDHKRRILWKHKYLGLWPKNQDDKVFLEQHLESNKR

SEQ ID NO: 7570 - protein, 682 aa, Bacillus licheniformis
MKTLDVQALHKAIDQTLKQLKQQSDEFAQVKKSVEDIVSLNDALKGKGGDAIRAFYKECHTPFLQFYDTFIEEYSSTLKKMKSAMNALEPNQNGFISQSFLEHQLENGLNAADRTTKHLVSKANATIAKVSHIVDLPDLNDSDFHEQNRKALKEINQTIEKLHTFDREQTSALKTAENDLETMQRYITRLEKMYTGPKIEIASYQKGSILKPDEMDALRGGQDTAMGVMLDKLDKRSKLEKEVSEVSKQDNKIAKLKKKLENVIDPDEFVEIAKEIGIENLTEKQQYYYFYTINRKRKQSGIMGRIKQGIEEGIEDVAVDTVTGIRDTITNPKETLEGIAYTVTHPVETFEIIKKDIEDSFVRDVINGDAESRARWFTYATGMVASSIVGTKGVDKVSKLAKAGKMGKAASKVKDVSKKTASKGIKSAKKAGKKAADKVVRDFKDIKNLLPKVQIASPQLAMANVGKVPFNTMDGSRLKNKLIQQTKKISDQAKQARNRMVSILTGGSSKTKTDIKVDSKTIHKVKYGDHFTRVKRRKVLKPNIEYTTPVGYTYKTDHKGRITNVRGKLNLGAAKRNKYAQRIVGREDRLKTDEGGHLIASIFEGSGKLDNLVPMDGNLNKGEWKKLENMWSQELGNGKTVEVEIHPVYKGDSQRPTSFDIDYRIDNEDWVFVEFKNKPGGK

SEQ ID NO: 7571 - protein, 184 aa, Bacillus licheniformis
LTSFVQNTVNGLKSLLDQNGVIRILGSEGEITDTLVTFSDSGASQRDIRAFETHHQLSLPDDYKKFLTLHNGARIFDSLLDGVNIGGGLHLFNLKEIDTELKDEEFYADVNGIPIGHLLEECDLMIDKDKLKDKDPNYLYLLEDGLEYKPLHLNFEIFLDRYVMCQGQPFWEWRYYTAENYYRT

SEQ ID NO: 7572 - protein, 329 aa, Bacillus licheniformis
MKKFVQSMLLSLLVLVALFGFEALGAKAASTDKEDGVTSVSKEILKFEVDKNKNAKLVDIEEVNTEKQIEKADQISKNFNHDYLYHSDYSAVKNNTVNLYPSEQQKTSSHKVQGKVPGFVEVQVETLLKEKTRTVTTVIKIVRVMGEKPVYINASHDLFASRYYNGKYVKVLDHKKKFTLIEIKPGAASSKSFKVGAASYYKREYSAIVVWKDSPPSYDAQTSSPFLANKIANLYPYVKNSHNKEVMGAPADAQMKVVPEDQREKRDSNLRNKFITWYTKQYGNPKWNWSGYEIHHVIPLQYGGSNHMSNLFPLQKNVHKKVTRWWRNK

SEQ ID NO: 7573 - protein, 522 aa, Bacillus licheniformis
MKRTFDHIKHVAIYLRISQEKRGENVETLENHRQILFEFCKENGYTYEEYGEVISGGKSEIEQRKELQRLLEDIEKFDAILCFELTRLSRNGLISQTVKQYCIDYDKPILTPYQSYDLANSETDRLLYDVGSMISSHEHGTIGKRSKANKKQMSKAGLHVSGNVPFGYRRNNETKKLEIYEEEAKVVRYIFKLHSEGLGSFKIRDILNSEGYKSATGKAFELPTIKRIIKNPTYKGTIVFNDRKKVKKNGKFVYEPVETIRVENAHPAIIPPDEWDRANRERLNRAKQAAVIREKPASTTGTTMLKDLIYCGVCGRKMRIFFDDRSSTGYVIQRCYHLYNGEKCPNRGIKLELVEKEVAKALPNFKSLLKKSVQRLQQEKEAGVETDIKRKIKQQERKLKDLNDQQDKLIDLALKGIFNEEEIRNKKQGLIDEIKYTESAIADLKEKMSNIDINDHINSLMNIIELIEKLPNMEPEEVNQSLKTFISKIVYTRVLPPELLNKSTRNKQRKEYPFEIEIEFIE

SEQ ID NO: 7574 - protein, 342 aa, Bacillus licheniformis
MENGLFKPKRHWKDIELWKDVPEEKWNDWIWQLTNTVRTLEDLKKVVNLTKEEEEGVRISTKTIPLNITPYYASLMNPDDPRCPIRMQSVPLAEEMHKTKYDLEDPLHEDEDSPVPGLTHRYPDRVLFLVTNQCSMYCRYCTRRRFSGQIGMGVPKKQLDQAIGYIRDTPDVRDVLISGGDGLLINDQILEYILKNLRAIPHVEIIRIGTRAPVVFPQRITDKLCSILKKYHPVWLNTHFNTSIEITKEAKEACEKLVNAGVPVGNQAVILAGINDSVSIMKKLMHDLVKIRVRPYYIYQCDLSEGIGHFRAPVSKGLEIIEGLRGHTSGYAVPTAFFYFMC

SEQ ID NO: 7575 - protein, 277 aa, Bacillus licheniformis
MVKKWSNDSCTLEADVDLFSKRIRIVNYEGNVCSFFPDILKEAKKHDIGKIIIFTKTTDRDALLERTFEPEGKIDGYFNGHDADVFVKYVKEDRRKTADWLMQDQMLAELFSTPRIAEIQNASFKIRRAVSVDAPVLADLYNSVFPVYPAPVSDSAYLKEAMGKGAVYYLAFDGEKVIASAGADVNPALGNAEITDCAVLPEYRGFSLTRRLIAELETDLKQSGIFCVFSIARAASFGMNASLYHLSYSYRGRLLNNCLIYRSIENMNIWCKNLSRS

SEQ ID NO: 7576 - protein, 422 aa, Bacillus licheniformis
MENIERKVCDWIDSHEQKAIRLLKKLVGEKSTMGREFNAQAVVLEKLRQFEAEIDVWEPSIKQLEQHPLFKSDRTSFKESPNIAAVKKGKGGGKSLILNGHIDVVPEGNRKDWETEPFQPVVKQGRIYGRGTTDMKGGNTALLIAMEALEQCGVQLKGDLIFQSVVDEECGGAGTLAAVMRGYKADGALIPEPTNMKMFIKQQGSMWFRITVKGLSAHGGTRYEGVSAIEKSMLVIQSLRQLEQVRNKRITDSLYDNIPIPVPINIGTINGGAWPSSVADTVTLEGRCGIAPNESPEAVQSELENWLNDLQYHDEWFKHYPVDIEWFGAMWLPNDLAEDHELTKVLKSAYQTITAEAPLIEASPWATDGGILSHAGGTPVIVFGPGETKMAHQANEYIEKDALIQSAKIISLFIMNWCDYER

SEQ ID NO: 7577 - protein, 217 aa, Bacillus licheniformis
MGLGVIERERIAKRAAREIKSGMIVNLGIGIPSLVPNFLDPGTSVMIQSENGLLGIGGSPEKGKEDENLCNAAGWPVTVVKGASYFDSALSFGMIRKGAIDVTILGSLQVSQSGDLANWIVPGKKVPGMGGAMELAQKAKKVIVVMSHTDKNSAPKLVADCTLPLTAKGCVDMVITEKAVITIDSGGFVLQELMNEEDLDDVLRLTEGKIRIDGPLS

SEQ ID NO: 7578 - protein, 230 aa, Bacillus licheniformis
MTMPNKRIAVEDAIADLKDEATVMFGGFGGVGSPPSFIRAILKKGVKNLTVICNDAGFPGIGIGPLIVNNRVRRLIASHIGSNPVAGKQMTDGFLAVEFSPQGTLAERIRAGGTGLGGILTDIGIDNDMVRQGKNIVSLNGRAYLAEEALSAEYAFIYGKTADEFGNIIYDKTARNMNPLMAMAADRTFAEVERIVPIGELDEEEIVTPGVFVEGVAETEGVNWKWVWES

SEQ ID NO: 7579 - protein, 446 aa, Bacillus licheniformis
MSFLIKPDLHASYPVVQYAKGSWIVDHSGKRYLDGCSGAVTCNLGHGVQEVIEPLKEQLDAVSFVYRSQFTSEPAEQLAELLAEWLPGDLNWSFFVNSGSEAVETAMKIAVQYWQEKGQNDKTIFLSRWNSYHGITNGALSLSGFYERRYRFTHMLHKYPAASAPNCYRCRLSHPECQEACVKEIELAVKRIGKQFIAGFVAEPVIGAAGAAITAPAGYYKKVKEICEDNEILFIADEVMSGIGRTGRMLAIEHWGVTPDIAVLGKGLSAGYSPIAAAVMSDGMMETVKNGSGAIMSGHTYSANPFSARAALAVLRYILKHDLVKQAEIKGEKLKRMLKEVMKQSSIIGDVRGKGLLLGIEFVADQKSKKTFPSSMPVSALVISEAKKRGLLLYPSQAGIDGGGGDAVIIAPPLTISDKEMEELIEIFKHAVYEIEKQAEKVMRER

SEQ ID NO: 7580 - protein, 411 aa, Bacillus licheniformis
LKYAWVIKGDFFRLWSGTFLSLFSSVLFYYSLVWWSLSETGSALSGSVVIGIGLTVSILVSPFTGWLSDRFHRGKLIAASDMIISAVFLMIGFLALSGMNSVFLLAASRVIVSACLTAIEPAARSLLPDTLRKEQIEKGIAFQEVLTQLIQVIVPLVTGVLFSFLHFGWLWVLCGSLSFLSIFLEWRIKDERGSQKRIPFTNKQLFSGFTSLYQNKPLKYLLYGTSIQQLVFSGFPIYIVIWTSLLLKDQAWLGGAFQSFWACGTLCAALFLSFIAKPEHAKAAVPALMLIFGLLLSPLGWIDHVVLGAVNLIVIGMISGVVNIYIEGYLQRVTEGENRGRSLGAFFAVNSSFMPLGYAAAGMLSEAVSPEYLFLIVALPAPFAAFSMMRSFYLWEKQTKETVALQDETSI

SEQ ID NO: 7581 - protein, 42 aa, Bacillus licheniformis
VHYSHYCCPTGGYGYGFHGRNTFVLIVVLFILLIIVGAAFIC

SEQ ID NO: 7582 - protein, 256 aa, Bacillus licheniformis
VTSISNTEDRYLMLTCSKKIESHYHIYTDEEIPQMFSSHFLQLQDDFPLTELYSLLVRTPEILKRNYVHVKSSYKRDLPFTMKKSLFDLGYILDEELFYSIRLADWKGDSPGVRAEWGTEKSLIDGCRMMQAYDTLSINEAFAKEKLLRKYPFYEEGIIQLCVCYSEEGEPIGCAELYLDHDENVAKIEEVAILEPYQRKGYGSGLIKQMLTAAKQSGMESCYLVTSGSDQVKTFYEKLGFQQKEKLTTIFKYLFV

SEQ ID NO: 7583 - protein, 47 aa, Bacillus licheniformis
MSNCLNARNPERKAEESSMQDDPFFKGSSFFRGFSALKAKKHYNRSS

SEQ ID NO: 7584 - protein, 151 aa, Bacillus licheniformis
MTNNKEERLKQLTRMQYEVTQKNGTELPFQNEYWDLHEDGIYVDIVSGKPLFSSLDKFDAHCGWPSFTKPVDAGEIEEKLDTSHGMIRTEVRSKSADSHLGHVFPDGPGPDGLRYCINSAALRFVPKDDLEKEGYGEYVKLFERKKSGEES

SEQ ID NO: 7585 - protein, 181 aa, Bacillus licheniformis
MAEKRELATFAGGCFWCMVKPFDEQPGILKVESGYTGGHTENPTYEEVCSNTTGHREAVQITFDPDVFPYEKLLELYWQQIDPTDSGGQFADRGESYRTAIFYHNDKQRKLAEESKKKLGESGIFKDPIATDILEAGPFYPAEEYHQDYHKKHPERYTQYRIGSGREGFLQQHWGRKHDEQ

SEQ ID NO: 7586 - protein, 144 aa, Bacillus licheniformis
LKVREQMMYDMEALLRTVFKQIRDEINELLEKEMSRNEFMILRLLSEQGPKKVTEFATILGVSASHITAVTDALVEKGWITRVRSKEDRRIIKIHLTDAGKEIIRYFEEKKTEYYFKRFSSYSDEELKTLIELFSKLDKKREQR

SEQ ID NO: 7587 - protein, 83 aa, Bacillus licheniformis
MTAPYLCPNCKTNRTRFNLIEQSPTSVKIDPATGEIVETYSDDELSPFHLPYSGPAIKVQCGACGLIEDEKTFIKLAEFDKRT

SEQ ID NO: 7588 - protein, 362 aa, Bacillus licheniformis
MFLIDLFLNLCILITSLFIYTQLKWNIFSRKATNKQLDWIDGILGGVLGNVLMFFSIQATDETIVDLRYVPVMILFLFTGAFPAFICSLLIIGGRFVYGTNTSSIAALIGMIVIFAGYYLILRIMDKDAGTYRKTFALVIFANVAISIVILMILHDFFLMKMLLTWFWILSTIGGFTSVYIVSYLRKSHFLLKKYEEESSIDYLTGLNNVRQFDAIWNAYISNAKEKNEKLSLLLIDIDYFKTINDTYGHSNGDAILKELGTILKKSARSEDIVSRNGGEEFSVILPNCSHSQAAEIAERVRKEVETHTFFISHSKKIHITVSIGVAAFPEVIHSTGELIEKADQCLYRAKHLGRNRVCTSV

SEQ ID NO: 7589 - protein, 433 aa, Bacillus licheniformis
MKTDFTYGNVFKQLVYFSGPIILANLLQISFQFVDSLWVGNLLGAKALGAAAVSGTVFFTVLSFVLGVNNAALTILAQQKGKGDKKGLASYVNAFVVLMTAMSVLLGVIGYFFTEPLLSLLQTPGNMMDLAVSYLRIHFIGIIFLFGYNFISTVLRAVGDSQTPLRFVLLAVILNLFMDPLFISVFNLGIAGAAYATVVSQGIAFIYGVVYTVRKQLVPFSKPALPSLAETSVILKLGVPAGLQMMVISGGSMAIMSVVNSFGESVVSGFGAVQRLDSLLILPAMAIGTAVNSMAGQTFGSGDMERTKKIANYGVIYVLLFMAAVSTAIFLTGYHAVRLFISEADSAAFGEEYLKTIAFFYPFIGINFVLNGVVRAAGERDFFLGFALSVYISIFKVAWRERHSAGHRNELYAEQPDRLFILPLREVEAPRSI

SEQ ID NO: 7590 - protein, 234 aa, Bacillus licheniformis
MFSAVHNARYMAEGFQGSRYDVLPAEAPFYFRNSGKAVMIRLLHAAPHTDNLDVFVNGISVFRNVSYTDLSSYVRFPAGRIQIDVFRRGWANGPLLTVQYHLIHGRYCTVAVTGTAAKLVPVGMYDQPAADPESRSIRCVHLSPDSPALDFAVQNGPVLFSGVPFQSVTRYIPVRSQKMDVELRGAGSTAVLLKAPRITLHAGESTTLYGLGFVNGSPSLEIKAAPFPVKAPPS

SEQ ID NO: 7591 - protein, 66 aa, Bacillus licheniformis
MERIYTYFSLLSMLFSLYFGGLAAFSFVDENMDKMYLNIGYCALFLSIMIFTLDAKKHKKTDHHNQ

SEQ ID NO: 7592 - protein, 43 aa, Bacillus licheniformis
MLKNNAQYPMFKYILSMFSSTKLKAARPPKYSENNIDNKLKYV

SEQ ID NO: 7593 - protein, 190 aa, Bacillus licheniformis
MKKWKSLFLILAAVNVMILAGIFILISLPGGQKEPPRPTPSEYQLNVTSTKDSLAAFINTYLEKESSPDLDYQIEIDDEFHIVGAIRAFSSTVDARVSFRPTVEKNGDVVLDVTRFSIGKLNVPISMVLNYMDQFYDLPDFVHVRSDAREIQVRLSEMPLKNGMYVKAKDIDLEKDQIEFVYYKPAQTDS

SEQ ID NO: 7594 - protein, 250 aa, Bacillus licheniformis
LNIRFITVMMALVCLLSACTEWNAGVEKTSVSPKRDIVIAAVGDSLTEGVGDQEKKGYVGMVADELESRSDVKSVTVKNYAVKGSRTDQLLERLKDKEVQEGLKDADYILFTIGGNDLMKVVRQNFAHLTLTPFRAEQKLFEKRFSNILAEIREQNASAELIYVSMYNPFKFTLSELREVDQVVDEWNEGAEKRLKKVSNTKMADIADIFEEYSDEKKIAEDEFHPNQYGYSLIAKRVYEQIKNEDLPAE

SEQ ID NO: 7595 - protein, 51 aa, Bacillus licheniformis
MKSSPILRRWKTVDKNGRPAAKACFLNTGKQAFFYIGQMIFKRIKTWYTFF

SEQ ID NO: 7596 - protein, 193 aa, Bacillus licheniformis
LKNVFGIFLAGILTVFLSSCGTSKIDNPLNYDVQSFSFQNQDGKAVTLESLKGQVWVADFIFTNCETICPPMTSHMAELQKQMEEENLQARIVSFSVDPENDTPEKLKKFAANYPLSFQNWDFLTGYSQEEIEKFALKSFKSIVKKPEDEDQVIHQSSFYLVDQNGKVVKDYDGARNTPYDEIIADIKTLENR

SEQ ID NO: 7597 - protein, 280 aa, Bacillus licheniformis
LTSIKIVTDSTADLSEELLRKYHISVLPLSISIDGTVYRDRFDIQPDEFIEKMESAAELPKSSQPPLGAFIELYEELTADGSEVISIHLSSELSGTYQTAVSASNMVGGNITVIDSMYISKGLGFQVVRAALLAEEGMTAEAIVKDLENLRDRTSLYVTIDHFDNLIKGGRIGRGKALLGSLLKVKPIARLEDGIYTPEKNVRSSSQLIRYLTGQFVSAVKGRTVQAIGIAHADALDLAHRLKDSLLEHIPGIDIDIDYTTPIISVHTGKGAIGFTFYTD

SEQ ID NO: 7598 - protein, 52 aa, Bacillus licheniformis
MHKYLWHSLPAHEESLIRFKRAEDGIRRQRIFHADLASLENTPFEPTGCEGN

SEQ ID NO: 7599 - protein, 83 aa, Bacillus licheniformis
LLLKSLEFKRSDGQKVKVTEIPLLKEDDPHFFMANLRLEIFLKTLYCSKTEKNVYSFRDYLKRALKWQDYLAIYQQDELKHNA

SEQ ID NO: 7600 - protein, 422 aa, Bacillus licheniformis
MKPLLKENSLIQVKDILKAHQNVKDVVIHTPLQKNERLSERYDCNVYLKREDLQVVRSFKLRGAYYKMKQLSKETTKNGVVCASAGNHAQGVAFSCKHLGIHGKIFMPSTTPRQKISQVELFGKEYVEIILTGDTFDDAYQSAVACCEEEKRAFIHPFDDPAVMAGQGTVAVEILNDIETEPHYLFASVGGGGLLSGVGTYMKNVSPDTKLIAVEPKGAPALFESNKKGEVVILEKIDKFVDGAAVQKIGEETFKTLETVVDDILLVPEGKVCTAILELYNQCAIVAEPAGALPIAALDLYRDEIKGKNVVCIVSGGNNDIGRMQEIKDRSMMYEGLQHYFIVNFPQRAGALREFLDEVLGPTDDITRFEYTKKNNKSSGPALVGIELKQREDYEPLIARMDRKGFRYVEVNKDEGLFHLLI

SEQ ID NO: 7601 - protein, 333 aa, Bacillus licheniformis
MIKHTYPSVGFSELIGECDSFLQTKNRAIQFAASSHPILIHGETGTGKELFAKAIHSGSSFKDDPFTHVSCSTLDEDETAEDFFLSELNEPGTLFLDEVWGLSLHLQGRLLAAIEKGMQKRLITSSSMPLIERIDSSEFRKDLYYRLNVLDLPLPSLSERRSDIPLLVHHFLKSGDHDIYVEPVVWKALEQHEFEGNVRELKNMTDYMITVSDGKTIQLYDTPPSLREQIKKKKPKDKKTASASLTLMEKEEFAFLLDAIKQLNEKGEPASRRVLSELSKSGKSELTPQQVRSRLDYLEKREFITKGRGRAGTKITLEGLRFLSSLKHHIIQD

SEQ ID NO: 7602 - protein, 213 aa, Bacillus licheniformis
MYTIKEEIANAITHGLGVLLSIPAIVFLVIFAIRYGSPVDVVSFSIFGASMLFLYLSSTLLHSIQHQKTKDILEIIDHSAIYVLIAGTYTPLLLGPLKGALGYTMLAVVWGLAIGGVVFKIFFVKRFIVVSTLVYLVMGWMAIIAIKPLYTALTGEGFALLLLGGILYSVGTIFYLWRKIPYHHAIWHTFVLGGSASMFFCVLFYVAKVPFVS

SEQ ID NO: 7603 - protein, 108 aa, Bacillus licheniformis
MLRYCFLWIYSAYMLIKHIKLLQALQTLDPRLSYANQMEAVFDKPKAFLRGCIGLTGSTVSIHQNGRSPAGPCFMCTQSSACQSLPCCLDTLTKPLRFLLIRAPFVIR

SEQ ID NO: 7604 - protein, 162 aa, Bacillus licheniformis
MISLIAAMDRNRLIGKDNDLPWHLPQDLKYFKEVTKGHAVIMGRKTFESIGRPLPHRENIIVTSNKELDIPNCQVMHSAEEAVRFAKNRNEECFVIGGSTLYTEILPFADKLYVTKIDETFEGDRYFPEFSEAEWEIVSRRKGLKDDKNPYDYEFLVYQRKG

SEQ ID NO: 7605 - protein, 90 aa, Bacillus licheniformis
LRKAAERLARPRHQAGFLCGIFYAFLEKCLVFERLNKIHYKRMKKIETSCGYVPSYVRKPELNKTGNETNAFGRPDQNENLEERFLSSQL

SEQ ID NO: 7606 - protein, 182 aa, Bacillus licheniformis
MKKYTMNEMVHLTKNMLNERGVAIEDIALIVQKLQEKYHPDLPLDVCIENVEKVLNKREIVHAVLTGIALDQLAEKKLLPEPLQYLVETDEPLYGIDEIIPLSIVNVYGSIGLTNFGYLDKEKFGIIKELDDCPDDEVHTFLDDIVAALAAAAASRIAHSHQDLEDEVQEERTDGQSVAKSR

SEQ ID NO: 7607 - protein, 200 aa, Bacillus licheniformis
MKMWMRKALVALFTIATFGLVSPPAALMADKPQEHQSVKESGYTAVYQKQEEPELDEDGESKSSFDTYRDELLNEAEDLSFVKFGSRISPVIEDEYREEVLPKIEEIIVSHLMTMQDNDAYQDLVISKTPTAGKSERIFHVYNRKTGEDVLRFHVRRDKPPHKGYWFNFHYHTAEDGFQKHHDLGSIYWDRNTPPNWMSH

SEQ ID NO: 7608 - protein, 24 aa, Bacillus licheniformis
MVEGLFIAASLITLAYFIVMEIAD

SEQ ID NO: 7609 - protein, 256 aa, Bacillus licheniformis
MIVTTSYRPTESTILTAEKISRTLGARFSERRKRPIRQIRQTEQDDVLVVGKERFELYHSEGEKFFFHPNSAMFRAKRMLRGEPDPFVEAAQVEPGDKVLDCTLGLGSDAIIASLAAGEQGEVRGIEKSPLLAFLVEAGLQSWETGLDVLDQAMKRIRVHSGDSIDYLLELDDASADIVYFDPMFDDGIKESDGIAPLRKWAHSEFTLDGALHEALRVARKRVVLKDHWKSPRFEKYGFSVKKRKTALFHYGVLEK

SEQ ID NO: 7610 - protein, 144 aa, Bacillus licheniformis
MSTAYEEYMRQLVLPMRQELVQAGFKELTTAEEVETFMEDAEGTTFVVVNSVCGCAAGLARPAAVQAVSGSEKGPDETVTVFAGQDREATAKMREYFEGYEPSSPSMALLKGKEVVHFIPREQIEGREMTEIMKNITDAFEKHC

SEQ ID NO: 7611 - protein, 558 aa, Bacillus licheniformis
MTGLRSDMITKGIDRAPHRSLLRAAGVKEEDFGKPFIAVCNSYIDIVPGHVHLQEFGKIVKEAIREAGGVPFEFNTIGVDDGIAMGHIGMRYSLPSREIIADSVETVVSAHWFDGMVCIPNCDKITPGMIMAAMRINIPTVFVSGGPMEAGRTSDGRKISLSSVFEGVGAYQSGKIDEKGLEELEQFGCPTCGSCSGMFTANSMNCLSEALGIAMPGNGTILATSPDRREFAKQSARQLMELIKSDIKPRDIVTEKAIDNAFALDMALGGSTNTILHTLAIANEAGVDYSLERINEVAARVPHLSKLAPASDVFIEDLHEAGGVSAVLNELSKKEGALHLDTLTVTGKTLGENIAGREVKDYEVIHPIDQPFSEQGGLAVLFGNLAPDGAIIKTGGVQDGITRHEGPAVVFDSQEEALDGIINRKVKAGDVVIIRYEGPKGGPGMPEMLAPTSQIVGMGLGPKVALITDGRFSGASRGLSIGHVSPEAAEGGPLAFVENGDHIVVDIEKRILNIEISDEEWEKRKANWPGFEPKVKTGYLARYSKLVTSANTGGIMKI

SEQ ID NO: 7612 - protein, 378 aa, Bacillus licheniformis
MKIKSIEPTPSPNTMKVILTEELPGGKSNNYKKDHAEGAPPVIQEVLNIDGVKGVYHVADFIAVERNARFDWKDILPKVRAAFGMDEAEEAEGRSEEKESFGEVKVFVQMFSGIPMQVKLTDGEREERFGLPERFQEAILKLKTASSNVVLERSWKEQGVRFGDFSEIGREVTEELEAAYDEERLRKLTESAASSDAEAKRTAVQRKSYRVTLEMMDEEDWQKRYAHLEQMDPTEEDIPVLEKALNDPKTSIRRLAVVYLGMIETPAVLPLLYKALEDKTITVRRTAGDCLSDIGNPEAIPAMIKALKDPSKLVRWRAAMFLYEVGDESALPALKEAENDPEFEVSLQIKMAIERIEYGEEAKGSVWKQMTESRKKDS

SEQ ID NO: 7613 - protein, 223 aa, Bacillus licheniformis
MAGLNQEQTEQIRLMSEWVKEKLSAEGTGHDWLHTERVRNVSLQIAKEEGADLFMTEACALLHDVIDEKLSDEHRVPLQELKRRLSEEWKVDPETVDGIFAIITRISFRDREKYKDELLSKEGMAVQDADRLDAIGAVGIARALMYAGAKGHLLYGGGNAPTAVGHFYEKLLLLKDLMNTKTGRMLAEKRHKLMLEFLGELENECAFSRESRLDRSGLGVMVE

SEQ ID NO: 7614 - protein, 159 aa, Bacillus licheniformis
MSIYDISVKTIKGEDTTLRPYKGKVLLIVNTASKCGFTPQYQQLQDLYETYKDRGLEILGFPSNQFMNQEPGDEKSIEEFCSVNYGVTFPMFSKVNVKGDQIHPLFRHLTNKAKGMLGTKAVKWNFTKFLVDQTGENVVRFSPQTNPKEMEETIQKWLG

SEQ ID NO: 7615 - protein, 561 aa, Bacillus licheniformis
LQMKSHLSDIEIAQRTELKPITEIARKLNINDEEIECFGCTKAKISLKIFERLKEKPDGQVILVTSINPTPAGEGKSTVTVGLSQALWQIGKKSIVAMREPSLGPTMGLKGGAAGGGYSQVLPMEDINLHFTGDMHAITAANNALAAFIDNHIHQGNELNIDIRKIVWKRALDLNDRALRETVVGLGGKANGFPREDGFDITVASEIMAVLCLARDLADLKKRLASMIVAYTVDGQPVTAGMLGVQGALALLLKDAIKPNLVQTVEGTPALVHGGPFANIAHGANSLIATKTAAKLADYVVTEAGFGADLGAEKFMHIKTRAGGFTPGAVVIVATVRALKMHGGTPLADLKQKDLEALKRGIANLAKHIETIDAFGLPYVVAVNRFVQDTEDELEAVLGWCRDNGHPAALCNVWEEGGKGGTDLAREVIHVMEQKDNRFSYLYELTDSIEDKLAKISRTVYGAEGVEFTEKAKKQLLELKKNGLDGLPVCVAKTQYSLSDDPGKIGRPQDFSITVRELKPSRGAGFIVALTGSILTMPGLPKHPAALKMDVDESGRAKGLF

SEQ ID NO: 7616 - protein, 302 aa, Bacillus licheniformis
LPINIPINLPAKQILESENIFVMDEKRAFHQDIRPLNIVILNLMPQKIKTETQLLRMLGNSPLQVYFTFLIPSTHTPKHTPRQHLEQFYTTFSSIRDRKFDGMIITGAPIEHLEYEEVSYWEELREILDWSKTHVTSTLHICWGAQAGLYHHYGIRKVKLPKKTFGVFEHRIMEKNERLVRGFEEFYYVPHSRHTDINMDDLKAVSHLKVLSISDEAGVCLIASKDEKQVFLTGHPEYDTDTLKEEYERDLARNMEIDPPVNYFKEGPDGAVPVNRWKAHATLLFMNWLNYYVYQETPYEWK

SEQ ID NO: 7617 - protein, 383 aa, Bacillus licheniformis
LNTNKNILILTANYGNGHVQVAKTLYQECERLGFKNVTVSNLYQESNPIVSEITQYLYLKSFSIGKQFYRLFYYGVDKIYNKRKFNIYFKMGNKRLDQLVKKHQPDIIINTFPMIVVPEYRRRMGKVIPTFNVMTDFCLHKIWVHEHIDKYYVATDYVKEKLLEIGTHPSNVKITGIPIRRQFEEEMDKDKIYEKYQLSPDKKILLIMAGAHGVLKNVKELCESLVTKEDVQVVVVCGKNTMLKSSLEDIEALYPNKLRTLGYIERIDELFRVADCMITKPGGITLTEATAIGVPVILYKPVPGQEKENALFFEDRGAAIVVNRHEEILESVSSLLADEKKLNEMKKNIKSLHLSNSSEVILTDIIEQSEIIMNKKQTVRALS

SEQ ID NO: 7618 - protein, 229 aa, Bacillus licheniformis
MNRYSVDEFVSKTQQEDKGEGLFEMETPRLLEVNLDGKVWAKAGSMVSYRGRVKFKREGVFEHGIGRMVKKVFSGEGAALMKAEGNGKVYLADQGKKISILNLKDDSIFVNGHDLLAFEPSIHWDIKLMKRISGMLAGGLFNIKLEGTGMAAITSHYEPLTLIVTPESPVYTDPNATVAWSGSLQPEFVTDVSFKTFIGRGSGESIQMKFSGNGFVVVQPFEEVYYSES

SEQ ID NO: 7619 - protein, 66 aa, Bacillus licheniformis
MQNGKVKWFNNEKGFGFIEVEGGDDVFVHFTAIEGEGYKSLEEGQEVSFEIVEGNRGPQASNVVKL

SEQ ID NO: 7620 - protein, 60 aa, Bacillus licheniformis
VESNELQTVLHKTFVEVYKDLEQLVDIAKKGRPSLEKNIEEIEQRLKQNILAIEIQLKIK

SEQ ID NO: 7621 - protein, 88 aa, Bacillus licheniformis
MKSDHRDDLETGFNQRKQLEIAVETAQKTTGMATRQKSSTLLKSAYQSIEDARQLSQAEELAALDEDFLNEQLNILNDCQHQLDESQH

SEQ ID NO: 7622 - protein, 61 aa, Bacillus licheniformis
LDKKEIFKELTHLQDTYCEGCFIKKHFRKEYGKTYAHAFCISKCTVGEKLRTYGDVLTNKN

SEQ ID NO: 7623 - protein, 219 aa, Bacillus licheniformis
VKLRAGMKIKIKGSSPIQFTADEWIEVKEAVAAGRQLSQSPYVTELEFEDEKGSFWTLKELEKLKEELAAEPDEITVYFDGSYDKESQLAGLGIVIYYSLGGERYRLRKNKSFRLTTNNEAEYAALYEAVKELRDLGASRNSVVIKGDSLVVLNQLEGSWPCYDPVHSKWLDRIESQLQKLKLTPTYIQISRKDNKEADQLAKKMLEHTIVESTIKLDE

SEQ ID NO: 7624 - protein, 233 aa, Bacillus licheniformis
LFNEILWISFAIINFIIVLFFFKRFGKTGLFVWIGFATAAANIEVVKTVELFGLTATLGNILYGSVFFATDVINERYGKEEAKKAVSIGFFILITLTLVMQGALLFKPHPEDIAQPALETIFGFLPRVALGSLLAYIISQTLDVYVYSGIRRLFPSDRALWLRNSGSTALSQLLDTLIFTSVAFMSAYPLDVWIQIFITTYVLKFVVAVFAAPYAYAAKRITPLDERSENNAG

SEQ ID NO: 7625 - protein, 132 aa, Bacillus licheniformis
MPVEVYIDGASAGDPGPSGLGIFIKDGQKTESFSLPAGSLSNHEAEFMALIEGMKLCAERNYRIVSFRTDSQIVERTADSEFVKNQAFKPYLDAIIRLKKDFDLFFIKWIPSKSNQAADKLAKKAILLNQPE

SEQ ID NO: 7626 - protein, 48 aa, Bacillus licheniformis
VEKQHSAGRGRLTGGVTPQGDIVLNRDNRHTDPKTELENRAKKSNTKH

SEQ ID NO: 7627 - protein, 295 aa, Bacillus licheniformis
MNKKLLLVDGMALLFRSFFATAVHRNFMLNDKGVPTNGVHGFLKHLLTAASAFEPSHVICCWDMGSKTYRNDLFKDYKANRSEPPLELIPQFDMAKEAAEELGILNIGLAGYEADDCIGTLTAMFSEEADITIVTGDKDLLQLLTVNVKVALLQKGIGNYKVYTEESFSEETGIEPKALIDIKALMGDTSDNYPGVKGIGEKTAYKLIKEYSTVDRLLENIGQLTKGQQTKITECLEDLKMSRILAEIKCDVPLSCSLDDADFTLMHDRAKEMLRLHQIRGIEPLLMKFEKREIG

SEQ ID NO: 7628 - protein, 49 aa, Bacillus licheniformis
MGRTKLGNANAQRNNNAKKKNGFNTEFATESYSQMEAAKLISSKKQHQK

SEQ ID NO: 7629 - protein, 89 aa, Bacillus licheniformis
MTNVHEAITAHSKKQHQHIKQFVRLEQEREKAIDDVVDKCRRNEAFSTDLINQITVQMNELAKKGIVPTRRLVSKEMVAEYVSRKYPQA

SEQ ID NO: 7630 - protein, 1187 aa, Bacillus licheniformis
MAQINTKDDLMKRAGAVFGELTKNGDDKRSAQLAGIIRKWLRKEVYIALTGHYSAGKSSLLNALLQEDVLPTSPIPTSANLVLVRRGEMKTTLHTVDGRYAQMDDSYDKEKVQAYCRDGSQIEMVEIGGPFSGIAPQAVLIDTPGIDSTDDAHFLSAYSILHQADALFYVVHYNHVHSEENVKFLRSIKDKIPNIFFIVNQIDRHDEAETDFHAYKKQVLDMLLKEGISEEHLFFTSVTAADHPLNEFNRLRAELERLQHQSEQQLQAYTEQKISSLIHEHIKMLISDEDTALSEETASLRETVDTLKSQLADLTEQEKRAEEQIKKDIQTIAQNANITPFEMRELAKSYLESIEKGFKKGILFSKAKTLEEKQKRKEAFLADVQKRVQAEIDWHVIEAIKAFMKCFNVQNDEMLREVLQFRTVIDENDLLRSRKKGAELTPEYVLNYTKELAENIRRKAKRQAQPLIDQLKTFIKERSVLQAEAIKAEYDAEQAKLAERERRLIEQQKSYEKANRLWDQWEHGNQSDLPANWYAAERKPLEKTLDAKRAEPVRAQGENSSRKDEALHPKKGVSESIEHFFELARILADIPALEKQRKAFLHKTERLHTRQFTLALFGAFSSGKSSFANALCGRKVLPSSPTPTTATINKITKPSGIKRDGTAEVAFKTEGEITAELDQLLDGKMASAKGSAFGEKLKNLLKKEELHDDERLLIKNFLKAYKRYGSYINDQEILTISADDLHPYVAEEQTACAVREVTVYLSTPVTEKGITIVDTPGASSMNKRHTELAFQYMKDADALLYLTYYQHSFSKADRSFLRKLGLIKDAFSMDKMFFILNAADLAKSPVELQTVEDYVRGELLKEGIQNPHLYHVSSKQELNKKTSPYNDFSRLKRELDDFIENGLARTAVEELLDEGKKLCETVFQLRGSLHRSAEEKEAEQKRVAKAYQEALAAIEEAEKGSSILQMTEKDVEEQFYHMKQRLAFFAHDLFKAAIHPGLQNGDWRANLQTALKSCLKEYEFEFLQELKALDIRMENLMLKFAGEQWANAVKERLAGNPYFSVHIQADRPETESWETTEASADEGEFTDELKMFKTPKTFFQQNGKARLVEAFTAKLSAITDNWIQREKQTFLNRCKTSAGQLQKAAVLSAKAQLEEQKEAYFHEALESAERENIEKAHALAGEWLRSC

SEQ ID NO: 7631 - protein, 31 aa, Bacillus licheniformis
MTMFFLLAAVSTYSLLIGYVLKGIAGANLQK

SEQ ID NO: 7632 - protein, 115 aa, Bacillus licheniformis
MFWTILSIFAAQRLLELAVAKFNEKKRSERGSGRIRETSLPLHRRDACFVFRIFDLGNDRFSTRNPSDGACRIDRPHLHAGSPVLGALFTGEMLEHENPCHPWNESCPKGALSMD

SEQ ID NO: 7633 - protein, 365 aa, Bacillus licheniformis
MAYVISAGTSIPRCHVDQKEAAVFAREMFKDSFKDIDRLLSAFQNGEIASRQFVMPLDWYKEAKSFKEKNQTYIDMAVRHSAEAVSNCLSDDRFLKKEIPCGKIDAIFFISSTGISTPSIEAKLMNILPFSKRAKRIPIWGLGCAGGASGIARAFEYCKAFPKSHVLVIAAELCSLTFQKDDQSKSNLIGTSLFGDGIAALLMCGKEADFSEARFEVLPEVLGSQSSTLEDSEEVMGWEINDNGFRVVFSRDIPTLIKTHLKNDIEAFLNKEHIALENIQVFLAHPGGKKVLDAYMEILGFSEAHIDCSRKILARHGNMSSATVMHVLKEYCLHGGPVPGKYGLLGALGPGFSSELLLLRWTKRE

SEQ ID NO: 7634 - protein, 183 aa, Bacillus licheniformis
METVNELVERIRTKDGGEAVIRPVKMADAPDIIEAVKDVIQTGVYIQKERPRTLEEERAFISDMMKKDNMYAAVEIDGTVYGIARVIRGELKMKRHTGLFRTWLHSKAQGLGIGREIMSYTLKWCRLHRLHKLCLTVFSENEAALSLYKKSGFIVEGVQKEQVLSDGKYEDEVLMAYFFNGST

SEQ ID NO: 7635 - protein, 438 aa, Bacillus licheniformis
MKLTAGKTVSLSIQHVLAMYAGAVVVPLIVGGALGLTPAQLTYLVSADILMCGVATLLQVWKNRFFGIGLPVVLGCTFTAVSPMISIASTYGIPAIYGSIIAGGVIVVIISFFFGKLVKFFPPVVTGSVVTVIGITLIPVAMNNMAGGEGSSDFGELSNLALAFSVLLVIVLLYRFTSGFIKSISILIGLIAGTAGAALMGKVDITEVANAGWVQMIHPFYFGAPVFEVTPILTMSLVLIVSLVESTGVYFALGDLTDRRLTEKDLGKGYRAEGIAVLLGGVFNAFPYTAYSQNVGLVQLTGVKKNSVIALAGAFLILLGLFPKAAALTTIIPKPVLGGAMVAMFGMVIAYGIKMLSRVDFGKQENLLIVACSIGIGLGVTVVPQMFQNLPDAVKLLTENGIVAGSFTAILLNAIFHIHPFSRHAEQPEAVSAEKSAV

SEQ ID NO: 7636 - protein, 194 aa, Bacillus licheniformis
MEKLKRKIAEQGTVLSDEVLKVDSFLNHQIDPELMLAVGEEFASLFREEGVTKIVTIESSGIAPAVMAGLKLGVPVVFARKRQPLTLTENLLTASVYSFTKKTESTVAVSASHLSKDDKVLIIDDFLANGQAAKGLVSIIEQAGAKVCGIGIVIEKSFQTGREELENLGIRVESLARIASLAGGKVTFLQEVGS

SEQ ID NO: 7637 - protein, 42 aa, Bacillus licheniformis
MKRDKTKKDEPAHIFSFERSYLTDNSDPKTPPIQTGGVFFYK

SEQ ID NO: 7638 - protein, 500 aa, Bacillus licheniformis
MSINTYEKEFLETLKKISRYEQAINVMYWDMRTGAPRKGEESRAEAIGQLSADVFQMRTSPRMKELLDTLAGQKQDLPFDTQKAVEEAKKEYDLNSKIPEEEFKEYTTLTSKAESVWEKAKKASDFSLFAPYLEKIIDFKKRFISYWGYEGHPYNTLLDQYEPGVTVEKLDALFSELREAIVPLVQKIAASDKKPDTGFVHDHFPKERQRDVCHFFLQELGYDFEAGRLDETVHPFQVTISQGDARVTTAYNENDFRSAVFGTIHECGHAIYEQNIDEALGGTNLSDGASMGIHESQSLFYENFIGRHQSFWTRYFDKIKEASPDQFAGVTAEGFYRAVNESKPSLIRIEADELTYPLHIMIRYEIEKAIFSGEVSVGDLPKLWNDKYEAYLGITPPDDAKGILQDVHWSGGDFGYFPSYALGYMYAAQLKSSMLKDLPEFDRLIENGDFQPIRKWLTEHVHIHGKRKKPLEIIKSATGEELNVRHLIRYLEEKYTTLYL

SEQ ID NO: 7639 - protein, 639 aa, Bacillus licheniformis
VTASRLPFSLTKTKNFYEELNNWIGDVFYDILPEKGFDLRDEQIFMAFQLERAFKEKKVMFAEAGVGTGKTLVYLLFALSYARYTGKPAVIACADETLIEQLVKKEGDIYKISEHLGLTIDARLSKSHDQYLCLKKLEKTMQRSDDEKWLDLYESLPSFVHESQGMQTFYPYGDRKEYSSLSNDEWSEIGYDSFQDCLTCDMRHRCGLTLSRDHYRKSTDFIICSHDFYMEHVWTEEARKREGQLPLLPEHSAVVFDEGHLLEFAAQKALTYRVKQSTLEMFLERLLGNDIREEFAELVEEALRANDEFFGLLTENAEKAEGSERMRIKDDTDVKKAAAELYDLLEKIGEALVFEGELYTIDQYALTVVEEYLEQMAYSLSLYRKNAISWLEQKELESTFVVMPRTVSEVLGEKVFSKQIPFIFSSATLSENGSFDYLATSLGIRDYLSFTVDSPYDYEEQMKVYIHQIEEKEAKEKAAIRAIKESGGKTLILFPSFEELLSFKRRTAQESFSFPVYFEGDEEISTIVEKFQTVEESVLCSVHLWEGLDIPGDPLQNVIIWSLPFPPHDPVFEAKRSGVENAFREVDLPYMLLRLRQGIGRLIRSNSDSGTISIFAGDEKEWNVIKEVESVLPVQPVYV

SEQ ID NO: 7640 - protein, 58 aa, Bacillus licheniformis
MLNSDHIQMIQKALETSESQLEDIGEERLTYAKEELKNAISHMESTDHPFLTHSIYRK

SEQ ID NO: 7641 - protein, 136 aa, Bacillus licheniformis
MYYYEPAKKDYWDYDYDPYKKDHDYCKKDFYYHEPCKKNYYYHEPCKKDFYYHEPCKKDYDYCKKDYDYHEDYKKDYDYHKPCKKDYDYCKKDFYYHEPCKKDYDYHKPCKKDCYYEPRKKCYDSSYKKKNDSWIY

SEQ ID NO: 7642 - protein, 383 aa, Bacillus licheniformis
MKTYTLIATAPMGIEAIVAKEVRDLGYDCTVDNGKVVFEGDALAICRANLWLRTADRVKVQAAEFTAKTFDELFEKTKAIDWSAYLPEHASFPVTGKSVKSVLASVPDCQRIVKKAIAEKLKSEYQTQGEWLEETGPVYKIEVSLLKDKAVITLDSSGAGLHKRGYRTGQGEAPLKETLAAALILLTNWTPDRPFVDPFCGSGTIPIEAALIGQNIAPGFNRDFASERWEWIGKEVWDQARLEVEEKANYDQPLSISGYDLDHRMIEIAKANAEEAGLADFIEFKQMQVKDFRTKEEYGVIVGNPPYGERLGEKKAVEAMYKDMGKAFAELDTWSVYMLTSNERFEECYGKKATKKRKLFNGFIKTDYYQYWGKRPPKPNKEK

SEQ ID NO: 7643 - protein, 98 aa, Bacillus licheniformis
MLADKVKLSAKEILEKEFKTGVRGYKQEDVDKFLDMVIKDYEAFHQEIEELQQENLQLKKQLEEANKRQPAQSNTTNFDILKRLSNLEKHVFGSKLYD

SEQ ID NO: 7644 - protein, 183 aa, Bacillus licheniformis
MKVLAVTGYKPFELGIFKHDDKALFYIKKALENRMIALLEEGLEWVLISGQLGTELWAAEVAFSLQEEYPDLKVAVITPFLEQEKKWSEKNQEQYEAVLAASDFTESLTHRPYESPVQFKQKNRFFIEKADGLLILYDEEIEGSPVYMLNEAKKAQEKRDFPIYTITMDDLRVTVEECSFYEE

SEQ ID NO: 7645 - protein, 89 aa, Bacillus licheniformis
MHCKPHVMAPIVHPTQCCYNHTHSKTVVPHIHPQHTTNVNHQHFQHVHYYPQTQSAVNKASHQHFVSPGAGMMPGPGGMPGPGMGMGPY

SEQ ID NO: 7646 - protein, 31 aa, Bacillus licheniformis
MYKGLFYLFFVVVLFIVLIMTNFKESFMAYF

SEQ ID NO: 7647 - protein, 437 aa, Bacillus licheniformis
MSLKRKLNRYKHHLGNQAKEEKTEPPADKLTSLSVSFEKEWAELGVKPYVFEECYCLIREVVYPLTHVHGHYAFSELHETVRRWNNSAVSHSLSSKGYTPSQLFFFDTETTGLGGGAGNAIFLLGHARVYDDRVVVKQHLLPKPGYEAALYHSFLSEVDIQSLVTYNGKAFDWPQVKTRHTLIRDRVPKLPDFGHFDLLHGSRRLWKHKFDRVSLGTVEKEELGVVRTEDTPGYLAPMMYFHFLKEERPEIIEGVLRHNELDVLSLITLYIHLSKKILTPEQTAEANEKYAMAKWLLANRETELATAQLQELEKKPFEQSERASFDLSMQYKKQGMLKEAAALWLKLQNGEDGKTAWRAGIELAKYFEHRKRDIRAALEVAENLLEQHGSQKFELTEKEMAGLLRRRERLERKYGRNIPRASAENDDLRKPNISSTL

SEQ ID NO: 7648 - protein, 755 aa, Bacillus licheniformis
LFQKRNLTDMIQLLKEDQAFSRQIVHWHTIEEKEADYCDFPEGLDKRIVHALQQRGIEKLYSHQADAFLHSAAGKNVTLVTPTASGKTLCYNLPVIQRITEDQDARSLYLFPTKALSQDQKSELNELIDEIGASINCYTYDGDTSPSIRQKVRKAGHIVITNPDMLHSAILPHHTKWVSLFENLKYIVIDELHVYRGVFGSHVANVIRRLMRIAEFYGSKPQFICTSATIANPLELAETLTGQPMHLISNNGAPSGRKHFLFYNPPMVNRSLNIRKSATLEVRKLASEFLKNGIQTIVFARSRVRVEIILTYLQEVMKPIVGPHSIQGYRGGYLPNERRVIEKGLRSGDIKGVVSTNALELGVDIGQLQTCIMTGYPGTISSAWQQAGRAGRRHNEALIVMVASSAPLDQYIVQNPDYFFKQNPETAVINPDNLVILVDHIKCAAFELPFKRTDTFGGIEIEDILDYLAEERVLHLTGNTYHWMNDAFPAHGISLRSASQENVVIIDQSRREKAKVIGEMDRFSAMTLLHDEAIYLHQGIQYQVEKLDWEEKKAFVREVQVDYYTDANLAVLLRVLEVDKEKKTETAAFGFGDVTVQAKATIFKKIKFETHENIGSGPIHLPEEELHTNAAWVQVNDSERQNWNDIKLEEALLGTANVLGHVAALKVMCDPSDLHVFPQIKAVHNEKPTIFLYDRYPGGVGLSQKVYEQMPEIISEAHRLISRCPCESGCPSCIGVSGGDQTKNNALRLLKGWKG

SEQ ID NO: 7649 - protein, 168 aa, Bacillus licheniformis
LLKKLFGIGQKQDEVKEETVFSPVDGQVLELSKVPDPVFSQKMMGDGMAVEPSAGEIVSPVDGEVIQLFHTKHAIGIRSLSGVELLIHIGLETVAMEGEGFTAHVKEGDKVKVGDPLITCDLELIKEKASSTITPIVIMNGDVLERVTKHEEAAAKKSETKLMELKVK

SEQ ID NO: 7650 - protein, 139 aa, Bacillus licheniformis
MDFKENDNHSLSKKDEIQEAVEQLFYNSPFHDILNSFQKLISDQLQNSTISMNIREDDGALYVDIAVPESFQNGDIMIEAKSRYLHIALKEKQESGGSSSFTSLSRTVLLPYPVREETMKTSWNRNVLTVSFSEQKKHE

SEQ ID NO: 7651 - protein, 147 aa, Bacillus licheniformis
MEERRSAVYPYSGPGAHIQAYQQNHQAYHPVQPYFSQETVPYAHPAQRPQPYQQPIEQNLDPFSVYHQPVQQQMQPLPPFQGFPYQHPYPSPRPNLHQPSQFQSFLSQFKKKNGQIDFSKMMDTAGQMVSTVNQVGALAKGFMGFFK

SEQ ID NO: 7652 - protein, 66 aa, Bacillus licheniformis
MNVSYLRNCFAEMKQYETDCMNKLMDFAKFLYIQGHLTLNEFRTSMKVLEANGAQHPAYDMNTDAS

SEQ ID NO: 7653 - protein, 123 aa, Bacillus licheniformis
LDTQSLLIQTQDLIRLVKEAEERYRKGKEEGTEYDFFEVVKPSVERFEQTVKSWLAESLSYIKANRPKYIYEEQLNSVEENANEIFMQSYFCKIHKKRFKDLTESVLYTLKNVEDDILKEDRA

SEQ ID NO: 7654 - protein, 75 aa, Bacillus licheniformis
MNGFASKDSVLQMLLETESDMSSAEKALTEAVRRTEQEKQSAWNERLDLIEKELAELSSCLNSTLMGVEPGVETA

SEQ ID NO: 7655 - protein, 34 aa, Bacillus licheniformis
VENNKKKSPAKTKPDAKQTDTLDKKLGGPNRPST

SEQ ID NO: 7656 - protein, 319 aa, Bacillus licheniformis
LHNTFSAAELTSRIQELTAKLNKDNISRTNAYKRYFDRHPEIKWSLLASFVSRNAGWSMTDLKGRLFELGLTAFQQKWLFLAYERANWLIFSDAYPQLLLYHWSKQLGQPLFHLLSSFGVSSFMKTEWERFWHERDQKRLMYALIINEQNTIQTPIIQNPLFKKNVFQTIPFQLCEWFHFNTVIFPTVEGVFYGVSVKRFTSLKERIKLGKQLSELLFSPELFPGFFHFTSCVPHTGSRFDMERWAGVKIRTSPFLRTCYPVVAHSLDGLKCDWFRGGKREAMFKDEKLPKTIEITDWYFQKRRQLQALFSLEHWLNKR

SEQ ID NO: 7657 - protein, 198 aa, Bacillus licheniformis
VIRYPNGKSYQPKTAASSLQKKPSYSNRGMTLEDDLNETNMYYQSHSIAVIHKKPTPVQIVQVDYPKRSAAVIKEAYFKQSSTTDYNGVYKGRYIDFEAKETKSRTSFPLQNFHDHQIEHMKQVVAQDGICFVIISAFEEIYFLEAEKLFYFWERKKQNGRKSIRKDELQEAAHPISLGYSPRIDYIKIIDQLYFSPS

SEQ ID NO: 7658 - protein, 895 aa, Bacillus licheniformis
MSDQFNSRQERRKAQQGKSRSNTHSKPKKKKKAGLFKKILLSILIIGVIGLIAGGVTFAVMVADSPSLDEAKLKTPYSSTIYDKNGKEIAEIGSEKRTYVSIKDIPDSVKNAFLATEDARFYDHHGVDPIRIGGALLANFEGGFGSEGGSTITQQVVKNSLLSHEKTLKRKVQEVWLSFQLERKYSKDEILEMYLNRIYFSPQAYGVGKAAEQFYGVTDLNDLTVEQAATLAGMPQSPNNYNPIKHPEKAEKRRNVVLSLMNKHGFISDAEYNKAKKVAVTKGLVSPKEYAKTTSNKYSAFIEQAVAEVKEKANVTPGTDGLKIYTTIDTDAQNYVDELMDGDSIQYTEKMQAGLTLLDTKTGEIRALGGGRDRKAGDFNYAVDTKRQPGSTIKPILDYGPVIENKKWSTYEQIKDEAYTYSTGDPINNYDRSYRGWISMREALVDSRNIPALKAFQAAGKDNIVKFAGNLGLNINSDDLVEAYAIGGFGNGVSPLQMAGAYSAFGNNGYYNEPHTVTAVEFNDGTKLDLTPESKAAMSDYTAFMITDMLKSAVQRGTGTAAQVPGVTVAGKTGTTNFTEDDIRKHGINRNGARDSWFVGYTPQYTAAVWTGKEGFNSLSQSEQQVAKLLFKKLIAKVDNGSGSFEKPDSVVEATVLKGSNPPVLASSNTPSDKKVTEYFVKGTQPTTVSKKYEEKENADKPSGLSAEYDEASKSIKLSWSYSGDGDVSFKVKQSVDGGGYSEIQNSSAKEAVIPNAKEGSVYRFQVTAVTEDGESDPASVTLKVNAADEDESKTDDEKKDDDEKKQDADDDQDKNKQNNGNSNQPNDQNPGNSDQNNQNPGNSDQNNGRKDDDADDQDNDQNKDKDKDKNKNPDQGANTGDQQTNSNGQSTGTN

SEQ ID NO: 7659 - protein, 167 aa, Bacillus licheniformis
VTSVSLLDEYEKTLRKKRPESGERLAVLSENPLCYDFFQDAGEDKPWEHAEEWVPLLFAEWERTKEKLLPVFKTRKSRCSQDDMLNGVCCLIASLHWTMGEPVKSLNWEIITRKDFGAKPMNWTERLEFILLKPTQYHCFIQLDELFTEMKKQFYKYVAMNHKKATH

SEQ ID NO: 7660 - protein, 220 aa, Bacillus licheniformis
MLTKKQIEFCLDTIGEMFPDAECELVHDNPFELVIAVALSAQCTDALVNKVTKTLFQKYKKPEDYLAVPLEELQQDIKSIGLYRNKAKNIQKLCKMLLEDYGGEVPRDRDELVKLPGVGRKTANVVVSVAFGVPAIAVDTHVERVSKRLGICRWKDSVMEVEKTLMKKVPESEWSVTHHRLIFFGRYHCKAQRPKCEECPLFSLCREGQKRYKKGLVKLL

SEQ ID NO: 7661 - protein, 232 aa, Bacillus licheniformis
MKKQHFIKMQDMGAVTIPNLLFMNYRELGLNETEFMLLLNIKMHVERGSFFPTPEELSKTMSIETEECMNMLRMFIQKGFIYIEECEDQNGIKFEKYSLEPLWGKLFELLEMAEQKKLAEQNEGEQKSLYTIFEEEFARPLSPLECETLSIWLDQDHHDAQLIKQALKEAVISGKLNFRYIDRILFEWKKNGVSTVEQAVNYSQRFRRKTAPRQNEQKEYTRQVPFYNWLEQ

SEQ ID NO: 7662 - protein, 430 aa, Bacillus licheniformis
VKTTINQVYKHVGEEVTIGAWIANKRSSGKIAFLQLRDGTGFIQGVVVKAEVDEETFQTAKSVTQETSLYVKGVVKEDERSPLGYELAVTSLEVIHEATDYPITPKEHGTEFLMDHRHLWLRSKRQHATMKIRNEIIRATYEFFNKEGFVKVDPPILTGSAPEGTTELFATKYFDEDAYLSQSGQLYMEAAAMALGKVFSFGPTFRAEKSKTKRHLIEFWMIEPEMAFVEFNENLEVQENYVSFIVQSVLENCKIELNTLGRDTSKLELIKAPFPRITYDEAIQFLKEKGFDDIEWGDDFGAPHETAIAESYDKPVFITHYPTSLKPFYMQPAPDREDVVLCADLIAPEGYGEIIGGSERIHDLELLEARLKEHGLESDAYQWYAELRKYGSVPHSGFGLGLERTVAWICGSPHVRETIPFPRLLNRLYP

SEQ ID NO: 7663 - protein, 394 aa, Bacillus licheniformis
LNLAKRVSALTPSATLAITAKAKELKAAGHDVIGLGAGEPDFNTPEHIIEAAVRSMNEGHTKYTPSGGLAALKDSIRDKFKRDQGIEYSQSEVIVCTGAKHALYTLFQVLLDEGDEVIIPTPYWVSYPEQVKLAGGKPVFVEGLEENSFKISPEQLEKAVTEKTKAVIINSPSNPTGMMYTEEELKALGEVCLRRNVLIVSDEIYEKLIYGGKKHVSIAQLSPELKNQTVIINGVSKSHSMTGWRIGYAAGSEPIIKAMTNLASHSTSNPTSVAQYGAIAAYNGPNEPVEEMRKAFEERLNKVYELLVDIPGLTCLKPEGAFYLFPNAKKAAESCGFSSVDEFAEALLDEEKVAIVPGSGFGAPDNIRLSYATSLSLLEEAVERIRRFVVNRSR

SEQ ID NO: 7664 - protein, 161 aa, Bacillus licheniformis
MGKKTLIFILIFGIIFLTALLAGANVYRTAMDQKENGHEQAAETARQEAGLKQVDSVETFVGKEKQYIVTGADKKGDKMYVWVPADKKQKTLYKKASAGITGRQAAKAVQDEGLMSELKEVHLAREGNVLLWEVTYLNKDGQYSLSYVDFINGKIHKNITP

SEQ ID NO: 7665 - protein, 56 aa, Bacillus licheniformis
MENKIEILSTVSVEHSEDLYKIVDLLNRTLKRDDLMFGLALDEEDQKQAIFTIYRT

SEQ ID NO: 7666 - protein, 930 aa, Bacillus licheniformis
MNNQRYVVIDVETTGNSPKKGDRIIQIAAVVIENGQITERFSKYVNPNQPIPAFIEQLTGISNEMVENEEPFSAIAEDIFELLHDSFFIAHNIHFDLAFVKHELQLAGFGEIECSVLDTVELSRIVFPGFDGYKLTELSEELQIRHENPHRADSDAEVTALIFLHMMDRLKRLPIPVLKSIRRLSWHLISDAQELFDGLIAEKGADAELEAGFTKVGSFVIRTPEVEDEEAGHKSRIPQTEPLIWERDGGLSSLDDRFDKREGQTKMMREVWTAFQNHEHALIEAATGIGKSLGYLVPAAIHAKQTGKPVVISTYTTLLQQQMINRDIPLLEKIFPFPVKAAVLKGRSHYLSIRKFKHILQEDDDNYDSVLAKAQILVWLTDTETGDLSEINLPSGGKLLWDRLAYDSHSYAESSNMRKLCFYERAKARAQKADMIITNHALLLTDETNQRIHTGDADMFIIDEAHHFERAAGEQYGARADYVFLHKRLMRLGTLKQRGILKKAERLYRSAGISSESFFQMDEWLAQLLEESDLFFTAVHSFVKRRKPRNDLNRLLYKIGEIGESRAWSRLEEGARRLCSMLYDMHRLFMDQKKSLAEKQASFTSRQAFLLEEYDSCMNDLEEYRKTLCRLMFDPVEDEVVWIEIDAKGAKNAAAIYAQPLDTSEILADRFFTEKKSVVLTSGTLVVENSFDYMIKKLGLSDFYPRTLQIESPFSYDKHMNIMIPTDVSPIQNDPGDYIQDVSRYVKALAKQKDAKVLVLFTSHDMLRDVYHTLKNEEDFPCQLLAQGISGGSPVKVMKLFKSYPHAVLLGTNHFWEGVDFPGDELTTLIIARLPFRPPDHPVESAKCDRAKRRGESPFQAVSLPEAVLAFRQGIGRLLRSEKDSGTVVILDRRIRTSSYGTVFMKALPPAKVMEPTFLELEAYIAGKNG

SEQ ID NO: 7667 - protein, 127 aa, Bacillus licheniformis
MYRTLMSAKLHRARVTEANLNYVGSVTIDEDLLDAVGMMANEKVQIVNNNNGARLETYIIPGERGSGVVCLNGAAARLVQVGDVVIIVSYAMMSEEEAKTHKPKVAVLNERNEIEEMLGQEPARTIL

SEQ ID NO: 7668 - protein, 288 aa, Bacillus licheniformis
MIQIYTAKDIQNLTKNYRKEGKTIGFVPTMGFLHEGHMSLVEKARKDNDIVVMSIFVNPMQFGPGEDYEAYPRDIERDRQLAAGSGVDVLFTPEPEEMYGQEPTVTASVKKRTDVLCGRSREGHFDGVATVLTKLFNLTSPTRVYFGMKDAQQVAVVDGLINDFFMDIELIPVETKREEDGLAKSSRNVNLRAEERQEATALYRALQRGAELIRNGERDPEAVKREIRSILEKTSGVIDYADIYSYPDLEIRDPLTGKVIIAVAVQFSKARLIDNIIVDIPADQKEDL

SEQ ID NO: 7669 - protein, 277 aa, Bacillus licheniformis
MKTKTDFLKMKQEGEPIVMLTAYDYPAAKLAEQAGVDMILVGDSLGMVVLGLDSTVSVTVADMIHHTKAVKRGAKDTFVVTDMPFMSYHCSLESALKNAAAIVQESGADALKLEGGDGVFETITALTRGGIPVVSHLGLTPQSVGVLGGYKVQGKDEESAGKLIEDSRRCEEAGAMALVLECVPAALAERISKELTIPVIGIGAGAGTDGQVLVYHDVVGHGVSRTPKFVKQYAQIDQPLEQALRGYVEDVRSRVFPEDAHSFRIDQQVLEGLYGGK

SEQ ID NO: 7670 - protein, 46 aa, Bacillus licheniformis
MILAEHGRYEILLLAGRFFCCPKRCRCKHGSSSPLKKRRRKHEDKN

SEQ ID NO: 7671 - protein, 327 aa, Bacillus licheniformis
MQSNLRKKLIQLFTEADGEFISGQKISEELGCSRTAVWKHIEDLRKSGYELEAVRKLGYKMIKKPDKITEDEIRLGLKTKKMGQTIHFQDVVSSTQKIAHELANNGAPEGTIIVADKQTEGRGRMARAWHSPEGNGIWMSIILRPEIPVQKTPQLTLLAAVAIVQAIEEQTGIAAEIKWPNDILINGKKVVGILTELQAEADQVHSVIVGTGINVNQLAADFPEELQETATSLRLASGEKIDRAALVQTIMSTFEKRYEDYLAYGFEPIKLLWESYALTLNRELTARTLNGTFHGKALGINEEGVLILETSDGIKKIYSADIDINPS

SEQ ID NO: 7672 - protein, 397 aa, Bacillus licheniformis
MEDLFLKALPLLRELKKHGWQAYFVGGAVRDAQMNRDVGDIDIATDASPEEIEAIFPKTVDVGKEHGTIIVLFEGESYEVTTFRAELEYEDYRRPSGVQFIKSLKEDLKRRDLTINAMAMDEEGRLIDYFGGLRDIRERLIQTVGDPAERFHEDALRMLRALRFMSQLEFELSPNTKKAICENRPLLAHISTERKTVEFEKLLKGKAAGRALEAAAETGLYKELPGLDGKKERVLAARAFPFYQLQKSADIWAAFIHMISINPAEAHRFLKGWKLPGKVIRQALHTAERIDQKWDAVSMYEAGEETLLAASAIRSLRDKQAIDEEQLAEIRQSYQALPIKSLKDLAVSGSDLLNFRKKPAGKWVSDDLKRIERAVLNGELANQKKAIEEWLDSCSQI

SEQ ID NO: 7673 - protein, 393 aa, Bacillus licheniformis
MKQLKIGITCYPSVGGSGIIATELGKLLAEKGHEIHFITSSVPYRLNKVYSNIYFHEVEVNQYAVFKYPPYDLALASKMAEVAKREQLDVLHAHYAVPHAISAFLAKQMLNGNIKTVTTLHGTDITVLGYDPSLKDLIKFAIESSDRVTAVSSALAAQTYDLIKPNKKIETIYNFVDERVYLKKQEHHSLKEQYGIAPDEKVIIHVSNFRQVKRVQDVIHVFSRIVKQMKSKLILVGDGPEMTVICQLVRQLGLKDDVLFLGKQDSVEELYAISDLKLLLSEKESFGLVLLEAMACGVPCIGTNIGGIPEVIKNGVSGYLVDVGDIEGAASKALHLLTDESLQRQFAEAALQSIKERFSSNKIIAQYEEIYQQLTDWECDNGGSLFEGSSSPS

SEQ ID NO: 7674 - protein, 233 aa, Bacillus licheniformis
MLDILAFGAHSDDVEIGMGGTIAKYTKKGFQIGICDLTQAELSSNGTVETRKSEAALAAEILGASPRISLTLPDRGLFPSQAAIRDVVAVIRKHKPKLVFVPYPKDRHPDHGHAAEIVEEAVFSAGIHKYEDAEKQPAHKVQNVYYYMINGFHKPEFVIDISETINQKKDGLAAYQSQFTRSRQSVETPLTNGYIETVEAREKLLGKEVGVAYAEGFFSKRTLLLNNDLFGGG

SEQ ID NO: 7675 - protein, 137 aa, Bacillus licheniformis
LKIALIAHDRKKQDMIQLTTAYKDILKKHELFATGTTGLKITEATGLPVVRFQSGPLGGDQQIGALIAKNDIDLVIFLRDPLTAQPHEPDVSALIRLSDVYAIPLATNMGTAEILIRSVEEGAFEFRNIVHGRDRDA

SEQ ID NO: 7676 - protein, 267 aa, Bacillus licheniformis
MQKDTIKIAIAGPRGRMGSEAVKLVEDTAHFELVGAIDRTYNREKLSDVMTSSSDAVIYTDITECFSETSPDVLIDLTTPEIGKLHTKIALEHGVRPVVGTTGFSESDLNELMELTDEKGIGAIIAPNFALGAVLMMKFSQMAANYFTDVEIIEQHHDQKLDAPSGTALKTAEMISAVREAKTQGHPDEKEILPGARGADQNGIRLHSVRLPGLIAHQEVMFGGDGQTLKIRHDSYNRASFMSGVKLAVEQVMKIDQLVYGLENIIE

SEQ ID NO: 7677 - protein, 112 aa, Bacillus licheniformis
MTKEKTMKDIQREVDEYIGQFKEGYFSPLAMMARLTEELGELAREINHHYGEKPKKKTESEKKIEEEIGDVLFVLVCLANSLHISLDEAHDMVMEKFNTRDKDRWTRKEEGK

SEQ ID NO: 7678 - protein, 290 aa, Bacillus licheniformis
MFGDIRMKNVLFILAGAAVFSFGLVHFNMQNNLSEGGFTGITLLLYFLFNIDPSISNLVLNIPVFFIGWKLLGRTVFSYTILGTVSLSVFLWIFQRFQIHMPLQNDLALAALFAGVFIGTGLGIIFRYGGTTGGVDIIVRLINKYFQVPMGKAMFVFDACVITLSLIFYLSYKEAMYTLVAVFVASKVIDFMQEGGYAAKGATIISEKNDQIQRKIIEEMERGVTVLKGQGSYTKTERDILYCVVPKNEVFQLKNVITSVDPHAFVAVSDVHDVLGEGFTLDENKNPITR

SEQ ID NO: 7679 - protein, 266 aa, Bacillus licheniformis
MIRKVILCMMLALVFPAAGLKAKESSALQELTELSDTVFQLTRQSQYEEAVQILQYFEKRLKAAEKDGTEDMMTGSEIRQVSLAYHDTLKSLESEEVAHQEKFKAAAQFRMLMDAIESDHDPLWSSLKKPIMDSFSALKAGIQKEDNLTFREKWNHFLSLYDTIYPSLTIDVSPKQLKSVSNHIAVVENGGFQQMTESSKLERLTLLEKDLEDVFDQVEEDDADPSLLWVILTTGSIILSTLTYVGFRKYKAEEDRRRKREKDWPK

SEQ ID NO: 7680 - protein, 194 aa, Bacillus licheniformis
LKLISYMLAQKPMLLLLLIINFFGTVYGYYWYLPQLTNTPAKFLIFVPDSPTATLFFLFVLIGLLLGRNAPLFEALALVTLVKYGLWAVVMNVLVLVVTGSLHWTGYMLIASHFAMAVQGVLYAPHFRFKGWHLALAAVWTLHNDAIDYLFGMMPNYSMLDQYMPQIGYFTFWLSIASIGLAYYLVLSRKAFKL

SEQ ID NO: 7681 - protein, 49 aa, Bacillus licheniformis
LIELKLTASQPLGLSTMSMAFSILTAADSEPARKLERPPLLDRCSAVNL

SEQ ID NO: 7682 - protein, 255 aa, Bacillus licheniformis
MKRGKGMKFVGDSRIPAERKPNIPKDYSEFPGKTEAFWPNFLLKEWMVGAVFLVGFLVLTIVHEPPLERMADPTDTGYIPLPDWYFLFLYQLLKYEYAAGPYTVVGAIIIPTIAFGALLLAPFLDRGPERRPFKRPVAVGLMLLAISATVFLTWQSVVTHDWAAAEEQGKIKEEADIDTSAEGYKIYQEQGCISCHGDNMQGGAAGPSLVDNGLSPEEIAKIAKEGKGEMPAGVFKGSDKELKELSKFISETTAK

SEQ ID NO: 7683 - protein, 224 aa, Bacillus licheniformis
MLNKIYDWVDERLDITPLWRDIADHEVPEHVNPAHHFSAFVYCFGGLTFFVTVIQVLSGMFLTMYYVPDIKNAWESVYYLQNEVAFGQIVRGMHHWGASLVIVMMFLHTLRVFFQGAYKKPRELNWIVGVLIFFVMLGLGFTGYLLPWDMKALFATKVGLQIAEATPLIGSEIKTLLAGHPDIVGAQTLTRFFAIHVFFLPAALFGLMAAHFIMIRKQGISGPL

SEQ ID NO: 7684 - protein, 168 aa, Bacillus licheniformis
MSEKRHRVSRRQFLNYTLTGVGGFMAAGMLMPMVRFALDPVLRPTEDQDMVQVVSVDELTNEPQRFDFKIKQVDAWYESEESRSAWVFKSGDEIVALSPVCKHLGCTVNWNSDPKNPNKFFCPCHYGLYEKDGTNVPGTPPLAPLDRYEQEVKDGYLYLGKAKPRKDG

SEQ ID NO: 7685 - protein, 148 aa, Bacillus licheniformis
VKWNTHDADVYLNAKEYIDTAVIPLISVDLGDQFKSAVSKGEFTSILAEELERQLKGRIYLFPPCTYLEADEKSAQHIADLKEMAEKHFRHIVFLTTDERWKQMLDSEQKLLWVPAIPLEHMKDSLKQKLLEDQIEQILNILLQYWNS

SEQ ID NO: 7686 - protein, 179 aa, Bacillus licheniformis
MQTPVSVNEKKDFIRWFLNHYQLKRRECVWILNYLMSHDSLMEKVHFVEQAEFCPRGIIMSTHCVEEVPFRFYKENVMTTDAEKSFHDIRLNKQQDLFIQLNFRSAYNSPEYAAVLEANPHIPKDLYENEKDKIVAEQILEHSIATFQRQKLLREIDEALDRQDKESFEKLAKQLSQLR

SEQ ID NO: 7687 - protein, 424 aa, Bacillus licheniformis
LNTSIQEAIKLVEAGHPESGLKKLADIESDLHDEDKAIVAQLYYEWGIVDKAIAIVTDLHELYPDETELTCFYAELLIETDQEEKALSVLETIPETDEAYPQCLLLMADLYQMQGLFEVSEQKLLKAQAILPDEPVIDFALGELYFTQGAYGKAVRQFKKAAEEEAVIGGVNVYQRLAESLSSSGAFEEALEWYEKAVKENPEPNTLFGFGFTALKAGYPKTAIKQLTELKEMDPAYSSLYKPLANSFETEGLYEEAFETAKEGIRVDEFNKELYLSAAKAALKTKRHSEAKELLREALALDPGYLEAVHTLLALFLEEEDDESIIELVREVRKYGEDDPKFSWHLASAFARTEAYDKAREEYENAFLHYRDDADFLYEYSMFLLEEGRRKEALPLLKKLAELDPANEEVQETIFRIEDENSFE

SEQ ID NO: 7688 - protein, 54 aa, Bacillus licheniformis
LCSGFFCPENHESRAFAHKTNVFGIACLNRINLLPYSCAGNIFAGNRRVNYDSK

SEQ ID NO: 7689 - protein, 428 aa, Bacillus licheniformis
MKRGKISSLKGELHIPGDKSISHRSVMFGAMAEGKTVIKNFLPGADCLSTIACFRKMGVEIEQNGSDVTVRGKGLDQLAEPAELLDVGNSGTTIRLMLGILAGRPFHSTVAGDESIAKRPMKRVTEPLRKMGAKIDGRAGGEYTPLSVRGGHLKAIDFQSPVASAQIKSAVLLAGLQAEGTTTVTEPHKSRDHTERMLSMFGVSLREDETSVSIEGGQQLKAAEVFVPGDISSAAFFLAAASLVPGSEVVLRNVGLNPTRTGIIDVLKEMGADLEIEEKDTGNTEPYGDLRIKTSSLKAAEISGDLIPRLIDEIPIIALLATQAEGTTVIKDAAELKVKETNRIDTVASELKKIGANIEPTEDGMKIHGKTPLTGGAKVSSHGDHRIGMMLGIAACICEQPIDILQPEAVSVSYPSFFEHIEKLAEKA

SEQ ID NO: 7690 - protein, 371 aa, Bacillus licheniformis
MTQPNETILLAGLGLIGGSIALAIKKEHPGKRIIGFDVSEEQARAAQKLGVIDAPAASFLEGVKEASTVFLAAPVEQTLHMLDELAASGIKKKLLITDVGSTKQKVVSHAEKVLPDDYRFIGGHPMAGSHKSGVAAAKDFLFENAFYILTPSGSAGKEAVASLKDLLKGTNAKFVEMSPAEHDAVTSVISHFPHIVAASLVHQTVKFEDQYPLVKRFAAGGFRDITRIASSSPAMWRDILLHNKDKILERFDEWKQELDRIQSFVENEDADGLFEFFRQAKEYRDGLPLRQKGAIPSFYDLYVDVPDHPGVISEITAILADAQISITNIRIIETREDINGVLRISFQSDEDRKRAEKCIQTRAKYETFYAD

SEQ ID NO: 7691 - protein, 361 aa, Bacillus licheniformis
MLQIKEQLKQLTPYQPGKPIEEVKKEFNLDRVVKLASNENPYGCSEAAKEALQIEVQQMALYPDGYSAALRTKLASHLGVNETNIILGNGTDEVIQIISRSLLDPASNTVMANPTFSQYKHNAVIEGAEVREVGLLENGCHDLDAMLKAIDEQTKVVWVCSPNNPTGTYESGRNLIRFLEKVPEHVLAVVDEAYYEYVTAEDYPETIPLLERFPNLMILRTFSKAYGLASLRVGYGIASEQLIQAIEPARQPFNTNRLGQAAALAALGDQAFIHDCVRKNNEGLKQYYDFCDEHGLNYYPSQTNFVLIDFKRDADELFSELLKKGYIVRSGNALGFPTFLRISVGTKEQNEGFLKTLAGML

SEQ ID NO: 7692 - protein, 267 aa, Bacillus licheniformis
MFNLKKQPSDKLFVPFITAGDPLPEISIELAKSLQEAGASALELGVPYSDPLADGPVIQRASKRALDNDMNIVKAIRLGGEMKKNGVHIPIILFTYYNPVLQLDTDHFFALLRQNQLDGLLVPDLPFEESVYLQQQCKKHGITYISLVAPTSESRIQKITQQAEGFVYCVSSLGVTGVRNEFEDSVSSFIRSVKGMSSVPVAVGFGISSSKQVEMMNELADGVVVGSALVRKIEELKDELVAPETREQALKAFEAYAKTFSGSYMVK

SEQ ID NO: 7693 - protein, 408 aa, Bacillus licheniformis
MYSYPNEQGRFGDFGGKFVPETLMQPLEEIEKAFLELKDDPSFQKDYQKLLNDYSGRPTALTFADQLTKQLGGAKIYLKREDLNHTGAHKINNALGQALLAKKMGKTKLIAETGAGQHGVAAATVAAKFGLSCIVFMGEEDVARQSLNVFRMKLLGAEVVPVSSGNGTLKDATNEAIRYWVQHCQDHFYMIGSVVGPHPYPYIVREFQRMIGEEAKAQFYQLEQSLPDKVVACVGGGSNAIGMFSAFIEETVELIGVEAAGKGVDTPLHAATITKGTKGVIHGSLTYLIQDEYGQIIEPYSISAGLDYPGVGPEHAHLHQTGRVTYESVTDDEAVSALRLMTETEGILPAIESAHALAKAFEIAKELPREKSVLVCLSGRGDKDVHTLMKVLEEEVNQDVQSEKTAVR

SEQ ID NO: 7694 - protein, 218 aa, Bacillus licheniformis
MKKPSLKYCGIHSLEDLKVTARSKADYLGFIFAESKRSVDPADVKRWCGETDTPGKKLVGVFVNENMSRMAEIVKDAGLDVIQLHGDETAADIKRLKSMTDCEIWKALPHGNDTVQSMASFAPYIDGYVIDSSVKGMRGGTGVSFSWDSVPLYIDAAQREGKRLFIAGGVNPDTIADLLKRRPPGIDLASGIEERGRKSEKLISLLEERMFEHVFISE

SEQ ID NO: 7695 - protein, 252 aa, Bacillus licheniformis
MLNQIIDRKREDILKIKLPEDLKLPKRSFKKALLSPNRFVALIAEVKKASPSKGVIQEDFEPVKIAKQYEQAKADCLSVLTDTPFFQGKNSYLSDVKRSVSLPVLRKDFIIDSIQVEEADRIGADAILLIGEVLEPQKLFELYQQAVEKGMDVLVEVHGEETLEGILNVFTPEIIGVNNRNLKNFETTVGQTERMAKLVPPGTVLISESGIGKSEDLTFVKTCGAQAVLVGESLMRETSQLKAVYALFGEDG

SEQ ID NO: 7696 - protein, 338 aa, Bacillus licheniformis
MNELLKSCVNGRTLNETEAHSIMRDMMTGSLSAAEIGGLLSVLAYRGETAEEITGFVRAMREQAHTIDGPEHVVDTCGTGGDGSSTFNISTAAAIIASSAGAKIAKHGNRSVSSKSGSADVLEYLGVSIQTSPEETIKSIERRNMGFLYAPSYHSSMKHVAGARKDLAFRTVFNLLGPLSNPMKAKRQVIGVYSIEKAKLMARALEAFEPEHVLFVSSRDGLDELSITSPTDVIELKGGKTYEYTVEPGDVGLPLGRLRDIQVATPEESGRLIVDILKNRGPDSAVHIAAFNAGAALYVAEQAADLKEGVALALEAVAGGEALNQLERLKQKEEELYA

SEQ ID NO: 7697 - protein, 515 aa, Bacillus licheniformis
LSLQTDFASFSEDTSHFKTIPIIESFSVDTLTPVQLVEKLQEDIVYLLESQDETSAWSRYSFIGLDPFLTIKEERGRFHACDQKQKKLYSASQLKDVLEWMSETYSIKAPELDIPFTGGAVGYLSYDLMPLIEPSIKGHSKETEMAKCLLFVCRTMIAYDHELKKLHFIHYTRLEGSENREEKRRIFKKGKEELKQLTQRLSDRKTPKELFLPQGRHTAPSFEGIQSTYEKSRFLADVDRLKEYIKAGDIFQGVLSQRFDIPVKVGSFELYRVLRMINPSPYMYYMRLPDRDLVGSSPERLIHVQNGHLEIHPIAGTRKRGGDQAEDKRLERELLADEKEKAEHYMLVDLARNDIGRVAEYGSVQVPEFTKIVSFSHVMHIISIVTGTLKAGVHPVDALMSAFPAGTLTGAPKIRAIQLLNELEPEPRETYGGCIAYIGFDGNIDSCITIRTMSVKNGVASIQAGAGIVADSVPEKEWEETCNKAGALLKTIQIAEETFLEKGEDGNERTAEIMR

SEQ ID NO: 7698 - protein, 127 aa, Bacillus licheniformis
MMMRGIRGATTIDRDTEKDITERTKQLIGKMIDENRLKPEQVVQILISATSDIHAAFPAKVVRTFDGWQHVPVMCMQEMDVEHGLKKCIRVMMTVQTDMRQDEVRHVYLENAVTLRPDLSLTKNTEL

SEQ ID NO: 7699 - protein, 362 aa, Bacillus licheniformis
MKSLQIETASLSYPVFIGGGIRKNAAELLSSLNLPMTKLLLITDEEVDKRYGEELFSLLRSKWPVKKVAVPSGEQAKSIDMFMKLQTEAIQFHLDRSSCIVALGGGVVGDLAGFVASTFMRGIDYVQFPTTLLSHDSAVGGKVAINHPLGKNLIGAFHQPKAVVYDTECLSTLPEKEMRSGLAEVIKHAFIRDESFLNELLKLDSIEAITTGQLSEMVYKGISIKAEVVSQDEREQGIRAYLNFGHTLGHAVEAEYGYGEITHGDAVALGMQFALFVSEKVLNCPVDRTKIAAWLKNLGYPESVKREVSTEALINRMMNDKKTRGGIIQFVLLDKIGSVRLHSFKAEEIERWLNMWRLEGDK

SEQ ID NO: 7700 - protein, 390 aa, Bacillus licheniformis
MRYLTAGESHGPQLTTIIEGVPAGLYITKEDIDYELQRRQKGHGRGRRMQIEKDQARITSGVRHGRSLGSPIALVVENNDWKHWTKIMGSEPITAEEESEMKRQISRPRPGHADLNGAIKYGHRDMRNVLERSSARETTVRVAAGAVAKKILSQLGIQVAGHVLEIGGVKAEKTNYESIENLKKVTEESPVRCYDEEAGRKMMDAIDEAKANGDSIGGIVEVIVEGVPVGVGSYVHYDRKLDSKLAAAVLSINAFKGVEFGIGFEAARKNGSEVHDEIIWDEEKGYTRATNRLGGLEGGMTTGMPIVVRGVMKPIPTLYKPLKSVDIETKEPFTASIERSDSCAVPAASVVAEAVVAWEIANAIVEQFGVDQMDRIAENVEKMRKLAREF

SEQ ID NO: 7701 - protein, 255 aa, Bacillus licheniformis
MDNYSFFVDKWKKMTGVDLALYKEAQMKRRLTSLYEKKGYGDFREFALALEKNEALLQETLDRMTINVSEFYRNYKRWEVLEKTILPLLKPAKTLKVWSAACSTGEEPYTLSMILSRQKGLTDYQIIATDIDDKVLQKAKEGVYQERSLQEVPKEMKELYFTQDGNRFKVKDEIRKNIRFQKHNLLADPYEKDFDIIVCRNVLIYFTEEAKEKIYHKFSGSLKNKGVLFVGSTEQIFNPEKYGFQSTDTFFYQKS

SEQ ID NO: 7702 - protein, 148 aa, Bacillus licheniformis
MEKTFVMVKPDGVQRQLIGEILLRFERKGLQLIGAKLMKVSEETAGEHYKEHNGKPFFGELVDFITSGPVFAMVWEGEDAIAVARQLIGKTNPKEALPGTIRGDFGMFVGKNIIHGSDSPESAAREINLFFKEDELVEDEKLMNQWIY

SEQ ID NO: 7703 - protein, 320 aa, Bacillus licheniformis
MKLTTFYSFLNDDIELIEKELEKTVHSDYPLLSEASLHLLQAGGKRIRPVFVLLSGMFGEYDISKIKNVAVSLELIHMASLVHDDVIDDAELRRGQPTIKAKWDNRIAMYTGDYLFARSLEAMTKINEPKAHEILSKAIVEVCLGEIEQIKDKYNMEQNLRTYLRRIRRKTALLIASSCQLGAIAAGAGENIHKTLYWFGYYVGMSYQIIDDILDFTSSEKELGKPVGSDLLQGNVTLPVLYARKSPELKARLMLVNSETTPEQIKPVIEELKKTDAIEQSFRVSEMYLNKAFELLETLPKNRARTALGQIAKYIGKRKF

SEQ ID NO: 7704 - protein, 232 aa, Bacillus licheniformis
MVQSKEQRVHGVFEKIYKNYDQMNSVISFKQHKKWRDKTMQLMNVPKGATALDVCCGTGDWTIALADAAGETGEIKGLDFSKNMLSIAEQKTESYSQIELIHGNAMELPFPDNTFDYVTIGFGLRNVPDYLTVLKEMARVVKPGGQVVCLETSQPEMFGFKQLYFLYFRFIMPMFGKLFAKSFKEYSWLQESAREFPGMKELAALFEEAGLKNVQYHPFTGGVAATHVGWKR

SEQ ID NO: 7705 - protein, 258 aa, Bacillus licheniformis
LQDIYGQLSYLKIKLNQKLSHPYLAKHLTAPKVDEDKLFLFYALFEETDLKEADKESYILTAMLVQTALDTHDEVTTAASIKQDDYKNRQLTVLAGDYFSGMYYSLLSGMKDIYMIRTLAAAIKEINEHKIRLYDHSAKDADSLKKSVSIVEAALFHHLADHFYLPHWKTAANDFLVFKRFAAEEKASDSRLLETIIQKEFPEGQASCGQLAAAAYKEAKLAINQSLAKKPAVQKWLLKRLQEIRPEKRTYHQKVEEG

SEQ ID NO: 7706 - protein, 76 aa, Bacillus licheniformis
MTNNQSNDFVVIKAVEDGVNVIGLTRGTDTRFHHSEKLDKGEVMICQFTEHTSAIKVRGEALIQTANGEMKSESKK

SEQ ID NO: 7707 - protein, 189 aa, Bacillus licheniformis
MREINKDQIEQAVRQILEAIGEDPNREGLLDTPKRVAKMYAEVFAGLNEDPKEHFKTIFGEDHEELVLVKDIPFYSMCEHHLVPFYGKAHVAYIPKGGKVTGLSKLARAVEAVAKRPQLQERITSTIADSIVETLTPHGVMVVVEAEHMCMTMRGVKKPGSKTVTSAVRGTFRQDVAARSEVLELIKTS

SEQ ID NO: 7708 - protein, 92 aa, Bacillus licheniformis
MNKTELINAVAEASELSKKDATKAVDSVFDTILDALKNGEKIQLIGFGNFEVRERSARKGRNPQTGEEIEIPASKVPAFKPGKALKDAVAGK

SEQ ID NO: 7709 - protein, 45 aa, Bacillus licheniformis
VLIYKQKIFTLLDKRSSQSEIFAGSREMPFLYLFEISVQTGIETG

SEQ ID NO: 7710 - protein, 64 aa, Bacillus licheniformis
MIPYSSRFKQNKTNKYSCFFFFNHNLSYISSRKPLPSNPLSPRPFSLFSGIKKDLPYDKRPSLL

SEQ ID NO: 7711 - protein, 492 aa, Bacillus licheniformis
LEKVDIFKDIAERTGGDIYLGVVGAVRTGKSTFIKKFMELVVLPNINNEADRARAQDELPQSAAGKTIMTTEPKFVPNQAMSVHVSDGLDVNIRLVDCVGYTVPGAKGYEDENGPRMINTPWYEEPIPFHEAAEIGTRKVIQEHSTIGVVITTDGTIGEIARQDYVEAEERVIDELKEVGKPFIMVINSVRPYHPETEALRQELMEKYDIPVLAMSVESMREADVLSVLREALYEFPVLEVNVNLPSWVMVLKENHWLRENYQDSVKETVKDIKRLRDVDRVVGHFSEFDFIERASLAGIEMGQGIAEIDLYAPDYLYDEILREVVGVEIRGKDHLLQLMQDFAHAKTEYDQVSDALKMVKQTGYGIAAPALTDMSLDEPEIIRQGSRFGVRLKAVAPSIHMIKVDVESEFAPIIGTEKQSEELVRYLMQDFEDDPLSIWNSDIFGRSLSSIVREGIQAKLSLMPENARYKLKETLERIINEGSGGLIAIIL

SEQ ID NO: 7712 - protein, 238 aa, Bacillus licheniformis
MKIVNVLLAILLTAIMLSGCLYPEERKAKNSAPHQHQLKEVQAAVDEFREATGGLLPIKTRDMGVPIYQKYPIDFNRLSPRYMAEPPGTSYENGGEYLYVLVDVEKKPTVKLIDVKMSEMIRELKLRVEMYKDQHKYPPYKKVVSKNLFMLDHEKLGLKEAPSVTSPLSGTSLPLLVDEKGDIKVDYRMDLAKLMKKSKKTVKPGEEVQDLMWEETPFVPAFSVKYTVNDKQEPVFLE

SEQ ID NO: 7713 - protein, 67 aa, Bacillus licheniformis
VNVGLLKMWFALGSMGLMFLAVIAIYISRYKFKNRFLKIITSFVAYTCMLISGVIVFFVVFSGPVNE

SEQ ID NO: 7714 - protein, 346 aa, Bacillus licheniformis
MTKVSILGAGSWGTALALVLADNQYDVCIWGHREELIQQINEHHENKDYLPGVKLSENVRATTDLEAAVADVKTIIVAVPTKAIREVLAQAVSFINQKAIFVHVSKGIEPDTLLRISEMMKEEIPAELREDIVVLSGPSHAEEVGLRHPTTVTVSADSSIESAQAIQDMFMNQNFRVYTNPDMIGVEIGGALKNVIALAAGITDGLGYGDNAKAALITRGLAEIARLGTKMGGNPLTFSGLTGIGDLIVTCTSVHSRNWRAGNMLGKGFKLDEVLEEMGMVVEGVRTTKAAYQLSKKFDVKMPITEALHKVLFDGEKVETAVESLMARVKTHEMEDLVNTFENQMK

SEQ ID NO: 7715 - protein, 436 aa, Bacillus licheniformis
MGKPVVAIVGRPNVGKSTIFNRIAGERISIVEDTPGVTRDRIYSSAEWLNHDFNLIDTGGIEVGDEPFLAQIRHQAEIAMEEADVIIFMTNGREGVTAADEEVAKILYRTKKPVVLAVNKVDNPEMRANIYDFYALGFGEPFPISGTHGLGLGDLLDAVSEHFKNIPETKYEDEVVQFCLIGRPNVGKSSLVNAMLGEERVIVSNIAGTTRDAIDTRFTYNQRDFVIVDTAGMRKKGKVYEATEKYSVLRALKAIDRSEVVCVVLDGEEGIIEQDKRIAGYAHEAGKAVVIVVNKWDAVEKDERTMKEFEEKVRDHFQFLDYAPVLFMSALTKKRIHTLMPAVMTASENHSMRVQTNILNDIIMDAVAMNPTPTHNGNRLKIYYATQVAVKPPTFVVFVNDPELMHFSYERFLENRIRDAFGFEGTPIRIFARARK

SEQ ID NO: 7716 - protein, 46 aa, Bacillus licheniformis
VISLEIDIIYELSPSVWNKKGFFLQTDFLKRETNDHSFKDGKALLN

SEQ ID NO: 7717 - protein, 52 aa, Bacillus licheniformis
MSESIEKFILAVVTTRRDRVIGGTAAFFCDTPEEMNTYAKTLKPFSTESPTE

SEQ ID NO: 7718 - protein, 299 aa, Bacillus licheniformis
MSQYTYPIILGIVAGIVVRVYMLRTDYRQYPTYLHGKTIHIALALIAASIGAIIIPSILKSDYTAITFLTLAATQFRDVRNMERETLTQLDGYELVSRGSTYIEGIAIAFESRNYIVIFTSLLTTLAYILFSSVWAGLAAALICFIAGRILMSGSFIKDIADIEYKKPHFEGAGLYVDNIYIMNIGLPEKRKLILEHGMGFILKPKNFNSAVTIANLGQRQAILFDVSNVLGVYRDSGEPSLSPLAKRDLNDGRVAVFVLPVIKDKETAIRVIGDVPTLENAIRVPMEFIKEKHSKVIK

SEQ ID NO: 7719 - protein, 200 aa, Bacillus licheniformis
MEEFYYYWSMWFLWVLTTFILEKNRFRFYASAFILLNIILSMYQVRLFMYFNAAYLSFYIGAFMLCGFLRLHKSVKRLLLHLSMVSAYGFLFLFALYDPVWFILKPEWLIIILFVIMTAAFERSFAVRLGVFVLGMCQGELLYTFVIRKLYGDIAAGGYSWLSMCAAGIVLVYGISQYEQLMHQVYYKLKRLNKGAAKMS

SEQ ID NO: 7720 - protein, 43 aa, Bacillus licheniformis
LGKDRQEKKLKQQKRTESDRDQSISYNGAASLESAEDARKRNP

SEQ ID NO: 7721 - protein, 349 aa, Bacillus licheniformis
VTRAKRKKEHIDHALSTGQKRQTGLDDITFVHVSLPETELSQVDTSTKIGELFLSSPIFINAMTGGGGKATFEINRALARAAAQTGIPVAVGSQMSALKDPDERPSYEIVRKENMKGLVFANLGSEATVEQAKRAVDMIEADMLQIHLNVIQEIVMPEGDRNFTGRLRRIEDICRSVSVPVAVKEVGFGMSRDTAARLFNVGVQAIDVGGFGGTNFSKIENLRRDKAVEFFDQWGISTAASLAEVSSISGDRPIIASGGIQDALDLAKSIALGASAAGMAGYFLKVLTASGEEALAAEIESLIEDFKRIMTVLGCRTIEQLKKAPLVIKGDTYHWLKARGVDPFVYSMR

SEQ ID NO: 7722 - protein, 382 aa, Bacillus licheniformis
MTEEMNQIDVQVPEVGDVVKGIVTKVEDKHVDVDIPNCKQTGIIPISELSSLHVEKASDVVNVDDELELKVTKVEDDALILSKRAVDADRAWEDLEKKFESKEVFEAEVKDVVKGGLVVDIGVRGFIPASLVEAHFVEDFTDYKGKTLTLIVVELDRDKNRVILSHRAVVEKEQSERKQEFLQTLEAGQVLEGKVQRLTDFGAFVDIGGIDGLVHISQLSHSHVEKPSDVVEEGQDVKVKVLSVDRDNERISLSIKETLPGPWSNIGEKVKPGEVLDGKVQRLVSFGAFVEVLPGVEGLVHISQISNKHIGTPHEVLEEGQDVKVKVLDVNEEEERISLSMKELEENTDKAEQEDYRQYQAKEESSGFQLGEMIGDKLNKLK

SEQ ID NO: 7723 - protein, 226 aa, Bacillus licheniformis
MEKKLCIAIDGPAAAGKSTVAKIVARKKSYIYIDTGAMYRAITYLALEKGVDLNDEAALTALLKESAIDLTVSPEGEQKVYIAGEDVTEAIRTDSVSNQVSIVAKYAGIREEMTKRQQQLAEKGGVVMDGRDIGTHVLPNAEVKIFLLASVEERAKRRFEENVKKGYNVNYETLAEEIRRRDKLDSEREISPLKKADDALEIDTTSLTIDEVAEKILQIVDKKAQK

SEQ ID NO: 7724 - protein, 58 aa, Bacillus licheniformis
MKTIERLLFKILVVQTVILISVQLLFHFSKAEPYLSKVVQYEGVNNMKIGEWIETFKP

SEQ ID NO: 7725 - protein, 41 aa, Bacillus licheniformis
LFSYYSSAARKIYGAGHFQFTGGRSAHMFSMEMFRANYSEC

SEQ ID NO: 7726 - protein, 450 aa, Bacillus licheniformis
MIRGILIALLGVAIVGTSYWGYKEHQEKDAVLLHAENNYQRAFHDLTYQVDQLHDKIGSTLAMNSKKTLSPALAEVWKTTSEAHNNVSQLPLTLMPFNKTEEFLAKVGDFSYKAAVRDLDKEPLNKKEYASLNQLYENSKDIQNELRNVQHLIIDKNLRWMDVELALASGQKQSDNTIINGFKTVEKSASAFSDTDLGATEMTNTKKEQQGYDHLQGKRITEKEARKIAQKFAQDKNYNIKVSKSGKKTNRDVYSISMQDPDQKADIYMDITEKGGYPVYLIQNKKIKDEKISLNDASNKALQFLKKNGYKTEDLKMDESSQYDGVGVFSFVPVQDDVWLYPDSIRIKVALDDGEITGFNAKDFLISHKKRDLPKPKLTPEKAKASLNPNVKVQETRIALVTNELSQEVLCYEILGTIENDTFRMFINANDGTEEKVQKMKSAEPIYNDL

SEQ ID NO: 7727 - protein, 321 aa, Bacillus licheniformis
MKSKGSFCLNVILCTIMATSLSLPFSQKSAAFSEQVIQRGATGDDVIELQARLQYNGYYNGRIDGVYGWATYWAVRNFQNQFGLRDTDGLVGPKTKRLLINHTKYYSDYVHRQLRKGNQFTHYGGLPLKYQTKPSKEVQQQARKKAEARQRQGAQQQGTAQKQPQQKQQAAPAQPKKQAQPKAAPKQAAPKKQDAVAANMPGGFSNNDINLLAQAVYGEARGEPYDGQVAVAAVILNRLDSPTFPNTVAGVIFEPLAFTAVADGQIYMTPDETAKKAVLDAINGWDPSENATYYFNPDTATSSWIWGRPQIKRIGKHIFCE

SEQ ID NO: 7728 - protein, 222 aa, Bacillus licheniformis
MFGIISAGLAPGIALLMYFYLKEKYESEPIHMVIRLFILGVLLVFPTMFIQYVLEKEHISEGSFVVSFLTSGFLEEFLKWFLLMVSTFQHIDFDEHYDGIVYGTSLSLGFATLENILYLIGNGVEYAFMRALLPVSSHALFGVIMGFYIGKARFSDSKTKMKWLLCSLFIPALLHGLYDYILLALKNWIYFMLPFMAFLWWFGLRKAKKARSVKTGGQPLQQ

SEQ ID NO: 7729 - protein, 322 aa, Bacillus licheniformis
MNKKVALITTGGTIASRKTESGRLAAGAISGPELAEMCSLPEDVQIDVYPAFQLPSMHITFEHLLELKQTIERVFQNGGYDGAVVTHGTDTLEETAYFLDLTIEDERPVVVTGSQRAPEQQGTDAYTNIRHAVYTACSPDIKGAGTVVVFNERIFNARYVKKVHASNLQGFDVFGFGYLGIIDNDKVYVYQKPLKRDVHQLQRPLPAVDIVKCYLDGDGKFIRAAVREGVEGIVLEGVGRGQVPPNMMADIEQALNQGVYIVITTSAEEGEVYTTYDYAGSSYDLAKKGVILGKDYDSKKARMKLAVLLASYKEGIKDKFCY

SEQ ID NO: 7730 - protein, 321 aa, Bacillus licheniformis
MKEEKVIIIGGGPCGLSAAIHMQEIGIDALVIEKGNIVNSIYQYPTHQTFFSSSEKLEIGDVAFITENHKPVRNQALSYYREVAKRKNLRINAFEKVQSVTKTENNQFIVETSKDTYLSSFCIVATGYYDNPNYMNVPGEDLPKVFHYFKEAHPYFDKDVAVIGGKNSSVDAAMELVKAGARVTVLYRGNEYSSSIKPWILPEFLSLVKHGKIRMEFRAVVKEITEDELIFSVDGKETRIKNDFVFAMTGYHPDHSFLQKMGVKIDAESGRPFFNEETMETNEEGIFIAGVIAAGNNANEIFIENGRFHGGLIAAEIAKRI

SEQ ID NO: 7731 - protein, 424 aa, Bacillus licheniformis
MVADQNTGHTEENTHDVLKSTQTVIHKALEKLGYPEEVYELLKEPIRFLTVKIPVRMDDGSVKIFTGYRAQHNDAVGPTKGGIRFHPGVTEKEVKALSIWMSLKCGIIDLPYGGGKGGIICDPRDMSFPELERLSRGYVRAISQIVGPTKDVPAPDVFTNSQIMAWMMDEYSRIDEFNSPGFITGKPLVLGGSHGRESATAKGVTICIKEAAKKKNIDIEGASVVVQGFGNAGSYLAKFMYDAGAKVVGISDAYGGLYDPEGLDIDYLLDRRDSFGTVTKLFNDTITNKELLELECDILVPAAIENQITAENAHNIKAKIVVEAANGPTTLEATKILSDRDILLVPDVLASAGGVTVSYFEWVQNNQGFYWTEEEVEERLEKMMVKSFNNIYEMAHNRRIDMRLAAYMVGVRKMAEASRFRGWI

SEQ ID NO: 7732 - protein, 194 aa, Bacillus licheniformis
MRLERLNYNKIKIFLTLDDLTDRGLTKEDLWKDSFKVQQLFKDMMNEANTELGFEANGPIAVEVYSLQAQGMVIIVTKNQETDEDDNEYDEDYIEMQVKLGESVDIIYEFQTFEHLIELSKNLDRIGIQGGTVYHYEGRYFLSLDDFDSLEVDGVISILAEYGNPTTLTIYRLQEYGKKIMENNAVQTIQTYFK

SEQ ID NO: 7733 - protein, 261 aa, Bacillus licheniformis
MIYWLSLASAAFIGLAALVWKMSAIARENRVLKAEFSLGRLKKELNVFFISDIHRRTVSEDIICEVKERGVQLVIIGGDLAEGGVPYTRIEENIKRLSSLGKTYFVWGNNDYEVDQERLLEIFKTYGVTPLRNASVLHDHQGQTVNICGVDDIRLELDDYPAALGGVQPGFPTVLVSHNPEIHHQIQEADGIDLILSGHTHGGQIRFGRFGLCEIGGTGTVFKAPYLISNGYGTSKLPLRLGARPETHLIKLVPGPRMEGN

SEQ ID NO: 7734 - protein, 147 aa, Bacillus licheniformis
VGSELEELDRFTDEPTKQMLRALIKRKKKYENYARQTFRWQAVAAICAVSFCVFAASKGIGQNGFLSGLLNDSVYLLWILSAAFAYSTAYYFKKKEEKAEGEYHKLRCEIIQKSTDLWPQPEEWKSRETVFKIMKQQYDINLYFESK

SEQ ID NO: 7735 - protein, 259 aa, Bacillus licheniformis
MTEMSRIERKKREQEKASAEMNREAAAAVELETLDEEIPSRRTYHKKKKSSKKKNKDRNPLFTSLAVMFVFIPIIVFVVFMYMLNQGGDTDPDQYDNVFYENKGETGMTNENQNGEQEADQKAASQHTAAALQEEKLKESKQPENKEDEPSKKDEQKQKERPKEAKKADEQPVAAKKPAASKQPAEQEKKTANAPQTPPVQQAPQPKKVLKHTVGEKETLFRISMKYYKNRSGEEKIRNYNQLSGNNVYAGQVLNIPIY

SEQ ID NO: 7736 - protein, 214 aa, Bacillus licheniformis
MLKKQSEIIRRLSDGEMLKQLYFSQTLMLFTALLMGIFLFDDADAFLSLWNPSDLSILKYGAPLAALVIIADLMVMKWAPKHMYDDEGINEKLFRERSYPHIVILTLFIAFAEEILFRGVIQTHFGLWAASIIFAILHFRYLKKWLLFVMVVSISFLLGLSFERTGNLFVPVTAHFLIDVVFACQIRFQHVRRSSHDGDVKNREEEEGTGEGQR

SEQ ID NO: 7737 - protein, 498 aa, Bacillus licheniformis
MDKLHQALRRYFGYHAFKKGQETIIKSVLEGRDTVAMLPTGGGKSLCYQLPGLLLDGTVLIVSPLLSLMEDQVQQLKMRGEKRAAALNSALTHQEKNDVLNRLHRLKYLYISPEALQSGQMLKKLQLLNVSLFVVDEAHCISQWGHDFRPDYSKLGDIKALLGHPVTLALTATATEATLKDISEILGLKAANYLIHSVDRPNIALHIEKLRDTAEKTERLTGLVQKLQGPGLVYCPTRKWAEELADKLRKEANLRTGFYHGGMEASDRMLIQQQFIRNQLDVVCCTNAFGMGVDKPDIRYVIHFSLPQTIEAYLQEIGRAGRDGKRSVSILLKAPGDEEIQEQLIQMEALSQSDIGFLYEKLAGVKDERCRREALQLAGLSETQARHFLHLYEKVHHLGGDGRAVIQREMDSRRQLKLKKAAGFAAVTETEGCFRESLLAYFNEQKKPPKTDETACCTSCGLSLEAYEVKGDRPSMNKLTAWEEELDTIFAASCDRVC

SEQ ID NO: 7738 - protein, 352 aa, Bacillus licheniformis
MPVHFFDAIVLDILSSMKGERSPSAVYHLLKGKRSSQTIQDAGLFAVSKYFGFCSALSREQVAASVQRLKQESLVREKAESGAYTVTEKGEAELAGFFALYPWPRHFHGGYYQAAAKVMWARMSLLIQVLSNKLYRERVYLPIVKDYQIQNWVKQYLRNRNAAETAAQFHQELKEKLSVLNHDEQAAIFVHSLTSRTKAGYTFRQLSEKMNLDEWYIYALFWDVLHHFIQSAQNGESPLFQTLIHDIPLNDGLTQSTRKTLFLIKEGYTIDRIAKIRKLKLATIEDHIVEIAIHDPSFSIDQYVSKEEQKIIADYAIANQTNKIRQIKEGLGGRYSYFKIRLALSKTVIRNG

SEQ ID NO: 7739 - protein, 82 aa, Bacillus licheniformis
MPKYTIVDKDTCIACGACGAAAPDIYDYDDEGIAFVTLDDNQGVVEVPDVLEEDMMDAFEGCPTDSIKVADEPFEGDPLKHE

SEQ ID NO: 7740 - protein, 192 aa, Bacillus licheniformis
MKHNKVRRLVSISMLSSIAFILMMLSFPILGAFPYLKIDFSDIPALLAVILYGPGAGIAVEAIKNVLNYFIAGSASGVPIDQAANFIAGTLFILPAAVLLKKSSSAKGFVTALFAGTLVMAVSMSILNYLLFLPAYTWFLNAPALNGEALKTTVLAGILPFNFIKGIAVALVSTPIFLSLKPRLKENVRMAK

SEQ ID NO: 7741 - protein, 42 aa, Bacillus licheniformis
VFHFVTLSFSITSHEKRNGSFPCPKQKTRFIEKAGLFYRQVK

SEQ ID NO: 7742 - protein, 49 aa, Bacillus licheniformis
VKKCTGAKLIALFWDILHDISVNSLFPHTKNRTFTVISFLIFVFPRETH

SEQ ID NO: 7743 - protein, 525 aa, Bacillus licheniformis
MFRVLVSDKMSSDGLKPLMEADFIEIVEKNVAEAEDELHTFDALLVRSATKVTEELFKKMTSLKIVARAGVGVDNIDIDEATKHGVIVVNAPNGNTISTAEHTFAMFSALMRHIPQANISVKSREWNRSAYVGSELYGKTLGIIGMGRIGSEIASRAKAFGMTVHVFDPFLTQERASKLGVNANSFEEVLACADIITVHTPLTKETKGLLNKETIAKTKKGVRLVNCARGGIIDEAALLEALESGHVAGAALDVFEVEPPVDSKLIDHPLVVATPHLGASTKEAQLNVAAQVSEEVLQYAQGNPVMSAINLPAMTKDSFEKIQPYHQFANTIGNLVSQCMNEPVQDVAIQYEGSIAKLETSFITKSLLAGFLKPRVAATVNEVNAGTVAKERGISFSEKISSNESGYENCISVTVTGDVTTFSLRATYIPHFGGRIVALNGFDIDFYPAGHLVYIHHQDKPGAIGHVGRILGDHDINIATMQVGRKEKGGEAIMMLSFDRHLEDDILAELKNIPDIVSVKAIDLP

SEQ ID NO: 7744 - protein, 274 aa, Bacillus licheniformis
LKKLRHQNFLFAIAWLSGLALFVNGPGAEASEWIEPIKGEITDQFGTRGGKHKGLDIAAPEGEAVAAAADGTISKSYQSDSYGQVIFIKHDNGYETVYAHLSKRLKKEKERVKKGEQIGIIGNTGISTGTHLHFEMHHGSWTEDKRYAINPLTVLREEAFRQNSIHVHQNAGTMSGAVTVQKGDTLWRISKDSGISIEEIMRINGLKHSNLKAGQTLRLHDDESKTGTYVVRKGDTLHHIAEKMGVTVQRLKEWNDLKGERIYPRQMLEIRENS

SEQ ID NO: 7745 - protein, 368 aa, Bacillus licheniformis
MKKSEWNEERLKALLSQLPTVKDNRSANQIYQKLILAPKRKSPKKRVGAFAATVLVLFLLMLITPQLIEQIRSQNSADANISSDGKLVQTEADAAKSEPANTFVVSQNQKDDYITFAFLDESKSVVVPVSLEKSTGMTNLEDALHAYSRLGVDQFTSFDTAYLDKVKFKEQKNNKKLKIQVDEKIPELSVEDFERLKNVINETFKWGSYDSVLFISNDKSGVEFETFGMLADMAIMHQTQKCYYLYESSDGRRFLAPSSESYESVQEAIKMMKNEESGTHLKPILSDDTPIEDIQKNGKELIIQFSSSANIENKPEDVLMVEGLLLTAKDFGFTKVKFKNASITKVGAYDLSKSVQVPYAPNPMTIEN

SEQ ID NO: 7746 - protein, 194 aa, Bacillus licheniformis
VEETFQKIYDQYHQDLFQFLFYMVKDKNQAEDLVQEVYIRVLHSYETFEGRSSEKTWLLSIARHVAIDWFRKQQTIRQRILGTFDWEKQDVKDRKPLPEDIVMQNENLKEIFEALDKCTLDQRSVIVLRFIQGYSISETAKALNFSESKVKTTQHRGLKVLRKQMELLKEDPKNEEVRMERRTAEGVTKPTSNG

SEQ ID NO: 7747 - protein, 294 aa, Bacillus licheniformis
MKNVILFVLALVITIGSVVSYWIYRTVAKSINGMYEPLHRDAEQKDTAPHDPISILLLGIDERPGDKGRPDSMIVMTVNPKTKKTTMTSIPRDTRVFIKSKNKFSKMNSAYTYGGIEGTVETVEQFLNIPINYYIKINMDGFKDIVDAIGGVTVDNRIDFTLEGVHLSKGKQHLDGKTALTYARMRKDDPRGDFGRQERQREIINEIIHEGAQLKSLTNYQEILAALEKNIKTNLTLDKMIDIQSSYKEAAKDIKQVEIEGEDKKVDSLWYHLVTDEKRMEISKKLRQQLDLKS

SEQ ID NO: 7748 - protein, 276 aa, Bacillus licheniformis
VSNSPKEDHKLSALGKLVLGMLIVFGVTLLCISWNALAGPKQEPIKENSAASASVPGGKHKAEKKESKQTAPEIGKVVYLSFDDGPNPAASDKILSLLDKYHAKATFFMLKPNIEQNPDIVKKMVENGHSVGSHGVTHQVSKIYKSPESFAAEMNDTLKAIKETTNVDTHLIRSPYGSKPYITGPFQEVIKRDHFNLWDWTVDSEDWKSANTNGQFVNNVIQQVNNLSGVEPLVVLMHEKPTTAAHLEKLLKYFQENGYEMKPIHDSIKPVHFRWN

SEQ ID NO: 7749 - protein, 55 aa, Bacillus licheniformis
MLFKYKRKISQKFDQLVNKMSQKEEKHHFLRNDNQANYPAKKVKEVFTKEKPYFG

SEQ ID NO: 7750 - protein, 376 aa, Bacillus licheniformis
MKNKPFIIWAGVLLFLIIIVSSYNVGKRSETIIIPSGEENHIYDQKTRPFQVNTIYRLPKVGQLLGWSSPDSVVGFFKGEGTSERTAHSLQRLSSPYEKAEIVKGIESNTSNLKMSPDGKRIAGVTLSLSKASMQLFSPASGKKTEIASTSASNEVYVQDVSWSNNSRYVCYLVLDVGQGDETGLRVYDTASGTLKTYSLNDFAEKDSLTGVNISDNGRDLLFTVLQRSDEYGIRMGTIDGSRIKIEDKRLDSRGGPVWLNNDQFVFLDTGETLCEYDRRNGELSALLDKVTVFKFSNDFKKIAYSLKDEDNIYAGKLQGKNILYEEPIYHGTIPSEIFWSPDGNSLLVNAQYQYPAMESASVRFLEEQAYIITFK

SEQ ID NO: 7751 - protein, 483 aa, Bacillus licheniformis
VLRTIKGKFIVGFFLIFSLSFLVLNHTVKNVIWSSNEKIVTSDLVELKKNSTVYVNQAFLINHYKNNELYFGDMADEMVDNLNHSTGSNVGVYTVDGALLSSSDQKVFSRGSDEDLQQAIKGKTAYHITYNRNKAKVFFSYPVVIEGTKVGILRFSKNFDLLYKQSGEILDIVFYIALAIFVAAFLFSYILSRHITIPLVKLTDATSQVKKGKLDMDIHFNRKDEIGQLAVNFNDMISRIREQILTIERDRDRLKELNEQEKRFFDNMTHELKTPLTSIQGYAEIIKDKGEADRKFFDKGMNHIVEESRRLHNLVIKLLEVSRETSKSAQFDRIDAGEILKDVCESMKFRAERYKKRITCDIEDGLYVLGEVSRLRQLFINLLDNAIKYSLSHSEIIIKAEIVGENILFTFKNPSDPLENDQHTKMFQPFYSVNQKIKEEGSVGLGLSIVKTIVDEHGGTIEMFYKENHTVIQVELAYAKVEK

SEQ ID NO: 7752 - protein, 233 aa, Bacillus licheniformis
MEKTKILIIEDDEAIADLLSYGLTSEGFETCTVNNGSSGMRKLDQFKPDLLLLDWMLPDCSGLDICKKVTESCNIPILMITAKSDITDKILGLEFGADDYITKPFDLREVVARIRTILRRLEQAHHVNERETEKVDEIRFKNIVIVPGERLVKKDGAAVELTPKEYDLLMTLVDHRGKVFTRSELLEFIWGYDFFGDTRTVDTHIQRLRKKLDASDLIKTVFGIGYKFEKQEE

SEQ ID NO: 7753 - protein, 43 aa, Bacillus licheniformis
LTKNLVPYETKSTCSYRTGAQLFEGKMYPICKISVYPETFMPL

SEQ ID NO: 7754 - protein, 593 aa, Bacillus licheniformis
MKFWKSVVGKLWFTILLLVSFVLFILTFFLLEFIENYHVDEAEADLTKLASKVAVIMENQKDQETARSITWELADELTSIAVIKNENEYWYSPREHQKVASITLKDIKNDPDLNEALRKHQKVQKRTVISNQKNDQLIVGVPYGKGEDEGMVFLSQSLLAVKDTTQHTTRYILFAAAIAIVLTTIFAFFLSSRITYPLRKMRQGAQDLAKGKFDTKIPILTQDEIGELAIAFNQMGRQLKFHITALNQEKEHLSNILSSMADGVITINIDGTILVTNPPAERFLQAWYYEQNMNVKEGHELPPEARELFQNTVSTEKEQMIEMTLQGRTWVLLMSPLYNQSHVRGAVAVLRDMTEERRLDKLRKDFIANVSHELRTPISMLQGYSEAIVDDIASSEEEKKEIAQVIYDESLRMGRLVNDLLDLARMEAGHISLNVEPVELREFFERVFRKFYGVAGDKNITLSHNLDLHEAKFVFDPDKMEQVLTNLIDNAIRHTNAGGTVHVDVQSAESGLKIAVKDSGSGIPEEDLPFIFERFYKADKARTRGKGGTGLGLAIVKNIVDAHNGSITVHSMLNEGTSFTFYIPRNKQDDGQI

SEQ ID NO: 7755 - protein, 240 aa, Bacillus licheniformis
MEQTKETKILVVDDEARIRRLLKMYLERENYKIEEAENGDEAIDKALGNDYDLILLDLMMPGTDGIEVCRQVRDKKATPIIMLTAKGEEANRVQGFEVGTDDYIVKPFSPREVVLRVKALLRRSSQTSYLNTDTTAKNVLVFSHLSIDHDAHRVMADGTEVSLTPKEYELLYFLAKTPDKVYDREKLLKEVWQYEFFGDLRTVDTHVKRLREKLNKVSPKAAKKIVTVWGVGYKFEVGNE

SEQ ID NO: 7756 - protein, 391 aa, Bacillus licheniformis
MAELSGNLLYAAFLLYLSAVFFFGGSIRSKASDRKKKNRWASIAVLITIIGFVCQFGYFIARWIVSGHAPVSNLFEFTTAFSMMLVLAFIIIYFIYKLSALGLFTLPVVLLLIAYASMFPTDITPLIPSLQSNWLYIHVTTAALGQAILAISFVAGVIFLLKHVDHSKPGKKTFWLECVMFMLVTTLAFILVTTSFRIGGYEAQFKWIDKDNQEDVMIYELPALIGPNKGELLTEERMEPLVNVPPIFSGRKLNTVLWSFGTGALLYGVIRLIIRKRISQLLQPLVKNVNLDLVDEIGYRSVSIGFPVFTLGALIFAMIWAQLAWSRFWGWDPKEVWALITFLFYAAYLHLRLSRGWHGEKSAWLAVIGFAIIMFNLIFVNLVIAGLHSYA

SEQ ID NO: 7757 - protein, 543 aa, Bacillus licheniformis
MMKEIKCECGHVNPAGTVLCESCGKPLVKQDAKLLDMRYDGSARRSQTYNKTIVDKIWNFFSSVKVGVWLIVITLTASAFGTIFPQEMFLPPGAQADTYYSEQYGLLGQIYYALGFHNLYGSWWFIILVASIGISLVICSLDRVVPLYRALKNQGVTRNPNFMERQRLFSRTEADMSEDTKSQIIGKLKKKRYRVKEENGNLFAEKGRFSRWGPYVNHIGLIIFLIGVMLRFVPGMYVDETLWIREGETVPIPGTDGHYYLKNNRFIKEMYDSEKEKEVFSEAITKAGDGTVAKTYQTDVELYERKNDSLPGEAPELKKVKNGKIKVNDPLKFGSYALYQLTYKEGELDKMVFQLIEKDSGKSFGKVAIDLLEPKPEYDLGNGYKVHIASYLPDFYFNKDGEPSTKTRNPNNPAFVFQITAPDKPKGEKSFVAIQETIEGSDDNKYKMKFDHVETKNLSGLTIRKDLTLWVLMVGGAIFMIGVIQGMYWHHRRIWLRTLDGHVLVAGHTNKNWYGLKQDLKAALADTGISEPADQKELSKEKK

SEQ ID NO: 7758 - protein, 54 aa, Bacillus licheniformis
MRGRIIEKKAFLHSDRHPPCAACSAWLHAVQRRVSKHGECGGGGKSSQFFAGGC

SEQ ID NO: 7759 - protein, 244 aa, Bacillus licheniformis
MERLQKVIAHAGIASRRKAEELIKEGRVTVNGKTVRELGVKVSSSDRIEVNGIQLESEEPVYFLLYKPRGVISAVKDDKGRKVVTDFFTEVEERIYPIGRLDYDTSGLLLLTNDGDFANKLMHPKYEINKTYVAKLKGIPLKENLKKLERGVRLEDGKTAPAKVKLLSLDKKKQTSIVQITIHEGRNRQVRRMFEAIGHEVLKLKREEYAFLNLAGLKTGEKRELTPHEVKRLRALAEHGKAAF

SEQ ID NO: 7760 - protein, 178 aa, Bacillus licheniformis
LEFINWLSLALIPFIIATILLYGTFKKVPTYEAFVEGGKEGIQIAFSIIPYLVGMLVAITVFRASGALDFFMNLLKPVFSAVGIPTEVVPLALIRPISGTAALGMTTDLIAVYGPDSFIGRLASVMQGSTDTTLYVLTVYFGAVGIKKMGDALKVGLLADLAGVIASVIIVTLLFGSA

SEQ ID NO: 7761 - protein, 195 aa, Bacillus licheniformis
MVNIIWVGLTVIGLVFALFNGTVQEVNEAVFKGSKEAVTIAIGLMSVLVFWLGLMKIAEQSGLLEKFSRLCRPFISKLFPEIPPDHPAMGYILSNLMANFFGLGNAATPLGIKAMEQMKALNRNRREASRSMITFLAVNTSSITLIPTTVIAVRMTYDAKAPTDIVGPTILATLISGIFAIFIDRYFYYRRKKKG

SEQ ID NO: 7762 - protein, 384 aa, Bacillus licheniformis
MRFFLKQAAAAIMICSLLCSSYETAQAQPSLHISAKSAIVMDGQSGRVLFAKDEHEKRRIASITKIMTAILAVESGKLDETVTVSDRAVRTEGSSIYLTSGQKVKLKDLVYGLMLRSGNDAAVAIAEHVGGSLEGFVYMMNQKAAELGMENTLFRNPHGLDDHPDHYSSAYDMALLTKYAMTNETYKKIAGTKRYKAETMQGIWRNKNKLLTGLYKYSTGGKTGYTKLAKRTLVSTSSKDGTDLIAVTINAPDDWNDHMNMFNYVFGHYKTYIIAKKGEIPKLKDSFYGNKAFIKRDVTYLLNEEEKEDVKVDIELLEPKKSWRKNKKEIPDIIGEMNVMFDGKTIASVPIYYENERNKKPKKSFFETFQSVFQKAAGGSSWSI

SEQ ID NO: 7763 - protein, 163 aa, Bacillus licheniformis
MGKSMARAQTEQAGEFLAQTVQTLSDYLNETTLSSLEAEEPGRRDYYRDVLSNLRKLAVYCEEGLAACRIRLQQDPFQEAAAERTLYQVYHRCIEEFFTPKKDTWYEDSRAAYTGKNAICFHEPAPASLKNLMASLETGYQSMREELEYYATDYRMKMVQPRS

SEQ ID NO: 7764 - protein, 197 aa, Bacillus licheniformis
MTLDIVNWKAIVEALLYAAGDEGLTKKQLLSVLEVDEAELLDIMLDVKETYEKEDRGIELVEYADTYMLSTKKEFAVYLKKLIEAPSKGLSQAALEVLAIVSYKQPITRAEVEEIRGVKSERILQSLVAKALLCEVGRADGPGRAILYGTTETFLEQFGLKTLEELPPLPENVEEDGVQEEADLFFENFNQTFEDLK

SEQ ID NO: 7765 - protein, 251 aa, Bacillus licheniformis
MEYQVKIEAFEGPLDLLLHLINRLEIDIYDIPVAKITEQYLLYVHTMRELELDVASEYLVMAATLLSIKSRMLLPKQEEELFDEEFLEEEEDPREELIEKLIEYRKYKSAAQNLKEREEERQKAFAKPPSDLSDYAKEIKLSEQKLSVTVYDMLGAFQKVLNRKKINRPSETRISRQEIPIEERMTQIVDCLKSSRKRMHFMELFPYEQKEHLVVTFLAILELMKNQLIIIEQEHNFSDIYITGSEAIHDA

SEQ ID NO: 7766 - protein, 31 aa, Bacillus licheniformis
MGGKGFGYGGGFALIVVLFILLIIVGAAWIY

SEQ ID NO: 7767 - protein, 173 aa, Bacillus licheniformis
MYPQAYIDYLAEFHGARDYFECHEILEDHWKKDPPGERKLHWVGLIQLAVALYHQRRNNFAGAERLMANSIRILASEKDAVESLGLDYSRFIELLRRTHQKIEAHSPYESIMLPIADEALIKACRKQCEKKSYEWGANAAPDAFIIDKHRLRDRTEVIAERDKQIKRRKKSRG

SEQ ID NO: 7768 - protein, 124 aa, Bacillus licheniformis
MLIRYKKSFEKIAMGLLSFMPNEKDVKQLQQTIKDYESDTERQLFLWKEGEDIVGCVGVEKREEEVEIKHISVNPSHRHQGIGKKMVSAISPIFAPKPLVPNELTKGFFERCQDHENEDITYNQ

SEQ ID NO: 7769 - protein, 154 aa, Bacillus licheniformis
MNKIEGHVIGTDLKIGIVVSRFNDFITSKLLSGAEDTLLRHGVKADDIDVAWVPGAFEIPLIAKKMAETKKYDAVITLGTVIRGATSHYDYVCNEAAKGIAASSMSTGVPVIFGVLTTDTIEQAVERAGTKAGNKGAEAAAAAIEMANLTRSLQ

SEQ ID NO: 7770 - protein, 398 aa, Bacillus licheniformis
MFHTIEEAIRDLKQGKVIIVVDDENRENEGDFVALAEYATPDVINFMASHGRGLICAPLNEEIASRLELQPMVDENTDSHHTAFTVSVDHRDTKTGISAQERSLTVMSLIADHAHPGDFKRPGHIFPLIAKKGGVLKRAGHTEAAVDLAEACGSAPAGVICEIMNEDGTMARVPELKKIADQHGLKMITIKDLIEYRYSKGTLINREVKITLPSEFGTFKVYGYTNEIDDKEHIALVKGDIPFGDEPVLVRVHSECLTGDVFGSYRCDCGPQLAAALAQIEQAGRGVLLYLRQEGRGIGLINKLKAYKLQEEGYDTVQANEKLGFLPDLRNYGIGAQILRDLGVKQMKLLTNNPRKIAGLEGYGLTIADRVPLQMETKKDNEKYLKTKKSKLGHMLHF

SEQ ID NO: 7771 - protein, 215 aa, Bacillus licheniformis
MFTGIIEEVGTILDMKKAGSAMSLVIQSNKVIEDVKLGDSIAVNGVCLTVNEFGSSSFTADVMLETLKATSLGTLKKGSRVNLERAMAANGRFGGHMVSGHVDGTASIVRIEKAANTVYYDLKLDPSLAKMLVLKGSIAVDGVSLTIFGLTEDQVTVSLIPHTLDETIFPAKKVGSIVNIECDMIGKYIYRFLHQTKQEKQAQALTEAFFKENGF

SEQ ID NO: 7772 - protein, 362 aa, Bacillus licheniformis
MTDAHYMNLALELARQGEGQTGANPLVGAVVVKDGEVVGMGAHLKYGEAHAEVHAIQMAGRHAEGAVIYVTLEPCSHYGKTPPCAELIIRSGLKRVVVAAEDPNPLVSGRGIEMLRSAGIEVETGILKEQAEELNEKFMHFMRTGLPYVTLKAAASLDGKTATATGDSKWITSEEARMDAHQYRKNHQCILVGSGTIKADDPSLTCRLPGAVNQPVRVVLDTTLSIPLQSKVIQDKEAPTWIYTTSKADPEKVRNVEKEGVQVTVLDADELQVRDVLLHLADRGIASVFVEGGATVHASFVKEGLYQQIIFYLAPKLIGGLQSPSILSGEGFQSMKDVPLLQFTTITKIGQDIKLAARPIKE

SEQ ID NO: 7773 - protein, 43 aa, Bacillus licheniformis
VKIPTGGNKARDSFRARDPLCFVQSGGFSEKLKPTVKVWMGEG

SEQ ID NO: 7774 - protein, 114 aa, Bacillus licheniformis
MGKIKFKLTVLLVLAAVLAGGFYYLKNGSVQDVSTALSQTVSSEEKNYTIYQYKITKIDGTEYHGVSDNGTKIIFNAKNLNQDLSDIKEGDKVKAYFSNANRIDGLIKVVKVAE

SEQ ID NO: 7775 - protein, 728 aa, Bacillus licheniformis
MRTLVLLRGCPGTGKSTWIRDHQLNQYTLSADQLRLIHQSPVLNLEGKYDISQKNDGKVWKLLFSLLEERMERGEFTIVDATHAKQSMISGYKALVLKYRYRAYVVDFSNVPLETALLRNRERAEHKRVPDSVVHAMHERILSEPAPSWTTVIKPEEFADAMQYKPRRLDSYKKIHVIGDVHGCFTVLDSYLKGRLEDDELYIFTGDMVDRGIENAKVVQFLLRIKDRKNVILLEGNHDKYLKQYGHDEVTRSSVFNKKTKPELDEAGFDKRDIRELARRFHQIAYFTYGEDTYIITHGGISALPDNLLFTATSQLINGVGGYETDIDHVFTKNMEGRNIIQIHGHRNMFRLPVHAAAKSYNLEGQVEHGGHLRVVTIDRSGIQTHEIKNDVFKTSAPPLTSHHAHEELTVEHFLKHLDEHDYVSEQKLAGGISSFNFTRKAFQERKWDSVSMKARGLFINRNTNEIVSRSYNKFFNIEERLTTKMHVLVNTLRFPVTVYDKANGFLGTVGYNSETDELVFTSKSYTSSGQKDGHAKWVEELFYKTFDASQTEAMKEYVKKRNVSLVFEVVLPEKDPHIIEYESDKLVLLDIVKRQMKYEKLLYEDVLRFAETFRVECKQKVITFHQWTDFYKWYLSVSNDPSIEEEGYVIEDSAGFMTKLKLPFYQYWKFIRGIKHRLGAAAARSPQHEALFHSEHVKFLAWAKTKDSEYFKNQSVIAIRNDFYNET

SEQ ID NO: 7776 - protein, 145 aa, Bacillus licheniformis
MPLVPYEPFKHLNTIRREFDRVFADFPANFGGEHGFGDIRVDVHEAGNEIVASCDIPGLESKEDVHIEVENNMLHISGTINRSSEVKEENMHRKERFTGRFHRAVALPAPVSREGIRASYRNGVLEVRMPKDKPDEKKRIDVEFH

SEQ ID NO: 7777 - protein, 101 aa, Bacillus licheniformis
MKSKLLLTAAASVAGLSLASAALMTQTDGVKVAERNVTSAPMQIAERNVTSAPVQVAERNVTSAPVQIAERNVTSAPVQVAERNVTSVKTSPIHIGERNVT

SEQ ID NO: 7778 - protein, 376 aa, Bacillus licheniformis
VSVKIPSTAVGVKINDWYNAIRKFNVTDAEMLKAEIEREISQMEEDQDLLLYYALMEFRHRIMLDYVKPLEEVETPPDFSEILKDIEDEQGKLTGLLEYYFNFFRGMYEYKNHDYIKAISFYRRAEKKLLHVEDEIERAEFHFKMAEVFYHMKQSHVSMNYALQAIETYQAHETYTVRRIQCEFVIAGNYDDLESNEKALSHLEKALKLSQQEGQLILEGHTYYNLGNCYYKMGDFDQAAEYFNRAAAIYQEESSDILPKAFFSLALAYFKLKQLEKADDALNKGIDIARRSDDAIYLSKFHFLKALYVDDDGRAPMLETFQLLGSKKMYPDIEDLALEAAEYYNEIGRLSDSVYFYQTVFSARKQMKKGDWSYEI

SEQ ID NO: 7779 - protein, 39 aa, Bacillus licheniformis
LNIFYIKGHFFTIILFISIVISYQDVDEESASSPVAPGK

SEQ ID NO: 7780 - protein, 145 aa, Bacillus licheniformis
MAKKGYIQLTNGKKIEFELYPDAAPGTVANFEKLANEGFYDGLKFHRVIPGFVSQGGCPHGTGTGGPGYTIKCETEGNPHKHEAGSLSMAHAGKDTGGSQFFIVHEPQPHLNGVHTVFGKVTSGLDAVTSMEQGQGMEKVEVFDA

SEQ ID NO: 7781 - protein, 364 aa, Bacillus licheniformis
MNDKRAARYDAGRAFDLKRKFSLFFFETSLIFHPSIFRNALFPFRQASLKVQQFCLKPAFLRRALSLKKSILGIFTALCLLIFPQVSFADAAVGDVIVTLGKDLSSQDRQKVLKEMNAPENATIIEVTNDEEHKYLGDYIPKAQIGTRAISSSSITVAKKGTGLEVQTHNISRITDEMYLNALMTAGVKDAKVYVTAPFEVSGTAALTGLMKAYETTSGEKISEDVKKVANEELVTTSELGEKIGSENASALMAKVKEEISKNGVPESKEELEKTIDSAASELGVTLTEDQKNSLISLFNNMKNINIDWNQVGDQLDKAKDKITKFLDSEEGQNFLQKLIDFFVSLWNAIVSVFTGGGTSESNG

SEQ ID NO: 7782 - protein, 291 aa, Bacillus licheniformis
MKPAKVSLLHRLLQCLKQCVDCNTVNRFTAINIFVNILLILAVISFPYSAAAHGATQSGDQYSSFEELERNEDPASYRITEKNARVPMLIMAIHGGGIEPGTSEIANEVSKNYSLYLFEGLKSSGNTDLHITSTRFDEPAALAITASHQYVMSLHGYYSEDRDIKVGGTDRAKIRILVDELNRSGFAAEMLGTDDKYAGTHPNNIANKSLSGLSIQLEMSTGFRKSLFDRFTLKDRAATQNETFYRFTKLLTDFIHENYEEDGGDFPSAKIKHPLQVKKGGVSAVVLTVGL

SEQ ID NO: 7783 - protein, 439 aa, Bacillus licheniformis
LFLHGTSRQNERGHLEIGGVDVLSLAERYGTPLYVYDVALIRERARKFQKAFKEAGLKAQVAYASKAFSSVAMIQLAEQEGLSLDVVSGGELFTAIKAGFPAERIHFHGNNKSPEELAMALEHQIGCIVLDNFHEIAITEDLCKRSGQTVDVLLRITPGVEAHTHDYITTGQEDSKFGFDLHNGQVEQAIEQVRRSSAFKLLGVHCHIGSQIFDTAGFVLAADKIFEKLAEWRETYSFIPEVLNLGGGFGIRYTKDDEPLAADVYVEKIIEAVKANAEHFGFDIPEIWIEPGRSLVGDAGTTLYTIGSQKEVPGIRKYVAIDGGMSDNIRPALYEAKYEAAVANRMNDACHDTASIAGKCCESGDMLIWDLEIPEVRDGDVLAVFCTGAYGYSMANNYNRIPRPAVVFVEDGEAQLVIQRETYEDIVKLDLPLKSKVKQ

SEQ ID NO: 7784 - protein, 109 aa, Bacillus licheniformis
MYPNRYPYTPAPGYAPEDVYAPYQPAAHYEQRIYEPYEGQIITAPANTRFWRRGTEVFLHSSTIDPYGREMLYVVYPIRRQNNICSLRAVAISANEYKGIGTQRPEFDY

SEQ ID NO: 7785 - protein, 490 aa, Bacillus licheniformis
MSAQKQEKTNVFLDPSKNEAYFKKRVGMGESFDLGVRKVFILGHEVQLYYVNGLCDTQYIIHLLRELVHLNDKEKESGEVEDIVENRLLNQQVSKAETLDEAVDQVLSGLVAIIVEDAGFAFIIDVRSYPGRTPEEPDTEKVVRGARDGLVENIIVNTALIRRRIRDERLRYKMLHIGERSKTDICLCYLEDVADPDLVEVLKKEIEDVKIDGLPMSDKSVEEFLVGQGYNPFPLVRFTERADVAASHILEGHVIVIVDTSPSVIITPTTLFHHVQHAEEYRQTPAVGTFLRWVRFFGILASTFLLPLWLLFVIHPSLLPDNLSFIGLNKDTHIPIIMQIFLADLGVEFLRMAAIHTPTALSTAMGLIAAVLIGDIAINVGLFSPEVILYVSLSAIGAYTTPSYELSLANKMVKLFMLILVALFKVEGFVIGLTILTIVMTSIRSLRTPYLWPLLPFNGKAFWHVLVRTSVPGGKVRPSIVHPRNRSRQP

SEQ ID NO: 7786 - protein, 200 aa, Bacillus licheniformis
MPAKRKVILVTDGDIYAAKAIEYATRKTGGRCISQSAGNPSVKTGPELVTMILQTPHDPVFVMFDDSGLQGEGPGETAMKYVAMHPDIEVLGVIAVASKTHYAEWTRVDVSIDAEGELTEYGVDKHGVKEFDVKRMNGDTVYCLDQLDVPIIVGIGDIGKMNRKDDVEKGSPITMKAVELILERSGYHECSKAREDERIP

SEQ ID NO: 7787 - protein, 116 aa, Bacillus licheniformis
MEYVIAFIAGGLICVIGQLLLDIFKMTPAHVMSTFVVSGAILDGFGIYDRFIEFAGAGATVPIVSFGHSLLHGAMHQAEKHGFIGIGMGIFELTSAGISAAILFAFLVAVIFKPKG

SEQ ID NO: 7788 - protein, 339 aa, Bacillus licheniformis
MKLTGKQTWEFENPLFVNSSGTAVGPKEKEGPLGHLFDKSYDEMHCNQKNWEMAERKLMEDAVQSALSKQNLKKEDIDIFLAGDLLNQNVTANYVARHLKIPFLCLFGACSTSMESIAISSALIDGGFAKRALAATSSHNATAERQFRYPTEYGGQKPGTATSTVTGSGAVVLSQQPGGIKITSATVGRVIDLGITDSQDMGSAMAPAAADTVKQHLEDLGRTPDDYDLILTGDLSGVGSPILKDLLKEEGINVGTKHNDCGLMIYTPDQQVFAGGSGCACSAVVTFAHIFKEIEAGRLNRVLVVATGALLSPTIIQQKESIPCIAHGVVFERAERGNA

SEQ ID NO: 7789 - protein, 149 aa, Bacillus licheniformis
MSSLKDNYQSKVKAYQPSPPYVLNCIKAFLVGGLICTIGQAFQNFYMAVFHFDEKTAGNPTVATLILISALLTGLGVYDRIGQFAGAGSAVPVTGFANSMTSAALEHKSEGYVLGVGTNIFKLAGNVIVFGVVAAYIVGMIRFAFDKLF

SEQ ID NO: 7790 - protein, 141 aa, Bacillus licheniformis
MIISVIFIIFLGLAGGVAVGSGFVAFLTVLGIIPRLTQLTKTKGFIQAYEWAVILGAVFGGWESLNMSRFFLSKWLLVPIGLFAGVFIGMLAAALTEVLNVLPILAKRIGMGDRILILLMAIVFGKILGSMFQWLIFVHLS

SEQ ID NO: 7791 - protein, 206 aa, Bacillus licheniformis
MERQVFIRLRHRLEADPDELILLGHIAQVAGDRGYKEKLERLPIYQVSKADQSMVVLDVMKVIEAVHKSFPDLDVQTVGGSETIVEIQYPKRGLSPVLFIAVWLLLFVGAGLAVMNFHEDVSMREVHILLYEMVTGKVNRYPYLLQVPYSIGLGLGMILFFNHLFKKRFNEEPSPLEVEMFKYQLDLDHYVAMHENKETTKDIHDH

SEQ ID NO: 7792 - protein, 41 aa, Bacillus licheniformis
MKYIPFIIQKGAKDHKLPHKKNRNAPKSVRFFIGHPRLPAT

SEQ ID NO: 7793 - protein, 255 aa, Bacillus licheniformis
MDVEVKKENQNTQLKDHEVKELIKNSQNGDQKARDLLIEKNMRLVWSVVQRFLNRGYEPDDLFQIGCIGLLKSVDKFDLSYDVRFSTYAVPMIIGEIQRFIRDDGTVKVSRSLKELGNKIRRAKDELSKSNGRIPTVQEIADYLEISSEEVVMAQEAVRSPSSIHETVYENDGDPITLLDQIADQSEEKWFDKIALKEAIKDLDEREKLIVYLRYYKDKTQSEVADRLGISQVQVSRLEKKILKQIKNQMDHFES

SEQ ID NO: 7794 - protein, 146 aa, Bacillus licheniformis
MKNEMNIQFTALSQNESFARVTVAAFIAQLDPTMDELTEIKTVVSEAVTNAIIHGYENSGQGNVYISVTLEDHIVYLTIRDEGVGIPDLEEARQPLFTTKPELERSGMGFTIMENFMDDISIDSSPEMGTTIHLTKHLSKSKALCN

SEQ ID NO: 7795 - protein, 117 aa, Bacillus licheniformis
MSLGIDIHVKESVLCIRLTGELDHHTAETLRKQVSDHLEQTDIRHIVMNLADLSFMDSSGLGVVLGRYKEIKQLGGEMIVCAISPAVKRLFDMSGLFKIIRLEQSEQRALETLGVAS

SEQ ID NO: 7796 - protein, 390 aa, Bacillus licheniformis
MKRHLSKLLIFTIILMTAPSALAKESAKKPSELADDAKSAVLIERDTGKVMYDKNSREKLPPASMTKVMTMLLIMEALDEGKIKMKDKVRTSEYAASMGGSQIFLEPGEEMTVEDMLKGIAIGSGNDASVAMAEHIAGSEEEFVKRMNEKAAELGLKDTSFQNTTGLPEEGHYSTAYDMALMAKELLKYENITKFTGTYEDYLRENTDKKFWLVNTNRLIKFYPGVDGVKTGFTNEAKYCLTASAKKGNMRVIAVVFGASTPKERNAQITKMLDFAFSQYETHPMYKRNEIISDLKVNKGREQKINLVTSEPISLLTKKGENIESVKKEIKQKEDIQAPVKKGTELGTLVLEKDGKVLAESPIVAEKDMDKAGMWTMFKRTMTHWTKWSE

SEQ ID NO: 7797 - protein, 271 aa, Bacillus licheniformis
VKQMIANAADYIKSKTEIKPAVGLILGSGLGVLADEIEDAVRIKYEDIPDFPVSTVEGHAGQLVIGRLENVQVVAMQGRFHFYEGYSMDKVTFPVRVMKELGIETLIVTNAAGGVNESFRPGDLMIISDHINYMGTNPLIGPNDSSLGVRFPDMSSAYDKELRLLAKKTAEELNISVQEGVYTAVTGPTYETPAEVRFLRTIGSDAVGMSTVPEVIVAKHAGLRVLGISCISNAAAGILDQPLSHDEVIEVTEKVKADFLRFVKAAVAKIG

SEQ ID NO: 7798 - protein, 394 aa, Bacillus licheniformis
MPAFDYNRVFLIVMDSVGIGEAPDAEKFNDKGADTLGHIAEHMGGISLPNMAKLGLSNIREIKGVEKAEKPLAYYGKMKEASNGKDTMTGHWEIMGLYIDKPFRVFPEGFPDELIHELEQKSGRKVIGNKPASGTAILDELGAEHMETGALIVYTSADSVLQIAAHEEVVPLEELYKICEIARELTLDEKYMVGRVIARPFVGKPGEFKRTPNRHDYALKPFDRTVMNELKDDSFDVIAIGKISDIYDGEGITESLRTKSNMDGMDKLVQTLDKGFTGISFVNLVDFDALFGHRRDPEGYGKALEEFDARLPEVFEKMREDDLLIITADHGNDPVHHGTDHTREYVPLLVYSKKHEKPGALPLADTFADIGATIADNFKTNMPKYGKSFLSLLK

SEQ ID NO: 7799 - protein, 296 aa, Bacillus licheniformis
VKVHIKDFIHYAVVERGLSHNTVVSYERDLNSYAAYLEEQEQLNSFDQVTRLHIIQFLKHLKDAGKSGKTVARHLASIRSFHQFLLREKVTAQDPSVHIESQKTERTLPKVLSLQEVETLLDTPKLTGPFGYRDKAMLELLYATGIRVSEMIALKLSDVHLSMGFIRCFGKGRKERIVPLGEAASHAVGEYLSKARGKLLKKNTEDALFLNHHGRQMSRQGFWKNLKKIALEAGINKELTPHTLRHSFATHLLENGADLRAVQEMLGHADISTTQIYTHVTKTRLKDVYRQYHPRA

SEQ ID NO: 7800 - protein, 74 aa, Bacillus licheniformis
MKMLKTAADMIKVFVLFTGFTVLFYYAMIWINSEYENYHRYDKPEGAALKVASMEEDEQGSWFNRLIFFYLNGE

SEQ ID NO: 7801 - protein, 149 aa, Bacillus licheniformis
METRIDRIKKQLHSSSYKLTPQREATVRVLLENEEDHLSAEDVYLLVKEKSPEIGLATVYRTLELLTELKVVDKINFGDGVSRYDLRKEGAAHFHHHLVCMECGSVVEIEEDLLEDVEEIIEKDWKFKIKDHRLTFHGICHDCQQKESE

SEQ ID NO: 7802 - protein, 218 aa, Bacillus licheniformis
MRKPTIKELIFQHMKDHLSIYLFVSVLFLMGVIFGAVIVNSMTIGQKEDLFYYLNQFFGQLSEGKAASSKEMFLQSFLHNMKYLGLMWILGISIIGLPVIFIMVFLKGIVVGFTVGFLVNQMGINGFFLSFVSVLPQNILLIPAYLIMGTCAIAFSMRLIRQLFVKRSLAEAPVHWFGRYAFVLVLILAMSLISSFFEAYLSPVLMEKLTEYVLPKQH

SEQ ID NO: 7803 - protein, 448 aa, Bacillus licheniformis
MSGFMEKFERNVERFLVPVAAKLNSQRHICAIRDAFILSFPIIMAGSIIILLNFAILSPDGFIAKILFLEKIFPNLADYQSVFTPVLRGSLDIMSIFVVFLVARNLAISMKADELLAGLTAVSCYFIIYSPYRLIENESFLTTKWLGAQGLFVALIIGIIVGEVFSRLSNAKRLQIHMPPQVPPAVARTFKVLFPIIFITIGFAILSFALMSLSKNGLHELVYTVLQAPLREMGTNIFTVVFLGIVANFLWLFGIHGPNTIAAIRETIFAEANLENLGFAAKTGSAWNAPFPETWALNDAFANYGGSGMTLGLLIAIFIASKRRDYKDIGKLSIGPGIFNINEPVIFGLPVVLNPIFMIPFIIVPAVNTVIGYLFIKFQLIPPIAYAVPWTTPGPLIPFLGTGGNWLALGVGFLCLAISTMIYLPFVMAANKTVNTDREHSAENRKES

SEQ ID NO: 7804 - protein, 99 aa, Bacillus licheniformis
MKKILLVCAAGMSTSLLVSRMKKHAEALNEEVDIIALPVSEAGTAASSADVVLLGPQVRYQKSQVEASAGDTPVQVIDMRDYGTMNGEAVLQKALQLMK

SEQ ID NO: 7805 - protein, 490 aa, Bacillus licheniformis
MKPVHQEKIQTDLTLSNSDLQPLKPEERTWKAVNFASIWMGCIHNIPTYATVGGLIAIGLSPWQVLGIIAVASIVLYSALALNGHAGAKYGVPFPVLIRSSFGIYGANIPALLRGFVAIMWFGIQAFAGSTAINILILNVWSGWKDIGGDWNLFGLHLPGLLSFVFFWGIHLLVLHHGMESIRRFEVWAGPLVYLVFGGMVWWAVDIAGGLGPIYSQPGKFQTFSELIWPFLAGVTGIIGIWATLILNIQFAASQKEQIRGQFYGLPGTFVLFAFASITVTSGSQAAFGEPIWDVVDILAHFDNPYVIALSVITLCIAAISVNVAANIVSPAYDLANFLPKYIDFKRGSYLTAVLALFTFPWKLMENEASVFSFLGTIGGILGPVAGVMLADYFIIRKRTLCLEDLYSAKGQYMYYKGYNYRAFAAVALGALISLIGSYIPAMKPLYDISWFSGVLIAAFAYIFLMRIHPPAAISNETAQYEGGGRKISG

SEQ ID NO: 7806 - protein, 186 aa, Bacillus licheniformis
MNPILLDFPDSFETERLLIRAPRAGDGKAVYDAIAASFSELKPWMPFAREIPEEERVEINVRRAQADFILRNDLRMHIFHKETGKFVGSTGLHRMDWKAKRFEIGYWRSSEFSGQGYMTEALNGLIDFARRHVRAKRLEICCDSMNTKSRKMAERLGFELEAVLQSDDLSNDLSEYRDTCIYSRIF

SEQ ID NO: 7807 - protein, 123 aa, Bacillus licheniformis
MAKSKARKKREHMLRNTGRDAAASRGKAPDFGTHVRKTKSRREELAKLHMKHKRKNPYDLLHEDHKGSFFRRCGNKCMCPDIRSNRSKGHRFVKRLQARNRGAPPFFCFSCSCCHNISQAAWL

SEQ ID NO: 7808 - protein, 150 aa, Bacillus licheniformis
MEWKLKSYEELSKEELYRIIKLRIDVFIVEQNCPYHELDHLDERAHHLFLSQEGEIAAYCRLFPSGTAYPEASIGRVIVRKEDRGKGYAQALLDKAIRFLEGEWEETKVKISAQNHLRSFYGSFGFKAISDVYMEDGIPHVDMVRTEEAV

SEQ ID NO: 7809 - protein, 387 aa, Bacillus licheniformis
MKEIFADMHIHIGRTESGRPVKITAARTLTLDEILIEASEHKGMELIGIIDCHSSEVLAEIEKGVSSGRYTELEDGGIKYKDTVLLCGSELEINDDRCRGPIHVLAFMPSISAMKQFSGWLSERVTNIHLSSQRIYETGIGLQRKVKELGGLFIPAHIFTPHKSLYGKGVEFSLKEVFDPRMIDAVELGLSSDTDMASHVSELNPYAFLTNSDAHSLGKIGREYNKLHIKHASFQEFSLALKGQEGRSIAANYGMNPQLGKYFQTACETCGRLQEADETLCKACGSRKFTKGVSTRLMELYDQDESPVKRPPYVHQVPLQLIPGIGPKTIQKLKEAFGTEMNILHRVKEGDLKETIRPQTAELVIKARNGDLELKAGGGGTYGKVQS

SEQ ID NO: 7810 - protein, 188 aa, Bacillus licheniformis
MIKLKHLEEKTISKEKLFSGKVIDLYLEDVELPNGKTGKREIVKHPGAVAVLALTDEENIILVKQYRKALERTIVEIPAGKLEKGEKPEYTALRELEEETGYTAAKLEKITAFYTSPGFADELVHLYLAEELTPLEEKRELDEDEFVEVLEVPLSGALKLMETQDIYDAKTAYAVQYLELRKALQAKK

SEQ ID NO: 7811 - protein, 58 aa, Bacillus licheniformis
MKVYRLNDRIVMSGKAWEIRAKLKEYGRTHHYVKDWLSEKENRLQKLNFIDIKKDCMK

SEQ ID NO: 7812 - protein, 201 aa, Bacillus licheniformis
VGIEKGRKGKQSRKRLLEVAANEFANRGFHETKVSTIVKRAGLTQPSFYLYFPSKDAIYDELINGFHANLKNLIESFHLEKGIEKKHVSKRVTAAVEAVFRFLAEDPDLTRIGFFLSPEAGEMKKDLTLALKENLKAEQELGYFRSDLEMETVAECLTGMIEHLADIYLLDGSKDPSSLAKQITDLLIHGMLVNPQHPETE

SEQ ID NO: 7813 - protein, 115 aa, Bacillus licheniformis
VAFIFLKAGLAAFMLTGGVIKVLHVPFQVEHWRHYEYPLWFLSVTGCLEIAGALGMIGGIWNVHLAVGSGLLFSLLMTGAIHAHLVRARQPFFTAIPAAVCLICALSMIIVELYF

SEQ ID NO: 7814 - protein, 306 aa, Bacillus licheniformis
MKKRTLGHSDLQVSEVGLGCMSLGTDKKHALSILDEALELGINYLDTADLYDFGRNEEIVGEAIKSRRQDVILATKAGNRWEEGKPGWFWDPRKAYIKEAVKRSLKRLQTDYIDLYQLHGGTIEDNIDETIEAFEELKQEGVIRHYGISSIRPNVIKEYVKKSNIVTVMMQYSLLDRRPEEWLSLLEEHGISVIARGPLAKGILTEKPLSDANASIKKSGYLSYSYDELIKTKADIEKTAPDLSATETALKYILAQPAVGAVIPGASKLSQLRENVESVGGRSLTEQEIKALRFYTKRDVYTAHRE

SEQ ID NO: 7815 - protein, 77 aa, Bacillus licheniformis
MGKKKQDPNTRQLLKDALADDLKHKLQQMKSELKEEDEKRKEREKERLIKERQEREKNKSFEELLNESGLDDWRKYK

SEQ ID NO: 7816 - protein, 309 aa, Bacillus licheniformis
MLIWLAAIGAVLLFIAALGIYFTNQIMYIKKRTDQYIIERETADGHYDEKAFAALPKEEITLASSYGYNIKGYYVHPHKTKNTVIICHGVTMNLLNSIKYMNLFLDLGWNAVIYDHRRHGASGGKTTSYGYYEKNDLKTVVNWLREKHGEQALIGIHGESMGAVTTLLYAGMDDAEADFYVADCPFATFEDQLIYRLKEDFHLPGAFILPLASLFLRWRDGYRIRDVSPLSVVGKIKKPVLFIHSKHDDYIPAESSEMLYEKKPGKKRLYIAERGAHAMSYTQNRNSYKNTVRDFLQEITNRHKEGERA

SEQ ID NO: 7817 - protein, 79 aa, Bacillus licheniformis
LNQKAKSLKQTAQNKTWASFLHQNHPYTLLHWSIGGTESVKKDVWLLQDEMTFETKEFDTIETAISWIGDHMSDITDIL

SEQ ID NO: 7818 - protein, 107 aa, Bacillus licheniformis
MQLEITAQARQAIQRATEPYPDKKIQLRYDSEGCGCAVSGVPVLWLTDELSGSCEPLETNGLPIYIQSSQKVFFDEAMTIDYYEKAGALMLKSPAQVLSPRMSILVK

SEQ ID NO: 7819 - protein, 65 aa, Bacillus licheniformis
MSKKVQIKVMDNGGFRVTGDVELIDMEGNSFPEKPAFSLCRCGKSLKMPYCDGSHKGMFDSCVRA

SEQ ID NO: 7820 - protein, 323 aa, Bacillus licheniformis
MIQLLNQKDPHTARSIVNVQRPAYEREAEIIQFQGIPQLNETVFDVMDSRETFIGSFEGEELAGIASFIHTAEKLTICRLAVHPVHFRKGIAMALLRYILMVKEAESFEVTTGAGNEPAKALYRKLGFSEIEQYEPEKGVVLSRLTLQAPRKVKVVSYKEEWKGEFFKEKKQLEALFRNEVLHIHHIGSTSIPGMSAKPIIDILIEVKDLGSAAGFEKGMKMLGYEPKGENGIPGRRFYQKGRRKRTHHVHLYESGHPDIRRHLAFRDYLISHPERAEEYAALKMKLAEMFPLDIAGYIDGKSGWIKETERLAEQWEKAEEDR

SEQ ID NO: 7821 - protein, 122 aa, Bacillus licheniformis
MISKTPEPPYYAVIFTSVRTNGDNGYKETAENMLKLAAEQPGFLGAESARDMNGKGITVSYWESLEAIEKWKFHGEHRQAKEKGRTEWYSDFAVRIAKVEDARISERSGRPPSDGTSGEEMQ

SEQ ID NO: 7822 - protein, 49 aa, Bacillus licheniformis
VDLDENMGFEASLSCAACAGCKAVRCMSTMCRLVITRDFRWKKVSKVFE

SEQ ID NO: 7823 - protein, 204 aa, Bacillus licheniformis
MRRHSFLSILLICMLSVVSVFSFRPSAASAASHNPVVMVHGIGGADYNFIGIKSYLQSQGWTSSELYAINFIDKTGNNINNAPRLSEYIKRVLNQTGASKVDIVAHSMGGANTLYYIKNLDGADKVGHVVTLGGANRLVTNTAPQNDKISYTSIYSTSDYIVLNSLSKLDGANNVQISGVSHVGLLFSSKVNALIKDGLTASGK

SEQ ID NO: 7824 - protein, 71 aa, Bacillus licheniformis
VMMITVKIRHTAETEGTDIGDFTPAELESIVQTIRKYGAWLSPDADTDDYKFTFQDAKYNLEQRVFEIIVE

SEQ ID NO: 7825 - protein, 509 aa, Bacillus licheniformis
MAYIAKRMIIPIIFLFILASCSAGGAGSAKGEEKKLTFLFNIPSQTLDPNLDVNYTAIRAGISETLVKISADLSIEPWLAKDWKSKDGQTWVFTLKDNLTFQNGKKADAKAVKASLERTMRESKAMKNALKIKEIKAEGQTLTITTKEPFPEFPSELVHPNTSIIDVSAANISQQPVGTGPFQVSSFEAGHKIELERYDDYWDGKPKLKHVTFSFNEDANARVMALQSKDADIIYRPSVEDIDQIQKDSSITVDSVPSLRVHQILYNTKKDHLADRHLRRAFDALLNRKEIAESILNGHAQPADGPFLADFPFSSDTVQKPSGLQAAKAELKKAGYELENGKAVKDGKALSFTLLTYQSRPELPLIAQILESNAKELGISIKIQQVENIDEYLAKNDDWDLATYSSMTAPRGDASYLLNTAYMPNGALNYSGIENQTLIKWIKEFNRTIDKEKRNRLAKKAAELIEKETLNSFIVTPENITAYRDGVLNWETSKSEYYMLTKDLDVKTK

SEQ ID NO: 7826 - protein, 313 aa, Bacillus licheniformis
MKQIAKRLFELVLFLFLLSFISFVFMKAAPGDPVKQMLRVDDVAVTDEQIEAFREELGLDKPVYIQYWNWFKRFFQFDLGKSYTTHEPVIDELSRKFPATLLLTGASLLVMLLIAVPVGTLSALYRDRWIDHLSRLLALVGAALPSFWLGLILIDLFSVRLNWLPSMGAGTFKHLILPSLTLGIAMSGVYVRLVRSSLIESLGQDFIRSARARGISEARIFFFHAFRHCLVPVITIFGVSLGSLLGGTVIIEVLFAYPGVGKLVVDAIVQRDYPIIQGYILFMGIAVVLINLLVDLSYRYLNPEIRLKEAGRR

SEQ ID NO: 7827 - protein, 273 aa, Bacillus licheniformis
MRKNVFRSKTGLWFVLLFSAALFTVPFFLPFDPLRTDMANRLQPISMQHWLGTDHLGRDIFSRMVAGAKATVGTALGAILISVFIGVPVGLVSGFFGGRLDRMMMRIVDAVMAFPDYIVAIVLSGLLGPGLMNLILAVVAVKWVGYARLVRSTVFSEKQKDYIALAELTGLSSGAILKKHLLPHVLGNLSVLATLDIGKTVLMIAALSYIGLGAQPPYPEWGAMLNDGKHYFLHAPQLMVIPGLAIMFIVLLSNLYGDRLRDRFDVKHKKGVS

SEQ ID NO: 7828 - protein, 280 aa, Bacillus licheniformis
MPMLSIEDLSISSRQHTIVKNASFSIHGGEWFALLGESGSGKSLTASAIAGLLPDGLTVTGGDVIFEGQQMLQAGRKALRRVRGKDIACIFQDCHGAFTPFIRIGKQIDEMVKTHTGWSKNKRREAILHAFREVSLPENRVYESYPFQLSGGQLQRAAIAQAMVLRPKLLIADEPTTALDSITAADVLQQLAAMRAKTNCAILFITHDLRLVKRYADQTAVMQNGEIVESGLTADLIRQPAHEYTRCLFAAIPPLKNPPPRLTAAPPETKEAVLAGTGGA

SEQ ID NO: 7829 - protein, 261 aa, Bacillus licheniformis
MTHSAETVLFVSNLTKHYACGHKAVDNVSFSIRKGECLGLAGESGSGKSTLARCLLLLEKIDHGEIRLHQHPLTGINKKETRRLRRKLQAVFQNPAASFNPKLNIIDSVMEPLDVSKQDMPSFLRDFRGSRRLTAERLFSMVGLPSRLLDRYPHELSGGQRQRALIARAISTHPSLIIFDEPTASLDVTSQAKILDLLKDLQDAMGLSYLFISHDLAAVHFMSHRIMVMKDGQIADQFEKEELFSAERHPYAKKLLQVFES

SEQ ID NO: 7830 - protein, 452 aa, Bacillus licheniformis
MNHKQYLALAVPLIISTITTPLLGAVDTAVAGQLSSPAYIGGVAVGTMIFNTMYWLLGFLRVSTSGFAAQSLGSQNRSESVLALARPVCIALFAGLMFIILQKPLEYAALTLIQPDRHTAEFASQYFSLRIWGAPFALISYCILGWLMGMSLIKVTLLLQISMNVLNIVLDIVFVYVFHMEVYGIALATLISDVTGCLIGCWLVKTNAAMPFKLPSVKLLFDPKPFKKMMVVNRDLLIRTLCLLTVFNLFTAKGAGFGAEILAANAILIQIHYLMAYVFDGFANASSIFAGKAVGRMDRDLYSRTLSLSIQWSLISAALLSVGYFLLRNAILPLFTPLESVLEAAKTYDVWIALFPLATSFGLVFYGIFTGATEIGPVRNSMFLAVLVFLAAFFTAVPAFGNHGLWLAFLLFSLGRSVFLCMAVPGLTTRLFGERSAAREAGQRPKSLKHPG

SEQ ID NO: 7831 - protein, 213 aa, Bacillus licheniformis
MKTPFIRNDQYNFIKFQTDSLVQGHANINDENVLDALKCNALDQVFNLFPDLSSDQKSLLEKLAEVEDSGEAVRFLAELKLHVIPFQNVTVKTAKKLFSKVKKLKTPEFEQMDFSGYSYLGWNDAGSGRKYMIVDAGGKLTGIHGTIKSSNKKGICSICNRTEEIGLFMARVKSGKETYTDRGNYICCDSEKCNQNLMTLDHLNHFVAQLTKE

SEQ ID NO: 7832 - protein, 29 aa, Bacillus licheniformis
MVNDIHLPTAASHAKPVILKGDTLHEAGL

SEQ ID NO: 7833 - protein, 112 aa, Bacillus licheniformis
MLRDRGSIKWVSMMLPEHVELLREYHESFQKIKKPILDEQKYEEFNEIICEAMAENRFLQFAYYRQGEVKTLAGRIHYADALKRELRIVSRADEICILKIEDIIEIEYDCRL

SEQ ID NO: 7834 - protein, 420 aa, Bacillus licheniformis
MDYSQYPSRSVLCVDMRSFYASCAAVLLGLDPMTCFLAVVGNTERQGSIVLAASPALKREFGVQTGTRLYQLPDDPRIKLVNPKMGLFVRVSTELTRLFCRYVPPDAIHTYSVDESFIQVDGVESMWGDARTIAMKIQDDMEREFGLPCAVGIGPNLLMAKLCLDLEAKKSAGGVAVWGYEDVKTKLWPLSPLRRMWGIGSRLEKTLNRMGIFTVGQLAHYDLSRLEKTFGVMGNQLYYHAWGIDLSAIGAPLMEGQVSYGKSQILLRDYPNPEEVKHVILEMCEEVAKRARAHRQAGRTVSLGIEYSRDELGGGFYRSKTMESPSNVTLDLYHTCLALFERFYAGKTVRKISVSLSNIQDDTNMQLDLFRPDQEKKRQLGYVMDGIRERYGSTALLRAVSYTNAGTARLRSKLVGGHQA

SEQ ID NO: 7835 - protein, 27 aa, Bacillus licheniformis
LTIPVRNFALFSLMIQIECSLENISFS

SEQ ID NO: 7836 - protein, 70 aa, Bacillus licheniformis
MDEKLIEKMLGQALKQYGRNVATDPLSPGEKKILKLALQERRIEEPNEGLHAHIEDVIYDYVTNQGLFSS

SEQ ID NO: 7837 - protein, 412 aa, Bacillus licheniformis
MKQKWQNIHPLSWTIIVGTIFGRMGTAMSIPFLAIYLTQVKGASSGFAGAVIAASSLIGIAASFYGGYLSDRFGRKTIMLVSIFGWTFVFAGFALADHVWTFFIMNALNGLCRALFEPTSRALLSDVSKPETRLFVFNLRYTAINLGVVFGPLLGLYLGSSKTTLPFFIAAFIYFIYAAVLVIQFKHHTVPAAERNKRIKVRDALEVTKTDRVFTITLIGSILCLFGYSHFTSTLAQYMAASPFIEDGTKVFGMMLTLNALAVLAVQYPIVHIAKRFSPILSLIAGNVLISGSLFSLSFFNDLWSIVLIIIVFTIGEVLLFSMMDLLVDRIARPELKGTYFGAMGFTQLGSVVGPWAGGMLLDTFGAEKPFFTFAILSAATICGVPFLVAAYRKLKMDEAKVNLSSKKTMQH

SEQ ID NO: 7838 - protein, 127 aa, Bacillus licheniformis
MIHHIELYVSDLEASKRFWGWFLGELGYEVFQQWEGGISWKANGAYLVLVQAKEQFIKAGYHRCRVGLNHLAFYAASKEQVDEMTMKLRERGCRILYEDRHPFAGGNGHYALYTEDPDRIKVELAAP

SEQ ID NO: 7839 - protein, 319 aa, Bacillus licheniformis
VANQDLNLHTLYTSHTRDAWANLGGHMSVKMTEEEVKKLEGLNDYLSLEEVETVYVPLARLLYLHRATQFERNTRVNGFLNHPHAAKIPFIIGIAGSVAVGKSTTARIIQTVLSRLQERLKVSLITTDGFLYPNSVLTEKQMMSRKGFPESYDVKALLEFLNDLKSGKEIVHAPVYSHLTYDRLEGVYETVEQADIVIIEGVNVLQTPTIEDDRTKPRVFVSDFFDFSIYVDAEEDLIIKWYLERFRMLRETAFQDPSSYFHKFKDLADEEADHMAKSIWETVNRPNLYENILPTKFRSDLILRKGEGHKVEEILVRRV

SEQ ID NO: 7840 - protein, 321 aa, Bacillus licheniformis
MSIKNIYNIFKKELAFQSYSKLLIILLLPLLFISSGYIYVHYKNTMDSYQQFKKTENEYKELGIDIKQALESPVKVKEGELKSEDGDGEIVENILRFDYENFVLSLHHLEPKQSVTMTLELMGFIIFPLGFTLYAIYISSYDIRFKTMKVKAVSHDWKSVLFAKQCSVYMVMAAAVIAVVCTAYVSSLVFYSLASRDIPVGEFTIPAVSKSNILLQLAVVLAVSFIFSTIGFYLGVLFRSFITPALLYVVYSLLIPALGRFDLKNLLSNLGHAVFSFSGGFKLFTPVKVDMIPVIIILAASVGLLSAVTYYMAHRQSKYVV

SEQ ID NO: 7841 - protein, 220 aa, Bacillus licheniformis
LIKIDDLTKSYGSKSVFNRLNMNIEKNKVTFLMGENGAGKTTLLKCLLKLEPFEGGILYDGEPLEAVRSKVHVIYDDSPFYDHLSGYQNIKLLINKPAGKEELEQLSQKFLGRELLKKKVKTYSYGQKKKLALMIAALNKPSFLFLDEISNGLDYRSMMELQELINDWSSRMTIVAAGHQFEFYSSIVDQLYVLKDGSAIHIDNFKTNGAELGDVYKEYL

SEQ ID NO: 7842 - protein, 162 aa, Bacillus licheniformis
MKKAILGFSLSAALLVPSSFAAAAGDGQLTSEQKELLEAKTEYVQSLPEQASVQSGVTAYAGKRLTIKRGSFLAWSKDYIDWYYNGKKVSKSSGSQDVGYVFPNVVRAKGIKRYYKSSGLHKWRAKKTLSFGTVTPWGDVELASSTFTDRRWVNKKGKYGND

SEQ ID NO: 7843 - protein, 86 aa, Bacillus licheniformis
MFQNKIKKAVGAVASAGALLVSGLPVSADTLPELIWVRDKYPGAQYEYKVINGERYVDVYRVINGKTDVTREKCETMYQDRCYVKK

SEQ ID NO: 7844 - protein, 42 aa, Bacillus licheniformis
MNMLRSAFGEQSVNERLILLQTRALERKQAGGVLMRLPLSVL

SEQ ID NO: 7845 - protein, 168 aa, Bacillus licheniformis
LIYIYNCYGGTHSSALAAAYHLKKLPFSRKPTRNEILSTDCFNQLSPKEMGKLIFHGLDEEGNQVYTIGRGSSKAVIPAMRGVLELFEKNGKLQEKVIFSNTSPTVPIAMTFGGLFSRRLKIDPIGVPLLVLGAQQAYQDIIKLVQQTKNHAKTTSSMIEVLDNGFKG

SEQ ID NO: 7846 - protein, 240 aa, Bacillus licheniformis
VQEEWNPLMKNRCIIWLVTGICLTVIFQFPLKSVASSADKYANFAELAEHETEGEDYQIEYTDMGTELLILSPHGGGIEGGVSELVRAFSADYSTYLFEGIKPSQNWDLHITSNHFDEPQALKAVKEHSYVLAFHGYHDIVEHTLVGGTDTGGAKAIVRALLNKGFSAELVSPSHRLAGGNPENINNQCKTGQSIQLEISTPQREAFFSEFGLWTRASSKNETFQAYVSAVKEVLETRYK

SEQ ID NO: 7847 - protein, 50 aa, Bacillus licheniformis
MAPVQPEAIDIKIRHAERFRASGNTCRPLMKNKVKVAFVLPFFLYKMATG

SEQ ID NO: 7848 - protein, 75 aa, Bacillus licheniformis
VTYFYINCLRLDRCHQIKQRLKKEAEVRCRVLQRDKVSLFLYDILSLSAGGIAKKMQTKKERMIPFLSSRNHYFL

SEQ ID NO: 7849 - protein, 260 aa, Bacillus licheniformis
MEQKLKAHKVMITGASGGLGERIAYHAAGEGAEIILAARRRDRLDALKQNIADKIGAKCRIIVLDVSRTDEVEAAFQEAGPVDILVNNAGFGIFESALDASLEDMKAMFEVNVFGLIACTKMALPHMIRQDKGHIINIASQAGKIATPKSSLYAATKHAVLGYSNSLRMELAETGVNVTTVNPGPIQTDFFKTADKKGDYVKSVGRWMLDPDRVAKKIVSAMMTNKREINLPGWMNSVSKLYQLFPSLVERTGRSAFYKK

SEQ ID NO: 7850 - protein, 317 aa, Bacillus licheniformis
MKDARIIPIALPTPFAVGDVNIYLLRGEALTLVDAGPNTKEAAAVLKSELAEQGLSLSDIDQVVLTHHHADHAGLLDEFPAEVKIIGHPFNEPYISQNPDFIEKQKSFFTYLFQRFGVPGDMKPPGHTIKASYRYSCNRTLTETVSEGGQIEGLDGWRVLETPGHAASHIVLYNEELGSMLGGDLLLKPSSSNPLLEVPQKGGKRPTPLLDYLESLGRLQELPLHMIYPGHGEEITKVNELVAKRLEKQRNRAEEVYRILSEKPHSPYQICRKLFPAVYEKELFLTLSETIGQLDDLESQGRIGVDAADGIDYYYAK

SEQ ID NO: 7851 - protein, 273 aa, Bacillus licheniformis
MKRIGFIGAGSMAEAMIKGLVKSGAMEPEAIFVTNQSNTARLRELSETYGVCGEADTAKVAARSDTLVLAMKPKDAAGGIAALRPYLRKEQLLISVLAGIPIHTIQHYAGLELPVVRAMPNTSAAIQKSATAFAASPLVTQEQMQEAADLFATVGSVTIVEESALDAVTAVAGSGPAFVYRFVEALQASAAELGLPEKTAKQLIIDMMAGAAQMLETARDPSVMRKEITSARGTTEAGLRMLDDHQFEQTVISCVKEAANRSAELRDMFAAKI

SEQ ID NO: 7852 - protein, 534 aa, Bacillus licheniformis
VKWQTVEELKRLLISLVQYESISGTAGEVALAKYMHDVLKDRSYFQKNPEYLKLHPMEDGRYFLTALVKKEKKSNTVLLLSHFDVVDTADYGEFKHMACKVPELMDLLNDKKELLPERVKKDLESGEWLFGRGSMDMKAGLAVQFSMLERAMNGEFDGNLLLITVPDEEVNSQGMLEAVPVLKALEKEFGLHYTACLNCEPMFEKHPGDPKQYVYSGSIGKALAGFFCKGVETHVGEPFAGVNANLMVSEINRLLELNVDYCEEADGEVTPPPANLMQKDLKEAYSVQTPHTAVSLFNVLMMQRSAAELHRMLLDTAREAAANIQTNIERKTAEYQRFEAFMPINPAVSVLTFEKLWNKAQEKAGKPEAERILNFAFANRGELGDRDFSTKIVSELASLCKEDAPMIVLFYSPPFYPAVSSKDDPLIRKVMREVKQYAADRHGIEFTEVQYFPGLSDLSYLQLQKQSVDAFTSNMPLFHHGYSLPKGRENALFVPVINIGPAGKDPHKWTERLHVPFSFGKLPDILRLAIHKLL

SEQ ID NO: 7853 - protein, 339 aa, Bacillus licheniformis
LSNRKLFTPWSLKGVTLKNRIVMSPMCMYSSHEKDGKVQPFHMTHYISRAVGQVGLIMVEATAVTPQGRISDQDLGIWDDAHIDGLAALTSQIKTYGSKTAIQLAHAGRKAEVEGTIYGPSAIPFDENSRTPVEMTKEDIKETVQAFKKGAERAKAAGFDIIEIHGAHGYLINEFLSPLSNKREDEYGGSPENRYRLLREVIDAVKEVWAGPLFVRVSASDYKTKGLDVADYVGFAKWMKEQGVDLIDVSSGAVVPADINVFPGYQVGFADTIRAQAEIQTGAVGLITSGLQAEEILQNGRADLIFVARELLRDPYWPKTAAKQLNTKIEGPVQYDRAW

SEQ ID NO: 7854 - protein, 253 aa, Bacillus licheniformis
MTITERIYTVEGCMFYTKQRKGKKNATIIFEAGYGFSSTTWQPILSDIDEDLGLFAYDRAGLGKSGPSTSKRTADQMVKELKALLAAADVKPPYLFVAHSFGAVIARLFASRYSDEVIGMVLLDPACEDQEEKVLPLLPDTLKEDYVKQFSIEGSHEDFKQSLDMLKQEKKHLGSVPLLVLSAGKRTEAAKQAHQEWLKLHSRLLSLSHQSGWIQAKNSSHLIHHDEPHIVQLAIYDVWYAAQQQTYAYQAAN

SEQ ID NO: 7855 - protein, 49 aa, Bacillus licheniformis
MRVKITLACTETGDRNYITTKNKRTNPDRLELKKYSPRLKRHTIHRETK

SEQ ID NO: 7856 - protein, 307 aa, Bacillus licheniformis
LELLFLGTGAGIPAKTRNVTSVALKLLEERRSVWLFDCGEATQHQILHTSIKPRKIEKIFITHLHGDHVYGLPGLVSSRSFQGGEGPLTVYGPQGIKTFLETALDVSGTHVTYPLVIKEIGEGTVFEDDQFIVTARSVSHGIPAFGYRVQEKDVPGALDAEALKEIGVSPGPVYQKLKNGETVTLEDGRTIHGADFIGPPKKGRIVAFSGDTRPCENVKRLAEKADVLIHEATFAKGDRELAGDYYHSTSEQAAETAREACAKKLILTHISARYQGENVLELVDEAKAIFPDTVAAFDFYEHEIKRT

SEQ ID NO: 7857 - protein, 492 aa, Bacillus licheniformis
LKKDQMEPKAVIVIFGATGDLAKRKLYPSIHRLYENGQIGNEFAVVGVGRRPWTNEDFRSTVQQSVSKFPLNEKDVDEFTSHFYYHPFDVTNSGSYRELNELIEKLESTYDIPNNRMFYLAMAPEFFGTIAKFLKSEGVTSTTGWSRLVIEKPFGHDLPSAKALNQEIREAFTEDQIYRIDHYLGKQMVQNIEVIRFANAIFEPLWTNRYISNIQITSSEDLGVEDRARYYEKSGALRDMVQNHILQMVALLAMEPPIKLNTEEIRSEKVKVLRALRPIQKDDVDQFFVRGQYDAGVVDEKHVPAYRDEQNVAKDSNTETFVAGKLLIDNFRWAGVPFYIRTGKRMQKKSTQIVVQFKDIPMNLYYGNGNTMHPNLLVIHIQPDEGITLHLNARKLGGGTFAQPIKLDYCHNCGDGINTPEAYEKLILDCLHGDATNFAHWDEVALSWSFVDAISQNWEENKTLSPNYKAGSMGPKASDDLLAKDGFHWWPL

SEQ ID NO: 7858 - protein, 654 aa, Bacillus licheniformis
MTEQLSEKDQQELLEKYDPEAGTRKLKGLTGAIAFAGLLAFSLFQLYTAIFGVFPAQIQRSVHLGFALGLIFLLFPATKGLRKTGKFKVAWYDAILAVLGAGVGAYWVANYETIVGGIGLITETDFYVGLLAVLLVLEATRRAVGLPITIIAGLFLLYGLYGSYLPGFLSHNGLTMERLVQTMYFTTEGILGTPLAVSSTFIFLFILFGSFLVRTGVGQYFNDLAVAIAGRSTGGPAKVAIFSSALQGTISGSSVANVVTSGSFTIPMMKKLGYKKEFAGAVEASASTGGQLMPPIMGAAAFLMVEFIGGGITYWDIAKAAAIPAVLYFTGIWIMTHFEAKRLGLRGLTKEEMPNRKEVFKKIYLLLPIISVVVLLMSGITVMHAALYSIVLAILVGLFNKETRMGVKGIVLALAEGARMALSVAAATAAAGIIVGVVTKTGLGLKLANGLLDLAGGALLPSLFLTMIAALVLGMGSPTTANYVITSTIAAPALILLNVPDLSAHLFVFYFGIVADITPPVALAAFAAAGVAGGEPIRTGINSAKLAIAAFIIPYIFVLSPELLMIDAHWYEILWVVFTALSGMIAIGAGMIGFWMRKVFWFERILAAASGLLLIYPEGYSDMIGLGIFLLLFVLQLMWKRDKSHPEEMQALKA

SEQ ID NO: 7859 - protein, 172 aa, Bacillus licheniformis
MGKLKIIKRLVPALIIAVFAAACLIPYQTAVVFEKEDSGEIIAFLPLQKKKSFDVVYTHSIHRTEVIESYVWEKGMIRQTALTYHDPAVGMPANAEQGERLDIKNGVYTISNMKRTFPFIDMRIGRVRANHRIKYSGAEHELKRYIRPGTWTRMSVRKLNVLQQLRGVKIND

SEQ ID NO: 7860 - protein, 329 aa, Bacillus licheniformis
MKKWKSLSWMVLLLTLVMGLAACGSNNASGNKDGGSASKGSGNYSLLTGGTGGTYYPLGGQFANLWEDATEDKFTTQTTGASAENMATLQKGEAEVAFSQTDIATYAIEGKEMFKEKIEGIKAIAALYPETVQIVTTEKSGINSVEDLKGKTVSVGAAGAGVNINAKQILEVHGMSFDDIKPQNLSFEESTDGIQSGAIDAAFITAGTPTGAVEGLSAQNKIKIINIEKDKQKKLIEKYPFYAEDTIKKGTYGIGSDVNTVAVKAMLVASDKMDEDTVYKMTKALFEADKINHAKGEFIKPETALEGLGDIDIHPGAAKYFKEKGIEKS

SEQ ID NO: 7861 - protein, 237 aa, Bacillus licheniformis
MRKYEYISNEMRRRIQEEYYPIDQPIPDELSLAKEFSCSRMTMKRALDILVSEGMLYRKRGHGTFIVKSSIQQLPVSVTDRENLGLTKLLANKQIESRIIQFDVEFPSDEVAKQLSIEKTVPVYHIIRLRKVEGEPYVIEETYMPSNVISELNEDVLHGSVYRHITETLKLTIAGSHRKIRADKSSALDREYLECAPDDPVLEVEQVAFLNTGEPFEYSFARHRYDKFVFSSVHIRK

SEQ ID NO: 7862 - protein, 471 aa, Bacillus licheniformis
MSKTEPQLEQIQYRFPNGFWWGSAASATQTEGAAAEGGKGKNIWDHWYEKEPNRFFDGVGPEKTSRFYETYREDIQLMKELGHHSFRFSISWARLFPDGKGRLNKEGAAFYNRVIDELLAAGIEPFVNLYHFDMPLALQQIGGWENRQVVDHFASYAETCFRLYGDRVKKWFTHNEPIVPAEGGYLYDFHYPNIVDFQKAVQVAYHEILSNAKAVEAYRRLGGDGKIGIILNLTPSYPRSQHPADVRASEIADAFFNRSFLDPAVKGEFPQLLTDILKEEGYLPVMEEGDLELIKNHTVDLLGINYYQPRRVKAKEHLPHPDAPFMPERFFDHYEMPGRKMNRHRGWEIYEKGIYDILINVKENYGNIECFISENGMGVEGEERFRGEDGMIRDDYRISFIKEHLKWVHRAIQEGANVKGYHLWTFMDNWSWTNAYKNRYGFVSVNLDKNGERTIKKSGYWFKKVAENNGF

SEQ ID NO: 7863 - protein, 438 aa, Bacillus licheniformis
MFEKLSNLLVPIAGKLNNNRYLGVLRDAFMLAFPLTIFGSIIVVLTNLPFLNKMMSKSALETFQSALSIAPSATISIMSVFVVFGIGYYLSKTYEVEAVFGGVVALASFLLLTPFVLNGEGGEVIPNVIPIDRLGAKGMFLGMITAFTSAEIFRFFVQKNYTIKMPAGVPPAVAKSFAALIPAVMTLSVYLVINILVTQVFNTNMHDLIYNLVQAPLVGLGSGIIPTLIAIFFTQLLWFFGLHGQIIINSVMDPIWNTLSIENLNSYTATGEVPHIINKQFMEVYTVGMGGTGMTLAVIIAILLFMRSKQMKQVAKLGAAPGIFNVNEPIIFGLPIVMNPLIFIPWVISPMIVTLITYFAMASGLVPPPTGVTIPWTVPIFISGMMATNSLAGGILQIVNLAVVFMIWFPFLKFIDRMNMKKEQEINEAEQEKTTLGL

SEQ ID NO: 7864 - protein, 110 aa, Bacillus licheniformis
MEKLKLDELTGEQICFQLILHSGNARSKVIQSIREYRDGSVQKAEELLQQAEDDLQQSHDIHFQMIQKEAGGGKNEFSLLLLHAEDHLMSTLTMKELVSELLELFKEKSL

SEQ ID NO: 7865 - protein, 102 aa, Bacillus licheniformis
MKKILLACSSGMSTSLLVTKMQEYAHSIGDEAKIWAVGQDQAKKEMAEANVVLIGPQMSFLKGELQKEAEQYGIKVDVIDMLAYGMADGKKAYEQALSLIGD

SEQ ID NO: 7866 - protein, 553 aa, Bacillus licheniformis
MGFLRNRIVGITLAGAVALGSAGTGSAAMETAKKKEEPKVKNVIMMVMDGTSSSASTLARWYKGEPLAMDQIVSGGVRTYSAESAITDSAPAATAMATGRKSNSSYIGVLPSKVNTPGVEKVREKDHYRPVANVLEGAKQKGKATGIIATSEIQHATPAGYSGHHKDRNNFEVLGEQQVYQNMDVVLGGGKESLQPGTKDKSRKDGEDLVKVLKDKKYDFVETKDQLLKSKSKKIWGAFSQRDLAYDMDRRATHPEQPTIAEMTKKSIQTLSKDKDGFFLFVEGSKPDWAAHQNDPIGMISDVLAFDNAVKEALDFAKKDKHTMVIAVSDHGNSGISIGNSNTTKGYDTTPVSAYVDPLKKAKMTVEGATGKLKDDLSNIEEAAKLYGLDDLTPAEKKQLKSVKNKKEAASLFTKLLSNRANIGFTTGGHTGEDVFLYSYGPEKPQGLVENTDIAKTMAKAMGFNLDKLTNELFIEAKQAFKKAGASVTIDQKDPANPVLVAARKKAKAEMPVNKNIIRINGKEYELDSVIVESNGSFYVPKEAVQLFKKYAR

SEQ ID NO: 7867 - protein, 261 aa, Bacillus licheniformis
MYPSLEGKTVVITGAGTGLGKAMALRFGAEKANVVINYFKEEENPEETVEKIESSGARAIAVQGDVSKEDDVKALIRQAVDSFGSVDVMVNNAGVENEVPSEDLSLEDWNRVISTNLTGMFLGCREAIGYMLDHNIKGSVINMSSVHQQIPWPHFVHYAASKGGAKLLTETLALEYAPKGIRVNAIGPGAIDTPINAEKFADPELKKGVIELIPIGYIGKPEEVAACAAWLASEEASYVTGLTLYVDGGMTKYPGFQAGKG

SEQ ID NO: 7868 - protein, 469 aa, Bacillus licheniformis
MAKQQIGVVGLAVMGKNLALNIESRGFSVSVYNRSSEKTEEFLKEAEGKNVVGTYSIEEFVESLEKPRKILLMVKAGTPTDATIQSLLPHLEKGDILIDGGNTYYKDTQRRNRELAESGIHFIGTGVSGGEEGALKGPSIMPGGQKEAHELVKPILEAISAKVDGEPCTTYIGPDGAGHYVKMVHNGIEYGDMQLISESYFILKHIVGLSSDELHEVFSEWNKGELDSYLIEITADIFTKKDEETGKPLVDVILDKAGQKGTGKWTSQSALDLGVPLPIITESVFARFISSMKEERVKASKLLAGPEAKPAAENKEELIEAVRKALFMSKICSYAQGFAQMKAASEEYGWDLKYGDIAMIFRGGCIIRAAFLQKIKEAYDRDPELDNLLLDPYFKNIVESYQGALRKTISLAVEQGIPVPCFSSALAYFDSYRTATLPANLIQAQRDYFGAHTYERTDKEGIFHTEWMK

SEQ ID NO: 7869 - protein, 418 aa, Bacillus licheniformis
LSADKQKGRVIFHIDMNSFYASVEMAYDPSLKGRPLAIAGNAKERKGIVVTCSYEARARGVKPPMPLWEAKRLCPELIVKPPNFDRYRSSSREMFQVLREYTDLVEPVSIDEGYMDLTDTPYRNRACETAKEIQERLQKELLLPSSIGIAPNKFLAKMASDMKKPLGITILRKREVPRILWPMDISEMYGVGRKTAEKLKTLEIEKIGDLAAADEYALKRLLGINGPRLKRRANGIDTGEVNPDRIYEFKSVGNSSTLPHDSTDEKELFGLIDKLSISVSDRLKRKEVMAAKVFIMIRFADWTNITRSKTLLNPTDSKDEIAKESKALFRQHWHGSPVRLLGVTGTDLVNRKEAVKQLDLFSFHEDAKDEPIQKVMAELNEKYGTDLIKKGVRIVKKESKTSGTSFNKDFFQDERQDQ

SEQ ID NO: 7870 - protein, 95 aa, Bacillus licheniformis
MILESFNDAFFLIEFFTIVLPALTAIGIALILKDCSTGDSWKTKRFEEYHAIQFVSAVDFLIILYHRITVWISKVIRMKASSNDDEDHRFLLLSI

SEQ ID NO: 7871 - protein, 273 aa, Bacillus licheniformis
LNTKLKQLFATAMFLIMTMFIGEQASAATGSTGGSDNFFHHYVVVPFSELIKGIAGIFHGNYGLSIIFVTIIVRVLVFPLFANQYKKQRAMQEKMALVKPELDAIQSRLKKTKDPVKQREIQQEMMQLYQKHNINPLAMGCLPMLIQFPILIGFYYAIRSTPEIASHSFLWFNLGHSDIIVSLSAGFMYFIQFYVSQKLNAQNAQSNPAAQQSAKIMGFFFPVMMTIFSINVPAALPLYWLTSGLLLTIQSVVLHQVYQKNKKAIQPAESATK

SEQ ID NO: 7872 - protein, 372 aa, Bacillus licheniformis
MNKKRLLEEFLELVQIDSETKHEAEICKVLKEKFAALGMDVVEDDTKPKTGHGAGNLVCTLPGTKEADTIYFTSHMDTVVPGKGVKPVIEDGYVKTDGTTILGADDKTGLAAMLEAVKVLKEKNIPHGTIQFIITVGEESGLVGAKALDRSLIKADYGYALDSDGKVGNIIVAAPTQAKIRATVYGKTAHAGVEPEKGVSAITIASKAIAKMPLGRIDEETTANIGRFEGGTQTNIVCDQVDILAEARSLVPEKMEKQTEKMKQAFESAAAEMGGRAEVEIEVMYPGFKYKDGDLVVEIAKKAAGKIGRPYELLTSGGGSDANVIAGHGIPTVNLAVGYEQIHTKNEKMPIEELVKTAEMVVAIIEEVANRS

SEQ ID NO: 7873 - protein, 509 aa, Bacillus licheniformis
MNMFERVDDLNNSRQKASLGGGQERIDRQKQKGKLTARERIDLLLDEGTFTELNAFARSRQSGGPLGDGVVTGFGKIDGRPVYLFSQDFTVTGGALGEMHAKKIAAVMDLALKNKAPFIGLNDSGGARIQEGVLSLDGYGHIFYRNVLCSGIIPQISVILGPCAGGAVYSPALTDFVFMSEKTGQMFITGPKVIKTATGEAVSSGELGGAYIHNSISGNAHFSGDSDEAVLHEVRKLLSYIPQNHEEKPPAKARKAKDHEIRPALMTILPEDGQRPYDVKQIIAEIADGGTFFEVQCHFAKNAVIGFARIAGETAAVVANQPKYLAGSLSMDAADKIARFIRFCDSFQIPILTLVDCPGFLPGIREEHGGVIRHGAKILYAYAEATVSKVTVILRKAYGGAYVALNSKALGADAVFAWPNAEIAVMGASEAADVLFAKEIERSDDPRAAREEKIRKCMQASSPFTAARYGMVDDIIDPKETRKKLIQTFDMLKSKKEIRPDKKHGNIPL

SEQ ID NO: 7874 - protein, 45 aa, Bacillus licheniformis
LVNLMKQGEACAVFSILPGSLSPKKAGVSPKKESPAFMICIKKSC

SEQ ID NO: 7875 - protein, 319 aa, Bacillus licheniformis
MFKIGYRTLKTALGTALAIYIAQLLGLHNFVSTGIITILCIQVTKKRSLQASWARFAACILAIVFSCAFFELIGYHPAVIGLMLLFFIPTTVLLKIKEGIVTSSVIILHLYMSEGITLSLVWNEFLIIITGIGVALLMNLYMPSLDNELKQYQQKIEDNFAKIFEEIERYLLTGEQDWTGKEIPETHRLINEAKTLAYRDVENHFLRHENLYYHYFKMREKQFEIIERVLPKITSISMTVEQGQMIAAFLHDLRGAIHPGNTAHKFLKRLVKMREEIEEMELPTTREEFEARAALFIFLGEMEQYLVIKSYFKGIKSPA

SEQ ID NO: 7876 - protein, 240 aa, Bacillus licheniformis
MINVRNLSKSFGKHEVLKHISVSFEKGEVAAVIGPSGSGKSTFLRCLNLLEKPTEGSIFIQDQEITSPKTNVLKIRENIGMVFQHFHLFPHKTVLENITYAPVHVKKESKQAAVKKAEELLEKVGLLDKKDDYPNRLSGGQKQRVAIARALAMNPDIMLFDEPTSALDPEMVKEVLQVMQDLAKTGMTMVIVTHEMGFAKEVADRVLFMDEGTIVEDDDPKAFFSSPKSKRAQDFLEKIL

SEQ ID NO: 7877 - protein, 220 aa, Bacillus licheniformis
MNFLDFSSTVPEMPFILEGLGVTLKVVAAAAVLGFLLGVLITLLKISSIKPLAWIADFYTSIFRGTPLVLQLMIVYYGLPQVLGFDIDAYWAAVIAFGLNSAAYVSEIIRAGINAIDKGQKEAAMALGVPYAKMMKDLLLPQAFKNIMPALINESITLTKESAVVTVIGLGDIMRRSYQAGAAIYSPLEPMLFAGLIYYVLVLILTFVGKAIERKLNVND

SEQ ID NO: 7878 - protein, 255 aa, Bacillus licheniformis
MKKWMLLVVAACVTFALTACGTSSSSDDKKTLVMGTSADYPPFESKDGDQIVGFDVDLAEALAEKTGHEIEVKDMDFNGLVTALKTNKVDIVLSGMTPTPKRKKQVDFSNVYYTAHNMIVTKKSSGIKSLDDLKGKTVGVQLGSIQEEKAKELTPDYDLKVENRNRISDLTEEIKAGRFDAAIIEDIVAEKYINKNEELVGYNLPKEPDEKAGSAIAFKKGSDLTEKFNKALEEMEKSGELDKLKEKWFGGETKK

SEQ ID NO: 7879 - protein, 40 aa, Bacillus licheniformis
MLFVCNQKDKGTGVQLVFKGLFKGFLVIFQNGIASASENV

SEQ ID NO: 7880 - protein, 145 aa, Bacillus licheniformis
VNMDFNLFMNDVVRQARQEITAAGYTELKTPEEVDEALTKKGTTLVMVNSVCGCAGGIARPAAHHAVHYDKRPDHLVTVFAGQDKEATARAREYFEGYPPSSPSFALLKDGKILKMVERHEIEGYEPMAVITKLQGLFEEYCEEV

SEQ ID NO: 7881 - protein, 300 aa, Bacillus licheniformis
MNRKKAMLIYNGNAGQKNVEKTLGAAVPVLSQAIDELIVKPTRKKRDAFEFCLEIGEDIGQLFILGGDGTVHECINGISQLQTKPDIGILPGGTCNDFSRALRIPQNIEKAAEALANGNPVPVDVLKANDHYCLNFWGIGLITEASSHINQTEKALLGRISYFTSALRTISNLEPFSFRLSIDGEEFADEAVMVVVLNGPFIGTNKIPLPQLSINDGKADILVCRNTNLAALKELFAMDDPEWDSFKGELSYYQGQTVRIETALPMEADTDGEICTKTPASIEVLNGHLRMLTPLEKEKS

SEQ ID NO: 7882 - protein, 426 aa, Bacillus licheniformis
MAVEQMTMPQLGESVTEGTISKWLVSVGDHVNKYDPIAEVMTDKVNAEVPSSFTGTIAELVGKEGETLQVGDVICKVETNEEAKPEAEAVSKPDQEEAEPAKPEAKDTTQKKRYSPAVLRLAGEHNIDLEQVEGTGAGGRITRKDIQRIIASGAVPQTDAAPEKQPGANAAGAIEPDQKPAQAAPQAAPPQSAAGDVEIPVTGIRNAIATNMVRSKHEIPHAWTMMEVDVTGLVSYRNKIKNEFKKKEGFSLTFFAFFVKAVAQALKEFPQMNSMWAGDKIIQKKDINISIAVATEDALYVPVIKHADEKTIKGIAREISELAHKVRSGKLTSGDMSGGTFTVNNTGSFGSVQSMGIINHPQAAILQVESIVKRPVVMEHGMIAVRDMVNLCLSLDHRVLDGLICGRFLARVKEILEQIDDHTSIY

SEQ ID NO: 7883 - protein, 327 aa, Bacillus licheniformis
MPVMSYIDAVTLALKEEMEKDPRVFVLGEDVGKKGGVFKATAGLYDQFGEERVMDTPLAESAIAGVGIGAAMYGMRPVAEMQFADFIMPAVNQIISEAAKIRYRSNNDWNCPIVIRAPYGGGVHGALYHSQSVEAVFANQPGLKIVMPSTPYDVKGLLKAAIRDDDPVLFFEHKRAYRLIKGEVPSDDYVLPIGKADVKREGEDITVITYGLCVHFALQAAERLAKDGISAHILDLRTVYPLDQEAIIEAASKTGKVLLMTEDTKEGSIMSEVAAIISEHCLFDLDAPIKRLAGPDVPAMPYAPTMEKFFMVNPDKAEAAMRELAEF

SEQ ID NO: 7884 - protein, 330 aa, Bacillus licheniformis
MGNNRHEAVGLTDEQAIDMYKTMLLARKLDERMWLLNRSGKIPFVISCQGQEAAQVGAAFALDRENDYVLPYYRDMGVVLAFGMTAKDLMLSAFAKAEDPNSGGKQMPSHFGQKKNRIVTGSSPVTTQVPHAVGVALAGRLDKKDIATFVTFGEGSSNQGDFHEGANFAAVHKLPVIFMCENNKYAISVPYEKQVACENISDRAVGYGMPGVTVDGNDPLEVYKAVKEARERAGRGEGPTLIETISYRLTPHSSDDDDRSYREREEVAEAKKNDPLNKFAQYLKEAGLLDDQSEKQISDEITNIVNEATDYAEHAPYADPEDALRHVYAE

SEQ ID NO: 7885 - protein, 473 aa, Bacillus licheniformis
MATEYDLVILGGGTGGYVAAIRASQLGLKTAVVEKQKLGGTCLHKGCIPSKALLRSAEVYRTAKKADEFGVVIPEVGLRFSQVQSRKQKIIDQLHNGVKHLMKKGKIDVYEGIGRILGPSIFSPMPGTVSVEMANGDENEMLIPKNVIIATGSRPRSLPGLELDGENVLSSDEALELEQLPASMLIVGGGVIGIEWASMLNDFGVDVTVIEYADRILPTEDADISREMQAQLAKKGITMITGAKVLPDTLEKGDAVSIQAEKDGEKQSYSAEKMLVSVGRQANIEGIGLENTDIQVENGFIVTNSMYQTKESHIYAIGDVIGGLQLAHVASHEGITAVEHIAGENPHAIDYSLVSKCIYSSPEAASVGLTEGEAKAQGKSVKVGKFPFQAIGKALVYGETDGFVKIVADRETDDILGVHMIGPHVTDMISEAGLAKVLDATPWEVGQTIHPHPTLSEAIGEAALAVDGKAIHF

SEQ ID NO: 7886 - protein, 368 aa, Bacillus licheniformis
MQVQEKRILVINPGSTSTKIGVFHDDRSIFEKSIRHDEAELQQYQTIIDQYSFRKQAILETLHEQGINISKLDAVCARGGLLRPIEGGTYEVNDAMIVDLKNGYAGQHASNLGGIIAREIADGLNIPAFIVDPVVVDEMAPIAKISGTPAIERRSIFHALNQKAVARKAAWQFGKRYEDMKMIITHMGGGITIGVHCRGRVIDVNNGLHGEGPLSPERAGTIPAGDLIDMCFSGEYTKDELMKMLVGGGGLAGYLGTTDAVKVEKMIKEGDQKAALIYEAMAYQIAKEIGAASAVLKGEVDVIILTGGLAYGKSFISSIRQYIDWISDVVVFPGENELQALAEGAFRVLNGEEEAKQYPNQRRESHGN

SEQ ID NO: 7887 - protein, 364 aa, Bacillus licheniformis
MELFRYMEQYDYEQLVFCQDKQSGLKAIIAIHDTTLGPALGGTRMWTYESEEAAIEDALRLARGMTYKNAAAGLNLGGGKTVIIGDPRKDKNEEMFRAFGRYIQGLNGRYITAEDVGTTVEDMDIIHDETDFVTGISPAFGSSGNPSPVTAYGVYKGMKAAAKAAFGTDSLEGKTVAVQGVGNVAYNLCRHLHEEGAKLIVTDINKEAVERAVAEFGARAVDPDDIYSQECDIYAPCALGATINDDTIPQLKAKVIAGAANNQLKETRHGDQIHDMGIVYAPDYVINAGGVINVADELYGYNSERALKKVEGIYGNIERVLEISKRDRIPTYLAADRLAEERIERMRQSRSQFLQNGHHILSRR

SEQ ID NO: 7888 - protein, 303 aa, Bacillus licheniformis
MKLKQLLQKAAELDNKTVAVAHAEDDEVLQAVKLAVDKQFARFLLIGHREKLRHMMTEQNISKRHVDIIHSESPADSARIAVQAVKSGNADVLMKGNVPTAVLLKAVLNKEYGLRSSHVLSHVAAFEVSGFERLIYVTDAAMNISPKLDELKQILENAVGVARSVGVQMPKVACLAAVETVNPAMEATLNAAALTQMNHRGQIKNCVVDGPLALDNAISPLAARHKNISGIVAGEADILLVPSIETGNVLYKSLIHFAGAKVGAILAGAKAPIALTSRADSAENKLYSIALALCTSEARHEEE

SEQ ID NO: 7889 - protein, 689 aa, Bacillus licheniformis
MMQKVLIVGAGKGGTALLDLLLKTKTMHIEAVIDKNPEAPGLFVAQKNDIETALDWTPYITEQIDIIIETTGDAGVLKQLMRKKHDRTIVVPGSLAYIISQLMNEKQQLIQMLKEQTYKHDRIFNSMNDGMIFIDINEEIILFNKMAEVMTGTKRSEAIGQHIQSVIPTTKLPRILNTREPEYHQKQFLHPNRQIVTTRIPIIDDGGTLLGALSIFKDITDAVELAEEVTNLKEVRTMLEAIIQSSDEAISVVDENGNGMMINRAYTKMTGLTKDQVIGKPANTDISEGESMHLKVLETRRPVRGVRMKVGPNKKEVIVNVAPIIVDGILKGSVGVIHDVSEIQSLTNELNRARQIIRTLEAKYTFADIIGSSEQMLVALEQAKLGAKTPATILLRGESGTGKELFAHAIHNESDRKYNKFVRVNCAAISESLLESELFGYEEGAFSGARRGGKKGFFEEANNGSIFLDEIGELSLNTQAKLLRVLQEKEIVRVGGTKPIPVNVRVIAATNVNIEKALAEGRFREDLYYRINRYPISIPPLRQRKEDIEALSRHLIGKINQEYGRNVKGLTKNALKSLKARKWPGNVRELENVLERAMIFLKPQMEWIDLEHLPEADRPRKKVEAGEAFPEIEDEKLSDAVERFEAHIIKETLEKHQYNRTKTAKALGISIRNLYYKMDKYNLAKDSMQ

SEQ ID NO: 7890 - protein, 84 aa, Bacillus licheniformis
MGRMIALLVLLIPGGLAALGIKLMRDTVFGILIGPFQILWLQGLAGFICFAGGLYLLGGFILYRDRKRNQVSPRFRKKQSGREV

SEQ ID NO: 7891 - protein, 241 aa, Bacillus licheniformis
MTKIFAHRGASGTFPENTMAAFKHAAAIGADGIELDVQMAKDGRLVVIHDEKLDRTTSLKGYVKDLTYEEIKHGDASHRFAEKTGSVPVPTLEEVFEWAADAEFLLNVELKNSIIRYEGMEEKVMSMIEAYDLQDRIILSSFNHESLALCHRLNPSIELAALYMDVIYKPEEYIEMIPASGFHPYRRSMSDDTIKNAHLKEKAVRPFTINREEEMKKLIAAGIDGFFTDFPEKALKLKAEM

SEQ ID NO: 7892 - protein, 206 aa, Bacillus licheniformis
VKLLIKSFVLLLFSFMAAFPAAFAAEPLSGKTVYVDAGHGGEDSGAVGNGLLEKDVNLEVAMLIDEKLKEEGADTVASRTDDTFLTLEDRVAKASKNASDLFISIHANSAVPEASGTETYFDSTYQAADSERLASDIQERLPDALGTRDRGVKESGFYVIKNSQMPSVLVELGFITNKTDADKLESPEYQEKAADAIADAVVSYYE

SEQ ID NO: 7893 - protein, 40 aa, Bacillus licheniformis
MRKGVILVLFAMLLWQAAAQRSIMGKAVMRAEKEQARKRS

SEQ ID NO: 7894 - protein, 67 aa, Bacillus licheniformis
LLEAIRVKTSVKNDLPKAKNGCKLEEIRSFSSFLFFCIKKRLFSYEKRRFIRLSLYMIQSMTAMLRA

SEQ ID NO: 7895 - protein, 134 aa, Bacillus licheniformis
MIFTKTDLRYPVNFFGPGLRINHYGLLIVNSNAKIGANCDIHQGVNIGQNHARRDVPTIGDNVWIGPGAKLFGDIHIADGISIGANAVVNKSFTEENITIAGMPAKKIKEAPSNKDRKQAVQRQIQAWEMEQRC

SEQ ID NO: 7896 - protein, 98 aa, Bacillus licheniformis
MKVNKLLTGTTLAVGLLISAAPVFAASHSSEVIAHPTAQYINCPSDLPSSFKSSKSSKCVKSSSGVFSNKFSDSDGTWYFKGKFYSNVFNTWVGFYEG

SEQ ID NO: 7897 - protein, 266 aa, Bacillus licheniformis
VEKIKVCVADDNRELVGLLSEYIEGQSDMEVLGVAYNGQECLSLFKDKEPDVLVLDIIMPHLDGLAVLERLRESQLKKQPNVIMLTAFGQEDVTKKAVDLGASYFILKPFDMENLVGHIRQVSGNGSQLTHRAPSSQSSVLRPQPESPKKNLDASITTIIHEIGVPAHIKGYLYLREAISMVYNDIELLGSITKVLYPDIAKKFNTTASRVERAIRHAIEVAWSRGNIDSISSLFGYTVSMSKAKPTNSEFIAMVADKLRLEHKAS

SEQ ID NO: 7898 - protein, 427 aa, Bacillus licheniformis
VDVEKIRKAVGIILLVSLISVGFYKPVKEYIVIPKNLNIFETGTRAVETSLSVSTPKDGSSEAFTLKENQNEVEIKGEKNGKAELVYDFAGFPVKKTKVNVLPDLKVVPGGQSIGVKLHSVGVLVVGFHQINTSEGKKSPGEAAGIAVGDIITEINGTKIEKMNDITPFIQKAGKTGETLHLSIKRDKQEIKTKLVPKKDQAEDKYRIGLYIRDSAAGIGTMTFFEPKSKKYGALGHVISDMDTKKPIVVEKGQIVKSTVTSIEKGTGGNPGEKLARFASERKVIGDINRNSPFGIFGTLHESIKNRIADKAIPIAFSDEVKEGPAQILTVIENDKVEKFDIQVVSTTPQKFPATKGMVLKITDPRLLSKTGGIVQGMSGSPIIQNGKIIGAVTHVFVNDPTSGYGVHIEWMLSEAGIDIYKKEKAS

SEQ ID NO: 7899 - protein, 576 aa, Bacillus licheniformis
LLAELSIKNFAIIEELTVSFEKGLTVLTGETGAGKSIIIDAVSLLVGGRGSSEYVRYGEKRAELEGLFLLDGGHPVFDLCTELGIEASDDMIVMRRDINANGKSICRVNGKLVTIAALREVGRLLLDIHGQHDNQLLMEDEHHLQLLDRFAGEEIENALKAYQEVYSRYMDVMKKVKELSESEQEMAHRLDLIQFQLDEIESANLEPKEDELLQEERRQIANFEKIYEALQNAYNALRNEQAGLDWVGMASSELENVSGINEGLNKVSESVANAYYILEDSTFQIRNMLDELEYDPERLDYIESRLNEIKQLKRKYGATVEDIQAYSAKIEEEIDRIENRDSHLQALKSRLESIGKDVAIEAANVSEIRKKWAEKLAKQIQQELKDLYMEKSTFDTEFHVKKAERDDDAPVVNGMSVQLTKHGIDTVRFLISTNTGEPLKSLSKVASGGELSRIMLAMKSIFSAQQDVTSIIFDEVDTGVSGRVAQAIAEKIHRVSIGSQVLCITHLPQVAAMADTHLLITKQSKDGRTTTSVTPLSKQEKIAEIGRMIAGVEVTDLTKRHAKELLNQAKLVKTSG

SEQ ID NO: 7900 - protein, 149 aa, Bacillus licheniformis
MNKGQRHIKIREIITANEIETQDELVDILKKDGYNVTQATVSRDIKELHLVKVPTNNGSYKYSLPADQRFNPLSKLKRSLMDAFVKIDSASHLIVLKTMPGNAQAIGALMDNLDWEEIMGTICGDDTILIICRTHDDTKVVQKKILELL

SEQ ID NO: 7901 - protein, 281 aa, Bacillus licheniformis
MTGKKERLDVLLVERGLMETREKAKRAIMAGIVYTNENRLDKPGEKVDRTIPLTVKGNPLKYVSRGGLKLEKALKEFQLSVQGKLMIDIGSSTGGFTDCALQNGALCSYAVDVGYNQLAWKLRQDERVVVMERTNFRYCTPADFTEGLPEFATVDVSFISLKIILPVLKNILVPGSDCIALVKPQFEAGRESVGKKGIVRDPLVHKAVLDDISRFAAREGYDCRNASFSPITGGDGNIEFLLHLHWDGEAQSGTPIAEETINQIVEEAHKTLKAKKPDQRD

SEQ ID NO: 7902 - protein, 633 aa, Bacillus licheniformis
LDLLSIKDPAFLKNLSNEELESLSAEIRRFLIETLSESGGHIGPNLGVVELTIALHKEFDSPKDKFLWDVGHQSYVHKLLTGRGKDFATLRQHKGLCGFPKRNESEHDVWETGHSSTSLSGAMGMAAARDLKGTNEYIIPIIGDGALTGGMALEALNHIGHEQKDMIVILNDNEMSIAPNVGAIHSMLGRLRTAGKYQWVKDELEYLFKRIPAVGGKLAATAERIKDSLKYLLVSGMFFEELGFTYLGPVDGHSYDELFENLQYAKKTKGPVLLHVITKKGKGYKPAETDKTGTWHGTGPYKIDTGDFVKPKAAAPSWSSLVSETVRKLAREDERIVAITPAMPVGSKLEGFASEFPERMFDVGIAEQHAATMAAGLATQNMKPFLAIYSTFLQRAYDQVVHDICRQNLNVFIGIDRAGLVGADGETHQGVFDIAFLRHIPNLVLMMPKDENEGQHMVNTAVKYDDGPIAMRFPRGNGLGVKMDKELKTIPIGTWEVLRPGTDAVILTFGTTIPMALAAAEELQKEGRSVRVVNARFIKPLDENMLKEILNEGLPILTIEEAVLQGGFGSSILEFAHEHQSYSPIIDRMGIPDQFIEHGSVAKLLEEIGMTKEDVIRRIRLLTPVKTHKGIGS

SEQ ID NO: 7903 - protein, 61 aa, Bacillus licheniformis
MQGPLSITDPIGSTHFQHDFCKYAPCFVLGFQLELLYDEFIPMRKLAYADASFEKTAANTT

SEQ ID NO: 7904 - protein, 296 aa, Bacillus licheniformis
VTGKLEGFLKSRKTVIEERLPMYIKDLQAPSILKESMLYSLEAGGKRLRPILVLALLHAYGKDEEAGIPVGCAVEMIHTYSLIHDDLPCMDDDDLRRGKPTNHKIYGEATAILAGDALLTESFKMITSNMPSDVSAEKRIRLVNELISAAGAEGMVGGQILDMEAESKSVSLDELQRIHEGKTAKLLSFSVIAGAILADASEKEIEKLREFSHHIGIGFQIRDDILDLEGSEDKIGKRIGSDASNGKSTYPSLLSLEGASQKLDEHIEKAKQLISELPLEKELMYEFCDMIAARDH

SEQ ID NO: 7905 - protein, 86 aa, Bacillus licheniformis
MAEENKTNRDDLTFEEAMKGLEQIVSKLEEGDVPLEKAIDYFQEGMALSKICHEKLQNVEKQMDFILRENGELAPFSVREEEKGDR

SEQ ID NO: 7906 - protein, 449 aa, Bacillus licheniformis
MSEISFVTVTALTKYIKRKFDVDPHLEDIWIKGELSNVKIHSRGHIYFTLKDDNARIQSVMFARQNRNLAFTPENGMKVLVRGGISVYEPSGSYQLYAKEIQPDGIGALHLAYEELKKKLSQEGLFDEKYKKPIPAFPSVVGVVTSPTGAAVRDVITTIKRRYPLVKVIVLPTLVQGVNAGESIVSSIEEANRRDLCDVLIVGRGGGSIEELWAFNEEAVARAIFSSDIPIISAVGHETDFTISDFVADLRAATPTGAAELAVPNMLDLLERLKTLEARMTKSMQQDLKKRQERVKNLQSSYAFRYPKRLYAQKEQEFDLIFDRFQKQLAMTVDRKKQKLNEQTYKLEMLHPEEQLKQARKRHEEQTVRLKRNMKVQLKQIHSQFQTVLGKLNALSPLQVMERGYSLTYKENELIKSIEQVHEKDEIRVTLNDGTLTCEVLQKRGETNG

SEQ ID NO: 7907 - protein, 284 aa, Bacillus licheniformis
MTATIIDGKETAKEKRGQLAKEVEELKKQGVTPGLAVILIGDDPASLSYVRGKKKAAEAMGIRFQLDHFDASFTEQELLEVIDQYNQNDDFHGILVQLPLPDHISEQAVIERISPEKDVDGFHPLNVGKMLLGEDTFLPCTPAGIVELLKKTEIDLSGKEVVVVGRSNIVGKPVGQLLLNENATVTYCHSRTADITAHTKKADILIVAVGKANFIKADQIKEGAVVIDVGVNRLDNGKLAGDVDFEEAKEKASYITPVPGGVGPMTITMLAHNTVKSAKRTIQL

SEQ ID NO: 7908 - protein, 129 aa, Bacillus licheniformis
MKRRTAREKALQSLFQIDVSDIEPNEAMQHALDGQESDAFFEQLVYGVLENKEKIDEMIKRHLVNWKLDRLANVDRAILRLSAYEMIFLDDIPVNVSMNEAIELAKQFGDDKSAKFVNGVLSNIKSDLE

SEQ ID NO: 7909 - protein, 136 aa, Bacillus licheniformis
LKDDNSLLEMSHEDNHLGKVEIAPEVIEVIAGIAASEVEGVAEMRGNFATGVVERFGKKNHGKGVKVDLSDDGIIIDVYCVMMFGVSIPKVANAVQDNIRQTLLNMTALSINEINIHIVGIQFDSKTHEVEIDQEM

SEQ ID NO: 7910 - protein, 450 aa, Bacillus licheniformis
MIKKLLIANRGEIAVRIIRACKELGIETVAVFSEADREALHVQMADEAFCIGPKLSKDSYLNITNIVSVAKMTGADAIHPGYGFLAENADFAELCEEVNVTFVGPTADAISKMGQRMLQGKQCSRPGVPIVPGSKGIIEDIEDAVSLARDIGYPVIIKATAGGGGKGIRVARTEEELINGIKITQQEAATAFGNPGVYIEKYIEDFRHVEIQVLADTHGNTIHLGERDCSIQRRLQKLLEETPSPALDEGIREQMGQAAVKAAEAVKYTGAGTVEFIYDYREQKFYFMEMNTRIQVEHPVTEMVTGVDLIKEQIRVASGEKLTLTQDEVTFNGWAIECRINAENPEKNFMPSPGKIEMYLPPGGLGVRVDSAAYPGYSIPPYYDSMIAKVITYGKTREEAVSRMKRALSEFVIEGVHTTIPFHLKLLEHETFVSGEFNTKFLEIYDVMGS

SEQ ID NO: 7911 - protein, 159 aa, Bacillus licheniformis
MLNIDEIRQLIKLIDESSINEFTYENEGSKVELKKQSGTVQTIQQVAAAPVQAPAPEAQAKQAPVQDAPAKEEAAKEGGNFHKITSPMVGTFYASSSPEADPYVTVGSKVTESSVVCIVEAMKLFNEIEAEVEGEIVEVLVENGQLVEYGQPLFLVKAE

SEQ ID NO: 7912 - protein, 212 aa, Bacillus licheniformis
MMLKKQTVWLLTMLSLVVVLSVYYIMSPEGENVVTVDDKEQVAAEKEKPMKEEPAKDGKDDTAPAKDKTEGKDTKDKETSASEQNGEVVTEESSGDEDLFTTYRMEMDDQRSREREELTEIVRSDKATAKEKSEAYDKMTELSEAEGTEKTLETLIKTKGYKDALVNADGDKVNITVKAKEHSKAAATDIIDIVAKEVKNLNDVAVTFEPAD

SEQ ID NO: 7913 - protein, 231 aa, Bacillus licheniformis
MNKRTWIEKLIGHLLPKDEKDGKKLTKYHYFLLLFVLGVSFMLVSQIFSSEPSQEPAADQPAASQKATSESTVQSGEGEKEVFKPASDDKPKESIQDYEQEYENQLKDILETIIGVEDVSIVVNVDATSLKIFEKNRKTQETSTNETDKQGGKRTVSEMSSDEEIVIIKNGDKETPVVVQTKKPDIRGVLVVAQGVDNVQIKKTIIEAVTRVLDVPSHRVAVAPKKMKEDS

SEQ ID NO: 7914 - protein, 208 aa, Bacillus licheniformis
MEFLTEWLTNIILFILMAIVIDMLLPNSSMQKYAKMVISLLLIVVILNPIFSLFRTDPDVIFEKLTKNGQVQSNEIKNQLNSEKKEIQASQQAYILEQMAVQLEKNAEGRFTSDKYKIDRVEVSSDSQLKTEKDLSKHAEVSVFLKPASEKTVQAVAPVEINTDRSYQSMQEREKKETGEVREQLAGIWEISPDKITVHIEGGERSGN

SEQ ID NO: 7915 - protein, 401 aa, Bacillus licheniformis
VKRFLFWLLVIGIVCFGAHNVQASPKEAEPAGETAAEESAEAIAREQAEGLELDRVGEFWNNILTEYGGHLPESQKGSLLEFVKGEKHFSPEEWGKALFSYLFHEVLANGKLLGTLILLTIFCVLLQLLQNAFQQSTVSKVAYAIVYMVLIILALNSFRVAVTYANEAIQTMTSFILSLVPLLLALMATSGGAASAAFFHPVILFLMNTSGLFIQYIVLPLLFLSAILSIVSTMTDQYKVTQLAQLLRNAAIGTLAAFLTVFLGVISVQGASAAVTDGITLRTAKFITGNFIPVLGRMFTEATDTVISASLLLKNTVGILGVAILICIAAFPAIKILSLALIYKIAAAVLQPLGGGPVISCLDVISKSVIYIFAAMAIVSLMFFLSLTVIITAGNLTMMMK

SEQ ID NO: 7916 - protein, 121 aa, Bacillus licheniformis
MIATFLSLIVKEQKPTFAFLIVVFAGCTIFLFLVDQVYEIIRMIEKIAANANINMMYVETILKIIGIAYIAEFGAQLTKDAGQGAIASKIELAGKILILVMAVPILTVIIETIIGLIPSMS

SEQ ID NO: 7917 - protein, 68 aa, Bacillus licheniformis
MGVDVNIIFQIAGVGIVVAFLHTILDQMGKKEYAQWVTLLGFIYILFMVATVVDDLFQKIKAVFLFQG

SEQ ID NO: 7918 - protein, 171 aa, Bacillus licheniformis
MLKLLGAVLILAAATWTGFEMAKPFRERPKQIRQLLAALQSLEAEIMYGHTPLRQASKQIAHQLTEPVASLFQTFAEQLEKGSASAGTAWEDSLEKVWPETALKKKEYEILRQFGETLGRHDLISQQKHIKLALTHLETEEAEANLAQAKNEKMVKSLGFLTGLLLILLLM

SEQ ID NO: 7919 - protein, 307 aa, Bacillus licheniformis
LHHITEILPDTIKRALSGLGDHEIDQIEEIRVRTSRPLELVNKGKPRFLPYVATPEDSALLLNRLGNYSMYTLEEELKKGYVTIRGGHRVGLAGRVVVENGAVKGIREISSFNIRIAKEKIGISKPYVPHLFQNSWLNTLIIGPPQTGKTTLLRDLARLISSGSGNAPAKKVGIVDERSEIAGCVNGIPQYRLGDRADILDACPKAEGLMMMIRSMSPEVMIADEIGRMEDAEALLEAVHAGVTVIVSAHGYTYADLARRPSLKMLQEHRVFERIVELSRKNGPGSLSRILNGNGEPLGAAKRMLSC

SEQ ID NO: 7920 - protein, 93 aa, Bacillus licheniformis
MKLFFGQVNPTVLTMAALRVVSSLIELTAAVVMLLTNDVRKAVAVNSVLAMVGPLIFIITMTIGIYQIAGQLSYAKLILIFMGVVLIIAGIYK

SEQ ID NO: 7921 - protein, 41 aa, Bacillus licheniformis
LSILLTVLTYQEHKGNSGKEPASLKPALFLLSEIFYLSHAK

SEQ ID NO: 7922 - protein, 185 aa, Bacillus licheniformis
MISVNDFRTGLTIEVDGGIWRVVDFQHVKPGKGAAFVRSKLRNLRTGAIQEKTFRAGEKVARAQIETKTMQYLYANGDQHVFMDTTSYEQLELNEKQIEHELKFLLENMSVQIMMYQTETIGIELPNTVELKVVETEPGIKGDTASGGTKPAKTETGLVVNVPFFVNEGDTLVVNTSDGSYVSRA

SEQ ID NO: 7923 - protein, 353 aa, Bacillus licheniformis
MKLNKLRELFGGLGIDGILVTSGVNLRYITGFTGSSGLAVISDDQAVFITDFRYTEQARDQIKRFDIVQHAGGIVQKTAEVIKEMGINKIGFEQDKMTYGTYAAYKEQLGAAELVPVSQSVEKLRLIKSSEEIKILKEAAKIADDAFSHILTVIKPGITEIEVANELEFYMRSQGADHSSFDMIVASGVRSSLPHGVASGKAIEKGDLVTLDFGAYYKGYCSDITRTVAVGEPDDELKRIYQTVFEAQAIGMRSIKPGITGKQADAYTRDYISSQGYGDYFGHSTGHGLGMEVHESPALSARSDQMLEKGMVVTVEPGIYIPGKGGVRIEDDIVLTEEGNESLTHSAKDLIIL

SEQ ID NO: 7924 - protein, 145 aa, Bacillus licheniformis
LPHILILNGPNLNRLGKREPDVYGTDTLTDLEQRLFQFAEGIQTELTFFQSNHEGDLIDALHEAEEQYDGIVLNPGAFSHYSYALRDAVAAISIPVIEVHLSNPHAREEFRHRSVIAPVARGQITGLGFEGYKLAISYFMNTNNK

SEQ ID NO: 7925 - protein, 178 aa, Bacillus licheniformis
MGNEDNQKQPEELEQNKRETPMTFTGRVIMTGFVGGVLWSALGELAYLFKFSEVNANMILQPFVIGDWKNGFLGTFISILLIGVISIGAALLYYGTLKQVRGMWAGIVYGAVLWAVVFYLFNPMFPDVQTVAELKRETIVTTLCIYLLYGLFVGYSISFEYNELNSEKLTRALGETRE

SEQ ID NO: 7926 - protein, 317 aa, Bacillus licheniformis
MSNQTKQPAYGGQAVVEGVMFGGRRHYVTAIRRKDGSIEFFKLPRKTNPTLEKLKKIPFLRGIIAIVEASANGTKHLNFSSERYDLDPSLDDQLKEEKPSNLTMIFGLAAVGVLSFLFGKFIFTLVPVFLAELTRPVFQSDVAQIMIESFFKLLLLLSYIYAISCTPFIKRVFQYHGAEHKVINCYEQNLPVTVENVQRQSRLHYRCGSSFILFTVIVGMFVYLLVPTDPLWVRILNRLALIPVVLGISFEVLQLTNKLRDIPVLKALGYPGLWLQLLTTKEPSDDQVEVAIASFNELLHMETKAEDEQKEPSNIVM

SEQ ID NO: 7927 - protein, 128 aa, Bacillus licheniformis
MKQRVHPVSALIIAFGIFGFVYFAVTSPGRLLQYLLVFAAVGAIIYFVIRRISNRNMGSEGAAFKKAAKQSNKRFQDHKKRSVKGRVNHLRSVPSINKSKPVLVKKKSQTQLTVIEGKKSKKKNRAFF

SEQ ID NO: 7928 - protein, 291 aa, Bacillus licheniformis
MYIDGVFSGGGMKGVALVGAYEALEKRGFRFKRLAGTSAGSIIASFIAAGYTSAEIRQMMEELNESELLDPRFSLLPLKLLQWASIYWRLGLYKGDKLENWISEKLKAKGISVFGDLEQGKLKLIASDLSNGKMLVLPDDLNRYGLNPGRFSVARAVRMSCSIPYFFEPVKLKSPLGISVVVDGGVLSNFPMWLFTTEKKRPVLGITLMPNEKERPKKTIKNAFELFGALFETMKEAHDARHIATKHERNIIFLPVEEVLSTEFAMSAEKKLALIELGKKRTELFLKQWTF

SEQ ID NO: 7929 - protein, 40 aa, Bacillus licheniformis
MRGFVDTLKPLGNGGFFLFVSFFPDAARCLMVFFSVRFLK

SEQ ID NO: 7930 - protein, 142 aa, Bacillus licheniformis
MTTPSMEDYIEQIYMLIEEKGYARVSDIAEALAVHPSSVTKMVQKLDKDEYLIYEKYRGLVLTPKGKKIGKRLVYRHELLEQFLRIIGVDEEKIYDDVEGIEHHLSWNSIDRIGDLVQYFEDDSKRIDDLRSVQKRNEQENQ

SEQ ID NO: 7931 - protein, 278 aa, Bacillus licheniformis
MEKETWRFIDSGRRDPAFNMALDEALLFWHSENKIPPTIRFYGWNPPTLSVGYFQNIEKEINLDAVKKHGLGFVRRPTGGRGVLHDQELTYSVIVSEEHPEMPKTVTEAYRVISEGILEGFRELELDAYFAIPRTEKEKQSLKNPRSSVCFDAPSWYELVVEGRKVAGSAQTRQKGVILQHGSILLDLDEDKLFDLFIYKNDRLRERMQRNFKQKAVAINELTKEKVTIEEASEAFKKGFEKGLNIHLEPYELTEEETEFVEDLARTKYATDEWNYRR

SEQ ID NO: 7932 - protein, 128 aa, Bacillus licheniformis
LSTSSIVVLLICAALIIYAVASYIYQQRIMKTLTEEEFRAGYRKAQLIDVREPNEYEGGHILGARNIPLSQLKQRKSEIRPDKPVYLYCQNNVRSGRAAQTLRKHGCKEIYNLKGGFKKWGGKIKTKN

SEQ ID NO: 7933 - protein, 294 aa, Bacillus licheniformis
MWKKIAGIGTAAVLTLGLAACGSSNNNENASVGDQVNYKITGIDPGAGIMNATDQALKDYDLSKWTVTSGSSSAMTAALKKAYDKKDPIIITGWTPHWMFAKYDLKYLKDPKGSYGDAEEIHTVTRKGFKDDHPGANKLLSQFSWTEDDMGEVMLAVQEGKKPEEAAADFVKKHQDLVKKWTKGVDKADGEKIKLGYVAWDSEIASTNVIAKVLEDLGYNVTLSQVEAGPMWTGIANGSVDASLAAWLPQTHKTYAEKYKGKYEDIGTSMTGVKIGLVVPTYMKDVNSIEDLKK

SEQ ID NO: 7934 - protein, 284 aa, Bacillus licheniformis
MFTLSSLPRIPLADWIDQFVDWLTVSFGGVFNGIASGVESFVDAIVQGLGFVPPVMLTVIFAALVWLISKRGIALFTLIGFFIIDYLGYWDAMLQTLALVVTSVLISVIIGIPVGIWGSQKKTVRRVVTPILDLMQTMPAFVYLLPAIFFFNIGVVPGVVASVIFAMPPTIRMTILGIQQVPEDLIEATEAFGSTTSQRLFKVQLPLATKTILAGINQSIMLALSMVVIASMVGAPGLGEEVYRAVTQLQTGTGVETGLAIVIIAIVLDRVTQNIKLKKSRGNA

SEQ ID NO: 7935 - protein, 415 aa, Bacillus licheniformis
MNSDEKRIKIKVEKVSKVFGKNTKKATQLLADGKTKKEILKETGATVGVNQADFSVYEGEIFVIMGLSGSGKSTLVRLLNRLIEPTAGHVHIDGDMITNMSKDQLREIRRKKISMVFQKFALFPHKTILENTEYGLELQKVDKRKRRLKAMESLKLVGLEGYEQQYPDQLSGGMQQRVGLARALTNDPDILLMDEAFSALDPLIRKDMQDELLDLHESVGKTIIFITHDLDEALRIGDRIALMKDGNIVQIGTPEEILMNPSNEYVEKFVEDVDLSKVLTAGHIMKRAETVRVDKGPRVALTLMKNLGISSIYAVDKHNRLLGSVDAETAKKAAEKSQTLESVISREITTVEENVVLTDIFELVSDASIPIAVVDEKQRMKGIIVKGALIGALAGNDRYINAHEPAHEAVIQEVR

SEQ ID NO: 7936 - protein, 485 aa, Bacillus licheniformis
MNNQDQSLIFEVSKEGRVGYSLPELDVPETDVTDVIDEAYIRDEPADLPEVSELDIMRHYTALSRRNHGVDSGFYPLGSCTMKYNPKINEKIARIPGFSAIHPLQDEATVQGALELLYDLSEHLEEITGMDEVTLQPAAGAHGEWTGLMMIRAFHEANGDHKRTKVIVPDSAHGTNPASATVAGFETVTVKSNDDGLVDLEDLKRVVDEETAALMLTNPNTLGLFEENILEMAEIVHNAGGKLYYDGANLNAVLSKARPGDMGFDVVHLNLHKTFTGPHGGGGPGSGPVGVKKELIPYLPKPVLVKKDGHYTFDHDRPHSIGRVKPYYGNFGINVRAYTYIRSMGPDGLKEVTENAVLNANYMMRKLAPYYDLPFDRHSKHEFVLSGRRQKKLGVRTLDIAKRLLDFGFHPPTIYFPLNVEECIMIEPTETESKETLDAFIDTMIQIAKEAEETPEVVQEAPHTTVVKRMDETKAARKPVLRYEK

SEQ ID NO: 7937 - protein, 448 aa, Bacillus licheniformis
MKHRYLPATDQDKKEMLEAIGVERIDELFSDIPESVRFKGEYQIKKAKSETELTKELTKLAAKNKDTVTYASFLGAGVYDHYQPVIVDHVISRSEFYTAYTPYQPEISQGELQAIFEFQTMICELTGMDISNSSMYDGGTALAEAAMLASGHTKKKKIVVSETVHPESREVLKTYAKGQYIDVVEVPSKNGTADLEALDEAVCEDTAAVIVQYPNFFGRIEPLKDIEPIAHKGKSMFIVSANPLALGLLTPPGALGADIVVGDAQPFGIPAAFGGPHCGFFAVTKKLMRKVPGRLVGQTEDENGKRGFVLTLQAREQHIRRDKATSNICSNQALNALAASVAMTALGKKGVKEIAWQNLQKAAYAKEAAKRAGLEVAFEGPMFNEFVIRLNEPVEKANERLLEKNIIGGYDLGASYPDLKRHMLIAVTELRTKEEIDTLMNELGDRHE

SEQ ID NO: 7938 - protein, 364 aa, Bacillus licheniformis
MLKRTPLFDLYKEYGGKTIDFGGWELPVQFSSIKEEHEAVRTKAGLFDVSHMGEVEITGTDSLPFLQKLLTNDVSTLKEGGAQYTAMCYEDGGTIDDLLVYKKAANVYMLVINAANIDKDVDWMNKHIEGDVSVRNVSDEIALLALQGPKAEAILKQVADHDLAELKPFMFRDDAAVGSVQALVSRTGYTGEDGFEIYCRNEDAACIWKLLLETGKDSGLVPCGLGARDTLRFEAKLPLYGQELSKDITPIEAGIGFAVKTNKASDFIGKAVLASQKEHGADRKLVGLEMIDKGIPRHGYAVYYQGEQAGEVTTGTQSPTLKKNVGLALLKKEACALDTVVEVEIRNKRLKAKIVKTPFYKRQP

SEQ ID NO: 7939 - protein, 70 aa, Bacillus licheniformis
MSMKRNEYERMTARGETGRGKPKSGAEGASWGNSESLRQKNSCLTQLWREFVSYYVLQTTKGDIFAFDAK

SEQ ID NO: 7940 - protein, 559 aa, Bacillus licheniformis
MRPDIHFDNEWPEQFKKHLDEDGPWANWELYQLSCEVQKRLAIPTFEGLQAPYHLPGFTPLPHQLEVARKVVEQMNGKAILADEVGLGKTVEAGLILKEYMIRGLAKKILILVPASLVSQWVKELREKFLIPAVEQKKSYVWEQCDVVVSSLDTAKRSPHREAVLSIQYDVVIIDEAHKLKNNKTKNYEFVRSLKKKYCLMLTATPIQNKIDEIFNLVSLLKPGHLGNESNFNKDYTKQINSAEAHERLKSLINKVMIRNRRHDTGITWTKRHVETVPISFSPTEQALYDEIKKLKTNHQHSSSMFSIMTLERECCSSREAVYMTLKNMLDRKDREAPVISEPVIHHLIEKVNEVAQNSKALKVVELIQELDDKVIIFTEYRATQIYLQWFLQQNGISSVPFRGGFKRGKKDWMKDLFRGKVQVLIATEAGGEGINLQFCNKIINYDLPWNPMRLEQRIGRIHRLGQERDVYIYNMATKHTVEEHILKLLYEKIHLFEKVVGDLDDILTKIEVGNFEEHLHDILFYSATDEEMKIKMENLTSFISYGNEDVSNHTQIGG

SEQ ID NO: 7941 - protein, 264 aa, Bacillus licheniformis
MRQEEIYLFLERFFTANGCTITDKSPGHMTVQLTVEVDKQIMNRPFYWHWLEKTGGEPNPMKITLITNEDEAPSDIEGEFIHFGSPRLFQIFQAVQKNGKFIRLYEKIRSEGAHIPLEPWLGMNVTISYQSDMKKDKLLSLGLHLISGQLTESFQEQMEARELSSQISDYCYTMSPLIKPESGIKRLERYIEQAARSEPLDWAEASLKRWNNDLALLNQFYEDTEEKPEEYEIEKKALQTLYEPKIDIKVQNGGLFYLRKKNSG

SEQ ID NO: 7942 - protein, 58 aa, Bacillus licheniformis
MNKDKNEKEELDEEWTDLIKHALEQGISPEEIRIFLNLGKKSSNPSTSIERSHSINPF

SEQ ID NO: 7943 - protein, 111 aa, Bacillus licheniformis
LIGQRIKQYRKEKGYSLSELAEKAGVAKSYLSSIERNLQTNPSIQFLEKVSAVLDVSVHTLLDEKDETEYDGQLDSEWENLVRDAMASGVSKKQFREFLDYQKWKKRQEKE

SEQ ID NO: 7944 - protein, 41 aa, Bacillus licheniformis
LAFFTLNKPIPHEHKKTDHKDPFFKLHHYLSSLCALSFSFT

SEQ ID NO: 7945 - protein, 264 aa, Bacillus licheniformis
MGTKKKLGLGVASAALGLALVGGGTWAAFNDIETTQATYAAGTLDLNAKDTSARVNLSNLKPGDKFTKDFEFKNDGSLAIKEVLMQVGYSNFVDGNAKNGGKSTAEDFLKQFKVSVLTVGVEGGNGYPKNIILDEANLYDLYNMSAKKDKNAYEKVKKAIEPEFLHDNGKINVATINGKTAPEYDGIPKDPYDFDKVQLVIEFVNDKTTDASGRMVQNKYQGDSVQLDFSFEATQWNGLTIDGKKHADGKGYVKENERAHSEDK

SEQ ID NO: 7946 - protein, 194 aa, Bacillus licheniformis
MKHVMKWISNFLYVIIFTIIIAAVIVVISTKSSGGEPQLFGYQLKTVLSGSMEPEFKTGSVIAVQKVENPGSLKKGDIITFMQDENTMVTHRIIGITKNKSNLMFKTKGDNNQNPDSDPVLAENVVAKYSGITVPYAGYLLDFASKPIGTAILLIVPGLLLILYAVITVSAALREIDQKAKAIEAAGKDQSVSM

SEQ ID NO: 7947 - protein, 242 aa, Bacillus licheniformis
MFRLSRTRRCRKRAGKNIIVFQTLLIIYLLIGLGSQLSQHTNASFHDVETYSMTMKAASTFPQDEKQWDGSDLKLQKQTKTKGTVCAPLTLFAEYKNRGSQIADSEWKWELHKLGHSKKPLEDGTVIDKGVFKKEAESSIYRIESKRAAKGGLYAFKLIRPEGHPDVKKGKPFIWSNVMELQDCKEETPKPPKKASAKPKQTEQTQTTQKSEQDIEETPKDSESVDKENRKEDNSLESGEAS

SEQ ID NO: 7948 - protein, 106 aa, Bacillus licheniformis
VLKNVILCSFLLLSSIGPLNAHAAAYETARMSKWEEKAVEEAKKRYPEAEVRLTKKVWDRKRADEAVKQYHVTLSEGNKNFGVFVTISFEPATHKINKVVVVEEYK

SEQ ID NO: 7949 - protein, 60 aa, Bacillus licheniformis
MKTNDYVKYMTEQLVKYMDTPKQERKEMKEKRKELKPPSRIYQWFGILPLGCIMFFKKHK

SEQ ID NO: 7950 - protein, 121 aa, Bacillus licheniformis
VKNSKGFIYPAAVFAAVICMLCASHSAALLTNQRTFAQQTKEFHIQQNLLQNGILHALSHIHEETKEKVQKQHGLISYSVSPAHQQLTRVQIQVTTASGTETSAQFQYDLRNQKITQWKEY

SEQ ID NO: 7951 - protein, 160 aa, Bacillus licheniformis
MKYASLLKKETAKGTVSPFCGQRGYTLLNIMFSLMVHMFVAGTMASIFHLFLSPERNGSDIHPREWTITAEQILKESRNSIDIRSAGDHQSLAMTNRQGDTVRYEQYQTVIRKRVNGKGHVPLLQHVKKMRFMIENHLLILEATSLSGKSYRTSIPLYHM

SEQ ID NO: 7952 - protein, 115 aa, Bacillus licheniformis
MFKKNKGFTTVEAVSAFGIWVMITMLLIPMLHQLSLQREASEKEEETYRILEEKISRYTLTGRFQAKEAVLYRNTSYFIEWKEKGDDYEVCISIKKRDSQRHCFTILRAKGIYPS

SEQ ID NO: 7953 - protein, 137 aa, Bacillus licheniformis
LESLTVLMIGSIMFSLLFALLPPIYEKRIVQHFVSQLEEDLLYAQQTALVRHTTVKVQFDFAGCRYIMKHSDEGSSPELVRTYSCNIAIKKSTLKPILTFNPSGVPNQGGKIVIDTQHASFILTIYLGSGKINVQKK

SEQ ID NO: 7954 - protein, 97 aa, Bacillus licheniformis
VNEKGFTLIEMLVVMLVISILLLITIPNVTKHNQSIQKKGCEGLINMVQAQITAYQMDHDGKTPNRAELESEGYIKKNLKCPNGKAIKISNGKAQAD

SEQ ID NO: 7955 - protein, 344 aa, Bacillus licheniformis
MKIKMKWPVREQADLLKKLGDMMQSGYTILDALSMLKLQLNERRRADLTFAMEKLTEGCPVFQVLEMISFHKDAVTIVYFAEQHGNLPFAFRQSGELLHRKIAQSEKLKKAARYPLFLVLTVCVIISIMKSAIVPQFSAIYESMNVETSFATTLIFYVFDHFYLFFAGLPLVAAALSLYYLCSFRHKPPEDKMAFLITIPLLGQTFKLFNSYFLSLQLSNLLQAGLSVYDSLKAFESQPFLRFHKNEAKRLIERLKQGESLEQMLAGHPFYENDLAKAVAHGQLNGHLYRELYSYSQFLIERLERKAEKWTGLIQPLIYGLTAAMILILYLSMLLPMYQMMNQL

SEQ ID NO: 7956 - protein, 354 aa, Bacillus licheniformis
LYTIESLSGRLIDEAYRMKASDIHIVPGEKEAVVRFRIDDELFQKDGLTRNECSRLISHFKFLSSMDIGERRLPQSGALTLYINREPVHLRMSTLPTIHDESLVIRLLPKMSSKPLTKLSLFPSATFKLLSFLKHSHGLMLFTGPTGSGKTTTLYSLIDYAKRHFKRNIITLEDPVESRSENILQVQVNEKAGMTYSAGLKAVLRHDPDMIILGEIRDAETAQIAVRAALTGHLVLSSMHAKNAKGAIYRLLELGVDMTEIEQTLVAVSAQRLVDIVCPFCGDSCTLYCRLSRPVRRASVFELLYGKSLNLCIEEAKGRCGGIKTDTLKMLIRKGIALGYLPSKTYERWIGHED

SEQ ID NO: 7957 - protein, 56 aa, Bacillus licheniformis
MIRSCTNHCASFLSAVYTKTIGSIKSIKSANQAEYVTKTESPNTDLTILFDFKPLK

SEQ ID NO: 7958 - protein, 279 aa, Bacillus licheniformis
MENKHAALYEYLVKQADRITDEWLSRTASEKEKTAQQYKDFILAVSKVFAKDEQALCWNKASGCAKEIAYDRDVSQIPVTESINGFKVCRELLIDEIEQFSDEHAPDSSKKDFFIWNKQLHLMMDEVIEQFILEYEHTTKSQLKAQTEMIRELSAPVIPVSEHIGVLPLIGEIDTHRATVIIESALTQCAELHLSHLFIDISGVPVVDTMVAHQLFKVVDSTKLLGVETVLSGLRPEIAQTVVKLGMDFSHIKTEQSLAKALCNKGFCIHEDGKAEEQV

SEQ ID NO: 7959 - protein, 131 aa, Bacillus licheniformis
MEELTFYSYPSCTSCRKTKHWLKANQVDFTDRHLFRETPNQDELKHILSLTTEGIDEILATRSQAFKELNLDIEELTVSEVLELLIQKPKLLRRPIIVNGDKLVVGYNPGELLKLKNTPYTVLFPEKNEDC

SEQ ID NO: 7960 - protein, 81 aa, Bacillus licheniformis
MNRMFRVLGFWTGIFAVMFYLGNMKDASLLFFGQTVFFVFLSYLNLTERMYIYIFGAYLTIFFAAFTYYSVFIMVPGQGGH

SEQ ID NO: 7961 - protein, 212 aa, Bacillus licheniformis
MKWRRMPLGPIQTNAYILSNDDGTCLIFDPGSESGKLNAYIKENGLKPLAVLLTHAHFDHIGAVDNVRKEWNIPVYVHKNEAEWLTDPSLNGSALLTGQTITAEKADHLIEEEGDLKIGPFTLRMLFTPGHSPGSVSYYAEEENLIVSGDVLFKGGIGRTDLPGGNQKVLMDSIHQKLLTLPEETLVLSGHGPETDIATEQEQNPFINGFTL

SEQ ID NO: 7962 - protein, 42 aa, Bacillus licheniformis
VTRPKMITSNININPLRLDPLQYISNFILTVFIKFVEDNMIH

SEQ ID NO: 7963 - protein, 57 aa, Bacillus licheniformis
MLLVIIFGLVTILSALGVLRSLKQINVLGILFGGAAFLVFGWFTVMTIINSGYPTVH

SEQ ID NO: 7964 - protein, 104 aa, Bacillus licheniformis
VAIADVTIIPIGTETPSVSAYVAEIQTILEGFKKEGKINYQLTPMNTLIEGELSDLFQVIQTIHEAPFQKGIHRVATNIRIDDRRDKKTTMEGKLASVQRHFSQ

SEQ ID NO: 7965 - protein, 366 aa, Bacillus licheniformis
LRVSLLIIAALMAVAAAGCTPQHQEGSKSVHHEEPEGKRESGAAVKDKKVIALKDRHFDETAGWLDNETVIYTATDPVGGSEIKSYDIFKGTGKTIYKTDDRLIASEVNSEKGMILIQTAGNGSEMKLTLLNLQGKQLFAKKFRTHELQVDWNRFDPSLLYVTTFTKDWNYESSLIDAKEEQTEKNIAQAAFIHWTSADTFEYIKWNERDREKPAPVYSYSTADGREKKLAGDAVLLDIVGDMRLIVTPSSDQRQGTYIFSDVSSSEKKISFKLPLFSEYGSLSPMEYGYDPRHELFYTYQPNESGSLYDLISVNLKSGKREVIREKVEMLPITLSPDGDYALYGYTQDQIISLNSKTAAPLVTKE

SEQ ID NO: 7966 - protein, 374 aa, Bacillus licheniformis
MAFINIKPELKQNIERLSDILNIPEPLLISANANASADELYFPGVSFHAGKNVQAAETYEQLQLLANQYTFEDEQWLTKTAVYDSAELKKEIGRLTECFPFVTSRIIGRSSMGQPIYELLLGAENAGKRTHMNASFHANEWITTSVLMKWLKEYCYHLCTGQTALGFSPLDIFSSTKLSVVPIVNPDGVDLVLNGPGHLGIAREALDEMNEHQPDFREWKANINGVDLNNQFPSFWEIEKQRKPPKSPSYRDYPGDEPLTEPEAAAMRDLIANEPPDRLVALHTQGEEIYWGYKGLEPPESADVIQTFERLSGYKGVRYIDSYAGFRDWFIHYYGREGYTVELGKGKNPLPLKQFDDIYCKSRGILWASCFFES

SEQ ID NO: 7967 - protein, 315 aa, Bacillus licheniformis
VNIKGKTIAAACFVLLLIAALTACGNQTESKDSSSKSKSEETITYKAENGTVKVPKHPKRVVVMADDYFGYFKTLGLNVVGAPDRVFKNPYFKGKTDGVTNIGEGNSAEKVIQLKPDLIVVWTTQGADIEKLEKIAPTVALKYDSLNSTERLKDFAKMTGTEDQAEKWLAEWDKKVAAAKSKVQKAVGNKTVSIMQTNGKEIFVFGDQFGRGGSIVYQDLGLKATKLTKEKAIDEGPGYTSISLEKLPDFAGDYIFIGPWESSGDDSAVLNTSIWKNLGAVKNQHVYKIDPVGFYFSDPISLEGQLEFITENLTK

SEQ ID NO: 7968 - protein, 38 aa, Bacillus licheniformis
MQQAGYRSGLFLMTRGRHKNHDQTDAGYDIIDNDSLYR

SEQ ID NO: 7969 - protein, 632 aa, Bacillus licheniformis
MRKSFFSKISFLLIATLLMWLKTYVVYKTSFNIKIENFMQEFILFINPLSFLLFIFGIGLFFKEKNRNRFIIGASIVLTFVLLANMIFYRFYNDFLTIPVLFQTNNMGDLGSSINSLFMPADLLLIVDIAILIWLYKRQPAKTGGKATRKERAAYYLFVAAVFFFNLGISETERPQLLTRSFDREVLVKNISLYNFHIYDGLIQSKQSAQRALADSNSLTEIENYVNANRTDTNKDLAGIAKGRNVILVSLESTQSFVVNQKLNGKEITPYLNDLIKKSYSFENFYHQTGQGKTADSEFIVDNSLYPLGRGAVFFTNAGNEYTAMPEILKNHGYYSSIFHANNKSFWNRDIMYETFKYDKFYDIKSYDVNEENSVGWGLKDKEFFEQTSELMKEMPQPFYTRLITLTNHFPFELDEEDKLIDEFDSKSRTLNRYFPTVRYQDEALKRFIEKLKEDGLYDNSVIVLYGDHYGISENHNEAMSQFLGREVTPFEEVQLQRVPLVIHIPGVTDKEPKTIDTVGGQIDIRPTILNLLGIDSSDQIQFGNDLFAKDKTEFTVLRDGSFITKDKVYTDGICYDKSTGEPSKDKKGCEPYIEKAKQELSYSDQIIYGDLLRFYDSERLKKQSDSKPKDE

SEQ ID NO: 7970 - protein, 324 aa, Bacillus licheniformis
MNDSWLVGVDLGGTTVKLAFVSAYGEILHKWEIPTDKSGKTVTVSIAKAIDSKLNELGKPKHILKWIGMGAPGPVNTETGIVYKTTNMGWENYPLKDHLEAETGIAAVIENDANIAALGEMWKGAGDSAKDLILVTLGTGVGGGIIVNGEIVRGQNGAGGEIGHICSVPEGGAPCNCGKSGCIETIASATGIVRIAKEKIESDHRDTSLRECLDITARDIFEAARKNDPVAGEVVDYVAGHLGMVLANLASSLNPSKIVIGGGVSKAGEILRSKVEQSFKRFVFPRAGEAAEIVIASLGNDAGVIGGAWIAKNQWLKSQAQPVL

SEQ ID NO: 7971 - protein, 18 aa, Bacillus licheniformis
MKTAYDVQLLLKQFGCYV

SEQ ID NO: 7972 - protein, 484 aa, Bacillus licheniformis
MKKKHAVQKNLAKNVEYLNEKLGVDKSFDMIRLDVVYADRDMSLYLVDGFVKDDIMHHLLKNLSRLTPENLEDDPLEKLIKTHIPYIEIDTEDDLDKAADQVLSGPAVLLADGVDHAIIIDAQTYPARNPEEPDNERVVRGSRDGFVETIVFNTALTRRRIRDRSLRMEFLQVGRRSKTDVVICYLEDIADLESVKKLKQSLEAIDTDALTMAEKTLEEYIGGRHWNPYPTVRYTERPDTAAVHLYEGHILVFVDGSPSALITPVTFWHHLQHAEEYRNKPLAGAYLRIVRFISVLASIFLLPLWFLLSVHPDLLPDALEYIGPEKKGALPLLAQFIIIEIGVDMMRMAAIHTPSSLATALGLVAALMIGEVAVQVGLFSHEVVLYLAVAAIGTFATPSYELSIANRLARIVLLIAAGAFGPIGFVIAIFCWVIYLVRMKSFHVPYLWPFIPFDYRAFRDIAIRTPMPLKNRRPVFLDPQDPDR

SEQ ID NO: 7973 - protein, 512 aa, Bacillus licheniformis
MYSIDYLYWNFIGNLLDRDFELVQAPASFGEAWLEARGSAPYDLVRVFRKDIDFRQDLVRDLESLYERAERLRAASGQRKLSILNVYLSQEAPVDEWEDVVGHPVADKRISIVPVFIDHASAEEGLRKLAVALNMEPDELTGQMQDAGYENVEEKRAEVLAAAKAREEERRREAAVFEKGKPMFTWIFAVLQVFMFLLLEMSGGSQNTETLVRFGAKENSLLLAGEWWRLVTPIVLHIGLVHLMFNTFALLSVGAAAERVFGSFRFLVIYISAGIFGSIGSFLFSPYPSAGASGAIFGCLGALLYLAFSNRKAFLKTIGTNIIVIIILNLGLGFTISNVDNAGHIGGLIGGLLTALAVGIPGKKRPLQRLAGWVLIFVIGGGALYFGTHSAPVQKNAMLHQAAKWYEEGEYEKVKDALKEAGSKPDASSDTLRLLAYSEIRLGEYENAEKRFEAVVEKDPSDHASLYSLAWLYTQRGELAKAEQSIERALAEKPDEEMYKKLRDEIKKESAR

SEQ ID NO: 7974 - protein, 57 aa, Bacillus licheniformis
MRKVTFIVVGVIAALVFFQNRYRVINFILGQNQIRHYFIHLMMRIPFFRNKFIQQAF

SEQ ID NO: 7975 - protein, 190 aa, Bacillus licheniformis
VKRSLRSEVRKRLANMPEQEFHLKAEAIHRKLFQSKQWKKASVIALTVSRNREVPTKPIIEQARLEGKTVCIPKCMPETKKMHFRSYQDESDLEVVYFGLQEPIVHKTERMEPEDIDFILVPGICYDRRGYRIGYGGGYYDRYLAGFTKDTASLAFECQVIGHVPNEPHDIPVKQVLTEDAVYNCLDTAE

SEQ ID NO: 7976 - protein, 370 aa, Bacillus licheniformis
LINVLLLSLENPLSSKSGAGRYVKSHLELLRNEVSFTVCTTAAGQNSNGWETLEIPLDLKAFASFEEAVAAMNFQMIKIVLEHRGQFDFVHANDGVTAPAAVYLSEVLAVPLISTVHGLESGRKKAADGYVHPYRAILERLLAEKSDQILVLSSMMKSDMQKAFSLSFEQIRVIPHPCIKSRTVKKRMKSAPYFFSYGRFVPEKGFIELLHVFQKLRSRRPDLELVIAGEGPLQSGIETIAKELGIKDSVTILPFLCEEERESWLAFCEMAVFPSSYEPFGIAVQESMAAGAAVAAGINGGWNDFVIDRVTGFRIDFSDPHKAANALAEIVGNKEQLLKVGQTAKAYIFDLHDPGYVKNMFLHHVYHTSF

SEQ ID NO: 7977 - protein, 165 aa, Bacillus licheniformis
VKRTIIGKKPFQHSIRGDSSFCNDILKITSPDHETVRLSWEISEAALSAAEAVLFENIRDVEKQILLFCVKNGERSARTIHTGAFKGEASVFPAAGNAFYKAEYRIYNSLNMSLAVLSSDCFYLGENGIHSNSSCFQHQDNQQDWTTQFSAYTRYSLIEGKERPR

SEQ ID NO: 7978 - protein, 121 aa, Bacillus licheniformis
LKVMNVEIAIIALLVVSIALIAFSYFQREPIKEVEQELETLQLSAMQEIYKLKKKMTVLEEELLDSNVVVRRPNAGISQHIAKQILSKYQNGMSVDAIAKAEHVSVEDVKAIIKDNERVLV

SEQ ID NO: 7979 - protein, 159 aa, Bacillus licheniformis
MTRQSVQAFAGGMILATAVLAGAFYLTDNGKAEASKEAQNISEADVKTYLKDNQQVSLKREEYQQLLHYKETALKQDAASQNKKEQDDAKKGSKYKLEIKSGMSTAEIADLLAKGKVISSADDFKDYVKKTGNESKIRAGKYELKRGDSLKNIVKTLSK

SEQ ID NO: 7980 - protein, 259 aa, Bacillus licheniformis
MSAVTAVKPEDVYQINDLNLWYGEHHALKNINLTIPEYEITAIIGPSGCGKSTFIKTLNLMINMVPNVKMTGEISYNGTNVLNSKVDLVELRKKVGMVFQKGNPFPQSIFDNVAYGPRIHGLKNKKELNERVEKALVDVALWDEVKDRLHSQALGLSGGQQQRLCIARALATNPDVLLMDEPTSALDPVSTLKIEELMLKLKEKYTIAIVTHNMQQASRISDQTAFFLMGELIECNDTVKMFSSPDDHRTKDYITGRFG

SEQ ID NO: 7981 - protein, 275 aa, Bacillus licheniformis
MAQVQMPVLETVRDNIGIAPFPEAKEHILEVKNLNIYYGEKRAVNDIPMCIDKHAVTALIGPSGCGKSTFLRSINRMNDLIPSARTSGEIRYEGLNILDSNINVVNLRREIGMVFQKPNPFPKSIYSNITHALKYAGERRKSVLDEIVEESLTKAALWDEVKDRLHESALSLSGGQQQRLCIARTLAMKPEVLLLDEPASALDPISNAKIEELIVGLKEEYSIIIVTHNMQQASRISDQTAFFLNGDLIEYDRTEKIFMNPSEKKTEDYINGRFG

SEQ ID NO: 7982 - protein, 295 aa, Bacillus licheniformis
MNSKVTDRLATGVFGLIAAVIAAILVGLFAYIIINGVSHISLSFLTSRSSALSSGGGIRDQLFNSFYILVLTMLITVPLGVGGGIYMAEYAPANKLTDFIRVCIEVLSSLPSIVMGMFGMLMFVNLTGWGYSIIGGALALTIFNLPVMVRVTEDAIRSVPKEQKEASLALGVSKWHTIKTVLIPGAVPSIITGAILASGRVFGEAAALLFTAGLTTPRLNFADWNPFSETSPLNIFRPAETLAVHIWNVNTQGMIPDAEAIANGASAVLVLSVLIFNLAARWLGSFIHKKLTANK

SEQ ID NO: 7983 - protein, 309 aa, Bacillus licheniformis
MVQKIEKLSAKERLISSKHNRKMDEIRGRILVASCAFIMMAAAISITIFLGNKGLQSFLANGVSPIEFLTSLDWNPTNENPEYGALPFILGSFAVTLLASLIAAPLGIGGAIFMTEIAPSWGRKVLQPVVELLVGIPSVVYGFIGLTVLVPFISQFKSSGSGHSLLAGTIVLAVMILPTVTSISTDALMSLPKNLREGSYALGATRWQTIRKVLIPAALPSLLTAVVLGMARAFGEALAVQMVIGNSRNLFESLLDPAGTLTTIITLNMGHTTYGSVENNTLWSMGLVLLIMSFLFILLIRYLSSRRKL

SEQ ID NO: 7984 - protein, 305 aa, Bacillus licheniformis
VKPFKKITLMFIMSVLVVFAAACGSSSTNNNADEGKQSDKTENKASGSLTISGSSAMQPLVLAAAEKFMDENPDADIQVQAGGSGTGLSQVAEGTVQIGNSDVFAEEKEGIPAKELTDHQVAVVGMAAAVNPEVGIDDISLEDLKKVFTGKIKNWKELGGKDQKITLVNRPDSSGTRATFVKYALDGETPAEGITEDSSNTVKKLIAETPGAIGYLAFSYIKDDTVTPLSIDGVKPTAENVQKGKFPIWAYQHSYTKGEPEGLAKEFLDYLMSDDIQKSIVTEQGYIPVTDMEVKRDADGKQTDK

SEQ ID NO: 7985 - protein, 706 aa, Bacillus licheniformis
MMNKKMKNEKRKSLPIRLNILFLLAFIIFTIVVVRLGMVQIVFGEDYTNEVQKQEEVDVSTSVPRGKIYDRNLNTIVKNKPMNAITYTRTSSTSQEDRLKIAKKLAEMIKIDTDKITERDKKDYWILTRPKEAEKLITDEDRKKVKDGKLKEDDLYQLQLDRITEDKLNELTDQDLKVLAIKRQMDSGYALTPQYIKNKGVTAKEMAVVSEHLDELPGVDVTSDWKRDYPYNGLLRTMIGSISDSNEGLPKSLLDHYLSLGYNRNDRVGKSYLEAEYENVLQGQKEKVKNITNKSGDIVDTEVISEGKSGKDLVLTIDVDMQKAIEKIVEDELKSAKAKHSAPLLDRAFVVMMDPRNGEVLSIAGKQLKNESGKLKVDDYALGAMTSSYAMGSAVKGATVLTGLQTGAINLNTTFLDEPLYIGKGKPKKSWASNLGTLGIQGALEKSSNVFMFKTAIALGKGQYKAHQPLDLQTKAFDTFRYYFSQFGLGVKTGIDLPNEASGYKGSQRLPGFLLDFSIGQYDTYTPLQLAQYVSTIANGGYRMKPQLVKEIREPDSKKGIGAVTQSVQPEVLNKVDMSDEYIKEVQKGFRRVMTKGTAAGQFASASYKPAGKTGTAQSFYDGPDKSKTGTSTYNTTLVAYAPYDNPEVAISVVVPWVYNDYGQRYSITNEIGRKVLDKYFELKSKQSKENTVEKNKDKIEKEATE

SEQ ID NO: 7986 - protein, 428 aa, Bacillus licheniformis
MSRIKNIIGDVELNRDLLLLLAVGGLYSLSIALSNTFVNVYLWKQSGQFVDLAIYNLSIVVMQPIIFMFAGRLAKKIDRVFILRFGVSFLAVFYLTVLLAGENAGSRLVLLGSVLGIGYGFYWLAFNVLTFEITEPDTRDFFNGFLGILNSGAGMIGPIVAGYVISRLADNTGYTVIFSLSLALFSVAVITSFFLKRRESRGRYILKKIWTERNSDPNWRSITNAHFFQGLREGIFVFLINVFVFITTKSELALGKFGLINSAVSFFAYYFATRLIKKGARKKAILMGGLVLFGALFLILFHMTYVTLLLYAVAIAIGYPILLVPYSSLTYDVIGKARYARKARIEYIVVREVFLNIGRIVSILVFLLLVSLLKEDLGIPVSLVLLGAGHTLIYYFVKDIRLTEPARETVGKDAHKQTAEPNYLEGKR

SEQ ID NO: 7987 - protein, 56 aa, Bacillus licheniformis
MYFRAKETKNKQTGFSPVFQQTLRFADNIKRPASRGPLFSSWIILLRCKGVQLHPS

SEQ ID NO: 7988 - protein, 202 aa, Bacillus licheniformis
MAYKLPELPYAYDALEPHIDKETMNIHHTKHHNTYVTKLNEAVAGKQDLESKSVEELVANLDAVPENIRTAVRNNGGGHANHSLFWKLLSPNGGGAPTGELAEAINSKFGSFDQFKEDFAAAAAGRFGSGWAWLVVNNGELEITSTPNQDSPLSEGKTPILGLDVWEHAYYLNYQNRRPDYIKAFWNVVNWDEVARLYSEAK

SEQ ID NO: 7989 - protein, 160 aa, Bacillus licheniformis
MDVLYWIIIAAMFVIAFIGLVYPIIPSVVFIVAGFVLYGFLFTFGHYSYLFWIIEGIFTAVLFAADYITNLLGIKRFGGSRAAIWGSTIGLLAGPFVIPVAGIILGPFIGALAGEVIVHQKDLKTAARIGIGSLIGFISGVFAKSVIQLMMIGYFLYTVL

SEQ ID NO: 7990 - protein, 252 aa, Bacillus licheniformis
MNLFQRFFKSTYSPQAIGKMRFQGIGKTILYVFLLSVIAALPNLYHISSGVVNTMNSFQSAVKEFPAFSIKDGTLQTDAKKAIESQSFGFVIVFDPSGSYETKQIEDKRNSVGILKDKFVIAIDGQVQEMPYTMLPEDMSKDDILSLVDQNKAVIVPVLCVLLFLATAAGKFIDVSVLAVIGLIIRNGQKKMLSYKQLWVMSAYSITLATVFFAIMDALEAVVPSQFLLNWFVNFIMLFLAIKETPASKAAR

SEQ ID NO: 7991 - protein, 101 aa, Bacillus licheniformis
MKRVIVLFSILLALFIVYYDLKSGTIPQNALPASTMAAEAPAASLQYKSVTVKPGQTVFSIIGNSAVPADKIAEDFEELNPNVEAGRIQAGVTYKFPVYPD

SEQ ID NO: 7992 - protein, 370 aa, Bacillus licheniformis
VSEITHRTKTRPVKVGPLTIGGNNEVVIQSMTTTKTHDVEATVAEINRLAEAGCQIVRVACPDERAADAIPEIKKRISIPLVVDIHFNYKLALKAIEGGADKIRINPGNIGRREKVEAVVNAAKEKGIPIRIGVNAGSLEKRILEKYGYPTADGMVESALHHIKILEDLDFHDIIVSMKASDVNLAIEAYEKAAKAFDYPLHLGITESGTLFAGTVKSAAGLGAILSKGIGNTLRISLSADPVEEVKVARELLKSFGLASNAATLISCPTCGRIEIDLISIANEVEDYIAKIKAPIKVAVLGCAVNGPGEAREADIGIAGARGEGLLFRKGEIVRKVPEETMVEELKKEIDKLAEEHYAKQAAEKEKLNT

SEQ ID NO: 7993 - protein, 123 aa, Bacillus licheniformis
MERDQNVRDRNRAGYDADLVDATLDNDEFLEETAAEVAPTYRTDNGDNGEARNDADAAGGRVTGYIALALSIISLFMLPVLLGIAGIIVGYIARRQGAAGLGAWAMGIGAVSLVLGIFITPFF

SEQ ID NO: 7994 - protein, 194 aa, Bacillus licheniformis
MLHLGIDIDGTITAQDTFVPYLNESFSLSITLEDIKEYDLTKLLNISQEDFWKWMNENEPRIYQEALLAQYAKQTLDELKKQHKLIYITARRHHLEDITYDWFEKRDIHYDHIELVGGHDKLEAVFRHEIDVFFEDHHGNATMIAKEAGIPVLLFNTPYNQLPTDSNIVRVDSWLEAAEWLKKNEKTLKAAKSM

SEQ ID NO: 7995 - protein, 143 aa, Bacillus licheniformis
VNVQEALDLLKEKGYKYTSKREDMLQLFSDSDKYLTAKNVLSALNDDYPGLSFDTIYRNLSLFEELGILETTELSGEKLFRFKCSSAHHHHHFICMVCGKTKEIELCPMEKLTDDLDGYQISGHKFEIYGTCPRCEEESTEAQ

SEQ ID NO: 7996 - protein, 286 aa, Bacillus licheniformis
MLTPFFHYEFLQNAFISGILIGLIAPLLGVFIVVRRLSLIADALSHVSLAGIAASLYAGKQFAVFAGVSPIYFGMAFSVAGSLIIERLRTVYKHYQELAIPIIMSGGIGISVIFISLADGFNTDLFSYLFGSVSAVSREDMLVIVGISAAVLIVVFSLFKELFLLSFDEEHAKASGISAKWIHFIFILIVALVIAASMRIVGTLLVSALMTLPVAASMRIAKGFKQAIFLSILFGELSVIVGLVLAYHLDLAPGGTIVMLSIFILILCISYNKVKRRIRRERTGSA

SEQ ID NO: 7997 - protein, 258 aa, Bacillus licheniformis
LKQPIIEMKHVSYSYDHRNVIEDINLQIEEGTFLGLVGPNGSGKTTLLKCILGLIKPQTGELKLFGVPLRKFKDWSKIGFVSQKANSFNTGFPASVYEVVASGLTAKLGLFRRMSKADKQKVDEAIEAVGITSLKDRNIGELSGGQQQRTFIARALVSEPKLLILDEPTVGVDQKTVEGFYKLLEKLNREKGITLILVTHDVGTVSDKVTHVACMNKHLHFHGNTEEFESMTDQDLSQFYGHDVQAISHNHHHHGGHE

SEQ ID NO: 7998 - protein, 49 aa, Bacillus licheniformis
MLHFNNRLFQFVHLQILQNHYDLSHKKKMAAEKQQAIFTIDQFIFKLYI

SEQ ID NO: 7999 - protein, 294 aa, Bacillus licheniformis
MAKTQKQHKKESAVKKAFRIVMILIGAACAAASIELFLVPNNIIDGGIIGISLILDYLFKDNPYINFALLVVVLNIPFMFSGYKHIGKTFLISTLIGIVSLSIIETLLHHVEGVTTQPVLAAVFGGLLLGFGVGLVIRNGGSMDGTEILGILLTKKLPFSVGEFVMFVNVFIFAWASFVFGLEQAMFSVMTYYIAMKTIDAVIQGLEETKAVIIVSDQYEEISDSLLHRLGRGTTKLKGKGGYSDEDTEVIYAVVTRLEVTKLKSIVFDIDHNAFITIMDTHETRGGKFKNAIH

SEQ ID NO: 8000 - protein, 84 aa, Bacillus licheniformis
VILFQKIVLQRLNQVTADEVLKYAKQYGIQVTRKQALEVEKLVKGKNINIFNEEERNKLLKQVEAVTSKEAVQLLNQLFAQYVS

SEQ ID NO: 8001 - protein, 297 aa, Bacillus licheniformis
LLKIGSHVSMSGKHMLLAASQEASSYGANTFMIYTGAPQNTRRKKIEDLNIEAGRAHMEENGISDIVVHAPYIINIANTTNPATFELGVEFLRSEIERTSAIGARQIVLHPGAHVGAGAETGIQKIIEGLNEVIDPNQNVQIALETMAGKGSECGRTFEELAQIIDGVTHNEHLSVCFDTCHTHDAGYDVVSDFDGVLNEFDKIVGIDRLKVLHINDSKNVRGARKDRHENIGFGEIGFDALQYIVHHDQLKDIPKILETPYVGEDKKNKKPPYRFEIEMLKNKQFDEELLEKIKQQ

SEQ ID NO: 8002 - protein, 439 aa, Bacillus licheniformis
MKQTKFEMYDLKPFIIEAVHHLGFYEPTDIQKRLIPAALKGESAIGQSQTGTGKTHAYLLPLLSRIDPEKEFVQVVITAPTRELANQIHQEVLKITKFLGPDEAIRSKCFIGGTDKQKSIDKLKTQPHLVVGTPGRIADLIREQALDVHKAGSLVIDEADLMLDMGFLEDVDFIGSHMPEGLQMLVFSATIPEKLKPFLKKYMANPRYAHVEPKHITAEKIEHVLIPSRHRDKNELLLEVMTHLNPYLAIVFANTKTTADEIAAYLTDKGMKVGLLHGGLTPRERKKVMKQIGDLEFTYIIATDLAARGIDIKGVSHVINYELPDDLDFYVHRVGRTARAGTSGTAMTFYDTSDEDALVKLEQMGIVFENMRIEKGEWKKIDDRKRRQNRKRTPDETDEVAKRLVKKPRKVKPGYKKKMQTEIQKIKRQQKRKQFRKGK

SEQ ID NO: 8003 - protein, 215 aa, Bacillus licheniformis
MFQQQPMRNQPRPQAPQRPGRALMPRHPGMGMQPPQAQQRGLQQMFQPMGAAQQQAGARGGGIQGLLSKFLPGSAASGGTGAGLGGTGSGLGGIQGLANPSTISNMLGNVQKALGVAQQVTPMIQQYGPLVRNLPGMVKMFRQLNSDDTEAEDGEQQKDEPEHKTETSGEKKEEIKVSSKKPEKSKPEEIRKKQSRSAPPSAKRKTGGSKPKLYI

SEQ ID NO: 8004 - protein, 314 aa, Bacillus licheniformis
MNVIKISPRGYCYGVVDAMVIAKNAALDKSLPRPIYILGMIVHNKHVTDAFEKEGIYTLDGPNRLEILNQVDKGTVIFTAHGVSPEVRKIAEDKGLVAIDATCPDVTKTHDLIRKMKAEGYHVIYIGKKGHPEPEGAVGVAPDIVHLVETEEDVERLDIEAEKLIVTNQTTMSQWDVHDIMEKVKEKYPDVEFHQEICLATQVRQEAVSEQAKKADLTIVVGDPKSNNSNRLAQVSEEIAGTKAYRIGDLSELKLEWLDGVETVAVTAGASTPTPITKEVIRFLEQFDHEDPSTWKISHEVPLHKILPKVKAKT

SEQ ID NO: 8005 - protein, 373 aa, Bacillus licheniformis
MTKTINGHEIIQLFEQFSPKSLAVEGDKIGLQIGTLNKTVANVMVTLDVLEETVDEAIAKNVDLIIAHHPPVFRPLKHVITDQPGGRLIEKCIKHDIAVYAAHTNLDVADGGVNDMLAEALELKNTKVLVPTYEEPLKKLAVYVPKDYEEQVRTALGDAGAGHIGAYSHCAFSAEGVGSFKPLSEADPFIGKRGELERVEEVRIETVYPAGIEKSVIKAMSEAHPYEEVAFDIYPVEQNPLQKGLGRIGELNEEMTLEAFARYVKEKLEANGARMVGKSDAKVKKVAVLGGDGNKYIHHAKRMGADVYVTGDLYFHTAHDAMMIGLNVVDPGHYAEQIMKNGVAKKLTAMCREKKFDVSVFPSDTNTNPFTFV

SEQ ID NO: 8006 - protein, 237 aa, Bacillus licheniformis
VNELKLSKRLQTVAEYITKGAVVADIGSDHAYLPCYCVLNRLASAAIAGEITDGPFLSAKQQVEKLQLSSLISVRKGDGLEVIEKGEADVITIAGMGGSLIAHILKTGKDKLSGKERLVLQPNIHAQHIREWLYQEGYALINEEILEEDGKYYEVLVAEAGDRDAAYDGVSFAAGMLVGPFLVKEQNDVFIKKWSQELKHTENIYRQIEAAPPSEENRQKLLELSERIEILKEVLRR

SEQ ID NO: 8007 - protein, 147 aa, Bacillus licheniformis
MNINNIHDFNLNQENDFLTIQTKLKKHINLENPISKDALQTCAGVDLAYWEKDGEAFGVCSIIVLDFHTKRVIEKVHCAGKIAVPYIAGFLAFRELPLIIKAAKKLTIEPDVFLFDGNGYLHINHIGLRHMLRFFSKSQRSALRKLT

SEQ ID NO: 8008 - protein, 185 aa, Bacillus licheniformis
LVFVLVLGDFLGNNIYEDKVGIFHFLYAIGLWTFLMLGIEFMTLKNKSTRSLLLGNPNIIIRDGVMDRKLLTKNKLDVNQVLSILRQNNVFSVREVKYGILEANGQISLLLKSKYQKPDLNLPESPVDLPTSLIIDGEILWDNLHELGFDQQWLDNQLTTNGYDNVKRILYADWRESEGIHVSPK

SEQ ID NO: 8009 - protein, 497 aa, Bacillus licheniformis; identical to SEQ ID NO: 7164

SEQ ID NO: 8010 - protein, 224 aa, Bacillus licheniformis; identical to SEQ ID NO: 7165

SEQ ID NO: 8011 - protein, 286 aa, Bacillus licheniformis; identical to SEQ ID NO: 7166

SEQ ID NO: 8012 - protein, 68 aa, Bacillus licheniformis; identical to SEQ ID NO: 7167

SEQ ID NO: 8013 - protein, 116 aa, Bacillus licheniformis; identical to SEQ ID NO: 7168

SEQ ID NO: 8014 - protein, 339 aa, Bacillus licheniformis; identical to SEQ ID NO: 7169

SEQ ID NO: 8015 - protein, 159 aa, Bacillus licheniformis; identical to SEQ ID NO: 7170

SEQ ID NO: 8016 - protein, 157 aa, Bacillus licheniformis; identical to SEQ ID NO: 7171

SEQ ID NO: 8017 - protein, 68 aa, Bacillus licheniformis; identical to SEQ ID NO: 7172

SEQ ID NO: 8018 - protein, 296 aa, Bacillus licheniformis; identical to SEQ ID NO: 7174

SEQ ID NO: 8019 - protein, 68 aa, Bacillus licheniformis; identical to SEQ ID NO: 7175

SEQ ID NO: 8020 - protein, 156 aa, Bacillus licheniformis
MRRYKSMVALFLLLTLTGCWSRYEVQNMNYATAVGIDYVDGQYTMYLQLLDFSTVAKLEGQQKAEQPPVWVGKGEGSSFTEAANDLYSTSQQRLNLGQISAILFSERLMKENKVGEVLELINRYREIRYLAWLFSTREPPEEILLATPFFRFSPNA

SEQ ID NO: 8021 - protein, 72 aa, Bacillus licheniformis
VEEVGVNVALIRKRIKSTSMVYETKKVGVRTKTTVAILYMRDIVDPKIVQDVKNKLDDLHIDGAFSALAPLS

SEQ ID NO: 8022 - protein, 100 aa, Bacillus licheniformis; identical to SEQ ID NO: 7177

SEQ ID NO: 8023 - protein, 150 aa, Bacillus licheniformis; identical to SEQ ID NO: 7178

SEQ ID NO: 8024 - protein, 191 aa, Bacillus licheniformis; identical to SEQ ID NO: 7179

SEQ ID NO: 8025 - protein, 531 aa, Bacillus licheniformis; identical to SEQ ID NO: 7180

SEQ ID NO: 8026 - protein, 74 aa, Bacillus licheniformis
MNSNDTVTMLNEEFENDQTGEKVEGITIIVDGQFKQVLDIIKAKSDSYQNYTEIIRDALFEGVNSMTMKLRNKE

SEQ ID NO: 8027 - protein, 252 aa, Bacillus licheniformis
LSNSIKSLEPINIPCGWFVKYNDLTDTHEKVEPNTKLLELEKQRYHAAVKIIKGQDEYLIHIYDNHRETIDTINVEDRRQLVKELERIIWKIEAAAFGGNFFIFEGPPDYLRLRIPQGWTVSYNKLIDIDPDQLEEDSDDWFNFTSSLLQLEHKESRLILDVGWYVDIEPSGTFYMLLIKNLDWENPLEDMETRRPEKLVDHIEAALQKAAEALFDFSPSLLIDFSQKKLYSMYLEPACYEEYIPKSLDWSL

SEQ ID NO: 8028 - protein, 134 aa, Bacillus licheniformis
MITYNGPVEEPIENPNDDFIRSIVFEKDEDYWKQGSGDSCFEVEGCDEWLIFFYDEPYGFFIMRHPDYLVPMNKNVEIETVEHLVGGEPMKVPSCSYVDRGLAYRIINEFTTTKSMPIFIEWVDLYEIDFDHGF

SEQ ID NO: 8029 - protein, 123 aa, Bacillus licheniformis
LIAKHRGYDSYMEDPFLDHEVKNADLKGAEIVSGLKLEIDKITVSISATVHWTIVRWTIILIKYLKSKQLGKTPSTKSRTHFDVNSTVILESQKATIFLREVQWVPLKKSTPKTLRTCSTNSC

SEQ ID NO: 8030 - protein, 169 aa, Bacillus licheniformis
MNNIFLDNLQNKVKVGFVLTVAERVFSVISKDDERHPEGREALDKCWLWVESHAVTGDDLYELIDNADFTGISEFAEEEEDSNIARLWSLLVDAVAYTSWEAYKKEKVKHLPQALEGINKDSITIFLNSTVETGFITSKEVEKIRKGIEVYQSAKEEIPTNREAFIKLF

SEQ ID NO: 8031 - protein, 111 aa, Bacillus licheniformis
VWEHVKSLETENIAEKIYDLDLATQQDELYEYFGDYENYSEHFLPSDYVDIHEEIEGDLTMCALNWLVNGKTNNFYEKVFELYKEGGWPCGWKGTYPKGEFIVFVPSNSNE

SEQ ID NO: 8032 - protein, 169 aa, Bacillus licheniformis
MFQEWEELNDDLKSAYYLGLCEAIVPTLKQSNDFNFIKEALDACWKWLEHKNIEADDLYTYLENLDDTGILTLMQLESNEDDLDAWICIADAISYTIYKAYKYQKDEYLPETIESIDSYELFEEFHSHFSLLSKNPGQKEKAFLKFLKKEGEKKISRESIQDFLLNSVE

SEQ ID NO: 8033 - protein, 669 aa, Bacillus licheniformis
MKVFEAHSLIEAANNRKKQYETFEDQLQTLKKAFLGVADLGDDFQGKGADNIKDFYKGQAEIVDSWLKLVEAQIAFFNGVSGDIKDKKLSDSYVEVSFLDHELKNADLKATEIVSGLKLEMDKIIASISDIVDLDNWTLDDYIDKMSKAQTTRQNTIDAVNKLDESLKTEYTNLQALDSAVLGKYSGLMEATSHGKTASPMYFSLKSFHSSEIYKNTIEVENQAANYIEFKNEQAEARRLQEKQEEEANKPWDLKALDAAGTFVGEVSGYYDYKRAAEGVDPVTGEKLTDGQRVAAGAMAAAGFIPIVGWAGRAFKGGKAIYKTGKGLIAADHALDAYKASKTLNVLKMTEMGAYGLVASNGFSEAVTGKDMFGNKVSEERRKQGLIEATLSLVGAGAVAKTANHGAQTLAKTAGKNIPLAKSPKAALVQKGNNILEKVKSFQVPTNVRVYVEQPASATGHRIGTPIVRVNVEKTPVKELGIVKMVSGGGNVSKGARTGSKIDVGKADLGVLRQKWNVPKTDTVAVGKTDVEGLENLVFEGGSPKVRKEAGLPDLDSVMPDRPIKSPGKIASATRHAEEGVLNDFISKVEALGKNPAEITGTLKIHQSNPKGVCPTCIQGLNNPNVPAGVFKQFSEMFPNLTIEVTSETIQGIKPNGRLNLVIKNGEYI

SEQ ID NO: 8034 - protein, 87 aa, Bacillus licheniformis
MTTIKLKHETVIKKLEAVRAAIDALDLPNPPKAAGKNKLTYTTKCHEREQNIHQMVADYKKAVHKNIKDTKENVDLLKEQDKAIARK

SEQ ID NO: 8035 - protein, 144 aa, Bacillus licheniformis
MSHASTLNHIHSTINQKLADVERRIERVKTAKKEIEKEHETGIVEIRQILHPHLNSHWTGDFANDFDGERDEAHTSMYNIVNGKYEGYISQLERKIFALEVEKHSLELAGAAAKEADHLLSLGEKAVDQLSDKIRSIKNSWSWF

SEQ ID NO: 8036 - protein, 119 aa, Bacillus licheniformis
MNRNPLIPFLLIAIMGIGLVFILSIKGLYDAKEIAGEGNKTAQEDKADASPEEIYKANCVTCHGENYEGVSGPKLKGVGDRMDTGAIKEKIEKGGNGMPGGLVPAEKLDDMAKWVSEIK

SEQ ID NO: 8037 - protein, 49 aa, Bacillus licheniformis
MDDEAIVYFSFKNQFLNTVTTTIIKGFSFDLKVIMTQNTLLDICKFERN

SEQ ID NO: 8038 - protein, 373 aa, Bacillus licheniformis
MADKQAHETETEFTFEQVRDQLTEAGKKRGVLTYEEIAERMSSFDIESDQMDEYYEFLGEQGVELISENEETEDPNIQQLAKAEEEFDLNDLSVPPGVKINDPVRMYLKEIGRVNLLSAKEEIEYAKKIEEGDEESKRRLAEANLRLVVSIAKRYVGRGMLFLDLIQEGNMGLMKAVEKFDYRKGYKFSTYATWWIRQAITRAIADQARTIRIPVHMVETINKLIRVQRQLLQDLGREPTPEEIAEDMDLTPEKVREILKIAQEPVSLETPIGEEDDSHLGDFIEDQEATSPSDHAAYELLKEQLEDVLDTLTDREENVLRLRFGLDDGRTRTLEEVGKVFGVTRERIRQIEAKALRKLRHPSRSKRLKDFLE

SEQ ID NO: 8039 - protein, 607 aa, Bacillus licheniformis
MGNRIPDEIVEQVQKSADIVEVIGEYVQLRKQGRNYFGLCPFHGENTPSFSVSGEKQIFHCFGCGAGGNVFSFLRQMEGYSFTEAVSHLADKYQIDLPEQVAAVSAYSTGSSDEQKMAEAHDLLKKFYHHLLVNTKEGQAALDYLLERGFKMEQIEQFEIGCALDSWDFITKFLERRGFDLALMERAGLIIRRENGDGYFDRFRNRIMFPIHDHHGTTVAFSGRTFTGEQPKYMNSPETPLFRKSKLLYHFHQARLHIRKEERAVLFEGFADVISAVTSGVKESIATMGTSLTEEHAKIIRRNVGEVILCYDSDHAGYEATLKAAEILQKKGCNVKVAMIPDGLDPDDYIKKFGSEKFKNDVIGASVTMMTFKMNYFRKGRNLSDEGDRLAYINDVLKEVSLLSGPLEQEIYIKQLANEFSISFESLKDQLSVFEKQAASRSRESSRQDSKERQAAVSRAPRRKTGLRPAHENAERMLLAHMIHDRDVIRKVLERVGFEFNLDQHRAIAAYLYAMYEEGADISIQELFKRVEDQELGQLLTDILMLQVNEELSEAELSDYVKKVLNYRNWSMIKEKEAARAEAERQKDFIKAATLAQEIVKLNRSLK

SEQ ID NO: 8040 - protein, 163 aa, Bacillus licheniformis
MEGWRISLLEKERTIFVDADACPVKDEVLKTAADFDVKVVFVASFEHFQITRKEEENWTYVDPHKEAADLYIANHVRPGDVVVTQDIGLASLLLGKKVYVMSERGYLFEENSIDHALFRRHVAQKLRRSGRYTKGPKKLVKEDRERFVKELQKILSKIEGFTY

SEQ ID NO: 8041 - protein, 270 aa, Bacillus licheniformis
MSNRTIYVVSDSVGETAELVVKAAISQFNGSSEQTNIRRIPYVEDRGTIKEVISLAEADGGIICFTLVVPEIREFLIAEAEKANVVYYDIIGPLIEKMESVYGFSAKYEPGRVRQLDEDYFKKVEAIEFAVKYDDGRDPRGILKADIVLIGVSRTSKTPLSQYLAHKRLKVANVPIVPEVDPPEELFTVDPAKCIGLKISPDKLNHIRKERLKSLGLNDKAIYANINRIKEELEFFEKIVGRIGCNVVDVSNKAVEETANIIHNMMTKRV

SEQ ID NO: 8042 - protein, 230 aa, Bacillus licheniformis
MLSTFIHNERIVSFGLKVVSTIELNKRQEHILQIVKENGPITGEHIAEKLNLTRATLRPDLAILTMSGFLEARPRVGYFYTGKTGTQLLADKLKKLQVKDFQSIPVVIHENVSVYDAICTMFLEDVGTLFVVDDNAILVGVLSRKDLLRASIGKQELPSIPVHIIMTRMPNITLCRRDDFILDIAKMLIEKQIDALPVVKDTEKGYEVVGRITKTNMTKILVGLSENEIM

SEQ ID NO: 8043 - protein, 679 aa, Bacillus licheniformis
MSNQDLLLEIGLEEMPARFMHDSMTQLGEKLESWLKEKNIAFGSVKLYNSPRRLAVLVENVAEKQDDVKEEAKGPAKKIALDENGEWTKAAIGFSRGQGASPEDLYFKDIKGTEYVFVQKFQKGQDTFSLLPELRDLVTSLHFPKNMRWGSEDLKYIRPIKWIVALFGSEVVPFSVAHVETGRTTQGHRFLGKAADLSAPSEYEATLESQFVIADPAKRKQLIVKQLDELAAEKSWDIPRDEDLLDEVNHLVEYPTVLFGSYEEEFLAIPEEVLVTTMKEHQRYFPVKDENGSLLPYFVTVRNGDSRALENVARGNEKVLRARLSDASFFYKEDQKLNIDENVRKLEKIVFHEELGSLGDKVRRTEALAERIAEVIGADQETVQLIKRAAHISKFDLVTHMVYEFPELQGIMGEKYARMLGEKEEVALAVNEHYMPRQAGGQTPSSIAGAVVALADKLDTVASFFKIGVIPTGSQDPYGLRRQASGIVQILLDRNWGISFKELAAFAGQEANSELLEFFKQRLKYVLTAENIRYDVVDAVLESTNLEPYSAVKKAAVLESAAAKPEFKETAEALARVISISKKSETSAIDASLFENPQEEELFKAYEACRQQIETLYQAKDYEGAFSELSKLKEPIEAYFDHTMVHAEDERLKANRLAQMASLAELIRSFANINAIIVK

SEQ ID NO: 8044 - protein, 295 aa, Bacillus licheniformis
LNIQEMILTLQKHWSNEGCVLLQSYDVEKGAGTMSPYTFLRSLGPEPWKVAYVEPSRRPADGRYGDNPNRLYQHHQFQVIIKPSPDNIQELYLDSLKALGIDPLEHDIRFVEDNWENPSLGCAGLGWEVWLDGMEITQFTYFQQVGGLECKPVSVEITYGIERLASYIQDKENVFDLEWTNGYTIKDLFKMAEYEHSVYTFETSDVDMLFELFATYEKEANRQMDQGLVHPAYDYVLKCSHTFNLLDAKGAISVTERTGYIARVRNLARKVAKTYYDEREKLGFPMLKEEEASHE

SEQ ID NO: 8045 - protein, 256 aa, Bacillus licheniformis
MLTKCEGIVLRTNDYGETNKIITLLTREHGKIGVLARGAKKPNSRLSAISQPFLYASFLFRKSSGLGTLEQGEMIESMRNIREDLFLTAYAAYIAELIDKGTEEKKPNPFLFELLLQSMRRLNDGTDPDIIANLIEVKMLSVMGLYPELDECVHCKSKDGTFHFSIRDNGFICHRCFAKDPYRIPLSPASARLLRLFFYFDLSRLGNVSVKQETKDELKRVIQTYYDEYSGIYLKSRRFMEQMDNMKKMLGDENKS

SEQ ID NO: 8046 - protein, 47 aa, Bacillus licheniformis
MLNFTWNVFSQTGSVDTYLLFKELEKENLERPEVLEEELAQIDFPIL

SEQ ID NO: 8047 - protein, 301 aa, Bacillus licheniformis
MTQESFKSGFVSIIGRPNVGKSTFLNRVIGQKIAIMSDKPQTTRNKVQGVLTTDTSQTIFIDTPGIHKPKHKLGDFMMKVAHNTLKEVDLILFMINAEEGYGKGDEFIIERLKGVKTPVFLIVNKIDRIHPDELLVLIDEYRTRYPFQEIVPISALEGNNIDTLLKQIEDYLPEGPQFYPSDQVTDHPERFIISELIREKVLHLTREEIPHSIAVSIESIQERENGSVYVSATIVVERDSQKGIVIGKRGSLLKEIGKRARTDIEALLGSSVFLELWVKVQKDWRNKMSQLRDFGFREDEY

SEQ ID NO: 8048 - protein, 136 aa, Bacillus licheniformis
LTKQELIAEALKAREFAYVPYSKFKVGAALLTEDGKVYKGCNIENAAYSLCNCAERTALFKAYSEGEKSFKMLAVAADTPGPVSPCGACRQVISELCSPNMPVILTNLNGQVKEMTVQELLPGAFSSEDLHDTGKL

SEQ ID NO: 8049 - protein, 126 aa, Bacillus licheniformis
MGSQDPHKQNEWRRLKMSFSNAFTGIIKTFISERNFRIHCGAAILVIACGFFFRLTLIEWTVILILIGGMLALELMNTAVEHTVDLFTKENHPLAKAAKDAAAGAVCVFAAVSCMIGLLIFLSKLF

SEQ ID NO: 8050 - protein, 158 aa, Bacillus licheniformis
MSLILDITDETGRVPEDRLAEIEKLLQFAAAEEGVADGAEVSVTIVNNEEIQKINKEYRGKDYPTDVISFALEEDGEGEVEIIGADMPPVLGDIIISVDKAREQAEEYGHSLMRELGFLTVHGFLHLLGYDHMTEEEEKEMFTKQKEILNRYGLSRSS

SEQ ID NO: 8051 - protein, 716 aa, Bacillus licheniformis
LKKKKRGGKFRLIRLNNGGFLPVILYAALSALMFILLFFHVRPESLDLDLFSISENTIYAPATVEDQKATANKKQEAREEVPDQYTLKKEYSDNRVDLVSSIFDIIKEVKKESAEQEKKDKQAPSEKDQIKSVEEKLTSDVTDSLSQDSVKHLLRASDGELSMTQDSVITAVNDVMSKEIRAGKLDEAKEHVTKELKGNSIPSKLKNAADEIGRFAIIPNYVYDPDKTEQKRQEAADSVQQVQIKQGQILVEENQLIDREVYRKLELTGLLSGANIFKPVGGLLLLIALFISALVYYFEKQYSSRIPKNKSLMLFSLITGIVLIVMEVISLFQQLEIGHIGYLVPIAMGVMLIKLLINERLAILSSMILSICGSMMFNQGVTGTFNYGIGTYFLISSMAGILFLGKHNARAKILQAGLFVSLINIVVLFTLQLIQNTAQTGLEMGTYLVMGAVSGIGSSVLVLGLMPFFESGFGILSTMKLLELSNPNHPLLRKILTETPGTYHHSVMVANLSEAACEAVGANGLLARVGAYYHDIGKTKRPQYFIENQMNIDNPHDKLSPQLSKNIIIAHVTDGADMLRDHKMPKELVDIAEQHHGTSLLKFFYYKAKEKGDQTTEEEFRYPGPKPQTKEAAIISVADSVEAAVRSMHNPNPERIEKLVRGIIADKLQDGQFDECDLTLKELNTIAKTLCETLKGIFHSRIEYPEANPKQKVKHT

SEQ ID NO: 8052 - protein, 319 aa, Bacillus licheniformis
MTEHLLAIHQQLESPNEAQALFGNQDSHLKLMEEELNISIVTRGETVYVTGDEETFEIADSLLASLLNLIRKGIEISERDVLYAIKMAKKQKLEFFESMYEEEITKNAKGKPIRVKTIGQREYIAAMKRHDLIFGIGPAGTGKTYLAVVKAVHELKNGRIKKIILTRPAVEAGESLGFLPGDLKEKVDPYLRPLYDALHDVLGTDHTARLLERGTIEIAPLAYMRGRTLDDAFVILDEAQNTTPAQMKMFLTRLGFGSKMVITGDITQIDLPKGVTSGLAVAKKMLLDIEGISIVELDQTDVVRHPLVARIIEAYEKSK

SEQ ID NO: 8053 - protein, 398 aa, Bacillus licheniformis
VKNKWLSFFSGKIQLKITGKGIERLLNECTRRNIPMFNVKKKKDAVFLYIPLSDVHAFRKVIRGFDCKCRFIKRKGFPFLVQKSKRNSGFTFGVAAFFIIMFLLSNMLWKIDITGANPETEHQIRQQLDQIGVKKGRFQFSMLTPEKIQQALTKRVENITWVGIELNGTALHMKVVEKNEPDKEKYIGPRHIVAKKGATISKMFVEKGEPLVTVNQHVEKGQMLVSGLIGSEEEKQKVGAKGKIYGETWYKSTVTVPLETSFDVFTGKVRTSHKLSLGSFSVPIWGFSFKKEDFSRPKTETEKHSLHFMNFKLPVAYEKEHMRESEQIKRVYSKKEAVLEGIEMGKRDIRKKIGSDGNIISEKVLHETSENGKVKLIILYQVIEDIVQTTPIVQETKE

SEQ ID NO: 8054 - protein, 93 aa, Bacillus licheniformis
MAQRKNRIKAWLTRTLEIPPDVMMDLPRITMIGRLHIYIENHRGLLLFSDTEVRLMLKQGQCIIQGKDFVIKTILPEEILLEGTIELVRYIDS

SEQ ID NO: 8055 - protein, 149 aa, Bacillus licheniformis
LLDILFDNPIIMAAIIAAISFIFNKLGKNDENEEAKRKPAPEQQRTQTPKPKQTAQHRPAKNKNQRPAATAANSADMEAELRRIKEDAERSMPAVERTIKKQSSRVINRKQELLDMNKKTIVQGIVLSEVFGPPRSRKPHYTMRRRPKI

SEQ ID NO: 8056 - protein, 330 aa, Bacillus licheniformis
MDPSTLFLLLMIAAGIILLAVFFTFVPVMLWISALAAGVKISIFTLIGMRLRRVIPNRVVNPLIKAHKAGLDVAINQLESHYLAGGNVDRVVNALIAAQRANIELTFARCAAIDLAGRDVLEAVQMSVNPKVIETPFIAGVAMDGIEVKAKARITVRANIDRLVGGAGEETIIARVGEGIVSTIGSSDNHKKVLENPDMISQTVLSKGLDSGTAFEILSIDIADVDIGKNIGAILQTDQAEADKNIAQAKAEERRAMAVAQEQEMRARVEEMRAKVVEAEAEVPLAMSEALRSGKIGVMDYLNMKNIDADTDMRDSFGKMTKDQNEEDHK

SEQ ID NO: 8057 - protein, 439 aa, Bacillus licheniformis
LLLKKFRIFVALACGFVLFLLLGVHLTVKADGDTVYVIPIEETVEKGLSKFLERSFQEAEDMNAKHIILDINTPGGAVDAVLDMADTIHNSDIPVTAYVNRRALSAGAYLALNADDIYMAPGGKMGAAAIIDTQGNAADKKSESLWLAEMEDAAKKNGRDPKYALAMADADVDAKEVGAPKGELLTLSPDKALKVGYSEGTVSSLDDLLKKLNLKDAKIERAEVSFAEKVARFITHPVVIPILLSIGSLGLIVELYSPGFGIPGFMGLTALLLFFYGHLVAGLAGMETILLFAAGIILIILEIFLPGGIAGIAGLIAIVASLFLASGSFKVMAVSILIATAVSIAASILLTRVLGKRMKFFKKLILTDSTSTESGYVSNESRRDLIGKIGVTYTPLRPSGTVIIDDERLDVVSEGSFTAKDKKVKVVKVEGSRIVVREL

SEQ ID NO: 8058 - protein, 148 aa, Bacillus licheniformis
MSLLERLNQDMKLYMKNREKDKLTVIRMVKASLQNEAIKLKKDRLTDDEELTVLSRELKQRKDSLHEFSNANRSDLVDKVQKELDILEAYMPEQLTEEELLDIVNETIAEVGASSKADMGKVMSAVMPKVKGKADGGLVNKLVSKQLS

SEQ ID NO: 8059 - protein, 57 aa, Bacillus licheniformis
MSKTVVRKNESLEDALRRFKRSVSKTGTLQEARKREFYEKPSVRRKKKSEAARKRKY

SEQ ID NO: 8060 - protein, 311 aa, Bacillus licheniformis
MMILILFVLLIVLFLKGMSMLRKGLISLTFEKIEKRLLFFTDHPVKAFLVSIIFTGILQSSSAFMVIVIGFVSVGALSFKRSIPLILGTNIGSTFTTEFLAVKLEFLIFALLAAGAALFIAGKSPFRQVGVSMIGLGVIFFCISGFSRLAVPLSQLDSGAYIVQLAEDSSLYALFIGTVLTAMIHSSSACVGILMSFIDQGVVGLTEAMSVVLGSNIGTCITAVMASFKGGAAARQTAYAHVLFNVIGVAAVYPLLSSITGFISGLSESPAQQIAHFSLLFNVVTSLLFLPLSNLFHSLIMFLIPNKNQAR

SEQ ID NO: 8061 - protein, 223 aa, Bacillus licheniformis
MTKQIARMIDHTALKPDTVKSEIEALCKEARVYGFASVCVNPCWVKLCAELLKESEVKVCTVIGFPLGAASPETKAFETRQAIADGAGEVDMVINIGALKDRDTGTVEHDIRAVTDAADGKALVKVIIETSLLTDEEKRLACEPAVKAGADFVKTSTGFSGGGATVRDIKLMREAVGPDIGVKASGGVRDKESALAMIEAGATRIGASAGVSIVKGLTADEDY

SEQ ID NO: 8062 - protein, 451 aa, Bacillus licheniformis
MATVAFHTLGCKVNHYETEAIWQLFKEAGYERKEFESSADVYVINTCTVTNTGDKKSRQVIRRAIRQNPDAVICVTGCYAQTSPAEIMAIPGVDIVVGTQDREKMLGYIKQYQEERQPINGVSNIMKARVFEELDVPAFTDRTRASLKIQEGCNNFCTFCIIPWARGLLRSRDPEEVIRQAQQLVDAGYKEIVLTGIHTGGYGEDMKDYNFAQLLKELDSRVKGLKRIRISSIEASQITDEVIEVLDRSDKIVRHLHIPLQSGSNSVLKRMRRKYTMEFFADRLTKLKKALPGLAVTSDVIVGFPGETEEEFMETYNFIKEHKFSELHVFPYSKRTGTPAARMDGQVDENVKNERVHKLIALSDQLAKEYASDYEGDVLEIIPEEPFTETGEDNLLVGYTDNYMKVVFEGSEDLIGQLVKVKILKAGYPYNKGQFVRVAEDDVRENIRLSS

SEQ ID NO: 8063 - protein, 255 aa, Bacillus licheniformis
MQRYFIEQSKQEVTAAPAFSIKGEDVHHIATVMRMSPGDEVICCAKDGHEAKCRIESVTKEEVLLSVIEWTGETRELPVQIHIANGLPKGDKLEWIIQKGTELGASSFIPFQASRSVVKLDEKKAKKKRERWAKIAKEAAEQSHRNAIPDVAPVHTFQRLLESLEDFDKCVVAYEESSKQGETSRFQSVLKSLSEGSSVLMVFGPEGGFTEEEIEALKEKGALACGLGPRILRAETAPLYALAAVSYHTELLRGE

SEQ ID NO: 8064 - protein, 311 aa, Bacillus licheniformis
MKWSEICIHTTHEAVEPISNILHEAGASGVVIEDPLDLIKERENVYGEIYQLDPNDYPDEGVIIKAYLPINSFLGETVEGIKETINNLLLYDIDLGRNKITISEVNEEEWATAWKKYYHPVKISEKFTIVPTWEEYTPVHTDELIIEMDPGMAFGTGTHPTTVLCIQALERYVKEGDSVVDVGTGTGILSIASAMLRAKQVEGYDLDPVAVESARLNSKLNKVSDHIEIKQNNLLDGVEGEKDIIVANILAEVILRFTDQAYSLLKDGGYFITSGIIQQKKQEVKDALVKEGFTIVEVLSMEDWVSIIAKK

SEQ ID NO: 8065 - protein, 369 aa, Bacillus licheniformis
MSKRDYYEVLGVGKSASKDEIKKAYRKLSKKYHPDINKEAGAAEKFKEVKEAYETLSDDQKRAHYDQFGHTDPNQGFGGDFGGFGFDDIFSSIFGGGARRRDPNAPRQGADLQYTMTLSFEEAAFGKETTIEIPREETCETCSGSGAKPGTKPETCSHCGGSGQLNMEQSTPFGKVVNRRVCHYCNGTGKQIKHKCSTCGGTGKVKKRKKINVTIPAGVDDGQQLRVAGQGEPGINGGPSGDLFVVFRVQEHEFFERDGDDIYCEMPLTFAQAALGDEIEVPTLHGKVKLKVPAGTQTGTKFRLKGKGVANVRGYGQGDQHIVVRVVTPTNLTENQKNILREFAEVSGNMPDEQEMSFFDKVKRAFKGD

SEQ ID NO: 8066 - protein, 612 aa, Bacillus licheniformis
MSKVIGIDLGTTNSCVAVLEGGEPKVIPNPEGARTTPSVVAFKNGERQVGEVAKRQSITNPNTIMSIKRHMGTDYTVEIEGKKYTPQEVSAIILQHLKSYAESYLGETVSKAVITVPAYFNDAERQATKDAGKIAGLEVERIINEPTAAALAYGLDKTEEDQTILVYDLGGGTFDVSILELGDGVFEVRSTAGDNRLGGDDFDQVIIDHLVSEFKKENAIDLSKDKMALQRLKDAAEKAKKDLSGVSSTQISLPFITAGEAGPLHLELTLTRAKFEELSSHLVERTMGPVRQALQDAGLSASEIDKVILVGGSTRIPAVQEAIKKETGKEAHKGVNPDEVVALGAAIQGGVITGDVKDVVLLDVTPLSLGIETMGGVFTKLIERNTTIPTSKSQVFSTAADNQTAVDIHVLQGERPMAADNKTLGRFQLTDIPPAPRGVPQIEVSFDIDKNGIVNVSAKDLGTGKEQNITIKSSSGLSDDEIERMVKEAEENAEADAKKKKEIELRNEADQLVFTTEKTLKDLEGKADEAQVKKANEAKDALKAAIEKNDLDEIKAKKDELQAIVQELSMKLYEEAAKQAQAQQDGGAGAKKADDNVVDAEYEEVNDDKDQK

SEQ ID NO: 8067 - protein, 194 aa, Bacillus licheniformis
MAEEKQNEELNEQEELNETEAETAEAEQTAAEADAPAEETQTEMLEKQLKELQERLEEKENKLLRVQADFENYKRRARLDLEAAEKYRSQRIISDLLPALDNFERALQIDPDNEQTKSLLQGMEMVHRQILEALKNEGVEQIPSVGEQFDPNMHQAVMQVEDEAYESNAVVEELQKGYKLKDRVIRPSMVKVNQ

SEQ ID NO: 8068 - protein, 343 aa, Bacillus licheniformis
MLTNRQLLILQVIVNDFIRSAQPVGSRTLSKKEDITFSSATIRNEMADLEELGFIEKTHSSSGRIPSEKGYRYYVDHLLSPGKLSKTDLNIIHSIFKEKIFELEKAVQKSAQVLSDLTNYTSIVLGPRLSENHLKQIQIVPIQPKKAVAILVTNTGHVENKTINFPAEVDLSDLEKLVNILNERLRGVPISELKDRIFKEVVIFLKSHIQNYDTILHALGATLDSSVQTDRLFFGGKINMLNQPEFHDIDRVKSLLSLIEKEQEILRLFQSTESGITIKIGKENDYEEMENCSLITATYTVGSKQIGSIAVIGPTRMDYSRVVGLLQHVSSDLSKALTSLYDG

SEQ ID NO: 8069 - protein, 379 aa, Bacillus licheniformis
MKAAYIHIPFCEHICHYCDFNKFFIQSQPVDEYLRSLEKEMANSMEATGHPELKTIFIGGGTPTSLSAAQLERLLDSIHRVLKPSESLAEFAVEANPDDLSAEKLDVLKAAGVDRLSFGVQTFEDELLKKIGRVHEQKDVLVSFERARKAGFDNISLDLMFGLPGQTIGHLASSLDTALALGAEHYSVYSLIVEPKTVFYNLMKKGRLHLPPQDQEAEMYELVMRKMEEAGIGQYEISNYAKKGYESKHNLTYWNNEDYFGFGAGAHGYINGERTVNAGPVKHYIDLIEQSGFPYKEKHMVTKNEQIEEEMFLGLRKTEGVNKERFFEKYGRSVDDLFPKVLHSLEETGLIVNMNKNVFLTHNGKLLGNEVFQAFLGEL

SEQ ID NO: 8070 - protein, 612 aa, Bacillus licheniformis
VTDKEKRLQRQSRIRNFSIIAHIDHGKSTLADRILEKTAAITQREMKEQLLDSMDLERERGITIKLNSVQLKYQAKDGEEYIFHLIDTPGHVDFTYEVSRSLAACEGAILVVDAAQGIEAQTLANVYLALDNDLEILPVINKIDLPSAEPERVRQEVEDVIGLDASEAVLASAKAGIGIEEILEQIVEKVPAPSGDPEAPLQALIFDSLYDAYRGVVAYIRVVQGTVKAGQKIKMMATGKEFEVTEVGVFTPKAVPADELTVGDVGFLTAAIKNVGDTRVGDTITSAENPAPEALPGYRKLNPMVYCGLYPIDTAKYNDLREALEKLELNDSALQYEAETSQALGFGFRCGFLGMLHMEIIQERIEREFNIDLITTAPSVIYDVYMTDGEKIVVDNPSNMPDPQKIDRVEEPFVKATMMVPNDFVGAVMELCQGKRGQFIDMQYLDANRVSIVYEIPLAEIVYEFFDQLKSNTKGYASFDYELIGYKPSKLVKMDIMLNGEKIDALSFIVHRDYAYERGKVIVEKLKELIPRQQFEVPVQAAIGTKIVARSTIKAMRKNVLAKCYGGDISRKRKLLEKQKEGKRRMKQVGSVEVPQEAFMAVLKMDDSGPKS

SEQ ID NO: 8071 - protein, 107 aa, Bacillus licheniformis
VASFMGKCILACAVMFFGVLLGMQQANNGMIEMKGYEDPDLKAALSISEGDAKEASVLGHQIDLEEKQKELEQLEAFNLFSSAGRALADSVTNTARSLYDWIKEKTE

SEQ ID NO: 8072 - protein, 401 aa, Bacillus licheniformis
MRKRGRNRQFVLAVNGRSAVKTVFLFIVSLLLVFILSGVLTSLRPELRPSSSLYRVADELKGETFGLILGMENHYFASELPEPNKRFELSPLVLKLATSINLKDPRSFLGRELPGFSHFDSEILIAGQGTDYTNMPSESPPPTEVLKEEREANLAELEGKQKKKTDGEKPPEQSTGGRKVVFIYNTHNTESYLPFLKGEADPDRAIHSKANVTLVSDMLANAMKSQGVGAMVDKTDFQANLRKKGWAYARSYDESRPVVKEAMAQNKDLQYFIDIHRDSQRKKATTATVKGKSYARVAFVLGKKSSNFESNLKLAKELHERMEKKYPGLSRGVISKGAAGDNGIYNQDLNERSVLIEFGGVDNNREELERAAEAMADVFSEMYWNAEKVDADSGEDDKKKQ

SEQ ID NO: 8073 - protein, 368 aa, Bacillus licheniformis
MEKKKLDLSKYAVRTDLAVEARDLAEEKEASPKKELKGFTVKEYEKDGIKIQTMDIDEEGAKLSGKKAGRYLTFETQGIRQQDSVLQEKVVDVFAKEFSSFLDYLGIPRDASCLIVGLGNWNVTPDSLGPLVTENLLVTRHLFQLQPENVEEGYRPVSALSPGVMGLTGIETSDIIQGVIDRSKPDFVIAIDALASRGIERVNSTIQISDSGIHPGSGVGNKRKELSKDTLGIPVIAIGVPTVVDAVTITSDTIDYMLKHFGREMRDDSPSRSLVPAGMSFGKRKVLTEEDLPDEEHRKSFLGIVGGLAEDEKRQLIHEVLAPLGHNLMVTPKEVDTFIDDMANVIANGLNTALHENVSQDNKGMYNH

SEQ ID NO: 8074 - protein, 88 aa, Bacillus licheniformis
LPNIKSAIKRTKTNNERRAHNATIKSAMRTAMKQVETFVSNNEADKAKAALSAAAKKIDKAAKKGLVHKNTAARYKSNLAKKVNGLSA

SEQ ID NO: 8075 - protein, 347 aa, Bacillus licheniformis
MTVFDVWKSLKKGDIHPVYCLYGKETYLLQETVQRIRQAVVDEETKDFNFSIFDLEEDALDLAVEDAETFPFMGERRLVVAKNPAFLTAEKKKDKLEHNLGVLEAYITQPAPYSVFVLLAPYEKLDERKKLTKLLKKHAHMVEAKELTAKETADFIAGLAKSEGKQIEPEAAEELVLLCHASLSAIAQEVKKLSTYTGDRGEITIEDVRKLVARGLEQNIFELINKVVNRKRTEALQIFYDLLKQNEEPIKMMALIANQFRLLMQTKYFSDQGYGQKQIASNLKVHPFRVKLAIEQARLFSEQELRNIIEQLAVMDYEMKTGKKDKQLLLELFLLKLLQPHEKNGLL

SEQ ID NO: 8076 - protein, 43 aa, Bacillus licheniformis
VNEFEKDVQSKRNDLVDSGVGFIVSFGFFATMFIIATVIHLAA

SEQ ID NO: 8077 - protein, 795 aa, Bacillus licheniformis
MDRHRIFPCGAISAAAGIASAHSSLYLFLAVGFFLFFILCFFKKQILLFALCAAVCILYFTSFYVIDHFNTTIYHEGKFHTLASVQDIPVIDGDRLSFTAETDEGEALKAGYTLRSPQEKRALSALQPGSLCVMQGELKEPKKETVPGTFNQKESMYQKGIHWIFAVQSITSCKPGGGLMPSLLKIRKAGLDFIEENMADSAAGIGRALIFGDRFLIEQDVLDGYQRLGIIHLLAISGLHVGLLSAALFYIFIRFGVTRECAKWLLVIGLPVAAVLTGGAPSVMRAVFMSEIYLLASLSKKNFKSADVISIACLGLLLYHPYLLFQAGFQLSFAVSFVFILSKEILTRPKSRISQLLLGSFLAQLASLPILLFHFQEFSFLSTLMNLFFIPLYIFIIMPLSFGSLLALICFHPLGEAAAAVLDRLLVWSHQAVKTVSAADVSVFSAAKPPDLLLFFYFTAIFLFLLLLEKEMSLRAVMIPSGLLAAVFVIHACLPQLAGEGEVTMLDIGQGDSMYVSAPGQNGTVFIDTGGTVSFRKERWRKRKKDFSLGESVLMPFLATKGVKKLDALILTHADQDHIGEAHVLIQKHKVKQLIVPKGFAAEPSDEKLLRLALKEGVEVNVAKRGDILHIGNLEFYVLSPKEADKNSKNNGSLVLWMKAGGFSWLLTGDLEKEGEKEMMEVYPNLKADILKVGHHGSKGSTGEELIKQIEPKTALISAGEHNRYGHPHGEVLDILNRHDVKVFRTDRHGSIQHLFRGGNGTFLLHPPYDKVHSPQEKMTAEKQQSSKSRLPDGE

SEQ ID NO: 8078 - protein, 189 aa, Bacillus licheniformis
VERISWDQYFMAQSHLLALRSTCTRLAVGATIVRDKRIIAGGYNGSIAGGVHCADEGCYMVDGHCIRTIHAEMNAILQCAKFGVPTEGAEIYVTHFPCIQCCKSIIQAGIKTIYYAKDYKNHPYAVELFDQASVKVEQVELDEMIIDLKNQEKLAFVADLIKQLADKGLEEEEIRKIHEEANKLFTSYV

SEQ ID NO: 8079 - protein, 209 aa, Bacillus licheniformis
LTDWLKQYKWHAAGGVALVLIISAAFMLLSGKRETSSGLSIPEEASAQTYDKKEEVKREKSAGKEAVIIDLKGAVKNPGVYQMKEGDRVHDVLKKAGGTEKKADQKQINLAAVLQDGMVVYIPFEGEEAADSFSKAGSRADGASVDIVNINTASSEELQAIPGIGPSKAEAVIEYREENGPFHTVEDITNVSGIGEKSFERIKSAITVK

SEQ ID NO: 8080 - protein, 273 aa, Bacillus licheniformis
LNIGFIGTGNMGTILIEALIESRAVIPSSLTITNRTIDKALNIKKRFPDIQVAERPEEVITESDAVFICVKPLDIYPLLKRLSPVFTRDQTVVTITSPVQVEQLETIVSCQAARVIPSITNRALSGVSLLTFGESCTAEAKEKLTALVSKISIPLEIESGITRVASDIVSCGPAFVSYLVQEFIQAAVEETSVSKEDAILMTKEMLVGLGRLLETGLYTLPALQEKVCVKGGVTGEGIKALESGVQDMFRQMFRNTHLKYEEDIALVKKQFSV

SEQ ID NO: 8081 - protein, 251 aa, Bacillus licheniformis
MIYKGFSSIYDKLMSHAPYDQWVSWIEQTIGAQQKERIRVLDLACGTGEISVRLAEKGYDVTGIDISEDMLAQAQYKAAVRQLDIQFFQQDMRELAGHGQEFDAVAICCDSLNYLKSEKDVFNTFKNVFSLLKEGGLLLFDVHSVYKMDVIFPGSTYADQDEEVSVIWQSYAGEEPHSAVHDLTFFVQNRDVYERFDESHEQRTFQTEKYISLLRQAGFEVQCISADFSKLEPSAESERHFYTAKKTKTIV

SEQ ID NO: 8082 - protein, 118 aa, Bacillus licheniformis
MDQASILKIAAEACDDKRAEDIIALNMQGISLVADYFLICHGNSDKQVQAIAREIKDQAEENGIDVKKMEGFDEARWVLIDLGDVVVHVFHKEERGYYNLEKLWGDAPIEDLSFGVNE

SEQ ID NO: 8083 - protein, 187 aa, Bacillus licheniformis
MKREEALACVKEQLTEQRYIHTVGVMETAVKLAERFGADLKKAEIAAIFHDYAKFRPKEEMKQIILDGGGPLEVLNFHHELWHAPAGAALVKTEVGITDEDILSAIRFHTSGRPNMTLLEKVVYVADYIEPGRRFPGVEEVRTLAEEDLDSALIQALKNTITFLISKNQAVYPETVATYNALVNDRH

SEQ ID NO: 8084 - protein, 189 aa, Bacillus licheniformis
MRKIGIFGGTFDPPHNGHLLMANEVLYKLDLDEIWFMPNQIPPHKQKNSFSLSMHRVEMLKLAISGKEQFKLETIELEREGPSYTFDTVRLLKDRYPDHEFYFIIGADMVEYLPKWSNIDKLVNMIQFVGVKRPGFQIETPYPLVFVDVPIFEVSSSLLRDRIKNRQPTDYLIPDEVKVYVKENRLYET

SEQ ID NO: 8085 - protein, 96 aa, Bacillus licheniformis
MLTGKQKRYLRREAHHLSPIFQVGKGGVNENMVKQISEALEARELIKVSVLQNCEQPKEEVAEALAGGARAELVQTIGNIIVLYKESKENKKIELP

SEQ ID NO: 8086 - protein, 278 aa, Bacillus licheniformis
MKPIYGLIGNPVAHSMSPDIHNAALKDLSLEGHYHAFRVENEDLEDAVKGMRALGIQGFNVTVPHKVSIMKHLDRIDESAEALGAVNTVRREKEGLVGYNTDGAGFLKSLKPSLDRPLSELSILLIGAGGAARAIFTTLAAETPKRLDVANRTPEKALAFTQRFDGEARALSLQEAEADLSAYDIVIQTTSVGMHPNVEAAPLSLANAKETCLVCDIIYNPLKTALLHEAEAKGLKTLDGVGMFIGQAALAFELWTGHEPNMEKMKSIVLQQLGGKSC

SEQ ID NO: 8087 - protein, 366 aa, Bacillus licheniformis
MEKVVCIGCGVAIQTEDKNKLGYAPEASLLKEDVICQRCFRLKNYNEIQDVSLTDDDFLKILHGIGETDSLIVKIVDIFDFNGSWINGLNRFVGGNPILLIGNKADILPKSVKRERLVNWMKREAKELGLRPVDVLLVSAGRGQGMKDAIDAIEHYRQGKDVYVVGCTNVGKSTFINRIIKEVSGEDDIITTSQYPGTTLDAIEIPLDDGSAMYDTPGIINHHQMAHYVAKRDLKILTPKKELKPRTFQLNEEQTLFFGGLSRFDYASGGRSSFVCYMPNELKIHRTKLENADQLYEKHAGEMLAPPAKEDLDSFPALVKHTFTIKEPKTDVVFSGLGWVTVQGANQKIVAHAPKGVHVFLRRSLI

SEQ ID NO: 8088 - protein, 172 aa, Bacillus licheniformis
VLKKFFLPDEFVKNIFHITPEKLKERNVKGIITDLDNTLVEWDRPSATPRLIEWFEEMKEHGIKVTIVSNNNEKRVKIFSEPLNIPFIYKAKKPMGRAFRKAVKNMGLKKEDVVVIGDQLMTDVLGGNRNGFHTILVVPVAASDGFFTRFNRQVERRILSALKRKGHIQWEE

SEQ ID NO: 8089 - protein, 46 aa, Bacillus licheniformis
MKKLSDELLIESYIKANEMNLNREFIELIETEIKRRSLGHLLSVSS

SEQ ID NO: 8090 - protein, 51 aa, Bacillus licheniformis
MGYPFPAGPCSYPAYPGYAGAAYGYAFVVVLLVVLLVIGGFYWLSPRGFFK

SEQ ID NO: 8091 - protein, 243 aa, Bacillus licheniformis
MKKSLVMVLVFLLLLSGCGEDDPRKVVAFGDSNTRGSNWQFRDYPKAEKWVNLLQTSLQGQYKINNAGIGGETTEDARFRFRKDVLDKQPAYLFIMFGTNDAAILTKGLPRVSKKRFKENLYYFVKESRRRGIEPVLMTCLPIVEGSGDNIFYYARYRASSFEKYGGARKWHDSYNDVTRETARELDVPLIDNWKNIVKKAGGATDEKLIHSRFIDPSGNHLTPKGARIIFEGINKSKIIKTS

SEQ ID NO: 8092 - protein, 253 aa, Bacillus licheniformis
MIELKSSEKRKAKALLAEESPTFAHAIAEGIIEGNVYVDDFLTPATALFRTSSGIYYVAGNPPDSGRSEWLHYLNEQRSGARFTVFSASEEWDAFLIGGLGDPLQQMERVSFFLGKEERDCGAAFAGVERFTEDDLQKSANFTEKYADEYWGGASRFLKNGFGFKVLHGGVVASECVTIFCSERFAEVDIATHPDYRGRGFAVSCASAFIAHAIKNRLKPRWDCDRQNRASIRLAEKLGFRPVKTYSLFVGKP

SEQ ID NO: 8093 - protein, 123 aa, Bacillus licheniformis
MSKKIHEFNDMIRKLRKELFGKGPERIRTVFVDNMAVSTLYGNLTASEQFIASTPEGREMVHAARTTLIQKHYSNHVPEGMEELIGAKLEHLFTDIKIQEDIAVSVFIFDRNIEGVAESAGGA

SEQ ID NO: 8094 - protein, 979 aa, Bacillus licheniformis
MDGKPISVRIDGKEFEAVAGATVLDILNKNGFEHPQICHVPETDPIQTCDTCIVEADGKLKRACSLRAEDGMTISLSAERVKAAQKEAMDRLLENHLLYCTVCDNNNGNCKLHNTAEMMGIEDQKYPYTPKEDPSCAVDMSHPFYRYDPNQCIACGQCVEVCQNLQVNETLSIDWELERPRVIWDEGVSINESSCVSCGQCVTVCPCNALMEKSMLGKAGFMTGIKPDVMEPMIDLVKDVEPGYSSIFAVSEVEAAMRSQRTKKTKTVCTFCGVGCSFEVWTKGRDILKIQPVSEAPVNAISTCVKGKFGWDFVNSEERLTKPLIRKNNEFVESTWEEALDYVARRLGSIREQNGKDAVGFISSSKITNEENYLMQKLARQVFGTNNVDNCSRYCQSPATDGLFRTVGMGGDAGTIQDIAKAGLVIIVGANPAEGHPVLATRVKRAHKLHGQKLIVADLRKNEMAERSDLFIRPRQGTDQVWLMAVTKYMIDQGWHDQAFIDENVNFFEEYKQSLETYTLEYAEKITGIHKQTLIQIAEMIRDADGTCILWGMGVTQNTGGSDTSAAISNLLLATGNYRRPGAGAYPLRGHNNVQGACDMGTLPGWLPGYQHITDDKARKKFEQAYGTTIDEEPGLDNIEMLHAVEEGKMKAMYIVGEDMALVDSNANRVHDILSSLEFLVVQDVFLSKTAQYADVVLPASASLEKDGTFTNTERRVQRLYQALPPLGDAKPDWVIIQDIANRLGADWSYSHPGDIFSEMVSLSPLFSKADYDAIEGWNSFLWGSLTGESTPLLYEDGFNFPDRKARFAIADWAEPAEFPEEYDLHINNGRMLEHFHEGNMTNKSAGIQAKVPDVFVEVSPELAKERGICDGSQVRLISPFGAVKLTALVTDRVRANELYLPMNSTDKESAINFLTGPAVDARTNTPAYKQTKVRMEVLGGCAEPPLPKTNPRNKKRHPQNGAEVERKWKRPGYVHLTD

SEQ ID NO: 8095 - protein, 159 aa, Bacillus licheniformis
MAAPITAIRKEEKSEEQIKLEKLEELKALLAEQEAAVSKTMKLLGELNGLGILDAADSMIGAKEDIAKIVLGQLSKEPAKNLMNTAIAAGGALSKAEPEVMGKLVESIVAGTKQGEDFLKSDKKTGVLDLLKAMNDPDINRAVGFGLQFLKGMGKALKE

SEQ ID NO: 8096 - protein, 78 aa, Bacillus licheniformis
VPDGSPYRKRYQPAGPVRQMKNKRLFILSLIVLSVVMIGVQETFPNLLTTGLMTVVIAAAVFNILKESLNKKDETHSK

SEQ ID NO: 8097 - protein, 46 aa, Bacillus licheniformis
MEAIATVALSGENKRLHAEQNAGIFGSPAILPGTDTDIPPPTYIYI

SEQ ID NO: 8098 - protein, 241 aa, Bacillus licheniformis
MTGVFAALGYVIKELVFLVSYVKNNAFPQPLSSSDEKKYLELMAQGDEHARNMLIEHNLRLVAHIVKKFENTGEDAEDLISIGTIGLIKAIESYSAGKGTKLATYAARCIENEILMHLRALKKTKKDVSLHDPIGQDKEGNEISLLDVLKAENEDVIDTIQLNMELEKVKKYIDILDGREKEVIVGRFGLDLKKEKTQREIAKELGISRSYVSRIEKRALMKMFHEFYRAEKEKLKKTKRK

SEQ ID NO: 8099 - protein, 312 aa, Bacillus licheniformis
VITYFLKSFHLIFKTNKLWIFGSLFIRILNGLFPVCELWILTRLVNETASIIIDKKDNVLTLVFLLFIQLIIMISRSSCVHIMNVLDKDMELKLNLKLGNMIIEKSLNSPFFYFDMPEFYNHQFRINNYGHSFLRPISNSMHVLQLCITIVSYIGFLFFIHWGLVVLGILASIPAFIIQYKFGYSNFNLNRLQSGLMREASYINSLFRNKQSIKEIKLFRSGNFLINRWRKLTTSNNKKILKLFFKQNWANIGLDSLTAVLYSMSAVLMVWLLKLGKMNIGSFVSTAQAIQGLQGTVNQTSHLLASLFESNL

SEQ ID NO: 8100 - protein, 175 aa, Bacillus licheniformis
MISLSFLVITVAFLVLQLYRNMLRTKKQQGLLKSDEGLPKGETYPITTLKTIVGQEVTISKKTRGVILIFTSYGCSGCKRVYPFLELLKKEYPKIQFELIMLANKKQAQETISLYNLEDWSVSIIDHEHLHTLGITGFPFSYLISNEGKVIEKGLINYKKDIDFLVSMLQVKKIS

SEQ ID NO: 8101 - protein, 176 aa, Bacillus licheniformis
MELIFFIQCFFSVMFSISFIVKLKNISGFIETVSSIISNLFVAKISAYFFLILEALAAITIAFNTTKLFGEVIILMLLLAFLISNLLVQFKKQKIKCNCFGKLSEEFLGDKVSYYRITVLGLLLGTLIFFRRSQIGIELVPLNTTLNLFLSSIAVMLTYFLINTYIHLMYMRRNKY

SEQ ID NO: 8102 - protein, 33 aa, Bacillus licheniformis
MKKINSIQSHPFSKELSSLYSFLQDYKKSFFFI

SEQ ID NO: 8103 - protein, 385 aa, Bacillus licheniformis
MKRKGKKRYVFLYIQAGILSFVGLFIIIGLMTTFLSIRISADFMNTALKETDSQKVFRYFLASENKYFAANQNPLEDISITKLAFQLMTNVKPDDYRTFLGKEIPGFSEFDTKIEVAGQGTDFTTLPEESSPPMEVLLKEKEISQEMLTEDSKENKDSNPKPSQTTNGRKVVYLYHTHSWESFLPLLKNANTPDDAVSSDERVNVIGVGKKLKQNLESKGIGVEQSTVNATEKLHNRGWNANQSYRYSRSLVKEATATNKDLTYAIDIHRDALRKEKTTINIQGKSYARLVFVIGKANPNYEENLEFAKKLHKELEKKYPGISRGVLAKGRDAGNGLYNQDLSKHSILLEAGGVDNNMQELDNSMEAFAGVFSDYFWKQNDAEKY

SEQ ID NO: 8104 - protein, 37 aa, Bacillus licheniformis
MLKNIELKGMDDLETKKPTFNLVNLHLYQYFFFLLPF

SEQ ID NO: 8105 - protein, 37 aa, Bacillus licheniformis
LERKIVYAAGQRGIKWVSMMLPEHVELLKEYHEGLVR

SEQ ID NO: 8106 - protein, 18 aa, Bacillus licheniformis
YVPHDAIHTYSIDESKPS

SEQ ID NO: 8107 - protein, 102 aa, Bacillus licheniformis
GIEISLIDVLKSENEDVIDTIQLNMELEKVKKYIDILDGREKEVIVGRFGLDLKKEKTQREIAKELGISRSYVSRIEKRALMKMFHEFYRAEKEKRKKAKGK

SEQ ID NO: 8108 - protein, 183 aa, Bacillus licheniformis
LVALGIGMLVTRPMIGKMIDKIGAKSVVMISLVFPLILITDKTSLIWISIVLFIRCTSIGGNLPLASDAYTGLDRKQLPEAGVGINNIENPGSSFGSAVIATVGATVMEGLQPTIANSLKGYHAGFLVSTIVLAIIFVPHIKKPNKQMLTGEVYTLQEHSKLADLFHTGKLHQAEDAPVTQPN

SEQ ID NO: 8109 - protein, 174 aa, Bacillus licheniformis
MILIRKAKVSDANSIAKVHVESWKTTYQGVLPDDTLSKLSVENQAKLWRTSLSDPKNQDIVYVAEETDGKIIGFASGGPNRDHLSKYKGEVSAIYLLLQYQKKGIGSRLMKAIVEELVKKNIKSLLVWVLAGNPSINFYEKLGGRQSTTKQIQFGEDYFKAIAIGWTDINGFLL

SEQ ID NO: 8110 - protein, 116 aa, Bacillus licheniformis
LNEACQHTKKYKGTITNNVSAGTLVGAAISLTGIDKGSCEQSKTNSFDHNFISCSNEELLQELIEITPVEESMEISILIQDPETNVAYYINSGKLIKYKCNLPEFWGRYTSGSSSS

SEQ ID NO: 8111 - protein, 41 aa, Bacillus licheniformis
SENEDVIDTIQLRHRPEKVKKYNDILDVREKEVIAGASALI

SEQ ID NO: 8112 - protein, 410 aa, Bacillus licheniformis
MSPNHHKLFYKDPYLKTFETKILKQQQDKKGDVYIILEETAFYPTGGDQPHDTGTLNGVKVLNVDEIDGEIRHYVERPLPHLNDQVVGVIDWERRFDHMQQHTGQHILSAAFAQLYDLHTVGFHLGNDTVTIDLDVSELTEEMAGKAEKLANEIITENRSIVAKWVEYDDLVNYPIRKLPSVKENIRLVMIDEFDYNGCGGTHPSATGEVGAIKVLNWERQRKKIRLYFVCGNRVITQFDQKQKAIVELTGLLNRPEGELSEAVKRLLENVKKLDKALLESYEKNLQYEANELLAKSAIQNDTVMVIETFSDRSIQELQKLAKMIADREKWALIFFLSENDHRFQLVCGRGEANKMNMRDLMQEALSLIDGKGGGNKMFAQGGGTASFTKEKFMKNVMNIIATQINSEEN

SEQ ID NO: 8113 - protein, 368 aa, Bacillus licheniformis
MNDLQLDTPALLIDKDVMLSNMKDMQNYANEQKVSLRPHTKTHKMPKLAKLQEEMGAVGIAVAKVGEAEVMARNGLKDIFIANEIVGKSKLERIRKLSETIDISFGIDSAYQVREIEEVFEGASKKAQVLVEIEVGEQRSGIIEEDDFRTLLELIKTCQNVELKGIFSHDGHSYKAKSVAHCKELYKESVERTLHFARIAEEMDLKPKVVSIGSTPPFMFKFDIPEGVTEIRPGTYIFMDASQANVIGTYDRCAASVLTTVISKPTKERVITDVGAKGITAQTRSEGLTATKGLGRIKEYEDVYIHGVFDEHAIIYHEEFNKKVSIGDKVRIIPNHICPVCNLHDKAYLVDNGEVVDELNIEARGRLQ

SEQ ID NO: 8114 - protein, 129 aa, Bacillus licheniformis
LKPVHTKYSTRDGGHYVPAMEHNDVLYISGQLSMNPETGKIPAGGIKEEAKQALANMELVLKERGLAKEDVILCRLYTPDVKYWPDINEVYAHFFGNHKPARVVVPSNHLYAGCLVEVEAIAAIKEEAQ

SEQ ID NO: 8115 - protein, 54 aa, Bacillus licheniformis
MENKKIILLSTGGTIASKPDPETGLLEAGAMTGEELSEMCRLPSHIEIEIKSVF

SEQ ID NO: 8116 - protein, 367 aa, Bacillus licheniformis
MEQYQCHSCRTKYNVSEQVWKCQCGGVLDLVKEKVEWSDSKVLKDIPSMWRYIEAMPFDRDSAIWSGITMGEGYTPLIVLDSGEPNTLVKVDYMMPTLSFKDRGAAVLIAKAKELGVKHVIADSSGNAGTSIAAYAKRAEIACDIFLRKGTSPKKIAQAKAHGANVREIEGTREDVAEAAQKAVDIEKKFYASHVFNPYFYEGTKTYAFEIWEQMNGAPDTLIIPVGNGTLLLGVYYGFKELLENKCIDKMPRLVAIQAENCAPLAKAFINNQKAAEPVKSSGTLAEGIAIAKPARSAQILETIRATNGQIITTNEEEILKARTALASKGFYVEPTTAANYAGYLKYSHSSDEKIAIPLCGAGIKSN

SEQ ID NO: 8117 - protein, 124 aa, Bacillus licheniformis
VESIFEAGNLKSNGHYALAVIHQNTVYVSGQFAIDPITQEKKFGTIEEETLQVLSNIEYILKKAGSHKGKILKITLYLHDINLLDRVDNVCQGFFHDYRPARSVVSTTELHYGFQVEIEAIASL

SEQ ID NO: 8118 - protein, 221 aa, Bacillus licheniformis
LTEAKQVLKSYIPFAKTIGEMFGPNCEVVIHDLTTPESSVIFTINNHVTGREVGQSFDHLVKKVLLSNEFKEDYLAGYEIQADDGRTIKSSTTLIRDGQQQVIGAFCINYDMNVMIQMKEMLDAFMPGVEKKNQIQTSNTAEQEASIQNVEEITNQLIEQIVANRKHSMMKRREKIELIRFMDEKGIFLMKGAVDKVAEQLGISKVTVYSYLDEVKKRQSE

SEQ ID NO: 8119 - protein, 38 aa, Bacillus licheniformis
MKQKYIFLYTELIIHYLQFVSFYFVIKQELFRYCSVSF

SEQ ID NO: 8120 - protein, 44 aa, Bacillus licheniformis
LFGIFLVQSLNLLKPVSGIEISLIDALRIGKRRRHRHHPAQHGA

SEQ ID NO: 8121 - protein, 189 aa, Bacillus licheniformis
MRAPIDEPIWYAYPGMVAVVTAQYEGEKNAMASGWHTYIGSSPGMYGISLNKETFTYKLIEKSGVFGVNFLPGRCSELIQALGTHSGRDINKFEAFHIQYEEGLKAEVPILTDAYFAYECKVHSISTLGDQEWIAGEVLQRYQDKELFLKNGMPNLEKLDVPLHIGGSSYRILNSQAEEHQHAFNSEAD

SEQ ID NO: 8122 - protein, 281 aa, Bacillus licheniformis
MKEYFSIGETARLNNISIQTLRYYDKIGIFKPQCTDRDNGYRYYHVKQFFYLDIIKYLKSIKTPLEEIKRIISHTSAPELMQTFLEEQENVIEREMERLERARQLLQRRKDQLHEQLEIRAKKEEGLVYVRHIEGQTILKAATPQVNPHDQSDLYYRKLAEVLEERGDMVDNYYGLIYDLKPYKNSGDIYCNSVYTTIYEGAKIDTDEQNIGIDTIPSGEYVCISFDCSSTNYFSYYQKLYHFIESHGIQTDGKVYQVSFPNSYNSLKEEDFLTEFRVLKK

SEQ ID NO: 8123 - protein, 37 aa, Bacillus licheniformis
LIRRKRKREEAGAADMFQKCDQTEKEKRKHYQSRGRE

SEQ ID NO: 8124 - protein, 98 aa, Bacillus licheniformis
MLLRYFYDKKLAHASYLVGCQKTGEAIVIDPGRNLKPYLQAAKEEGLNITAAAETHIHADFVSGARELALHIKRSCIFPMKETQIGNTNMSMNRNINL

SEQ ID NO: 8125 - protein, 399 aa, Bacillus licheniformis
MARHARYSIVIVGAGTAGISVAARLVRISKKLKGQIAIIDPQTKHYYQPLWTLVGGGAAKKEESERDLASLIPAGVDLIGDAVTEFRPNQNTLLTKQGTIVSYDYLVAAAGLQIDWDGVKGLKDAVGKNGVCSNYSYHTVDSTWENIRNFKGGTAIFTHPDSPVKCGGAPQKIMYLADDYFRKSNVRHQSEIIFASAKSIIFDVTKYANALEKVVLRKDIQTMYKRNLIEIRPDSKEALFEHLETGEQEVFTYDLLHVTPPMKAPSCIKESALADAGGWVDVDPYTLQHKKFANVFGIGDCANLPTSKTGAAVRKQAPVVVRNLMSLIKGSSLDAKYDGYTSCPLVTGYNKLVLAEFDYHKVPQETFPFDQSKERFSMYLLKRRLLPIMYWNGMLKGLM

SEQ ID NO: 8126 - protein, 214 aa, Bacillus licheniformis
VIRVLLVDDHMMIRKGIRVLLEGFSGIEIAGESNNGNKAVLSAGQLKPDVVLMDLSMPNGLDGFTASSEIRKLNPSVKIVILTMHDEEIFVQKAIEAGAHGYVLKNSHYRLLYQAIVEVYRGNLFYKTSVSQDIIDQWLNSEPKKPTSVLTVREKEILRFIVLGYANKEIADKLSISVKTVENHKTNMMQKLDLDSKHELIQYAIKNKYLDLSL

SEQ ID NO: 8127 - protein, 360 aa, Bacillus licheniformis
MCQNPARYTEEGMSNESGYLRQIFDHLQDGIIMMDQERTILVMNPSAEKMTGWKLGDKVPYCSYCCQTRKLEAGEERCYLLAKREIPYFLSSMPTYEGRFVDMEMSTAVISENGDQMEVLLVLKDLTMKKKEEEAKISKLVLQKTLEAQENEHKRLAQELHDGVGQSLYSVSVGIQAIQSLMEQEETFKDYMQDIIDELEKAIQDVKLYSLQLRPHSLDQLGLIPAVKHLVSSLNKTHQDVSITFASSDISNRLLPIFEINLYRIIQEALHNALKYSQATLIEVILYKEDGELVLIIQDDGIGFERGLTEEGLGFKHMKERVDQMDGSLRIHSALQSGTTIKVKVQDKEGKESDQGIAGR

SEQ ID NO: 8128 - protein, 111 aa, Bacillus licheniformis
MKEAAELTSMVSIEKFITDHQLSFIYISRPQCTVCHAVLPQLRALLARFPKIKLGHINADIVEEVAGRFSVFTVPVLLLFIEGTECLREARFIHFEQLEQKLKRVYQLYEE

SEQ ID NO: 8129 - protein, 260 aa, Bacillus licheniformis
VDISFILLIFFIGFIGSFMSGMLGVGGAIINYPLLLYIPALLGFTGFNAHQVSGIVAVQVFIAAFSGVWAYRKDGYLNKELIFIMGLSILLGSLIGGYGSHFFSEDAINMVYGLLAIIAAIIMLIPKTGTEGNQSDHIRFPKILTSIMTFVVGLASGIVGAGGAFLLVPLMLVIIKIPARITIATSLAVTFISSIGTTATKLVIGQVPIMPALVVMAASLIASPLGVFIGKKVNAKVLQGILIFVIFLTTVKIWVDILLY

SEQ ID NO: 8130 - protein, 75 aa, Bacillus licheniformis
MKSDKVIDAKGFACPMPIVKTKKAMDELQSGEVLEVHATDKGAKSDLTAWAKSGGHELLKDTEEDGILKFWLKKG

SEQ ID NO: 8131 - protein, 376 aa, Bacillus licheniformis
VNFTFVSPKEVAEKLLRKESFFILDVRNKEALSDWKIEGSRVEHLNVPYFDLIDGIEKIDGQVPKDQDVLVVCAKQGSSEMVAQHLVDAGFERVLVLKGGMKAWSKFLHPVKIGDLKEGGTIYQFVRMGKGCLSYFIETDGEAIVVDPARSVDAYIDFAKERNVTIKHVVDTHLHADHISGGRLLRKRTGAAYYLPPKDAEEVLFSYEPLVEDENISVGSAGMKAEPIYSPGHTIGSTSLMIDNRYLLTGDILFVESIGRPDLAGKAGDWAEDLRNTLYVKYKQISGDLIVLPAHFSTVSELGDQGQVQAKLSDLYKKNAGLNLDENEFKGAVSENLPPQPNAYQEIRQTNMGKIMPDADRQSEMEMGPNRCAVHG

SEQ ID NO: 8132 - protein, 190 aa, Bacillus licheniformis
MNIKTDRVLDAKGLACPMPVVKTKKAMNELKPGQVIEVHATDKGSLADIRAWAKGSGHQYLGTTEDGDILKHYLRKAGHSEIKKVKTFPYTIQNEELQKKVEAGERLTVVDVREPAEYRFGHIPGAISIPLGELEKRAHELNRDGKIYVVCRTGNRSDLAAKQLADNGFKDVENVVQGMAEWSGPVEKNQ

SEQ ID NO: 8133 - protein, 160 aa, Bacillus licheniformis
MSDQKEKTTIVLFSGDLDKAIAAFIIANGAAAYDHEVTVFHTFWGLNALRKDEPVPVKKGPLEKAFGFMMPRGSKKLGLSKMNFAGIGPKMIKHVMKKHGVLSLPQLIEMAQEQGVKLVACTMTMDLLGLQKEELIDGLDYAGVAAYLGDANEAKVNLFI

SEQ ID NO: 8134 - protein, 42 aa, Bacillus licheniformis
MAVVYDTASIYPWLKEILLFLYPLGYKKLTYIFFSFYIPVRV

SEQ ID NO: 8135 - protein, 86 aa, Bacillus licheniformis
MEYDDQLKNRIKRVEGQVRGILKMMDEGKECKELVSQMSAVRSALDRAIGVVVSSNLEKCVRLQIERGEDTEDLIQEAVNLLVKSR

SEQ ID NO: 8136 - protein, 43 aa, Bacillus licheniformis
MMSFTVQRKRSDEKSRVIFRLFLFHFKKTRNHFMLLDINIEAS

SEQ ID NO: 8137 - protein, 198 aa, Bacillus licheniformis
MENNVFEQIAKRYDTEERIELAKVIVNEVRPELRNSQSKSLIDYGSGTGLISLELSDLVHSILLVDSSKQMLEVAKAKISRKGIANAKTLYSDFTQETPELKADIVLMSLVLLHIPDTNKILQELFGILNDGGKLIIIDFDKNDKIQHPKVHNGFSHEELKKRLSDVGFKSTEMKTFFHGRRIFMNQDASMFISSSIK

SEQ ID NO: 8138 - protein, 135 aa, Bacillus licheniformis
MDLETVMKELEALGTENMKKRYITNGAHEPLFGVATGKMKPLAKKIKKNQPLAEQLYATGNYDAMYFAGIIADPMTMTEADFERWIDAAYFYMLSDYVVAVTLAETDFAQAVADNGSQAVKSLKCRQAGAVTAGF

SEQ ID NO: 8139 - protein, 85 aa, Bacillus licheniformis
MKTNFYGKDHQIPLIGGTFYKPNLQNIYQYEPDLVIGIGGVHDTLRDGSPSSSGLHLDLLICSFHFFFHFFNASAEFWRLFSFMY

SEQ ID NO: 8140 - protein, 106 aa, Bacillus licheniformis
VDDRITEWKGLDSLEPFMANCSSCAHCGIVDSGNRKCLEAGTESAVLLGLSLKKTNALLFFISALLTAGAVSIVGAIGFIGLIGPHIAKLDRWRGCEKKSYHFQIY

SEQ ID NO: 8141 - protein, 280 aa, Bacillus licheniformis
MIKSFLMLGQSNMAGRGFLNEVDPIYNEKIKMLRNGQWQMMTEPINYDRPVSGVGLAASFADAWSKAHPDEEIGLIPCAEGGSSLNDWHPEGILFQHALSEARFALRSSQICGILWHQGESDSYRSLHETYYEKLTLIIETLRNELKLDEVPLIIGGLGDFLGKTGFGQHATEFRQVNEQLLRFANEQQNCYFVAAAGLTANPDGIHLDAASQRKFGYRYFEAFSKKYHILKPISGEEQSLKVNGDYSKTEQIYLHSMDLASGKITYAEFEARMAMVMKP

SEQ ID NO: 8142 - protein, 81 aa, Bacillus licheniformis
MKRAAIIFIRFYQKAISPLFPPTCRFYPTCSNYGLEAIQRFGFIKGSYLLIKRLLKCHPLHPGGFDPVPSKTDQKKEGDSD

SEQ ID NO: 8143 - protein, 80 aa, Bacillus licheniformis
IKPGLPYLDIIRDMRNSLQIPLVSYQVSGEYAQIKAASQNGWIDEKNTVLESMLAMKRAGADLIVTYFAKDIAKFLREES

SEQ ID NO: 8144 - protein, 130 aa, Bacillus licheniformis
MRLMHLGINAFVTGETVTPAFTENDLLIVGTGSGKTESLLHMAEKAKDIGGTVAAVTTSSDSPIAEIADLILQLPGSPKDQTTGSKQTIQPMGSLFEQTLLLIYDAIILRIMEIKGLNTHNMYANHANLE

SEQ ID NO: 8145 - protein, 210 aa, Bacillus licheniformis
VELQLALDLVNIPEAIKVVKEVEEYIDIVEIGTPVVINEGLRAVKEMKDAFPNLKVLADLKIMDAAGYEVMKASEAGADIITILGAAEDMSIKGAVEEAKAQGKKILVDMIGIKDIESRAAELDELGVDYICVHTGYDLQAIGQNSFADLMTIKNVVKNAKTAIAGGIKLDTLPKVVKLKPDLIIVGGGIANQDDKAAAAAKMKQMIQQS

SEQ ID NO: 8146 - protein, 115 aa, Bacillus licheniformis
MSRMENKTFNCEKELTLNIIGGKWKMLILWFLGKEGTKRFGELKALMPGITQRMLVNQLRELEEDHIVHREVYPVVPPKVEYSLTKQGESLMPILEAMYEWGKNYIETNFSKDDK

SEQ ID NO: 8147 - protein, 352 aa, Bacillus licheniformis
MTEQTIAHKQKQLTKQVAAFAQPDTKNSLLQLLNTFIPFFGLWFLAYFSLNVSYLLTLGITVIAAGFLTRIFIIFHDCCHLSFFKQKRLNHILGFLTGVLTLFPYLQWQHSHSIHHATSSNLDKRGTGDIWLLTVNEYKAAPLRTKIAYRLYRNPFIMFILGPIYVFLITNRFNKKGARRKERVNTYLTNLAIAALAAVCCLIFGWQSFLLVQGPIFLISGSIGVWLFYVQHTFEDSYFEADENWSYVQAAVEGSSFYKLPKLLQWLTGNIGYHHVHHLSPKVPNYKLETAHEQHEPLKNVPTITLKTSLQSLAFRLWDEEKKQFVTFRDMKQTSSHPSPDSTKKQKLRKNA

SEQ ID NO: 8148 - protein, 370 aa, Bacillus licheniformis
MFKKHFTFQKLNGISPYIWTIFFILPFYFIMQSSSTLVIVVGIILTLLFFAVYRFAFVSKGWDVYLWAFILIGISTASIMMFSYIYFAFFIAYFIGNIKKRAPFHILYYVHLISAAVAANFSLVLKKEFFLTQIPFVVITLISAILLPFSIRSRKERERLEEKLEYANERIANLVKLEERQRIARDLHDTLGQKLSLIGLKSDLARKLIYKDPDQAARELKSVQQTARTSLNEVRKIVSSMKGIRLKDEIINIKQILEAAGIAFIYEEDKLPENISLLNENILSMCLKEAVTNVVKHSQAKTCRVDIQQLWKEVVITVTDDGTFQGEEKCFSKGHGLLGMRERLEFANGSLHIDTKNGTKLTMSIPNNSK

SEQ ID NO: 8149 - protein, 199 aa, Bacillus licheniformis
MISIFIAEDQQMLLGALGSLLNLEDDMEVVGKGTTGQDAVDFTKKHRPDICIMDIEMPGKTGLEAAEELKDTGCNIIILTTFARPGYFQRAIKAGVKGYLLKDSPSEELASAIRSVMKGKRIYAPELMEDMYSEANPLTDREKEVLELVADGKNTKEIAQELSIKSGTVRNYISMILEKLEVKNRIEAITRSKEKGWFK

SEQ ID NO: 8150 - protein, 349 aa, Bacillus licheniformis
MSRNELFDVTVIGGGPAGLYSAFYSGLRGMKTKIIEYQPMLGGKVHVYPEKMIWDVGGLTPISGAKLIEQLVQQGLTFHPEVLLNEKVESIARNEEGLFELHTAASGVHLSKTVIVAVGGGILNPQKLQIEGAERFEVSNLNYTVKSLQHFKDKTVIVSGGGNSAVDWANELEPVAKKVYLAYRKDALSGHEAQVDQLLNSSVSCFFHTEITKLIASEDHEVIERVELTNAQTGEVMELPVDEVVINHGYERDTSLLENSRLDVTRVDDYYIAGTSNCQSSVPGLYAAGDIVHYEGKLHLIAGAFQDAANAVNSAKRFIDPEAHKSAMVSSHNEVFKERNRELVKKMFV

SEQ ID NO: 8151 - protein, 540 aa, Bacillus licheniformis
MMSGRNSLKIKIIFILMLAFSILLAGCTTSGNSTEKTHENLVTMAWPRDIGEMNPHVYNPSQLFAQSMVYEPLVTYEAGGKLKPHLAESWDISSDGKVYTFHLRKNVTFSDGTKFDAKIVKKNFDSILKHTELHSWLGFISKIAQTEVIDDHTFKLKLTEPYYPTIQELAVVRPVRFLGEAGFPEDGDTSKGVEKPVGTGPWVLEEHKADEYAVFKRNEHYWGEKPKVEKIKVKVIPDAETRVLAFEKGELDLIYGEGVISLDAYKQLQSTGQYETSLSEPVATRQLVMNTKKEQLSDERVRQALQYGFDKEAMVKGITSGLEEKADHILPTDFPYTSDIDVKQINYDTEKAKELLDAAGWKLPNGKTVREKDGKPLEFSLMYDSAESIQKTMAETLQAEWAAIGVKLNLEGVELATQVKRFKANEFDMNFFSNYGAPYDPHTFLNIVASKGFGFNEAISAYPNKDELIKQMAKVPQTTDEKERQELYSSILKSLQDQGAIVPVSYIKKTAIYQKNITDFTFPANRDEHPFTGIRVKQQH

SEQ ID NO: 8152 - protein, 314 aa, Bacillus licheniformis
MGNYILKRIMSIIPVFLLAALLTTGMIHLSPVDPAEAYLAAAHIQPTDEILAQKRHEFGLDQPFFIQYVNSVLKICQLDFGISYVSNQPVWDEVAHRMPATVELALGSLLIAVLVSVPLGFLAGIKRNGAVDHISRFISFFGASIPTFWLGYMLVFFFSVQLDLFPVEGAGTWQHLVLPSMTLALPLIAMYTRLLRANVIENLQEPYVQFARIRGIAKLNIMAKHVLRMAISPMITGLGMNLGKLLTGTIIVEVVFSWPGFGRYFIEAIFNRDIPVIQCYVFLAATFFILSNLIVDLIQMYIDPRISRKEGQHR

SEQ ID NO: 8153 - protein, 277 aa, Bacillus licheniformis
MMISIRRIFKGQKVITVCTTILTILFIIAVFAPWIAPHHPADVHMVYKLQPPSWEFPLGTDHLGRCNLSRLLYGARISLGFAMLIFISSLVIGLIVGTISGYKGGWIDQLLMICCDGVMAFPNLILVLGLVGIFGPGLPQVILALMLVQWVYYARIFRGMVLSLKEENFIAAAKINGSSQWKIIKNHIIPNVLPPLVVIGTLEMGWAIMDISAMSFLGLGVQPPAAEWGAMIHEGKSYIRSNPGLMIYPGVMIMIVVVTFNLLGEALSDQYGVKRRF

SEQ ID NO: 8154 - protein, 272 aa, Bacillus licheniformis
LGTEQSTVLRVRDLHVQVNNQKGHSTLVQDINFDLKRGQVLGLIGESGCGKTVTSMSILQTLDPKTTKVEGSIALRGRELNGLADKEMRKIRGKDIAYIMQNPMNAFTPVFTIGQQMTESIRSHTSFSKKQAKELATEALHHVNLPHPAKLLHSYPFQLSGGMLQRVMIAIASCLKPAILIADEPTTALDVYNQKTVLKYLDGMRSDFGTAILLISHDLGVIAEMADEVAVMQNGRIVENRDVFQLFDEPKHEYTKKLLSARLTLPVDQLAT

SEQ ID NO: 8155 - protein, 272 aa, Bacillus licheniformis
VSLLQVKEVTHHYTARKLFKWKIQSKQVLSNVSFSIEEGACLGMVGPSGAGKSTLGKVMLGLERPQSGQIFFQGHDLYKADQSIRRKIRRDLQAVFQDSYSSVNPRMTAEQILAEPLENYERLTIAEKKRTIIELLERVGLTEKDLTKYPHQFSGGQLQRINIARAVSLKPKLIVLDESVSSLDMVTQTLILGLLKELKDDFGMSYFFITHDLKAAYQLSDTLGVLDHGQLAGLYDKHRFLKSDHPVVQEMKRSILAEHPRFRSIRTRAVRQ

SEQ ID NO: 8156 - protein, 277 aa, Bacillus licheniformis
MNNRFRVGEVARLFKLPASTLRYYDEIGLFRPKYTDPETSYRYYGVEQFQILDTIIFLRKNGFSLKDIQHQLDQRTPETTMEILKKKLEEVRAEIFRLQRNAARIENKISTIEEGIKLAEHPALTFQYFPKRAISYLYFDKPVDLMEEGDDIYLKDKETLSSQSIENNGFFTGDIGTIVDMESLKQEGPVKYIGVFELLHEEDSEDYLNEGLYASYPHIGPYEDIRKSYQLVLSQLKEKEYELAGIPVEISFLDDAVIKESARYVTLIQIPVTKSFD

SEQ ID NO: 8157 - protein, 450 aa, Bacillus licheniformis
MTETHQQLMKLPVNQVFFKYFVPATLGLILMSANILIDGLFVGNGIGTAALAGVKLSYPVISLIMAIALWIGIGGATKYSISIGENRPKKASSIFSLALFLALIISVLLGVFGILNIQTISIWLGANSDTSSFVIEYLSVMFLFGWVITLEQVLSIFVRNDGSPKLSMMALATTSIVNIILNFYTIMILDMGVTGAAISTVLGGFAGLLVLSLHFFNRQAQLRRPAFQWSWKSLMHIFAIGFPCFLAEAGLLVFVTGYNLAMASLAGTEGVAAFSVINYLHGFMFLSFFGIEMALQPMISYYHGAEETEQIKSSMKIGEKTAVILGILLLVIGWGAAPFLVGLFGIESTEIQQLAIDGIRLFFIGYTFLGYNFVYMSYFQSIGRAGSSVVIIILRSFVSLFILLWILPKFIGVTGVWLSLPLSEFFVAVLLFFIARKHVMGKGNPAIGKG

SEQ ID NO: 8158 - protein, 177 aa, Bacillus licheniformis
MSHTRIKFPAGFWAGLRQLGINAPDVLRKARLPLTVMTEPVVTAAQYFAIWQAYSDLVDDVSKGIIKLATGFEPAHYPPAVLAAYHARDYRGALKRMARYKQLCPPESLRITEEDEHCAIELEWLDDKLPGPPLLIGITLAFLLELGRRGTGQPLTAKSVEFAHPMGDMQALEAYFG

SEQ ID NO: 8159 - protein, 264 aa, Bacillus licheniformis
MDMGLKNKTALVTGTTKGIGKAIAIELAKEGVHVLINGRNEEEAERTVNEIKSAFPDTFPQNAAADIVDIRQREALFKKHPQIDILVNNMGIYELMQYEDVDDEVWEKYFRTNVLAANGLSKFYLPKMLKSDFGRIIFIASEEAMMPSGQMPQYCMTKSMLLSLSKSLSKLTIGTEVTVNTIMPGPTLSENVKQITEGMYPDEGMTFSEKEKKFMTTNLPQSEIQRFIKPIEIGRLAAFVCSPYASAFKGSPIRMDGGMVPTIF

SEQ ID NO: 8160 - protein, 596 aa, Bacillus licheniformis
VRMKRLRMRKHLLIAVCTLALLLSSPIVSDASPATKPTTADSPQSSGFFVDHYKNNISANTTAESNPVIGLLSEFNKLWTPGKTWNTGTKLNSRVLDANIQKVVDIAERRTMLEENAAYFDDRRSQSYSIIDGLGKLAGVYRMNAGATTTITSIPADASIRKYNDEGTNSGSTSSELGNVVSLVNTLRGNYSSSNPAKSYFNYPRPFRWKDNSIIVPTLIPVINPDPNKDGGFPSGHTNAAYLSAFAMAYAIPERYQELLTRASELGHNRIVAGMHSPLDVMGGRVMATALSAAILSDPANERLKKTAFDEARRKLLTQTGTAEDRYSDYEKNKKQYTERLTYGFRQMNKTAKPMAVPKGAEVLLETRFPYLDKKQRRSVLATTGLPAGYPVLDDREGWGRLNLFSAADGYGAFTKNVTVTMDSAKGGFHTADRWRNDISGTGKLTKKGTGALKLEGDNTYSGGTRIDQGTLEGGSETAFGRGDVALNGGILKEDAPGKLIIEGDYKQSAKGILELQLSGKKDQLKIKGKARLKGTLRLNFTDNYVPADGSAIITFRKRHGSFSSVETSGLPSKYKVKIIYKSNSIQLKVEQKGRS

SEQ ID NO: 8161 - protein, 275 aa, Bacillus licheniformis
LRGFIKWAGLAILCIGLFACTSNRNAENVHYAKDDRQTLDIYTPQSNEGEKHPVLIYLHGGGWTSGDKSRAASKPAFFTDNGYVFVSVNYRLHPDVQYDEMADDAAKAVKWVMDHADEYQIDPSKINVMGHSAGGHLAGLIAANSTYLNRVGLTPAALNSIVVLDGPLDMKRFIEAIPSYKEVFGTDEKVWTKASPLSYINNSKLPPAYLVTRWEDPAVYKFAETANKAKATEFVYQVNSLSHSDLNKMFGSPDAPAEAQNLTKAVMAFLEKENK

SEQ ID NO: 8162 - protein, 49 aa, Bacillus licheniformis
MMGFAISCDVLSAISAREGMECFHLENRTSDDETFISITRLIKKSYSPI

SEQ ID NO: 8163 - protein, 247 aa, Bacillus licheniformis
MSSKQEESVAILTERELSSAAFKDEAYEFYKRLRASRPVCPVSMGELGEGWLITRYDDAVHILKDARVKKNYENAFTEEELENFSALENEEPLSKHMLNADPPDHGRLRSLVQKAFTPRMVLQLENRIQKIADSLLDQVEPNHSMNLVDDFAFPLPIIVISEMLGIPLEDRQKFRVWSQAVIDFSDTPESLEEYKYKIGEFAEYLEYLVRKKRDEPAQCINSGRKRRNEIKHRRAVCDDYASYRRRT

SEQ ID NO: 8164 - protein, 295 aa, Bacillus licheniformis
MKKLIVFVLIGLFAQLIDGALGMAYGVTSSSLLLAFGIAPAVASASVHLAEVVTTAASGVSHIKFGNVDKQTVKRLVIPGSLGAFLGASFLSNIPGELAKPYISMFLLVLGVYVLIRFLFMFKIGEQKNNISLSRKKAVPLGLIAGFADATGGGGWGPIATPVLLSKKGVSARKVVGTVDTSEFAIAVSATLGFFISLGWEEVNWLWVGALMIGGIIAAPIAAWLVQKVHARLMGVLVGGLIILVNTRTLIHSWIDQTALYPVIYIGIIAVWISAIVYIVVKIRTSDQTAQAFNQ

SEQ ID NO: 8165 - protein, 126 aa, Bacillus licheniformis
MKFSKIGALLLTLACLLLPFSSATAAGAGVWDNIGTYGMTSQTPIIKSSGGKFYFHNNSFYGFTFTLYEVDGAGSTPEIARKNFYVGPKSNSPAIDVSSFTDGANKQAELVLFKGNDTYITVTCYD

SEQ ID NO: 8166 - protein, 72 aa, Bacillus licheniformis
LIPPFSFHYKQNNVKQNINYDYGTEDTKTEVRTFKSYRHFFVPIGIRRELDQKNPPAVNGGLAVYGTFNHNK

SEQ ID NO: 8167 - protein, 264 aa, Bacillus licheniformis
MNLDLRGKRALVTGSTSGIGKAIATSLAKEGASVIINGRRQEKVNQTIDELKGQFPEAVLQAAPYDLGTEKGCQSLLAAFPDVDILVNNLGIFEPAEYFEIPDEDWFRFFEVNIMSGVRLSRRYLQSMIEKKEGRVIFIASEAAVMPSQEMAHYSATKTMQLSISRSLAELAAGTNVTVNTVMPGSTLTEGVETMLKTLYPDENLTVEEAEKRFMKENRPTSIIQRLIRPEEIAHFVTFLSSPLSSPINGAALRADGGLVRSVF

SEQ ID NO: 8168 - protein, 677 aa, Bacillus licheniformis
MKKRMIQMGIIGAMMFPEAFSAAAADPDYYNEDHRPKYHFTPEANWMNDPNGMVYYAGEYHLFYQYHPYGLRWGPMHWGHAVSKDLVKWEHLPVALYPDEKGTIFSGSAVADRHNTTGFQTGTEKPLVAIYTQDRSGEQVQSIAYSNDKGRTWTKYSGNPVIPNPGKRDFRDPKVIWHEQTKKWVMLLAGGDRILIYTSPDLKRWTYASEFGEGEGSHGGVWECPDLFELPVEGRPNETKWVMQVSVGDGAVSGGSGMQYFVGSFDGTTFKNENPPNRVLWTDYGKDFYAAVSWSDIPKSDGRRLWLGWMSNWQYANDVPTSPWRSAMSIPREVKLKAFSEGLRMIQAPVAELQSIRGASQTWKNKIISPRNGNLLKGLSGDAYEINAEFQVNTGAAAEFGFKVRTGENEYTKIGYSKNSASLFVDRSQSGNVSFNPNFNTGKHAAPLEPVAGKVKMRIYVDRSSVEVFGNDGRQVITDIILPDQSSKGLEVYASNGFVKLNSMTVHPLKKVWGASPFQSNLTGWTTVNGVWADTIDGKQGRSEGDSFILSSAKATDFTYEADVAIKDGNGRGAGALVFRADQDVKNGYLANVDAKHDVVKFFKFEDGSASVIAEHRTPIETGRKYHLKTVARGANFYIYLDDQLVISARDSTFADGAFGLNAWDATAVFQHVYAKR

SEQ ID NO: 8169 - protein, 275 aa, Bacillus licheniformis
MGTEKRLTKREIFSMFIRSNFLLGSFNFERVQALGYCYVMIPAIKKLYGPGAKRSEALQRHLEWFNTHPWLTAPIFGVTAAMEEEMANNKKIDAKAINGMKIGLMGPLAGVGDPIFWGTLRPVLAALGASLALSGNIAGPLLFFFLINAVRLSTKYYGLKYGYVKGMEILQDLVGNRIQKLTEGASILGLFVMGALVSKWTTINIPIVVSRIKDDAGKVDVQTVQNILDSIMPGVLPLGLTLLAAWMLRKGVNPLLMIFGIFIIGIVGYWAGFLA

SEQ ID NO: 8170 - protein, 267 aa, Bacillus licheniformis
MSTIQIILLLVIAAITGIGSVLDEGQTHRPLIACTLVGLVLGDLKTGIILGGTLELMALGWMNVGLAMAPDTAIASVISTILVITADQGIGEGIAVAVALAAAGQALTIFVRTITVFLIHRADKYAKDGNFKGIEIMHITAMAFQALRVMIPTLIVALISVSAVQAFLGNIPEVITKGLQIGGGIIVVVGYAMVINMMNIPYLKPFFYIGFLLAAFTDFNLVGFGALGLCLAFLYQQVMQKNHAQGAVAAASDGSMAAYDDDDDLDA

SEQ ID NO: 8171 - protein, 163 aa, Bacillus licheniformis
MKIVLARIDDRFIHGQVLTRWIKIHAADRIIVVSDEVAQDEMRKTLILSVAPSNVKASAVSISKMAKAFHSPRYEDTTAMLLFENPGDIVSLIEAGVPIETVNVGGMRFENNRRQITKSVSVTEKDIKAFEQLQELGVKLELRQLPSDSSEDFMQILRNATKS

SEQ ID NO: 8172 - protein, 145 aa, Bacillus licheniformis
MITVIISGHGNFPIALKESSGMIFGEEESLIAVPFLKGEGIQTLQEKYHQTLKDVPEEHEVLFLVDIFGGTPYNAATPYIAKERRFDMAAGVNLPILLEALSLREHMPLKQLLNQLKKMSRECFQICSEQLEKFSQSNQGREDEL

SEQ ID NO: 8173 - protein, 928 aa, Bacillus licheniformis
MKRIDKIYHQLLDNFRETNINQLLKIQGNSAKEIAGQLQMERSNVSFELNNLVRAKKVIKIKTFPVRYIPVEIVENVLNIKWNSELMEVEELRRLADGQKKPARNISADPLELMIGAKGSLKKAISQAKAAVFYPPHGLHMLLLGPTGSGKSLFANRIYQFAVYSDILKPDSPFITFNCADYYNNPQLLLSQLFGHKKGSFTGAGEDKAGLVEQADGGILFMDEIHRLPPEGQEMLFYFIDSGTYNRLGETEHKRTAKVLFICATTENPSSALLKTFLRRIPMTVHIPSLDERSLGERVELTTFLLGKEAERIKKNLNVHIDVYNALIHSAKFGNVGQLKSNVQLVCAHGFLNNLDKDEVVELTVRDLPDEIKEDWMSSSKNIERSKMISEYVNITTIISPIVEDEATKIDDSFNLYHVIEEKAKILNKEGLTKKQINQYILTDIHLHVRSFFNQKMLQNHSLLKFVVDDVIQMTKELKGVAEHELDCKFDRKFIYFLSMHIAAFLKRGKQIDVLNSQETDEIRETHVKEYEVALIFKDKIQAYFKVTVPEIEVIYLTMLIQSIKSWKENKRTGIVVAAHGNSTASSMVEVATELLGSTPIAAVDMPLTVSPSEIVSCLAEKVKQVDEGEGVLMLVDMGSLAMLESRLEQQTGVKKKTISNVTTSMVLDAVRKVNYLNLNLHAIYDSVTKDFIDLWADKPRVSGKKKAIVSICTTGGGTAKKLEEILTSIVSRTSDEQISILTVPSIKLASRIKEIEKAYEILATVGTKNPKIDAPHVPLEVLIEGEGEKVIQQVIATGDIPMSGGLSGENVVVKELCEDSLKKYLVFLNPYHVIDMLLEWLQTVQDELRMTFSNAVLIKVIMHTAFAFERVIKQNPIAFPEEEEMNDQLENVLHITEKTLKPYEEKLGLAISEDEKMFIASIFAEEL

SEQ ID NO: 8174 - protein, 37 aa, Bacillus licheniformis
MVDFIYSFHMYHPLFSIDQQKAGDFLEDSEFQKRITG

SEQ ID NO: 8175 - protein, 154 aa, Bacillus licheniformis
MRLFICASCLFGLIVPSFETKALTFEELPVKQASKQWEVQIGKAEAGNGMAKPEKGAFHTYAVEIKNIGHDVASAEIFVYRNEPNSSTKFSLWNIPHENPVSLAKSLNHGSSVKHRNLLMAENATELEVDMIWTEKGSEGRLLKETFIFKGDES

SEQ ID NO: 8176 - protein, 86 aa, Bacillus licheniformis
MPQNNNNRYELFFKKRYKVLHILNDFLIGLLFLVGSFCFFSEELKPAGLWMFVIGSFQLLIRPTIRLVHDFHYRKFVESRRSKCRE

SEQ ID NO: 8177 - protein, 216 aa, Bacillus licheniformis
MNFQTIELDTWYRKSYFDHYMKDAKCSFCITANVNVTNLLALLKKKKIKLYPAFIYIVSRVIHSRPEFRTTFDDKGRLGYWEQMHPCYAIFHQDDQTFSALWTEYSDDFSQFYHQYLLDAERFGDKRGLWAKPDIPPNTFSVSSIPWVSFTNFNLNLDNSEHLLPIITNGKYFSEGRETFLPVSLQVHHAVCDGYHAGAFMNELARLAADCKEWLV

SEQ ID NO: 8178 - protein, 45 aa, Bacillus licheniformis
VRDGERHSKNTKKEGSVASASETRYNSFTIQDEVRILPKSVKQSS

SEQ ID NO: 8179 - protein, 186 aa, Bacillus licheniformis
MNSKSRLTPEMWRAITENDSAYDGVFYYAVKTTGIFCRPSCKSRVPQIDNVQIFFNAKDALSEGFRPCKRCNPAGALLPDEELAQRVVQIIEKSYRDTLSLQALADRCHISPFHLQRTFKRIKGVSPAEYILQKRIEKAVDLLAHSERSIAEIASMVGIANAEYFASLFKKKTGQSPTSYRQMKRR

SEQ ID NO: 8180 - protein, 175 aa, Bacillus licheniformis
MDDQIVYWRTLICRGWQIHIGATARGLCFTGGWNQGFEDLAAWAEKRFTQPVFIRDDKGLAEYAEQLQAYLNGKRTHFSFPVDLAGTPFQLAVWKALSEIPYGSTCSYSDIAEHIEKQAAVRAVGAAIGANPLLMVVPCHRVIGKSGQLTGYRGGLDMKKELMMMESGGVTAQFN

SEQ ID NO: 8181 - protein, 282 aa, Bacillus licheniformis
MMTAKNLQDRIKLNNGTAMPWFGLGVFKVEEGPELVQAVKTAIKHGYRSIDTAAIYGNEEGVGQGIREGLKEAGISREDLFVTSKVWNDDLGYDETIAAYEASLEKLGLDYLDLYLIHWPVEGRYKAAWKALETLYEQGRVKAIGVSNFQIHHLEDLLKDAAVKPAINQVEYHPRLTQKELQAFCRAHGIQLQAWSPLMQGQLLSHPLLKDIADKYGKTPAQVILRWDLQNGVVTIPKSTKAERIAQNADIFDFELTTEEMKQIDALNENTRVGPDPDNFDF

SEQ ID NO: 8182 - protein, 411 aa, Bacillus licheniformis
MTSVHDKKRSILALLALAASAFAIGTTEFISVGLLPLIAEDMNISVTTAGLTVSLYALGVTVGAPVLTSVTSSMPRKALLLVIMLIFMIGNGLAACAGSIGVLLTARVISAFSHGVFMSIGSTIAASLVPADKRAGAISIMFTGLTIAMITGVPIGTFLGQQFGWRIAFAAIVAVGALAFIANSLLVPGDLPKGVRTSFKSQLKLVTNGRLLLLFIITALGYGGTFVVFTYLSPLLQHVTGFKQEAVAVILLAYGIAVALGNIIGGKAANKKPLTALFYMFIAQAAVLLILTAAAPYQAAGFIVIMLMGFLAFMNVPGLQSYVVILAERFVPGAVDVASAVNIAAFNAGIAIGSYTGGAITQSIGLIHTPWVGALMVLGAVVLTGWSRALERNDQKQNDQKQNQALKENCA

SEQ ID NO: 8183 - protein, 125 aa, Bacillus licheniformis
MKPKKYNISVEATLEVIGGKWKCVILCHLTHGKKRTSELKRLMPNITQKMLTQQLRELEEDGVINRIVYQQVPPKVEYELSEYGWTLKDILDSLCSWGEKHITKVYGDKFAVLEDSVLNEQLQET

SEQ ID NO: 8184 - protein, 221 aa, Bacillus licheniformis
MGKWFLSGGGDAHQTEQLDRHIARSICPHKPLLYIPIAMDADRYDDGFDWISRLFHPLGIKNIVMWTDVKGKTVHDLDVFSAVYIGGGNTFRLLKQFIESHFTAVLKRYAESGGAIYGGSAGAVILGKNIMTCSYMDRNACGLRDFNGLKLLGDYSVWCHYKAEHDPLIKRFRNAFGTPVIALPEETGIAASTSDIRVIGTKPARMFKEDGAVFVSDQFVL

SEQ ID NO: 8185 - protein, 50 aa, Bacillus licheniformis
LFYKAKNASAHQRSVFLVFADASRLTRRSVRKNTAKPKPSKKEKFAINGS

SEQ ID NO: 8186 - protein, 37 aa, Bacillus licheniformis
LGCGSLLGGVVMFFKDADPKGKKPKMQLAVRLLFSGP

SEQ ID NO: 8187 - protein, 275 aa, Bacillus licheniformis
LGKGLNGRRIAIGASRKTDEMSTLIKKQGGVPLIRSLQGTVFLAEKEVGPDLRAFVETGADWVIFTTGIGTETLVSLAEKLGIGERYLQAIRRAKSASRGYKTIAALKKLGITPVAADEDGTTKGLIDSLQSHDFSGKRVMVQLHGENAPSLLQFLEEKGADAVPLLPYRHVAPDRETVALLCSEIINREVDAVCFTTAVQVRSLFHFAKENGYAEKIVQSFQDSVLAAAVGKVTAEALREEGVERLLAPDLERMGAMIVELARFYETEEGIRTQ

SEQ ID NO: 8188 - protein, 314 aa, Bacillus licheniformis
MHSQFETRAEHLTKHARFFEYTTASDPIGSGIISPVPVKEFGPELYETGETRIIPLDISEELKTDYPASSPSLLAHFIKIRSGDTIHTAPRATSELYYIVSGAGKTETGEDTIHWQKGDFLTLPAGSGSRHTAAEDAAIYYITDSPLLNYLGVKPSESRFQPTLYTAEQSKAKLAEAAAAPDARYRNRISVLLNNEIFDQTLTITHVLWAMFGIVPPGSNQAPHSHKSVALDFVAYAAPGTYTLVGSKIDPATKEIIDPKRIDWVTGKAFITPPGLWHSHHNESDEAAYIIPIQDAGLQTYLRTLDIQFQHYEK

SEQ ID NO: 8189 - protein, 318 aa, Bacillus licheniformis
MTKKQYSYIFTLLLAFAVFLSGCQSGQKQAASEKNEEKTRVVKTINGNVTVPANPKRVVTIGYAGTMLAFGIKPLGETGKYLGSPYIKDQVSGIKDIGGKDGFSVSVEKVLELKPDLIVSMTNDSKEYKKLSKIAPTVVYPFGTFKDARDEMKTFGKLLGKEKEAREWTKTFNQKMKAARAKIKDASVKGETFSLIGAYAKSLYVYGAYGYRGGEAIYTQLGLTPPESVKKDAIDTADGYKAISFEVLPKYAGDYIFVDESYNGKLDQDNPVWASLDAVKKGKVFFLDPDRFWPYDPNAVQAQAEEIADMISKKAKNK

SEQ ID NO: 8190 - protein, 299 aa, Bacillus licheniformis
LELYQIDHFIAVSRHKHFTKAALEQRISQPALSRSIKKLEEELGVPLFIRKTKSIRLTKYGEQFLIKAKQARLALDEGVQQIRESVNPNAGEISVSFLHTLGSRLMPQLIAEFKKKYPNVAFRLYQAANEHLQHMVETGEADICLSSPPLPNEHLEWTVLDTEPLYLVLPADHPLADRKEVAIRSIAHEDFVCFKPGYGLRYVFDQMCRGLSISPKLAFEGEEVSTILGLVSAGLGVAILPKTAEHVHSPVAFCRVSDYRSERTIGLAVLKDHYLSPAARNFKEFVIEYYRRNERSDQP

SEQ ID NO: 8191 - protein, 405 aa, Bacillus licheniformis
MTYIQPHSKDYHKASIALFISGFVTFATLYTTQPLMPLFAEEFGISAAAASLTLSISTGILAFALLTAAALSDGFGRKTIMAISLFATSVLGLLTAFSPNFAALLAMRGLLGFFLAGVPAIAMAYVGEEFDPRGLGKMMGLYISGTSLGGMSGRLLTGLLTDLFSWRAALGIIGALSVLLSYLFWILLPRPQHSAKRKTSVKKASLAYGAVLMNKRLLSIISLGFLLMGSFVTLFNYIGFQLMGPPYRLSQTVIGFIFIVYLAGTLSSVYMGKKADRFGSPLMLKIGIAIIAGGALLTLLPQLPLKIAGIAVFTFGFFGSHSIASSWVGQTAGEQRVQASSLYLLSYYLGSSLAGSFGGFFWTHFKWPGIISFIIGLLLIAYPVIFFAEAKRNKRQDNSQVRNKS

SEQ ID NO: 8192 - protein, 127 aa, Bacillus licheniformis
LLKTIGFYGFLASVCLNLFLRFGLKINGTANDIISTASLVFVLVYVWDDLKKRSAKTLILQGITLIIFVALLVFVIMKGQTFIASLPFFEGWETPAKWVYILLVLFLGSNLFIYINEKITNSKKEAS

SEQ ID NO: 8193 - protein, 1074 aa, Bacillus licheniformis
MNKLDGIPIPKTYGPLGNLPLLDKNRVSQSLWKIADEMGPIFQFKFADAIGVFVSSHELVKEVSEESRFDKNMGKGLLKVREFSGDGLFTSWTEEPNWRKAHNILLPSFSQKAMKGYHPMMQDIAVQLIQKWSRLNQDESIDVPDDMTRLTLDTIGLCGFNYRFNSFYREGQHPFIESMVRGLSEAMRQTKRFPLQDKLMIQTKRRFNSDVESMFSLVDRIIADRKQAESESGNDLLSLMLHAKDPETGEKLDDENIRYQIITFLIAGHETTSGLLSFAIYLLLKHPDKLKKAYEEADRVLTDPVPSYKQVQQLKYIRMILNESIRLWPTAPAFSLYAKEETVIGGKYLIPKGQSVTVLIPKLHRDQSVWGEDAEAFRPERFEQMDSIPAHAYKPFGNGQRACIGMQFALHEATLVLGMILQYFDLEDHANYQLKIKESLTLKPDGFTIRVRPRKKEAMTAMPGAQPEENGRQEERPSAPAAENTHGTPLLVLYGSNLGTAEEIAKELAEEAREQGFHSRTAELDQYAGAIPAEGAVIIVTASYNGNPPDCAKEFVNWLEHDQTDDLRGVKYAVFGCGNRSWASTYQRIPRLIDSVLEKKGAQRLHKLGEGDAGDDFEGQFESWKYDLWPLLRTEFSLAEPEPNQTETDRQALSVEFVNAPAASPLAKAYQVFTAKISANRELQCEKSGRSTRHIEISLPEGAAYQEGDHLGVLPQNSEVLIGRVFQRFGLNGNEQILISGRNQASHLPLERPVHVKDLFQHCVELQEPATRAQIRELAAHTVCPPHQRELEDLLKDDVYKDQVLNKRLTMLDLLEQYPACELPFARFLALLPPLKPRYYSISSSPQLNPRQTSITVSVVSGPALSGRGHYKGVASNYLAGLEPGDAISCFIREPQSGFRLPEDPETPVIMVGPGTGIAPYRGFLQARRIQRDAGVKLGEAHLYFGCRRPNEDFLYRDELEQAEKDGIVHLHTAFSRLEGRPKTYVQDLLREDAALLIHLLNEGGRLYVCGDGSRMAPAVEQALCEAYRIVQGASREESQSWLSALLEEGRYAKDVWDGGVSQHNVKADCIART

SEQ ID NO: 8194 - protein, 191 aa, Bacillus licheniformis
MESESKYQKIIEASLVLFADRGFDAATIPMIADKANVGAGTIYRYFDSKEALVNVLFQDSVKRFKEKIEEGYPEDSAGIKKQFQHIFRCLFEFSQENIHALYFLEIDKTSHYLTEKSREVLNELLDFIYLFFEKGKAAGMIRPLPSHILSAVVFGAFVHIQKLVRAGEFEDPTELMEEIEECSWDAVKHHG

SEQ ID NO: 8195 - protein, 1047 aa, Bacillus licheniformis
MNKRIVKSSIVFFLLAALIFGQLPLPKTMAAEDSVPNNETTLTSASPVEASFQSDDEVHWYKVNPSNQEIANYTHFRVKLKSDAELNISVYSSLENATGHQTFDRYNGYSYENNPALIDFPIAWKGPYYIKVENHHDEENETTSITDISYTISYEGVTLPPSIQEAEEECPAELSVSERETGKGILKQLRTIRDEVLSKTEKGKELSSLYYKAAPFISAKMLFNKSMRDSVYKDLVQLKPLFADVAKNGQVSAYSITNDDQKAISRLYETARASVPEPLKKQLDQVAKDIGIEQLTGSKVSAVLEKAGMATASSSAPENRYIVKLKEGKKPGSFKSKAQSSGVQALEPLGKSKTAFKDMYVVEMKESRSSGFKAAAKQYQAAASKIAKMPEVEFVEQVQQYEALSRDTQYPYQWSLKNNGKNRAANADIQFEQLQKLMKGKKLKDTVIAVVDTGVDHTLADLSGSVKKDEGYNYVGRTADAMDDNGHGTHVSGIIAAAQDNHFSMAGINAYAKILPVKVLDSSGSGDTEQIANGIIYAADHGAKVINLSLGGPYSRVMEYALKYAASKNVTIVAATGNDGVSEISYPASSKYTLSVGATNNLDLVSDYSNYGKGLDMVAPGTDIPSLVPDGNVTYMSGTSMAAPHVAAAAGLLLSQNPSLKPKQIASLLTETTADVAFEEQDNPNPDYDLDIEPAAQIPGYDFVSGWGRLNVFHAASVFELNMKVHPVLNRHTAVTGTAKSGVTVKILRGKQVLGTGTAGKSGAFSVKIPAQKAGQVLHVAASGHQAETSLRTVVEKAPKNPSVKRITNKDTAVTGRTAAGYTIKVKNTSKKVIAQGKADASGAFKVKINKQKEYAVLYVSASADDHRESGDVKMTVADVIPPGAPKVYQVSDKSTVIQGKTEANAQVSAKAKGKTIASGKANGKGEYKLKISRQKAGTVIGVTAKDKAGNVSKATAVTVLDKTPPSAPKVNPVTNKSTAVKGKAEANAAIIVKSGKKTIGTGKADKKGAFFVKIKKQKANTVLAVTAKDKAGNTSKVSKIKVKKAK

SEQ ID NO: 8196 - protein, 23 aa, Bacillus licheniformis
LIELKLDLKYHIFVFLKKSIPLT

SEQ ID NO: 8197 - protein, 201 aa, Bacillus licheniformis
VFEQWLGKQLRSPRGILSKWVASYMENGNHDINEWTINLMDICPHERILEIGTGSGAALYRIAEMLEGGKACGIDASKSMVKQGMRRIRHVKEEGKAELKLGHAEQIPYPDRSFHKVFSVHTIYFWTDFKQALKEIYRVLQVDGTLFLAVHLEGQMKKSKKTKGFSLYSEEQIKQLLEESHFRDITVHMNKNYCCISAVKS

SEQ ID NO: 8198 - protein, 49 aa, Bacillus licheniformis
MGFGYGGGCCGGWGGYPGGYGGGYGYGGGFALVVVLFILLIIIGACYVC

SEQ ID NO: 8199 - protein, 49 aa, Bacillus licheniformis
MQKNGRMPFIGHGYTSMPHSFKHGYGNPYRRQRMEMVRHFGYWPHYWYY

SEQ ID NO: 8200 - protein, 49 aa, Bacillus licheniformis
VTINLFFLTLTIQRRFKSPEEYEREYEIEQMYNEMKDLQLKYLYLNSQR

SEQ ID NO: 8201 - protein, 77 aa, Bacillus licheniformis
MQKKKVKSLMEDYKQFAFTLLSVSAFLYIGSVIPGQGLETGQKMTMMLATCGFLGGAFYCVKRSLKYKRQLDEMEES

SEQ ID NO: 8202 - protein, 380 aa, Bacillus licheniformis
MKPKTKMIHGGITGDEKTGAVSVPIYQVSTYKQPRAGQHTGYEYSRTGNPTRTALESLIADVEGGAAGYAFGSGMAAITAVMMLFKSGDHIVLTDDVYGGTYRVMTKVLNRIGIEATFSDTSSIEDIEKAIKPNTKAIYVETPTNPLLKITDIKKTAETAKKHDLLLIVDNTFYTPYFQNPISLGADIVLHSATKYLGGHSDVVGGLVVAASKELAEEIHFIQNSTGGILGPQDSWLLMRGMKTLGLRMEAHEQNARKIAAFLDDHPAVKKVYYPGLPSHPGHELAKRQSTGFGGMISFDIGKEENVDLVLGRLKWFTIAESLGAVESLISVPARMTHASIPPERRLELGITDGLIRISAGVEDIDDLLEDLQQALAPLS

SEQ ID NO: 8203 - protein, 307 aa, Bacillus licheniformis
MNVIKDITELIGKTPLLQILNFRIPKGVNIYAKLEMMNPGGSIKDRLGEVLIAEAIGSGKLKPGGTVIEATAGNTGIGLALAARKHGIRPVFCVPEHFSMEKQSIMKALGARIVHTPRSAGMKGAIEKALELEKEIPDSYCVLQFKNPVNPLAYYKTIAPEIWNDLGGRIDVFVAGAGSGGTFAGTAKFLKEKNPSIKTVIVEPKGSILNGGEPHGHKTEGIGMEFIPEYMEESHFDEIYTVLDEDAFRLVKEAAEKEGLLIGSSSGAALFAALKEAEKAKAGTNIVTIFPDSSDRYLSKKIYEGGI

SEQ ID NO: 8204 - protein, 231 aa, Bacillus licheniformis
MKIAVIGAMEEEVTILRSKLEQTNREVIANCEFTSGFYEGKEVVLLKSGIGKVNAAMSTTILLDRFKPDVVINTGSAGGFHHSLNVGDIVISTEVRHHDVDVTAFDYEYGQVPNLPAAYKADSALIQAAEDEASELGHIQVVKGTIATGDSFMSDPDRVAFIRGKFEDLYAVEMEAAAVAQVSYQFNTPFVVIRALSDIAGKESEISFDQFLEQAAKHSTDLVLRMIKRIN

SEQ ID NO: 8205 - protein, 213 aa, Bacillus licheniformis
MGREFIPLFENWANSYDDTVVGRDLQYKEVFRDYDGILDDVVSRSGHKVLEFGVGTGNLTAKLLAAGKAVTGVEPSKAMREIAEAKLPENALIVDGDFLDFPDPPFSPDTIVSSYAFHHLTNEEKREAVKRYGKMLGKHGKIVFADTVFKDREAFSVAVKKAKENGFLQLAEDLETEHYPTISEMETIFTSEHFSIAFQKHNDFVWVMEAAKL

SEQ ID NO: 8206 - protein, 67 aa, Bacillus licheniformis
MNFGLDLIKDKIEFFEALSLEELEKKISQQIENNQAILLRVHSVSHHTAVIDGRIHYSAVVHFKAES

SEQ ID NO: 8207 - protein, 228 aa, Bacillus licheniformis
LSETRESRFENRDKRRKANLVLNILIGIVLVLIVVVASSLMMNSPKEQAQQDVSKNDSEQTTEAPASDNKKQTSDEDVKDEDKGKSDSADKEDSDSDSDKDKESASDEDKSTSDDPFEGAEVTEGGSSANVEKTIINPDWEPVGTQQSGQHTATYDSSSQDWKEMLEAISYATGVSKNNMTVIWLGNNGSPQDAKGTIRAKDTGVKYQVAITWVDGKGWKPTKVEQLK

SEQ ID NO: 8208 - protein, 41 aa, Bacillus licheniformis
MLSTRFAFLRLSRFSKRDSLVSLKFIALLFPSCLASYFIIT

SEQ ID NO: 8209 - protein, 584 aa, Bacillus licheniformis
MKWQKRMKWVSIIISAALLFLLIRLAEIQLFFTESFSKRNVNLIQESVKQRTEEVRISDGRGSFLDRNGEHLSVSQKPAIVLFPFLKNQPWPAKEAAEILNMTEDELGSKLDHAKKPVILTKHDGASVSKTALEKINKLKYPGVYGVYIEETEKNRLASHTLGMTNQDPDLLRRKYPDKEGLSISTKIGTFGMERTFDEFLLPEQDTKLLYHVDGLGNPLFGMDVKYTADANPFYPLQVKTTLDKKVQQAMEDVLDDHQLDKGGAVLLDIETNGVVAIASKPDLNMAAQKTRQNYMLTPVYPGSVFKTVIAAAAIENGLDHPSKTFNCNLNLYGEAGEDKGKLSLEDSFAESCNYTFTNLAGQLVEKNSSVIEDTAAKLGLTGRVGWEGKLYHEDEFRQFYHETAGSIWGDEKDKKVKKAVAQTAIGQKNVKLTPLEIVNMMATIARGGEKKQVKIADQIEYKNGTLMTAFKDHELPGEKIDQYTAQKLQKLLRKVVTSEKGTGRRFSDLPYDVAGKSGTAQTGRTTDDKKTLYHKWFAGYFPADKPKYALVVVHMDTPDSKAATNAVFYDIVKKVYEIEKNQT

SEQ ID NO: 8210 - protein, 158 aa, Bacillus licheniformis
MAQEKVFPMTETGKKKLEEELEYLKTVKRKEVVERIKVARSFGDLSENSEYDSAKEEQAFVEGRITTLDNMIRNAKIIEDDGANSDIVSLGKTVTFTELPDGEEESYTIVGSAEADPFEGKISNDSPIAKSLLGKQVGDEVTVQTPGGEMLVKIVKIS

SEQ ID NO: 8211 - protein, 211 aa, Bacillus licheniformis
MGKKPVVIGIAGGSGSGKTSVTRSIYEQFKGHSILMLEQDLYYKDQSHLPFEERLNTNYDHPLAFDNDYLIEHLNELLAYRPIKKPIYDYKLHTRSEEVVHVDPKDVIILEGILVLEDERLRDLMDIKLYVDTDADLRIIRRMLRDIKERGRSIDSVIEQYISVVRPMHNQFVEPTKRYADIIIPEGGQNRVAIDLMVTKIQTILEQNAIL

SEQ ID NO: 8212 - protein, 422 aa, Bacillus licheniformis
MSAVKDKISKIVNGKRVITKKPELLAPAGNLEKLKIAVHYGADAVFIGGREYGLRSNADNFSIEEMAEGVEFAKKYGARIYVTTNIFAHEENIDGLEDYLRDLEGAGVSGIIVADPLIIETCRRVAPKLEVHLSTQQSLSNWKAVQFWKEEGLERVVLARETSALEIREMKEKVDIEIETFIHGAMCIAYSGRCVLSNHMTARDSNRGGCCQSCRWDYDLYQTDGTNALPLYEEGDAPFAMSPKDLKLVESIPQMIEMGIDSLKIEGRMKSIHYIATVVSVYRKVIDAYCADPENFVIKEEWLKELDKCANRDTAPAFFEGTPGYEEQMFGVHGKKTTYDFVGLVLDYDEETKMVTLQQRNFFKSGDEVEFFGPEIENFTCKIDTIWDEKGNVLDAARHPLQIVKFRVDNKIYPSNMMRKGQ

SEQ ID NO: 8213 - protein, 309 aa, Bacillus licheniformis
MKKPELLVTPTSVSDIKPLAEAGADAFIIGEQRYGLRLAGEFSREEVKEAIIQAHEKGAKVYVAVNAIFHNDRVPELNDYLSFLDEAGADAVVFGDPAVLMAARESAPNMKLHWNTETTATNHYSCNYWGRKGAKRAVLARELNMDSIVEIKEKAEVEIEIQVHGMTCMFQSKRSLIGNYFEYQGKVMDIEGKKKEKGMYLHDKERGNKYPIFEDENGTHIMSPNDVCIIDELEDLIDAGIDSFKIDGILKSVEYMTEVTAMYREAIDLCIADREAYEDKKEQWIERIEQLQPANRSIDTGFFFKETVY

SEQ ID NO: 8214 - protein, 220 aa, Bacillus licheniformis
VKIGHEELTGYLEKLLKPRPAEIMKLEAYAEEHGVPIMEPTGIEVLLQLLSFKNPKKILEIGTAIGYSAIRMALALPEAEIFTIERDEDRYREALKNIRSFQLENRIHVFFGDALSESDPVQSMAPYDALFIDAAKGQYQKFFSIYEKMLADDGIIFTDNVLFKGLVASEYNQIESKRIKKLVSKIDHYNHWLMEHPDYHTAILPVGDGLAVSQKRGERI

SEQ ID NO: 8215 - protein, 370 aa, Bacillus licheniformis
MFEDQTKKPFIKRLLKHKIKFWLTVVAVLLILTAGAVSLYVKSALEPVDKNNAKTVNVYIPEGSTVTSIAAKLKKEDLIKNEKVFIAYVKFKNASGFQAGNFQLSQSMDAAGMINKLTTASHVPAFKITVPEGRQLQEIADIIAGQTNYSAKDIMKKLDDREFISRLKQKYPKLITDDVLNKNIKHPLEGYLHPATYPFYDPETKLDAIIEAMIKQTDQLAEKYEKQMKDKKMSVHKALTMASLIEEEATEKADRHKISSVFYNRISKNMPLQTDPTVLYALGEHKNRVMYKDLEADSPYNTYKHTGLPPGPIANAGETSWEAALNPEQTDYVYFLAKKNGEVVFTKTLEEHNKAKAKYITNTQDEEKGE

SEQ ID NO: 8216 - protein, 94 aa, Bacillus licheniformis
MEHGEKNITIVDDKGNEQLCEVLFTFDSDQFNKSYVLYYPIEAQDDEEIEIHASSFVPNEAGEDGELMPIETEEEWDMIEETLNTFLADEDEEE

SEQ ID NO: 8217 - protein, 139 aa, Bacillus licheniformis
MRILGLDLGSKTLGVALSDEMGWTAQGIETIKIDEAGGDYGLNRLAELTKDYVIDKIVLGFPKNMNGTVGPRGEASQKFAEVLEETFQVPVVLWDERLSTMAAERMLISADVSRQKRKKVIDKMAAVMILQGYLDSLNS

SEQ ID NO: 8218 - protein, 88 aa, Bacillus licheniformis
VSSFDKTMKFNFSDDSMETNVNEVLITVHDALQEKGYNPINQIVGYLLSGDPAYIPRHRDARNLIRKIERDEIIEELVKSYLEQHKEA

SEQ ID NO: 8219 - protein, 878 aa, Bacillus licheniformis
MKTLTSAQVRQMFLDFFKEKGHAVEPSASLIPHEDPSLLWINSGVATLKKYFDGRVVPENPRICNAQKSIRTNDIENVGKTARHHTFFEMLGNFSIGDYFKEEAIEWAWEFLTDQKWIGFDPERLSVTVHPEDDEAYELWSKKIGIPEERIIRLEGNFWDIGEGPSGPNTEIFYDRGEDYGNDPSDPELYPGGENERYLEVWNLVFSEFNHNPDGTYTPLPKKNIDTGMGLERMVSVIQDAKTNYDTDLFMPIIKATEAISGEKYGTSAEKDTAFKVVADHIRTAAFAVGDGALPSNEGRGYVIRRLLRRAVRYAKSININRPFMYELVPVVADIMAAFYGEVKEKADFIAKVIKTEEERFHETLHEGLAILSEVIQKEKAKGNRIISGEDVFKLYDTYGFPVELTEEYAEDEGMEVDHEGFEREMDKQRERARQARQDVGSMQVQGGALRDIMTESEFIGYSDIKTETKIAELLQDGELVDLVQEGQKVQFILEKTPFYAESGGQIGDKGWVKSGDAAIRVTDVKKAPNGQHLHEGIVESGAIKKGMSVTAEVTERLRKDIVKNHTATHLLHQALKDVLGTHVNQAGSLVTDSRLRFDFSHFGQVTKEELEQIETKVNEKIWASIPVQIDLKPIAEAKAMGAMALFGEKYGDIVRVVQVGDYSIELCGGCHVRNTAEIGLFKIVSESGIGAGTRRIEAVTGQGAYEEMNAKLELLEQAAEVLKTNVKEVPKRIEALQSDLKDAQRENESLLAKLGNKEAGEILEKVKEIDGIKLLAEKVNAKDMNHLRTMVDDLKAKLGSAVIVLGAVQNEKVNISAGVTKDLIERGFHAGKLVKQVAEACGGGGGGRPDMAQAGGKQPERLAEALASAEEWVKSVL

SEQ ID NO: 8220 - protein, 352 aa, Bacillus licheniformis
MLKKPLQLLMWVSIFMLLLLTVYIFLQLRMIWEPVCVLLKSILIPLAIAVFITYLLLPVVEKIHRAGVPRTLSILLIYFLFFAGLGYAFYKGVPILIKQLTELSEGIPVLAASYENMLDQLHHHTDGWPDGMHDRVDRFVNQTEEFVASWVERTIRSIRFVFDYMLLAAIIPFLVFYMVKDIDTMKKAVWYLTPSSWRARGSEFIRDVDDSLGDYIRGQLFVCLVIGLGASLSFWFFDLPYPLILGLVIGATNVIPYFGPVIGAIPAVMVAAALSTRLVFVVIITILILQFIEGNILGPLVVGKSLHMHPVVIMLGLLAGGELAGIIGMILAVPVMAVIKVMLVHFLAARKA

SEQ ID NO: 8221 - protein, 63 aa, Bacillus licheniformis
MLVCPNCKSKNIGKIGVNQYYCWGCFIELTLSKGKISTHQVEEDGTLSSLDDLFTDDERTINL

SEQ ID NO: 8222 - protein, 159 aa, Bacillus licheniformis
VVDHTLRTCNELEGLNVYDRQSSLPLGVVTDICFSHEGTCLGLIMEEKRRFYNPRSLLPLPAVTEIGRDGVYVDFTEFKPMQVPKQSLSYDQMKQKMVKNGAGDTLGMLEDVYFSSDTGIIVAYELSDGFFADLSGDKKQIHSSGEPLEVGRSTIVLNE

SEQ ID NO: 8223 - protein, 799 aa, Bacillus licheniformis
VMQRHNPDQIEMEEASFVKGTVTAVIYHNETNLYTVLKVKVEETSESFEDKTVSVTGYFPLIHEDDIYTFYGKTASHPKFGLQFQADHFKKEVPTTKEGVIQYLASDLFEGIGKKTAEEIVNKLGEGAINKILSDGAVLYDVPKLSKKKADKLAAALQQHQGLEQIMISLSEFGFGPQLSMKIYQAYEAETLDKIRENPYQLVKDVEGIGFIKADELGGRMGISGKHEERIKAAILYTVEATCLQEGHTYIETRQLIIETQKLLNQSAGDEKVTEMDVADAIISLGEQKELFIEDERCYYPSLYYAEQSFAKRVQKIAGQTEYDDQFPESEFLLALGELEERMKVQYAPSQKEAIQKALMSPMLLLTGGPGTGKTTVIRGIVELYSELHGLSLNPADYKKDETFPFVLAAPTGRAAKRMSESTGLPAVTIHRLLGWNGAEGFTHDEDNPIEGRLLIIDETSMLDIWLANQLFKAIPDRIQVIMVGDEDQLPSVGPGQVLRDLLASNVIPSVRLTDIYRQAEGSSIVELAHEMKQGKLPENLAAPTKDRSFIRCRQQQIKEVVEKVVKNALQKGYSARDIQVLAPMYRGAAGINELNALLQGILNPPKPKGREMKYGDVVYRTGDKVLQLVNQPEHNVFNGDMGEIVSIFYAKENTEKEDMAVVSFDGNEITFAKKDFNQFTHAYCCSIHKSQGSEFPIVILPVVKSYYRMLRRNLLYTAITRSKKFLILCGEEEALEWGVKNKESSERQTSLKRRLQQAAHEEDEELMALQKELPFSVYDANIGMEGITPFDFMEKEAE

SEQ ID NO: 8224 - protein, 216 aa, Bacillus licheniformis
LDYNQIGIDAMQKGDFEKAAEAFTKAIDENSGDPVPYINFANLLSAVGELDRALKFYDRAAALDEKAGAAYYGAGNVYVMKERYQEAKDMFEKAHRTGMENSDLYYMLGTTLVKLEQPKLAMPYLQRAAELNDADVEARFHYAMCLANEGMLDEAITEFSNVTERDPSHADAFYNLGVAYAFKEDRKTALDMLNKALDIQPDHMLSIRAKQLLEEA

SEQ ID NO: 8225 - protein, 372 aa, Bacillus licheniformis
MAKRPEDTRVVVGMSGGVDSSVAALLLKEQGYDVIGIFMKNWDDTDENGFCTATEDYEDVIKVCNQIGIPYYAVNFEKQYWEKVFQYFLDEYKAGRTPNPDVMCNKEIKFKAFLEHALSLGADYLATGHYARVDRTDGRVKMLRGLDENKDQTYFLNQLTEEQLSKVLFPIGQLQKSRVREIAKEAGLATAAKKDSTGICFIGERNFKTFLSQYLPAQPGDMRTMEGEFKGRHDGLMYYTIGQRHGLGIGGSGEPWFVVGKDLEKNILYVDQGFDNPLLFSDKITATNVSFVHKGVFGGEEELACTAKFRYRQADHEVTVRMTGTDEAEVVFKEPVRAVTPGQAVVFYKGEECLGGGTIDDVFKDGQQLWYV

SEQ ID NO: 8226 - protein, 379 aa, Bacillus licheniformis
MERIYLDHAATSPTDPRVVEKMLPYLTENFGNPSSIHSFGRESRKWLDSTRELIAQEIGAHPNEIVFTSGGTEADNMAILGSALAREKQGRHIITTKIEHHAVLHTCNRLEEMGFDVTYLDVDESGRISAEQVKDALRDDTILVTVMYGNNEVGTIQPIDEIGDLLKDHPALFHTDAVQAFGFLPIDVQKSRIDMMSVSGHKLNGPKGTGFLYVNENVKLSQLLFGGEQERKRRAGTENVPGIAGLGEAVLLSGREREEKSDLYRRFKDIITRTLEAEGVSFDVNGSRRHSLPHILNLYFPGVSVESLLVNLDMAGIAVSSGSACTAGSVLPSHVLSAMFGEEDDRLTSSVRISFGFGNTEEQVERAAKELAKVVKRLS

SEQ ID NO: 8227 - protein, 138 aa, Bacillus licheniformis
LKISTKGRYGLTIMIELAKKHGEGPTSLKSIAQTNDLSEHYLEQLVSPLRNAGLVKSIRGAYGGYILGEEPAAITAGDIIRVLEGPISPVEVLENEEPAKRELWIKIRDAVKEVLDSTTLEDLASYTEGEQEAYMFYI

SEQ ID NO: 8228 - protein, 421 aa, Bacillus licheniformis
MKPLAFRMRPTKIEEVLGQDHLVGEGKIIHRMVQAKHLSSMILYGPPGIGKTSIATAIAGSTSIAFRKLNAVINNKKDMEAIAAEAKMSGQVILILDEVHRLDKGKQDFLLPYLENGMIIMIGATTANPYHAINPAIRSRTQIFELHPLDPEQIKTAIKRALEDKHRGLGSYDVAVDDEALDHLARGCGGDVRSALNALELAVLSTKENSEGAIRITLEIAEECLQKKGFVHDKDGDAHYDVISAFQKSIRGSDVNAALHYMARLIEAGDLESLARRLLVIAYEDVGLASPQAGGRTLQAIQTAERIGFPEARIPLANAVIELCLSPKSNSAILAVDEALSDVRSGKIGDVPNHLKDAHYKGAAELGRGVEYKYPHDYENGWVKQQYLPDPLKNKVYYQPKQTGKFELALKQVYDKLMKQK

SEQ ID NO: 8229 - protein, 254 aa, Bacillus licheniformis
LLHQFSRNELAIGKEGLNILKNSTVAVLGVGGVGSFAAEALARSGVGRIVMVDKDDVDITNVNRQLPALLSTVGQPKVDLMKARIADINPECDVIALKMFYTEETYEQFFAYEPDYVIDASDTIHYKIHLMKECLKRGINIISSMGAANKTDPTRFQVADISKTHTDPIAKVIRTRLRKEGITKGIKVVFSDESPIVIREDVRQVVGNDEAKIRKAQMPPSSNAFVPSVAGLIMGGHVIMELLKDIPIKRVKDK

SEQ ID NO: 8230 - protein, 73 aa, Bacillus licheniformis
VFVVHLVLTEHFFTWEFDVSEWSKCLLSLVCSGGLAKFGTEHPPAESGIKTKEYDNGTIGTFLCLKRPFFGHT

SEQ ID NO: 8231 - protein, 592 aa, Bacillus licheniformis
LFGRTYYCGEITEKAIGETVVLKGWVQKRRDLGGLIFIDLRDRTGIVQVVFNPDVSKDALETAESIRSEYVLDITGKVVAREEATVNPNLKTGRIEIQAESVDVLSAAKTPPFAISDQAAEVSEDIRLKHRYLDLRRPEMFNSLKMRHNVTKAVRRFLDDNGFLDIETPVLTKSTPEGARDYLVPSRVHEGEFYALPQSPQIFKQLLMVSGFDRYYQIARCFRDEDLRADRQPEFTQIDIEMSFMSQEDIMKLSEEMMAHVMRETHGIEISLPLPRMSYEDAMNRYGSDKPDTRFGMLLTDVSEAVKDSDFKVFASAVANGGAVKAINVKGAAANYSRKDIDALGEFAANYGAKGLAWLKTEADGLKGPIAKFFAGEKQEALVQALDAADGDLLLFVADKLEVVNDALGALRLKLGKELNLIDESLFNFLWVVDWPLLEYDAEEGRYYAAHHPFTMPVREDLKLIETNPQDMKAQAYDLVLNGYELGGGSIRIFEKDVQEKMFGLLGFSEEEAKEQFGFLLEAFDYGAPPHGGIALGLDRLVMLLSGRTNLRDTIAFPKTASASCLMTEAPSEVDNAQLDELHLEIKRKIRQ

SEQ ID NO: 8232 - protein, 424 aa, Bacillus licheniformis
MGFNIPRGTQDILPGESERWQYVEKIARETCHAYQYKEIRTPIFEHTELFSRGVGESTDIVQKEMYTFADKKGRSLTLRPEGTASAVRSFVENKLFANPVQPTKLYYIGPMFRYERPQTGRYRQFYQFGIEAIGSNDPAIDAEVIALAMSVYRKAGLSNLKLVINSLGDKESRTAHREALIRHFEPRIDEFCSDCQKRLRQNPLRILDCKKDRDHELLKTAPSILDYLNEESKAYFAKVQQYLTDIGIAFEVDPNLVRGLDYYNHTAFEIMSNAEGFGAITTLAGGGRYDGLTEEFGGPKAPGIGFAMSIERLLAALDAENVKVGADEGIDCYIVTLGDKAKDYSVSLLYKLREAGISAEIDYEQKKMKGQFKSADRLNAKYIAVLGEDELNQNQINVKDGKTGDQQAIGLDDFIRFLKTNTES

SEQ ID NO: 8233 - protein, 54 aa, Bacillus licheniformis
MRYNQRMGRAIHEQDANLHLKEHADPERAGFMEETATELGLTSKESIQNKKNRK

SEQ ID NO: 8234 - protein, 523 aa, Bacillus licheniformis
MKKRAVLILSMMLAAQAAFYTSSNTASAAIGEAVIATDEINVRSGPGLSHEIVSVVSRNESYPILEERGDWVQIQLNGGQKGWVVSWLIKKKSQVSSGSDSASGKVTSSEANLRIRKGPGTSYEVQGVFPEGEQADLLKTDGKWIKISYQNITGWVYSDYVNQGSGAKQSQSSSSHASSSKSGTVGVSTLNVRSTASHQGRIIATLQRNASVTILNEQHGWYEIEFNGQKGWAASHYILEGNKQNSGTSETSSSSEAKRQATIVYEGTNVRSGPSTSSAIVKRTGKGESYPIVSTKGDWYEIKLSNGDSAYVASWVVQTVDQAGSAGDSKSAAPPLAKRSSSGGTIKNKTVVIDAGHGGHDSGTIGTRGTLEKRLTIKTATLLAAKLRADGVNVYMTRNDDSFVSLQSRVATSHYRNADAFISIHYDSFPNASVRGNTAYYYSPSKDRKLAADVQSEIERHSPLPSRGVLFGDYFVLRENKQPAALFELGYLSHPQEEAVVSTNAYRERVTDGIRSGLENYFD

SEQ ID NO: 8235 - protein, 147 aa, Bacillus licheniformis
MRLVVQRVTDASVSVGGETVGEIGLGLMVLVGVTHEDTSEDAAYLAEKLVNLRIFEDEGEKMNLSLLDVGGSVLSVSQFTLYGDTKKGRRPNFTKAAKPDQALQLYEEWNSMLRAKGVTVETGRFGEMMDVKLTNSGPVTFIMDSKA

SEQ ID NO: 8236 - protein, 733 aa, Bacillus licheniformis
MANEQVLTAEQVIEKAKSYLSDEHVAFIKKAYQYAEDAHREQYRKSGEPYIIHPIQVAGILVDLEMDPATIAGGFLHDVVEDTSVTLEDLKEAFNEEVAMLVDGVTKLGKIKYKSQEEQQAENHRKMFVAMAQDIRVILIKLADRLHNMRTLKHLPQEKQRRISNETLEIFAPLAHRLGISKIKWELEDTALRYLNPQQYYRIVNLMKKKRAERELYVEEVVNEVKSRVEEVNIKADFSGRPKHIYSIYRKMAMQNKQFNEIYDLLAVRILVNSIKDCYAVLGIIHTCWKPMPGRFKDYIAMPKPNMYQSLHTTVIGPKGDPLEVQIRTFEMHEIAEYGIAAHWAYKEGKNANEDSSFDKKLSWFREILEFQNESSDAEEFMESLKIDLFSDMVFVFTPKGDVIELPSGSVPIDFSYRIHSEIGNKTIGAKVNGKMVTLDYKLRTGDIVEILTSKHSYGPSQDWINLAQTSQAKHKIRQFFKKQRREENVEKGRELVEKEIKNLDFEVKDVLTAENLQKVADKFNFANEEDMYAAVGYNGITAAQVANRLTEKERKIRDQEEQVKSVQDVTPEVKPYQGKKREAGVRVKGVDNLLIRLSKCCNPVPGDPIVGFITKGRGVSVHREDCPNVLTNEALDRLIQVEWEHEPQTQRRKEYNVEIEILGYDRRGLLNEVLQAVNETKTNISSVSGKSDRNKVATIHMAIFIQNINHLHKVVERIKQIKDIYSVRRVMN

SEQ ID NO: 8237 - protein, 44 aa, Bacillus licheniformis
LFVRHGITFFIIENCIVIIIKKNVTDVKRRNSKGLLPAPEYFYE

SEQ ID NO: 8238 - protein, 170 aa, Bacillus licheniformis
MDLKKYVTIVPDYPKEGVQFKDITTLMDKGDVYRYATDQIVTYAKEKEIDLVVGPEARGFIIGCPVAYALGVGFAPVRKEGKLPREVIKVDYGLEYGKDVLTIHKDAIKPGQRVLITDDLLATGGTIEATIKLVEELGGVVAGIAFLIELTYLEGRNKLDGYDILTLMQY

SEQ ID NO: 8239 - protein, 782 aa, Bacillus licheniformis
MLASKMRWDVQTPDKEKVEQLAGRLGITPLAASLLVMRGYDTADKASSFLYGNDARFHDPYLLKDMEKAVRRIKQAISDQEKIMIYGDYDADGVTSTTVLLQMLKKCSAQADFYIPDRFKEGYGPNEAAFRGIKESGYSLIITVDTGIAGVHEAEVAKELGIDLIITDHHEPGPVLPDAYAIIHPKQPGCGYPFKELAGVGVAFKLAHALNGELPEDLLDLCAIGTIADLVPLHDENRQIAKRGMEQFRKTKRPGLKALAKIAGAEIHNADEETIGFQIAPRLNAVGRIEQADPAVYLLNTEDEREAEELAEDINALNKERQKIVNQMTEEAVQMIEEEGLDQPVIVVARPGWNPGVVGIVASKLVERFYRPAIVLGVDEEKGIAKGSARSIKGFDLFQNLSECRDILPHFGGHPMAAGMTLNLEDVSALRERINRQAEAVLTEADFIPVQDVDLCCRLEDISVDSIAEMNLLAPFGTGNPKPFVLVSDVKIDDARKIGANKNHLKLVLADDGNKLDCIGFYKGDIEEGIVPGAKISIVGELSINEWNNRKKPQLMIKDAAVNEWQLFDLRGKRSWEEKILKLDPAKRACICFREETKAKLAGTGLEEELTVISGPEDAERLDLESRYAVFIDIPQSLDIFDHVINGKKLERIYLIFYQSDEHFFSTFPTREYFKWYYAFLLKRGSFDLPKYGGELARHKGWTKDTIDFMTKVFFELGFVTIENGVLSVVYHAEKRDLTDSETYREKQRLIELEQKLIYSSADELKQWLDKRMAEKAGAYKV

SEQ ID NO: 8240 - protein, 97 aa, Bacillus licheniformis
MNKQWTLIAALIFTLIVAVFAVINVEPVKVDFLFGTAEWPLILVILVSVLMGALIIGSAGAFQIMRLKKELKALKKEERAKHPELEAEPAAPENQKD

SEQ ID NO: 8241 - protein, 741 aa, Bacillus licheniformis
MKKGRLIAFFLTVLLIGTGLGMFTKPAADNISLGLDLQGGFEVLYEVQPAKQGDKIDRDALISTVEALNRRANVLGVSEPNIQIEGNNRIRVQLAGVDNQNRAREILSTQAQLTFRDTNDKELLNGADLVENGAKQSFKQDTNEPIVTIKLKDADKFGEVTKKVLDMKPNNQLVIWLDYKKGDSFKKESQKADHKYISAPNVSQVLNTSDVMIEGNFTIQEAKDMASILNAGALPVKLVEKYSTSVGAQFGEQALNDTVFAGIIGIAIIFLFMLLYYRLPGFIAVITLSVYIYITLQIFDWMNAVLTLPGIAALILGVGMAVDANIITYERIKEELKLGKSVRSAFKAGNRRSFATIFDANITTMLAGIVLFIFGTSSVKGFATMLILSILTSFITAVFLSRFLLGLLVESRWLDRKKGWFGVRKKDILDIRKTDENTEPPNPFSKWDFVGKRNWFFAFSGVLLAAGLIVLLVFKLNLGIDFSSGSRIEVQSDHKLTTQQLEKDFEQVGLDPDSIVLSGEKNDHGVARFVGVPNQKKIAEVKDYFKDKYGSEPNVSTVSPTVGKELARNALYAVIIASIGIILYVSIRFEYKMAIAAITSLLYDAFFIIAVFSLTRLEVDVTFIAAVLTIIGYSINDTIVTFDRIREHMKKRKPKTFSDLSHIVNLSLQQTFTRSINTVLTVVIVVIALLIFGAASISNFSVALLVGLLSGVYSSLYIAAQLWLVWKGRELKKPKRKPAEE

SEQ ID NO: 8242 - protein, 98 aa, Bacillus licheniformis
MGKHPADLYKDHLKPFLRSKTEEFRILGYDDIEIEELWSYLLNKKWKNRKDVQIHQLAGDILSVKIGEFMNYATVESFKTSNLLDSKEGQDMLDELLR

SEQ ID NO: 8243 - protein, 517 aa, Bacillus licheniformis
MTKQTFLKGTLILIAAGLITRMLGFINRIVIARFIGGEGVGLYMMAAPTFFLAVTLTQFGLPVAISKLVAEAEARRDHRKTKQILVMSLAITGTLSAIITPVFLIYAPLMADTLLTDKRTLYPLLAVTPVVPIIAVSSVLRGYFQGKQNMRPLAVSQVLEQIVRISLVAVCTTAFLPLGIEYAAAGAMLSSVFGELASLLYLFVSFKYKKKIRIRKRFFQSLKAGRTTFFELMSVSLPTTGSRFIGNLSWFFEPIVVAQSLAIAGVAASAATSQYGELTGFALTLLTLPSFITYSLSTALVPAISEGIEQKKMQVVEYRLEQAMRLCLLSGGISAVILFSYADELVSVMYGSSNAAIYVKIMAPFFLFYYFQGPLQAVLQALNLAGAAMMNSLVGAVVKTGLIFVLASRPSLGIMGAALAILTGIILVTLLHAATVSKVLPISINLKEYIVSFGVILISGWGSLLMKEHLFLAQSEPMRLLLCIAVTSCLYVFLLIAFKLVKKEEIQRFPLFGRWIS

SEQ ID NO: 8244 - protein, 216 aa, Bacillus licheniformis
MDEILALTFRTIVLYFIIFILFRLMGKREIGELSILDLVVFIMMAEIAVLAIENLDDHLLHTIIPILVLTLIQVIFAYLSLKNQKIRRLLDGKPTIIIDRGKIDEHAMRTQRYNYDDLMTQLRDKNVERIGDVSYAILEPTGKLSVFTKDGPNKMIELPLIVDGVVQKEELEKIGKDQEWLEQKLEKRGHRDLSKISYCTYNKGSFFIDIKDEFKP

SEQ ID NO: 8245 - protein, 127 aa, Bacillus licheniformis
MNEPKQVGKGILYSLVVIFALMFAGSLLISLLLTFTSLTESSFSWLITAISFITLFIGGFIAGGKSKEKGWLSGGLTALCFSLTVLLFQYLGFGEAFNLKQLLYHSGFLGVSMLGGVFGVNLQGSRA

SEQ ID NO: 8246 - protein, 56 aa, Bacillus licheniformis
VHKGSKKGADVRSLFPVPAGFFRHSHQKQMQLPKTIRNGAYSARTSPSEQRRRHVV

SEQ ID NO: 8247 - protein, 86 aa, Bacillus licheniformis
MEMLGTLLPIILMFAVLYFLLIRPQQKQQKAVRQMQEELKKGDKVVTIGGLHGIVDSIDESKVVIKTGDNTRLTFDRRAIREASAE

SEQ ID NO: 8248 - protein, 381 aa, Bacillus licheniformis
LSQQPIRYEFIKACKQTGARLGRVHTPHGSFETPVFMPVGTLATVKTMSPEELKEMGAGIILSNTYHLWLRPGHDIVKEAGGLHQFMNWNRAILTDSGGFQVFSLSEFRKIEEEGVHFRNHLNGDKLFLSPEKAMEIQNALGSDIMMAFDECPPYPAEYDYMKKSVERTSRWAERCLKAHNRPDEQGLFGIVQGGEYENLRKQSAKDLISLDFPGYAIGGLSVGEPKDVMNRVLEFTTPLLPADKPRYLMGVGSPDSLIDGAIRGVDMFDCVLPTRIARNGTLMTSEGRLVVKNAKYERDFRPIDEQCDCYTCRNYSRAYIRHLIRCNETFGIRLTSYHNLYFLLKLMGQVRDAIREDRLGDFREEFFERYGFNKPNAKSF

SEQ ID NO: 8249 - protein, 342 aa, Bacillus licheniformis
MKVELFDFDLPERLIAQVPLKERDASRLMVLDKKTGEITHSTFKHVIDFLNAGDCIVLNDTRVLPARLYGVKEETGAKVEVLLLKQEEGDVWETLVKPAKRVKRGTVLSFGDGRLTAVCTEELEHGGRKIEFRYEGIFYEVLESLGEMPLPPYIKEQLDDRERYQTVYSKKQGSAAAPTAGLHFTEEILDALREKGVHIAFITLHVGLGTFRPVSAENVEEHDMHAEFYEMSEETAALLNRVRQEGGRIISVGTTSTRTLETIASEHDGRFREASGWTSIFIYPGYTFRAIDGMITNFHLPKSSLIMLVSALAGREHVLSAYRTAVEHEYRFFSFGDAMLIK

SEQ ID NO: 8250 - protein, 39 aa, Bacillus licheniformis
MTEFPKILMVLGAVIFGIGLFMQVIGRLPGDIFCEKGKT

SEQ ID NO: 8251 - protein, 334 aa, Bacillus licheniformis
MDERLVSSELDNHESAIEQSLRPQRLAQYIGQEKVKDNLKVFIEAAKMREETLDHVLLYGPPGLGKTTLAAIIANEMGVNLRTTSGPAIERPGDLAAILTALEPGDVLFIDEIHRLHRSIEEVLYPAMEDFCLDIVIGKGPSARSVRLDLPPFTLVGATTRVGLLTAPLRDRFGVLSRLEYYTRDELSEIVIRTAELFEVDIDSLSALEIARRSRGTPRIANRLLRRVRDFAQVLGNSSITEEVAVDALERLQVDKLGLDHIDRKLLMGMIEKFGGGPVGIDTISATIGEESHTIEDVYEPYLLQIGFIQRTPRGRIVTPDVYSHFKMEVPNHD

SEQ ID NO: 8252 - protein, 201 aa, Bacillus licheniformis
LIEFVKGTIDYVSPQYIVIENGGIGYQIFTPNPFIYKKNSKETIYTYHYVREDTNALYGFSTREEKMLFTKMLNVTGIGPKGALAILASGDPGAVIEAIENEDEAFLVKFPGVGKKTARQIILDLKGKLADAVPEIAADLFNHEEREQIHEAATALEEALEALRALGYSDREIKKVQPHLKKEEALSTDQYVKKALQKLLK

SEQ ID NO: 8253 - protein, 173 aa, Bacillus licheniformis
MYSRSKFKIGLLLIGSLLAALSFHLEALAEKPAKVQIQLEKVYLDGDVGIENKVEAARTLEDFKAAYKGWQLIDQKKGFILFRKQVDDISPLSKTNGYIGVTEDGVISTFHGRPGILSEPIQSFFQIDIKRLESRMADDLRKGIPYRTKKEFEHVIEAVKSSGSQHHVEDMKT

SEQ ID NO: 8254 - protein, 216 aa, Bacillus licheniformis
VKKAHTYAEAVKYDTKKKFNKLIQKPDDLELIGKGRSAYVFKLTEEGDREMALKVFFPEFKNIAAREAEIYKKLSDSNYYPDIYETGPSYILMEYIKGYTFYECLNKGIRIDDDMICEVDRALNDARRKGLNPSDIHLRNLILTPSGTIKVIDVARFLQTKECRQWDDLKTAYQTLYKKSRFPQRLPKMWMELIAYLYKKSWLQKQWASRKNKFHP

SEQ ID NO: 8255 - protein, 57 aa, Bacillus licheniformis
MLVYEITPLPSRKEKHSLKKKNKRNDDKWDYLYLVDLLEPLFYVLRLAVRGLAKIIN

SEQ ID NO: 8256 - protein, 59 aa, Bacillus licheniformis
VNTQRAQEIVESPDMVDVTYNGRPIYIQRVDEQNETARIFPLGQPENEQEVPLANLKEH

SEQ ID NO: 8257 - protein, 154 aa, Bacillus licheniformis
MERKDRIVQEFMSHRLVTEELIQKIDEKHLDYKPTETSMPAKELVTHMLQSFYTFASAAKEGNGEPFKKKPEETGTSLSELAKTYTEKTKTLLESFTDEELDREVDLTGVFGRKVAGEQLLQLAIGHEIHHKGNLFVYVREMGHTDLPLYVKIH

SEQ ID NO: 8258 - protein, 236 aa, Bacillus licheniformis
MKKKVLIYLVIAAVMINGVYRWSEKTTRESYQIQAGDKYKNFKELQENEKSGYDIDYHEKAGSDCLIFSPHGGRIEGGVSELVRAFNDDYSTYLFEGKKDENNSDLHITSTNFDEPLALQKIKEHRYTIAFHGYSGDRPHTLVGGTDRKLAKAIVKSLKKSDFSAELVKVDGKFAGTAEENINNESQTGMSVQLEISTAQRKEFFEDFSYKEREETKTRTFRKYVKAVRKVLQDRC

SEQ ID NO: 8259 - protein, 59 aa, Bacillus licheniformis
METEYETKGYDLTKVYDYNQYPDVRHGRCDNCDYTLFKSSVKNGQFLRECRRCGMKKSI

SEQ ID NO: 8260 - protein, 108 aa, Bacillus licheniformis
MAEQQGNEKPFTAMGAGAQDQETAQIIERVGSLITGFGESIYELVQKNSGIDLREADFTKSENAELNQAIQNIISEYIQNLNNLNADLSGKIGESIQGIVTSKDQKDA

SEQ ID NO: 8261 - protein, 240 aa, Bacillus licheniformis
MAGHSKWKNIQRRKNAQDAKRGKIFMKLAKEIYVAAKEGGPDPESNASLRLVIDKAKNANMPNDNIDRAIKKASGSQDGKSYEEITYEGYGPSGVAVMVKCLTDNKNRTATSVRTAFSKNGGSLGETGCVSYMFDRKGYIAIEREDLEIDEEEFMLEVIDAGAEELETSEELFEIYTEPEQFEEVKKSLEERGYKLATSEITMVPQTYAEVDEALQEKVEKLIDVLEDDDDVQEVYTNVH

SEQ ID NO: 8262 - protein, 211 aa, Bacillus licheniformis
LDSKLKVFSGILLLTAGLSACGTNDAIDNGNNTRPIGYYSNDADRNAGLDNDGPVTEMLENMNGRNGATNVNNRAGNGNPVPTGDGTYSRGDMNYHNHLVNTADTGYDRPENRKISRNITGRVNKLNYVDESQAVVTNETVIIAVRSDKRLTNNERTQIRKAAKTFAGDRTVQVVEDDGAFTRLREMNDDPQNIRDRGDTTNNNLNRLRNQ

SEQ ID NO: 8263 - protein, 350 aa, Bacillus licheniformis
LKIHIVQKGDSLEKIAERYEVDFEELKKLNSQLSNPDLIMPGMKIKVPSGGVPVKKEEQLNMRKELPKKQQEHPFAKEKPKSKLDVEDIKPKEKPSVPYVPPVPNIGQSSLPEGDISNLYQSVNQLHQPYVPPKPYEHQEKGPNMYNPWTNEEENHMENVNYPNVPQPPNVGAAGDENKQFHGMPNVAAAGYHHHPYPYPFYPGGCWIPVSPVLPGSGLCHPWYPYPAQMPYMHQPSYVSPAEYDDDDNMGHDNAGHHGYHHQPMTAPAYAPYQPFPGFAPPNVGHAGDPNMAHGKEDDCGCGPGQFPGGFPGAAPYGQMPQMGAPYGMGGYGQQPAGGQMFNRPEDDED

SEQ ID NO: 8264 - protein, 369 aa, Bacillus licheniformis
MSILKVIHDRNAGMMPEVYKELTEEEMAGRILKIKKKFGARLFIPGHHYQKDEVIQFADATGDSLQLAQVAQKNKKAEYIVFCGVHFMAETADMLTSDEQIVVLPDMRAGCSMADMANMRQTNRAWEELTKLFGDTVIPLTYVNSTAEIKAFVGRNGGASVTSSNAARMLTWALSQKERILFLPDQHLGRNTAFDLGIPLSRMAVWDPIAEKLEYNGDMKDIIIILWKGHCSVHEKFTVANIKSVKERDPDINVIVHPECTHEVVALSDFSGSTKKIIDSINEAKPGSKWAIGTEMNLVSRIIQEHPDKQIESLNPDMCPCLTMNRIDMPHLLWSLEQIDKGEPTGVIKVDQDIAKDAILALNRMLTIR

SEQ ID NO: 8265 - protein, 279 aa, Bacillus licheniformis
MQRFILRNMLKEFFKEDIGRGDLTSEAVFDDNHQCEAVITAKDDGLFAGELVILEGFRLLDETIAVHMLKTDGEAVRKGETIARLKGRAASLMTGERVVLNLIQRMSGIATLTKQSIIRLNDPNIAICDTRKTTPGLRILEKYAVKTGGGSNHRFGLDGGIMIKDNHIAACGSISKAVEKARSACGHMVKIEVEIESEQELHEAIEAGADIIMFDNCPPETVKAFAEMTPAGIITEASGGISFENLPAYRGTGVHCISLGYLTHSAKSLDISMNVDLKK

SEQ ID NO: 8266 - protein, 524 aa, Bacillus licheniformis
MSHQTIIVVGAGAAALSFAASIPPSYEVVVMTKASVKDSNSTLAQGGIASAVLPRDSWSLHADDTLYAGCGHNQIEAVHDAIKDGQRLVDELILQHFPFDTDESGKLSLGKEGAHSVNRILHAGGDATGQELIRHLIGRLGPHVVLKEYETAADLWIEDGRCCGVWTKDSRGKTFLRKADFVVLAAGGCGNLFQINTNNRSVTSDAISLAYRAGAELADLEFVQFHPTLLVKDGRAHGLVSEAVRGEGAVLIDENGQRVMEGIHSLLDLAPRDVVSRAIHQKLACGSSVFLDISRISDFKSRFPTISSLCEKAGISIEEGRIPVSPGMHFLMGGVSVNKWGETAVPNLFVIGEAACTGFHGANRLASNSLLECIVFGRRAAERIQACQKPEPVRGQSPQPENVTYSVPLTDVKDIQKQMTDYAAIVRTEDELTKVKEWLERMPVQIVNVKEITIEQLELAHLWQTAKQMTASALLRTESRGGHYRSDCPAPDDKNWHGKQIVHTKGGIKIRQNEGIVKYAAVHT

SEQ ID NO: 8267 - protein, 392 aa, Bacillus licheniformis
VIYLDYAATTPASKEALDAFQKLSTDVYGNSSSLHDAGGKAENILRCCRQRMAELLSGEEEGVYFTSGGTEANFLAIHSILNGLPAGKKRFLMTEMEHQSIHILKRHLEMLGFDVDLMKPNASGIITTDILERHLRPDTGLVSIQHANSETGVIQPLAKLSAYLHKRDVLLHSDCVQTFAKIPVRIDELGADALSVSSHKVYGPKGVGAVYIRPGVNWKPVYPGTLHENGFKSGTVNVPGIGAFITAADSTINRMDAAHLKFQELRAGFLEGVKDRKLPVSLAVPDSANSHVLPHIIGCFFHSFEGQYTMLECNRRGICISTGSACSAGYHEPSNTMKALLIPRELALQFVRISFGCDTTSEHVDRLLDVLEDMMNEKGDHRIDRRIKTYGS

SEQ ID NO: 8268 - protein, 180 aa, Bacillus licheniformis
LTDGLKLTGAERRQQLLAWLKESEAPLTGSELAKRASVSRQVIVQDISLLKAKNEPIIATSQGYMYLRSALGKKQPVQRIIACDHEPEKTEEELNLIVDFGVTVKDVTIEHPVYGDLTASIRVSTRKEVADFVKKISSTNAAYLSQLTNGIHLHTLEADDEEKIEQACGALQKAGILIPE

SEQ ID NO: 8269 - protein, 285 aa, Bacillus licheniformis
MSMRVGYLGPEATFTHLAVCSCFSDADQQAFNTIPACMDAAMNGEIDLAVVPLENAIEGSVNLTIDYLIHEQPLYIVGEITAPIRQHLLVHPTRKEAWEDIQKVYSHSHAIAQCHKFLHSRFRSIPFEYATSTGAAAKYVSENPEENIGVIANEMAADTYGLDIVKRDVHDYEYNHTRFVMLHPDREASPPVNPQLKGRPKTTLLVTLPSDRSGALHQVLSAFAWRNLNLSKIESRPTKTGLGNYFFIIDIEMALDDVLIPGAIAELEALGCKVKMLGAYNAYTL

SEQ ID NO: 8270 - protein, 147 aa, Bacillus licheniformis
VKEETFYLVREDVLPEAMRKTLEVKKLIERKKAESVAEAVQKVDLSRSAFYKYRDAVFPFYTMVKEQIITLFFHLEDRSGTLSHLLQVVAESGCNVLSIHQTIPLQGRANVTLSVSTRGMDENIDLLMNKLRKLEFVEKVEILGSGA

SEQ ID NO: 8271 - protein, 428 aa, Bacillus licheniformis
MFVDQVKIYVKGGDGGNGMVAFRREKYVPKGGPAGGDGGKGGDVVFKVDEGLSTLMDFRYQRHFKAARGEHGMSKNQHGRNAEDMVVKVPPGTVVIDDDTKQVIADLTEHGQEAVIAKGGRGGRGNTRFATPANPAPQLSENGEPGKERYIVLELKVLADVGLVGFPSVGKSTLLSVVSSAKPKIADYHFTTLNPNLGMVETEDGRSFVMADLPGLIEGAHEGVGLGHQFLRHIERTRVIVHVIDMSGLEGRDPYEDYVTINKELEQYNLRLTERPQIIVANKMDMPDAEENLKAFKEKLTDDYPVFPISAVTRQGLRDLLFEIADRLETTPEFPLYDEEDMAENRVMYKLEDEEAPFEISRDPDGTFVLSGAKLERLFKMTDFSRDESVKRFARQLRGMGVDDALRARGAKDGDTIRLLEFEFEFID

SEQ ID NO: 8272 - protein, 192 aa, Bacillus licheniformis
MEETSKKREKNMDDKALTHELIHLLSHSRHDWMNKLQLIKGNLTLKKYDRVFEIIDEVVIEAQHESKLSNLRIPRAAYELLTFNWMAHSLTLEYEVIGQVKDLSAYEERLVVLIRKLFGIFDDAVLKGSDNHLTITLQTDGPDDRLVIFLDFHGVFTKLTGIKDFHHSLADFYEIKRFDVTDRECIAEIHIK

SEQ ID NO: 8273 - protein, 93 aa, Bacillus licheniformis
MLRLDLQFFASKKGVGSTKNGRDSEAKRLGAKRADGQFVSGGSILYRQRGTKIYPGENVGRGGDDTLYAKVDGTVKFERFGRNRKKVSVYPVA

SEQ ID NO: 8274 - protein, 113 aa, Bacillus licheniformis
MIHAKITRSRSNKDILGFEMSGHANFAEHGQDLVCAGASAVAFGAVNAVMKLTGIEPVIDLGEDGGFLSFRFPDGTDREAFEKAQLLLEGMIVSLDTIERDYKGYLKVTTNKI

SEQ ID NO: 8275 - protein, 102 aa, Bacillus licheniformis
MYAIIQTGGKQIKVEEGQTVYVEKLAAEAGETVTFDNVLFVGGENVKVGSPTVEGATVTGKVEKQGRAKKITVFKYKPKKNQHKKQGHRQPYTKVVIEKINA

SEQ ID NO: 8276 - protein, 288 aa, Bacillus licheniformis
LSKWTELFTKLHIHPLLWLVMAIGIMTGHIKALFCLMIIILIHELGHAAAAVYFSWRIKGIFLLPFGGTLEVDEHGNRPLKEELAVIAAGPVQHIWLQFAAWLLAVNSLISPHIFETFTFYNLTILLINLFPIWPLDGGKLLFLLFSKHLPYQKAQRMMLAVSCFCCAVLIAATLLVSPSQLSAWVLLVFLAASLYQEYRNRHYAHIRFLLERYYGNEREVRRLAPITVCAEQQIYEVMLMFKRGCKHPIIIEKDGQKLSQLDENEVLHAYFTDKRTTSSMEDLLLVY

SEQ ID NO: 8277 - protein, 263 aa, Bacillus licheniformis
MSHRADEIRKRMARKRKRKTPDKQPFSSDGKKRPLKPPAWTAFSEDEKGGDFPPPEGSSLLINGKHPLVKADALILKCLLSACLVLVSAIAYKGQFEPANQIKPVISQVFTEEFQFAALQNWYESKFGDPLAFFQPKGAKPSGQVEVNQDLAVPAVGKVQEKFSGQGIKVETEDETIRSMKEGYVIEVDKNPETGLTVVLQHADNSYTYYGQLKKADVALYDYIDKGTKLGTIEQDKNQKGIYYFAIKQGEEFVDPIQVITFE

SEQ ID NO: 8278 - protein, 142 aa, Bacillus licheniformis
MSNQLVPDIHKQAVFHASIEKVWEAVATSEGIAAWFMPNDFRPEIGCEFTLQSPFGPSPCKVIELDAPHRLAFSWDTSGWIVTFELKELSAEKTEFTLIHSGWGAPEETVSKAGEKQADVRNRMNGGWETIVNQKLRQAVEG

SEQ ID NO: 8279 - protein, 106 aa, Bacillus licheniformis
VTSAAKHDVFQAVSDPSRRKMLELLAGKELPVTDISSHFPMSRTAVSKHLRVLSEAGLVSGRKAGREKLYRLHPEPLAELQQWLAYFDMYWDNKLSLLKHKVENDQ

SEQ ID NO: 8280 - protein, 268 aa, Bacillus licheniformis
LGEAIVITSGKGGVGKTTTSANLGTALAILGKRVCLVDTDIGLRNLDVVMGLENRIIYDLVDVVEERCKIHQALVKDKRFDDLLYLLPAAQTSDKSAVLPEQMVKLIQQLKQDFDYIVIDCPAGIEQGYKNAVSGADKAIVVTTPEISAVRDADRIIGLLEKEENIEPPRLVVNRIRNHLMKNGDTLDVDEVIQHLSIELIGIVADDDEVIKASNNGEPVVMDPNNKASIAYRNIARRVLGESVPLQSFEEENKGVFAKIKSFFGVRA

SEQ ID NO: 8281 - protein, 226 aa, Bacillus licheniformis
VKTQKQQYVTIKGTKNGLTLHLDDTCSFEELLYGLQDMLSLEHYMDGKGQKINVLVKLGHRYVTEEQEQILTDVITEKQNLFIHSIESEVMTKDEANRLKAESEIISVAKIVRSGQVLETEGDLLLIGDVNPGGMVKAGGNIFILGSLRGIAHAGFNGNKRAVIAASDMRPTQLRINHVLNRSPDNIQEGNDMECAYLDENENMVIDRLQQLAHLRPSLTRLEGGM

SEQ ID NO: 8282 - protein, 172 aa, Bacillus licheniformis
VKRFLLPVVMMFVLVSDSVYADFVNLPFVTEEQQLIPRFLLLVLVFMTAYVNQPFAITYGFIFGLLYDINYTDLLGVYMFGFAGICYLSSKAFKVLQTNALVVIFISLLAVCVLEFYQYGVQMLIRPEIMPFHQFVLGRLLPTLALNAVGGLLLIYPFKWFFTSLKKELRNE

SEQ ID NO: 8283 - protein, 302 aa, Bacillus licheniformis
MPQFFTNKRLMLLLLCIIILVAMIGFSLKNDRNATWPEKFIGDTTGVFQTIFHTPAQFFAGFFENIEDLKNTYSENERLRKKLDGQTQYEAKLQELENENKSLRKELGHLKSIKDYTPILATVIARNPDKYEWWNLITINKGSKHGVEKDMAVTDENGNLIGKIKSTKVNNFTSTVQLLSATDRNNRISTVIAADKGKKTVNGIINGYDSDKKALSMEIIEPDEDREVKKGDLVETSGAGGVFPKGLTIGKVTEVEPDSYGLTKIAYVEPAADMYNLDNVIVVDRTLDTVDVDKMDDEEEGS

SEQ ID NO: 8284 - protein, 336 aa, Bacillus licheniformis
MFGIGARDLGIDLGTANTLVFVKGKGIVVREPSVVALQTDTKQIVAVGNDAKNMIGRTPGNVVALRPMKDGVIADYETTATMMKHYISKAVKNKGLFARKPYVMVCVPSGITAVEQRAVIDATRQAGARDAYPIEEPFAAAIGANLPVWEPTGSMVVDIGGGTTEVAIISLGGIVTSQSIRVAGDEMDEAIITYIRKTYNLMIGDRTAEAIKLEIGSAEASENGESMEIRGRDLLTGLPKTIEITEKEITAALRDTVTAIVDAVKNTLEKTPPELAADIMDRGIVLTGGGALLRHLDKVISEETKMPVLIAEDPLDCVAIGTGKALEQIHLFKGKN

SEQ ID NO: 8285 - protein, 224 aa, Bacillus licheniformis
LKLKDFPDEERPRERLLNTGAESLSNHELLAILLRTGTKKESVLQLSSRLLQTFDGLRLLKEASAEELSSISGIGRAKAVQILAALELGRRIHSLACKDRYVIRFPEDAANFLMGDMRFLSQEHFVCVYLNTKNQVIHKRTVFIGSLNSSIVHPREVFKEALKRSAASFICVHNHPSGDPAPSREDIEVTQRLHESGQLLGIELLDHIIIGDQKFVSLKEKGYL

SEQ ID NO: 8286 - protein, 190 aa, Bacillus licheniformis
MTRQLILASQSPRRKELLDLLQIPYSIVTSNAEEKLIRNFSPAENVKWLAEQKVRAVAEQYPDAVVLGADTIVYYDGAYLGKPKDAEDAERMLSMLSGQTHSVLTGVCIKDGERCETFFEETEVSFWPLEEKEISAYIATGEPFDKAGSYGIQGKGALFVKQIKGDYYTVVGLPISKTMRMLKTFDLHSF

SEQ ID NO: 8287 - protein, 343 aa, Bacillus licheniformis
MKKRKSKKNSAKKAPEQDPLKVMINGREETIYGNEKEFSNRNEEKKFTFSNWEEKRKAEREISASKEDGTHETGEFTWTPPDEEETVYKDDPKVVAPYQKKNEPKNNRKTKTSLTYPVKRFAATIVFAVLLGTGLGQFALNLATHKEGVPASGSLGADAENGQTVKAGDSGAEEKKSGEKNSGQAGESFNSFAVQAGKFSSKEGADTLASQIADKGYAAVSIAKDDGFYVIAGITGEKQMTSELGKILIENDFEAWGGKELPVAIESGLLEPFKEAAELSAKAILGAEVTSQNIADVKAQLDGAQSKGSEEVKKSILEAVNLLEKPTAANGWKSQQLLLGQIK

SEQ ID NO: 8288 - protein, 249 aa, Bacillus licheniformis
MFIFYLFTAGLVLGSFFNSAGRRIPEKISLIAPRSLCRVCKRQLGFSELIPVLSYLMQRGRCKGCQTPLSIVYPAVELSAAILFAFAGMHVGHEGELVIVLALISLLLIVFVSDVTHMIIPDAVLCFFLPVFAVGRFLVPLEQWHSSLSGAMAGGMLPLLTLLLTKGGIGWGDVKLFAVIGMALGSRLLVLAFFISAAAGTVLGLIALLAGKLKKNEPMPFAPAILAGTLTSCFYGEPMIEWYLQTAWW

SEQ ID NO: 8289 - protein, 432 aa, Bacillus licheniformis
LFKTFDEALSWINGRLKFGVKPGLERMEWLLRKLGHPEKKLNAVHVAGTNGKGSTIAFLRSVLNEAGYTAGTFTSPYIITFNERISVDGAPISDEEWTALFNEVGPLVLELEKTEFGAATEFEIITACAFLYFAKYRRTDFVIFETGLGGRLDSTNVVKPMLTVITSIGHDHTAILGGTLKEIAAEKAGIIKRGVPVITAVHQHEAAEVIKRKAMETESAFISLHEDCQLYGELSLPEGEQFSLKTPLHHYEGIETSLIGTHQRQNASLAILAAEWLTAEKHAAIGEKELKRGIRNAGWPGRFEKVLNKPLVYIDGAHNKEGMERLAETISSHFAGRNIHVCFSALKDKPYRDMIRKIESFASSIHFTSFDFPRAESAQKLFEQSTADYKTFDEDIASVFRYIEEKAEEEKAVVVITGSLYFISAVRAALTE

SEQ ID NO: 8290 - protein, 63 aa, Bacillus licheniformis
MRKKFNTYSFQPWLKQVRLVAVQVVLPITIFQGIRTIIFPTTFDVLLLGILIFLACAFHLDWI

SEQ ID NO: 8291 - protein, 340 aa, Bacillus licheniformis
MEGIQSVLNEYGLTPEYMESVSSKVWKVYTDHGVFALKKLAASRNTRFTEQMIMLEEKGYRQFVPVYRNRTGEFLTQAGEDVCYLMPWLTLEREEERDQKHEYMFKEIALLHQRTEKELGVRREEILGHYERTKRKWEQQKQKYEAFIMKAENEWYMSPFQLQAAMYFKETISAADFALARLEDWHEAMREKESARMVLNHGHLSVRHFLYNDTGTGYFTNFEKAGHAPPANDLIVFFTRMFKTNPVMCTECVNWFYTYHNVYPLREEEIGLFLSYMAYPGPVFGVLNRYEHEKGLGEKEACTRLLKAYWQMKNAEPLVMSIHETEENRKLQEETESPSS

SEQ ID NO: 8292 - protein, 485 aa, Bacillus licheniformis
LPQNNRLQFSVEESICFQKGQEVSELLSISLDPDITVQEVNDYVSIRGSLELTGEYNIDQTREYAELPATSRFVEDVKLKGDGSAELTHCFPVDITIPKDKVNHLNDVFVFIDAFDYQLTDARMLTIQADLAIEGLLNVSGEAGEEEPRTMPAAVHPEEELEPAYRSPSNDEDQGEEKEYLIQLDRPYEEQDEEQAEEHDTGEETVPIYQSFLGNDTEEAKPFFTASLSAAERTKREIENQKEASLEQPEEEYKLKREKVEEEPEEYELKREKVEEEPEEYELKREKVEEEPEEYKLKREKVEEEPEEYELKREEAEEEPELSHSSYQPHEELKENPFYSVPPLLKEDQNDREPEAFEVEVTQEAEAIDEEEEAGHTIEIPEYSFHEQTEPEEERDEMQAADEQEVSAKENDNALYLTKLFTKQGEEEFTRMRMCIVQQNDTIDLLCERYDINVQQLIRMNSLSLDEELKEGQILYIPDYQNSHA

SEQ ID NO: 8293 - protein, 431 aa, Bacillus licheniformis
MRSYEKSKAAFEEAQRVMPGGVNSPVRAFKSVNMDPIFMERGKGSKIYDIDGNEYIDYVLSWGPLILGHSNEKVVKEIQKAAEHGTSFGAPTELETELAELVIDRVPSIEIVRMVSSGTEATMSALRLARGYTGRNKIVKFEGCYHGHGDSLLIKAGSGVATLGLPDSPGVPESIAKNTITVPYNDLESMKLVFQEFGDDIAGVIVEPVAGNMGVVPPVKGFLEGLRELTETHGALLIFDEVMTGFRVDYNCAQGYFGVTPDLTCLGKVIGGGLPVGAYGGKAEIMEKIAPSGPIYQAGTLSGNPLAMTAGLETLKQLTPESYREFSRKADRLEKGISEAAEKNGIPCTFNRAGSMIGFFFTNGPVINYDTAKQSDLGLFAEYYKGMADEGVFLPPSQFEGLFLSTAHTDDDIEHTIKAAERVFERISRSR

SEQ ID NO: 8294 - protein, 324 aa, Bacillus licheniformis
MEASFQRHRRLRTTAGMRKLVRETELRASDFIYPIFVTEEENVKSEVPSMPGVYQLSLDRLKEEMEEVASLGIQSVIVFGVPEHKDDVGSGAYHDHGIVQKAIAQIKQDFPELVVIADTCLCEYTDHGHCGLVENGEILNDESLVLLAKTAVSQARAGADIIAPSNMMDGFVAAIREALDQEGFTNVPIMSYAVKYASAFYGPFRDAAGSSPQFGDRKTYQMDYANRREALREAKSDVEEGADVLIVKPTLSYLDIVREVKNEFNLPVVGYNVSGEYAMVKAAAQNGWIEEKALVLEMLTSMKRAGADLIITYFAKDAAKWISE

SEQ ID NO: 8295 - protein, 263 aa, Bacillus licheniformis
MKHDLPLEGKKVLVTRNKAQAQSFREKVEALGGEAVLTSLISFRPALPPEAAQRFQADLESADWLVFTSVNGAKFFFSYLKDAGLCDPPASKAKVAAVGEKTARYLRDRGLSVDLMPELYVAEHLAEALKQNAGRHDKVVVLKGNLSRDVIKKTISPLGIQVSEWILYETVRDERGILDLKEAAKHASFDFVTFTSSSTVHTFMSILKEESLAWAEKNRTAFITIGPLTKKALSDYGIPSYMPDVYTIDGMLREMCRISRKGE

SEQ ID NO: 8296 - protein, 313 aa, Bacillus licheniformis
MRNIIVGSRRSKLAMTQTKWVIKKLEELNPDFTFEIKEIVTKGDRILDVTLSKVGGKGLFVKEIEQAMLSGEIDMAVHSMKDMPSVLPEGLMVGCIPKREDARDVLISKGRQKLADLKQGAVVGTSSLRRSAQLLQMRPDLEIKWIRGNIDTRLKKLETEDYDAIILAAAGLSRMGWKDDVVTEFLDPESCLPAVGQGALAIECRGSDEELLSLFSRLNDRYTQLTVTAERAFLHAMEGGCQVPIAGFAKMDEDGVIELTGLVASPDGKTVYRETVKGKDPEAVGRECAAVMSEKGAKALIDRVKQELEDHEA

SEQ ID NO: 8297 - protein, 276 aa, Bacillus licheniformis
MTDTLLARLNEVTIVLYAFTVLFYFIDFLQHNRKAGKAAFWLLSIVWILQTVYLFYFMQYTDQFPVLNNAQGLYFYAWVLVTLSLVLTKLLKVEFLVFFTNLIGFSMAAIHTFTPTAQQSAELSGRLVSELLIIHITMAILSYGAFSLSFVFSVLYLFQYRLLKKKKWGKWLLRIEDLSKLDHMAYVLNIIGVPMLLLSLILGIIWSYVSLETLYWADPKVLGSIVLLFLYGYYLFIRIVKELQGRIAAMWNAASFLVLLINFFLLGSFSQFHWFS

SEQ ID NO: 8298 - protein, 458 aa, Bacillus licheniformis
VQARVMHILVVGLDYKSPPVDIREKLTFQPDELGQAMAQLKEEKSILENIIVSTCNRTELYAVVDQLHTGRYYMKMFLANWFGLSKEDISPYLKFYENDGAVEHLFRVSCGLDSMVIGETQILGQVRTSFKLAQEEKTIGTVFNYLFKQAVTVAKRCHAETDIASNAVSVSYAAVELARKIFGDLSDKHVLILGAGKMGELAVQNLHGHGIGQVTVINRTFSKAKELAGRFSGAAKSLNELQCALMEADILISSTGASGYVVTKEMIEHVNKLRKGCPLFMVDIAVPRDLDPALSEVEGVFLYDIDDLEGIVEENLKERQAVAEEVELIIEAEIVSFKQWLNTLGVVPVISALREKALTIQAETMQSIERKLPHLSTREKKLLNKHTKSIINQLLRDPILKVKEFASEADAEEKLALFTQIFDIEEAAFPDGERQDERQPVHAFKRQNPQGLTSIASE

SEQ ID NO: 8299 - protein, 47 aa, Bacillus licheniformis
MEAKQISFSKYHLLDVVKEIETHFLLYHINFLKSVHILGRENSEYML

SEQ ID NO: 8300 - protein, 161 aa, Bacillus licheniformis
LKKKSVLLPLLLIAVAVYAFLRSGRISLFDGQEEWSVLAGLVGLALFYQGQKEADSAHSFAGLLMTAIGVYFTFKEDYFSRADDFAVIVLIFGAALLVKSFKTKEYQYESLLMIAVALYLYFFRQIAAWLKSVNIETAYVEAYWPAAFIAVSLLLLFLKRK

SEQ ID NO: 8301 - protein, 195 aa, Bacillus licheniformis
MKVTKSEIVISAVKPEQYPEGGLPEIALAGRSNVGKSSFINTMINRKNLARTSSKPGKTQTLNFYIINDVLHFVDVPGYGFAKVSKTEREAWGRMIETYLTSREELKAVVQIVDLRHAPSQDDVMMYDFLKHYEIPVIVIATKADKIPKGKWEKHAKVVKETLNIEKEDRLILFSSETKKGKQEAWSAIEQMIAR

SEQ ID NO: 8302 - protein, 774 aa, Bacillus licheniformis
MADETKRNIPLLPLRGLLVYPTMVLHLDVGREKSVQALEQAMMNDHMIFLATQKDISIDEPDEDEIFTFGTYTKIKQMLKLPNGTIRVLVEGLQRARILEYHDLDEYTSVKIERIDEETEKDVEDEALMRTLLDHFDQYIKISKKISAETFAAVTDIEEPGRMADIVASHLPLKLKDKQEVLETIDVKARLNKVIDLIHNEKEVLEIEKKIGQRVKRSMERTQKEYYLREQMKAIQKELGDKEGKTGEVQKLTEKIEQAGMPDNVKETALKELNRYEKIPSSSAESSVIRNYIEWLISLPWNDATEDRLDLKLASQILDEEHHGLEKVKERVLEYLAVQKLTRSLKGPILCLAGPPGVGKTSLAKSIAKSLGRKFVRISLGGVRDESEIRGHRRTYVGAMPGRIIQGMKKAGKNNPVFLLDEIDKMASDFRGDPASAMLEVLDPEQNHTFSDHYIEETFDLSKVLFIATANNLATIPGPLRDRMEIITIAGYTEVEKVEIVKDHLLPKQLKEHGLKKSNLQIREQAVLDVIRYYTREAGVRNLERQIAAICRKAAKLIVSGERKRITVTDKNLEDYLGKRMFRYGQAELDDQIGVVTGLAYTTVGGDTLSIEVSLSPGKGKLILTGKLGDVMRESAQAAFSYVRSKAEELNISPDFHEKHDIHIHVPEGAVPKDGPSAGITMATALVSALTGRPVSRNVGMTGEITLRGRVLPIGGLKEKALGAHRAGLKTVIMPKDNEKDIEDIPNSVREGLTFIPVAHLDEVLKHALVGEEK

SEQ ID NO: 8303 - protein, 551 aa, Bacillus licheniformis
LSWTSIALFVQLFFGIIIGLYFWNLLKNQRTQKVTIDRESKKEMEQLRKMRSIHLSEPLSEKVRPTAFKDIVGQEDGIKALKAALCGPNPQHVIIYGPPGVGKTAAARLVLEEAKKNKRSPFQEHSAFVELDATTARFDERGIADPLIGSVHDPIYQGAGAMGQAGIPQPKQGAVTHAHGGVLFIDEIGELHPIQMNKMLKVLEDRKVFLESAYYSEENTQIPKHIHDIFQNGLPADFRLIGATTRMPDEIPPAIRSRCLEVFFRDLEKHELKTVAKKAADKIQKKVAEEGLDLLTRYARNGREVVNMMQIAAGMALTEERDEVTVEDIEWVIHSSQLTPKYEQKIASKPQVGIVNGLAVHGPNSGSLLEIEVTVNQAADKGSINITGIAEEENIGNQSKSIRRKSMAKGSVENVMTVLRTMGVKASDYDIHVNFPGGIPVDGPSAGIAMAAGIFSAIHKIPIDHTVAMTGEISLNGRVKPIGGVIPKIKAAKHAGAKTVIIPHENVQSILKRIEGIHIVPVKTLQEVLDLVLVNPPSEMPDGVQMKRESV

SEQ ID NO: 8304 - protein, 37 aa, Bacillus licheniformis
LHPETVGIPEQSDGFKSKIIPFCTFIPSLIRKYYLTY

SEQ ID NO: 8305 - protein, 421 aa, Bacillus licheniformis
MFKFNEEKGQLKCSFCGKTQDQVRKLVAGPGVYICDECIELCTEIVEEELGSEEEVEFKDVPKPKEIREILDEYVIGQDQAKKSLAVAVYNHYKRINSNSKVDDVELSKSNISMIGPTGSGKTLLAQTLARILNVPFAIADATSLTEAGYVGEDVENILLKLIQAADYDVEKAEKGIIYIDEIDKVARKSENPSITRDVSGEGVQQALLKILEGTVASVPPQGGRKHPHQEFIQIDTTNILFICGGAFDGIEQIIKRRLGQKVIGFGSDNKHEDLEKEALLSKVLPEDLLRFGLIPEFIGRLPIIASLEPLDEKALVEILTKPKNALVKQYRKMLELDDVELVFEDEALTEIAKKAIERKTGARGLRSIIEGIMLDVMFDLPSREDIEKCVITGKTVTDGEPPRLIMKDGTVVNKDKKTSA

SEQ ID NO: 8306 - protein, 47 aa, Bacillus licheniformis
LSFFLVEFKHSFTPYILVIPVSSLKETSLENIRSIMYCILPHFPKRR

SEQ ID NO: 8307 - protein, 424 aa, Bacillus licheniformis
MSVKWEKQEGNEGVLTVEVDADTFNKALDDAFKKVVKQVSIPGFRKGKVPRGLFEQRFGVEALYQDALDILLPVEYPKAVEEAGIEPVDRPEIDVEKIEKGENLIFTAKVTVKPEVKLGEYKGLGIEKDDTAVTDEDVQNELKSLQERQAELVVKEDGKVEEGDTVVLDFEGFVDGEAFEGGKAENYSLEVGSGSFIPGFEDQLVGLEAGAEKDVEVTFPEEYHAEELAGKPAVFKVKIHEIKAKELPELDDEFAKDVDEEVGTLAELTEKTKKRLEEAKENEADAKLREELVLKAAENAEADIPQAMIDTELDRMMKEFEQRLQMQGMNLELYFQFSGQDENALKEQMKEDAEKRVKSNLTLEAIAKAENLQVTDEEVEEELSKMAEAYNMPVENIKQAIGSTDGMKEDLKVRKAIDFLVENR

SEQ ID NO: 8308 - protein, 335 aa, Bacillus licheniformis
MKHDKKNSKIIPFPNVKERLVHKGMGALKEKNYHEALRLFSEAKRYDDEESDIYLGMAICLLEIGELEEAKGICEKMLKEGHGHYFTVLQVYMTILIQLRQYEKVKETIEAVLEENKLPPESAEQFYKLLDFSRKMTEDPGPEDITEDLPETEEVDQERLLNDTEEQVKLLHGLKDRNLTSYIGLLKTILQNPSAHPVVKTMILQLLAESDHEKPTLVAKFGDSMTINPTETVKPDDMPILKHVLSVLDDTLGNENPTLYQAVEELWRRHIYVLYPFQPKYSNRELWAAALHKVGYEMHGIDIDKEELHILYEFNDRQLDEACALIKDIEEISYL

SEQ ID NO: 8309 - protein, 34 aa, Bacillus licheniformis
LAASIKKLSDVDRRLFLLAAAYCRRFFLVFSGPG

SEQ ID NO: 8310 - protein, 199 aa, Bacillus licheniformis
MEPLKTHNGIAAVLNRINVDTDQIIPKQFLKRIERTGYGRFAFFDWRYLDNGDPNPDFELNRPEYKGASILIAGENFGCGSSREHAPWALDDYGFKIIIAPSFADIFHQNCFKNGMLPIRLPYEAWKELAEQYEYQSLTMTVDLEKQTITDHAGQQIAFEVDPHWKEMLLNGYDEISLTLLLEEEIEQFEKQRSSWLQA

SEQ ID NO: 8311 - protein, 472 aa, Bacillus licheniformis
MMPRTIIEKIWDQHVIKKGEGKPDLLYIDLHLIHEVTSPQAFEGLRQKNRKVRRPQNTFATMDHNIPTVNRFEIKDDVAKRQVSALERNCEEFGIRLADLSSVDQGIVHVIGPELGLTLPGKTIVCGDSHTSTHGAFGALAFGIGTSEVEHVLSTQTLWQQKPKTLEIRVDGKLQKGVTAKDVILAIIGKYGVKFGAGYVIEYTGEVFRNMSMDERMTVCNMSIEAGARAGLIAPDETTFEYVKTKKYAPKGEDFEKAVEEWKNLKTDPGAVYDRTIVMDGSAISPMVTWGINPGMVLPVDETIPGPEAFLQEDDKKEAQRAYEYMGLEPYKKIEDITIEHVFIGSCTNSRMTDLRQAAEMIKGQKVADGVRAIVVPGSQSVKIQAEKEGLHKIFIEAGFEWRESGCSMCLSMNNDVVPEGERCASTSNRNFEGRQGKGARTHLVSPAMAAMAAIHGRFVDVRKYYQETTAV

SEQ ID NO: 8312 - protein, 372 aa, Bacillus licheniformis
LNLKKRIALLPGDGIGPEVLDAAVDVLKSVAEHYQHEFEFEYGLIGGAAIDEAGAPLPEETVAACKAADAILLGAVGGPKWDQNPSELRPEKGLLAIRKQLDLFANLRPVKVFESLAGASPLKTEYIEGVDFVIVRELTGGLYFGKPSEQYVNQNGEEEAVDTLFYKKSEMERVIREAFQMAQSRKGKVTSVDKANVLESSKLWRKTAEEVAKEFPDVKLEHMLVDNAAMQLIYAPGQFDIIVTENMFGDILSDEASMLTGSLGMLPSASLSSSGLHLYEPVHGSAPDIAGQNIANPLAAILSAAMMLRTSFGLEAEAQAVEHAVDQVLRAGKRTKDLAKGSEHCTTQSITGEVKAALADDNAISNIMTAYV

SEQ ID NO: 8313 - protein, 518 aa, Bacillus licheniformis
VRKINFFDTTLRDGEQSPGVNLNTQEKLAIAQQLEKLGVNIMEAGFPASSPGDFNAVKEIARTIKNCSVTGLARSVKGDIDSAWEALKDGAEPRLHIFIATSDIHLKYKLKKTREQVLEQAVAMVKYAKERFPIVQWSAEDACRTDLPFLAEIVSEVIAAGADVVNLPDTVGYLAPAEYGNIFRHIKENARNADKVQLSAHCHDDLGMAVANSLAAIENGADQVESVINGIGERAGNASLEEIAVALHIRKDFYQAESTIQLNEIKRTSDLVSKLTGMAVPRNKAVVGDNAFAHESGIHQDGFLKEKTTYEIISPELVGVKTDALVLGKHSGRHAFKDKLQNLGFQLGEEEINKFFNIFKELTGKKKEFTDEDLISLILEEKTADRKIGYDFISLQVHYGTSQVPTATVSLKDQETDQVIQEAATGAGSVEAVYNTLKRCMDKEVQLLDYRIQSNRKGQDAFAQVYVRVMIDGKESGGRGVAQDVLEASAKAYLNAVNRYLVLKTNTEGLSKQAAVGS

SEQ ID NO: 8314 - protein, 342 aa, Bacillus licheniformis
MVKVYYNGDIKENVLAGKKVAVIGYGSQGHAHALNLKESGVDVIVGVRKGKSFAKAEEDGHQVFTVREAAEQADIVMVLLPDEQQQKVYEAEIKDGLQAGNSLVFAHGFNVHFHQIVPPADVDVFLVAPKGPGHLVRRTFEQGAGVPALFAIYQDVTGEAKDKALAYAKAIGGARAGVLETTFKEETETDLFGEQAVLCGGLTSLVKAGFETLTEAGYQPELAYFECLHELKLIVDLMYEEGLAGMRYSISDTAQWGDFVSGPRVVDEKVKESMKEVLKDIQNGTFAKEWIVENQVNRPRFNAINASENEHQIEVVGRKLREMMPFVKQGKKKEAVVAGAKN

SEQ ID NO: 8315 - protein, 172 aa, Bacillus licheniformis
LKRIITLTVLNQSGVLNRITGLFTKRHYNIESITVGHTETAGISRITFVVHVADEKETEQLTKQLNKQIDVLKVTDITNQSIVQRELALIRVVSPPSSRTEINGVIEPFRASVVDVAKDSVVIQVTGESSKIEALIELLKPYGIKEVARTGTTAFARGTQQKPASIKTISIV

SEQ ID NO: 8316 - protein, 574 aa, Bacillus licheniformis
MGTNVQLDAENAQCTQTMAGASMLIEALKQENVEVIYGYPGGAVLPIYDKLYGSGMFHVLTRHEQGAIHAAEGYARISGKPGVVIATSGPGATNLVTGLADAMIDSLPLVVFTGQVATSVIGSDAFQEADVIGITMPITKHSYQVRNAEDLPRIIKEAFHIATTGRPGPVLIDIPKDIAVVEGEFRYDHDIHLPGYQPTKEPNYLQIRKLVEAVSAAKKPVILAGAGVLHGKASEELKNYVEQQQIPVAHTLLGLGGFPADHPLFLGMAGMHGTYAANMALYESDLLISIGARFDDRVTGNLKHFAKYAKVAHIDIDPAEIGKNVHTHIPVVGDSKLVLTELIKQNGKPSASDEWKKQLAAWKTEYPLWYEENETEGFKPQKLIEYIHRYTKGEAIVTTDVGQHQMWAAQFYQFQKADRWVTSGGLGTMGFGLPAAIGAQLADKDATVVSILGDGGFQMTLQELSVIHDLNLPIKVVVLNNRCLGMVRQWQEIFYDERYSHSKFTSQPDFIKLSEAYGIKGVRITSEEEAEEKLEAALTSNEPMVIDVQVAQAEKVFPMVAPGKGLHEMVGVKP

SEQ ID NO: 8317 - protein, 52 aa, Bacillus licheniformis
VVPRKEKPFRPFGLQGVQRQQWAGRLFLAAKADWIHALRHIYIDYFLKNNCE

SEQ ID NO: 8318 - protein, 304 aa, Bacillus licheniformis
MGDQKDQWIFLNDKLVKKEDAKISVYDHGFLYGDGVFEGIRVYDGNIFRMQEHMDRLYDSARSIMLEIPYPQEELTQHVLKTVEKNGLKDAYIRLVVSRGAGDLGLDPNNCSNPSVIIIVEPLAIFPKHLYETGIDIVTVPTRRNRPDVLSPKVKSLNYLNNILVRIEAHMAGVTEALMLNDQGYVAEGSADNVFIYKNGKLLTPPGYIGALEGITRNAIIEIARELGYEVKEEPFTRHDVYTAEEVFLTGTAAEVIAVVKVDGRKIGDGKPGVHTNRMLEKFRERVVREGLKVSLKDQSLSVS

SEQ ID NO: 8319 - protein, 75 aa, Bacillus licheniformis
MYRTFPAHSVPRVRQYPGYFGYPVTYVYNPSAHGPYTYYPYGGVFTTPTLGFGIGYPGISVPAVHAFTGGFRDNE

SEQ ID NO: 8320 - protein, 460 aa, Bacillus licheniformis
VHTLEKMEQTNFQTARDYVTQAYETVQKRNFYESEFLQAVKEIFDSLVPVLARHPKYIEHRILERIAEPERMITFRVPWVDDEGNIRVNRGFRVQFNSAIGPYKGGIRFHPSVNASIIKFLGFEQIFKNSLTGLPIGGGKGGADFDPKGKSDREIMSFTQSFMNELYRHIGPDTDIPAGDIGVGAREVGFMFGQYKKIRGRYDAGVLTGKGLEYGGSLTRKEATGYGLVYFVEEMLKDQGLRFENSTVVVSGSGNVALYAMEKAAQFGAKVVACSDSDGYVYDEKGICLETVKRLKDDGNGRIREYVSEHPEAHYFEGCTGIWSIPCDIALPCATQNEIDEEAAEVLISNGVKAVGEGANMPSEEGAVKRFLDAGVLFGPAKAANAGGVAVSALEMAQNSARLHWTAEETDAKLRAIMADIYKRSVEAASEYGRPGNLLDGCNIAGFIKVADAMIAQGVV

SEQ ID NO: 8321 - protein, 11 aa, Bacillus licheniformis
LYAVGFILKTG

SEQ ID NO: 8322 - protein, 84 aa, Bacillus licheniformis
MDDKKEMSNVETQRNFLTAEEFPEGAYGAAQGKDEPVENKSTPWKEGQQYYSNFAYEFRNLHQGTPRQYPGAHPTHDEEDQNEE

SEQ ID NO: 8323 - protein, 163 aa, Bacillus licheniformis
MTKQQQNQQQKQKQQKQKHEQLLGANITDTELAQEFGNIQQQLAQLEQTVNQMGSQQQGQSGQQSSQLSQGINQLKQQIQQFSSQSQQQMQQTDQQIQQSIQQAVQQLNQALQGIQTNQAMNQMSQALQQAQQSFNQQGQQGQQGQQNQQNQQQNQNFQQPLQ

SEQ ID NO: 8324 - protein, 73 aa, Bacillus licheniformis
MAQQSVKATVFKANAPSETTKQIYEDQFDYKGNDIIEPPYSLKELKSTAEYSTILQQCIHAYKTKYSRFLVLM

SEQ ID NO: 8325 - protein, 431 aa, Bacillus licheniformis
MTVKEVNPHFEDFLFDWNQKFQLLVGGYGSSKSYHIALKLILKLLEEKRTVLVIREVYDTHRDSTFSHFEGIINDLEIDHIVRCMTSPMQVRFPNGSRIIFKGLDKPAKLKSINNISIIWIEECSEVKYEGFKELLGRLRHPTLPLHMIFSTNPVGEDNWTYKHFFKDDLNNRFVLDDKELYEKRTIVLNDTYYHHSTAEDNLFLPESYVRQLDELKEYDPDLYRIARKGHFGVNGVRVFPQFEEWPHDEVMQAISNIDRPIKRVGMDFGFEESYNAVVRLAVDHKKKYLYIYWEYYKRGMTDDRTAEELQEFKKTQELIKADSAEPKTIQYFRQQGFNMVGAHKYQGSRLQYTKKIKRFKKIICSGQCRNTIFELKPLTYKKDKLGSIIEDEFKIDPHTLSAIWYALDDYEVTDLKEKPKIRQRPNRERR

SEQ ID NO: 8326 - protein, 136 aa, Bacillus licheniformis
MQRISRIENGLSEKQRRVLQQMRKVKDIVQTPDKNGLVKPVPVMNERLVVTEIEETEMRAIDDILNIEEALTRVTDKRLKAIRQKYDMIRLMDEQELKLRGIYLSNETKQAELERLTARPVDNSVNITITRKGDGK

SEQ ID NO: 8327 - protein, 128 aa, Bacillus licheniformis
MARPRDPRRDEAFRLWKESSGTKKLKDIADELGVSSSTVRKWKAIDKWEDKIKGSAPKSNGSAPFRPSAPIGNKNAKGNKGGNAPPGNENAKGNAAPKGNKNSARTGEYETIMWDFLNEDERQLFGEI

SEQ ID NO: 8328 - protein, 82 aa, Bacillus licheniformis
MATENTNIRSCDDKEKEKLLLLHSAELLENISQSKEKYRKIIQAGITQWVKDFQSGHIKVNTVEDLKKLIELDIQLQKDEEI

SEQ ID NO: 8329 - protein, 257 aa, Bacillus licheniformis
MTVVPEKLYCRACKRKTNHQIVKNEHDNELKYSISNLDYDEEIDFQFNEDYAIVQCRGCDAIAFLKIYGDEDMFHIVGSNYHTDREYFVEYTVFPEEPKKEDPVEQLLQFKEKYEFDHLPNLINGIRNETINAYRQRMNLLCNTGIRMLIESICMVNGIDKRPKIKKGEPVLDGHKNPVMVNLNLVQKINELKEKNIIDEEQRRILLEIKDVGNQTVHEIFRPKRRDLLLYLETLDLILFNIYELPHIKITNSPSPS

SEQ ID NO: 8330 - protein, 247 aa, Bacillus licheniformis
LGDLKNIKKNGLKVFSTFSWGGGSSMGYKLAGYDLLGNCEIDPQMMKIYRKNHNPIYPFLMDIRDFNKMENLPDELFDLDIFDGSPPCSVFSIAGDREKAWGKEKAFRKGQAKQSLDDLFFHYLDAVERLRPKIFVAENVKGMVSGNAKGYVKLVIERTKEIGYDVQLFLLNAATMGAPQRRERVFFICRRKDLNLLPLKLSFNEPPIVYKEFRSGHGARLKETSKLYKRWVKRRPSDNNGRHHEKD

SEQ ID NO: 8331 - protein, 118 aa, Bacillus licheniformis
MASYNLCVLMEENPKTLLVSVVNFDEAEEKALNLALNKISGDWDDYKLEQVLEDLQHNNFDLSLTGFSESEIDEILGELAEHEGNEGKINDSQELDLDDYEDDHFQHTCPKCGFSFNE

SEQ ID NO: 8332 - protein, 64 aa, Bacillus licheniformis
MYRMMMKIVSFKGGAAGVYAGLRAIVAGNASGEIPFAQEVIFIWLPIIFASSWKKIQRLSWFQL

SEQ ID NO: 8333 - protein, 131 aa, Bacillus licheniformis
MERENYVSLWIGSIQTDDKLNEYVELPYDEEEGDFLPSAFLKDFNIDIDDLDEDFIEKVVHDQNKELLHELIGGCSYDEIILPRFEAIQGKKLPNNINSAILLYNFDYEGKRNEIVNDGYTFKFIGSVSYV

SEQ ID NO: 8334 - protein, 640 aa, Bacillus licheniformis
MKTLDVHALHHAIDQTLEQLKQQSDELSKVKKAVEGITSLDDALKGKGGDAIRAFYEECHTPFLQFYDTFIEEYSSTLKKMKSALNSLEPNHNGFISQSFLEHELEQGLNAADRTTKRLVSKTNATIAKVSHIVDLPDLNDSGFHEQNQKALKEINQTIEKLHAFDREQTSALKTAENDLETMQRYISRLEKMYTGPKIEITGYQKGSILKPDEMDALRGGQDTAMGVMLDKLDKRSKLEKEASKIEPMSHTDTLKKKLEKLYDDPDEFLKVAREIGYDNLTSEQMNYVTAIEEAYEFRADPIKGTLEDGKHVLESMKGFVVGGYEFAKDTIQGTIETGKALIGQADDFIKNPKATVNSVLEYDYKAAFESMLQSIADSWDEKMVHGDSYSRGHYIAYAIGTIWGLAEAGPTVVSGSKSLGKAGKAAAQTAKKNINSVKQHFNPPKNRYTPALEGMLQRAGEAPNVKNTPLLRELVEDKKKSVLFNSNKGTSGQTVKKVRKTIVPTVKSGEFNKWFNSLSTKQLDELWSDKKIRRAIERQLRAPGGMHEWHLVSRAPTFKHWGVTAEQIRELRTAINEVEFVNPTGKHGGLGSTAAHNELIKIIDSSKDYNMFVRRLNNWANYRLKGGVEALPEGLRIKK

SEQ ID NO: 8335 - protein, 369 aa, Bacillus licheniformis
LVVKIRSEKVGNMLNQWYATIKLQQVHKATQMKKEIQKAIDNMEKNQDVLLYFNMIDSRYKLLIEKYNESGSILKSLKYRAEEKKTDDMLQYYFYFFSGLYQFYIKNFTKAINFYRIAENWINKIPDEAERAEFNYQIAIAYYEIHQNFFSLTHAEKALESFLALGNYENRAATTQLIIAANRLDLHQYELTESVYKKAIKMAADTRQNYVEGLGHHNLGLAYERQEKLDLARESFEIALDIFENLHSKIAIIRTSYMLARVLFKKGLFEEGTHWYQKALNLAKEINEKTYEAKLLVIHSIYKELDKTLLDKGLNMLRDKKLWSDVADLAIIAARHFKKKEYHELAAKYFDEGVVARDKIQTWTEELVS

SEQ ID NO: 8336 - protein, 43 aa, Bacillus licheniformis
MKKLLLGAVITGVFLTGILNFTTQGKAEFGTGDFKVAENAFFG

SEQ ID NO: 8337 - protein, 82 aa, Bacillus licheniformis
MNNLFLQLRDQHSLNELKVCQMDRALKQSLDGDELKIIKAKYLSPQKIKDIEIYMEMGLKKDKCYQVKRRAIYNLATALGII

SEQ ID NO: 8338 - protein, 48 aa, Bacillus licheniformis
LTKKKPIFTIDEDFSDLTTAQKPPVNTPKKRVRDRITIEMKLFERNNN

SEQ ID NO: 8339 - protein, 173 aa, Bacillus licheniformis
MKVLIVSDSHGLEDELEMIAERHGKETDLIIHCGDSELDPSHPALSSYLTVKGNCDFYGEFKDEIVVPAGSRKLFFTHGHLYGIKQSLLNVYYRAEELGADIICFGHSHIAGSELMDGKLLINPGSIRLPRVRKEKTYAILNIDKDNATVRYYDLDGREVESLTNHVQLPAHS

SEQ ID NO: 8340 - protein, 196 aa, Bacillus licheniformis
MKEVIIATKNEGKVREFKAMLEPRGYDVKSLLDIGYTPEIEETGQTFEENAVIKAETISKETGKIVIADDSGLSVDYLGGSPGVYSARYAGEEKNDLANLKKLLKELEGVEKEDRSARFRCALAICIPGQETKTVEGSVEGYITEEPRGTNGFGYDPVFLVKDKDQTMAELSSGEKNKISHRAEALKKLSALLDQA

SEQ ID NO: 8341 - protein, 246 aa, Bacillus licheniformis
MRYDGRKNNELRPVTMDLDFITHPEGSVLITVGGTKVICNASVEDRVPPFLRGEGKGWITAEYSMLPRATNQRTIRESSKGKISGRTMEIQRLIGRALRAVVDLEKLGERTIWIDCDVIQADGGTRTASITGAFTAMALAVGRLVEKGALKEMPITDFLAATSVGIDKEKGLILDLNYQEDSAAEVDMNVVITGEGRFVELQGTGEEATFSRSELDGLLELAEKGIAELIEKQKEVLGDVALSIQQ

SEQ ID NO: 8342 - protein, 369 aa, Bacillus licheniformis
MLKKGMKGIAVTVTASALLLSGCGIFQSDQASEEIDPPQDITYVKEEKEQDKTDKTKDKTEDKGSKTTSDDKAAQTGDTVMRELYLIDKNGYVTAQTLPLPKQEGTAKQALEYLVEGGPVSNILPNGFRAVLPADTTVNVDIKEDGTAIADFSNEFKNYKAEDEQKIVQAITWTLTQFNSIDKVKLRMNGHDLKEMPVNGTPISEELSREDGINLDTAGVTDITATQPVTVYYLAESDKGTYYVPVTKRTSAKEKDQVTAAIKELTEGPDNKSGLLSDFQGDVKLENKPKIEDGHVTLDFNEAIYGSADGQKKVISDEVLNSIVLTLTELPDVKSVSVTVNGKSELVNEKGEKLSKPVSRPSKVNTGSF

SEQ ID NO: 8343 - protein, 271 aa, Bacillus licheniformis
LDQPIGVIDSGVGGLTVAKEIMRQLPKEKIIYLGDTKRCPYGPRDRKEVLSYTWEMTNYLLSRHHIKMLVIACNTATAIALEEISREVAIPVIGVVQPGARTAIKVTENQRIGVIGTENTIKSGAYEEALLSLNGDLTVENLACPMFVPFVESGKFLDETADEIVRTSLHPLRDSSIDTLILGCTHYPILKEPIQRYMGERVNIISSGDETAREVSTILSYNGLLSKTAEPPEHLFLTTGERARFTKIANDWFGYEVKNVESISLQETAVK

SEQ ID NO: 8344 - protein, 147 aa, Bacillus licheniformis
MNSNASLNHIADIEKSLRHIAGIIKQKGREILTQYTITPPQFVGLQWLYEYGDMTIGELSQKMYLACSTTTDLIDRMEKNNLVERVKDPSDRRVVRIHLLSEGERIIQEVIQKRQDYLEDMLEAFSEEETAAFEKLLIKLQQEMNRK

SEQ ID NO: 8345 - protein, 74 aa, Bacillus licheniformis
LKEKEFQSKPLLTKREREVFELLVQDKTTKEIASELFISEKTVRNHISNAMQKLGVKGRSQAVVELLRMGELEL

SEQ ID NO: 8346 - protein, 44 aa, Bacillus licheniformis
MGFDIVVISYETYARSVTFLTEKRIPSNTYFSNHDTGIVSGLNF

SEQ ID NO: 8347 - protein, 232 aa, Bacillus licheniformis
MKKAIIIGASSGIGNALAKQLSAGGVEVGLAARRYELLAKLRDDLPGPSYIKKIDTADSEHSPILLKELLDEMNGADAVFICSGVGYLESEMDWSKEKETIDVNVTGFVSCSNVLMEHFIKNGRGHLVGISSIAALRGNGGAVTYAASKAFVSNYLKGLCQKVKKLGCDEIAVTEIQPGFVDTALAKGDHLFWTASPEKAAAQIISAVQKKKTHAYITKRWRLISWILKCLP

SEQ ID NO: 8348 - protein, 156 aa, Bacillus licheniformis
LKLPGYIEEPFDTWCQSFSFFDEVSVRFSETDMFGHMNNVTPFVYFEEARISYFKHLGVMDRLSDGKSAAIPVVASQQCDYFQQVMLHERLKIGVKTASVGNASLTLHYAAKNGEGGLCFTGLAVMVQIAKDTGKPVKWTDEQKAKLLGNNSFPEK

SEQ ID NO: 8349 - protein, 254 aa, Bacillus licheniformis
MSENKTIKFIITRQDTSDSNPYQEEFEIPYRPNMNVISALMEIRRNPVNAKGEKTSPIAWDMNCLEEVCGACSMVINGKPRQSCTALIDQLEQPIRLEPMKTFPVVRDLQVDRSRMFDSLKKVKAWVPIDGTYDLGPGPRMPERRRQWAYELSKCMTCGVCLEACPNVNDKTNFMGPAPLSQVRLFNTHPTGAMNKSERLEAIMGDGGLAECGNSQNCVQSCPKGIPLTTSIAALNRDTTVQAFKNFFGSDNTE

SEQ ID NO: 8350 - protein, 587 aa, Bacillus licheniformis
MSNSSIIVVGGGLAGLMATIKAAEAGTNVKLFSIVPVKRSHSVCAQGGINGAVNTKGEGDSPWEHFDDTVYGGDFLANQPPVKAMCEAAPSIIHLLDRMGVMFNRTPEGLLDFRRFGGTQHHRTAYAGATTGQQLLYALDEQVRRFEVEGLVSKYEGWEFLGAVLDDDNTCRGIVAQNLTTMEIESFRSDAVIMATGGPGIIFGKSTNSMINTGSAASIVYQQGAYYANGEFIQIHPTAIPGDDKLRLMSESARGEGGRVWTYKDGKPWYFLEEKYPAYGNLVPRDIATREIFDVCVRQKLGINGENMVYLDLSHKDPKELDIKLGGIIEIYEKFMGDDPRKLPMKIFPAVHYSMGGLWVDYDQMTNIPGLFAAGECDYSMHGGNRLGANSLLSAIYGGMVAGPKAVEYIQGLETSAEDLSSSVFDAYVKKEEEKWADIMKMDGNENAYVLHKELGEWMTDNVTVVRYNDKLLKTDEKIQELAERYRNININDTAKWSNQGAVFTRQLHNMLQLARVITLGAYNRNESRGAHYKPDFPERNDEEWLKTTMAKHAGDFEAPKFHYEDVDVSLIAPRKRDYSKKKVAKS

SEQ ID NO: 8351 - protein, 202 aa, Bacillus licheniformis
MAGNREFVYRRLHSLLGVIPVGIFLIQHLVVNHFAASGEEAFNNAAHFMENLPFRYALEIFVIFLPLIYHAVYGVYIAFTAKNNANRFGFFRNWMFVLQRITGIITLIFVSWHVWETRIAAQMGAEVNFDMMADILSSPIMLGFYIVGVLSTIFHFSNGLWSFAVTWGITVSPRSQRIATFVTMGVFVVLSYVGLRAILAFV

SEQ ID NO: 8352 - protein, 149 aa, Bacillus licheniformis
LDMNKYEANLAQLKELEVSAYGYELIREVLLPDMLGQDYADMMYWAGKKLARKFPLESREDLPAFFQDAGWGTLAIVHSKKQELEFELEGPLVSNRLKYQKEPCFQLEAGFIAEQIQLMNEQIAESYEQVKKRAGKVVLTVKWDLKDPA

SEQ ID NO: 8353 - protein, 409 aa, Bacillus licheniformis
MGLIVQKFGGTSVGSVEKILNVAYRVIEEKQRGHDVVVVVSAMGKSTDSLVALAKEITEQPSSREMDMLLTTGEQVTISLLTMALQNKGYDAVSYTGWQAGIETENIHGNARITNIDTAKLKERLNEGKIAVVAGFQGVTAEGEITTLGRGGSDTTAVDFAAALKADKCDIYTDVPGVFTTDPRYVKTARKLAGISYDEMLELANLGAGVLHPRAVEFAKNYQVPLEVRSSTEKEAGTLIEEESSMEQNLIVRGIAFEDQITRVTVCGLASGLTTLSTIFTTLAKQNINVDIIIQSVTGTSKTSISFSVKTEDLKRTVEVLEEYKDALDYEQIETENRLAKVSIVGSGMISNPGVAAEMFAVLAEKNIQVKMVSTSEIKVSTVVNEGDMVKAVEALHDAFELSKQTAVI

SEQ ID NO: 8354 - protein, 590 aa, Bacillus licheniformis
MNKKIKEKLALLPDQPGCYLMKDRQDTVIYVGKAKILKNRVRSYFSGSHDAKTQRLVSEIEDFEYIVTSSNIEALILEMNLIKKYDPKYNVMLKDDKSYPFIKITNERHPKLVVTRKVKKDKGRYFGPYPNVQAARETKKLLDRLYPLRKCAKLPDRVCLYYHLGQCLAPCVYDVSEETNRQLTEEITRFLKGGYNEVKKELEAKMLEASENLQFERAKEFRDQIAHIESTMEKQKMMLNDMVDRDVFAYSYDKGWMCVQVFFIRQGKLIERDVSMFPLYREADEEFLTFIGQFYSKNNHFLPKEILVPDSVDKDMIEELLDVNVRQPKRGAKKDLLLLAHKNAKLALKEKFSLIERDEERTIGAIEKLGKALDIYTPYRIEAFDNSNIQGTDPVSAMVVFLDGKPHKKEYRKYKIKTVEGPDDYGSMREVIRRRYTRVLKENLPLPDLILIDGGKGQVSAALDVLENELGLDVPVAGLVKDDKHRTSNLLIGDPLEIVQLERNSQEFYLLQRIQDEVHRFAISFHRQLRGKSAFQSVLDGIPGVGEQRKKLLLKHFGSVKKMKEASAEDIRKLGIPLKTAQLIEEALKK

SEQ ID NO: 8355 - protein, 104 aa, Bacillus licheniformis
MAIVKATDQTFSSETSEGVVLADFWAPWCGPCKMIAPVLEELDQEMGDKLKIVKIDVDENQETAGKYGVMSIPTLLVLKDGEVVETSVGFKPKEALEELVNKHL

SEQ ID NO: 8356 - protein, 325 aa, Bacillus licheniformis
MSKKVIVLGEFRDGSLRNVTFEAIAAGKTVAEGGEVIGVLFGESVSSHAAELIHYGADRVLTAENPLLKNYTSDGYVQALLPIIERENPDVIIFGHTSMGKDLSPKLSARMGTGLISDAVDVEVAGGNIVFTRPIYSGKAFERIISEDETIFATIRPNNIAPLDKDETRTGAVESIEADIRDIRTVIKDIVKKTSEGVDLSEAKIIVAGGRGVKSEEGFKPLQELADVLGGAVGASRGACDADYCDYSLQIGQTGKVVTPDLYIACGISGAIQHLAGMSNSKIIVAINKDPEADIFKIADYGIVGDLFEIVPLLTEEFKKLSVST

SEQ ID NO: 8357 - protein, 257 aa, Bacillus licheniformis
MNIYVLMKRTFDTEEKIQIEQGEINTDGAEFIINPYDEYAIEEALQLKEKHGGEITVVTVGEEEAEKELRTALAMGCDKAVLINIEDDVEEADQYTASAILYNYLKDREYDIILGGNVAIDGGSGQVAPRLAELLGIPCITTITKLTVNGGDVEAERDAEGDLEVIQTSLPIVATAQQGLNEPRYPSLPGIMKAKKKPLEELELDDLDIDEEDVAAKTKTIERFLPPKKEAGKILEGEPEQQAAELVSLLRSEAKVV

SEQ ID NO: 8358 - protein, 258 aa, Bacillus licheniformis
MAALSYAVDGHVATITIQHPPANALSTQVLEDLSACLDELSERQDVRSVVIHGEGRFFSAGADIKEFTSLMDGSDYANLADKGQQIFEKVESFPKPVIAAIHGAALGGGLELAMACHIRIAEESAKLGLPELNLGIIPGFAGTQRLPKYVGTAKALEMIGTSEPISGKEAFEYGLVTILAANEEEVLQKAKELAQKFAEKSPQTMAYVIELLNSSKVYSYEGGLKLEGKYFGEVFQSEDAKEGIQAFLEKRKPHFKGK

SEQ ID NO: 8359 - protein, 200 aa, Bacillus licheniformis
LKQKRPKYMQIIDAAVIVIAENGYHQAQVSKIAKQAGVADGTIYLYFKNKEDILISLFKEKMGQFIEQMSEEMTAKNSATEKLSLFIKKHFELLSSDRHLAIVTQLELRQSNLELRLKINEILKGYLTILEDIITEGKEAGEFKSTLDVRLAKQMIFGTVDETVTTWVMNDQKYDLPNLADSIHELLIHGFSSQKTKEEE

SEQ ID NO: 8360 - protein, 559 aa, Bacillus licheniformis
MPTEKPWLRHYPEQIPHELQFEDQTLHSILQQSAQQFSEKTAIHFLGKKRSYREVYEDALKMADYLLSLGIQKGDRVSIMLPNCPQAVIAYYGVLFSGGIVVQTNPLYTERELEHLLHDSGATIIITLDMLYPAAYKMKALTSIRHIIATSIKDYLPFPKNLLYPIVQKKENQMSVEINENETTHLFRTIMKRPVPSGPPGIEIDPAHDIAVLQYTGGTTGTPKGVMLSHRNILANMEMCAAWFYQLNKGEEKVLGIVPFFHVYGMTAVLNFTIRQGYEMILLPRFDARAALKTIDKEKPTIFPGAPTIYIALLNHPDLHQYDLSSIKSCLSGSAALPVEVKQQFEKVTGGRLVEGYGMSETSPVTHANFIWDLNKAGSIGCPWPGTDAAIYSEETGGFLGPYEHGEIAVKGPQVMKGYWNNDEETAQSLRDGWFFTGDIGYMDKDGFFYIVDRKKDVIIAGGYNIYPREIEEVLYEHEAVQEAVVAGIPDEYRGETVKAFVVLKDHVTITEKELDEYARSRLAPYKVPKVYEFRDELPKTAVGKILRRALVQEEKTGV

SEQ ID NO: 8361 - protein, 27 aa, Bacillus licheniformis
MEKLAKVLFFTAGVFVVIGLIYMIFYA

SEQ ID NO: 8362 - protein, 134 aa, Bacillus licheniformis
MKEFWENNLVEIAAYYSVSVLCLVIFLSVFELVTTYKNWEEIQKGNMAVAMATGGKILGIANVLQKSISQHNSLLQMMGWGLFGFILLLIGYFIFEFLTPRFKIDKEIENDNRAVGFISFVISVGLSFVVASGI

SEQ ID NO: 8363 - protein, 785 aa, Bacillus licheniformis
LQQKALSALEFHKVKEQLTEHAASSLGKEMLLELKPSRSLEEVKKLQEEVDEAGTVLRLKGSAPFGGLTDIRKALRRAEIGSILSPAELTEISGLLYAAKQMKHFLEGLFEDGVEIPYLHQYAEKLIPLSELERDINSCIDDHGEVLDHASETLRGIRTQLRTLESRIRDRLESMLRSSSAQKMLSDTIITIRNDRFVIPVKQEYRSSYGGIVHDQSSSGATLFIEPQAIVDMNNALRQAKVNEKQEIERILRVLTEKTAEHTNELFHDVKVLQTLDFIFAKAKYAKATKAVKPAVNADGYVRLIQARHPLLPLDEVVPNDIELGGEYTTIVITGPNTGGKTVTLKTLGLLTMMAQSGLHVPAEEGSETAVFDQVFADIGDEQSIEQSLSTFSSHMVNIVDILKDMTENSLVLFDELGAGTDPQEGAALAISILDEVCQTGARVIATTHYPELKAYGYNRENVINASVEFDIDTLSPTYKLLIGVPGRSNAFEISKRLGLPDYLIGRAKAEMTAEHNEVDTMIASLEDSKKRAEAELKETEAIRAEAEALHRDLQQQISEWQEKKDKLYEEAEQKAAEKVKAAMKEADDIIQSLRMIKEDHKAFKDHELIEAKKRLEEAVPSFEKAKKPAQKKTDKRELKPGDEVKVLTFGQKGTLLEKTGAAEWNVQIGILKMKVKEKDLEFLKSAPEPEKQKTIAAVKGKDYHVSLELDLRGERFENALHRVEKYLDDAVLAGYPRVSIIHGKGTGALRKGVQDLLKSHRNVKNSRFGEAGEGGSGVTIVELK

SEQ ID NO: 8364 - protein, 571 aa, Bacillus licheniformis
MHKKDIIKLLETIAIYMELKGDNPFKISAFRKAAAALEQDDRSLSEIDDMTSLSGIGKGTYAVIKEYMDTGASGTLERLKEEVPEGLVPLLKLPGLGGKKIAKLYQELGVCDAASLKEACEQQKVQGLAGFGKKTEEKILQALGEAGKRPERYPIAVALAVADIIEEQLEGLPGLIKFSRAGSLRRAKETVKDLDYIMAVTDPELVREGLLKLSNIKEVIAAGDTKVSLTFAFEYEISADFRLVTEEQFPTTLHHFTGSKDHNIKMRQLAKEKGERISEYGVETVETGEIKTFSSEKEFFAHFGLPFIPPELRETGREVEDYSVDIGLVSAEDIQGDLHMHSAWSDGAFSIREMAEACMAKGYRYMAITDHSQYLKVAGGLTPERLRMQAKEIDELNKEFTDFHIFKGVEMDILPDGTLDYDDELLAEMDLVIASIHSSFSQPQHVIMKRLETALLNQHVDIIAHPTGRLIGRRAGYEVDIDQLIELAKKTNTALELNANPARLDLRMEHLIKANAAGVTLVINTDAHNTAMLDDMKTGVTAARKGWTPKANVLNTRSFEEVQAFLSRHRS

SEQ ID NO: 8365 - protein, 178 aa, Bacillus licheniformis
MLDIIIIILLLSGLFIGLKRGFIRQFIRLVTFIAAIAVAATYYGDLAPKLGWIPSPDFTGGQAALAFVNGSLEGAYYNMIAFLILFILTIILLRVAASFLDAVASIPVLKQINQILGAVLGFAEIYLFVFVVLFIGTLLPIDVLQSMMAGSVMADLIIHKTPFLSNMLNNLLHQYGSL

SEQ ID NO: 8366 - protein, 50 aa, Bacillus licheniformis
LSDGQKTKTTVDIYGQQFTIVGDESKSHMRHVASIVDDKMREIKRKKSVS

SEQ ID NO: 8367 - protein, 313 aa, Bacillus licheniformis
VSHSVLKVPPSVIERMQSHYGPDITSLSVQGAVFQAKPQGCTITAYRSGKVLFQGKNAEKEAERWTADAETPAPKKPASKKSIPSVYQPPEGIGSMSVIGSDEVGTGDYFGPITVACVYADKAKLPLLKELGVKDSKNLKDPQIVQIARDLIKTVPYSLLVLRNEKYNEMQEKGMSQGKMKALLHNQAIGNLLKKLDGTRPEAILIDQFAEPAVYFKHLAGKTAVKERTYFSTKAEGIHLSVAAASIIARYSFLMEMDKLSKQAGITLPKGAGPLVDEAGAKLIKKHGEDALRVFTKLHFANTQKAKRIASKR

SEQ ID NO: 8368 - protein, 54 aa, Bacillus licheniformis
MAFECVLLCFWILLRYKAGIWMKKSGSFGILLIISALIISMYFMLNTKALIFRI

SEQ ID NO: 8369 - protein, 267 aa, Bacillus licheniformis
MSKIKWIITLTICTALAFSLFIFFNKANFTEASENKETGLFFARNYISHMMENETMSFNIFGLQKANAGVPLSGETVTSLAFDNNHIQISDYKVETGIRHKGYTLVNIIVDVRVSSDKPEKADQLLISFNGRDKEAFQIGKITLQNHHNVRSGDLSPAGQYTAGYPKPSLDVRLKNNLAKDISLEKITDLNGVMAYTFDKGTAIQAKQSKHIVVPSFHMTGEYDFYTVTPVLRYTAAGKRNQYSMPGVLYGALDSDEEKIERMLKRQ

SEQ ID NO: 8370 - protein, 46 aa, Bacillus licheniformis
MTQFSRILEKGIYSPHIKILAKEEVTKVHDQVLKALEDTYQAVLRG

SEQ ID NO: 8371 - protein, 99 aa, Bacillus licheniformis
MTISKKQRINASLALGLLFTLTFFTMLYATTAPVLPIADLAATYPQIPGWALTSISAILNAAGTVGAIAAVLGTFGLGAIASLVFSYAKKYGIRYAIAY

SEQ ID NO: 8372 - protein, 480 aa, Bacillus licheniformis
MNNKYLIYSKILLTNDIRKFNTKSKWLALFVLILSFVVFPLIIGSFAGYIIKNLVIIHLSFFLFILTVNIDKSIFRVMFSSDKKQMAILGIKLDQFILGKDISKFYSSFLSLISFYVGSSIVYYLIHQSLEEVFAIAVIGLLSAILGYLLRLHFIRLLVLPKFINVSSIIGFFTNGILILWIFFILKYNLLFLNINNMRIFSISIPIMVSLTILLIIVWYKSLRNLSIFNDHLNSKTDTNLKKSRESRSLLYYELILLYRNPPVRWSVLLFILSLSAGLLTIILYGFNTDRFADTGISNEFSFMFSVLFPLVFISIMIQSLVSFDIDGLIIPLNQHKPNFIKNKIKAKTKISVLAHVLFVLIYAAISNFYIKPDHFIALSIILLMIAVTLGLSCLTSTILFPYFKWDYIYQVPSTLSKIFLNLVFGLLIGLAIVSTYNKVLYVVIFITLLCIITLLHSINKQIWKSTINKNYISIKSLFE

SEQ ID NO: 8373 - protein, 230 aa, Bacillus licheniformis
MLKLQNISKEYPQSNFSMKNLEFACGRNQIIGLLGKNGAGKTTLLEIIAGLIPPDSGEVVVDGHLTNYLEKIGYLEDDPKLFENLTCYELIKYQSLLIEKPLSQEQIIETLDMFSLKEQKDQMASSLSRGMRQRMSFILSTLHQPDVILLDEPFTGLDPKNMADMKKILINIRNQNRIIILSTHILQFAADLCDEILFINNGNIIHTEKKLAGETFNEASLEKKFLEYLC

SEQ ID NO: 8374 - protein, 79 aa, Bacillus licheniformis
VFLNGYFSGAIFFSYEKSLGFWKSLQYLLFHGPFEILALLAFYVISSDISSRFLRFLKKSEINLMIKPKVKESQYMIVQ

SEQ ID NO: 8375 - protein, 182 aa, Bacillus licheniformis
MKKTKFNLICICLLSGAAALCVSILKMNEIDASLHELNEDEYGNLITISKWIGITIAVIGEAIKPLLELLFFTLIIWLAIMIFGAKDSFKNIFSKGVLSYYFNLVGSVLVIVFYLFGLKDAESLFSIPFLRNLNIFSLISLFFWCYLCLEKKENSLKIKYSFSFFILFLFSIAISIFSDILA

SEQ ID NO: 8376 - protein, 804 aa, Bacillus licheniformis
MFVSYKWLQEYVNLDGMTPEILAEKITRSGIEVEGIEYKGEGIKGVVIGHVLEREQHPNADKLNKCLVDIGEEEPVQIICGAPNVDKGQKVAVATVGAVLPGNFKIKKAKLRGEASNGMICSLQELGIQGKLVPKEYAEGIFVFPGDAETGADALQSLALDDAVLELGLTPNRADAMNMLGVAYEVAAILGREVKLPETAYQAGAEKAADYISVKIEDPEANPLYAAKIIKDVKIGPSPLWMQTKLINAGIRPHNNVVDVTNFVLLEYGQPLHAFDYDRFGSKEVVIRKAYENETITTLDEQERTLTTEHLVITNGSLPQAVAGVMGGAESEVREDTATVLLEAAYFNGQTVRKASKDLGLRSESSVRFEKGIDPARVRLAAERAADLISRYAGGTVLEGTVEENHLDIKENVIRLSVDKVTKVLGMSISKEEMVNIFERLGFAVEDAERELVVTVPSRRGDIAIEEDLIEEVARLYGYDNIPSTLPEVTGFAGGLTPYQDKRRKVRRFLEGAGLSQAITYSLTNDKKATAYALEKSFKTILSLPMSEERSVLRHSLLPNLLDSVAYNLARQADSAAFYEIGSVFLKAEEHTKPVEKEHVAGAVTGLWHKNLWQGEKKPVDFFVVKGIVEGLLEKLGITEGIEFAQSERKELHPGRTANILHNGSLVGFIGQLHPSVEKELDLSDTYVFELDLHELLRLDVPEITYTPIPKYPSVTRDIALVVDKQTTAGQLEDVIKTAGGKWLKEVHVFDVYEGEHMEEGKKSVAFSLQYLNPEQTLTEEEVTKVHDQVLKALEDKYQAVLRG

SEQ ID NO: 8377 - protein, 344 aa, Bacillus licheniformis
MQEELKRLEKEAVEKVEAAGSLKEVNDVRVAYLGKKGPITEVLRGMGKLSAEERPKMGALANEVREKIAAAIAEKNARLEEEEVKRKLKEQTIDVTLPGSPVKTGARHPLTIVIEEIEDLFISMGYSVEEGPEVETDYYNFEALNLPKEHPARDMQDSFYITEDTLMRTQTSPVQTRTMEKHKGKGPVKIICPGKVYRRDNDDATHSHQFMQIEGLCVDRDISMSDLKGTLETVAKKMFGEEREIRLRPSFFPFTEPSVEVDVSCFKCGGKGCSVCKQTGWIEILGAGMVHPNVLEMAGFDSKQYQGFAFGMGVERIAMLKYGIDDIRHFYTNDVRFLSQFKQA

SEQ ID NO: 8378 - protein, 38 aa, Bacillus licheniformis
MCKGEPDLFRYANEVSSKAFLLCFKKGWYHGHDSSLSL

SEQ ID NO: 8379 - protein, 38 aa, Bacillus licheniformis
VTTQEVKRFPACHKNACSLRHFLPEWRHVKKRSLYHCF

SEQ ID NO: 8380 - protein, 248 aa, Bacillus licheniformis
LKRIESAKNQKVKDWKKLHAKKERTKTNTFLIEGEHLVEEALKTPGVVKEIMVADEADFPAMIDESVARYVLSADAFSAIAETETPQAVAAVCRMPESGPFQYEKLLLADAVQDPGNLGTIIRTADAAGIDAVVIGQGTVDPYNAKTLRSAQGSHFHIPILKRELSELIEELKGKSVPVYGTALQGAVPFREAEPSQSFALLIGNEGSGVDPALLAQTDQNLYVPIYGKAESLNVAAAAAVLLYHLRG

SEQ ID NO: 8381 - protein, 70 aa, Bacillus licheniformis
MDLNLRHAVIANVSGNSQEELEHTIVDAIQSGEEKMLPGLGVLFEVIWQHATESDKTEMLETLEQGLKAK

SEQ ID NO: 8382 - protein, 598 aa, Bacillus licheniformis
MNAITIVIASICILAIAYRLYGTFMMVKVLKVDDDKPTPAHLQKDGKDYVPTNKWVSFGHHFAAIAAAGPLVGPILAAQFGYLPGLLWLLIGAVIGGAVHDIVVLFASMRRKGKSLSEVAKEELGPVAGFCTGLAMLFIITITMAGLSMVVLHALERNPWGMFAVAITIPIAMGVGLFYKKTGNLKLASTGGFILLMAGVFIGPSIAETPLGDALTLDTKTLAVALPVYAFFAAALPVWLLLAPRDYLSSFMKIGVFIALIAGVFVVNPAIPFPAFTEFTGGGGPVSPGPVWPFISITIACGAISGFHAFVGSGTTPKMLDKWSDMKFVGFGAMLVECLVGIMALIAATALQPGDYFAINSSPEVFRTLGMNVVHLPELSREIGLDLEGRTGGAVTLAVGMAYIFTDIPFFSHLASYFFQFVIMFEAVFILTAIDAGTRVARYLIQDFFGEVYKPLKKTDWLPGSVAASALACFMWGYLLYSGDISSIWALFGVSNQLMASVGLIIGATVILKIADKRRYMLTCLIPLAYLYVTVNYAGYWMIKNVYFNAEAAGFSVLNGILSIIMLVLGLVIMAAAIKKWTEIWRDPALRMEPSIPG

SEQ ID NO: 8383 - protein, 112 aa, Bacillus licheniformis
MKTFFSAAYCFLMYAFLAYLWLLFITAILDRPRFLNHSLLEAGVILIGTILFFSLSHHFSASPCQNKCQSNRGDRRFLSSDGRSFFYRSVMLTEKRRISDDTRQLRLKKGSR

SEQ ID NO: 8384 - protein, 72 aa, Bacillus licheniformis
VINRSQRYAKNAYIKKQYAAEKNVFINPPPVLTYSSAYLLKPFFHLKKPASSGRFFNHCFFILITFQESFGR

SEQ ID NO: 8385 - protein, 502 aa, Bacillus licheniformis
MTVHKAKMTIDKEYKVAEIDKRIYGSFIEHLGRAVYEGIYEPDHPEADESGFRKDVIKLVRELKVPFIRYPGGNFVSGYNWEDGVGPVEQRPTRLDLAWATTEPNLIGTNEFMDWAKLVGAEVNMAVNLGTRGIDAARNLVEYCNHPSGSYYSDLRKSHGYKEPHKIKTWCLGNEMDGPWQIGHKTAAEYGRLAAEAAKVMKWTDPSIELVACGSSGSGMPTFIDWETTVLDHTYEHVEYISLHSYYGNRDNDLPNYLARSLDMDHFIKTVISVCDYMKAKKKSKKTIHLSYDEWNVWYHSNEKDKEAERWAKAPHLLEDIYNFEDALLVGCMLITMLKHADRVKIACLAQLVNVIAPIMTDKGGEAWRQTIFYPFMHASVYGRGTVLQTAVSSPKYDAKDFTDVPYLESVSVFNEEAEELTVFAVNRATDAGLEMEADMRSFEGYSVSEHIVLEHEDHKATNEKDRNNVVPHSGGDAKVCDGRLTAHLPKLSWNVIRMKKQ

SEQ ID NO: 8386 - protein, 280 aa, Bacillus licheniformis
MRPAGGLNIAKVALFLLFAILSFLFVFPLFCLVLGSLKPSSELLRFGLNLKLSPEILSLDNYTYLFNGGSIYFQWFSNSLILVVISTVLTLLFSSMVGYGLAVYDFKGKNLLFVAVLLIMMVPIEILMLPLFKMTVSLHIVDTYAGVILPFIVSPVAVFFFRQYALGLPRDLLDSARMDGCTEFGIYFRIMAPLMKPAFGAMIILQSLNSWNNFLWPLIVLRSKEMFTLPIGLSALLSPYGNNYDMLISGSVLAILPVILIFLFFQKYFISGLTAGGIKG

SEQ ID NO: 8387 - protein, 314 aa, Bacillus licheniformis
LKTVKTDTVHSFPPVSRKRKIRRLLYSAKAAPYIFTAPFVLSFCIFFLYPLISVVIMSFQSILPGEVRFIGTENYKALNNPTFYTALFNTVKYTFWTLLILIPVPLILAVFLDSKLVKFKNVFKSALFIPALTSTIVAGIIFRLIFGEMDTSLANSILAKLGGSPYNWLNNEHTGMFLMVMLASWRWMGINVLYFLAGLQNVPKELYEAAEIDGAGTFKKFYHITLPFLKPVSVYVLTISIIGGFRMFEESYVLWQNNSPGNIGLTMVGYIYQQGLAYNNMGYGSALGIVLLIIIFICSLISLKLSGSFKKEGY

SEQ ID NO: 8388 - protein, 434 aa, Bacillus licheniformis
VKRFLSSIFMVTVAVCLLLSGCKASPASDQADGTELTFWTFNGLHEQFYAEMVKEWNKKYPERKIKLNTVVYPYGQMHDNLSISLLAGKGVPDIADVELGRYSNFLKGSDIPLTDLTPLVEDERDKFVEARLTLYSKNGKLYGLDTHVGTTVMYYNMEMMNKAGVDPDDIKTWEDYREAGKKVVKALGKPMTTIETTDPNSFLPLVSQQGSGYFDEQGRLTLNNETNVKTLEFLKTLIEKDKIAVTTPGGNHHSEEYYGFMNQGGAASVLMPIWYMGRFLDYMPDLKGKIAIRPLPAWEEGGDRSAGMGGTATVIPKQAKQVDLAKDFLKFAKASKEGNTKLWTVLGFDPLRWDVWDSDELKKTNQYTEYFQNGQHIFSVLLDIKDEINPLYLTEDYAKTSDLVNRNILYEALKTKSKTPKEALDKAAAEVKGQ

SEQ ID NO: 8389 - protein, 401 aa, Bacillus licheniformis
MNDLISYVKKTLGACECGTVHHPLTVEKIAIGDNAVEQELPAFVKSASYKKAAVIYDETTGRLAGKRIASLLEETAETVPVLLEANEAGDVTADEQTLVSALIGVPIDADVLIAAGAGTIHDIVRFCAYQRGIPFISVPTAPSVDGFTSAGAPLILKGKKQTVQTTAPIALFADLELLCQAPQNMVAAGFGDMLGKVTSLADWEISRLLAGEPYCPAASRLTREALDQCLDRKDDIAAKMRDGIEKLMESLILSGLVMLVLDHSRPASGGEHHLSHYLEMKALENNKRQVLHGAKVGCSAIMLTDIYRSLIGASLGDQHAEQAIRSVYEKLPDGKKMAEWMRRIGGPVSFKELDVEEELVREALAYAHQLRDRYTGLKIINQYGLLPGLLGKGPGVKGVKM

SEQ ID NO: 8390 - protein, 228 aa, Bacillus licheniformis
VLESLKEQVLKANLQLEEYRLVTFTWGNVSGIDRENKLVVIKPSGVKYSDLKAEDLVVLNMDGEIVEGDLKPSSDTPTHLYLYRQFQSIGGIVHTHSPWATSWAQSGKDIPSLGTTHADYYHGDIPCTREMDPDEIRSQYELNTGKVIVETFRHLDPLAVPAVLVNNHGPFCWGKDALTAVHNAVVLEEVAKMAYRSLMLNPSLKRIKSALQDKHYFRKHGADAYYGQ

SEQ ID NO: 8391 - protein, 552 aa, Bacillus licheniformis
LSGRAVLVDVRTGEEIATAVKEYTHGVIDRELPVSKRKLPRDWALQHPADYIEVLEETIPSLLKQSKADPKEIIGIGIDFTACTILPVDENGTPLCMREEYASEPHSYVKLWKHHAAQEQANRLNQIAEERNEPFLQTYGGKISSEWLVPKVMQIAEEAPDIYDAAAEIMEAADWIVYMLCGTRKRNNCTAGYKAIWNNKSGYPSDDFFASLHPKLKNIVREKLTEDIYSVGEKAGGLTEEMAGKTGLLAGTAVAVANVDAHVSVPAVGITEPGKMLMIMGTSTCHMLLGEDVRMVPGMCGVVEDGILPGYVGYEAGQSCVGDHFHWLIQHFVPEAYLKEAEAEGISIYELLSQKAGSLQIGESGLLALDWWNGNRSTLVDADLTGMLLGMTLATKPEEIYRALVEATACGTRIIIETFRQSGVPIEELYAAGGIAEKNPFIMQVYADVTNMEIKISGSPQAPALGSAIFGALAAGSMNGGYDHIEEAVAHMGKIKDKTYKPIPENVSLYDQLYAEYKELYTYFGKQNNVMKRLKKLKNIQSLSSDPGKAMA

SEQ ID NO: 8392 - protein, 493 aa, Bacillus licheniformis
LIQAKTHVFWFVTGSQHLYGEEAVQEVEEHSKMICNGLNDGDLRFQVEYKAVATSLDGVRKLFEEANRDDECAGIITWMHTFSPAKMWIPGLSELNKPLLHFHTQFNRDIPWDKIDMDFMNINQSAHGDREYGFIGARLGIPRKVIAGYWEDREVKRSIDKWMSAAVAYIESRHIKVARFGDNMRNVAVTEGDKIEAQIQLGWSVDGYGIGDLVTEINAVSEQSLSELISEYEELYEWPEGEAARESVKEQARIELGLKRFLSSGGYTAFTTTFEDLHGMKQLPGLAVQRLMAEGYGFGGEGDWKTAALVRMMKMMAGGKETSFMEDYTYHFEPGNEMILGSHMLEVCPSIAEHKPRIEVHPLSMGAKDDPARLVFDGIAGPAVNVSLIDLGGRFRLVINEVGAVKVPHDMPNLPVARVLWKPQPSLRTSAEAWILAGGAHHTCLSYQLTAEQMLDWAEMSGIEAVLINRDTTILNLRNELKWSEAAYRLRKF

SEQ ID NO: 8393 - protein, 320 aa, Bacillus licheniformis
MKNVLRKMSLAALIFGLLLSFSMPESGKAAFWDTKGDNFIHDPSIIKEGNTWYTFGTGLGTGLRVIKSTDGRNWSAAPSIFPTPLSWWKMYVPNHEPHQWAPDISYYNGRYWLYYSVSSFGSNTSAIGLASTDRISSGQWRDDGLVIRSTSGDQFNAIDPDLVIDKDGKPWLSFGSFWSGIKLTRLDKNTMKPTGSLYSIASRPNNGGAVEAPNITYKDGYYYLFVSFDSCCKGVDSTYKIAYGRSTSITGPYYDKSGKNMMNGGGTILDSGNDRWKGPGHQDVLNNSILVRHAYDALDNGVSKLLINDLYWDSQGWPTY

SEQ ID NO: 8394 - protein, 36 aa, Bacillus licheniformis
LFFSLQEQECELNEKCVAENVFGGLDIRTAAVFFDA

SEQ ID NO: 8395 - protein, 361 aa, Bacillus licheniformis
MAKLDETLTMLKELTDAKGIPANEKEPRQVMKSYIEPFADEVTTDRLGSLIAKKTGQADGPKIMIAGHLDEVGFMVTRIDDRGYLRFQTVGGWWSQVMLAQRVTVVTKKGDITGIIGSKPPHVLSQEARKKSVDIKDMFIDIGASSREEAMEWGVLPGDQVVPYFEFTVMNNEKMLLAKAWDNRIGCAIAIDVLKNLKGADHPNVVYGVGTVQEEVGLRGAKTAAHTIKPDIAFGVDVGIAGDTPGITEKESTSKMGKGPQIILYDASMVSHKGLRDFVTNVADEAGIPYQFDALSGGGTDSGSIHLTANGVPALSITIATRYIHTHAAMLHRDDYEHAVKLITEVIKRLDKETVQNITFD

SEQ ID NO: 8396 - protein, 133 aa, Bacillus licheniformis
MIVIILRLALLALLVYVVYRAVQFLGSPDRRLKSAQAKKHFYFLDEQKNTRKNLKLTFKGVLFEGEKHIPSKDHPLFIHTIFVWTEAPEEKLSSFTDEDFAELEENIKEHYPDCKIDWDSNIQKWRNKKAEEQ

SEQ ID NO: 8397 - protein, 87 aa, Bacillus licheniformis
LTLIWIYMILINGYGFFLMKADKQKAVRGKWRVSERRIWLVAAAFGSAGVWFGMMRFRHKTKHLSFRLGIPFFLGVQAVLTGFYMMN

SEQ ID NO: 8398 - protein, 119 aa, Bacillus licheniformis
MPRVKGGTVTRKRRKKVLKLAKGYFGSKHTLYKVANQQVMKSGNYAFRDRRQKKRDFRKLWITRINAAARMNGLSYSRLMHGLKLSGIEVNRKMLADLAVNDLNAFNQLADAAKAQLNK

SEQ ID NO: 8399 - protein, 66 aa, Bacillus licheniformis
MPKMKTHRGSAKRFKKTGSGKLKRSHAYTSHLFANKSQKQKRKLRKSAVVSAGDFKRIKQQLANIK

SEQ ID NO: 8400 - protein, 186 aa, Bacillus licheniformis
MSCEINSKILWRWLIISKDQLVNEGIRAREVRLIGQNGDQLGIKSRQEALEIAGRANLDLVLVAANAKPPVCRIMDYGKYRFEQQKKEKEARKNQKIINLKEVRLSPGIEEHDFNTKLRNAIKFLQKGDKVKASIRFKGRAITHKEIGQRVLDRFSEACAEVATVETKPKMDGRSMFLVLAPKTEK

SEQ ID NO: 8401 - protein, 191 aa, Bacillus licheniformis
MILGIAFLKIGGFSYEDYKSGGDIIKFFLEPATIAFAIPLYKQADKLKKYWLQILGAIIAGSVCSVAVVYLIANALHLDGAVMKSMLPQAATTAIALPLSKGIGGIQDITAFAVIFNAVIVYALGALFLKIFKVQHPIAKGLALGTSGHALGVAVGIEMGEVEAAMASIAVVVVGVVTVFVVPLCVQMIGG

SEQ ID NO: 8402 - protein, 137 aa, Bacillus licheniformis
MKGKKEYGFLTQAFIFAVMMFISNGIAAVLPIPIPPSVIGLVLLFALLCTKVLKLEQVESLGTALTSLIGFLFVPSGISVMNSLGVMEKYGLPIVLVIFLATVILLAATGLFSQFILSVGKKDRQDTRVEPAKKTAS

SEQ ID NO: 8403 - protein, 518 aa, Bacillus licheniformis
MDHSRGGRFVPSGEFASLARRGLMPEDASIAAGAPRFADYPFKLGVASGDPHPDGFVIWTRLAPDPLAEDGLGGMPDKAVPVQWEVAEDEHFHKVVKRGTSSALAELAHSVHVEVHGLKPGSYYWYRFKAGREISRTGRTKTAPAPHADIKGMSFALASCQAWYHGYFTAYRHMAEDHPDVVFFLGDYIYEYAINAKNLFRDVTLSAAHNAKTVTLSQYRLRYSLFKTDPDLQAIHALAPWVVTMDDHEVENNYAGIHSQYNTFPDDFLRQRAAAYQAFYENIPIRSTSIPKGPDMLMYRRFRYGNLAEFNVLDTRQYRNNFPANEAERLEPSRSILGFDQERWLFHGLSRSDTIWNFLVQQVVLAQIDRDTGPGVEYSTDQWDGFPACRDRLFSAYKAYGIQNPVVLTGDIHRHAAADLKADFDDAGSATIGTELITTSISSDADGSETDSLAPIWLGNPHVKLYNAQRGYVRCRLTPRQLEADFQVLPYITRPGAPASTYAKFAVEAGRPGLQRMF

SEQ ID NO: 8404 - protein, 240 aa, Bacillus licheniformis
MLKVLIVDDEMFARDELRYLLEQTEEVDAIDEAEHIEEAFDKMADRKPDILFLDIDLSGENGFDIAQRLKKMSAPPAVVFATAYDEYALKAFEVDAIDYLTKPFDEERIRQTIHKYKRMRPGKQEERQLAGHHRLALSIDESIVVLDPDEIVYAGLEGGHVTVKTFDQAYTVHDTLVVLEQKLSQTALIRVHRSFLANMDHIKQVKPWFNSTYNLLMKDGSTIPVSRTYAKELKKRLHMV

SEQ ID NO: 8405 - protein, 594 aa, Bacillus licheniformis
MVQLMIMMLERVGIIVILGFMLAHMKVFRQHLQHPEGYKGKGVLIFIFSLFSIISNYTGIEIREREILNNDWIFAIDPSSSIANTRILGVEIGGLIGGPFVGAGVGLLSGIHRFSLGGTTALSCAVSSLLAGVIAGYIGSFFRNRHQMVTPRVAALAGICMEGLQMLMILVLAKPQAEALALVQMIGIPMMIVNGTGSFIFLSIIQSIIRKEEQARAVQTHKVFSIADQTLPFFRRGLNEDSCKSAALIIHRMTGTDAVSITDRENILAHVGDGADHHIPSKNLITGLSKKVIQTGKVMKVKSRDEIECAHRSCPLQAAIVLPLFSNRETIGTLKLYFKHPSGLNRVTEELAEGLAMLFSTQLELGEAELQSKLLKDAEIKALQAQVNPHFLFNAIHTISALCRTDPEKTRKLLLQLSVYFRSNLQGARQLMIPLSKELNHLEAYLSLEQARFPGKYHIDFHIEDGLENMEIPPFILQLLVENALRHAFPRKQKVCTVKVSAVRERDGVLMKVSDNGRGINPEMLGQLGQAPAPSKEGNGTALYNVNQRLTGLFGHQAALQIASELDKGTEISFKIPFQTEREGNRDAQGINRG

SEQ ID NO: 8406 - protein, 75 aa, Bacillus licheniformis
VKKRWVFWWICNILWTAVFVIGAAVVWLRDVDGAGVAQTPELKLIAFIVLLIAFIFPFIIQVVWLIVNFKVGSSK

SEQ ID NO: 8407 - protein, 270 aa, Bacillus licheniformis
MKAVFFDLDDTLLWDEKSVSTAFSKTCLKAEEKYGIHAEEFEAAVREAARKLYMSYETYPYTVMIGINPFEGLWSNFSEPISEGFQKLNKIVPEYRRNAWTNGLKAFGIDDPAFGEELGEYFAAVRRKSPFVYEETFAVLDELKGKVELLLLTNGDPSLQKEKLAGVPELAPYFNEIVISGEFGKGKPDPSIFEHCLTLLGMTKYDAVMVGDNLNTDILGASRAGIQTVWVNRKGKKNETDVAPDHEISHLSELFDILRGQAADKLSKKA

SEQ ID NO: 8408 - protein, 643 aa, Bacillus licheniformis
MSDMVKIKFPDGAVKEFAKATTTEDIAALISPGLKKKAIAGKLNGKEIDLRAPILEDGAIEIITEGSEEALEIMRHSTAHLMAQAIKRLYKKVKLGVGPVIENGFYYDVDLEEALTPEDLPKIEKEMKKIVGENLPIVRKEVSREEARALFAEIGDDLKLELLDAIPEGETVSIYEQGEFFDLCRGVHVPSTGKIKEFKLLSLAGAYWRGDSNNKMLQRIYGTAFFKKAELEEHLRLLEEAKERDHRKLGKELKLFANSQKVGQGLPLWLPKGATIRRVIERYIVDKELALGYEHVYTPVLGSKDLYETSGHWDHYQDGMFPPMEMDNETLVLRPMNCPHHMMIYKNDIHSYRELPIRIAELGTMHRYEMSGALSGLQRVRGMTLNDAHIFVRPDQIKDEFIRTVRLIQDVYEDFGLEEYSFRLSYRDPEDTEKYYDDDEMWNKAQSMLKEAMDEIGHDYYEAEGEAAFYGPKLDVQVKTAIGKEETLSTVQLDFLLPEKFDLTYVGEDGKPHRPVVIHRGVVSTMERFVAFLIEEHKGALPTWLAPVQFQVIPVSPSVHLDYAKKVQERLQREGLRVEVDTRDEKIGYKIREAQMQKIPYMLVVGDQEVENEAVNVRKYGEQKSETVAIADFIKKAVAEAKK

SEQ ID NO: 8409 - protein, 280 aa, Bacillus licheniformis
MLEITFEDDYDTAAFLHLLRNADANRHIRIHEAPGKIGIEKTHSSVSIQAYIEPVLTRFFTECKEDEYMLSVIEGDYYFLDRDEQQQILQLAHSIMEGELEGLPLNKDDTPREHYIIQELQAICLEENVFSIRSFMTFRLAKYYERLRSYVEAAIDEYKMEQEYQTFIQSLRDYVMSKEPMLDHVHIVHDGYFVLWELKYISEREQKKYIDRRFVREHPMYIDSHLLAPLVSIAPEKIDLYTEDREHAMVQTIQNIFQERVRILPLGAFHPRENILEEHS

SEQ ID NO: 8410 - protein, 210 aa, Bacillus licheniformis
MRKRTLAKWTVIAVIAAAGLWLNAKYLNLSPAHIREGVLSFGIFAPLIYIGLLMIRPFLLLPASVFAVSGGLAFGPLFGSLYSFIGAAGGAFLSFALAYRLGGYFQHMPLKLDSLRTLLRKNGFFCILLLRLAPIHFDAVSYAAGVSKVKPLSFALATAAGIIPGTIILNVLGSSLLTGDIIAIAVTAAIYLIFITVPLLFRKKVQALLD

SEQ ID NO: 8411 - protein, 311 aa, Bacillus licheniformis
MMEPIKRALQGVTTRPDFKKRLEDMKEKVLSDKDVQAFLNSRQSEVDQGMIDRSLNKLYEYTQQSKACQDCPGLKECKNLIQGYHPKLVLNGKTIDVQYDRCPEKKKADERERQRSLIKSIYIQQDLLNATFADIDGDDPSRLKVLQLVTGFLHDYNETGKGKGIYVYGKFGVGKTFMLAAIANELAAKDHPSILVYVPEFVRELKNAIHDQSLEEKLDMVKSTPILMLDDIGAESMSSWVRDEVLGAILQHRMSQQLPTFFSSNFDPDELKHHFTYSQRGEKEEVKAARLMERVLYLATPVRLDGKNRRQ

SEQ ID NO: 8412 - protein, 474 aa, Bacillus licheniformis
MSNYWKDLLPVDPYVVKSSGLLQDLDRQIVTLLYQPLIGSFSFSLFLTLWGELEQNRVWGKSSTHRQLMAAMQTSLKTIHSEKEKLEGIGLLKTYIKETEHERLFIYELIPPLRPDEFFQDGMLNVFLYNRVGKARFQQLKEYFSHPSVPEEARDITRSFNEVFASVQPSEWKMSDDMIEAMELREDHEWMKEGNSQPAAVTDDAFDFQLFLAGLSDTLIPRKALTDQVKETIKKLAFLYGIEPLQMQNVVMSAVDEHDMITTEALRKAASDWYQIERGGPLPELVDKVQPMNLREQPNQQSSTNAKEDNLIALLEQVSPRKLLQDIGGGAEPSKADLKIIEEIMLDQKLEPGVINVLIYYVMLKTDMKLSKNYTQKIASHWARKKVRTVREAMKLAKEENRQYLEWAEGKKKTSRNKKVIREEKLPDWLRESDDADSKPLETEQADPATREGFDQQKQKLLEEVKKLKNHSAL

SEQ ID NO: 8413 - protein, 152 aa, Bacillus licheniformis
MKCPACQHNGTRVLDSRPVDEGRSIRRRRECESCNYRFTTFEKVEEIPLIVVKKEGIREEFSREKMLRGLIKACEKRPVALKQLEDICFEIDKELRNQGVSEVKSDMIGEMVMDRLAKIDEVAYVRFASVYRQFKDINVFIDELKDLIKKER

SEQ ID NO: 8414 - protein, 130 aa, Bacillus licheniformis
MSLFQNIQRFFSTHAETSDRHPSEELKSRYYKAASKEALNAVKEVLEGLDGCKVTSVSEERGEISAEVKKTRKAFVVATVVSIRPFDTAVDFNVSTETFLPTDFGYSRGLVSTLYSELDGKLQESVHSNN

SEQ ID NO: 8415 - protein, 128 aa, Bacillus licheniformis
METMGRHVISELWGCDFDKLNDMDFIEKTFVNAALKSGAEVREVAFHKFAPQGVSGVVIISESHLTIHSFPEHGYASIDVYTCGDLDPNVAADYIAEELRAETRENIEIPRGMGPVQVKQAKAKAQAL

SEQ ID NO: 8416 - protein, 80 aa, Bacillus licheniformis
MKVKVAINGFGRIGRMVFRKAMLDEQIDIAAINASYPPETLAHLIKYDTNHGRYELDVKAGEDCLFVNGKKGHADQSEGP

SEQ ID NO: 8417 - protein, 501 aa, Bacillus licheniformis
VSSRKDNHETDQKRIFYHFFFGCGRHLFFIRYSRCFCGKQRLSETDDQAGKLLRLKHYACRESRQRTANNKTDERKKTERWRLDTSDGKQFKIRNMDSGKIIIPAHYALSDNNPAVLYYDNSRKEELWNIIGADKDGNGDFITYKIVSAQNNSLALTLDGSGVKLAKYTGSSVQKWKLPSDGLEGFAGYAKETNGKQKTGTTGGLLGKVVYVNNLGELKANIEDSTPRTIVVSSNIGASAKTVLTVGANKTIIGSYEKHKLNNIYFKTKADSGNVIFKNLVIAHDASINENNDIPVYITDSRNYWIDHVTFQGHSYTANGHDLDKLLYVGAKADYVTLSHSTFTDHRYGLILGWPQDDKQYHSIYNGYPRMTISHSRFENLYVRAPGLMRYGYYHVKNNYINNYHLGFTITTLAKIYSEANYFGTGNEKGILDDYGDGAFKDVGSYPAIKGQKSPETSWTPSSNYSYRTMKAGNAKAFAKRYAGAQRTALYYANYSQFKKD

SEQ ID NO: 8418 - protein, 201 aa, Bacillus licheniformis
LTLVIGLTGGIASGKSTVAQMFQQCGITVVDADVIAKEAVEQGMPAYQKIAETFGEGVLLETGDIDRRKLGEIVFANEEKRLQLNAIVHPEVRKMMIKQRDEAIRAGERFVVLDIPLLYESGLEHLTDKVIVVWVPMELQLERLMKRNRLNKDEALNRIHAQQSLDEKKKRADAVIDNSGSLKDTEAQLHQLLDTWSNIEK

SEQ ID NO: 8419 - protein, 210 aa, Bacillus licheniformis
MMFASFLLLAFAVSLDSFSVGFTYGLRKMKIPFKAILIIAFCSGAVMYIAMMIGTLLAKFLPVVVTERLGAVILMGIGAWVLYQFFRPEKEQDLVFSEKTLINLELKSLGIVIHILRKPTSADIDKSGIITGIEAFLLGFALSIDAFGAGIGAAALGFSPVPMSITVGIMSSLFVFCGIQAGRFLSKWNWMDKLTFLPGILLIMIGIWKL

SEQ ID NO: 8420 - protein, 275 aa, Bacillus licheniformis
VPELPEVETVRRTLAGLVRGKTIDAVDVRWTKIIKRPEEPEEFARLLAGQTIQSIGRRGKFLLFHLDDCVMVSHLRMEGKYGLHQNDEPLDKHVHVIFRFTDGSELRYRDVRKFGTMHLFKPGEELTELPLRQLGPEPFSSEFTADYLRERLKKTNRSVKTALLDQRTVVGLGNIYVDEALFRAGIHPEATANKLTKKQTVLLHKEIIQTLKEAVEAGGSTVRSYINSQGEIGMFQLKLFVYGRKDEPCKKCGSPIEKTVVGGRGTHFCIKCQKK

SEQ ID NO: 8421 - protein, 879 aa, Bacillus licheniformis
MTERKKLVLVDGNSLAYRAFFALPLLSNEKGIHTNAVYGFTTILMKMLEEEKPTHMLVAFDAGKTTFRHKTFKEYKGGRQKTPPELSEQLPFIRELLDAYRISRYELENYEADDIIGTLAKSAEKDGFEVKIFSGDKDLTQLATEGTTVAITKKGITDVEYYTPEHVREKYGLTPEQIIDMKGLMGDSSDNIPGVPGVGEKTAIKLLKQFHTVEELLSSIDEVSGKKLKEKLEEFKEQALMSKELATITTEAPLEVSLDSLGYEGFDREAVVKIFKDLGFHSLLERIGEEAGEKEEEQLEEIDVMIKTDITDDLFASPASLVVEQLGDNYHEAPILGFSIVNEHGAFFIPEETAVQSDRFKEWAEDESKKKWVFDAKRAAVALRWRGIELKGAEFDVLLAAYIINPGHSYDDVASVAKEHQLHIVSADEAVYGKGAKQAVPDEKELADHLARKAKAISLLREKLLDELEENEQLELFEALEMPLAHILGEMESIGVQVDVDRLKKMGEELSAKLAEYEKKIHESAGETFNINSPKQLGVILFEKLGLPVVKKTKTGYSTSADVLEKLRDKHVIIEDILHYRQIGKLQSTYVEGLLKVIKKDSHKVHTRFNQALTQTGRLSSTDPNLQNIPIRLEEGRKIRQAFVPSQKGWLIFAADYSQIELRVLAHISKDKNLIEAFTNDMDVHTKTAMDVFHVSEEEVTPAMRRQAKAVNFGIVYGISDYGLSQNLGITRKEAAAFIERYFHSFQGVKEYMEETVQEAKQRGYVTTLLSRRRYIPELTSRNFNLRSFAERTAMNTPIQGSAADIIKKAMIDMADKLKEKNLQAKLLLQVHDELIFEAPEDEIKVLEKLVPEVMEHALELDVPLKVDCASGPSWYDAK

SEQ ID NO: 8422 - protein, 581 aa, Bacillus licheniformis
MIKFRTRLLAALLTLLILVFASLGFLLVHLFHSSYDAKLSSHIEKEAALVASLANGENMKSSEQGAILEKASRELDSRVSLIDTKGQVLFHFGGRAEEQSVIKEALESDLNGEGGGFRINPDDESVYRYVQPLKDDGNVNGYILISTPVDSLQDINQKIWILLGVSLGTAFLIIAGLGARITSQYTNPIESATQVAIELAKGNYKARTFNEDETMLSQSINMLAQNLQDMTRAQEMQRDRLQTVIENIDSGLILIDGKGYIHLVNRAYQKQFHVEADQLLYHFYHEVLEHEEIINLIEEIFMTETKVRKMFKLPIKIERRYFEVDGVPIIGINDEWKGIVLVFHDMTERKQLEEMRKDFVANVSHELKTPITSIKGFTETLLDGAMNERETLLQFLSIILKESSRLQTLIQDLLDLSKIEQQNFTLNIQNCNIGEILAEIEMLLKNKAEEKGITLTLEKPDKPAVASGDPHRLKQIFLNLVNNALTYTPEDGSVTISADVLEDAVQVKVRDTGIGIKQSEIPRIFERFYRIDKDRSRNSGGTGLGLAIVKHLVEAHQGEIDVESERGKGTEFTVRLKRASE

SEQ ID NO: 8423 - protein, 240 aa, Bacillus licheniformis
MSKKILVVDDEESIVTLLKYNLERSGYHVVTAMDGEAGLLKAIEEKPDLIVLDLMLPKMDGIEVCKELRQKKLMYPILMLTAKDDEFDKVLGLELGADDYMTKPFSPREVTARVKAILRRTQTLSVQPEETEEPDAGELIIGELKILPEHYEVYFQNERLELTPKEFELLLYLGRHKGRVLTRDLLLNAVWNYDFAGDTRIVDVHISHLRDKIEKNTKKPEYIKTIRGLGYKMEEPKLND

SEQ ID NO: 8424 - protein, 33 aa, Bacillus licheniformis
MGIPSLKTAAYGRKREILSKTLKNQIVERIGFR

SEQ ID NO: 8425 - protein, 312 aa, Bacillus licheniformis
MGKKRNKVSVIGAGFTGATTAFLTAQKELADVVLVDIPQLENPTKGKALDMLEASPVQGFDANITGTANYEDTAGSDIVVITAGIARKPGMSRDDLVATNEKIMRSVTKEVVKYSPDCIIIVLTNPVDAMTYAVYKESGFPKERVIGQSGILDTARFRTFVAQELNLSVKDITGFVLGGHGDDMVPLVRYSYAGGIPLETLLPKDRIDAIVERTRKGGGEIVNLLGNGSAYYAPAASLTEMVEAILKDQRRVLPTIAYLEGEYGYEGIYLGVPTIIGGNGLEQIIELELTETEKSQLDKSIESVKNVMKVLS

SEQ ID NO: 8426 - protein, 423 aa, Bacillus licheniformis
VAQGEKITVSGGVLNVPNNPVIPFIEGDGTGPDIWRAASRVLEAAVEKAYNGEKKITWKEVYAGEKAYNKTGEWLPEETLDTIREYLIAIKGPLTTPVGGGIRSLNVALRQELDLFTCLRPVRYFTGVPSPVKRPEDTDMVIFRENTEDIYAGIEYAKGSEEVQKLISFLKNELGVNKIRFPETSGIGIKPVSEEGTSRLVRAAIEYAIEHDRKSVTLVHKGNIMKFTEGAFKNWGYEVAEKEFGDKVFTWAEYDRIAEKDGKDAANKAQSEAEAAGKIIIKDSIADIFLQQILTRPAEFDVVATMNLNGDYISDALAAQVGGIGIAPGANINYETGHAIFEATHGTAPKYAGLDKVNPSSVILSGVLLLEHLGWNEAADLVIKSMEKTIASKVVTYDFARLMDGATEVKCSEFGDELIKNMS

SEQ ID NO: 8427 - protein, 372 aa, Bacillus licheniformis
MTATRGLEGVVATTSSVSSIIDDTLTYVGYNIDDLTEKASFEEVVYLLWHLKLPNKEELAELKKQLSENAGIPKEVIDHFKSYPNGKVHPMAALRTAVSLLGLFDEEADQMDAEANYRKAVRLQAKMPALVAAFSRIRKGLEPIEPNPELGFAANFLYMLNGKEPSPVEVEAFDKALILHADHELNASTFTARVCVATLSDVYSGITAAIGALKGPLHGGANEAVMKMLSEIGEVENVDSYIHAKLEKKEKIMGFGHRVYRQGDPRAKHLKEMSRRLTNLTGESKWYEISERTEEIVTSQKKLPPNVDFYSASVYHSLGIDHDLFTPIFAISRVSGWLAHILEQYENNRLIRPRADYTGPDMQTFIPIEERS

SEQ ID NO: 8428 - protein, 154 aa, Bacillus licheniformis
MFTQANLFLILLLAIALIAKNQSLIIAVSVLLLIKLIGLDQKLFPAIQSKGINWGVTVITIAVLVPIATGEIGFKQLGEAMKSYYAWIALGAGILVALIAKNGITLLAEDPHITTALVFGTILAVALFKGVAVGPLIGAGIAYLVMQAVQHFTS

SEQ ID NO: 8429 - protein, 371 aa, Bacillus licheniformis
LNQSYLTAALRAVYVLFLTAVCGAVGYYSFPLTYPFVIALILAIMINPFVEWLDKLTGFPRGVNVGIVLFGFLTAGAGFLTLVVAEIVSGTAYLAKILPLQFNKAALYIESFFTNQIMPLYNELAAFFDGLEAAQQESIITQVQNLGSELASGTALLLSKILETVPLFFAFLPNMAAVLIFSLLATFFISKDLHKIQNKARSVLPDRLISGAAAVYAELKRALAGFVKAQLTLVAMTMVLVLIGLSVLKVNHAVAIAFLIGLVDLLPYLGTGSVFVPWIVYLAAAKQLPLAIGLGILYIVVLVFRQLAEPKILSRSIGLHPLGTLIALFAGFKLFGFLGLIMGPALLVLIQALFTTGIFRDIWLFIKGNEK

SEQ ID NO: 8430 - protein, 128 aa, Bacillus licheniformis
MKFFLLFLVIFPASEIGLFLLSANWIGVLPTVLLIILTGFLGAALAKKQGIEVYYKVQRDLQYGKMPGAAILDGLCIFIGGMLLLLPGFLSDIIGLLLLLPATRGRFKPFISRKLKRMSEGRRINIIK

SEQ ID NO: 8431 - protein, 585 aa, Bacillus licheniformis
MRKTKIVCTIGPASESVEKLTQLMEAGMNVARLNFSHGDFEEHGARIKNIREAAGKLGKDIGILLDTKGPEIRTHTMENGSIELAAGSQLIVSMDEAIGTPDKISVTYDGLIHDVSVGSTILLDDGLIGLEVTDINKDKREIVTKVMNSGTLKNKKGVNVPGVSVNLPGITEKDANDIVFGIEQGVDFIAASFVRRPSDVLEIRELLEEHNAADIQIIPKIENQEGVDNIDAILEVSDGLMVARGDLGVEIPAEEVPLVQKELIKKCNALGKPVITATQMLDSMQRNPRPTRAEASDVANAIFDGTDAIMLSGETAAGNYPVEAVQTMHNIASRSEEALNHKKILSARSKQVSMSITDAIGQSVAHTAINLDVNAIVTPTESGHTARMISKYRPQAPIVAVTVNDAVSRKLSLVFGVFATSGQNHSSTDEMLEKAVQKSLDTGIVRHGDLIVITAGAVGEAGTTNLMKVYVVGDVVAKGQGIGRKSAFGEVVIAQNAQEAAKKMKDGAVLVTKSTDRDMMASLEKAAALITEEGGLTSHAAVVGLSLGIPVIVGMENATSILKEGEDITVDSARGAVYKGRASVL

SEQ ID NO: 8432 - protein, 319 aa, Bacillus licheniformis
MKRIGVLTSGGDSPGMNAAVRAVVRKAIYHDVEVYGIYNGYSGLISGKIEKLEIGSVGDIIHRGGTKLYTARCPEFKTVEGREKGIANLKKYGIEGLVVIGGDGSYMGAKKLTEHGFPCVGVPGTIDNDIPGTDLTIGFDTALNTVIDAIDKIRDTATSHERTYVIEVMGRHAGDIALWSGLAGGAESILIPEADYDMEEIIARLKRGHERGKKHSIIIVAEGVGSGVEFGKRIEEATNLETRVSVLGHIQRGGSPTAADRVLASRLGAFAVELLLEGKGGRCVGIQNNQLVHHDIIEILEQKHTIDQSMYRLSQELSI

SEQ ID NO: 8433 - protein, 45 aa, Bacillus licheniformis
LAHVYFLWVKVKSERIVSAARDFSKSLLKIYFKNFLFNCIMSKVL

SEQ ID NO: 8434 - protein, 325 aa, Bacillus licheniformis
VAGELEFEKPVVELREKISELKKFTQDSDMDLSSEITKLEARLERLEEDIYTNLKAWDRVQIARHPNRPTTLDYIEHLFTDFFECHGDRYFGDDEAIVGGIAKFRGLPVTVIGQQRGKDTKENIRRNFGMPHPEGYRKALRLMKQADKFNRPIICFIDTKGAYPGKAAEERGQSEAIAKNLFEMAGLSVPVISIVIGEGGSGGALALGVANRLLMLENSTYSVISPEGAAAILWKDSGLAKKAAETMKITAPDLKELDIIDHVIKEVRGGAHRDVEQQAAYIDEALKGELKSLLKLDKNELIQQRYNKYKSIGKISTENQYVGIK

SEQ ID NO: 8435 - protein, 291 aa, Bacillus licheniformis
LLKDIFSKKKKKYASVPAESAKQDVPEGIMTKCPDCKKIMLTKELDKNLRVCMNCGYHLQMNAKQRIKSLLDDGSFEEFNQDMMSENPLEFPGYLEKLQKDREKTSLNEAVVTGKGTIDGSPAVVAVMDSSFRMGSMGSVVGEKITLAIEKAREEKVPFIIFTASGGARMQEGLLSLMQMAKTSSALKLFSEEQGLIISVMTHPTTGGVSASFASLGDYNLAEPGALIGFAGRRIIEQTIREELPEDFQTAEFLLKHGQLDSVVHRADMKKTLGSILKMHQTGGDLEWLEN

SEQ ID NO: 8436 - protein, 411 aa, Bacillus licheniformis
MSLKEKALHMHKVNQGKLESKSKVQVRNADDLSLAYSPGVAEPCKAIYDDNSKVYDYTMKGNMVAVVSDGTAVLGLGNIGPEAALPVMEGKAVLFKSFAGVDAFPICLNTSDVDKIVETVKLLEPTFGGVNLEDIAAPNCFVIEERLKKETKIPVFHDDQHGTAIVTVAGLVNALKLSGKTMSSVKVVANGAGAAGIAIIKLLYHFGVRDIIMCDTKGAIYEGRPNGMNAVKEEVAKYTNKNRIDGSLKDVIKDADVFIGVSVEGALTKEMVESMADKPIIFAMANPNPEIMPAEAHEAGASVVGTGRSDFPNQVNNVLAFPGIFRGALDVRATHINEEMKIAAVEAIASLVSDEELRPEYVIPAPFDPRVAPAVAKAVAKAAMETGVARIDVNPEEVAEKTRKLAVIEGK

SEQ ID NO: 8437 - protein, 1114 aa, Bacillus licheniformis
MPFVHLQVHSGYSLLNSAASVEDLTAKAKELGYSAMALTDDEVMYGAVEFYKSCKKRGIKPIIGLTASVLTDEKEQLSYPLVLLAKTNKGYQNLLKISSVLQSKSKTGIKEKWLKSYHEGLIALTTGGTSHVEALLKEGLIEEAKDAALRCLSIFGEGSFYLSYQPYKGDPLLSERILELSEHTGIPIAATGDVRYIEKEDAAAYTCLKAIKAGEKLNEDMKAEGDLHLELKPPAEMLDIYRDRPDALENTVKIADRCQVDLSLGQTRLPKYPAPSGKNADDYLAELCFLGLKKRFEAAPKEYVERLKYELKVIRDMAFSDYFLIVWDFMKFAHDNGIITGPGRGSAAGSLVAYTLFITDVDPLKHKLLFERFLNPERISMPDIDIDFPDTRRDEVIQYVKNKYGALHVAQITTFGTLAAKAALRDVGRVMGISPKEADQLAKLIPSKPGVTLKEARALSPELDKRLNGSKKLQDIFKTAQKIEGLPRHTSIHAAGVVLSEEPLTNIIPVQEGHGGVYLTQYSMGYLEDLGLLKMDFLGLRNLTLIESIKTLIEKSERVTIDFSAIPYDDEQTFKLLAEGDTTGIFQLESAGMRNVLKRLKPSSLEDIVAVNALYRPGPMENIPLYIERKHGRVPVSYPHEDLADILKDTYGVIVYQEQIMMIASRMAGFRLGEADLLRRAVGKKNKEILDTERNHFISGCLKKGYSVQAANEVYDLIVKFANYGFNRSHAVAYSMIGYQLAYLKAHYPLYFMCGLLTSAIGNEEKLAQYIYEAKGKGLNVLGPSINKSGYPFVVENGALRYSLRAVKGVGIAAVKEIYRARKEKPFADLFDFCVRTSVKSVNRKTIEALIFAGAMDEFGENRATLLASVDVALEHAELFAGDNDQLGFFLDEGLTIKPKYAETEEMPLVDLLAHEKETLGIYFSDHPLSVHRKKLDRAGALPIIQLLASGRKKAALGGLLTRMKTIRTKTGQTMAFLELSDESGEMEAVVFPEQFRQLSPILEEGVSLFAEGRLETRNEKRQLIISGASLVESLHAKKQPSVYIKVEESQHTHDIFKKISSILLEHKGETPVCVYYEKRKQTMQLPESYNIKADHAALYRLKSVVGEKNVVLR

SEQ ID NO: 8438 - protein, 113 aa, Bacillus licheniformis
MDPEQPFFPNFISCYFIALGVLLGGCLIGGIGAYLSGQPPLTIITSLANRLKIWALVAAIGGTFDAVYSFERGIIEGNTRDIVKQLLLILSAMGGAQTGYLIINWLTQEHISS

SEQ ID NO: 8439 - protein, 167 aa, Bacillus licheniformis
MRIPPYYKKPGWQRFFAGMMCGAIISWFVFLFTYGTFQEKQVVLIREQKERINDLNDQITIYREDLHKLNEDNKRKLLIQSVDVKLINGKQYKLSQPDMMNFEEHIRDNISDVITKDIESVYRTKELLKRTIENKEYTINDKKYKAKVTELTIYTRLSVEIKISFSE

SEQ ID NO: 8440 - protein, 59 aa, Bacillus licheniformis
MYIYSYHQLARDKVNRIKLGYSAYAETESLASLIKKELKAQNIHVYEDVTDIGSWFIPE

SEQ ID NO: 8441 - protein, 314 aa, Bacillus licheniformis
MKKEIIRTISLYDTIIIHRHVRPDPDAYGSQCGLTEILRATYPEKNIFAVGAPEPSLAFLYTPDVIEDPVYENALVIVCDTANQARISDSRYNLGDKLIKIDHHPNEDRYGDLLWVDTSASSTSEMIYELYLAGKEQAGWALPTKGAELIYAGIVGDTGRFLFPNTTKKTLKYAGELIEYPFSSQALFDQLYETKLNVVRLNGYIYQNVSLSENGVASVFITRDILHQYNITPSEASQLVSTLGNISGIKAWVFFVEEADQIRVRLRSKGPIVNEVAKKYNGGGHPLAAGASIYDWKDADLVIADLERICKENK

SEQ ID NO: 8442 - protein, 100 aa, Bacillus licheniformis
MPFFVFFIVVSAIAYVYFKVRYVRTKKTVEREYYSAKSSMSLGLFIMFFGANQLILNRGTLAVVIGVIFMLTGLGSMWAGYKAYKHYVPLLAKENERENA

SEQ ID NO: 8443 - protein, 440 aa, Bacillus licheniformis
LATKHEQILKYIDSLSVGEKISVRRIAKEMKVSEGTAYRAIKEAENKGFVSTIERVGTIRIEQKKKENIEKLTYAEVVNVIDGHVLGGKAGLHKTLNKFVIGAMKLDAMMRYTGAGNLLIVGNRIDAHRQALEAGAAVLVTGGFDTEPEIIELADRLELPVISTSYDTFTVAAMINRAIYDQLIKKEVVLVEDILTPLEKTVCLSPHEKLERWYEKNFETGHGRFPIVDEQMKIHGILTSKDVAGYDRSVLIEKVMTKNPITVIGKTSVASAAQMMVWEGIEVLPVVDERQKLIGMISRQDVLKALQMIQKQPQVGEKLDDIVTGGFKESDNDKNKPAPVYQYEVTPQMTNHLGTISYGVFTTILTEAANRFLRSRKKGELVIESMTIYFLKPVQMESVIEIKPNILEAGRKFGKMDIEVFHQGALVGKAMMMVQLMERS

SEQ ID NO: 8444 - protein, 185 aa, Bacillus licheniformis
MRVLKYAILGLLDHGSLSGYDMTSRFKAELGQFWSAKHSQIYPELKKLTDEGFIEFETVIQGSKLEKKMYSITEAGKRELHGWLTEFKPVPDTVKDEFMLKAYFISSMEPDEAKRLFNDQLQKRQEKAAFLNTKLDELKREAGDSITFRSPHFGHYLVLTRALEREKGYCSWLEKALLLMEDDKA

SEQ ID NO: 8445 - protein, 228 aa, Bacillus licheniformis
MKVAYHGHSVVTVDTGDHQLIFDPFITGNSLTDLKPEDVKADVILLTHGHNDHVGDTIEIAKRNNSLVVAPNELAVYLGWKGLNVHPMHIGGSHQFDFGKVKLTQAFHGSAYTEEDSQKIVYTGMPAGILLTVEGRTIFHAGDTGLFSDMKLIGELNHIDLAFLPIGDNFTMGPEDAKLAAEWLRAKQVVPVHYSTFPVIEQDPHAFADSLPGGVGKVLEVGESIEFK

SEQ ID NO: 8446 - protein, 253 aa, Bacillus licheniformis
VRHALITAGSKGLGRKVTEALLEKGYSVTVNYRQDEEAVRRLKEKWRSSLDRLQFVKGDVTRKEDLLRMVNAALERFGKIDLLINNAGPYIFERKKLADYTDDEWYDMLEGNLSSVFHLFKAVVPIMRRQRFGRIITYGFQGADHAPGWLHRSAFGAAKVGLASLTKTIAIEEAGSGITANMVCPGNIVGDMKEASISEARASLDEETPIGRSGTGEDIARIITFLCDEHSDYITGTVIEATGGLNVINRHSL

SEQ ID NO: 8447 - protein, 47 aa, Bacillus licheniformis
MKQDQSKHGYMYDADGDKETVQQISDAYFSGFVAHDDAQPLADADKQ

SEQ ID NO: 8448 - protein, 459 aa, Bacillus licheniformis
MKKLWGGRFQKTPEKWVDEFGASIHFDKTLVKEDIAGSLAHASMLEKCGILTEAEAVKIKEGLTSLLHKAEKNELDFSVDCEDIHLNLEKMLIDEIGPLGGKLHTARSRNDQVATDMHLYLKGHTEHIIELITAFQHVMIEKAEEHVETILPGYTHLQRAQPISFAHHLLAYFWMLERDKERYHDSFKRINKSPLGCGALAGTTFPIDREYSADLLGFDSIYENSLDGVSDRDFILEFLSASSILMMHLSRFSEEIILWCSQEFKFIELDDTYATGSSMMPQKKNPDMAELIRGKTGRVYGDLIGLLTIMKGLPLAYNKDLQEDKEGMFDTVKTVEGSLEIFAGMIKTMTVNKNMMKKATEQDFSNATELADYLAKKGMPFREAHEVVGRLVFTCIEKGIYLSGLPFEEFKKASGLFEEDVYIVLDPHHAVEKRMSEGGTGFKKVTEAIQKAKQCLNNF

SEQ ID NO: 8449 - protein, 403 aa, Bacillus licheniformis
MTQKKKVVLAYSGGLDTSVAIKWLQEQGYDVVACCLDVGEGKDLAFVQQKALQVGASNSYVIDAKEEFAKEFALTALQAHTLYEGKYPLVSALSRPLIAKKLVEVAEKENAQAVAHGCTGKGNDQVRFEVSIKSLNPDLEVLAPVREWKWSRDEEIAYAEKHGIPIPINLDSPYSIDQNLWGRSNECGVLEDPWAAPPEGAYDLTKPLEKTPDTPDVIEIAFEEGVPVSIDGTHYPLSDLILKLNELAGAHGVGRIDHVENRLVGIKSREVYECPGAMTLIKAHKELEDLTLVKEVAHFKPIIEQKMAEVIYNGLWFSPLKDALSGFLKETQKHVTGVVRVKLFKGHAIVEGRKSEYSLYDEKLATYTKDDAFDHHAAVGFIELWGLPTKVNSIVQKKEQIKA

SEQ ID NO: 8450 - protein, 172 aa, Bacillus licheniformis
MSVEEHKKEAPDCVNCKVITVSDTRTEDTDKSGRLMKEFLAEAGHEIVSYEIVKDEKEIIQKAVLKGCLDDRIDAVLLNGGTGIASRDVTIESIVPLFSKEIPGFGEIFRMLSYTEDIGAAAILSRAAAGVIQNKAVFATPGSSGAVKLAMSKLIVPELAHVIRELRKDMKK

SEQ ID NO: 8451 - protein, 395 aa, Bacillus licheniformis
MSKIIAINAGSSSLKFQLFEMPSEKVLTKGLVERIGLDNGIFTISVNDEKKTETTDIPDHSVAVKMLLDKLTKFGIIKDLNEIDGIGHRVVHGGEKFSDSVLLTDEMIHEIEEISELAPLHNPANIVGIKAFKEVLPNVPAVAVFDTAFHQTMPEQSYLYSLPYEYYEKFGIRKYGFHGTSHKYVTERAAELLGRPIEELRLISCHLGNGASIAAVEGGKSIDTSMGFTPLAGVAMGTRSGNIDPALIPFIMEKTGQTADEVLNTLNKKSGLLGISGFSSDLRDIVEATKEGNERAETALEVFASRIHKYIGSYAARMSGVDAIIFTAGIGENSVEVRERVLHGLEFMGVYWDPALNNVRGKEAFISYPHSPVKVIVIPTNEEVMIARDVVRLAH

SEQ ID NO: 8452 - protein, 23 aa, Bacillus licheniformis
LNLLRTILYIFFMFRVEHNVTGL

SEQ ID NO: 8453 - protein, 328 aa, Bacillus licheniformis
MQNYPVETIYEWLDKGAEVIARDRQIPYIEGLAEAGEAFFTGSADRGLSEEAEQKVKDLIGRARFSECSHESIRKAFQLAILKGQKDIPHPNRQMTPDTIGLFIGYLVNKFMERKKGLTLFDPAVGTGNLLLAVLNQLAEEAGKAFGSEIDDVLIKLAYVQANLQEKEIELFNQDSLQPIFMEHADAVICDLPVGYYPDDESARAFKLKADEGHSFSHHLFIEQSLTYTKPGGYLFFMIPNHLFESGQSEKLRTFLKNNAYINAVLQLPLSIFKDEAHAKSILVLQKHGEQAKAPKQVLLAQVPSFANQDAMLNMTAKLDSWFQAEKR

SEQ ID NO: 8454 - protein, 167 aa, Bacillus licheniformis
MASITFKGNPVTLVGSEVKVGDQAPDFTVLSNSLEEVTLQDIKGKPAVISVIPSIDTGVCDAQTRRFNEEAAGLGSVKVYTISADLPFAQARWCGANGIENVETLSDHREMSFGEAFGVYIKELRLLARAVFVLDENGKVVYTEYVSEATNHPDYDKAIEAAKSLVK

SEQ ID NO: 8455 - protein, 152 aa, Bacillus licheniformis
MAEHPIQGLMKTAMENLKEMIDVNTIIGDPVETPDGSVILTVSRVGFGFAAGGSEFGGNKPAESKASDGDRERKESKLPFGGGSGGGVSITPIAFLIVGSSGVKVLHLDENTHVIDKILDSAPQTIERIQHMFKKNDKQKQNMNRQNQTPPF

SEQ ID NO: 8456 - protein, 227 aa, Bacillus licheniformis
MIYIWIAGVFILLAALMIMKIRVAIEYLHTDDDDRLTVKVRTAFGLLRIKREIPVIKINQEDMTVDVKEQTNSALKKDKKRRKIGYREVFDSTKQIKKLVEQIINMQPIIRRFMKRIHVTKLEWTSVLGFPDAALTGIVTGGVWSLKAGTVALLHQLFCFDSQPEYEVIPGFNSRSSKTHLTCIFHFRVGHAITAAFRIVVNWKGKMRGLFKLPKNLSGSTKNDSSV

SEQ ID NO: 8457 - protein, 172 aa, Bacillus licheniformis
MDVTYDGKDHNELSPNVGVSREESAPHVEHAYAGFWIRLFAFLLDGVVIGSINNLAVSPVFSLLNLPKESGFFTFSLYSFVTAAVFFAYFVLMTKYFGQTLGKMVFGLKVVSLVPEKGLTWDVVLFREFIGRYINSLYITYLVAAFSPKKQGIHDFFADTAVIHEKLYRKKD

SEQ ID NO: 8458 - protein, 335 aa, Bacillus licheniformis
MNAKRWIALVIALGVFALSAVMSLLLAVFDTMGNDGKLQFGLNDTQEETVLEQGNTSRKIAVLEVNGTISDNGGASGLFSSEGYNHRSFLQMLEKAKDDSAVKGIVLRVNSPGGGVYESAEIHKKLEEIKKDTKKPIYVSMGSMAASGGYYISTPADKIFAAPDTLTGSLGVIMESLNYSKLAEKLGLKTETIKSGEFKDIMSPTRDMTKKEREIMQSMVDDAYEGFVDVIAEGRGMSENDVKKIADGRVYDGRQAKQNHLIDELGYYEDAVKAMKKDHKNLAGASVVSYEESAGLASLFSMTANKMFKSEADFLNIKEAISQSGAPRLMYLYAK

SEQ ID NO: 8459 - protein, 265 aa, Bacillus licheniformis
VTDRRNIYFFYKKSEETDEQCKKLKQLAEEHGFRVVHHHNEANIIASIGGDGTFLQAVRKTNFRDDCLYVGVAKKGKAHLYADFNIYDTDKMIEATNSEQIEVRKYPLIDVTVDGTSFQCLNEVSIRSSIIKTFVMDVYIDDLHFETFRGDGMIVSTPTGSTAYNKSVDGAIVDPLIPCIQVTELASLNNNTYRTLGSPFILSADRKLTLKIVQDGNDYPIIGLDNEAFSTMNVKEVEVSLSGKMIKTIKLKDNSFWEKVRRTFL

SEQ ID NO: 8460 - protein, 211 aa, Bacillus licheniformis
MSKGRLMIINMIGIIATLALVAVCGYYYYQNEHYVTTDEARVSANMTKITAPASGKLSGWDAKEGDHISDGDNLGKISDGQQSVAVKAISDGTLVKNTAVNHKIVNAGDVIGQTADMDNIYITAHIKETEIRDIEKDDKVDIKVDGDPDTTFEGKVEEIGYATDSVFSMLPEMNQSGDYTKVTEKVQVKISIQNPSAKLLPGMNAEVKISL

SEQ ID NO: 8461 - protein, 540 aa, Bacillus licheniformis
MSQSDVAIPSSKKIGIPKYLIISVLTILAIGPQYFLNLSYTLSQVVIQNGLHLSPDDMRIPSILTNLAFSLGVPLGRIFSRRFGIRNSYLTLITLFLCGSLIDAFSAGLFSLLIGRVIQGLCSGMLFLTILPVKLISFPNKVRNLFLFFVISGLFGASAIGAVFGSLSLSADAWRWVFILNICSPVLCLVIGFFSLPKQAADEREHHSIDKTGVFMLSLLMVVLTVPLINLQKTGVHSFYVWPFFLAGFIILALFVITDLRAREPLVPFRSLWSAKAVSGTVMAVASHIAIIVSLAGINGFLENIAEASFESMTRFYLCFFAGILATAVLSTLLYDHFGAGLLGCIGALEMIIVGMEWRSVQPGVSMESLYLHAVLLGSGVSMVLVSGALGTALAGDIHQASKRSVSLHFIRNFAGAWAAPVIGWFASMKNAVHYEMIRGHISEADPEIQLELSKMIRDFVSSGLSVGDAKNMAAYTIVANARKASALGAYHDLFTILLCLSIIMLAASIGKAATGKGRSLVQKRLRLPDPSASQQKEIG

SEQ ID NO: 8462 - protein, 39 aa, Bacillus licheniformis
MQVKLYILPAINQPKEKEKADDRLTNQPLAAYLLHFLKS

SEQ ID NO: 8463 - protein, 142 aa, Bacillus licheniformis
LGHDSLRNIEKEIALLVRLTTAYSPRFGSLDRSEYLLLSELDKQSPLAINSLAETLMLNLSTASRQVSALERKKLIRRFPDPNNGRISLVEMTSEGIDALKKVQKARYHVYTEVLQDWTTEELNTLETHLIRLNQDFKKWSK

SEQ ID NO: 8464 - protein, 529 aa, Bacillus licheniformis
LRREDLIAPEKYNAVDEIEKFKSSRDKTALIWEDESGRQVSWSYEKLIEKAYKIGSILTRSGLKKGDKLIVMMPRIPETYAVYMAILKAGMVVIPCSEMLRAKDLDYRIKHAGVKGAVVYSAFLDAFLDVRSKEALSLFAVGESSEGWINLLEEMNQAIAADFQAADTSRDDIAFLSYTSGTTGQPKGVVHTHGWAYAHLRTTASAWLDISEGDLVWATAGPGWQKWVWSPFLAVLGSGATGFIYHGKFTPETYLRLIERHQVNVLCCTPTEYRFMAKVNDLSRFDLSSLHSAVSAGEPLNREVIDTFKKHFHIAVRDGYGQTESTLLVGILKGMKIKPGSMGKPTPGNLVDIIDGNGKSCPPGETGDIAVHLSTPALFKEYYKDQERTLRQRRGDYFITGDKARKDEDGYFWFESRNDDVIISSGYTIGPFEVEDALIKHPEVKECAVVASPDEIRGSIVKAYVVLKDPSRRNEHLTKELQDHVKAMTAPYKYPREIEFIEELPKTPSAKIKRFELRQREIALKTKAE

SEQ ID NO: 8465 - protein, 70 aa, Bacillus licheniformis
MAQNNRQSSSNQLLVPGAAQAIDQMKFEIASEFGVNLGAETTSRANGSVGGEITKRLVSFAQQQMGGTQQ

SEQ ID NO: 8466 - protein, 401 aa, Bacillus licheniformis
MNEDYILIRFGEISTKGKNRKLFVDRLKRNIKMVLRDFRNVRYESTRDRMTLVLNGEDAEAVMARLKHVFGIQSFSLAVKCRTDLESIKETALASVQEQYKPGDTFKVSTKRAYKQFELNTNEMNAEIGGHILRNTDDLTVDVHSPDIHLRIEIREDATYLTFRDEKGAGGLPVGSGGKAMLMISGGIDSPVAGFYAMKRGLEIEAVHFFSPPYTSERAKQKVIDLTKRLTAFGGDIKLHIVPFTKTQELIQKQIPENYSMTATRRLMLQIADKLRERHNALAIFTGESLGQVASQTLESMYAINAVTSTPVLRPLIGMDKTEIIEKAKEIDTYDISIRPYEDCCTIFTPSAPKTRPKKEKIEHFESYTDFEPLINEAVENTETIVLSSKAETKDQFADFF

SEQ ID NO: 8467 - protein, 381 aa, Bacillus licheniformis
MIYLDNSSTTKPYPELLQIYEQVNQRFFGNPSSLHRHGVEADQLLSEARKQIKSALSLKNHDIVFTSGASEANNMALKGIALAHAQKGKHIIASSIEHPSVTESLEQLKTAFGFEVTYLPVDGHGFVSLEDLKQALRKDTILVSIMHVNNETGVIQPLEEIGKIVKENTRAYFHVDHVQGINKVPLDISGAAIDLCTISGHKFHGLKGTGALILNERISLFPLISGGEQQNNRRAGTENTAGAVTLAKAINLSKQDYNHYIEEIKAAKSAFIKELKELKGVILNTPEENSAPHIINFSVPGLKAEVLLHMLEERDIFVSTTSACSSKQHKPSKVLLEMGKGEDAASSSIRISMTYRDNHEIVGPFMTALKESLHKLKGIMR

SEQ ID NO: 8468 - protein, 48 aa, Bacillus licheniformis
MTKVQRLLYFKNQRSQTFIFNFQLQVDMITYTVMKKNVHFKGVDHDLS

SEQ ID NO: 8469 - protein, 445 aa, Bacillus licheniformis
MKTSLSAKETTAIGLMLFALFFGAGNMIFPPQLGQAAGENIWPAIIGFLLTGVGLPLLGVIAVALKGSAKGLADKAHPVFGTILIVSIYLTIGPLFAIPRTGNVSYVIAVEPFLGKHSSSLYLFIFTLIFFGITYFLALNPSKLVDRIGKILTPILLTVIAILVIKAFITPMGSIGSVTEAYQSAPLFVGFLEGYKTMDAIASIVFGIVVITAIKDRGVTNPKSIAASCIKAGIVAAVGLGLVYVSLAYLGATSVETVGSLDNGGEILSKASAYLFGSLGNAVLGIAILFACLTTSVGLVSSCGEYFSNLIPKLSYKAVVIIVTLFSLVIANFGLTEIISFSVPILSAIYPLAIVVVLLSFIDKLFNERREVYIGALIPTGILSIIDGLNAAKIPLGPVNDILKANIPLFSMGVGWVVPAVIGAVIGYIVTFFIALPEDKLKNVS

SEQ ID NO: 8470 - protein, 564 aa, Bacillus licheniformis
MEFVIGLLALFLILFATGYLFRKNIYKEIDRLEAWKIEIMNRSIVEEMSKIKHLKMTGQTEEFFERWRREWDEIVTSHMPKVEELLFEAEDCADKYRFQKSKQVLAHIENLLSAAESNIEDILKEIADLVSSEEQNRKEIEEVKERYTKVRKNLLAYSHLYGDLYAKIEADLDTVWEGIKQFEEETEGGNYIEARKVLLAQDRLLEELQSYIDDVPKLLASCKQTVPQEIAKLKAGYQEMIDKGYKLDHIQVEKELENLLKELKRAEDALLDELDLEEAAAIVQIIDETIQTLYNQLEHEVEAGQEILGKVPELAAALEKLEASKKDTEAETELVKKGYRLTTGELEKQQSYEKRLEMIEKQFEQVRERLDQKHVAYSLLKEELADIEKQMEAAQREHDEYRDMLQMLRKEELQARELLKQLKQTIKDTARSLEKSNVPGIPEAITEKIRQSQTTVQKVTEQLNELPLNMDAVNERLQEAEQLVTEVKTKTDELVELVLLIERIIQYGNRFRSQDRILSEQLKEAENCFYAYQYEEAYDIAARAVEKASPGAVARLEADAKQPE

SEQ ID NO: 8471 - protein, 270 aa, Bacillus licheniformis
MLKRDGHVHSPFCPHGSKDEFRYYIEELCKKGFQSVSFTEHAPLPPSFIDPTPEKDSAMPISQLGRYIERLTELKEEYRGQLDILIGLEVDYIRAFEHETKAFLDQYGTHLDDSILSVHFLPAGSSYICLDYDEKAFQQLIDCYGSTEQVYLAYYDEIYSSIVSPLGAFKPKRIGHITLAKKFVKLFPYTMSESVRKSVSSCLDEAAKRGLELDFNTAGLRKPYAGNVYMEEWMIKEAEQKNIPLVFGSDAHQAEDAGFGYEHFESRFVK

SEQ ID NO: 8472 - protein, 212 aa, Bacillus licheniformis
MGSNATPTTKDRIIESAVELFNQKGFSGTSVREIARAANVNVAHISYYFNGKGGLMEHLVSRFYEGYLRILEKGHERLQDAGATDCLLQLVFDILSYQHEHRQLTRFVYREVTIDSTLNREVMSTYLTKEKYILHLIIEKGNEDNEFSRFPLSHFMIQLKSLLMMPYLQPQYISEVLYVQPHEPYFYQAYYKEVKTWLLSLLYRERRQAAVI

SEQ ID NO: 8473 - protein, 38 aa, Bacillus licheniformis
MKHYISLAFSLKWQKRACRDAICRALFTGTTPLEVELF

SEQ ID NO: 8474 - protein, 164 aa, Bacillus licheniformis
MFHVEKTEGSKEKKYELLLKQIDALTEGEPDMIANTANASALLYQSLEDVNWAGFYFAKDGELVLGPFQGLPACVRIPFGKGVCGTAYTNGRVERVEDVNAFPGHIACDAASQSEIVVPLEVDGSIIGVLDIDSPIKNRFDETDEYYLKKFTEKLGERLSEKSR

SEQ ID NO: 8475 - protein, 20 aa, Bacillus licheniformis
MNKQTEDLYLTFHQKLFQFF

SEQ ID NO: 8476 - protein, 51 aa, Bacillus licheniformis
MVITLKNPFFVFYFPDYITKTGLYTYKQSVPFGTIHEWLTLPGGHYIIFFV

SEQ ID NO: 8477 - protein, 200 aa, Bacillus licheniformis
MARYTGPSWKLSRRLGISLSGTGKELEKRPYAPGPHGPGQRKKLSEYGLQLQEKQKLRHMYGVNERQFRNLFDKAAKMAGKHGENFMILLESRLDNIVYRLGLARTRRQARQLVNHGHVLVDGSRVDIPSYQVKPGQTISLREKSQNLSVVKEAVEVNNFVPEYLTFDAEKLEGSLTRLPERSELPAEINEALIVEFYSR

SEQ ID NO: 8478 - protein, 62 aa, Bacillus licheniformis
MFACEKVPYSYEAGLFYSGGRISNQDECDHRYHLKVNHQIYQQPESTGSKQKTLESLGCQQF

SEQ ID NO: 8479 - protein, 76 aa, Bacillus licheniformis
MLLFFAKFVLFYVFCSVAFALFKVMYYNISKKWVTKTAEGTKLNWALNVFLKHGKKMDSNDCFVMGVLAGWCAIYL

SEQ ID NO: 8480 - protein, 145 aa, Bacillus licheniformis
MKWYWRGLKNYANFEGRARRKEYWLFHVFNGIICFILFILSLMVVSLFISGIMTAEGYDRYQVGYIIGYGGGFLGYILIFIYQLAVLVPSLAVNVRRLHDTGRSGWWILIGFLPIIGAVILLIFYCQAGEAKENQYGPNPKVNVS

SEQ ID NO: 8481 - protein, 51 aa, Bacillus licheniformis
METVYCFSYDMNVSSKPIEKMFFPNRHQNIPSSKWSKMIFYGIIHMFFANL

SEQ ID NO: 8482 - protein, 253 aa, Bacillus licheniformis
MNIQQIRNATLAVKYAGKTFLIDPMLAEKGAYPPFPNSARQEQNNPLVSLPVPTDELVKNTDAVIVTHLHLDHFDDAAKDLLPKEIKLFVQNEADAEEVRKAGFQNIEVLTKDTVFEGIQLIKTKGEHGRGEILKLAGEVCGVVFKHSKEKTLYVAGDTVWYEGVREEIAAHQPDVIVVNGGDNQFFEGGSLVMGKEDIAEVYQAAPKATIISSHMEAVNHWTLSRKELKSFIQEKGMSSRVLVPDDGESYTF

SEQ ID NO: 8483 - protein, 139 aa, Bacillus licheniformis
MLDHTDKQIIEELSKNSRMTMKELGEKVHLTGQAASARVAKLEDQGVIEGYTIQVNQVKLGCFIHAFINIYTKSTYHKPYLSFIKAQQKYIIHNYKISGDGCYLLECKFPSNQQLDQFLIDLNHHANYKLSIVINKTGG

SEQ ID NO: 8484 - protein, 48 aa, Bacillus licheniformis
MNLFIAAKEKFMEDYHKQLETERKQEVQQSADGYNQLNQTENAAKRLK

SEQ ID NO: 8485 - protein, 422 aa, Bacillus licheniformis
MMTHILDDLSFRGLIQQQTDEAGLRELLDKEKISLYSGFDPTADSLHIGHLLPILMLRRFQLAGHRPIALVGGATGLIGDPSGKKAERTLNNEEIVREWSQKIKNQLSRFLDFEAEENPAIMANNYDWIGKMNVIDFLRDVGKNFGINYMLAKDTVSSRIETGISYTEFSYMILQSLDFLNLYRNQECKLQIGGSDQWGNITSGLELIRKSEENAKAFGLTIPLVTKADGTKFGKTEGGAIWLDKEKTSAYEFYQFWINTDDRDVVKYLKYFTFLSKEKIEDLAEKTETAPEKREAQKRLAEEVTVLVHGREAFEQAVNISKALFSGDIKQLTAEEVKVGFKGVPSLEVEKADELPLVEILVQSKLSPSKRQAREDITNGAVYVNGERRTDVADVLTADDRIEGQFTVIRRGKKKYFLLTYK

SEQ ID NO: 8486 - protein, 75 aa, Bacillus licheniformis
VCHHQLAPFFQNKTPLRKNEGTIKIAVPPCLKERMAALFSLSLITEKLPFFCYRKPGRLFSQKRFMSVIQTIHMC

SEQ ID NO: 8487 - protein, 572 aa, Bacillus licheniformis
MELKALPAEKGNYNLKDYDETYRTFDWKDAEKHFSWHKTGKINAAYEAIDRHAESNLKNKVAFYYKDPVREEKYTFREMKNETNKAGNVLKQHADVGKGDRVFVFMPRSPELYFILLGAIKLGAIVGPLFEAFMEGAVKDRLANSGAKVIVTTPELLERVPADELPDLESIIVVGEGVKEEGPVIDYYAKAAEAGTDLEIEWVDQEDGMLLHYTSGSTGAPKGVLHVHKAMIQHYQTAKWVLDLHDDDIYWCTADPGWVTGTVYGIFGPWLNGATNVVVGGRFSPEAWYETIEKMEVTVWYSAPTAFRMLMGAGDDLVNKYNLSSLRHILSVGEPLNPEVIRWGHKVFGNRIHDTWWMTETGSQLICNYPCMEIKPGSMGKPIPGVEAAIVDNQGNELPPYRMGNLAIKKGWPSMMHSIWNNPEKYSSYFMPGDWYVSGDSAYMDEDGYFWFQGRIDDVIMTSGERVGPFEVESKLVEHQAVAEAGVIGKPDPVRGEIIKAFIALRDGYEPSDALKEEIRQFVKQGLAAHAAPREIEFKDKLPKTRSGKIMRRVLKAWELNLPAGDLSSMED

SEQ ID NO: 8488 - protein, 210 aa, Bacillus licheniformis
VEHHKTYHAKELQTEKGSVLIEGPISPEKLAEYEFHDELTAFRPSQKQHEALIEIAGLPEGRIIIARFRQTIVGYVTYVYPDPLERWSEGNMENLIELGAIEVIPAFRGHSVGKTLLAVSMMDPQMEKYIIITTEYYWHWDLKGTNKDVWEYRKMMEKMMNAGGLVWFATDDPEISSHPANCLMARIGKEVSQESIERFDRLRFHNRFMY

SEQ ID NO: 8489 - protein, 214 aa, Bacillus licheniformis
MIVEKIMKRDVVTLSRTDTIEEAIKRMRTFHIKHLPVINERGTVIGIVTDRDVKTASPSIFAQNRSNEDLKKPVELIMSKEVITGHPLDFAEEISAVFFEHEIGCLPIVKNGKLVGIVTKSDLLHTFVQLTGAHFPGSQIEIKTDHIARSLADISAIFSRRQIAILSVLVYPGDEDDSKILVFRVQTMNPASIIKDVKSKGYQVLWPAVQRDLP

SEQ ID NO: 8490 - protein, 386 aa, Bacillus licheniformis
MKDSVFIFSPSYQTYQFHQDHPFNQLRVYVTYDLLNTVGAFEPGETIAPRAATETELKLVHTGDYIRAVQLAGAGKLPAAESENYGLGTEDTPVFAGMHEAASLLVGGTLTAADYVMTGKARHALNLGGGLHHGFRGRASGFCVYNDSSVVIRYLQKKYHAKVLYIDTDAHHGDGVQFTFYDDPSVCTVSIHETGRYLFPGTGQVQERGHGEGYGYAFNIPLDAFTEDESFLDSYRTAVSEIAEFFKPDVILSQNGADAHYYDPLTHLCTTMKIYEEIPKLAHELAHTYCSGRWIAVGGGGYDIWRVVPRAWARIWLEMKGMEPEEKMPEKWLKKWGKQASVRLPANWSDPEDLYPPIPRKTEITEKNAQTVAKALYPIRSAQRTT

SEQ ID NO: 8491 - protein, 229 aa, Bacillus licheniformis
MKLRHERRKREQGRKSPNWIITFSDLITLILVFFILLFSMSQIDLNKFKAAVGSFQDRADGKSAAELKKDASDQKAEKTAKSQDDLLKKINDYIEKNELSSLIAAKRDERGVILVLQEAVLFDSGKADLKDQAHPLLHKIAVLLKSVSNPIRVEGHTDSRPISTYRFPSNWELSAARASTVIGYFTSKEKLDSSRFLAIGYADTKPVRDNRTESHMKENRRVEIVIAKQ

SEQ ID NO: 8492 - protein, 272 aa, Bacillus licheniformis
MKRFDYLTPVGFILGIFILVLGVVSGAGLSGFYSFIDLTSFFIVTGGLCAAVFISFSPKDLKRAPAVLKQVFISEEDDVRELVKTFVSLSEQARKQGILSLDANVNEMKDPFLKKGLLLAIDGWDEETIRNVMNSEIAAMEERHRKGRRIFEKAGEFAPAWGMIGTLVGLVMMLKNLNKPETLGPNMAIALLTTLYGSLLANMLFIPIAAKLEEKTENEIFKKQVMIEGIIGIQSGRNPRNLESQLVVFSSKEEWTKKRADRMKQKDRPHEA

SEQ ID NO: 8493 - protein, 333 aa, Bacillus licheniformis
MSNVTIYDVAREANVSMATVSRVVNGNPNVKPTTRKKVLEAIERLGYRPNAVARGLASKKTTTVGVIIPDISSIFYSELARGIEDIATMYKYNIILSNSDQNMDKELHLLNTMLGKQVDGIVFMSGNVTEEHVEEFKRSPVPIVLAASVEEKGETPSVAIDYEQAIYDAATMLIEKGHKRLAFVSGPMAEPVNQAKKLQGFKRALGDKGLQFKEEYVVEGDYTYDSGMEALEALMKLDEKPTAVLSATDEMALGVIHAAQDKGLAVPDDLEVIGFDNTRLSLMVRPQLSTVVQPTYDIGAVAMRLLTKLMNKEEVEEHIVQLPHRIELRQSTK

SEQ ID NO: 8494 - protein, 358 aa, Bacillus licheniformis
MSNTELDLLRQQANELNLQILKLINERGRIVQEIGKAKEAQGINRYDPVRERAMLNEIIENNDGPFENSTIQHIFKEIFKAGLELQEDDHSKALLVSRKKKPENTIVDLKGEKIGDGEQRFIVGPCAVESYEQVAEVAAAAKKQGLKLLRGGAFKPRTSPYDFQGLGVEGLQILKRVADEYDLAVISEIVNPQHIEEAIDYIDVIQIGARNMQNFELLKAAGSVKKPVLLKRGLAATLKEFINAAEYIMSQGNDQIILCERGIRTYETATRNTLDISAVPILKQETHLPVFVDVTHSTGRRDLLLPTAKAALAIGADGVMAEVHPDPSVALSDSAQQMDIPTFEKWLNELKPLVQVKA

SEQ ID NO: 8495 - protein, 149 aa, Bacillus licheniformis
LNTELKDMLQSVLKEELSPINQRLDGIDKRLDKIDARFVEIDKRFDEVDARFVEVDKRFNAIDKRFKEIDGRLNKVENRLNAMDKRLNRLETDIDELKRGQERLPKTIIENIGQFTENIVEHADDKAAALNDRVFSVETAIQRIYRLSS

SEQ ID NO: 8496 - protein, 108 aa, Bacillus licheniformis
VSKQLIQTEDEFKRLAENNDTFIFLKHSVTCPISRRAFEEFESFANQHEDIPAYYLKVQESRPLSNYIAEQYGIKHESPQAFIFTNGNVKWHASHSQITAQALAENSR

SEQ ID NO: 8497 - protein, 138 aa, Bacillus licheniformis
MSKDGMNTKDFLIGTFVGGIIGAAAALFLAPKSGKELRDDLGNQAVVLKDKTGKLTSEARERGSEYVSIAKEKTSSISQLVADQSSQIMDKVKDLRSKGAEKAGELKEEASSAIEEQAEEAKNEIEDEARKTADTAQK

SEQ ID NO: 8498 - protein, 140 aa, Bacillus licheniformis
MIIILYLSAALIAVSFLILVIYLSKTLKSLQVTLNHVASTLEGVEGQMKGITAETTELLNKTNRLADDIQEKSLKLNTVVNAVQEVGTSVRQFNNSIQQVSQSVTSAAEQNREKISQVVSWSNAALEIWNRWKQKKMREE

SEQ ID NO: 8499 - protein, 432 aa, Bacillus licheniformis
MTVYHFVGIKGTGMSPLAQILHDNGYNVQGSDIEKYIFTQTALEERNIPIYPFDPENIKPGMTVIAGNAFPDTHPEIEKAQAEGLPVVRYHKFLGDYLKKFTSIAVTGAHGKTSTTGLLSHVIKKAKPTSYLIGDGTGKGCENSEYFVLEACEYRRHFLSYQPDYAIMTNIDFDHPDYFANIDDVFDAFQTMALQVNKGIIACGDDEYLMKIHANVPVVYYGFAEENDFQARNVIKNTEGTTFDVFVRNTFYDTFYIPAYGSHNVLNALAVIALCHYEQVDVDIIKEGLQTFGGVKRRFNEKHAGSQVLIDDYAHHPTEITVTIEAARQKYPERDIVAVFQPHTFTRTQSFLNEFAESLKKADYVYLCDIFGSARENAGKLTIGDLQEKIPQAKLIDENDTSILKEHENAVLIFMGAGDIQKYLRAYENVLA

SEQ ID NO: 8500 - protein, 930 aa, Bacillus licheniformis
MSWFNKMFSLFLGDDEDNEKQKKHIDEFEADSSSEDEEMPQITDAKVVYEYPKGKFRFPVIPDQNTRPREKDDSREQRTRRPASRYSASQPKPGNSYHYEEKAAAKKPFRPSVIPSPVYGFHEQKRAKPENHTYRAKKQTEARVTLFNEEIEKEQKSAEHKQPVREEASVQTEKNGRPLIKSESRNPALRAEFEDVPQASTEIPKETEIRPERMTEGAGLAEEKALRHESERTEAPVSAHILEETEVRPERMTEGAGLAEEKALRNEAVEETASASQNITEEDAIPAEQTPEQIEKLLDKIEETGEEMVLAEDAEAATEEQGKTYGSGKTHPDPEASVPEEPHTHGRASEITVQSDESSHRTDSNTPADALEETSGSRQTGWRQEQASCSPETAAPSAGEPESRQENRETTRINEDRPEAPRKREAGAAPGSKKGSVPFNVMMFASDKQKEKAPQGYQFPNMSLLDVPPAQKQDDQDWIHEQRELLDVTLENFNVKANVVHVTQGPSVTRFEVHPEPGVKVNKITNLSDDIKLSLSAKDIRIEAPIPGKNTIGIEVPNLHSKMVYLREMIRSSEFRTNPSPLTAALGLDISGKPVVADLKKMPHGLIAGATGSGKSVCINTILVSLLFKASPRDVKLLLIDPKMVELAPYNNIPHLVSPVITDAKAATAALKWVVEEMERRYELFAHSGVREIERFNEKVREQNMGEKLPYLVVVIDELADLMMVAPNEVEESICRIAQKARACGIHLLIATQRPSVDVITGLIKANIPTRIAFSVSSAVDSRTIIDMAGAEKLLGKGDMLFLENGSGKPVRLQGNFVSDREIDRVVSHVRRQQEPNYLFEQEQLVRQNPAGFDHDELFLEACEFAVEQNSASTSSLQRRFRIGYNRAARLIDMMEREGMISEAKGSKPREVLITKADLEQLIESSSLFG

SEQ ID NO: 8501 - protein, 201 aa, Bacillus licheniformis
MNAFYNPEGVGDTLLISLNDIPREEIAFERYGDVVKIFHKDTKETAGYNIFNASSYLSIEESGAIALSESFVQDVNEILVRNGLKDELTVDLSPKFVVGYVEEKEKHPNADKLSVCKVNVGSETLQIVCGAPNVEAGQKVVVAKVGAVMPSGMIIKDAELRGVASSGMICSAKELNLPDAPKEKGILVLDDGRKAGEAFTF

SEQ ID NO: 8502 - protein, 269 aa, Bacillus licheniformis
MKMTSRKLSDILKKRLQNDSWSFHFDREKDSLRIEDKNTGKGITLELPGIIAKWEQKKDDAIDEVVYYTEEALNAMKGQSQEMEGRESLIYPVIRSTSFPEKSSAGVPLVFDGHTAETRIYYALDLGNTYRLIDEKMLEKEGWTKERIRETASFNLRSLQTVVKEDEVAGNHFYFFRANDGYDASRVLNESILAEYEKNAEGTLAVSIPHQDVLIIADIRNNAGYDILGRMSMSFFANGTVPITALSFLYEDGKLEPIFILAKNRPKKK

SEQ ID NO: 8503 - protein, 106 aa, Bacillus licheniformis
MKTIETNEELQKVVKDDLSLLMFSADWCPDCRFVEPFLPELEANYPEFTFYYVDRDKFIDTCAEWDIFGIPSFLVFKEGNEISRFVSKDRKTKEEIEQFLTDSLNK

SEQ ID NO: 8504 - protein, 148 aa, Bacillus licheniformis
MEFIVYLAGEIHSNWREEVKEKAKSLKLPITFVGPMENHERSDNIGEEIMGKQADSIAKDDAASDLNNFRTSVLMNKADVVIALFGEKYKQWNTAMDASYAIAKGKPLIIIRPESLHHPLKELSNKANITVETVNQAIKSLSYVFESR

SEQ ID NO: 8505 - protein, 357 aa, Bacillus licheniformis
MNQETRTLFQTLTELPGAPGNEHLVRRFMKKELEKYADEIIQDRLGSVFGVKHGPEGSPKIMVAGHMDEVGFMVTSITDNGLLRFQTLGGWWSQVLLAQRVEIHTDNGPIPGVIASTPPHLLTDEQRRRPMDIKNMMIDIGADDREDAERIGVKPGQQIVPICPFTPMANEKKILAKAWDNRYGCGLSIELLKELQGTELPNNLYSGATVQEELGTRGAQTAANMIQPDLFFALDASPANDSSGDKNQFGQLGKGVLLRIFDRTMVMHSEMRNFVLDTAETNDIPYQYFVSPGGTDAGRVHISNEGVPSAVIGICSRYIHTSASIIHVDDYLAAKELLIKLVKACDSSAVQSILRNE

SEQ ID NO: 8506 - protein, 104 aa, Bacillus licheniformis
MKLRHFLIGAGIGIAAAVVVKQYVMQPYISSEKALRIVKSAFKQRGPIDGSWIYTVPEAYTVNGETVMVYKTGITRSAFGELEQYEVMVDAKTGMIVDVIDTAA

SEQ ID NO: 8507 - protein, 565 aa, Bacillus licheniformis
VSHNKLNEQVIETRLRGFEVLATPLLNKGVAFPPEERDALGLTGLLPPKVLTLEEQAKRAYKQFQSQPDDLSKNVYLTALHDRNEVLFYRLLNDHMTEMLPIVYTPTVGTAIQQYSHEYRKPRGLFLSVNDPEGMKTAFENLAAKRSRIDLIVATDAEGILGIGDWGVGGIAISIGKLAVYTAAAGIDPNRVLPVVIDAGTNQERLLNDPLYVGNQHSRIRGERYESFIDQYVQIATETFPGVLLHWEDFGTQNARQILKKYKDKICTFNDDIQGTGAVTLAAVLAAVKISKMPLKDQKVVIFGAGTAGIGNAEQIRAALVQEGVSEEESYRRFWCVDRNGLLTDDMNDLQDIQQPYARPADEVKDFSRNGPGDAIDLLEVVKRVQPTILIGTSTVSGAFTEEIVKEMAKHVKRPAIFPMSNPTPLSEARPEDLINWTEGRALVATGSPFAPVEYSGTRYAIGQANNAFVFPGLGLGTLVSKARLITDNMFYASAAAIAGMVDTGRPGAALLPEVEDLRTVSATVATAVIKAAIEDGVAENEPDDVIQAVQDAMWHPVYRPIRAI

SEQ ID NO: 8508 - protein, 281 aa, Bacillus licheniformis
METLTIGRIKLTWLNGGVTHMDGGAMFGVVPKPLWSKKYYANEKNQIELRTDPILVQKDGTNLLIDSGIGLGKLTDKQKRNYGVTEESSIDDSLKALGLSTEDIKAVLMTHLHFDHACGLTRYEGESLVSVFPNAAIYTSAIEWEEMRNPNIRSKNTYWKENWEAVQHQVRTFDEKLEVLPGITMHHTGGHSDGHSVIVLEDAGETALHMADIMPTHAHQNPLWVLAYDDYPMTSIAAKQAWQAKAAEKNAWYIFYHDALYRALKWDENGDIAESVKRESR

SEQ ID NO: 8509 - protein, 213 aa, Bacillus licheniformis
MRMRHKPWADDYLAENSHIVISEPSQYKGKWHSVFGNDNPIHIEVGTGKGQFISGMALQNPDVNYIGIELFKSVIVTAVDKVKQTEAPNVKLLNINANMLSDVFADGEVDRVYLNFSDPWPKKRHEKRRLTNHAFLKKYEQVLGGKGAIHFKTDNRGLFEYSLTSFSEYGLVLTFVSLDLHQSDFEGNVMTEYEEKFAAKGQPIYRVEAEWRT

SEQ ID NO: 8510 - protein, 92 aa, Bacillus licheniformis
MGLNQQNQIHLLKDILSDHQADCTGTVAECEQMERIIKSLMANTNLDAGLKGVLEDIYLYSQKGRSSASINNHIQEHQDYLTQWVEDIDSFS

SEQ ID NO: 8511 - protein, 39 aa, Bacillus licheniformis
LKIDMNWLGQLLGSEWEISPAGGATGDAYYAEHNGQQLF

SEQ ID NO: 8512 - protein, 710 aa, Bacillus licheniformis
MPGISRPFEAYLDEMRTITVLVPKSRASSCSPPFLLEDDQGERIELSVKAQVELEEQFKYVLESSCTVPFGRVHKVCCEESVWTDLQIGSVTRSAAFDKAFFYDGRLGAFYSKGSTLFKVWAPTASAATIKLEDPDSLQTNTFQMMRRKKGVFEVTVEGDLNGWSYLYELYVNGKPLLTVDPYAKAVTANGEKGVVLDPEEVKVEKHRAPRLHSPCDAVIYEVHIRDFSIHEDSGMRHKGKYVAFTEDGTETSGGFSTGIAYLKELGVTHIEVLPFHDFAGVDELSPDQSYNWGYNPLHFNAPEGSYSLDPQNPKCRITELKTMIQSLHKHGFSVIMDAVYNHVYKRETSPFEKTVPGYFFRHNEYGFPSDGTGVGNDIASERLMVRKYILDSVRYWLEEYDVDGIRFDLMGILDIETVRQISTLAENVKPGVLLFGEGWDLNTPLDSGQKATLQNAGKVPAVGFFNDRFRNAVKGSTFELSDRGYALGDTGKKAALQHGIAGSPGFLQPAQSINYVECHDNHTFWDKMALCFEEDADTKRLRQRLAVSIVLLSQGVPFLHAGQEFCRTKNGDSNSYRSGDDINKLDWEKRAELCEDVEYVRQLIRLRRSHPAFRLQKEEEVKEHLSFMDGTGEVTAYKLKNIAAIDPWNEIIVVHCPFAKKETLKLPDQKQYLLHCDPFTFFNGKVQAEKRLRLNGIGTYVLYEPKGIF

SEQ ID NO: 8513 - protein, 306 aa, Bacillus licheniformis
MSDWYIIINPKAGNSTAFRAWKSLQKDLQKANISYRSFMTQHPGHAEVLARQISTMQDDRLKRLLVIGGDGTVHEVLNGLVSLRDIQLSVIPSGISNDFKRGFGVKKSNVIKEMKRKGQSLTRTYALGSFHTKDSENELYFANHLSLGFDACTAKKMSALPKWTAALRLNHLIHPLIFFVTAFTFKPFVLSYENGDDKRTFKKIWFASVSNHPYYGGGMKIAPNANPRDELLDVIIIEDLPVLKKAGLLFAMIFGKHVGKNGVTAFKTKDIYFHTNERVLFQADGEVIGWAPVFIKTGTESLRLRA

SEQ ID NO: 8514 - protein, 313 aa, Bacillus licheniformis
MAQIIKIQDCISRYEQDPYHYINQFIRLKKQRWQSIKEMAEKKKESFHHDKGAAGDETFGKRKNTFTLKRKKEASDINKGKEADEWFNGLDGETDESLIARIPAAGEELVPFFKEYVYEFQLKWASSTISDISRLSREIKSDKILHILAQQLPDSYFIMYRPVLQVNQAAVELSVLILTPLEIYCMSFLEGERDSAFIGSKDRFWKEKTVRGKERSLLNPAVELLRTGKVLSGLLKGSGIELPVRKVIVSRTSYIDYPEPPYGIGICDKRHWKEWLEKQQKNFAPIKSQQLKTAKILLSHGVSDSVRRQEWLS

SEQ ID NO: 8515 - protein, 201 aa, Bacillus licheniformis
MSVKPHYFIGIPIPAELSDPLYQTVSSRPEFSFHRWVHPLDYHITLVFLGSAEKEQLAMLAGSLKLISDETAPFQLAIKRFGTFGKPSEPRILHVEPEYSAALFHVREQVKHAADAAGFEIEKRPFHPHVTVARKWNGSASFNGRLEPLEDAVSFTARHFTIFQTHLDRLPKYEHQAVFHFGERPTAEKQDSEMNADGTDY

SEQ ID NO: 8516 - protein, 308 aa, Bacillus licheniformis
VRAVQNIAELIGETPLVNRVQPENAAQVYIKLESFNPSGSVKDRAAYQMILDAEEKGLLKPGSTIIEPTSGNTGIGLAMNAAARGYKAILVMPDTMTKERINLLKAYGAEVVLTPGDERMPGSIKTAQELARQIPGSFIPMQFDNEANPEAHRRSTALEIARAIEEIGKPLAAFVATAGTGGTITGTGEKLKALFPGITVHVAEPAGSPVLSGGKPGKHKLVGTSPGFIPNILNENVYDEILKIKDEEAYEMTRRLAREEGILVGPSSGAACFAAVETAKKLPPDKVVVCMTADTGERYLSSDLFQFD

SEQ ID NO: 8517 - protein, 69 aa, Bacillus licheniformis
LKQEKELKRFYSFYFCSFSVAGRFIRFFPCRQTIAFVARPAKSMLTNKRETAANGAGVVLPEHCRHHIL

SEQ ID NO: 8518 - protein, 45 aa, Bacillus licheniformis
MSHKRGVLFEIPNGYGRFLLDILKPVEPADFNWLLADGECYLVER

SEQ ID NO: 8519 - protein, 463 aa, Bacillus licheniformis
MNWEQEVLKRRNEIVEDIQGFLKINSVLDEETAGPGRPFGKGIQECLTALLNKGEESGFTVKNLDGYAGHIEWGKGEEIIGVLCHIDVVPPGDGWTSDPFAAEIRGGRIYARGALDDKGPTMAAFHALKIVKDSGLPLSKRIRMIIGTDEESDWRCVEHYFKHEEMPSAGFAPDADFPIIYAEKGLIDAALKIETDQAETGADLVLEAFRSGRRLNMVPDDAEAVLAGAVPSEFEESFARFVKEKRAEGRILQEGGRLTLTVHGKSAHAMEPNNGVNAGLILAEFLHTQSLDRAGLHFVQTVSGAFAGDTRGKKIGIGCRDDISGELTLNVGRLQYEQGKGGEAHINIRYPVTEESGRVKSGLSQIKGARLISFKDSKPHHVAKDHELIKTLQRVYEEQTGETAQLISIGGATYARSLKAGVAFGPLFPGRPDVAHQKDEYMEIDDLLKAVSIYAQAIYELAK

SEQ ID NO: 8520 - protein, 435 aa, Bacillus licheniformis
MFNIKENQTTVKKEILAGITTFFTMVYIVVVNPSILSGTGVPFDQVFTATIIAAVVGTLWMALAANFPIAIAPGMGLNVYFAVSVVGSSNGEISYQTAFSTVFAAGILFIILSLTPLRKQLIEAIPANLKYGITAGIGLFIAFVGLRGAGIITANEANLVGLGNLHSPGVILALIGLAFSVVLMVMNVSGALFFGMILTGLIAFFTGQLEFTKGIMSMPHLPEKLIVTNPFAAFGDVIHYGLYSVVFSFLLVTIFDTTGTMIGVAEQAGLMKNNKLPNARKALLADSTATTVGAMFGTSPTTAYIESSAGVAAGGRTGLTSLTVAVLFGAALFFSPLVSAVSGIAAITSPALIIVGSMMIGAVTNIRWKELDEAFPAFLVILTMPLTSSIATGISLGFIAYPIVKAAKGKWREIHPLVFVFAVLFFIHLFFLEGH

SEQ ID NO: 8521 - protein, 73 aa, Bacillus licheniformis
LKPSTNRMLTRIKSVYMFIQEKGLVTTQELVDEFGTTPRTIQRDLNVLAYNDLVHSPSRGKWETTRKKVKISS

SEQ ID NO: 8522 - protein, 240 aa, Bacillus licheniformis
MRLDKLLSNSGYGSRKEVKKMLKNGAVRVNDQLVKDAKKHVDPESDDITVYGAPVMYREFIYLMMNKPQGVLSATEDSRQETVVDLLDPELLRFEPFPVGRLDKDTEGLLLLTNDGQLAHQLLSPKKHVPKTYEVHVNKPIDQAALDQLEKGVDIGEGYVTKPAEASLLASENGVERLLLTITEGKFHQVKRMLKAVGHDVIYLKRLKMGDVDLDEELLPGEYRELSEHELAALQNKKTL

SEQ ID NO: 8523 - protein, 542 aa, Bacillus licheniformis
MSSKLLRGTFVLTLGTYISRILGMIYLIPFGAMVGATGGALFQYGYNQYTIFLSIATMGFPAAVSKFVSKYNSMGDYETTRRMLRAGMSMMLVTGIIAFSILYLSAPFFAEMALGGTENNGLTLEHVVYVIRMVSLALLVVPILALIRGFFQGHQMMGPTAVSQVVEQIARIVFLLTATYLVIKVLNGGLVVAVGYATFAALIGAFAGLFTLYFSWQKRKGALLALKPNLVPSADITYRQMFKELFSYAAPYVFVGLAIPLYQYIDTNTFNKAMIAAGYQNISQDLMAIVTLYVPKLVMIPVSLATAFGLTLIPAVTENFTNKDFPALNKQIDQAMQIILFIVLPASVGMALLSGPVYTFFYGSESLLPEMGRDILFWYAPVALLFSLFTVNAAILQGVNKQKFAVVSLMIGIVIKIALNVPLIKLLQGSGSILATALGYSASLLYGFIMIKRHAGYSYRKLFKRFLLMLILTAVMGIILLLVQALLSIFISYEGGQIRSAVVIFITTAVGGSVYLYLAYRVKLLEKIFGQRLNRFFKRKAS

SEQ ID NO: 8524 - protein, 424 aa, Bacillus licheniformis
MKYFDVIVIGGGPSGLMAAIAAGEQGADVLLIDKGNKLGRKLAISGGGRCNVTNRLPVDEIIRHIPGNGRFLYSAFSEFNNEDIIKFFERLGVKLKEEDHGRMFPVSDKAQSVVDALLTRLEQLHVSVRTNEKVKTVLYNEEKACGIVTGSGEEIAAGSVVIAVGGKSVPHTGSTGDGYEWAEKAGHTITELFPTEVPVTSDEPFIKQKTLQGLSLRNVALSVLNKKGKPVITHQMDMIFTHFGLSGPAVLRCSQFVVKELKKQEKVRLKIDLFPDIHEEQLFQRMHKELKDAPKKSLKNVLKPWMQERYLLFLFERNKIDPSETFSSLSKDRFRAFVKDCKEFTVNVNGTLSLDKAFVTGGGVSVKEIDPKKMASKKKEGLYFCGEILDIHGYTGGYNITSALVTGRLAGLNAGEFSLCRRKK

SEQ ID NO: 8525 - protein, 510 aa, Bacillus licheniformis
LKNISSVFWIVIVITAAAVLWGIVAPDNLQALTTSIQGYVTNTLGWYYLLVVSLFVAFSIFLIFSPIGKIRLGKPEEKPEFSRLSWFAMLFSAGMGIGLVFYGAAEPISHYAISSPSGETETAQAFRDSLRYTFFHWGLHAWAIYAIVALCIAYFQFRKDAPGLISATLFPVFGDRVNGPLGKGIDCIAVFATVVGVATSLGIGATQINGGLHYLFGVPNSFQVQLAIIAVVTVLFLISAWSGIGKGIKYLSNTNMVLAGILMIFMLFVGPTVLIMNSFTDTIGTYISNVVQMSFRLAPNDPDSREWINSWTIFYWAWWISWSPFVGIFIARVSRGRTIREFLIAVLFAPTVLAFLWFSIFGVSAMDLQQKGIFNVAKLSTDTMLFGMFDHYPLAMITSIVALLLIAVFFITSADSATFVLGMQTTYGSLNPENSVKISWGIIQSAMAGALLYSGGLSALQNTAILAALPFSVVVILMIVSLYKSLSQERKEIKQAEKFQKPRSPRVKKA

SEQ ID NO: 8526 - protein, 60 aa, Bacillus licheniformis
MLKVAVFDEEHEKDLQHEINEFLKKLSEDQLVDIKYDVSAACDPQGEQLYCFSALILYRT

SEQ ID NO: 8527 - protein, 104 aa, Bacillus licheniformis
MTIKEISPDELKDRLAKGETLNIIDVREDEEVAEGMIPEAVHIKMGDIPEKLDVFQKDQPYIFVCRSGKRSENVCLYLQDKGFDVTNMVGGMLEWTGNTKPKTK

SEQ ID NO: 8528 - protein, 44 aa, Bacillus licheniformis
MKKNICFFAVMLVCLMGGSFTADSAAQDGSFQPLGKSVFPDSGR

SEQ ID NO: 8529 - protein, 368 aa, Bacillus licheniformis
VEAKAAYEKAAGLLNQWYTMIKRHEALQAVSLRYEIQNLLSKMEKSGDLELYFQLLDYRCKLMMEQFAESAELFRKIKRQKETVKSADDIIQYYFFFFSGMYEFYEKNYLEAISCYKKAEAKLHKLTDEIEKAEFYYKIATAYYQIDDHFRSLNYSEKALSLFSKHKEYIDKTIGCEMILGSVQFELFRIKQAEEHYGRALDQAVALQNRRIIGLIYHNMGLNYAKCGMPLLAEEHFRKALSIGVHEQSVFGINTLFELSHLMYKNGSPEEARRLCKEGFTRSAELGEDEYAAKFRLIFALYDAGHPLDIEFSLEYMSDKRLWSHVAELTKDIADYYMKSGDHEKSALYLEKSQHAKNQIYKMKEGII

SEQ ID NO: 8530 - protein, 35 aa, Bacillus licheniformis
MALDHGVPLIQESGRFFVCRFRFHFFIHPFSFLKA

SEQ ID NO: 8531 - protein, 119 aa, Bacillus licheniformis
MGEEFEKRYLHWIDEAVKESEKKDDFKSLPGYGKPLSKEMLEGDALSSTLKNARYLPEWLKLQKEIKQEIEKAIKSNQRETLIDAINQKIKKYNLTCPNQFQKGLVSAKNLESQLKYWS

SEQ ID NO: 8532 - protein, 215 aa, Bacillus licheniformis
MEQNVSMGRVLSFCEWVLKFFYANLLWFVFTMLGLGVFGFMPATTALFSVTRKWIMGKTDIPIFKTFWQAYRGEFFRSNAIGLILAAAGIIIYVDLAFIYPDHLLLHVLRFVIMVFGFLFLIMLFYMFPLLAHFDWKKRMYFKFSLILGISYLQYTLTMMAVTAMLYIAFAFLPGIVPFFSASLLSYAVMWLAYQVLKKAEAAEQKETVITTRHT

SEQ ID NO: 8533 - protein, 425 aa, Bacillus licheniformis
MKKYAICGLSGRAFNMFIEPLVGKYGKENRIAALLDIDPLREEVCKERFPALRPVPFFEEKAFTEMLDKIKPDAIIVAGRDDTHVRYILGALRADIDVITEKPMVTTARDAAAVLKAEAESKGKVTVTFNYRYNPYHRKIKELILDGKLGTITSVDLNWYIDTYHGASYFKRWNRMRAFSGGLSVHKSTHHFDLVNWWLDQTPSEVFAYGGLYYYGPGGEMNPEKGENRYCGTCHVKKKCRYYMRWQAGDPQDDHVKTNESQHLLYTDYRPDACIFDEEIDIEDTYAAVLKYGKGALLNYSVHFSAPYEGYRLAINGTKGRLETQEYHAPARVPFEVPEQTIDYYPLFESKETIRVVRQPGGHGGGDPLLLEELFGGGDPLRNYDILAGAEAGAYSIAAGEALWRSIKEKKPIGISELLHTRQYT

SEQ ID NO: 8534 - protein, 164 aa, Bacillus licheniformis
VKNFAFSVLLIAAVLLLTSCGKDGSRGTDVLIFSDAPAEVKENVQRAVGKEQLNITVFPATPEKLLVEIAAKEGDLFIVPEDMFKPFYDPEGLQPLNAASEEKEPYSAPGKNGEVQLYAAVIEKGEKRLNGYTVQLNTDMAAFIPVYAKKTPEATELIEALQAK

SEQ ID NO: 8535 - protein, 373 aa, Bacillus licheniformis
MNQSLITKSPLYIAEEAAKTIMKAYTPKELPPAGRWHYHQGVFLCGLIRLWEETGKEAYFKYVKEYADDLIDDCGNFYFRRDELDAIQAGLLLYPLYEETGDERYRKAAKKLRGLFETLNQTEEGGFWHKDKYPYQMWLDGLYMGGLFALKYARAFNEPELYDKVILEEKLMRKHTKDCRTGLYYHAWDEKRQMPWADPVSGCSPEFWGRSIGWYALALSDMIELLPQGHSTRQEWTRTLQEMVKSIADFQDESTGLWHQVVDKGGLPDNWLESSCSCLYMYAMAKGARMGYIDSSYIDRAAKAFKGLVEEKIEMSAKEGLLLKDICVGTSAGTYDYYVGREKSTNDLHGVGALVMALVELEKTGRFSCGEAK

SEQ ID NO: 8536 - protein, 321 aa, Bacillus licheniformis
MKAADVQTGKNPALVVGKKRKTRFWEKLLQQKYLYLMILPGLIYFLLFKYVPMWGIVIAFQDYQPFLGITGSEWVGFKHFERLFTEPTFFMLLKNTLILFFLNLVVFFPIPIILALLLNEVRVALFKKFVQTLIYIPHFMSWVIVVSLSFVLLTVDGGLINEIIAYFGGEKINFLLNESWFRPMYILQVIWREAGWSTIIYLAAITAVDPQLYEAAKMDGANRLRRMWHVTLPAIRSVIVVLLILKIGDTLELGFEHVYLLLNATNREVAEIFDTYVYTAGLKQGQFSYSTAVGLFKAAVGLILVVFANRMAKKFGEEGIY

SEQ ID NO: 8537 - protein, 769 aa, Bacillus licheniformis
MKRKQYKFYYKLVTFFLILSTIPVIIVGFFSYQRSAETIEQNVTNEKLQTVSQTQLNIEHILKTVDHSFTNYVRSYPLIQTLSRTITPERFQLYNQINKELNELQTFDTDLSDITLISQEKKWYINNSGLYPLDQGKQAITLSLYNALKSRSSWVLEKNNGLVATKEGASGNCLYNVNLVKQLPLNSMENRGLAIASIPSCSLVKRMPDHSKTNSMMVLDDNGRIILHSDPSMIGQSIKQENYFKTIRRHQEKNGQFDTTVSDTAYNITYQKSDYNNWIYVSLTTIPELYQQTASIGWFTFTICLILLALSYLFSWFGSRHFYRPIKVLYESVSGFPPGADSVQEKPKNEFELIERNIKEMKNKNHDLKVRVEQQVTQLKQYFLTRLLLGKLSEEEIKDRFTGLGFPEDWSHLSVFTLQIDTLKDTSYEKKDLDVLLFAINSLVERSVPKNKRLPPVVIDKTQTIIMLNRGQPLERFQEDLEHTASAIKDKIHEELGLFVSIGISQPFTSLAMSKRGYLEGLEALTYRLKSGKHAVIFYEHLDRNKAFLTQFPKQIQNELFEAIKTCNRKQAAEQLHLLLESICSENMNPHHCQIAIARLLNNLIEFMHLLGIEIFEPNENTMLYDDVFELTTIEEIESWLNAQIIVKMIDTLSIREESQYKNISEKIVHIIQQEFDTDLTLESIAGRLHYNPNYLSSIFRKEMKISFSEYLSSYRHHIAKNWLTETTMSVKEISEKLKYKNPQNFIRSFKKLEGITPGKYRELKNHSA

SEQ ID NO: 8538 - protein, 501 aa, Bacillus licheniformis
MGKKWLIPIFAFVLLAGGLLGCSNSGADQASSKEEKVDLNSPLDLSWMVILYHQQPPKDTAIKKIEELTNTKLDLMWVPDAVKEDRLNSALAAGNLPKVVTIQDIKNSSVMNAFRSGMFWEVGPYLKDYPNLSKMNKLINKNASIDGKLYGIYRERPLSRQGIVIRKDWLDNLGLDMPKTVDELYETAKAFTEKDPDQNGKNDTIGFADRNDLIYGAFKTLGSYMGMPTDWEEKDGKFTPDFMTKEYMDTMKYMKKLYDEGLINKDFPVTSKTQQQEMFSQGKAGIYVGNMVDAVNLRDQSVDDKMELEIINRIKGPDGKERVWASGGHNGIFAFPKTSVKTEKELKRILAFFDRIAEEDVYSLMTYGIEGVHYKKEGNKQFKRIDEKLKDWQAEIQPLVSLVGIDKQYLKNTGDPLRTKYEELTEDNNEIIVSNPAESLYSPAASERGDELQKIIDDATYQFILGKINESQFEKAVEKWRTNGGNQVIEEYEESFKKAEK

SEQ ID NO: 8539 - protein, 282 aa, Bacillus licheniformis
VFDILNYSFLTGFGLVCVLPFIHVIAASFATVEEVISKKFILIPTTFSLDAYRYIFSTDIVYRSLIVSILVTAVGTAVSMFLSSLMAYGLSRKELMGRRVLMFLVVFTMLFSGGMIPTFLVVKSLGLLDTYWSLILPTAINAFNLIILKNFFQNIPSSLEESAKIDGCNDIGIFFRIILPLSLPAIATISLFYAVTYWNTYMQAILYLSDATKWPIQVLLRQIVIVSSGMQGDMTEMGAAAAPPEQTIKMAVIVVATIPVLLVYPFIQKHFAKGALLGSIKG

SEQ ID NO: 8540 - protein, 254 aa, Bacillus licheniformis
VKKVTIVGGNGTVGRVLAGGLAGEGYEVTVLDLKEPDDKQAVRFIRVDATDYNEVVKSIPAQTNALINLLAVKPSGDLLDRQEFAKMTDIFFKATYTILRAAAELGVPKVVFASSNHVTDVYEKGGDSLLGRQINTNDYPQSKSLYGLLKLASENLGYLFSHQLDAKVSVINLRIGTAAENELETLHAKPRSKKTLLSHPDLIGIFKAAIESGKTYGTYYAVSDNKGRPWSIDSAIRELGYRPQVSASDILDED

SEQ ID NO: 8541 - protein, 295 aa, Bacillus licheniformis
MRSQLFKLLGDLPGKKSIDASTLKIEEKSSFILETLLLDLNGIEAVPAYFAKPKQMNGKRPAVLYCHSHGGRYERGKEELVEGAEYLQAPPFAEELTALGFSVLAIDHWAFGDRRGKTESEIFKEMLWTGRVMWGMMVFDSIRAIDYLKMREDIDESRIASLGMSMGGLMAWWTAALDERVSVCVDICAQVDSEALIKTQNLDRHNLYSYVPGLVKHFSTAQIESLIAPRPHLSLVGTADKLTPVQGIDIIEEKLSDVYIEKGAGERYEVFRSHSGHLETAGMRHKAVGFLKTWL

SEQ ID NO: 8542 - protein, 416 aa, Bacillus licheniformis
MREKKLGPLLLSGLMTGPILGSGIILLPPMIHQTAGDYAIFAWLLMLGIGFLFAWVFARLSVEYPNDAGIAYAAEKAFGSRVKKLAVFYFIMAASFGPAAVLMTAGEYIHSLAAGTAFPAELYGFVFFIFCMVILCFNLSFVGMVALIFSTAAALILFGSSAASVPYFREGPLVDGTFQFTDFGRGLLLLFWALVGWEIVGNYSMEVKNRGKTIPRAVVISSLTVTVIYLATAAAVQWIDPGFSANGQLKLAMMLTPLFGSFALPVIAVLTAVLCMCAYFQVTGGAARLVASQAGGLFAYRSRGNQPTAALGLIFLIHTIVFVCLMFHFLNVETLVLIANAFFICNSLCGLAAAYKLLSGRIYKKVCLFLMGGFTLLILFSSSWVLLFIMLASALFVVNFRQLNIWKKVKRPFKSY

SEQ ID NO: 8543 - protein, 297 aa, Bacillus licheniformis
MEIRHLKTFKTIVDIGGFTRAADYLGYAQSTVTSHVQAIEQELRKPLFYRLGKKMMLTEAGKHLLPYAAEMVELYEKARHIPENDQEPSGNLIIGASESLTVYRLPAILHEFTSKYPQVTVTLKSSTCWQLRDELKQGKIDVAFLLDNDRKENDLHVEKLVNEPMVFIFPKEHPAGQKALDDLTFNANETFLYTEHGCSYRDFFEEYLRQRGVIADHTMEFWSVEAIKQCVMCGLGVSLLPLITTRTDIEEGKLQGTLVRDALFSTQMVYHKNKWLSPAMAAFTDIVRRKAREWEQT

SEQ ID NO: 8544 - protein, 134 aa, Bacillus licheniformis
MHFSDFSAVQVRIARPTDRFDEIVAFYEKGLGLKKLGGFSGHHGYNGVMFGLPNVQYHLEFTSHIEGSPCPAPTKDNLLVFYIPDPEEIRSILNRLADMGYDEVPPENPYWKEKGATVEDPDGWRIVLMNTEGI

SEQ ID NO: 8545 - protein, 41 aa, Bacillus licheniformis
MAKAPSIRRGFFCHSAERMIIFQTIASFQMIHDRLKWEKRR

SEQ ID NO: 8546 - protein, 804 aa, Bacillus licheniformis
LSFDHQTIEKKWQDYWLKNKTFATREDKSKPKFYALDMFPYPSGAGLHVGHPEGYTATDILSRMKRMQGYNVLHPMGWDAFGLPAEQYALDTGNDPAVFTEQNIDNFRRQIRALGFSYDWDREVNTTDPDYYKWTQWIFLKLYEKGLAYVDEVPVNWCPALGTVLANEEVIDGKSERGGHPVERRPMKQWMLKITAYADRLLEDLEELDWPESIKEMQRNWIGRSEGAHVHFAVDGTNETFTVFTTRPDTLFGATYAVLAPEHDLVQKITTPEQKDAVNAYIEEVQSKSDLERTDLAKTKTGVFTGAYAVNPANGEKIPVWIADYVLATYGTGAVMAVPAHDERDHEFASAFGLPIKEVVKGGDVEKEAYTGDGEHIHSDFLNGLDKAAAIEKMIQWLEENGKGEKKVTYRLRDWLFSRQRYWGEPIPIIHWEDGTSTPVPEEELPLILPKTSEIKPSGTGESPLANIKEWVEVTDPETGKKGRRETNTMPQWAGSCWYFLRYIDPKNPNELASPEKLKEWLPVDMYIGGAEHAVLHLLYARFWHKFLYDIGVVPTKEPFKQLYNQGMILGENNEKMSKSKGNVVNPDEIVETHGADTLRLYEMFMGPLDASIAWSTTGLDGARRFLDRVWRLFIDDNGGLNEKIVEGAGETLERVYHETVMKVTDHFEGLRFNTGISQLMVFINEAYKADQLPKEYMEGFVKLLSPVAPHLAEELWNRLGHEETIAYEAWPVYDEAKLVDDEIEIVVQLNGKVKAKLNVPADADKEQLEELAKNNEKVKEQLEGKTIRKVIAVPGKLVNIVAN

SEQ ID NO: 8547 - protein, 83 aa, Bacillus licheniformis
MKMLHQVLVACLIGGIMGVLGHVKKRGRLEKPRTTKRFIYLGFFEDILVEWLLLFCLFYLRNLIREFSLSCYRSLPATAVKLY

SEQ ID NO: 8548 - protein, 38 aa, Bacillus licheniformis
MEETSFFSSQTEHIFCMVVSNIIARGLGGLLDGLKSLD

SEQ ID NO: 8549 - protein, 393 aa, Bacillus licheniformis
MPRTLWLLVIGMFINVTGASFLWPLNTIYIHQHLGKSLTAAGFVLMLNSGANVLGNLFGGYLFDKIGGFKTVVLGIVITFASLSGLVFFHDWFQYILFLTLAGFGSGIVFPACYAMAGSVWPEGGRKPFNAVYVAQNAGVAVGSALGGIVASFSFTYVFLANAMLYAVFFMIAFFGFKRIRSEKAMQSSVLDHADSVSGKSKFSALLVICTGYLLGWIAYSQWSSTIASHTQELGISLGQYSVLWTVNGALIVFGQPLIGFFVKRFAESLKNQIVIGFVIFMMAYGILFGAERFPAFLAAMVVLTIGEMLVWPAVPTIANRLAPRGKEGFYQGFVNSMATGGRMIGPLFGGMLVDYFSMQLLLAVLLALLLIAIGTAFLYDRKEKQLSAQSDA

SEQ ID NO: 8550 - protein, 274 aa, Bacillus licheniformis
MNKLLKWTSALGLALSLALLAACGNNAASDGKTIKIGATAGPYYDMVKKAIQPELEKKGYKVEVIEFTDYVQPNTALSEGELDANLFQHEVFMKSYNQENNKNLAALISVPTAPMGLYSAKYNDLNDVKSGAEVAVPNDPANAARAFLTLQDQGLIRLKSDVDTLKASVQDIAENPKKLTFKQLESANLPRAVDDLDIAAVPGNFALSANMKLQDALALENMPDRYRNQVVVDEKNKDKPFAKDLKEAVKSKAFEETIDREFAGFGKPKWMTQS

SEQ ID NO: 8551 - protein, 226 aa, Bacillus licheniformis
MESIMLIGFLSFLFSICYLVFHLIRRIFSPGKRFSRKLFYPCFAGGLLLLIISAPYYDEETYAADEKKTENLTTELQELKTEHSALQKEQTALKQQVKQANEKLKSVKAENDTLKKANEKLTKEKDSLTKKTKSLTEKLAKAEEKSGSAETSVKEKSAAAQAEASHSTPAAKKSSAESKQECKIKGSVNHIYHTPGSTYYDRTKNVARWFCTEQEARDAGYRPPKR

SEQ ID NO: 8552 - protein, 443 aa, Bacillus licheniformis
LKFKDQLKFIRRNMKKNRLRVFMTILATTVACAFLIVLASVGFGLQKSMTEQLMKEQIVTEINVVGKEGQSDQKVQKKDLKEFENRKDVSAIIERTNVFAPAEAKLGNRTNNQMSNITITDMAAEQKANIKLDRGRVAKTPNEIVVGYHFGKNLWTKKEAADYEKQMENNAEEAKEPKGYEEDILGKTIELKISKMDEKTGEEGEAKTYDLKVVGVTKKPSYEWASDSTVYVSNGMQKDITGFLKSEKDSGMIEKTLSVYADNFEHVGQLTTDLEDEGYYVDSITKKLDSINLFFMAFKIGLIFVGVIAVLISAIGIFNTMTMAVTERTQEIGIMKAIGASPNVIRKMFLLESAYIGILGSVLGIIISYGVSFLVNKIIPVILSSVSEGEASAAELSITFSHIPVSLVLIATLISAGVAILSGLNPAIKATRTNVLTALRREL

SEQ ID NO: 8553 - protein, 232 aa, Bacillus licheniformis
MISVKHIHHSFKVGKKGRENEIKVLKDVSLTVEKGEIACIVGRSGSGKSTLLNLISGYIAPTKGKIMIDGTDVTKYSEKEWAAFRLEHFGFIFQSFQLIPSLTTFENIELPLTLKGVHPSERKQRVNEMLHRVGLENHAGHYPNELSGGQQQRVSIARALILNPSIILADEPTGSLDSETEQEILEFIRQLNRERGITFVIITHDDEVASIANTKFHLSDGVLEKGEETVEV

SEQ ID NO: 8554 - protein, 325 aa, Bacillus licheniformis
MVDRGLLYKEWKQHFWIFLVVFAAVLLSEPLAILNDYFQYQGCLAEQKKFPDIECVLYKDYGVSGAMRMFWVGGVALAISQIGFERSSGTLDFTLGLPYKRGVIFNTKYFFGISILLTAQLLSYLLSYALIILYNVDVVFFHEYFIGAVIFCFMVYSLVMAAGAMTGNPLAQMIVAFSASILPYLLIGLPLANLRIILGFFGHDPAFFYGETELLDYITPIIYLNSFGIQDGSLAFTLIPLAMGILFYIIGYFCFIKQQLERNGHFFLWRKMDRPIQILVILFGIWGFGTAAASSLFSYIFGMLIGSAVGFLISYFLIFKKIKQL

SEQ ID NO: 8555 - protein, 292 aa, Bacillus licheniformis
MIELKSVSKTIDGKQILKDISFKLEEGEIFGLLGRNGSGKTTLLRLIQQILLPDEGDIFFGSVKVKDHPLVKRNIVYMPVQNTYFEKYNYKQLVNILRNIYPDFDVTYANELMNRYDIPETKKYRELSTGLKKQMSLILSFAIRPAVILLDEPTDGIDAVTRQDVLQLMVDEVAENNTTILITSHRLEDIERMCNRIGFLEDNTLSNIMDLDELKGDFIKIQMAFEEDVNLKIREREIPVLDHTGVFYTVLVPKEDNVSKQFLKSLSPKVWNELPVSLEEVFIAKYGGKRRW

SEQ ID NO: 8556 - protein, 130 aa, Bacillus licheniformis
MIQIDPRSSTPIYEQIIQQMKELCLKGIIKPGDKLPSVRELATIIIANPNTVSKAYKELEREGIIETLRGRGTYISENAKVTLDEGKIAMIKEQLKQLIIDAHYAGIDTKKLQEWMAEIDEEVRGGEVND

SEQ ID NO: 8557 - protein, 42 aa, Bacillus licheniformis
MSDKHKKVTPMVVVAFIIACSFLFVLAKLGFMIQENLGYVFF

SEQ ID NO: 8558 - protein, 90 aa, Bacillus licheniformis
LATRQSVGEHIQRSEDAYDYALSQFETASRQEHYNETEYSDAQLMLENAVNELNKLSLFANEQQREEIHRKRLQLQTLQNNMILQRSYER

SEQ ID NO: 8559 - protein, 322 aa, Bacillus licheniformis
LHQNNPFPYTNSEKRYHTWNYHLRNHFGHKVFKVALDGGFDCPNRDGTVAHGGCTFCSAAGSGDFAGNRADDLITQFNEVRDRMHEKWKDGKYMAYFQAFTNTHAPVSVLREKYETVLGLDGVVGLSIATRPDCLPDDVVEYLAELNERTYLWVELGLQTVHERTADLINRAHDFDCYVEGVNKLRKHGIRVCSHIINGLPLEDRGMMMETAKAVADLDVQGIKIHLLHLLKGTPMVKQYEKGKLTFLSQDEYVQLVCDQLEILPPEMIIHRITGDGPIELMVGPMWSVNKWEVLNAINGELERRGSHQGKWFNKAKEGMAT

SEQ ID NO: 8560 - protein, 194 aa, Bacillus licheniformis
MKLKKILPYAKELLKTAAGEGDIVIDATMGNGHDTHFLAELVGESGHVYAFDIQEAALMNTAERLGNEYKDRVTLIQKSHDELTTSLPDDISGKVAAAVFNLGYLPGGDKSVTTKSDSTIASIKQLLKILKNEGLIVLVVYHGHPEGKREKDALLEFCASLDQDTARVLCYQYLNQRNDPPFIIAIEKKEAVQK

SEQ ID NO: 8561 - protein, 416 aa, Bacillus licheniformis
LKKFIAYQILIALAIGAVIGHFFPDFGMALRPVGDGFIRLIKMIVVPIVFSTIVIGAAGSGSMKKMGSLGIKTIIWFEVITTFVLGLGLLLANVLKPGVGLDLSHLAKKDIDELSGYTEKVVDIKQMILDIIPTNIVDVMARNDLLAVIFFAILFGVAAAGIGKASEPVMKFFESVANIMFKLTQMVMVTAPIGVLALMAASVGQYGIELLLPMLKLVGTVFLGLFLVLFVLFPIVGLVFKIKYFEVLKMIWDLFLIAFSTTSTETVLPQLMDRMEKYGCPKRVVSFVVPSGLSLNCDGSSLYLSVACIFLAQAFNIDMSISQQLLMMLVLVMTSKGIAAVPSGSLVVLLATANAVGLPAEGVAIIAGVDRVMDMARTGVNVPGHAVACIVVSKWEKSFRYNKRFVLEKQYRTESL

SEQ ID NO: 8562 - protein, 359 aa, Bacillus licheniformis
LAVPEHPFGLMAKVYREVFPLVHQELDKWKRKAETIQNPELKTQAKASIRDKTFHCEGGGIMALLSGDKIEQSIRFITAYQTISDYLDNLCDRSTSLDPDDFTMLHQSMKDALTVGAELKNYYRFREDQDDQGYLHDLVKTCQGVLAEIENYDLIKEHLIELCSYYCDLQVHKHVVEHERVPRLEAWFENYKSALPKMEWYEFSACAGSTLGIFCLVSYSVRPDFTESMAGKIRDSYFPYIQGLHILLDYLIDQEEDLIGGDLNFCTYYPSHSDMMERLEYFIEMADEHLRGIPHENFHRLINRGLLGVYLSDDKVAGQKEIGRLAKKLIKASGKTSFFFYINGRAYRKIQKMPWMKSS

SEQ ID NO: 8563 - protein, 259 aa, Bacillus licheniformis
MWCMEAERPVATIVIIHGACEHHGRYKWLSEMWRSSGFNVVMGDLPGQGTSTRERGHIRSFQEYIDEVDKWVARAKAFELPVFMLGHSMGGLIAIEWFKQQQSGIAGLILSSPCLGLQLKPNKFLDLISKGLNVLAPSMRFESGITPDKATRNKEVIEMDINDSLYITKVSVRWYQEMLKALKSAMEPTDAFLNIPLFVMQAGTDWLVDKKMVVKWFNQLASHNKTYREWDGLYHEIFNEPEREDVFKAARAFAEQYIT

SEQ ID NO: 8564 - protein, 172 aa, Bacillus licheniformis
MIYPYKKTEPVIHETAFIADNAVITGDVTIGERSSIWFSSVIRGDVAPVRIGKGVNIQDLSCLHQSPERPLVIEDGVTVGHQVTLHSSVIRKHALIGMGSIILDEAEIGEGAFIGAGSLVPPGKKIPSGHLAFGRPAKVIRPLTDKDKQEMERIRKEYIEKGQYYKSLQKKD

SEQ ID NO: 8565 - protein, 44 aa, Bacillus licheniformis
LLQLYHFSTDNLSKNLFGRTRLRLFSFSEIFTNTYHLLNIHFLQ

SEQ ID NO: 8566 - protein, 174 aa, Bacillus licheniformis
LNKLMVGIYNFECRIFLGMNRLFHQKTLNRYFRSSTHLGGAMCTISACLSLLLFGSGSVRTAGMASALALLVSHLQVMLIKKLYPRKRPYLTLKETQVLQNPLKDHSFPSGHTTAVFSVITPLMIFFPILALLLIPVGVSVGLSRIYLGLHYPSDVLAGTALGISVGTLSAMIF

SEQ ID NO: 8567 - protein, 378 aa, Bacillus licheniformis
MKIAIFTDTFTPDVNGCARTLKRYTDYLEKNGMPYKVFAPESTHETQFSSRIRRFTSMPFFLYPECRIALPNLIKMKSELREFHPDLIHIATPFNIGLAGLKLAKKWNIPVVGSYHTDFDQYLSYYDLQMFSKLLWKYMLWFHKDFRKVFVPSRETFMQLKAKQFRNLSIWKRGVDCSQFSPAHQTEHIRKRYGIKETYILSYVGRLAPEKDLETLLKIASHPALKDDVHWLIAGDGPLKKELEKRAPLNMTFAGYVKGEELASIYASSDLFVFPSPTETFGNSALEALACGTPVIGADSGGLKDFIQNGRNGFLSEPRNPEAFTANILRVLSNPSLKKRMAYEARSYALTQSWDVIFDNLLSECESVLADLSAEKTA

SEQ ID NO: 8568 - protein, 632 aa, Bacillus licheniformis
MCGFVGVFNHRPSSETAAQEELIKQMNEMIVHRGPDDDGYYHDEHVGFGFRRLSIIDVENGGQPLSYEDDSYWIIFNGEIYNYIELKDELLSKGYEFKTDSDTEVLLATYRHYKQEAASKLRGMFAFLIWDKKEQLLYGARDPFGIKPLYFTKTDGHVYFASERKSLMAVDADLELNEKALQQYTSFQFVPEPETLDKKVQKVESGHQFTVRPGEDIQFKTYWKVQFKPVQTEEDKLVQEVRDAIFDSVKVHMRSDVPVGSFLSGGIDSSFIVSVAKQFHPNLKTFSVGFEHEGFSEVDVAKETADKVGVENFSAIISPEEYMNELPKIVWHLDDPLADPAAIPLYFVAKEAKKQVTVVLSGEGADELFGGYNIYREPLSLKPFERIPSPLKKMLLRVASAMPEGMKGKSFLMRGCTPLEDRYIGNAKIFEEGMKSKLLRQYDSNLSYCDVTKPYFEESRSYSEINKMQYVDIHTWLRGDILLKADKMTMANSLELRVPFLDKVVFEAASKIPEELKTKNGTTKYLLRKAAEGIVPEHVLNRKKLGFPVPIRHWLKNEMHDWAVNIIKESETDAYIHKDYVLQLLEDHCANKADNSRKIWTVLIFMIWHSIFVEKRFVPEELNHQPKEVIIV

SEQ ID NO: 8569 - protein, 40 aa, Bacillus licheniformis
LKNVHIKIFVSGNITSILNLDIFQVSTSARILPSKNKAAY

SEQ ID NO: 8570 - protein, 400 aa, Bacillus licheniformis
MSKNRRLFTSESVTEGHPDKICDQISDSILDEILKKDPNARVACETSVTTGLVLVSGEITTSTYVDIPKTVRETIKEIGYTRAKYGFDAETCAVLTSIDEQSPDIAMGVDQALEAREGAMSDAEIEAIGAGDQGLMFGFACNETKELMPLPISLAHKLSRRLTEVRKEEILPYLRPDGKTQVTVEYDENNKPIRIDTIVISTQHHPEISLEQIQRNLKEHVINPVVPKELIDENTKYFINPTGRFVIGGPQGDAGLTGRKIIVDTYGGYARHGGGAFSGKDATKVDRSAAYAARYVAKNIVAAGLADSCEVQLAYAIGVAQPVSISIDTFGTGKASEETLIEVVRKNFDLRPAGIIKMLDLRRPIYKKTAAYGHFGRLDLDLPWERTDKADQLKKDALGE

SEQ ID NO: 8571 - protein, 527 aa, Bacillus licheniformis
MNSVDLTTDLQTLLTGENVQMNLSVPHLVEKILERKEGVLTSSGAVRATTGTYTGRSPKDKFIVEEASTKDKIDWGAVNQPISEAAFDRLYAKVLGYLKERDELYVFEGFAGADEKYRLPITVVNEFAWHNLFARQLFIRPEEHDKKPEEQPFTILSAPHFKADPLVDGTRSETFIIVSFEKRTILIGGTEYAGEMKKSIFSIMNFLLPEQNILPMHCSANIGEEGGTALFFGLSGTGKTTLSADPKRKLIGDDEHGWSSTGVFNIEGGCYAKCINLSEEKEPQIYNAIRFGSVLENVVVDSKTGEPDYSDSFYTENTRAAYPIDAIDNIVKPSIAAHPQTIVFLTADAFGVLPPISKLTKEQAMYHFLSGYTSKLAGTERGITTPEATFSTCFGSPFLPLPAHVYAEMLGRKIDEHGVGVFLVNTGWTGGGYGTGERMSLAYTRAMVQAAIEGELDKAEMRTDRIFGLHSPVHVPGVPDQVLDPAKTWTDENEYEEKAIHLAKAFKQNFKKFSNTENIEKAGGPLV

SEQ ID NO: 8572 - protein, 394 aa, Bacillus licheniformis
MKFGLLPRIITAIVLGVIVGSFAPLWFVKTAATFNDIFGSFIKFVIPFIIIAFIIPGIGQIGSGAGKILGITAGIAYTSTIFAGLLAYLVGSNLLPAIISGHQLQEFKNPEEVLQAGFFTIEMTPFMSVMSALIFAFIMGIGIAYLPGKTLKNAFDEFQTIVEKLISYIIIPLLPVHIFGIFTNMTFGGQVQTILSVFAKVFVMIIVLHLVILLIQYSVAGAANGRNPLSLLKIVAPAYFTALGTQSSAATIPVTLRQVRKTGASQKVADFAVPLLANIHLSGSTITLTSCAMGVMILNGQTPTFSVMMPFILMLGVTMVAAPGAPGGAVMAAAGLLQSMLGFNETSVSLMIALYLAQDSLGTATNVTGDGALTMLIHRLTSKKGIGKEENVPA

SEQ ID NO: 8573 - protein, 80 aa, Bacillus licheniformis
VGMPVEFNTMIVTKGKETRVEENVFTLEKEGYRVYPLHVPLEVRKTKRGDITGTAQAERLEWSDGRTHLTYRLVSLNSTN

SEQ ID NO: 8574 - protein, 266 aa, Bacillus licheniformis
MWIEKRRFPSPNKEVRLFSVTYLSQGLKVKGLLAEPAAPGNYDGFLYLRGGIKNVGMVRPGRIVQFASQGFVVLAPFYRGNQGGEGDEDFAGNDREDAFAAFRLLQKHELVKDGRVHIFGFSRGGIMGILTAIEMKAAAASFVSWGGVSDMVMTYRERKDLRRMMKRVIGGTPEKVPEAYEWRTPFDELEKIEAPVLLIHGANDENVSIEHARRLERELLRRNKSVDTWYFSQYTHYFPPRENRRIVRELSQWMKSRPWTSYGKLK

SEQ ID NO: 8575 - protein, 330 aa, Bacillus licheniformis
LKRFFFTILSFIMMLFILASCGGQKTEKIRLAEVTRSVFYTPLYIALSEGFFKEEGLDVELKTTWGGDKTMTALLSNGADIALVGSETSIYVNAQGASDPVINFAQLTQTDGTFLVSRNDSGHFSWDDLKDKTFLGQRKGGMPQMAGEFVLKQKGIDPKKDVDLIQTIDFANIANSFASGTGDYVQLFEPQASIFEREGIGRIVASFGKESGRIPYTTFMAKQSYLTKNKEAVEKFTRAVYKAQQWVETHSAKEAAESIQDYFKDTELSIIASSIERYKQQQSFALDPVLDEKEWNQLQTIMDEAGELPKRTPHQKLVNTKIAEKVTKNY

SEQ ID NO: 8576 - protein, 262 aa, Bacillus licheniformis
VSFLQVQDVTHTYFSLKEKTAALENVSIEVEKGEFVSFLGPSGCGKTTLLSIIAGIVSPTEGRVLVEGRTPDGKDRHIGYMLQQDYLFPWKTIEENVLIGLHISKKLGPETKETALGLLKKFGLYEVEKKYPKELSGGMRQRAALARTLAVDPDILLLDEPFSALDYQTKLNLEDLVFNTLKTYQKTAVLVTHDIGEAIAMSDRILLFSKQPGTIHKTFAVPEPIRKLTPFEARQEPEFQPLFQNIWKELNDLEQQTSETKS

SEQ ID NO: 8577 - protein, 274 aa, Bacillus licheniformis
MTLNNKHPKPKVDFLHEAFLKEQQAEKRRVRFFQIAIFIVFFSLWETASRLAWIDPLIFSSPSAVWALFLEKMGDGSLPGHIGVTVFETILGFLAGTLLGTFLAALLWWFPRLSKILDPYLVVLNAMPKVALGPILIVAIGPSLTSIIAMGAIISVIITTIVVYTSFQEIDENYLKVMKTFGATKREIFKEVILPASIPTIISTLKVNVGLSWVGVIVGEFLVSAQGLGYMIIYGFQVFNFNLVMLSLLIIAVFATLMYQGVELLERKWMKGRV

SEQ ID NO: 8578 - protein, 158 aa, Bacillus licheniformis
MYEFKDFYRNTVQLSFEKEPFSKEPKHVWVICRYEDQWLLTNHKDRGREFPGGKVEPSENAEEAALREVKEETGAVVRKLTYLGQYKVLGREKVIVKNIYFADIEKIEKQQTYYETNGPVLLKSLPKDIAKNKNYSFIMKDSVLTISLEKLKKAGIIK

SEQ ID NO: 8579 - protein, 107 aa, Bacillus licheniformis
LEKKTYYVSVQDGMISQSSDASPWEFQISATDDDIIILREYFDQLYSEDWVNFFRAHVPAVEYHNDSANDKMDELRKDIYSMLYRLGNEETKSFISENGLAELNSAD

SEQ ID NO: 8580 - protein, 134 aa, Bacillus licheniformis
MFKDLSIFSLFTIGLSAIGFLFGRIEYLFMILITLMGIEFVSKSLNECVEDRFTIKRLFTRLAKKLVTLFLISVAHLFDQMLQTGSSIRDFSIMFYILYEAFQIVSTAHSLGIPVPQMLLDILNTIKEKLRGKP

SEQ ID NO: 8581 - protein, 145 aa, Bacillus licheniformis
MSEKLKATVNKQVANWTVLYVKLHNYHWYVKGKDFFTLHEKFEELYTEAAEHIDDLAERLLAIQGSPVGTMKECLEMSAIKEADGSESAEQMVQNIYNDFLTVAEELKSGMELADEVNDETTGDMLLAIHQSIEKHNWMLKAYLG

SEQ ID NO: 8582 - protein, 47 aa, Bacillus licheniformis
MILFWIIVGILITGAVLAISLVTTSKAYDFKHEVDPLPSREEEQPHQ

SEQ ID NO: 8583 - protein, 147 aa, Bacillus licheniformis
MRFGKWFILLCLAVGLSACSQGDKQAASDEEPKVLTAKLATPESAAKNEKAVIKATVLYGEEPVADADEVEFECWKAGSKEDSELIKAKNEGKGVYSMEKAFPEDGHYKVQVHVTAKKQHTMPVADIKVGKATDETDEDEKEEAHHH

SEQ ID NO: 8584 - protein, 55 aa, Bacillus licheniformis
MIEKNRLIREPVFYFLFTKKIMPFIPELCYTLYCNTYHRRRVIGCVLENGSFSYV

SEQ ID NO: 8585 - protein, 157 aa, Bacillus licheniformis
MPSVESFELDHNAVKAPYVRHCGVHKVGTDGVVNKFDIRFCQPNKQAMKPDTIHTLEHLLAFTIRTYAEKYDHFDIIDISPMGCQTGYYLVVSGEPKVEEIVDLLEDTFKEAVEVTEIPAANEKQCGQAKLHDLEGAKRMMRFWLSQNKEDLLKVFG

SEQ ID NO: 8586 - protein, 75 aa, Bacillus licheniformis
MKTVFLLLIRFYQKWISPALPPTCRFYPTCSNYGLEAIEKHGAFKGGWLTIKRILKCHPFHPGGIDPVPEKKQKD

SEQ ID NO: 8587 - protein, 189 aa, Bacillus licheniformis
MKLLDNILQFNQQFVERQDYQKYQTSKFPDKRMVILSCMDTRLVELLPHAMNMRNGDVKIVKSAGALVAHPFGSIMRSILVAVYELNADEVCVIGHYDCGMSKLSCDSFLDKVVKRGIPKERIETLEYSGVDFEQWLKSFDSVEDSVRDSVSVIRNHPLMPEEVPVHGLVIDPETGRLDLIVNGYPEER

SEQ ID NO: 8588 - protein, 393 aa, Bacillus licheniformis
MKENLIPVTVLSGYLGSGKTTLLQHVLHEAHGLKIAVIVNDMSEINIDGSLVKKGDLIRTDEKLVEMQNGCICCTLRDDLLIEVKKLAENGGIDYILIESSGISEPIPVAQTFTYKDEELNIDLGKYCRLDTMVTVVDGSRFFEDFASGESLLERKQAADETDSREVADLLIEQIEFADVLILNKTDLLNEEEQEKLFWSLRKLNPDCRIISAAFAKVPLSAIMNTKSFDFEKASQSAGWIKELNEEHTPETEEFGISSFVYQKQRPFHPERLKRWLENWPPQIIRAKGFFWLASRNDTAGLLSQAGSSLMIQSAGPWIAASTEEEQKLAFEEDPNLKADWDETYGDRKTEIVFIGIDMNQEDIIRSLDQTLLTDKEMNSDWSALLDSLPEYI

SEQ ID NO: 8589 - protein, 343 aa, Bacillus licheniformis
MKKTFGIASAFILAAGLTAGCSSNGASSEQKENKDTLDIYTTIYPLEDFTKKIGGEYVNVKSVYPPNVEAHTYEPSSKTMAEISDSDAFIYSGVGVEGFADKAVSTLKNSDVKIVKAGEGIDLLSREEEGEHDEHAHGEEHGEHDEHAHEEEHEHGEAEGHDHHHDHGDHDPHAWLDPVLAEKMAENIKDQLVKLEPEHEKTFTKNYESLKKDLEQLDKDFKQTVDKADKKEILVSHAAYGYWEKRYGIKQISVLGLSPTEEPSQKQLENIVKTAKEHNIKYIIFESNVSSKISEIIKKEIGAESLTMKNLESVTKEDIESGKDYTAIMKENLDVLKKALSSK

SEQ ID NO: 8590 - protein, 81 aa, Bacillus licheniformis
MKPNIHPKTYQVIFQDVNSGYRFLSRSTKTSDETAEWEDGKTYPVIKVEVSSDTHPFYTGRQKFNERGGRVEQFKKRFNMD

SEQ ID NO: 8591 - protein, 64 aa, Bacillus licheniformis
MPFLLSKRNNYVLLYTFQIPVSKMNVHLPYLIPLSILTSYRKNNLKKAVNNKKQNGVNERWFSG

SEQ ID NO: 8592 - protein, 441 aa, Bacillus licheniformis
MNDLIFARSLFGTTMGFHIIFASLGVGIPLMILLAELIYQRTKDPHYAIMAKRWTKAQAVLLGVAIPTGTIAGTQLALLWPGFMEVIGKVMSLPFQIEIYAFFIEALFMSIYVYAADRLTPLMRITAVIFIVIGAAASAILITNVHAFQGTPEGFKIVNGEITDVQPWTAFFNKSFVATAGHVVVSAFMTGAFIIATIAAYKMLRNRGDDRVYALHRKALLLGLIVGGAFSLVTALSGHESAQLLHRYQPEKLAGAEGLFETQSHAPLAIGGFTDEKTQSVKWAIEIPWALSFLADNRFDTVVKGLNDFPRDEWPPLFIHTLFNGMVFIGSLLIVYAAVGFIWRKVMKKDRFPRWMLAVFITGGPLALLAIELGWVFACTGRQPWVIYHMQKTSEVVTSSGSIGILFLLFFIVYIILGAAVVFVLQYYFKRHPVEEDLKSS

SEQ ID NO: 8593 - protein, 350 aa, Bacillus licheniformis
MMQLDGTTDALLAISIVWGFIFIYAVMASMDFGAGFWSMIYMNKKQLKATNIANRYLSPTWEVTNVFIVGIVVALFSFFPGGTFVLGTVLLIPGSIILLLLAIRSGFLVFSHAAKDYERALTYVSGISGFIIPAVLILVLPVTHGNFVYQVDGSHQLDFVNLFLSPHAYSFMGFAIFSTLFLSSLLLADFSNVAGEKDAYQVYRRNALITGPLALLMSFSIMMTMRTEASWLYTKMMDGLPWLILSFLLFLVAFAALFLPNRHNSDRLGKPRLAVIAITLQYFTASYVYGRAHLPYMVYPDVTIQSGFTAPETFRALFISYIVGFIILFPGFYYFWKLFMKDKRYIKQHE

SEQ ID NO: 8594 - protein, 53 aa, Bacillus licheniformis
MEQKILCEVSNCTYWEEGNKCTADAIYVVSHAEGEKASNSEETDCKTFKPEHH

SEQ ID NO: 8595 - protein, 63 aa, Bacillus licheniformis
VNKESLLQAFYQEIHGADETAFQKAARSFMNLWDYEYGCLDGLPDQADRVIGQIVHEDLLLGD

SEQ ID NO: 8596 - protein, 369 aa, Bacillus licheniformis
MIQIKQLTLYHLSMRLKKPFKSSLETFQDRKFIIVEAADQEGVTGWGEVSAFSSPWYTEETTETCYHMLKDFLIPAVLRESFTHPSEVPEALRGFKGNRMAKAGLEAAFWDIYARKKGISLREALGGVKTEVPAGVVVGLAPLDDMLQEIEQYVKEGYQRIKIKIQPGQDIELLKEIRRHFPKVPLMADANSSYELKDISRIKELDAFKLMMIEQPLADDDIVDHRHLQKHIKTSICLDESIRSAADARKAIELGSCKIINIKPSRVGGLTEALKIHDICKEHQMPVWCGGMFETGISRAHNLALSSLPQFLIPGDLSSSSRYWEEDIVKPEIRIEGGYIQVPTLPGMGFEVDTHILRKNSSKIDVFKQ

SEQ ID NO: 8597 - protein, 478 aa, Bacillus licheniformis
MLMDHPNWLKQRAELTPDRMAVIQGDHKLTFIQLFHEAKKTAGRLKSFGLKNGDTAALLLTNRMEMVIAVHACFLLGVRIVLLNTKLSMAERSYQIEHSEAKLLLTEKPFIEEHRGGQPARAVDIEDVQNAACPPVTEIESIHLDDAATIMYTSGTTGRPKGVMQTFANHYFSAVSSALNLGLQEHDRWLIALPLFHISGLSALFKSVIYGMTVVLHQRFDAEEVLRSIKDQQVTIASVVQTMLSRLAAKVDRCPGSLRCLLLGGGPAPLSLLEECKRKRLPVVQSYGMTETCSQIATLAPEYSIEKLGSAGKPLFASSIKIEKNGTECQPGEHGEITVKGPTVMKGYLKNEAANKDSFNDGWFKTGDIGYFDDDGFLYVLDRRSDLIISGGENIYPAEVEAVLLSHPNVAEAGVKGVDDKTWGKVPHAYLVADSPVDEEELSEFCKERLASYKVPKAFHFVDRLPRNASNKLMRHKL

SEQ ID NO: 8598 - protein, 272 aa, Bacillus licheniformis
MTVEWKSERQYEDVLYETYNGIAKITINRPEVHNAFRPKTVSELIDAFAYARDDANIGVIILAGAGDKAFCSGGDQKVRGHGGYVGEDEIPRLNVLDLQRLIRVIPKPVVAMVSGYAIGGGHVLHVVCDLTIAADNAIFGQTGPKVGSFDAGYGSGYLARIVGHKKAREIWYLCRQYNAQEAKEMGLVNTVVPLEKLEEETIKWCEEMLEKSPTALRFLKAAFNADTDGLAGIQQFAGDATLLYYTTDEAKEGRDAFKEKRRPDFGQFPRFP

SEQ ID NO: 8599 - protein, 273 aa, Bacillus licheniformis
VAVLKLTLKDGVSYKIEDNGLSAEKTAVFLHGFTGSAATWDGIDGYFQGMRLIKLNLLGHGGTDSPSDSRRYTTEKQAADLIEIFDRLNVKQAYLIGYSMGGRLALSLAMIHPERVSGLVLESSSPGLDSPEERKARREQDSRLSRRILEEGIKSFVDYWEGIPLFASQLSMDPSKRKKVREERLNNNPIGLRGSLIGMGTGSQPSWWNKLSGINYPVLLIAGSLDQKFVAINESMAKRIPAARLEIVEHTGHAVHVEEPDFFGRIVSEFILK

SEQ ID NO: 8600 - protein, 197 aa, Bacillus licheniformis
LTENPITKYIGNFIDELSLAGVTEAVICPGSRSTPLAILAASHPDINVHIHVDERSAAFFAMGMAKAMRKPVALICTSGTAAANFYPAVIEAHYSRIPLMILTADRPHELREVGAPQAIDQQFLFGNFVKFFTDSALPDSHPDMLAYIRSLAARAAGEAKKAPRGPVHINFPLREPLMPNLEDEPFQRLRSGRSCDG

SEQ ID NO: 8601 - protein, 474 aa, Bacillus licheniformis
MVTTVQRTFLKEAPEALNIVKKVNHAVLISYSRKIESIDALSFFINGKEQFAGERFFWSDPDGGLTLVGLGKEISVSTDLKDAGRYQAVHEKWERLKEKTYHFHEDQSRGQAAVGPLLFGGFSFDPLEDRKQHWNGYQEGAFFIPAAMLTQDGEETFITVNRWKTPEEDVRKVLEEIKGAASQLTKADDSRYPEKGHTQYTAKEELDVPEWLEAVRRATDDIKNGKYDKVVLAREILLTFDQPVELHRVLFNLMSEQKTSYIFAIEENGKSFVGASPERLVKKDGENVLSTCLAGSIKRGESEQEDRMLGLELLNDEKNLIEHDIVVNMIHQALLSNCSNIKKPAKPGLYKTKNVQHLYTPIVGKMNAESSIFDLIEKLHPTPALGGAPQQKAIEVIRELEPMSRGWYAAPAGWIDMSGNGEFAVAIRSGLIDSNAARIFAGCGVVADSDPLMEYEETQIKMKPMLSALGGDIR

SEQ ID NO: 8602 - protein, 40 aa, Bacillus licheniformis
MCQQNDTLLTTATTYYKRNRPIEKDKVIYYFRIAGRPLFF

SEQ ID NO: 8603 - protein, 310 aa, Bacillus licheniformis
MQHQSLSGSVSEIKPEKWRVWWMLTRPHTLTAAFVPVTLGTVMSLESGKIDIWLFLAMLAASILIQIGTNLFNEYFDFVRGLDNENSVGIGGAIVRYGMKPKTVLYLAYGLFGAAVLLGVYICASSSWWLALIGLVCMAVGYLYTGGPFPISYTPFGEIMSGVFMGMVIILISYYIQTGGLTWNVFLISLPITILVGGINLSNNIRDLVGDKENGRKTLPILAGRKNAVQILSWVFAVSYILIGIYIGFEIVSLWSCLVLLSLPKPIKAIQEFKAKEKPAELMVAMKSTAQTNTFFGLLLAIALLIQYVF

SEQ ID NO: 8604 - protein, 251 aa, Bacillus licheniformis
VLTKEQLTKLENELKAGKEQIISRFKENGHFGIDATHPFNSTGDLSAYDNHPGDEGTELYEREKDLALFEHEREHLHDIEHALAMIEKGTYGRCEVCGKDIPYERLSVLPTATTCSEHSSTVSVSKDRPIEEEVLNPPFGHFEQDEDDENVAYDSEDAYQDVERYGNSETPQDLAVPPLSYSQMYMEYEEPLGYVEDYENYAATDITGKEVTVYPTKEHEKYEDLLDEEGIMTSFGDLPAYEKDPYTEDDD

SEQ ID NO: 8605 - protein, 799 aa, Bacillus licheniformis
MFSSKESFKQCFLKRVERLCGKSFRDSSTLDQYQTLGIMVREHISANWIETNERSRSNQNKQTYYLSIEFLLGRLLGQNLLNLGVREIVKEGLTELGICLEDIEEAEMDAGLGNGGLGRLAACFLDSLASLDLPGHGMGIRYKHGFFEQKIVDGHQVELPEQWLKHGYVWEIRNADQAVCVRFGGRVKMAQEGGRLRFWQEDAEVMTAVPHDIPIIGYETKTVNTLRLWNAEPCSLHHEPNILKYKRETEAVSECLYPDDTHDEGKILRLKQQYFLVSASLQSIVKRYKNTHPSLHDFHQKVAIHINDTHPALAVPELMRILLDEEKMTWDEAWHVTVHTISYTNHTTLAEALEKWRIDLIKPLLPRIYMIIEEINERFCGWLWEKYPGEWERIEKLAVIAHGEVKMAHLAIVGSYSVNGVANIHSTILKEREMNDFYSVFPFKFNNKTNGISHRRWLLKANPPLANLITEAIGDRWLKDPESLLDLRPFANDSAFLESFQRIKRERKQLLADMMKGSVGFAVNPDSIFDVQVKRLHAYKRQLLNVLHIMYLYNRLKEDKGFAIYPQTFIFGAKASPTYHYAKKVIKLIHSVADKINHDPDVRHSINVIFLENYRVSTAERIFPASDVSEQISAASKEASGTGNMKFMINGALTIGTHDGANIEMLERVGTECIYTFGLKADEVLDYAEKGGYLSREYSQHDARIRQTADQLINGFFEGEAGEFEPIYDSLIAYNDEYFVLKDFASYIVAQERIQKDYLNKRLWAEKAVTNIAHAGYFSSDRTIREYADDIWEIKPYQH

SEQ ID NO: 8606 - protein, 484 aa, Bacillus licheniformis
LKVLFAVSECVPFVKSGGLADVAGALPKELALLGIETVVMMPKYSLIAEDVRRRMVKTAECEVRVGWRRQFCGIEHLEHDGVSYYFLDHGYYFNRDSLYGHYDDGERFAFFSRAVLEALYALNFEADVIHTHDWHTGMVNYLLKEEYRKKPFYQHMKSVFTIHNLQFQGIFPKEAVHDLLGLDISHFTTEKLEFYGNINYMKGGIIAADQVTTVSPTYRDEILTPYYGERLEGVLSDKKDALTGILNGIDDVLYDPLNDPHIDYHYDAVNRDGKRKNKAVIQKTFGLPVNEDIPLISMVARLTKQKGFDLIKRVLHELFEEEDMQLIVLGTGEAEFENYFRYMEHAFPDRCKAYIGFNEPLSRKIYAASDLFLMPSKFEPCGLGQLIALRYGAVPVVRETGGLHDTVTAYRETTSEGNGFTFAHFNAHDMKHTIKRALSFYHRKEEWGRIVQKAMTHDVSWALSARQYQRLYSREIKGEAHVLK

SEQ ID NO: 8607 - protein, 342 aa, Bacillus licheniformis
MNNQMLGIIDAAVNQHSLQDLTAGRSTGAVPFAGRYRLIDFALSGMVHAGIRSVAVFSKSPYRSLMDHLGSGKEWDLNRKREGLFFLPSSLPHDEHVGLGSFRQFAEHLDYFQRSTQQYAVVANSYTVGHIPFQEVLKQHLESGCDLTEICHEGKPLGMYVTKKSLLWEMVEGHCPEGAQSFEEVCRKERGSLSVNSYEHSGYTAVIDSPESYLFHSLNLIQPVFWEQVFHMGQPVYTKIKNDPPVKYAKNSRVKQSIIANGCVIEGEVENSVLFRGVHVGKGTTIKNSVVMQKTRIGENCRLEHVICDKDVKIGHHIEMSGTMSLPFILKKGAIQGALMNS

SEQ ID NO: 8608 - protein, 379 aa, Bacillus licheniformis
MKEQCVAMLLAGGKGSRLNALTKNLAKPAVPFGGKYRIIDFALSNCANSGIHHVGVLTQYQPLLLNSYIGIGEPWDLDRNDGGVSILSPYAEASEVKWYKGTASAIYENRHFLKELQPEHVLILSGDHIYKMDYGKMLEYHAEKQADATIAVIEVSWAEAGRFGILHTNDKMEITSFEEKPKYPKSNLASMGVYVFKWSVLEDALERDEKNSASSHDFGKDVIPALLEENNRLNAYPFKGYWKDVGTVRSLWEANMDLLGDHPPLDLFERNWRIYSVSPNLPPQFVADLAEIKESLVSEGCTVYGSVTRSVIFQRVAIGRHSAIKRSVVMHDVSIGEYVEIENAIVSAGIRIPDGFCAKPEDGEVLLITEEYVKKHKVV

SEQ ID NO: 8609 - protein, 627 aa, Bacillus licheniformis
MAGVSASDIKAHLFHEGRLYESYRFFGAHQTEQDGRQGFRFCVWAPHAKEVRIAGTFNGWSGVLHRMEKRHQEGIWELFIPGIGEGELYKYEMITAANETKLKADPYAFFSEVRPKTASVTYQLAGYQWGDRKWQKKKQQKAVYEKPISIYELHIGSWKKKADGRFFTYRELSETVIPYVKEHGFTHIELMPLTEHPFDRSWGYQTTGYYSPTSRYGEPYDLMYFIDQCHQHEIGVIMDWVPGHFCKDDHGLYLFDGMPLYEYKHEHDRENWEWGTANFDLGKREVHSFLISNALYWIEMYHIDGFRVDAVANLLYWPNRPQPEANGFAIEFIQTLNEQVFAKDPHFLMIAEDSTDWPLVTHPTYEGGLGFNYKWNMGWMNDVLTYMEASPEQRKHLHHLVSFSLMYAYSENYILPFSHDEVVYGKKSLLHKMPGDYWQKFAQYRLLISYFMMHPGKKLLFMGGEFAQFDEWKDEEELDWFLDDFDMHRKARMFTKEALHLYKKSRILYENDHRQQGFEWIDVNNAEQSIVSFIRYGKQPGEALIIVCNFTPSVYHEYRVGVPFQTEYIEVLNSDDAKYGGSHQINPKRLQARKGVLHGKPYSISMTVPPLGAAVFRAVKKRGAKKG

SEQ ID NO: 8610 - protein, 41 aa, Bacillus licheniformis
LSIKRSAFIKGIKPYYPNKRVIFKYSGRKDEINGWCECLGY

SEQ ID NO: 8611 - protein, 68 aa, Bacillus licheniformis
MNAYILSSTTFIFKTRRLLLRVGIERVEKRNILLIVRNGLKIVLKNQFEYKFTMGKRQEFMERLENLL

SEQ ID NO: 8612 - protein, 40 aa, Bacillus licheniformis
LIIIFLKKLLCKTKIDVILVSALKRRLYKYNFKKTFKKSC

SEQ ID NO: 8613 - protein, 256 aa, Bacillus licheniformis
MSELTKYSMVKNEIKSWIYEGKVKPGEKIHSENELMKIFDVSRHTIRQAIGDLVHEGLLYREQGSGTYCSHRLQLSEKGRERNKMIGVITTYLSDYIFPSIIRGIESSLSSAGYTLVVASTNNDIEKEKQCLVNMLDKKIDGLIVEPTKTGSFNPNLNYYLTLEQHHIPYLMINQLYQELNPPHFILDDEHGGFIATEHLIKLGHEKVFGFFKQDDMQGVNRMKGFIRAFRENGLSFYPEMVVTYTTENKKRKNDC

SEQ ID NO: 8614 - protein, 194 aa, Bacillus licheniformis
MNQSKQLVQLIEIAIMTGIALILDMVSGMFLKMPQGGSIAVMMIPIFLISFRWGLKAGLATGFLAGLLQFVTGGFYVVHPLQLLLDYFIAPTAAGIGGFFAGSIRNASFEKQKGKIISYVMLAVLLGSGLKFLAHVISGAVFFGNYAPKGTPVWIYSLVYNGTYMLPSFIVCTIVLCILLLTAPRLLENRTNMR

SEQ ID NO: 8615 - protein, 185 aa, Bacillus licheniformis
MVACGAYFTTTNVFKLMHGYALFSFQQMKEEEKPEKPPIQTTKKEKTAIDQTFETGEKIGDLVIPKINARLPIYHGTDEDELQKGVGHFAGSVLPGEDDNSVLSGHRDTVFRKLGRVGKGDQLIVEASYGTFTYKVKKVRIVDADDRTVIVPKPRATLTVSTCYPFDFIGSAPERYILVADLIKT

SEQ ID NO: 8616 - protein, 331 aa, Bacillus licheniformis
MKKRLMSLLVCILVLVPAAGAFAAPKQAELKDYLEEIGMTEKELEAYLQDTYDESLKGFDSVEELKDFLGQRLTKKLLASYLKEYGLSEKEAADLFVENGYMESGQNILDVFMFEYELDDALYTVTYEEDDFQIGNMFQELGVDDQEWERLVNHLRKVRDNNPNLENDLMALGERLEAVADFESVSELSAQDIAEMLSILNDLQKTLEVKTKYYLVKDGKKKEVSLTTLVSAEDLKGASLLVEVYDLQGNFILDVLLTPEMIGSDLIHDTGSKVKQTQTAVKHDAKKSHVKKTVKGAKLPKTAGHYAEWSIFGAVLMFGGLFMVRRLRKAA

SEQ ID NO: 8617 - protein, 62 aa, Bacillus licheniformis
MNPYYMMLLCYVLSIIHFLIGYREALKISGADGLVNGTAMISCIPLGAVFAFFAHFFWKMTI

SEQ ID NO: 8618 - protein, 370 aa, Bacillus licheniformis
MAKAVASQEVANMLNDWYILMKKRDISGSIEMKDDIDKAIEKMEEDHDVLLYYQMLDFRLRLLLEDISQSSTEKLEAISFKDKDPKSTDDKLNYYFYLFKGIYEDYKQNHTEALNFFRIAEKRLSVIQNEIEKAEFHYKIGVLYYNLKATWLSIHHINIASGIFQGYDGYAKRVINCKMLIGLNYIDQFKFAESEVLLKEAIEKTEKIGDQYLLPYTYYNMGFLKSKEDKHEEALKYYNKAFAIKDFETKAKYAYLLCVYENTRSLFKTNDPDQAFKWIDTGFKKAQEVNSEIFELKFKTLYTLHSDCQNKLEVIKDFIHQLEDKKAWVDLEELLMDVANYYRENKLYEEAIYFYIKTDKASKLAGRGGE

SEQ ID NO: 8619 - protein, 42 aa, Bacillus licheniformis
MKKVLLAVFVLGTVFSFSFANHAPEAASQSNEILLASRGAGG

SEQ ID NO: 8620 - protein, 215 aa, Bacillus licheniformis
MGKKVLLTGFDPFGGETVNPSWEAVKRLNGEEAEGVSIAAEQIPTVFHHSAAVLKKAIEKHKPDVVICAGQAGGRAHITPERIAINIDDARIPDNEDREPIDEPIAADGPAAYWSALPIKLIVKELRKNGIPASVSNSAGTFVCNHLFYQLMHRIDRTSANIRGGFIHIPFLPEQTIDKPEPSLSLETIVEGLRIAAVISALHEKDIRETGGSIS

SEQ ID NO: 8621 - protein, 218 aa, Bacillus licheniformis
MQKSYAVFGLGQFGGSLVKAFHAKGAEVLGIDKSEEKVNEYSTYATYTICANAVDEKTLKQIGIRNIDHAFVSFGDDIEASILTSLLLIEMGVPKVWTKAQNDYHQKVLHKIGVHRIIHPEKDMAKRIASHITSEKMIDFVELSPNYSIVEIVATKKLDKRSLGDIDVRANFGCNIVGIKRDGHFIIAPSADDMIYENDILIVIGQNKDIETFEKKGD

SEQ ID NO: 8622 - protein, 439 aa, Bacillus licheniformis
VKFKQIQLSPSQLLVLVFLFFIILGTLLLKLPAATPKPIGWIDTLFTSTSAMTVTGLAVVDTGTDYTMFGQLIILVLIQLGGLGIMSFAVLIFIMLGKKIGLKERLLIQQSLNQTSLGGIIKLIKSLFIYSFAIEMLAMLILAVKWIPEYGLARGIYYSLFHAVSSFNNAGFSIWPDSLMRYEGDPLVNLVISFLFIVGGIGFTVLSDLWHKRSFKKLSLHSKLMIYGTFIVNLAAMILIFLLEYQNQKTLGMLPLAEKLWGAYFQAVTPRTAGFNTTDIGSLRESTITLLLLLMFVGAGSASTGGGIKLTTFLVILLSVITFLKGKKHISIAKKTLKDQLILRSLAISTISVLLILTAIFILNMTEPIPFLAILFEVVSAFGTVGLSMGITADLSPIGKMLIVFIMFLGKLGPLTLAFSLARPEKENIRYSSEDILTG

SEQ ID NO: 8623 - protein, 304 aa, Bacillus licheniformis
LRTTLYPYIALVVGVLAVSSSAIFVRLSTADAGIIAFYRLFFSALLIFPFFWGKRKEVLGFSKKDWLFSAAAGFFLAFHFILWFRSLEYTSVASSVVLVTLQPIFSFIGTYFLFKERVSFAGIISALLAIGGSVYISWGDFKVSGQALYGDILALLACALVTAYLLFGQHVRKRHSLTVYTFIVYGISALTLCLYCLFSGAAFFSYPASDWGYFFLLAVIPTLLGHSLFNWVLKWLSTNMISVAILFEPVGAVALAYWILDESVMMTQVIGGAVIFSGIILFMASQSIRKNNVPAVKGKTPKAL

SEQ ID NO: 8624 - protein, 160 aa, Bacillus licheniformis
MSIFNEARKELWSEIQGLSDEMLNKRPAEDEWSIQEVIDHLKKIDLMALQILKEQIKHAPVKSIEDKPVHQLEDRSSKRKAPPYAEPERKTADALTLKAELDNVRTQLTSVIAAFHNEDFQRVLPHPIFEELTVRQWLDFIGHHERRHIKQIKEVKQKLL

SEQ ID NO: 8625 - protein, 193 aa, Bacillus licheniformis
MWKKRTAVAEHVYIADTASFVTEKQAKIVIDYGGIPGDLHFGLTKKAGAREPMYKRGTEIFNRRQISIVSVEECLEIAGRLNIPAVLPEWLGANIALSGLPDLTSLREGSRIVFPSGASLLSEGENEPCIQPGEVIQEQFPDKPKLASRFVRHAMGRRGIVCIVERPGLIHQGDQAEVWAYSPAAMKDARSFA

SEQ ID NO: 8626 - protein, 402 aa, Bacillus licheniformis
MTLNMKVEAMNKFHTFEIPTVIKHGIGAVKHVGEEVKKLGVSKALLVTDPGIYKAGVTNPVVVSLQEAGVEVAVFNKVEPNPPVRLVAEGSKLYAEENCDGLVAVGGGSSMDTAKAIGVEATHEGSVLDYEAAEGKKPLENRIPPLTTIPTTAGTGSEVTQWAVITDEEREFKFNTGGPLIAAHLTIIDPELHVSMPPHVTAMTGVDALAHAIECYTMKFAQPITDAVALLAIEYGAHYIRRAFADGEDLEARYGMAQAAMLAGLSYGSESAGAAHAMSQTLGGIIPVAHGQCVAAMMGPVMEYNWKGYPEKFARIAKAFGIDTSGMSAVEAAKAAVNWMYQLVEDLEIPSLEEQGVSPDMIDRLSKEAMKDPQTVGNPRDLNEKAYNWIYKRCFNLTPKTV

SEQ ID NO: 8627 - protein, 490 aa, Bacillus licheniformis
MSQTLFIDGKWVGAKKGETRQIINPYNQEHIETVSEGDREDAVRAIAAARRAFDDGEWANTPGLERGNIVLKIAELIRRDHEELAELESLDTGKTIEESRADMDDIANVFQYYAGLADKDGGEVISSPIPDSKSKIVREPVGVCGQITPWNYPLLQASWKIAPALAAGNTIVVKPSEITPLTTIKIFKLMEEAGVPEGVANLVLGPGATVGDELARNKDVDLISFTGGIETGKKIMQAASTNVKKIALELGGKNPNIVFKDADFDVAVDQALNAVFFHAGQVCSAGARLLVEESIHDEFVAELVKRAKKIKLGNGFHEETQSGPLISAEHRSKVEKYVEIGLQEGAKLETGGKRPEDPELANGFFYLPTIFSSCTSDMRIVKEEVFGPVLTVETFKTEEEVVSLANDTIYGLAGAVWSKDIEKAERVASKLRMGTVWINDFHPYFAQAPWGGYKQSGIGRELGRMGLEEYTEVKHVYRNTKPAAVNWFKA

SEQ ID NO: 8628 - protein, 45 aa, Bacillus licheniformis
MPPEKSGIVLKSALSLLSYFCMFFILTKEIEMSKSKIFFKRSQPM

SEQ ID NO: 8629 - protein, 184 aa, Bacillus licheniformis
MDNPRDVSAKETIAQAKDLVIDSIAETMDLYGITRSAGILYGTMYLSDEMTLDEMREELQMSKPSMSTSVKKLQDLNVVKKTFHRGRRKHSFVAEKDFFKFFTSFFPKKWEREVKVNLMAIQDAQKALEDIIESEGLDESIKEEARTLYDQLEHSKPYYDWLLRLAKSVQSGEIFEFIPIDNKK

SEQ ID NO: 8630 - protein, 542 aa, Bacillus licheniformis
MNYAEKKKNWIKLGIFALFAGGILAYIGISNADIHWGGFISMMIFFAFTYYLGAFYAAKKSNSFSDMIVAKRSMPFFVGMVTMAATWVGGGYINGTAESTYSDGLIWAQAPWGYTLSLIIGGIFFARKMRRHQFMTIIDPLEQRFGKRMAGVLYIPALLGELFWSAAILTALGTTFGMILNIDFQTSIILSAMIAIAYTVAGGMWAVAFTDVFQMIVILLGLFLVVPFVLSNVGALDSVWANYRHDFGSSANLLPPLDGWKNPDWGNLFWNWWDNALLLIFGGIAWQVYFQRVLSAKSESAAMWQSIIAGVICIIAAIPCVIIGAAGNSTDWSLFGASAPDNPAMILPQTLAYLTPGIIAGLGLGAIAAAVMSSMDSSILSASSMAAWNIYRPLIKPKATQKQLQKVVKRSIILFGAGAAVIALNVKSVYTLWYLASDLVYCILFPQLTMALFYKRANLYGSIAGFAVAVILRLGGGEPAFGIPPLLPYPMIEDGTVLFPFRTLAAVTAFMTIFAVSELTQRKCPPKQLVLPQEKQKDDRAA

SEQ ID NO: 8631 - protein, 305 aa, Bacillus licheniformis
MKKDESSITSLISAFGRAYHSQYDEPKIFDDNLAKSLISQQEFADIKNSFIQGIQFFNKAIAEKYEGDDEEILRWITQVQLSPTPLARAAYCERVLHHEIRLGTEQYVILGAGLDTFCFRNLELKDKIDIFEIDHPATQKLKKEKLDKAGFHIPDHLHFIPLDFAKSFSYQELADKGFHFNKKTFFSFLGVSYYLTKEETEKLLGELMADLPSGSSIVFDYADENLFKEKGFFNRVENMVKMAAAGGEPMKSCYSYQKIQHMLQQSGLLVYEHLSPSDIQGRYFKNRKDDLSAFETIHYIHAVKK

SEQ ID NO: 8632 - protein, 389 aa, Bacillus licheniformis
MKKLCREVWVEVNLDAIKKNLRAFRRHIPKKSKIMAVVKANAYGHGSVEVARHALEHGASELAVASVEEAVVLRKAGIKAPILVLGFTPLSCVKEAAAWNISLSAFQVDWIKEANEILENEADPNRLAVHINVDTGMGRLGVRTKEKLLAIVEALTASENLEWEGIFTHFSTADEPDTELTMIQHEKFISFLRFLKEQGFKLPTVHMNNTAAAIAFPEFSADMIRLGIGMYGLYPSDYIRQLNLVKLVPALSLKARIAYVKTMLTEPRTVSYGATYVAERGEVIATIPVGYSRELSNRGFILHRGRRVPVAGRVTMDMIMVSLGEGEGKQGEEVVIYGRQKGAEISVDEIAEMLDTINYEVVSTISWRVPRFYIRDGEIFKKSTPLLYV

SEQ ID NO: 8633 - protein, 393 aa, Bacillus licheniformis
MKRTAGTPAWYNHVPHPIRNDGAGATDFGPRDVMRDLENPDMFVPPKTDAGAIPNLKFSFSDTHMQLNHGGWSREITARELPVSTTIAGVNMRLTPGGVRELHWHKQSEWAYMILGHARITAVDQDGRNFIADVGPGDLWFFPAGIPHSIQGLEDGCEFLLVFDDGNFSEFDTFTITDWFAHTPKDVLAANFGVHESAFARIPDKQRYIFQAKAPGPLENQKVPDPYGTVPKSFAYRLFAQKPIVTPGGTVRIVDSSNFPISTAIAAALVEVKPGGMREMHWHPNNDEWQYYISGTGRMTVFAANGTARTFNYRAGDVGYVPFAMGHYIQNTGSESLWFLEIFKSSRFADISLNQWMALTPRELVEEHLHAGPELMNALRKEKWPVVKYRTDS

SEQ ID NO: 8634 - protein, 132 aa, Bacillus licheniformis
MRNGVWALYNDKEYEIIQHDQENYELFTKDPEAIQFGFILDETGHYCKQVRREHISSVYDVRYQAIINDLEFPVFREEDNRLLIGSGLHGPDIIKKYGFVQVDRFEYEKWVGKSEVEKIEEVKVPMWGFPAP

SEQ ID NO: 8635 - protein, 640 aa, Bacillus licheniformis
MDVKYVPEEWQGMKDGLDALTGGQYGGGMKSGLIKLNDLLEDIESKIKDKDSDRSISFTHTSKKSKIEELFKDYQKLADFCLKAGSLVADHIDSPFYKKIDAFAEKMRGLTIHNYTTVNRIGSKETTYVGYGMSKQAVETDKAKVSVNDIFKDSESFDHVLSKEFEEFQINHPDIELSYEEYTKAIASSRGFEYESIGDVQKNQELWRDLLAGAGIIVLTIFCAPAGLTVAVAYGGANIASAATGKDWMTQRELNTGERFERGVFGALDIIPGAAAAKGSFKSAATIGQISSKTEHMVQSLKDSKNIWANRMKVNGLKAQDRLNDAGFAIKKQFAKSADALSDIARGAEAGAGGTLVRKGSNYSAHVNDAHKASKAKMQDSIQRVEKEIEAGKSVKSVVKEVDVNRNSPVNPKFSWEQLDKSFEDNLGTVLKKHKLTVNNFNDLRLKSINKLSSKEVEVIKDIRRNVPSLSEDTIMQKVLSPDSKSWLFSSPSDGGQIKLGGYVARATDTKELNTFDKIYEGLRLDYENNPFSGGTSALAVRYKAGNPNDYKIPFGGKNSEAVNKMTHDDLAMDYIATEQQSPFTGNGFTESKDYTIPEYRNDTRTPMHEGAELYEITNQGEKLIGIYSVKQKRFISVNE

SEQ ID NO: 8636 - protein, 107 aa, Bacillus licheniformis
MNAEGGAGGGGTNIHLEFEEMITISNKLKSICDIYTEGVQKEIKNLSESDFYKAGQASKAIESYADILGKTMELFDNYCIASHIVSYAMEKMYETDKELQKLYKIQK

SEQ ID NO: 8637 - protein, 235 aa, Bacillus licheniformis
MQVKADTLSAAELYVLAGAAGVSYIFGLPEREQLALVEPDCAIKAKDSLIEKGILLKEGKLTKTAFFLIKLLQHYQESGEYVRFNNVMCAFLPDDEERVIALTEISPGKGYTLDYVEKREVYLSLISKVSFLVREPRDQDRAFLTKPMSAAEKAEVRAMNLDEKEVLAVETFKLASQQKPADPGFQTTTLYFTKGEDFISVDPLNDRYEWISLYIMNNRIYDALQINFRAGRAMI

SEQ ID NO: 8638 - protein, 116 aa, Bacillus licheniformis
MDGYGYYNYQAANPKVSGETVKISHNGTIKAHSHAKAIEKHVGDSLKKAKELKAYVESGKWSGKTRDAFLSYLELIIELNADMKDALKEHTAALDALEKHIDGFSQLSEVQEIKNL

SEQ ID NO: 8639 - protein, 119 aa, Bacillus licheniformis
LGEGFWDSVGNFLHISYTENERKRDEYKNLYDYLSDKESDVKTKLAEIDASLKAYHSNLPDLKIPSHEFEDTRHEKDAKLKELVKHFKDMVDDIQSAKTKAKSKWEYYKAKAEAEEKKA

SEQ ID NO: 8640 - protein, 58 aa, Bacillus licheniformis
MECSSKENISQEMIGRKTRKIRLDLFAYKRSLSTGNFIFVPRKTILLTYSFVWDHPVR

SEQ ID NO: 8641 - protein, 69 aa, Bacillus licheniformis
MREHKGCIKCGSTDAGQKEIATTGTGLSKLFDVQHNRFLVVYCKNCGYSELYNKQSSTAGNILDLFFGG

SEQ ID NO: 8642 - protein, 57 aa, Bacillus licheniformis
MGEKYGSLIAIFILALCVHSNIVVEHALLQTIIKAVSLFVMIASALAAFVKGIRQPS

SEQ ID NO: 8643 - protein, 493 aa, Bacillus licheniformis
MSESSKKSVVMLLIDSLMDEPLKEAVKNGQAPGLQYLLENGRYVPDMISPFPTMSVNVDSTLLTGVYSDQHKVPGLVWYNAKEKRIINYGSHIRELLKLGIKQSSRDVFYNLNQVHLSQQVKTLHEELDEKGIETCSINALLHRGSRDGYLQIPFLFSMISGLNRSVKINASQLFSYGGFSKVNPANRSLFKKFGFNDRFSTNELVYLIQTNKVPPLALVYFPDLDQHVHKHGRNDAAGVAKADRHVQRILDSFSSWEAALKDHIWIVMGDNGQAWISGNKKEALIDLRSLLDAFRIVKLKKGVTADDDIVLAVNERMAFIYSLDKAKLPLKRIADILQKDERIDIICWKNEADSIEAVSGEQHGKLTFRPGGKCTDEFGQTWTLEGDLHILDLTVEQNSLTYGKFPDALARLYASFFSHEGDYLIANAKPGYEFIGEGSPTHVGGASHGALHKQDTLVSMIITGTDTMPAYNRLVDIKEWILDLVKSRGAGE

SEQ ID NO: 8644 - protein, 377 aa, Bacillus licheniformis
MTKILIFPFLSISTGHHHVADSLQTELLLKSHHCEKIDIFSHAYRRLEKASSAAYLSWIQYFPKVYSSVYHLLACGRHETAKRHLLYELIFLKGMQQIIAEKKPDIVFCTHALPSYLLNRLKGQFPDMKVVNVYTDFFVNRIWGREKIDYHFAPIKDIKDQLIAEGVDEEKIFLTGIPVHRSYKTERKPEQDGDKKAFCNILITGGSMGVGGIFKLVRELSPNGNVSYQILCGKNRKLYRYVRDLNNPYIKALPYIESKTEMNRLYAEASGIITKPGGVTISECIEKQLPVFIYHALPGQEEMNLDILKKKNLVIELNQQKQQPIEQQLLSFFRSDEDIRRYQMSVDQYLREKSDRDFSDILDGIIHNRSGLGNAHV

SEQ ID NO: 8645 - protein, 45 aa, Bacillus licheniformis
MLKKGKIRIFVISILHFRRKMFSIYIFQISSQNISVFFQERKVTT

SEQ ID NO: 8646 - protein, 182 aa, Bacillus licheniformis
LRNCFLSIWSVIDPFYYFFSRLTLIDQTKTSIFRVRLTKYKGIDVVLSDGTVIKKNDVLIKIHLHNIKLIKELQNIESAVRRGILIYQKAYFSMPILGEYIKNHHRSDQIKGIIGITTLHKGVERLGFEAVEPANQFYRVFKKLTQIPILYLTTKQFSLRKIPPSQYLFISKEKLFKSYLQK

SEQ ID NO: 8647 - protein, 271 aa, Bacillus licheniformis
MFIIACLLIILGLMPFLYKANHNTKDVKVNTISVERVQAPALKKKLNILHLSDLHLENISISPERILELANKKRVDLIALTGDFLDRKRNIPKLANYLKALKKLKPAYGMYAVFGNHDYLLKDEHFRKLKRVLEDNGCITLQNQHVSIEVEGETLNIIGIDDYSTKRSDIAGSYKGLKEGYNLVLTHDPNVVLDMQEFHFDYLLSGHFHGGQIHWPKPYHLVKMGKLVRMNMIKGLHYHHDKPFYISEGLGQTGANIRIGSRPEMTFHHIS

SEQ ID NO: 8648 - protein, 276 aa, Bacillus licheniformis
MNIWDIIVAIILGIVEGLTEYAPVSSTGHMIIVDDVWLKSKELLTPEAANTFKVVIQLGSILAVAIVFKDRILNLLGMKKNITEEQKSGNRLSIAQIAVGLVPAAVLGFLFEDYIDQYLFSVRTVAVGLIAGAVLMLAADWINRRKDTTDSVDRMTYKQALGMGLFQCLALWPGFSRSGSTISGGVILGLSHRAAADFTFIMAIPIMMGASLLSLIKNWAYLSADLLPFFIAGFISAFIVALFVVRFFLRLINKIKLVPFAIYRIVLGLLLFILFL

SEQ ID NO: 8649 - protein, 381 aa, Bacillus licheniformis
MDSLHMWGGRFKKFFLDNKFVLFLLILLLIGLNILVFTKASFIFTPFIVLVETIALPVVLTGVVYYLLNPIVDFLERKNVKRIYSILLLYIVIIGLITISIVSVIPLLREQITSLVDNFPRYVHIVEDQIKQLIGSQFFNQVQQTMNINLTDLASKLSDQATTILNSTFTGVGTFIGAVTEVVISIVTVPFILFYLLKDGKKLPLFILKLIPVRLREQTDVMMSEMNHRLSSYIRGQIIVSFCIGCLLFIGYMIIGLDYASLLALVAACTSIVPYLGPTIAITPAIIIALVTSPFMLVKLIIVWTVVQLFEGKFISPQIMGKNLHIHPVTIIFVLLTAAKLFGVIGVILAIPGYAVIKVVVTHLFEWFKQRSHLYEKNEEV

SEQ ID NO: 8650 - protein, 328 aa, Bacillus licheniformis
MIRFGVVGTNWITDRFLGAARLIEDFQLTAVYSRTGERGREFAQKYGAEAVFTDIGEMAESDVIDAVYIASPNSLHKDQAVTFMKCGKHVLCEKPLASHVKEAEEMVKTAQEHRVTFMEAMKTTFLPNFKNISRNLHKIGKVRRFTASYCQYSSRYDAYRNGTVLNAFNPALSNGSLMDIGVYCVHPAIVLFGKPLEVKANGLILESGADGEGTVLLKYKEHEAVLMHSKISNSFIPAEIQGEEGSIVIDKIHRPEQVDIRYRDGRVEHLTLPDDKPAMFYETEEFINLIKQGRIESSLNTFERSIDTLAVMDEARKQIGLVFPADHM

SEQ ID NO: 8651 - protein, 174 aa, Bacillus licheniformis
MRLEGKKVIALVSDEFEDLELWYPVLRLKEEGAIVHFIGEKADHEYKGKYGVPAVSDYELKSVNIEEYDAVLVPGGWSPDKLRRYPEVLEMIRWFNERKKPIGQICHAGWVLISAGILEGRKVTSTPGIKDDMENAGAIWVNEAAVVDGHIVSSRRPPDLPIYVKAFADLLAQS

SEQ ID NO: 8652 - protein, 660 aa, Bacillus licheniformis
MSNIVNWMKRPSIAKKLILSFLLILTVPIIVLSYSAYQTASSTLDGEIMDNARENVNQLNEIINQNISQKTNAMSYFSGFINENSFKGKESDSLKVKFEQFAKLHPDVEGIFTGSKDGKFIRYPDQKMPSGYNPVERDWYKKAAEHKGEVVITDPYKTASTGTVVITIAKMHEDGSGVVAVNMKIEELIKATERVTIGKKGFAFITSADKKFVAHPKHDAGSDVEGGWVEKVYANDKGTFKYTLDGEKQMAFATNKLTGWKIGGTMYITELKEASQPVLNAALITLGASIIIGVLLMILIIRSITGPLRELVSSAKSISGGDLTQKITVRSKDEIGQLGTSFNDMAESLSSLISVIQTSVENVASSSEQLTASADQTSKATEHITSAIEQFSNGNESQNEKVEISAQQLADMNSRLHEMSKVSASITESSIQSTDIAGTGGELVQKTVGQMNSIDHSVKQAESVVKGLESKSKDITAILRVINGIADQTNLLALNAAIEAARAGEAGRGFSVVAEEVRKLAEQSASSAKEIEALIQEIVNEIGKSLDMFQDVNREVQSGLTITDETDTSFKQIYDMTNEIAGKLQTMNAAVEELSEGSQQVAGAVEEIADVSRESSGSIQDIAASAEEQLASMEEISSSAATLEQMAEELRDLTKKFKID

SEQ ID NO: 8653 - protein, 661 aa, Bacillus licheniformis
MKKILDWLKRPSISKRLFFSFILVLTLPILALSYSAYQTAGSSLETEIMRSARDNVEQLNEIIDQNIGEKEEAVSFFSGLVNEKLYQEKENASLVERLEQYAKLNQDVEAIYTGSKDGKFIRYPAEKMAKGYNPADRDWYKQAVENKGKVIITNPYKTASTGTMVITIAKQTEDGSGVVAVNMKIDELIKATERVNIGKSGFAFISSNDKKYVAHPTIEAGTEGKGDWVGQMYGSEKGDFQYTFEGNEKKMAFTTNKLTGWKIGGTMFTDEISEAAQPVFHMAIIILAAAIVLGGILIYFIIRGISKPLSELVSSAKSISGGDLTQKIEVRSKDEFGQLGTSFNEMAESLRSLISVIQSSVDNVASSSEELHASAAQTSKATEHITMAIEQFSDGNESQKEKVEASSHQLNEMNNGLYDMSKTSAAITDASLKSTEIAGKGEELVQKTVGQMNSIDRSVKQAEAVVKGLEAKSKDITSILRVINGIADQTNLLALNAAIEAARAGESGRGFSVVAEEVRKLAAQSADSAKEIEHLIQEIVKEIDNSLNMFKSVNHEVQSGLRITDETETSFKTIYDMTNDIAGKLQTMNAAVEQLTQGSRQVVGAVEEIADVSRESSASIQDIAASAEEQLASMEEISASSTTLAELAEELRDLTRKFKIE

SEQ ID NO: 8654 - protein, 660 aa, Bacillus licheniformis
MKKLLNWMKRPSISKKLIFSFIFILTIPILVLSVTSYFTASSTLEDEILRSAKDNIDELNDIIQQDIGSKETSIAYFSEWIDQKAYKEKGQTAIKQRFEQFAKQNPDVELVFTGSEDSVYAQYPNAPLPDGYDPVERDWYKQAVQEKGKTIVTEPYKSASTGHMVVTIAKQNKDGSGVVALDLNIDKLIKSANSISIGKTGYAFIIGEGKTYVAHPKIKAGTEAEADLTEQMFSKESGLFTFNEKGKEKKTVFTTNKLTGWKIGGKMNTAEIKDAAQPVLHMAVMTLAGAIILGGILVYFIVRAISKPLNQLVSSAKSISEGDLTQKIDVRSKDEFGQLGTSFNEMADSLRSLISTIQESVDNVASSSEQLTASADQTSKATEHITLAIERFSSGAESQSEKVEESSQRLSQMNEKLNEIAGVSESITESSGKSTEIAETGGELVQQTVGQMNSINRSVKQAEQVVKGLEAKSKDITAILRVINGIADQTNLLALNAAIEAARAGESGRGFSVVAEEVRKLAAQSAGSAKEIEALIQDIVKEIEHSLNMFKSVNQEVQSGLEITEETESSFKHIYDMTNEIAGKLQTMNAAVEHLSTGSHEISDAVEEIADVSRESSAGIQDIAASAEEQLASMEEISSSAATLEQMAEELRDLTKKFKI

SEQ ID NO: 8655 - protein, 58 aa, Bacillus licheniformis
MNIKEKINFLEIEGRFIQFKSFFMCDSPFSTFIGDGVYFLNKKSGKLDRFPAQASGIR

SEQ ID NO: 8656 - protein, 245 aa, Bacillus licheniformis
MISVSGYWLRPEDIEKLNVSQTQRDIANRMLAMPSGYRYGSISELLFELRFREHTVKSARELINSGAKFATFSKTYGNEQFWRVTPEGALELKYRASASKAIRNIFESGPSYAFECATAIVIIFYMALLKTIGDQTFDRNYQRIILYDWHYERLPIYTDKGNDYLPGDCLYFKNPEFDPSRPQWRGENAILLENNLYAAHGLGILSGETIIEKLNGLRKPHAQTSAYLLSQVTRVDIPALIQMIR

SEQ ID NO: 8657 - protein, 351 aa, Bacillus licheniformis
VNQFMERLSLSKPVIQAPMAGGPTTPRLAAAVSDCGGLGGLASGYLTPEVLRQQILETKKLTSAGFQVNLFIPEKRETVSREEYEGWQEKIPLAHSASPVTDERQDWGDFYEKIEIILKEGISAVSFTFGPPPADAVKELKDRNCCLIGTAVSVEEAVLLEELGMDVIVVQGSEAGGHRGAFLKTKGEPAVGSMSLIPQAADHVSVPVIAAGGIFDKRGVAAAFALGAQGVQIGTAFLTCEESGTHPAYKQKLFEAVETDTSLTRLFSGKPARGIVNQWMEDRRQEEAEALPYPLQNTLTQPMRKQAKLDGNTDNMSLWAGQSVRATVEQTTVKELMDQLVPADVLSDHLN

SEQ ID NO: 8658 - protein, 133 aa, Bacillus licheniformis
MLKKIQIQTNRRDEMLDITNDVQRFISENDVSSGAVIVYCPHTTAGITINENADPDVKRDMLRRFDEVYPWEDELDRHMEGNTAAHLKASTVGASQHILIEGGRLVLGTWQGIYFCEFDGPRHRTCYFKILSD

SEQ ID NO: 8659 - protein, 560 aa, Bacillus licheniformis
MARAWWKEAVVYQVYPRSFMDSNGDGVGDINGIREKLPYIRELGADAIWICPVFDSPNADNGYDIRDYQSIMPEFGTMDDFDELLTEAHQLGMKLIIDLVINHTSDEHPWFIESRAERNSGKRDWYIWHDGKDGSEPNNWESIFGGSAWTYDEKTEQYYLHLFHEKQPDLNWENSDMRSALYDMINWWLQKGIDGFRVDAISHIKKKEGLPDLPNPEGRPFVPSFAYHMNVEGIMALLQDVKENTFAGYPHIMTVGEANGVSAEEAEDWVGEPNGIFSMIFQFEHLGLWDIEGGEPDIPELKRILSNWQSALEGKGWNALFIENHDQPRAVSVWGDDGKYRTVSAKALAAMYFLMKGTPFIYQGQEIGMTNAIFLDIDDYDDVSIKNYYRIQKEKGRSHEDIMKAVWKKSRDHARTPMQWTDRPNAGFTKGEPWLRMNENYKLINVVHQQHDPRSVYHFYKRLVAIRKRYDVFIDGSYKLLLAEDRQIFAYLRKLEEETAIVIVNLSARQAFYHHPAYPLCSNGLLLSNLDINAHKHLTSFMMRPYEARVYLIRQEIGDL

SEQ ID NO: 8660 - protein, 196 aa, Bacillus licheniformis
MKKKMNTQDAIVEAAFTLIARHGLKGTSLSMIASEVGISKPAIYYYFPSKEELIDYLFHIVFDDHNFSEYFSINEYTKENFKKRLITDGVRYFEEYKHNSPALKVVHEFVLSAAQKPRYEKKLKSIMEQFLEGFEALLSYGVELGVISSKNTKVNAHSLALIIDNLGNFMILGIEMDYKKVWETAVSNVMKGSERF

SEQ ID NO: 8661 - protein, 224 aa, Bacillus licheniformis
LNQETIIGLSKIEKTLYWIIPPVLGAVLGWFLPVIADWVLTIPIVPFKGPLEFITSLNSFWVSIIAAFIGIVAGLFFSQYIFTEILQVFISDQNVKLLFKEKEEVIEKKDISAIYLEKKDLVVLGHKGTELYREQLESKRALAESAFKHHGYKWADEDPFKNEYQRWVADHPDFPSHINTLLLARERALLDNKHEEAKILRKDLAKLGVVIQDEDKRQYVRMVS

SEQ ID NO: 8662 - protein, 261 aa, Bacillus licheniformis
VKNNHLLKSILLWGAVCIIVLAGPLSAFAASSSNPSDKLYFKNKKYYIFNNVWGADQVSGWWQTIYHNSDSDMGWVWNWPSNTSTVKAYPSIVSGWHWTEGYTAGSGFPTRLSDQKNINTKVSYSISANGTYNAAYDIWLHNTNKASWDSAPTDEIMIWLNNTNAGPAGSYVETVSIGGHSWKVYKGYIDAGGGKGWNVFSFIRTANTQSANLNIRDFTNYLADSKQWLSKTKYVSSVEFGTEVFGGTGQINISNWDVTVR

SEQ ID NO: 8663 - protein, 429 aa, Bacillus licheniformis
LNILNLILVILLIAATAFFVVAEFAIVKIRGTKIDQLVESGDKRAIAAKRVVTNLDEYLSACQLGITITALGLGWLGESTFEQIIHPLFELFGLPESVLRVASVVAAFIIITFLHVVVGELAPKTIAIQKAEAVSLWTAKPLILFYKIMFPFIKLLNGSARLLTKLFGFHSVKEHEVAISEEELRLMLSESYKKGEINQSEYKYVNKIFEFDNRLAREIMVPRTEMATLLADQSIKEAIETVINERYTRYPVIKDDKDHIIGIVNSKDLFKSYFLDETIPLTDLMRPVIRVIENIPIQELLIRMQKERIHMAILVDEYGGTAGLVTVEDILEEIVGEIRDEFDQDEMPHIIKKGEHHYIMDGKALIDEVNDLLHIAIENEEVDTIAGWLLTQKMELKNGDILKTEGCEFKILDAEDHHIRFIEVKKTDF

SEQ ID NO: 8664 - protein, 226 aa, Bacillus licheniformis
MSMIFYLLTFAALGLSIWAQFKVKSNFEKYSKVEASSGRTGAEVARQILDRNGLYDVPVEPVRGTLTDHYDPTARVVRLSEPVYYGRSIAAVSVASHECGHALQHQESYGALVLRHKMFPVVNFSSGVAPFLFIGGMLLGSLNLIGLGIILFSAAVFFQLVTLPVEFNASSRAKRIIVSEGMIRNTEERGVSKVLDAAALTYVAAALVSLFELLRFVAIFLSGRND

SEQ ID NO: 8665 - protein, 74 aa, Bacillus licheniformis
MSCLMRLFFILIGVQLMAASSIQFIFDLNAVYHSSDEVFWREFFKELFTRPPLYFMISGMVLIFIGVCLPRRNK

SEQ ID NO: 8666 - protein, 108 aa, Bacillus licheniformis
LSVNEGLLLPEKFLQKRDILIKKANSGGDTVKVTDQEKEQLSTAIDKMNEGLDAFILLYNESEKDEQLIEFEEETAEMIRQAIEQHGKVSTNQKLNAIIKEILSFSLR

SEQ ID NO: 8667 - protein, 327 aa, Bacillus licheniformis
MKSNRVFIAWLRWPIYVRIAIIILLLILLFGQLITFVEPQQFSNVFEGIWWALITVSSVGYGDFVPKTALGKIVGMLLILIGAAFVTAYFATMATAAFSKQQRYAEGKVNYRGKGHMILIGWNEKSNKLMRTLQAADSNKTIVLIDETLKEGPLMENIHFIRGHAADDATLQKANIEEAEIVFITADQHKSEISADMQSVLTLLAVKGLNPSVYCVVEILTEKQKKNAERAGANQIISTADLLKTAMLQHFLIKDQLPDPLFTEADIHFKVHRVPLPKTMEGASFQEVIRHFMKEDIFIIGVHQKDGPVLSPSFSYKLQPTDQLLSL

SEQ ID NO: 8668 - protein, 134 aa, Bacillus licheniformis
MISLPSELENRSFSLYHLEQTLKPLGYVISGGWEYDRGFFDYKIDDEDGYLFLRIPFEAEDGQLDSQNATVKLGTPFLLRHVYQEALDDYVVQGNFRASFDQFAEPKEKDADIPGVYEKLGQSYVKELEEALLS

SEQ ID NO: 8669 - protein, 188 aa, Bacillus licheniformis
MAFVLETLFLILTGIVLLRISGRKSISQMTIATTVVMISIGTIIVQPIIEDSIFKTVAAASIFIIVLLLIEYLKMKFDFFESLIAGKAVVLIENGELQEQNLKKHRLTVDQLEMRLRTQGISKLADVKNVTLESNGQIGYELSDDAKPFTMGEYKKFLRMQNNLQQPEDNLFKEITEGHLNEPDKQLR

SEQ ID NO: 8670 - protein, 158 aa, Bacillus licheniformis
LKKGKIVTAVIVFLVIYALFSLAGILFPVDREWYESLNKPDWTPSGRLIGTVWSVLFAFISLAAALVYAAYDMRKAAAPFWIMLIINYVFNQAFSYFQFTQKNLLAAAVDSFFVAITALSLTFITRRIHKTAAILFIPYVLWSFFAAYLAFTIYGMNH

SEQ ID NO: 8671 - protein, 174 aa, Bacillus licheniformis
MNHFLQTKRIGFSLWKKENLNLAKTLWGNRDVTNYLTADGIMTEGEIRNRLLLEIEQYKTHGVQYFPIFKTSNNEFVGCCGLRPYDPENDVYELGFHLVRSAWGKGYASEAAEAMIEYAFNKIRAKKLFAGHHPENTASRKRLEKLGFVYIHDEFYPSTGLQHPSYELKQPPGQ

SEQ ID NO: 8672 - protein, 450 aa, Bacillus licheniformis
MTHVRFDYSRALPFFKEQELTYLRDFVKVAHHTIHEKTGAGSDFLGWVDLPTDYDKEEFARIKKCAEKIQNDSDVLLVVGIGGSYLGARAAIEMLNHSFYNVLPKEKRKTPQVIFIGNNISSSYMRDVMDLLEDADFSINVISKSGTTTEPAIAFRIFRKLLEEKYGKEEAKRRIYATTDKERGALKTLANEEGFESFIIPDDVGGRFSVLTAVGLLPIAVSGADIDEMMKGARDASKDFSTSELEDNPAYQYAVVRNVLYNKGKTIEMLINYEPGLQYFAEWWKQLFGESEGKDEKGIYPSSANFSTDLHSLGQYVQEGRRDMFETVLNVEKPRHELTIEEADNDLDGLNYLAGKTVDFVNKKAFQGTMLAHTDGNVPNLIVNVPEMNAYTFGYLVYFFEKACAMSGYLLGVNPFDQPGVEAYKVNMFALLGKPGFEEKKAELEKRLNQ

SEQ ID NO: 8673 - protein, 35 aa, Bacillus licheniformis
VKREEAVAENRHVLKPFGPHSHANESAGGYLKENS

SEQ ID NO: 8674 - protein, 51 aa, Bacillus licheniformis
LTAQGEPPFLEPLFIVMFLTKMQVEAEKTCIFGGHPPSSFFSSLDLTKEFI

SEQ ID NO: 8675 - protein, 387 aa, Bacillus licheniformis
MDNFIYWNPTKLIFGRGEVEKLAEEVKQYGRNVLLVYGGGSIKRNGLYDQVISILEKAGATVHELPGVEPNPRVATVNKGVAICKENDIDFLLAVGGGSVIDCTKAIAAGAKYDGDAWDIVTKKHIPADALPFGTVLTLAATGSEMNSGSVITNWETNEKYGWGSPLVFPKFSILDPVNTFTVPKDHTIYGIVDMMSHVFEQYFHHTENTPYQDRMCESLLKTVIETAPKLIEDLENYELRETILYTGTIALNGMLSMGARGDWATHNIEHAVSAVYDIPHAGGLAILFPNWMKHTLSENVGRFKQLAVRVFDVDETGKTDREVALVGIEKLSEFWTSLGAPNRLADYDITDEKLDLIADKAMANGEFGRFKTLNKDDVLSILKASL

SEQ ID NO: 8676 - protein, 78 aa, Bacillus licheniformis
MNALQRIALVLTIIGAINWGLIGFFQFDLVAAIFGGQGSALARTVYALVGIAGLINLGLLFKPAEETAGEDAKQPEMR

SEQ ID NO: 8677 - protein, 129 aa, Bacillus licheniformis
MTAKFEVGSVYTGKVTGLQAYGAFVALDEETQGLVHISEVTHGFVKDINEHLAVGDEVQVKVLSVDEEKGKISLSIRATQAAPERKESKPRRQKAVQAEDTAAPQGFNTLKDKLEEWIEQSNRKDLIKK

SEQ ID NO: 8678 - protein, 390 aa, Bacillus licheniformis
MRTTYISKAAQQIKPSGIRKFFDLASTMEGVISLGVGEPDFVTAWNVREASILSLEQGYTSYTANAGLLSLRKEISAYLNKRFHLDYAPDDELIVTVGASQALDIAVRAILDPGEEVLIPEPCFVAYEALVSLAGGKAVHIHTNAERGFKASAADFEAVLTERTKAIILCTPSNPTGSVYSKKELEEIAAFAEKHDLIVIADEIYAELTYDEAYTSFAEIAGMKKRTILISGFSKGFAMTGWRLGYVAAPAYLRDPMLKIHQYSMMCAPSMAQFAAEEALKNGLEDVEKMKKSYRRRRNVFVDSLNEIGLDCHQPGGAFYAFPSVKKTGMSSEQFAEELLISEKVAVVPGNVFGPSGEGYIRCSYASSLEQLQEALVRMKRFVEKVGAVK

SEQ ID NO: 8679 - protein, 166 aa, Bacillus licheniformis
MKLTEKETEILEILEENSRLEPETIAKMANISQEETKAIIEKLEKEKVIIDYSAMIDWRKVDGHEGVTAMIDVKVTPKRGVGFDEVAERIYRFQEVESVYLMSGVYDLSVVIRGRTMSDISHFVSEKLSTLESVVSTTTHFILKKYKHDGKVFDSGDDDKRIVVSP

SEQ ID NO: 8680 - protein, 273 aa, Bacillus licheniformis
MLLTKPSIETIQGVNIYYEHYENPGKTSLVLIHGFLSSSFCYRKIIPLLKDEFNLVAVDLPPFGQSEKSSTFVYTYQNMARVVIELIERLKIKDAVLVGHSMGGQISLYAIKERPELFKKVVLLCSSGYLKRSPRSLIFGSHIPYFYLYIKRWLSKQGVLKNLMNVVYDSSLIDQEMINGYLKPFLDDQIFRALARLIRHREGDLSPDDLKKIETPSLLIWGEEDRVVPVQIGKRLHQDLPNSIFYSLQETGHLVPEENPDYVSDKIANFILT

SEQ ID NO: 8681 - protein, 84 aa, Bacillus licheniformis
MKESQAAAQIIHIIKEWDPFQAGPDFYETEAAEIVQAVYTEDDAERLGEAIQTVFEVSFDQTLPLSECKRLAERLLVIKDSSSC

SEQ ID NO: 8682 - protein, 165 aa, Bacillus licheniformis
VEWSSILEWAFQRHLNPMSWYIRPLFLVALAYFCYRRSWKGVIITFLLMTSSMVWFPVPERINPEMQAVLDYELMLLSNPLSAVVTLAFMMGFLVLIGTAFWKRSLGWGLAVLNVTLIGKVVLSVMLTGENGWAPLGNTVFGLILVNGIGLLLIAWREKRGKAGR

SEQ ID NO: 8683 - protein, 387 aa, Bacillus licheniformis
MDFNTEHNRRGTQSVKWDLTQELFGVNDALPMWVADMDFRAPQPVIDALQQRLEHGVFGYTSANAGTEEAVTDWLSRRHGWNTEPAFITFSPGIVTALAQAVQAYTEPGERVVVQPPVYTPFFDIVEKNGRVVLHNPLIEKDGRYEMDFSDLEKKLVEPDVKLFILCNPHNPSGRSWSKEELTTLGELCLKHGVTVVSDEIHSDLMLNGLNHTPFASLSPEFADISITCIAPSKTFNLAGLQASAIIIPDKAKRTAFAKVMQRQGLHSLNTFAIAAIEAAYSKGEPWLDQLIPYIERNMEEVRRFLAEELPEVRMMEPDASYLAWLDCRKLGLSDQDIKRLLLHKGKLILEPGPKYGPGGEGFVRMNVGCSLSVVKDGLRRLKTAFS

SEQ ID NO: 8684 - protein, 66 aa, Bacillus licheniformis
MAPFLIQFMLYFPEDKREYIPSFITLAVFFIIAIAVFRLIIKHSKKEAEKAEKLERELNETIHKRS

SEQ ID NO: 8685 - protein, 129 aa, Bacillus licheniformis
VNNQFQVGDRVKGFYKTGVYIGEITDVKPMHYLVKILAVLTHPKQGDLHHPNRADVPFFHERKALAYGEQTNIPHRMVKPFDEAVPDYADSLRSALSRLKTDLQNDSSEYAAKSLELIHGLEKEYFLHK

SEQ ID NO: 8686 - protein, 205 aa, Bacillus licheniformis
LEASTLLIIDFEFTMPEGKYHPQNFFPEIIEAGIVKAVHDEVVETFSSYIKPKKFPKLTRRCKNFLSITQEQVDQGITFNALIEKLRELDPDRNSVIITWGNMDMKVLKQNCMFNHVPFPFKGEMRDLSMEYKEFFGDKTLTNLWKAAEEYGDSGTGKQHKALDDAMTTYKLFRLVERDKKYLENPKPTTIGERVDLSKVFPHAT

SEQ ID NO: 8687 - protein, 423 aa, Bacillus licheniformis
MQLSHFIYNEREFKFFKKVIRISVYKKNLVIMWFANFFVAASSTMVLPFLSLYIETLGSYSDGFTAKWSGYVFGVTFLMAFLVSPFWGRFGDKHGYKKILLITGTGIGTSILLMSLVSSVYELFFLRMAMGLVTGFIPTSLAMISAQTPKKTAGKVLGTLQMGTVSGGLFGPLLGGLLADRVGFTYTFFITSFAIYSAVFLVFAGVRERPLKQKRDASAGYTRKQVLQTILHQRPLITAMILTAVIQVGNFSVQPLLALYVSELHGTQNLAFFSGLAFSATGLGSLLAARKWGALGDRFGHGKILMILALAAAVCVIPQGLTSQYETLVFFRFLFGIALGGMIPCITALIRVESPGPIQGEVLGYNVSFRFLGNVIGPVLGGILSSFFGISSAFYATAVLFFGGACLLMFQRSQQKKSEAKAS

SEQ ID NO: 8688 - protein, 622 aa, Bacillus licheniformis
LRSFFGWIFLLMLIPIFVFTLMASGREAQNMKPLDQVLDEKINIKDIGLVQNSYMYDRDGALISEIVSDHQNRVFVPYKDIPEHVKQLFLTSEDRHFFQHKGFDFIGMARAAAANVKKGGIDQGASTITQQLSRNLYLNHERTFDRKFTELLYSYQLEKKLSKEEIFEKYLNTIYFNHGVYGIGSASSFYFSKPLKSLSLAETAFICAIPNNPTLYDPLKHFDYTKTRQKRLLEGLKKAGVITEKEYSKAVKQKITLNVKEKKDDYPDYTTYVNEEFTKLVSATEGFDERLKKAKTKEEKKKIEKELSNRISSLTTSGIKIYTALDTSMQNRVVQQVKNRLPYEGVQGGAVVINHQTHQIVAMSGGKNYKKYDYNLAFQAYRQPGSSIKPLLDYGPYIEETGATAGSMIDASKFCSKEYCPNNFNERTYGTVSIKTAFKYSYNTPAVRMLNRVGVQKGFSYLKPFGFDKIVQNDYRLPAALGGFTWGFSPLEMADAYTTFGNNGSYTSSHAITKVTDLKGKTLYKWKDKPQQVFSMRTNSQMRELLAAVVKEGTGKKANFSGGYVGGKTGTSNGYRDLWFVGLTDTYTMSVWVGKEAKGTVEYLHHAGPQLLIWRGTLQYAS

SEQ ID NO: 8689 - protein, 135 aa, Bacillus licheniformis
VADMPDRIVLFDGVCNFCDGAVQFIIKHDPEGLFSFASLQSDAGGNLLKQYHLPSDHFDSFILIENGRVYQKSTAALHVVKSLPGLWRAASALLIIPRPLRDAVYSVIAKNRYKWFGQKSECTVPGPEIRKRFLS

SEQ ID NO: 8690 - protein, 185 aa, Bacillus licheniformis
MKNTYVTGFFPFIAILLFSSSLAISSVIYAMQMLSSLGIYKGMLEFFSESGIRMALFAVFTLIFFMVFSALKLIANTVTELALLFFAKDPEGANLRKIRIGSAVYLGASLLSFIFVQYAAGIAALFLLATLVYFIFIVYTIHSTLSFMSLIGFIMFELLFWFTFMIGTVYIIIKLYNSVMASLPV

SEQ ID NO: 8691 - protein, 533 aa, Bacillus licheniformis
LKKTLKLQTRLTIFVCVVVLISLLIAFFMVGSETARNIREQEQQIALQTAEMVAEAPITAQSLESGEYEELRKYTARVQKITQTEFVVVMDMNSIRKTHPDPNKIGKKFAGGDEKEVLKGRRHISTAKGTLGESLRAFVPIYNKTGTQVGAVAVGITLNEIEQITQQNLRPLYTVIVLSIVAGIIGAVIVARKVKTIMFGMEPYEIATLLNERSAMLESTKEGILAVDRTGKIKLANAEAKRLFQKMGIEENPIDRDVLDILPNSRLKQVIETQKPVQDRDVRINGLELVFNEVPIHLKKGNIVGAIATFRDKTEVKHLAEQLSGVKMYANALRAQSHEFMNKLHVILGLVQLKNYDELGNYIKDIAIYQQSEASGIINHIKNSVLAGFLLGKQSYIREQGASLEVHCSTRIPDTANTAVIHDLITVIGNLLNNALDAVSATEKKNISISFRHHDGQLDIEVTDTGVGISKEEQQKMFDQGFSTKGPNRGFGLYFVEQSLENLNGHIVVTSEKNEGTTFSLRIPYEPKEDDHD

SEQ ID NO: 8692 - protein, 235 aa, Bacillus licheniformis
MIDVLIVEDDPMVRELNKRYLSQVEGFQLKGIAASFQEALTFLREEHIDLILLDIYMPGRNGVELLTEIRRQNQAVDVIVISAASEMDVVQKTLRFGAVDYLIKPFEFERFQSALTDYKRKQQLYASNRNISQKELDFELFQKKRAPEKVHLPKGLTKSTLKLIWSSIRSFDSLTFTTEDLANHTEISQVSIRKYLKFLEEIEVLNVEMAYGTIGRPVFQYKLNTNDLNVINQYL

SEQ ID NO: 8693 - protein, 57 aa, Bacillus licheniformis
LSEAEEQGSDRLPFTEHKRGERDKSLSGNDGESNVAVTKKRPLSLESSGRGHVIDIG

SEQ ID NO: 8694 - protein, 66 aa, Bacillus licheniformis
AIIAGQGFIALAALVFGKWQPIGALFFSFAQSLSIIGFTLPFFKRNTKRLYADCALRIDDSSAGRI

SEQ ID NO: 8695 - protein, 178 aa, Bacillus licheniformis
LNKSVIPSLITVGNFVSGISSILLAFRGYLFLAIIFVLIGAILDSLDGMAARRLNAVSPFGKELDSLSDIITFGVAPAIITYSIVFYDAPILGLPSTLLFPVCGALRLARFNIQSENQDYFTGLPITAAGTILVCLNLFSEILGKKPFILIMLFLSFLMVSKIKVISLKGKKLLKKVS

SEQ ID NO: 8696 - protein, 160 aa, Bacillus licheniformis
MELAKELISQYGYFAIFGMLVLGIVGLPIPDEVMMTFVGYLSSIHILNYEMCLLISFSGAISGMLISYFLGKKIGKPLLDKFGKWIGLTPKRLDTVHRWFEKYGPWTILFGYFVPGIRHVTCYLSGMNEMDMKRFLIYAGSGAFIWCLVFITIGYTIGVI

SEQ ID NO: 8697 - protein, 263 aa, Bacillus licheniformis
LKKRLYRFLIELTNKKGVSRMLKKFAQSKLSKPLIPSYIKTFHINTEEMLEDVRSFNSLHELFIRKLKSGARPLPADPNSLVSPVDGVIEEMGTITRDKQFTVKQKLYSVEEMIGRSEIVNRYVGGTYIIIYLSPRDYHRIHSPAYGTLETQYSLGSTSYPVNKIGLTYGKSPLTKNYRMISEFKHQYGSALLVKVGAMYINSIVMLQESKEWRQGDEIAYFSFGSTVILLFEKDTFIPDERLHPSLQVKMGEVLGSLAKRTS

SEQ ID NO: 8698 - protein, 447 aa, Bacillus licheniformis
MEAAKDLKPITNHGHKENKNIFHKLINWKIGVIPFPLYIALALIVFLAAYFNELPNDMLGGFAVIMILGIFLGDVGQRIPILKDIGGPAILSLFVPSFLVFFKVLNPASMEAVTTLMKTSNFLYFYIACLVAGSILGMHRTVLIQGFMRIFVPLLAGTVAAVAAGILVGLLFGYSPYEAFFFIIVPIIAGGIGEGILPLSLAYSQILGQSTDVFVSQLIPAAIIGNVVAIISAGLMKKLGEKRPELNGNGRLVKSKKDDEIFNQKEEEPKIDLKLMGAGVLIACSFFIFGGLVSKFIAIPGAILMIIAAAAVKYAKLLPASMEKGAHQLYKFMSSSFTWPLMVGLGILYIPLDDVASVISLRFIAVCASVVIAMVTSGYFVGKLMNMYPVESAIVTGCHSGLGGTGDVAILSASGRMGLMPFAQISTRLGGASTVIMATVLLRFFTS

SEQ ID NO: 8699 - protein, 77 aa, Bacillus licheniformis
MKRKAFVSLSLFCSLFAGAFMINREMTREQTPGIGTPEGPQYRGDYTPLQTGAEDQSLTGTERAPFKPREYIRVEKR

SEQ ID NO: 8700 - protein, 42 aa, Bacillus licheniformis
MESFFEQDEFEVMKDEKESFCQPKFILFAFCGSVYDQQGNDA

SEQ ID NO: 8701 - protein, 800 aa, Bacillus licheniformis
MTSLHIAILSPFALAFLIPLLAKNVRKIHTGWFVLFLPVLLFIYFFRMIKMTADGGTLKAVLEWIPSFGINFTAYVDGLGLLFALLITGIGSLVVLYSIYYLSKEREQLGPFYVYLLMFMGAMLGVVLVDNVIVLYLFWELTSISSFLLIGYWYKREKSRYGATKSMLITIFGGLSMLGGFILLYTITGSFSIREMINQVDLISGHGFFIPALVLVLIGAFTKSAQFPFYIWLPDAMEAPTPVSAYLHSATMVKAGIYIVARFTPVFAFSGEWFWIVSLTGIVTLFWGSFNAVKQTDLKSILAFSTVSQLGMIMSMLGVGAAALHFQHFEYYMVAVIAAIFHLINHATFKGSLFMAVGIIDHETGTRDIRKLGGLMTIMPITFTITLIGAFSMAGLPPFNGFLSKEMFFTSMLRITNFNLYNADTWGFLFPVLAWIGSVFTFIYCMVLLFKTFGGKYQPEKLEKQAHEAPIGMLISPIVLVSLVVIFFFFPNILSYSIIEPAAASIMPTLLDGDEKFKVHIYMWHGFSTELYMTIGVVALGVLAYLTLSKWRKVYGLFPETLTLNKLYDSSLSGLEKGSNKITRTYMTGFLRDYLVYVFVFFIVIIGGSLAVTGGFSYDVKGNASIGVYELVLSAVMIAATFTTVFARSRLTAIIGLGVIGYTLALFFVIFRAPDLALTQLIIETISVALFLLCFYHLPKLRFKPKSARFRVTNALVSVGVGTVVTLLALSANSQRSLESIASYFIENSYKLAGGHNIVNVILVDFRGFDTLFEITVLVIAALGIYGMIRLRLEKGGEEH

SEQ ID NO: 8702 - protein, 143 aa, Bacillus licheniformis
LKKVQTNDVILQTVTKIASFIILLFSFHLFFAGHNNPGGGFIGGLMTASSLVLLLLAYDLKTVQNILPVNFIYVAAVGLFISVSTGIGSFLFGAQFLSHAFDYFNLPLLGKTELATAVLFDIGVYLVVVGVTMTIIQTIGERE

SEQ ID NO: 8703 - protein, 113 aa, Bacillus licheniformis
MEILMSFIVGILFMAATYLLLSKSLLRVIIGTAVLSHGVHLLLLTMGGLKKGAPPILNEESTTYVDPLPQALILTAIVIAFGVTSFLLVMAFRAYQELKMDDMDQMRGNDQHE

SEQ ID NO: 8704 - protein, 492 aa, Bacillus licheniformis
MNNLVILPILIPLMAAILLIFMNRSIVLMRAFSAISSIAAIAAAAVLVQTVYTDGIQTLYLGGWKPPFGISLVADQFASLLALTTAIIGFLTVLYSFRSIGEKRERFFYYPAVQFLLAGVSGAFLTGDLFNLFVFFEVLLMASYVLIVIGGTKIQLRESLKYIVFNIISSALFVIGVAYLYAVTGTLNMADLSVRISESGQTGLITVIAVLFLIVFGLKGGIFPLYFWMPGSYYAPPAAVSALFGALLTKVGLYAITRVFTLIFTQDAAFTHQLMVWLAALTIIFGVIGSIAYWDVQKIIIYNIVTAVGVILFGIAANTPASIEGSVYYLIHDMIIKGALFMLGGALFALTGTNNLKKMSGLIKNHPVLGWMFMISAVSLAGVPPFSGFIGKLKIAEGGFLSGEFVITLLMLLSSLLVLYSVMKIFINGFWGDEQEDAPAKRQLKGYMYPAAVLLFLSLAIGLGTELIAPYFHQAADTLVNPEKYIEAVLKE

SEQ ID NO: 8705 - protein, 158 aa, Bacillus licheniformis
MALQILLNFILALCWMFLNNDYTAAGFVIGYVIGLFSLFLMRRFFRRRFYLINIWAIVRLLFIFIKELVLANVSVLKTILSPRLKNKPGIFAFKTDLKADWEITTLANLITLTPGTLVVDISDDRSILYIHAVDIDDAEKAISDIRISFEEAIKEVSR

SEQ ID NO: 8706 - protein, 94 aa, Bacillus licheniformis
MFEFILQLSLGILAVSTFLYVLRVIKGPSIPDRVVALDAIGINLIGITALVSILLNTTAYLEVILLIGILAFIGTVAFSKFLEKGEIIENDRSR

SEQ ID NO: 8707 - protein, 124 aa, Bacillus licheniformis
MIEAAKLLIAVLILLGALISLAASFGTLRLPDLYSRIHAASKGATLGIISVLLGVFFYFWFLHGFITAKVLLGIVFVFLTSPVGAHLIARAAYNTGVKMEKKTVQDDYEGYRNFLIKKKEDSYL

SEQ ID NO: 8708 - protein, 129 aa, Bacillus licheniformis
METKHTLLEALGIELKECSKERCVAVMPVDERTRQPFGYLHGGASVALAETVASIGAYQHIDPKEQACFGLEINANHIKSVKDGTVKAVATPLHVGKSTMVFQIEIRDEQDSLICTSRCTMAVISRPSS

SEQ ID NO: 8709 - protein, 212 aa, Bacillus licheniformis
MRRLLVIDDHPAVMEGTKAILETNQDFVVDCLSPEASEQFLKKHDFSAYDLILMDLNLGEINGMDLSKKILETCSSCKIIVYTGYEVEDYFEEAIRSGMHGAISKTESKEKIIEYIYQVLDNKIVVDYDYFKQLITQQKSKSNSQQTQHDLLTERECLILKEVEKGYTNQEIADALHLSKRSIEYSLTSVFSKLNVGSRTEAVLIAKSEGVL

SEQ ID NO: 8710 - protein, 76 aa, Bacillus licheniformis
MKFSLKIISVILVCLSFIYSCYVVYICYNNLFVGAYLKYNSDNQLVVDYIQEDSLADYTGLKAGDIILLKSWGYYS

SEQ ID NO: 8711 - protein, 57 aa, Bacillus licheniformis
VQEIVSFLVQHPEILEQVINGNSCLLGVDIDQLESIIDGFKLLESSIGRPVPFWRSI

SEQ ID NO: 8712 - protein, 293 aa, Bacillus licheniformis
MNHFIDLEIPNADLNRTLHAFLDAKDQLHFSELAFYHYQSFGGTDTDAAETLGAGIELLILAFDIFDDLEDEDSPDEPWMKINRSVAMNAATALYTISIKVIGSVSKEPVFFEKLMEYTLQSMQGQHDDLSNRPATEDECLDMIKRKSGALTALPCVLGAMLATGKFDPTVEKYAYQLGIASQIENDYKALFYDSKSDIAKKKRTLAYLYLSRKFNQPSIDLLKTFETEDKIADKEIKCYKEKLKAAGVTQYMYVMNQLAIQKFKKGIGELELGELKKQQLTSFVLKMFGKED

SEQ ID NO: 8713 - protein, 46 aa, Bacillus licheniformis
VEKQQIEELKQLLWRLENEIRETKDSLRKINKSIDQYDKYTYLKTS

SEQ ID NO: 8714 - protein, 42 aa, Bacillus licheniformis
LNFGIDLPAADVLIWMHPKAMRRKQYEHLFSIFTGQIAVFAV

SEQ ID NO: 8715 - protein, 112 aa, Bacillus licheniformis
LLPPHCFWMHPYQHVSCRQVYPEVQVSALLRSAKEAESLMADGQRILSRLSASRTLAQQIMTAAQSNQKNNVLAALRQTGVRSQLDASFDPDGIRIMLISPRSRLFLLLRWS

SEQ ID NO: 8716 - protein, 321 aa, Bacillus licheniformis
MRVFVARQPIFNRKEQVVAYELLYRESEKNFFSGIDGDQATTELMINSFLNIGIDKLTEGKRYYVNFTEGLLASGLPTYFDPDQLVVEILEDVPITLELIERCRHLKSLGYTIALDDFCLKHRVKRDLLHQLLASIDILKIDFFKTTQQERQSILRSCRNHRLTFLAEKVETRKEYEQAVKDGFHLFQGYFFSEPVVIDGQDITYHFHAYYELLHELSEDQPDIENVTNIIERDLSLSYQLLKLLNSPANRPIQKIKSIRQAIVLLGFKEIKRWIFILSFKDLTKKQNSSKNEVVKISLIRAKLCELLAKKRTALSRLLIC

SEQ ID NO: 8717 - protein, 489 aa, Bacillus licheniformis
LEHRFTDDSLALHTDLYQINMAETYWRDGIDQKKAVFELFFRKLPFDSGFAVFAGLEKAIEFLRDFRFTESDLVYLKEELGFKDDFLGFLKDMRFTGSLYSMQEGEIVFGNEPIMRIEAPLAEAQLIETALLNIVNYQTLIATKAARIKSVIGEETALEFGTRRAHEMDAAMWGARAAIIGGFDATSNVRAGKRFDIPVSGTHAHALVQAYRDEYTAFKKYAETHKKCVFLVDTYDTVRSGIPNAIKVAKEFGDQIEFSGIRLDSGDLAYLSKKARAMLDEAGFTDTKVVASSDLDEYTIMNLKAQGAKIDVWGVGTKLITAYDQPALGAVYKLVSIEEDGKMADTIKISSNPEKVTTPGLKKVYRIINQLNHHSEGDYIALDYEKVNEQERLKMFHPVHTFISKFVTNFDAKDLHQPIFEKGELVYENPSIQDIKRYVQENLSLLWEEYKRISKPEEYPVDLSEACWNNKMQQIHEAKIKAKKGLDQG

SEQ ID NO: 8718 - protein, 183 aa, Bacillus licheniformis
MKKALICIDYTNDFVAADGKLTCGEPGRKIEDAVARLADTFIQNGDYVVFAVDSHEAGDTLHPETRLFPPHNIKGTSGQDLYGKLEKLYRKHEHDQNVYYMEKTRYSAFAGTNLELKLRERDIQELHLVGVCTDICVLHTAVDAYNKGFNLVIHQNAVASFNPDGHDWALSHFANTLGASVSD

SEQ ID NO: 8719 - protein, 133 aa, Bacillus licheniformis
VSDQSLDQYLQQGMYGPRETKPDERRLFLGSLRERVIIALTKGQVLRPKAYREVIDALGSKADATLLLNGEIGYSHLSPYIKESNKQGVPFSIVSDQQSDTPLGLVLAAREAVEKESIYVQDDIFEQSVLNKR

SEQ ID NO: 8720 - protein, 82 aa, Bacillus licheniformis
MKIRKANILNEDQMITDVYLHENKKEFHTLVAVPQLEWSTLISYEEEKAELAEKLDRSLSKVAESDAAEELSKKIVQWVTEM

SEQ ID NO: 8721 - protein, 73 aa, Bacillus licheniformis
MPAIVGPIFIRRVVDDSAAFFGDVFAISPKCTDSSGGGAGTFQTGDYGLIHNDINKTTFTDADVMDGSQSLNL

SEQ ID NO: 8722 - protein, 369 aa, Bacillus licheniformis
LLKSKTHFWTLQILLVLLIIYVSTKVSFLFEPIIVFASTLFTPILIAGLLYFIFNPIVRLLEKKLPRTLSILLIYLVFVAFIGFVLSAVGPVFTKQVTDLFNNIPSYVKQIQIFIKQMSNSQWFTWIMNQDFVSVAKIESSIGEYLTSLPENITGSLTSVFGVVTNIALTAVTVPFILFYMLKDGHRFPNLAVKILPDKYKNEGLKIFKDLYETLAAYIQGQLIVCLFVGTACFIGFWIAGVKYALILGLIIAVTNIIPYVGPFLGAAPAVIIAFLDSPTKALIALIIVVAVQQTDGNLLSPLIIGRRLNTHPLTIILLLIGAGSFGGILGMILAVPAYALLKAFTLNIVRLVRLRQRYKKETAENPEV

SEQ ID NO: 8723 - protein, 144 aa, Bacillus licheniformis
MKISSRFTIAVHMLSLMHVRSDHLTSEQIADSVNTNPVIIRQISRLLKKAGLIEVKRGTGGAHLLRDAGAISLYDVYKAVEVVGEGELFHTHENPNPDCWVGANIHQVLELVLLKAQTAMENILKEMSIKELTDLIIQKKNASQ

SEQ ID NO: 8724 - protein, 298 aa, Bacillus licheniformis
MTNHIKEINWEQNTNSYIQLIPNIEYTKVEDTSLTLHLLVYRNPMDALFNRKGNQETYPLIIYLQGCGWGWTKQDTSAFIPQLVPFVEQGYVVASVQYRGSGEAVFPAQLHDVKTAVRFLKANAARYNIDPDRVGVWGDSSGGHLALLLGLTEGIEEFEGPDEYRHVSSKVDAVADWFGPVDLLSMSKYPSIFDHDSPNSPESKLIGGAVQENRVQAKQASPIRYVHREAPPILIMHGDQDDVVPYQQSVQLFEALIKEGHDALMYKINGAGHNGFTQAHTLDIVKSFFRKHLKPGKA

SEQ ID NO: 8725 - protein, 487 aa, Bacillus licheniformis
MKKLVLLMLVLLLVYPHVSKAGGFKGGGGDPGYWFVGDPVEHPDPAKPPIVFVHGLNGSSSAWFDENDMAEQAWKNGYNAAFIDLHPDKDMQDNGAMLAAKLREIYQHFGRKVILVSYSKGGIDSQSALIHHNAYHYVERVITLGTPHHGSQLADLAYSNWAGWLADILGQKNDAVYSLQTGFMKSFRDQTDNHPNRSKTKYFTLAGNKIGGLGSVLFFGGVYLNMFGENDGAVTEKNARLPYATNLNTGKWDHFSIIKGNLTFPVFMPLLTVQEYANETAAINEKLSYPFIRGGENHGLREEEFAVEKGVKEITVHWLSNHSSGNIKLTDPRGKPFKDFSIAKTADVFEGGFVHSAAIKNPAAGTWKIASSVKQKEAFLFIVTFDSPLNQQIKNAVTRESSNLANVKASVRSIRYENGKQTEKKSLKPASINALQNSLSFKKAGLYSVTIDLSGKTADNSPFNRTIIRSIYVNDKGEKFENSPLSD

SEQ ID NO: 8726 - protein, 176 aa, Bacillus licheniformis
MRNVTLMDVFTHPIAQKYLTRSGVAHAVACAYHAYRLAVRAGVDPDIATKAALLHDIGHYEWYTDGEWDYEKYKQNDIHAIKGAERAHKLLIRLGEDRKAAKEIALAILLHTDSYLPEGDLDKNKLQQIVKKADELDEEPGGNHHYRKIDHKLALEKIRKLDRMVDESLSPMKRTV

SEQ ID NO: 8727 - protein, 243 aa, Bacillus licheniformis
MHLSIVTGASKGLGAAMAEGLLQKGHIVHAVSRTKSDISHDRLIQHEADLAQLAETEKWFRQFSDSVQAHDFASITLINNAGMVTPIKRAGEAEPEELRLHYDLNLLAPVMLSQLFTKWLKPYKGKKSIVNISSGAAKNPYKGWSAYCSSKAGLDMFTKTFGFEQEDESDPVKMISFSPGIMDTGMQEVIRSSSKKDFHEIERFKTYQTEGKLRSTSYVAGILLDLLETDFENGRVYDIKEFL

SEQ ID NO: 8728 - protein, 162 aa, Bacillus licheniformis
MMRNAKWGKKGIMAVMLSFFLFTPIAKAEETDKVDVKPNEYEKQDIKIETDYLQEEEAEYKEEISIPEELKEFSFTDSKKEDAIEKLKSLSGSFTNESNSVASKLKQLDLSFSANPSLSGREDDSAENRQSIFLPILYGLLILLCIAGLFFLIPKVSGQQKK

SEQ ID NO: 8729 - protein, 1020 aa, Bacillus licheniformis
MTEQQKSTLKIISAIVTIILLPVLFFHFIGENPTKKVSNATREIAVVNEDTGVLKDDGTVDQDALLGNEISASLVDRPDYKWTVVNRSAAESGLAEKQYDAIVYIPSDFSQNILSYNHERPQKAELEFKIQDQLDAVNKEKVQRELQDAQKTVSKKMSSLYWRFVKQGVKKVRKEFDSIVNKESEFQNAMYNFYKPSSNNLAGEVERQKEMIDRLKESINETEGTSKERNASVEESKKQLDSFVDNVNQYKQYQEKQSELLQAAQADSEKQIQDGLTSIKDKQASAQSRFSEQMNGMAMSLSGLHNQFSLAGSSLENLAKYRYVEVPEQQLGQISTIQSELISNYKADARQLNIKNIESQSHILEYRQKLFEFDDTPIAEDPGNDGEDDSDEDDNKNIEINLDDETTELEKISKELEELSNNIEVPNKEEPESPSPGENDGTTEDNTSTDPVDTGQTGENDNTVNSEENEQQADNGNNVDDTNKEDPPPAEENPDEQDGSNLEELKKELSTISANIEGVKSNIDQKTKEHNEELKKKIDNLDEKVEKLNKKVDELNERVEDLKQKLIEERDKDFQKIYGKIIKLEEDLKVYYENDISPEVKRAFDNQSFVNRNINQLMDYYNLLSVYHVAVTGKYKAGTELEDGLLQNSKNKVDTVLRVNENETTKWKNLKNNMLATNEDIEAYTTGMTDFVDSYGAFIDEKQTETLNELSNISDRANAVSEQLRNPEGAGTAVMEGDATDGTMVISMQDTLGNDILQLSNMLGSLSETQSGVIEYTSNIQESVNDVQKKADTLNSNWGQNVATTKLIRGDVYGILGNAFGGNDGYVYDHLASPVKISGDVPESKAQNVPPVVILVIVMLSSLLIGYFSHHYQNAPLLVRGALFGILNIIVGLMISLFGLNIYSLADDQAVMWSVFTILLLVASSAIIRTAFMLGSIAGGIATAAMVLFYVAPLLDLAMPNFSFNNPVSTVYMSIQYGTGSQFALGIGALILITIIAIAVPFIVDFAKSRTEESETDHDA

SEQ ID NO: 8730 - protein, 1494 aa, Bacillus licheniformis
MSLLWIFYHKNYQKIKLDDQNSRTLTIGPDLKHSVTIKHFSFEKGPVTLEKQKDSDVLNVQLGGETVSSLKLGGKASVQSGAEQLTLFLAEEADSVPAYYLGERQEIVISSLDQEADVYFNETDSFFGEKGTFSFIRLDGQWNVLPNDAKIYLNGEEVSAPVSVQNGDEIAFGLNILRIVEDDLLEIEGFGKFDTSLENILKPSSETKNKYPQYRRPPRMIYDLPDEKVSFSFPAQESDGDNRGLWLMILPPLVMLIVMGIVALIQPRGIFIIVSLAMFMMTLITSTVQYFRDKNQRKKREEKRERVYTLYLENKKKELHELAERQKFVLDFHFPTFERMKYLTKEISGRIWEKSIESADFLQIRLGTGNVASSYQINLNGGDLANRDTDHLLEQTQKMEEVYRELKNAPITVNLAEGPMGVVGKLSVVKNEIHQLVGQLAFFHSYHDLRFVFIFDEAEYQEWEWMKWLPHFQMPHIYAKGFIYNEQTRDQLLSSIYEILRERDLDENKKKTLFKPHFVFIITNQQLIAEHVILEYLEGKQKHLGVSTIVAAETKESLSENIHTLVRYITEQEGDILIKQKKAVQIPFQLDHHNREDNEQFSRTLRTLDHQTGMTNSIPDTVSFLELFQVKEVDDIGIEQKWMTSESAKSLAVPIGYKGKDDIVYLNLHEKAHGPHGLLAGTTGSGKSEFLQTYILSLAVHFHPHEVAFLLIDYKGGGMAQPFRNIPHLLGTITNIEGSKNFSNRALASIKSELKKRQRLFDQYKVNHINDYTKLYKQKKAKTAMPHLFLISDEFAELKSEEPEFIRELVSAARIGRSLGVHLILATQKPGGIIDDQIWSNSRFKVALKVQDANDSKEILKNGDAATITVTGRGYLQVGNNEVYELFQSAWSGAPYMEDGYGTEDEVAIVTDTGLIPLSDVDADRAAKKEAVTEISAVVEQIERIQAEMGIEKLPSPWLPPLEERIPKTRYPSEEADAFNFAYIDEPEKQSQEPISYRMMEDGNIGIVGSSGYGKSLTATTFMMSFAEQYTPEELHYYIFDFGNGTLLPLARLPHTADYFLMDQTRKIEKFMVRIKAEIEHRKNLFRAKEISHIKMYNALNEEKLPFIFITVDNFDIIKDEMHELESEFIQFSRDGQSLGIYLILTATRVNAIRQSLLNNLKTRVVHYLMDQSEAYSIIGRPEFSLEPIPGRVIINKENQYFAQMFMPVEADNDIELFEGIKADIQAIAERSEGMRKPAPVPMLPLELSVTQFVRDYPLQPERGLIPMGLDEETVEPVYFNLEKNKHCLIMGQTQRGKTNVIKIMLEHLLDHDTKKIAVFDSIDRGLSQYATEDQISYLETKDDILLWLAETEEICRTREAMYLEAVKQGEIANLDFSPMVFIVDGISRFQQTIDASIQDKMAMFMKSYAHLGFHFIPAGNHSEFTKGYDSLTSEVKQVRHAMLLMKKSEQNLIQLPYERQEPEILPGFGYIVENGKERKIQIPLCAVERKKAK

SEQ ID NO: 8731 - protein, 438 aa, Bacillus licheniformis
MAEKKKTYLEDQLEAVMTKEDGTYIFRFQREKINLVNGLEANVIKEVDPSFNKEAVMTDDEVQIMIQPPSEYKEFRYIKGKNKKSKWLFAYQLVKAVEEHSIKRLHLIAAPENIVFDKGLTPKFLHYGVKESIPPYEHDEERLFNEVKAAAALAVDGQFSFEEYLKYSETIKFSDQVKDIITSGTYGDLKAVIQKRIDELDAEEKMLVHLPKKKWKIQRYIGLGLILCLIPAVLFSFYSLFFAQPKQQAFIESNRYFLNKQYSKVISTLDKYDADEMPDSVQYQLAYSYIIVDNVLKEADLQEDAMKSLTLQVDPNNFLYWIQIGRGANKEALETARKLENNAQIMLALMKYTDDIKADDKLSSDERQKQLDPLEKELEELKRTADEQKAKTEENQQANTEQNQADVEAAKAETEKAEKEQAKKENKEKEDKKKKDDK

SEQ ID NO: 8732 - protein, 79 aa, Bacillus licheniformis
VYVDITIDLKHYDGSVFDLRLSDYHSVKKVVDIAWQAKSIPVPPREGYWVRVTNKDAVFSGEYTLSQCGITTGDRLEIL

SEQ ID NO: 8733 - protein, 98 aa, Bacillus licheniformis
MSGIIRVTPAELRQMADRYQKESGDVTEQVNQRLDQMINQLQDMWEGESSRAFSEQYQELRPSFIKMAELLSDVSKQLHQTANTLESTDQDIASQIRG

SEQ ID NO: 8734 - protein, 469 aa, Bacillus licheniformis
LAILEKINGFLWGVPGIVMLAGTGLFLTFILRGLQFKRLIYAFKLAFGKEKESAGADGDVSNFKALMTTLAGTIGNGNIAGVATAITVGGPGALFWMWLVGLLGMATKYSEALLATKYRVKNERGEYSGGPMYYVEKGLGKKWKPLAVLFALSGVLASFGIGDSVQSNTISEVVTQSFGIPGWIIGLVLAVLTAAIIFGGFQRVSTVASIFVPVMAILYIGGSLIIIFLHYDQIIPAFQLIFYHAFNPVSAAGGFTGMVVSEAIRNGMSKGIFSNEAGLGTAALIAGNAKSDHPVKAALVAMTGTFIVTLIVCTMTGLVLIITGFWDPSGGLLSGVAHDASLDAGALTNAAFASSLGAAGKYIVTFSVIFFGYSTIVGWYVYGEKCLEYLVGLKWVPLYRVVYVIAAYYGAVASLNTVWAFADAANALMMIPNLIALVLLWKVIRAETDDFFLHHYNKEKQKSAGLKAG

SEQ ID NO: 8735 - protein, 412 aa, Bacillus licheniformis
MNNRNNPFKYQYDRLEDVADHISEVLDCPITIEDINHRLLAYSTHSDYTDPARTSTIIGRRVPEKVINKLWKDGTIPALMKTDEPIRVEQIDEVGLSSRVAISIWKNSEVIGFIWALESQKTLSEDELHLLKLAADSVKNKLLPYQVRKRKNEQRSQEFFWKLLTGHISEDQEISDGFHQLGIGVPSTYSVIIIRLKDEIEEKTEKQLHYLLETTQQLQILLATIDYNELIVLASSKTGQKGQPFNDLKQFAANIQKQLEERYKLNNCTIAIGGMYSLITLVHQSYQEALSALKVKERFPDETRHLVSFSELGIYQYLDVLNEKRKHASYPNYSLMQLEAYDKEHHSNLVETLEQFIECDSNVNTAAKKLNIHVNTLNYRLKRISKIAEIDLKNINEKFTIYLEIKLRNMHL

SEQ ID NO: 8736 - protein, 379 aa, Bacillus licheniformis
MIIGVPKEIKNNENRVALTPGAASQLIAAGHRVIVEKDAGTGSGFENEDYVSVGAEISEQAEAVWEAAEMVMKVKEPLPEEYPYFREGLILFTYLHLAAEPSLAEALKQKGVTAIAYETVSNGRSLPLLTPMSEVAGRMAAQIGAQFLEKPKGGKGILLAGVPGVARGKVTIIGGGVVGTNAAKIAAGLGADVTMIDLSADRLRQLDDQFGNQIKTLMSNPVNIADAVAEADLLICAVLIPGAKAPTLVTEEMVKQMKPGSVIVDVAIDQGGIVETVDHITTHDNPTYVKHGVVHYAVANMPGAVPRTSTVALTNVTVPYALEIANKGAEKAILENPALKAGVNTANGHITYEAVARDLNYGYVPAELAIENSSSAAGA

SEQ ID NO: 8737 - protein, 81 aa, Bacillus licheniformis
MFFVQLFIFLMLSACFWLFIASFKKKAFAVLLLLTAAAVLALFAAVGDASDRALWRIVLFGAVPVSAIAAKLIQDRRKTES

SEQ ID NO: 8738 - protein, 197 aa, Bacillus licheniformis
VFFGKTKPHKSDRVPPNQNVTTSFPVLHAGHVPEYEDLSKWNLQIYGLVEQPLLLTLDDLHEMPQSEVSNDIHCVTGWSKLDNVWEGIKTKEIAERVKPLPEARFVILHAEEGWTTNVPLEDFLKDSSLLAHSHNGAPLTPEHGFPLRAVMPHLYFWKSAKWLRGIQFTKENHPGFWEKNGYHLRGNPWKEERYSFD

SEQ ID NO: 8739 - protein, 198 aa, Bacillus licheniformis
MNNKKLRAGDMALVGMFAALMGIGANITSFAPFLQIGGIPLTMQPFFCLLAGLLLGRKLGALSMIVYALVGFIGAPVFASFSGGISVLFKGSAGFILSYIPAAYAAGWITDKLSEPKTGHFFAASLIGTLIIYLIGVNYTYLAFSTWLNTPMSYSAVWKMMAWFFVKDLAFSVLLAALASKVFRAVQKGAGFRRNPTF

SEQ ID NO: 8740 - protein, 442 aa, Bacillus licheniformis
MNAVVIAVIVMLILSLLRVNVVLALIVGALAGGLTGGLGLGQTVSVFTEGLGGNATVAVSYALLGAFAVALTKTGLPDAMVEAAVKLIGKEGDTRRKTLSKALIVFVILIISCMSQNVVPVHIAFIPVLIPPLLKILNELQVDRRLIACAMTFGLTAPYILLPVGFGQIFQGILKDNMKDAGLSVTLADIPIAMIIPIVGMIAGLAVAAFVYRKPRTYEMKEIAGQKSASYTKKSLSIAVLAIAVSLSVQLYLSQSLDVDGMILGALSGLAVLFLSGAMKRGEADELITNGMNMMAFIGFVMLAAAGFANVLEKTGDVKALVEASTGFISNNQVLGALLMLVVGLLITMGIGSSFATIPIIATIFVPLCMQLGFSPMATIAIIGTAAALGDAGSPASDSTLGPTSGLNADGQHHHIWDTCVPTFIFYNIPLILFGWIAAIVL

SEQ ID NO: 8741 - protein, 496 aa, Bacillus licheniformis
MFYAFKDFEKKETLLIGLFKKIRLYGKAEEIDRLLNGQLSQLLKDGDVSSKKAKVSKIFTPSLQGVKRIYIVGLGREAEFTFEDAKQCFAEAVQLIHKDRKQELTVMLDSFVSEEVPAADAAHALAESCMLSCYEVQDYKHRSNVPDQCLQSVYVLTDHDLKEIQASLHVGQVYGNATNSARTLVNMPGNMLTAADLASYAAELAAKYEFECEILEKAEMEELGMGGLLAVNQGSEEPPKMIVLKYQGKETWDDVIGLVGKGITFDTGGYSIKTKSGIVGMKSDMGGAASVLGAMEAIGELRPEQNVLAVIPSTDNMISGSAMKPDDVIVSLSGKTIEILNTDAEGRLALADGLTYAKHHGASVLIDVATLTGGVVVALGTETTGAMTNHDPLYQQVRQAAEEAGEAIWQLPITEKDKKRVKNSQMADLNNSPGREGHAIMAGTFLGEFAEQTPWVHLDIAGTATTAQNSCFGPKGGTGVMVRTLVTFVERFSGNL

SEQ ID NO: 8742 - protein, 158 aa, Bacillus licheniformis
MEILTNFPLLASFAAIFFAQFIKVPIYFVVSKKWDWRLVTSTGGMPSSHSAAVTALSTGVALDHGMDSSLFAVSAIFAVITMFDATGVRRHAGEQATVINRLVRDFNRFVNEAKDFPKSHQEEKQKKLKELLGHQPIEVFFGGLTGIALTLLLDYLLM

SEQ ID NO: 8743 - protein, 224 aa, Bacillus licheniformis
LRKVMTMFRRFLMTVLFVLAFMTTFFAVSGVEAQDISSWAKERDLSLKQLMLTFKSLPEEKAEKTSLSAAEQIKNKPKSLEDAFDWSKYPKQKVTATGYTAGAESTGKQPHHPDYGITYSGVKVKRDLYSTVAADPSVFPIGTILFIPDYGYGVVADTGSAIKGNRLDLYYETVEDVYKEWGKKTLDVYVIKKGNGTITEEDLLKLNENKSMQVFRQKYKMAKE

SEQ ID NO: 8744 - protein, 106 aa, Bacillus licheniformis
LISLPVVIISVVLFFVLFFGIGFLLNMLLRMSWIMAVIYPIVCLFIVNKEKLIRYVEAPGEAFSGLFDRVASLAAADIIILASGMAGALLSGVTIKALRKRGYQMF

SEQ ID NO: 8745 - protein, 56 aa, Bacillus licheniformis
MIYYQKIKKKGVYPMKTTSTHRLESTCTFCSGKGYFQLLLGGSETCSNCKGTGKDR

SEQ ID NO: 8746 - protein, 403 aa, Bacillus licheniformis
LNKPKVVVLGAGYGGLMTVTRLVKKIGINEADITLVNKHNYHYETTWMHEASAGTLHHDRCRYQIKDVINTSRVNFVQDTVKKIDKEGKKVVLETGELSYDYLVVALGSVPETFGISGLKEHAFSISNINSSRQLREHIEYQFATYNTEAEKRPERLTIVVGGAGFTGIEFLGEMANRIPELCREYDIDRQQVRLICVEAAPSVLPGFEPELVDYAVNYLEGKGVEFKIGTAVKECTPDGIIVGKDDQTEEIKAGTVVWAAGVRGNPIIEESGFENMRGRVKVKPDLRVEGHDDIFVIGDCSLIINEETERPYPPTAQISMQQGETCANNLAALIHGKETETFSFDNKGSVASLGEHDAIGVAFGRKMTGTTASMMKKIIDNRSLFMIGGPGLVLKKGKFKFF

SEQ ID NO: 8747 - protein, 43 aa, Bacillus licheniformis
MKIVLNYIISHKINTSASVFLGAENNTVRAYLTLKKQLQAAMM

SEQ ID NO: 8748 - protein, 332 aa, Bacillus licheniformis
MREDTKVYDITIIGGGPVGLFTAFYGGMRQASVKIIESLPQLGGQLSALYPEKYIYDVAGFPKIRAQELVDNLKEQMAKFDQTVCLEQAVESVEKQADGIFKLVTNKEIHYSKTVIITAGNGAFQPRKLELESAAQFENANLHYFIDDLNQFAGKRVAVLGGGDSAVDWALMLEPIAKEVSIIHRRDKFRAHEHSVENLRNSKVNVLTPFVPTELIGSERIEQIVIEEVKGERKEIIDVDDVIVNFGFVSSLGPIKNWGLEIEKNSIVVKSTMETNIEGFYAAGDICTYEGKVKLIASGFGEAPTAVNNAKAYMDPKARVQPLHSTSMFENK

SEQ ID NO: 8749 - protein, 66 aa, Bacillus licheniformis
MEKINCRSCGGLTPYDSKVCEACGCEKPLPKSQKITDRIVLTAAGVVGILTIVLILGTIFSYLNII

SEQ ID NO: 8750 - protein, 74 aa, Bacillus licheniformis
MSYYNNRNQEPLPKEDISTWECTAEDCNGWMRKNFTSSDRPLCPLCNKEMISGSRYITSITNNTSNLNRIFNQK

SEQ ID NO: 8751 - protein, 159 aa, Bacillus licheniformis
MKLVSTHALSKADVTAFFHTHWGSPEMVNSHGTFRCDELEGFAVTDEKSDIKGLITYFIAGNECEVVSLDSVVENKGIGSLLLQEVERVSKRKQCKSIKLITTNDNMRALMFYQKRGYTLAELYVNAVDKARKVKPEIPFVADNGIPIRDEILLVKDLA

SEQ ID NO: 8752 - protein, 121 aa, Bacillus licheniformis
MSEKTVTVTEAAALHIKDMMKEHEEENAFLRIGVKGGGCSGLSYGMGFEHEKNEDDNEFVQHGITVLVDQESLDIMNGTVIDFKQSMMGGGFTIDNPNAIASCGCGSSFRTAANAGKPEEC

SEQ ID NO: 8753 - protein, 285 aa, Bacillus licheniformis
MNSFRFTKMHGLGNSYIYVNQFEEHLPEELLSDLAVKVSSVYTGIGSDGMILICPSDRAPVKMRIFNSDGSEGKNCGNGLRCVAKYAYEHKLVEETSFLIETLSGLVKAQVEVDEGKVVSATVDMGEPRLLKSDMPMRGEQGSETINEKMIFGGREMKGTAVSMGNPHIVFYLDDIEKAPLTTMGPLIEKDERFPEGVNVEFVEVENENELHFRVWERGSGITQACGTGACAAAVSSVLNGYSKRDTDITVHLAGGDLIINWKNDGRVMMTGPAETVCEGEFFIS

SEQ ID NO: 8754 - protein, 26 aa, Bacillus licheniformis
LYPSLSAFILEERKKCGGGYEFFSFY

SEQ ID NO: 8755 - protein, 405 aa, Bacillus licheniformis
MNILWGLLGILAIFAIAFLLSEHKSKINIRTILIGLAIQLLFGFIVLKWETGREAFLWFTKAVQHLVNYANEGISFLFGPLLQVGDSAAFALSVLPVIIFFSSLITVLYHLRIMQVIIRFIGGGLAKLLGTSKTESLSAAANIFVGQTEAPLVIKPFIANLTKSELFAVMTGGLASVAGSVLFGYALLGVPLEYLLAASFMAAPAGLIMAKMLIPETEKPKIEEKDIQMAEDEDAANVIDAAAKGASTGLSLALNVGAMLLAFVALIAVLNGILGGVGGWFGFKDLSLEYILGYVFAPLAFVIGVPWDEAVQAGSFIGQKLVLNEFVAYSNFAPMFDQLSVKTASIISFALCGFANLSSVAILLGGLGGMAPNRRSDIARLGLKAVAAGTLANLLSAAIAGMFIG

SEQ ID NO: 8756 - protein, 41 aa, Bacillus licheniformis
MNSFKNGVILVISFFHAKPLNERVYIKREKIRENFCGQANH

SEQ ID NO: 8757 - protein, 78 aa, Bacillus licheniformis
VFPIVEFCVSNLAQGSQEAKEILEKDPNLDVVEYGCLSYCGQCMQTMYALVNGEMVTANNPAELVENIYKFIDENELI

SEQ ID NO: 8758 - protein, 355 aa, Bacillus licheniformis
MRNLVLLGGGYGNMRIIHRLLPNQLPDDVMITLIDRNPYHCLKTEYYALAAGTISDHHIRVSFPDHPKLKIEYGTISSVDLEGKKVLFHDREPVSYDDAVIGLGCEDKYHNVPGAPEHTYSIQTIDQSRSTYQALNNLNAEATVAIVGAGLSGVELASELRESRKDLNIILFDRGELILSSFPKRLSKYVQSWFEEHGVKIINCANITKVEEGIVYNHDDPIQADAIVWTAGIQPNQIVRDLDVEKDPQGRVVLTPHHNLPGDEHVYVVGDCASLPHAPSAQLAEAQAEQIVQVLELRWKGEPLPETMPKFKLKGVLGSLGKKAGFGLVAERPLIGRVPRLLKSGLLWMYKHHNG

SEQ ID NO: 8759 - protein, 123 aa, Bacillus licheniformis
MEVFEEYLAGIDHPEHRARMEEVLGWVAETFPNLTPKIAWNQPMFTDHGTFIIGFSVAKNHLAVAPESAGIDRFSEEIVQAGYDHTKQLVRFRWDRPVDFSLLEKMIEFNIADKADCSTFWRK

SEQ ID NO: 8760 - protein, 63 aa, Bacillus licheniformis
VKKMIAVALTAVFASLVVLSFSSQPKGDAEFAGRAIFLDDKPAQLMAGRAIFLDSFDGNSPAA

SEQ ID NO: 8761 - protein, 368 aa, Bacillus licheniformis
LKTKIAYEEVAGMLNQWYVMIKRHEVSQAVSIKCDIEHQLPNMEENQDLLLYFNLLDYRHKLLTEEFAASNKLFEDIQEQKADMQSTDDMIEYYYFFFAGMYEFHKKDYTNAINYYKLAEEKLRTIPDQIEIAEFHYKLAIAYYQIKQNFLSLNHAKTALKTFKAHDDYIQKAISNDMLIGANKLDLFRFDEAEQHYKQALKDAALIKHHVLLGMAHHNLGLSYVNRNLLTLAEHHFKEALLIKEHEESVYGIHSMFELTHVLYKSNVVKEARKLYEKGFFRAEKAGEREYLSKFKLIHALYDEQDPLTVEHALEYLKTINLWTDVAELTFDIALYYKENGDADKAAEYFEESHHARDQILKRTEELK

SEQ ID NO: 8762 - protein, 166 aa, Bacillus licheniformis
MNQDVKEFVGSHMIYTYENGWEYEIYIKNDHTIDYRIHSGMVGGRWVRDQKADIVKLTEGVYKVSWTEPTGTDVSLNFMPNEKRMHGIIFFPKWVHERPDITVCYQNDHIDLMEESREKYETYPKYVVPEFADITFIENAGIDNEDLISKAPYPGMTDDIRAGKRV

SEQ ID NO: 8763 - protein, 88 aa, Bacillus licheniformis
MSSIEGQIMSGDFDDEMNVFSLKKIKQFQTQTSLKENQLKALQHYLRQHEHDEDGQIITLYDQMLVPLSQDDIKALLDDLTKVQSLYH

SEQ ID NO: 8764 - protein, 108 aa, Bacillus licheniformis
MKKQAELFVYGADVLCPSCVNLPSSKETYEWLEAALKRKYPDQPFSITYIDIHQPPENDPEKQEISEKILNDEYFYPLVMVGDQVVGEGNPKLKDVYKEMEKQGYKPA

SEQ ID NO: 8765 - protein, 79 aa, Bacillus licheniformis
MTTEVEMKEQVQEVLDKLRPFLLRDGGDCELVDVEDGIVKLRLLGACGSCPSSTITLKAGIERALLEEVPGVIEVEQVF

SEQ ID NO: 8766 - protein, 653 aa, Bacillus licheniformis
MKQLITEKDLIKLVSITDPQYSPDGAKIAYVQTKVNEKQDSYDSHIMIYDREKQASVQWTFGKGRNQHPRWSPDGKYLAFTSNREETAQIYVISAAGGEARKVTDIPYDVSQPEWSPDGKSLLCSVKLTKEESVDDEKKTEIEDHEPLEVDSLSYKADGQGFKRGKYTQLVLVQVETGEMKQLTDLERDHFSHAFSPCGDQIAFCANQTDMRVNDVYLMNLSTGDLKRLTGQNGIFSSLSFSPDGKHLAFIGNEKEYQNATLDKAWLYDIETGKLTCLTEMLDVHLSDAVAGDSLVGGVLPKPAWTKDGNGFYVIGSDQGSTGIYYISIEGLAYPVRLEKEHVNGFSLHPDESGFAASIALPVRPSELYHLQLGEEKAERLTDANQAFTEEHIISEPEELQFQAADGLTIHGWLIKPAQYEKGNTYPLILEVHGGPHAMYANAYFHEFQVLAAKGSAVVYVNPRGSHGYGQDFVNRVRGDYGGGDFKDVMAAVDHVLEHYDFVDQERLGITGGSYGGFMTNWAVGHTKRFKAAVTQRSISNWISFYGVSDIGYFFTDWQLGADLFEDPGKLWEHSPLKYADKVETPLLILHGERDDRCPIEQAEQLFTALKKMGKEVKLVRFPNASHDLSRSGHPKQRIRRLEYIAGWFEAYL

SEQ ID NO: 8767 - protein, 306 aa, Bacillus licheniformis
MTEADMLFSVTVPGSTANLGPGFDSVGMALSRYLRLSVFPHDEWRFEAETEVVAGIPEGTDNLIYQVAKRTAAHFGKELPPSLVKVWSDIPLARGLGSSAAAIAAAVELANELADLKLSDREKLHFASLEEGHPDNAGASLFGGLVIGLHEEDETEMVSMKDIDLDVVVVIPFYEVLTKDARDVLPESLSYPKAVEASAVSNMLVAGLMAKDWKLVGRMMQKDLFHQPYRRALVPELSKVEHEAGQNGAFGTALSGAGPTILSFIEKGKGEALRNQLASKFPHCEVDCLYVPDTGIIVERKSVNSV

SEQ ID NO: 8768 - protein, 355 aa, Bacillus licheniformis
LELMWKGLIHQYKEYLPVTDKTPELTLNEGNTPLIYLQNLSKKLGIELYVKTEGVNPTGSFKDRGMVMAVAKAKEEGNDTIMCASTGNTSAAAAAYAARANMKCIVIIPDGKIAFGKLAQAVMYGAEIIAIDGNFDDALKMVRSICEKEPIALVNSVNPYRIEGQKTASFEICEQLGEAPDILAIPVGNAGNITAYWKGFKEYHEKNGTGLPVMKGFQAEGAAPIVKNKVIEKPETVATAIRIGNPASWDKAVNAAKESNGKIDAVSDEEILHAYQLLAREEGVFAEPGSCASIAGVLKQLQTKEIQPGAKVVAVLTGNGLKDPNTAVDVSQIKPVTLPTDEEAILEHLKGAARV

SEQ ID NO: 8769 - protein, 433 aa, Bacillus licheniformis
LKAIRVGLLGLGTVGSGVVKIIQDHQDKLTHQVGCPVTIQKVLVKDKDKKRDVELSKDVLTTEAYDVIQDPEVDVIIEVIGGIEETRRYLLDALQAKKHVVTANKDLIALYGSELTAAAKENGCDLYFEASVAGGIPILRSLEDGLASDRITKMMGIVNGTTNFILTKMNKENAPYDEVLKEAQELGFAEADPTADVEGLDAARKMAILARLGFSMNVDLDDVKVKGISQVSDEDINFSKRLGYTMKLIGIAQRDGQKVEVSVQPTLLPEHHPLSSVHNEFNAVYVYGEAVGETMFYGPGAGSMPTATAVVSDLVSVMKNMRLGVNGSSFVDPQFEKKIKAPSEIFAQQFLRIHVKDQVGSFSKITSIFSERGVSFEKILQLPIKGHDDLAEIVIVTHHTSEEDFTDILQKLNDLEVVHQVKSTYRVEGNGWS

SEQ ID NO: 8770 - protein, 320 aa, Bacillus licheniformis
MDKPFVYVTRKLPEEQLSALKEEAHIEMWEKEEEPCPRAILKEKAKKAHGLLTMLSDTIDEELLKGAPHLKVVANLAVGYDNIDVEAAQKHRVICCNTPGVLTESTADLTFALLMASARRIVEASDWIRQGKWTGWGPLLLAGADVHHKTIGIVGMGSIGQAVARRAKGFGMKILYHNRTRNPDAEAELGASYLPFDELLEQADFVVCLTPLTHETKHLFNRSAFKKMKRSAIFINVSRGQVVNEDDLYEALVEKDIAGAGLDVFAEEPVQKDHPLVSLPQVTALPHIGSAAVETREAMMRLCAENIALVLRGKQAKTEI

SEQ ID NO: 8771 - protein, 340 aa, Bacillus licheniformis
LQEVMSVKELIKEKFGIYIRDLTSYLSYQAFHTPNSMFLIVPVSHLSQDELAELFSMSQYLQEQRDPYVSSFILTKDGEMTFEENGVSYVLLQAAPRMTNRSVSFGAELAEFHHKGRGYPYEVKETSRIGQWKELWGKRLDQLEQFWIQKTQARQLQPFEKQFIESFPYYLGLTENAIQYLADTELDDQPQAADSGTICQQRLTCEALRREPLIKIPMEWVFDHAARDLAEYARSLFHERKNFNEIMLFLQQYEQAAPLSSFSKRLMYSRLLFPLHYFETVEGYYISPESEHHYFESRLDYLLSQAPAYEQFLNGFQEMAGMRSAGLISMPPVNWLKRTP

SEQ ID NO: 8772 - protein, 166 aa, Bacillus licheniformis
MPENNSMHQIETAAKEWLEKRGVKISEIADLVYVLQKKYHPNLTKEECEENVNRVMKKREVQNAVITGIQLDMLGEQRKLMEPLQTLIETDESLYGVDEILSFSIVNLYGSIGYTNYGYIDKIKPGVLARLNDKSTGECHTFLDDIVGAIAAAASSRLAHRAKDAE

SEQ ID NO: 8773 - protein, 256 aa, Bacillus licheniformis
MKTYKGYLIDLDGTMYKGTEKIEEACEFVRKLKDRNIPYLFVTNNSSRTPKQVADKLVSFDIPAEESQVFTTSMATANFIAEQKPDASVYVIGEEGIRQAIEEKGLAFGGEDADFVVVGIDRGITYEKLAVGCLAIRNGATFISTNGDIAIPTERGLLPGNGSLTSVLTVSTQTEPIFIGKPEPIIMEQAMKVLGTDISETLMVGDNYDTDIMAGMNSGMDTLLVHTGVTKKEHLEAYQEKPTYVIDSLTEWLDRV

SEQ ID NO: 8774 - protein, 147 aa, Bacillus licheniformis
MMYFVDRHKIENTLNFLEEELRLYQMQEEWTSDVEKKALERIGHTLIECILDIGNDMIDGFIMRDPGSYDDIMDILTDEKVVSQAEGDSLKHLIAYRKTLVQDYLNVNHEELEELLSRHAETLEKFPARIRDYLNHELGPVSAFKPH

SEQ ID NO: 8775 - protein, 91 aa, Bacillus licheniformis
MIVVQNAAFEVVKDVKNGFNEEAFKARYSDILNKYDYIVGDWGYSQLRLKGFFDDQNQKATFDTKISTLDEYIYEYCNFGCAYFVLKRLRK

SEQ ID NO: 8776 - protein, 207 aa, Bacillus licheniformis
MNKKILLAGLVALPLAGCQTALNDTEHNIYDEDGNTVHVADKNPQYQEKFRNDNRKGRFGYARHQATPVANKEEMQAPQIDREEMAHIISSLTVQLPNIQDASALVTDEEALVVYKTDSGQRKQTADQVKKTAASVVPRYYHIYISDDPDMMQSVANFSRLGANSRNVDQLMADTIKEMQKSPQGKTTTGTDENGNDLDGKGKATES

SEQ ID NO: 8777 - protein, 298 aa, Bacillus licheniformis
LAKKDEHLRKPEWLKIKLNTNENYTGLKKLMRENNLHTVCEEAKCPNIHECWAVRRTATFMILGSVCTRACRFCAVKTGLPTELDLNEPERVADSVSIMNLKHAVITAVARDDLKDGGAGVFAETVRAVRRKSPFTTIEVLPSDMGGDYNNLKTLMDTRPDILNHNIETVRRLTPRVRARATYERSLEFLRRAKEMQPDIPTKSSIMIGLGETKEEIIETMDDLLANNVDIMAIGQYLQPSKKHIKVQKYYHPDEFAELKEIAMEKGFSHCEAGPLVRSSYHADEQVNEASKKRQAQA

SEQ ID NO: 8778 - protein, 326 aa, Bacillus licheniformis
VKAVLSVLILLLLILQPCALAKEKKEPDLQKRMALYHKTEAATHIPWYVFAAVDQYEINIRKNRKDLPKQKGHTGIYIPQSVWSGPENPNPKDTSPLSIKVFDGIGMDGNGDGLAEPDQDEDVLYTFGQYLLTYGRDIENIRIGLWEFYERDQTVGIISGFIRLFQKYGHIDLGKHAFPLPVRSDYSYRSTWGDARGFGGRRIHEGTDLFAHYGLPIRSTCYGIVEMKGWNRFGGWRIGIRDINNTYHYFAHLNGFTKGLKVGEIVEPGQVIGSVGATGYGPPGTSGKFPPHLHYGMYKDNGRTEWSFDPYPHLKAWERKELRKKK

SEQ ID NO: 8779 - protein, 37 aa, Bacillus licheniformis
MNGASIAMMVIGIVIIWGGLAASIINAVVKSKKSQAG

SEQ ID NO: 8780 - protein, 509 aa, Bacillus licheniformis
MDNRPQWGTRAGFILAAVGSAIGLGNIWRFPAVAYENGGGAFFLPYLFALLTAGIPLLIMEFTIGHKYRGSAPLSYARMGKGKEWIGWWQVAISFVISTYYAVIVAWAISYTVFSFNLGWGKNTENFLMNEYLNRIDIGGGAIGQFGGFVPGVLIPLAIVWIVSLGILFAGVKKGIEIANRIFIPLLVVLFLIIVIYSITLDGAAQGLNAFFTPDWSQITNGKVWVAAYGQIFFSLSIAFAIMITYSSYLPKKSDITNNAFITGFGNSSFELLAGIGVFSALGFMAAQQGVPVKEVVSSGIGLAFVVFPQIINEFPAFNAFFGFLFFGSLVLAGLTSLISISETYVAAIQDKFNVPRRKAVLFGGGAAALCSLVFATKGGLFFLDAADYFINNFGVALAGLIEVVAIAWFAKELKALQAHANSVSDIQLGAWWRICLSVVTPIVLGYMMFDNIKTNITTAYGDLPVEFLLKWGWCVAFGAIAAGFILSLSKWKNGLAYTPFQHDKEVSS

SEQ ID NO: 8781 - protein, 257 aa, Bacillus licheniformis
LRRLRGPLSKRGPLPLRYVMLLSFIFFIFSTAVSLLIINSSIKPTLLNIAEMETNRIATHVIQEAVEDYMSQDENVKNLVEMKTNENGKVTTIDFNSHGLRGMHSKITKQLHEKLKETETEEFNSSAKTPEGKNDGVIYNIPLGQATGNSLLGNLGPKIPVRFNVVGDVFTDFKQSVEPYGINNALINVGVLVEVKVRVVIPFATKTAVVKNTIPATIQAVHGEVPDFYSGNGSQTAPSIQIPSKDEKTEQKKEQKE

SEQ ID NO: 8782 - protein, 101 aa, Bacillus licheniformis
MVNLTPIMIEDQPFTAVTVKLPKTNFMAVTNDHGYIMCGALDVALLNDKLKERKIVAARAVGVRTIDQLLEAPLESVTDAAGELGIHPGMSGKEALLKMVK

SEQ ID NO: 8783 - protein, 451 aa, Bacillus licheniformis
MTEKLHIYHTNDLHSHFENWPKIVDYIQTQRQKHEEQGEEVLLFDLGDHVDRFHPISEATFGKANVELLNRLQYDAATIGNNEGITLPHQELDTLYDNAQFPVVVSNLFDGEGKRPGWAAPYLLKKVKSGATLAILGVTVPYYPIYRQLGWTVTDAFESIGEMLSEIKEKADTVILLSHLGILDDQRVAEAFPEIDLILGSHTHHLLEEGMMKDGVMLACAEKYGNYVGHVELTYNGALENITATVMKTADWNEESEETIRFLKEKEREAGHLLEEEIATLDNTLETAWFRRSALPQMLADALKEWCEAEIGMVNSGIVLESLSQGPVTKADVHRICPHPINPVKLKLTGRELKEVILHASSEQTEKLRIKGLGFRGEVMGKMLYAGLDPEKLSVNGADIEDDAFYTLATIDMFTLGTLFPVIRDAEDIDYFMPEFLRDLLAWKLKKANRS

SEQ ID NO: 8784 - protein, 273 aa, Bacillus licheniformis
MEYLILIILGFIAGTIGSLVGLGGGIVIVPSLLFLAGLPTLFDHVTPQMAVGTSLVVIIFTGLSSTIAYMKYKTVDYKSGLIFFIGSGPGSIVGAHVSTYFSSDSFSLWFGIFMILISLSLMIKKRVKPAEKKHTGVIRTFTGDEGQEYTYSYHPLAGIAIAFFVGFLGGLFGIGGGSLMVPAMILLFLFPTRVAVATSMFIIFLSSVAGSAGHVISGHVNWLYALALIPGAWFGGQLGAYINKKMQTKTIVLIMRFVLILIGIRLIYQGVFS

SEQ ID NO: 8785 - protein, 283 aa, Bacillus licheniformis
LIYIGLTGWGDHDSLYPPKTSSQNKLIHYSSHFPIVELDASFYAIQPERNNEKWVKETPETFQFIVKAYQGMTGHQRGEIPFETKDDMFAAFKLSLTPYIKAGKLAMVLFQFPPWFDCKKENVNYLRWVKEKMGDIPCALEFRHRSWFMPQFYDKTLAFMEEQQWIHSICDEPQAGEGSIPTVLHATDSRKTLVRFHGRNKEGWLRPSSGQNWREVRYLYLYNEQELKDWKRNLELLEQQSKNVYVLFNNNSGGDAAQNGKQMMELLNIEYKGLTPRQLDLFS

SEQ ID NO: 8786 - protein, 52 aa, Bacillus licheniformis
MSGFFFMFKYPAAEKGNATSRPGSRFSKKTCDKLKEEVNCIDLYWINRMGGS

SEQ ID NO: 8787 - protein, 177 aa, Bacillus licheniformis
VIGLLILACEIGFWIFILLGLIFRYMAGWKKAGLIMFACTPVLDLLLLAATSLDLHNGAQADVLHGIAAVYIGVSIAFGSRMIKWADERFAYRFAGGPKPDKGPQYGREHAKKEREGWFRHFIAWLIGAALLAGMHLFIGDPERTEPLIRIASLWSIILVIDFLYSFSFTLFPRKAR

SEQ ID NO: 8788 - protein, 194 aa, Bacillus licheniformis
MPKIVDHEKQKEKIAEAVWNVIHRDGLEQCTVRNVAKEAGLSAGSMRHYFPHQSELFIYSMRLVANRVKTRIENMTFNGTPAENVKQLLFQLMPLDEERKLEMEAWYAFTAKSLSDPELKPLRKEMNEGIYSACKSAVEMLVKTEKKTGIDVLKETEHLYALVDGLALHLIMAPERLTAERIDTVLAGYLRSLE

SEQ ID NO: 8789 - protein, 73 aa, Bacillus licheniformis
MKKKRFGILFLVLFLLLFNTASQAADPNQKTTEEVLLNAFDKFGLVSSVIGKTDQLYQSAQMILAVKKNSENT

SEQ ID NO: 8790 - protein, 37 aa, Bacillus licheniformis
LSFYFYVFQLSGTPFIHILGAGPESVNERGDLYFLGK

SEQ ID NO: 8791 - protein, 20 aa, Bacillus licheniformis
VQKNSLRSGCFFCDDQQNNL

SEQ ID NO: 8792 - protein, 408 aa, Bacillus licheniformis
MTIGEMNIPKRTIMTPGPVEVHPRVLRALSSPLLGQFDPAFTDMMNDVMALLRQIFRTTNKWAFPIDGTSRAGLEAVLASLIKPGDRVLIPIFGRFGYLLAEICERYQADVYTMECPWGDVFEPKEVISEIKRTKPEIVAVVHGETSTGCIQPLEEIGRACRELDVLCVVDAVATIGGTDVNTDEWCLDAVVGGTQKCLSVPSGMAPITFNSRVEKRINERKKVERGIATREDIVLETGRLPISSNYFDLGMLMDYWSPRRLNHHTEATSMLYGLREGARVVLEEGLRERFSRHRLHETALIKGIKAMGLELFTEGRKKLPTVTCVKVPDRVDADLVRKMMLDDFGVEIASSFGPLAGKIWRIGTMGYSCRKENVLFTLAALEAVLIRTGASVSPGNALQAALDFYHE

SEQ ID NO: 8793 - protein, 417 aa, Bacillus licheniformis
MTIGIHKTGESTARNIEDMINWLASFGESGEGGVTRLLYSKPWLSAQQSLKEKMEDWGIEPYFDDAGNLFGRIEGTENRTKAILTGSHIDTVINGGKFDGAYGILASLLSAKHLLDTYGRPKTSIEVVSLCEEEGSRFPLTFWGSGNLTGLFDCQKTPAVHDRDGVSIEQAMKDCGFGKRRYRRPFRRDVKCFIELHIEQGSILEESGRQIGIVTDIVGQRRFTVMVKGESNHAGTTPMNARKDAVAVSALCISYLTNKAKAAYPLLTATVGRFEAKPNVPNVISGEAVFSLDLRHHHDAVLDQYCDDIFAYFTELAGEWNVQITVEQTTDAKPVRMDRDLIQLSKQSAEDLDVSYQEMVSGAGHDAQVFGPHCPTSLLFVPSRKGISHSPEEWTKPADLAAGVELLTHVLYRLAYE

SEQ ID NO: 8794 - protein, 532 aa, Bacillus licheniformis
MNIYDMMKLPVFKGATLAAGKAGVTRNIEHINMMDAPDIADYLHHGELLVTTAYHLKDRPFLLKELIERMIRRGCAGLGIKTRFLQEIPDEVIKLADERSFPIIELNEDVRLGDIVNHTLSHILDKRTAELEQAIAAQKKFTSHIMSGKSIQSLLHNVSAVLKLPVLLFNQHLKPIASSKADAAGTLSDYEGIFQKGNRTGLTCFSTIPDKQTYSVFPIYTHEKKCGFLVVCGMISPSDKGLLLTLEQAANVIAFELLKENALKQYLRRARNEFFSNFLDGAFSSAEEIKNRAKEFQLKWDQKYVCIAGKLDRREKSLSFTENQLESDSVFERLEEELVDFPFPPHLFTKGNICFLLAEATDSWAEMNAAVGGFLKAFQRHASEHFQRTISFGISNLSHQLRDVPHICKEAVDALHSGHLSGSTEFIQTYHMKDVSELLRMIPADDLKTFYTHALHQLASLPKDDPGLLQTLSVYLETHCQISETAKRLYIHRNTVIYRLEKCEELLGKSLKDADTTLRLRLALRIQMLLGL

SEQ ID NO: 8795 - protein, 398 aa, Bacillus licheniformis
MKKMARLYILMLNVFIVMLGIGLIIPLMPTFIEEFGASGSTLGLLIAASGITQLLFSPVAGEMTDKYGRRKMIILGIGAFAVSQLLFALASQMWLLFVSRLLGGAGAAFLVPAMFAYIADITSEKDRSKGMGLISAAMSLGFVIGPGAGGYLAAFGLTFPFYVSAGLAGLATVLSLLVLPETLSQEKMLEKRRSVQKREPLAKQMARALRSPYAFLFILVFILNFGIMNFEAVFSLYVDHKHGFTPGDIAFVITAASLIGVFVQAVALGMLTNRFGEKKLMNMTLIGSAGALAVCSIAGSYWLVFGATIVFFMLTSILRPAINTLISKMAGDEQGFAAGMNNAFMSLANIVGPTVAGLLFDVNVEIPYIFGVVVLVLSFLAAVSWGRKQQARTIPEKV

SEQ ID NO: 8796 - protein, 253 aa, Bacillus licheniformis
MGMPAYKTEEVKKNEKRKKEFPHIYVILAVMIGLMALATYVIPAGEYERVESPDGREMIDPASYKRVEQTPVDILGLLTAVPKGMTEAAPIIVFTFVIGGAFAVLRKASVIELGVRLLADQFRNKPVFVTPVLIFVFSGISCFIGTPELSIVYVPVILPLLLSLGYDRMTAAAIALCGTIAGFTSALTNPFTVGTSQMISGLPLYSGMGYRAVIFVVVTAIAAVYVLKYAEKIRAHPERKQSNPCRLLKQADG

SEQ ID NO: 8797 - protein, 37 aa, Bacillus licheniformis
LIENVTIFWIARVDLCILTENTLKFRGFFNAISAAII

SEQ ID NO: 8798 - protein, 246 aa, Bacillus licheniformis
LTLQQWIKEVARGKRGARDLTYEEARQAAEAIVTGNASPAQTAALLIAERIKTESPEELFAFTEALRNSSESLSLSRAVKEAVIDFAGPYTGRHSFLATIPVSLLLAGNGVPAFLHGSDALPPKYGTSVKDVLDKLGIPSETAPAQTARSLEKALIGFAAAETFCKPFVRMRKIREEIGVRTVLNTAEKLVNFSDADKLMMGAFHRTAIQKMHPVFQRLTYKEVFIVQGRRARKMCRSTEAALCLQ

SEQ ID NO: 8799 - protein, 115 aa, Bacillus licheniformis
VPVHRGSFVFTIKNGEIDSFILKPEEYGLYAEEAKLNKPLSAEEQAEKITAVLAGDESADTEYERKQVIMNAALRYYLFGYCAAIEEGVQAAEKQLKEKAGLEALERWKASFTRP

SEQ ID NO: 8800 - protein, 270 aa, Bacillus licheniformis
MNRKCVIPFILMLSAMCAPAQNAEAFQLFSLPVQSSAPADYYEQAQGKTGEALKRALHDTIDDHRELSYSEVWEALKATDEDPANRNNVILLYSRESRSKQANGGQTGDWNREHVWAKSHGDFGTSKGPGTDLHHLRPSDVQVNAARGNLDFDEGGSPYPGAPGNYYDGDSWEPDKSIKGDVARMIFYMAVRYEGDDGHPDLEMNNTTNNGSKPYHGKMSVLLKWHHEDPVDALERKRNDIIYQQYQHNRNPFIDHPEWAEDIWGSGVLN

SEQ ID NO: 8801 - protein, 54 aa, Bacillus licheniformis
LGLGRFELNKKSACSALFFQTSVFLFSTDFLSIKRKKSAVQQPRGTASLADYLH

SEQ ID NO: 8802 - protein, 279 aa, Bacillus licheniformis
MIQFDFEYYRPQSAQEAVKLFQSLEREGKKPAYCSGGTEQLTLVRMNVIHTNAVIDIKDIPECRTLQFERHHLALGSALTLTEITENGGFPLLSKAAREVADHTARNKITLGGNICGQIFYREAVLPFLLTDSKVVTVGDKGKKRYLIHDVFDQQLKLSKGEILISLLIEERYLHQPFASIKVRQRWDTGYPLATISALEIDGRVRCAFSGVCSYPFRSAEVESALNDEALPVDQRVEEAINRLPGPVLDDAQGSAEYRTFVIKHTLFDILGMLKKETL

SEQ ID NO: 8803 - protein, 373 aa, Bacillus licheniformis
MKSFIVVGAGILGASAAYHLAKKGADVTLIDRGERGRATDAAAGIVCPWLSQRRNQAWYKLAKGGAAYYADLIKQLEADGELDTGYKRTGAISLHTDERKLEKMEERAHLRRKDAPEIGEITRLSHEETKRLFPPLAEGYSSVHISGAARVNGKLLRRSLVNAAKKYGASVVSGNASLLYEGNRVTGISTGGKKIYADQVLVTAGAWADELLKPLGVRFSVSYQKAQIVHLCLPDADTGSWPVVMPPNDQYILAFEDGRIVAGATHENEAELDDLRVTAGGLHEIFSKALAVAPGLELSELLEARVGFRPFTPGFLPVIGSLPNICGLLVANGLGASGLTSGPYLGAELARLALGEEPELDIALYDPAGALES

SEQ ID NO: 8804 - protein, 286 aa, Bacillus licheniformis
MTVVGFCVLLCSAFIHASWNYLSKKADGGVPFIWLFTAIAAVIYTPLAIGVVIYEKPEIGIWQLVIIMASILAHLGFFLVLQKGYKKGDLSLVYPIARGTGPLLTCMLAVAFFGETLTLPAIIGILLIVISILFFTGGVKRLKESGSFTPVLYGLAVGGIIAAYTLLDKAAVSRFLIPPLLLDYCNTLGRLVILTPYAAKSWSEVRFEWKHHRMEAVGVGVFNSLAYILALSVMVFAPVSYVAPVREISILIGTVMGAVLLSEGFGRLRIIAAALMVLGVISVAAG

SEQ ID NO: 8805 - protein, 127 aa, Bacillus licheniformis
VKMLKKAVLIAAVFLLAAFAGSTEAFAMPSKGAVKFRTDANTYTKSATSIVVTGKSPVTGTMIAVRLINKKGTVLIYRDVHLTRGKPHFRVSFPTKKLKPGKYDVWVDAVKGKKWHGELKRYIVIKH

SEQ ID NO: 8806 - protein, 57 aa, Bacillus licheniformis
MASYLKSRIVSYLFILLEVGTGFAICEVSMENPNYSSACAVFIIGFTIGECFMIRKW

SEQ ID NO: 8807 - protein, 373 aa, Bacillus licheniformis
VSVIPYDLVATKMNFWYTALKNNWTGKAEDTKKEVERELEQMEQNQDVIVYYNLLLFRHNLQLDYMYSKPGVNLNSRFDEFKKIRDQNNLEGMLDYYYHFFAGMYHFRQKELILALNFYRDAEKKLDSFDCDELEKAEFYFKASEVYYHMKQTIFSMNYASRAYNLFKKYDTYGERRVQSQFIIAGNWLDHMYPEKALHNLNKELKESETQGILHLMGSTHLNIGICYNKLEDVDKATYNFQRALNLYKEEKHSFLPKTLFNLAHVRAKQGKLSITDDLYYEGKELAEKNKNLDMLAKFDLIKGLYLSFDLDMVRESFKFFESKGKYADMEEYGLIAAELLEKKEKIRDAVEFYRITVNARRQIQRSAFLHVN

SEQ ID NO: 8808 - protein, 465 aa, Bacillus licheniformis
MAKKMPDIGEYKYGFADKDVSIFRSERGLTKEIVEEISRMKEEPQWMLDFRLKSLEHFYNMPMPQWGGDLNSLNFDEITYYVKPSERSERSWDEVPEEIKQTFDKLGIPEAEQKYLAGVSAQYESEVVYHNMKEDLESQGIVFKDTDSALKENEDIFREHWAKVIPPTDNKFAALNSAVWSGGSFIYVPKGVKVDTPLQAYFRINSENMGQFERTLIIVDEGAHVHYVEGCTAPVYTTNSLHSAVVEIIVKKGGYCRYTTIQNWANNVFNLVTKRAVCEENATMEWIDGNIGSKLTMKYPAVILKGEGARGMTLSIALAGKGQHQDAGAKMIHLAPNTSSTIVSKSISKQGGKVTYRGIVHFGRKAEGARSNIECDTLIMDNKSTSDTIPYNEILNDNISLEHEAKVSKVSEEQLFYLMSRGISEEEATEMIVMGFIEPFTKELPMEYAVEMNRLIKFEMEGSIG

SEQ ID NO: 8809 - protein, 148 aa, Bacillus licheniformis
MSFNVNLDTLYRQVIMDHYKNPRNKGVLNDSIVVDMNNPTCGDRIRLTMKITDGKVEDAKFEGEGCSISMASASMMTQAIKGKDVETALQMSRIFSDMMQGKDYDDSIDLGDIEALQGVSKFPARIKCATLSWKALEKGVSKENSDNE

SEQ ID NO: 8810 - protein, 406 aa, Bacillus licheniformis
MNAKDIREQFPILSQQVNGHDLVYLDSAATSQKPRVVIETLDEYYNSYNSNVHRGVHTLGTKATDGYEGAREKVRKFINAKSMQEIIFTRGTTTALNTVALSYARANLKPGDEIVITPMEHHANIIPWQQAVKATGATLKYIPLQEDGTISLDDVRETVTENTKIVSAAHVSNVLGTINPIKEMAKIAHEHGAVMVVDGAQSTPHMKIDVQDLDCDFYTFSAHKMCGPTGIGVLYGKKALLENMEPAEFGGEMIDFVGLYESTWKELPWKFEAGTPIIAGAIGLGAAIDFLEDIGLDEILAHEHRLAAYALERFKELEGAVVYGPAERAGLVTFNLEDVHPHDVATVLDAEGVAVRAGHHCAQPLMKWLNVSATARASFYLYNTEEDIDKLIEALQKTKEYFTNVF

SEQ ID NO: 8811 - protein, 437 aa, Bacillus licheniformis
MTLETKLSVDREYVKSFSEKHQEPAWLQDLRLEALEKAEDLPLPKPDKTKITNWNFTRFDKHTVENKPLDSLDDLSDEVKSLIDLGNEDKTLYVQRDQTPAYLSLSKELQDKGVIFTDIHTAFREHGELVKKYFMKDGVKADEHKLTALHAALLNGGAFLYVPKNVELEAPVQAVYVHESNDTTLFNHVLVVADDNSAVTYVENYISTVNPKEAVFNIVSEVITGANARVQYGAVDNLSAGVTAYVSRRGTALGRDSKIEWALGLMNDGDTISENTTNLHGDGTFGDTKTVVVGRGEQTQNFTTQIIHHGKHSEGYILKHGVMKDSASSIFNGIGKIEHGASKSNAEQESRVLMLSEKARGDANPILLIDEDDVTAGHAASVGRVDPVQLYYLMSRGIPKEEAERLVIYGFLAPVVNELPIEGVKKQLVSVIERKVK

SEQ ID NO: 8812 - protein, 261 aa, Bacillus licheniformis
MAASTLTIKDLHVEIEGKEILKGVNLEIKGGEFHAVMGPNGTGKSTLSAAIMGHPKYEVTKGSITLDGKDVLEMEVDERAQAGLFLAMQYPSEISGVTNADFLRSAINARREEGDEISLMKFIRKMDENMEFLEMDPDMAQRYLNEGFSGGEKKRNEILQLMMIEPKIAILDEIDSGLDIDALKVVSKGINKMRGENFGCLIITHYQRLLNYITPDHVHVMMQGRVVKSGGPELAQRLEAEGYDWIKHELGIEDETVGQEA

SEQ ID NO: 8813 - protein, 40 aa, Bacillus licheniformis
MFSSLTKNDLFLKRLGQENFPGQKSGIYYQTVENNRYIRH

SEQ ID NO: 8814 - protein, 311 aa, Bacillus licheniformis
MAHSHGHTGHSHHGSRSANQKALFISFGLIFTFMMIEVIGGILTNSLALLSDAGHMLSDAAALGFSLLAFKIGEKAASASKTFGYRRFEILAAFINGITLLLISLYIFWEAYNRFFSPPEVAGRGMLAIATVGLFVNIAAAWVIMKGDTSGNLNMRSAFLHIIGDMLGSFGAIIAGLLMLFFNWNIADPIASAVVAALVLVSGWRVTKDSVHILMEGKPKDIDAEALKNGLLSIPSVREVHDLHIWSISSDMPSLSCHIVADENSDRDRILKQVSKYLRKECNVEHVTVQIEGERCSPHESCSLGANHPRS

SEQ ID NO: 8815 - protein, 48 aa, Bacillus licheniformis
MEKAMHKSHGMGYEEYSRSHVNRLEVEKRREKQYQKSKQIVSDLPIIG

SEQ ID NO: 8816 - protein, 122 aa, Bacillus licheniformis
VNQHESEGIIESALHEYKAGIGIFSEKMPGIAAKYNEFTEECFKKGVLSEKDKQLIALGISVNTQDEYCIIYHIKGCLDCGASEEEILEAVGVTAAFGGGAAMSQAVTLVLQAMEEFQQMKH

SEQ ID NO: 8817 - protein, 276 aa, Bacillus licheniformis
MKKGLLTALFIIFAGVLAACGSSSSEGDKDSKVITVGATPTPHAEILEEAKPLLKEKGYELKIKNFTDYKLINKALATKDLDANYFQHVPYLEQEMKENKDYDLVNVGAVHLEPFGIYSKKYKSLKDLPDGAKIIMSNNAAEQGRMLAMLENAGLIKLKSGIEKVDATVKDITENKKNLKIKNDVAPEMTAKAYEANEADAVFINVNYAIQNKLNPKTDSIELESPKDNPYANIIAVRKGDEDSDKVKALMEVLRSDDIKKFIDKKYKGSVISVSE

SEQ ID NO: 8818 - protein, 222 aa, Bacillus licheniformis
MFEKLFPNVDMEQLWEATYETIYMTGISLLFAFIIGVILGMLLYLTSKGNIWQNRVVNGVISAIVNVFRSIPFIILIILLLGFTKFLMNTILGPNAALPALIIASAPFYARLVEIALREVDKGVIEAAKSMGAKTSTIIFKVLLPESMPALISGITVTAIALIGSTAMAGAIGSGGLGNLAYVNGFQMNNPDIILIATIFILAIVFIIQFIGDFITNKLDKR

SEQ ID NO: 8819 - protein, 341 aa, Bacillus licheniformis
LINLQNVSKIYRSKHGDVNAVQDVTLTIKKGEIFGIIGYSGAGKSSLIRLLNGLEQPTSGTVEVAGRKISEIKGKKLRKARQEISMIFQHFNLLWSRTVRDNIAFPLEIAGVSKAKRLERVAELIKLVGLEGKENAYPSQLSGGQKQRVGIARALANNPKVLLCDEATSALDPQTTDSILGLLSDINERLGLTIVLITHEMHVIRKICHRVAVMENGKVVEEGDVLNVFIKPKEEMTKRFVQQVTEPVETKETLKHFLEETTSGRTIKLTFVGEAAESPLITQIIRKFDVEVNILQGKISQTQDGAYGSLFIHVDGRENEVNDVVDFIKSRQVEAEVITNV

SEQ ID NO: 8820 - protein, 115 aa, Bacillus licheniformis
LEKMGLIEREGKALFLKPLLSTTALLITFQGEKEAFTLAINEKGEMEKYSPVEKAHLTFFGEQSEIIDLLHGDISLQHLVQRGTVKVKGSFRALLKLEAILWLTDGFFKNSDLYS

SEQ ID NO: 8821 - protein, 102 aa, Bacillus licheniformis
MQELQEKELKRLEHETCLLYVYTPFCGTCQLAGRMLEVVDEMMKDIPFYKNNLNYSPSFAKQQEIESVPCFILYKKGRVVKKEYAFHSVSYLYDTIKQNLVD

SEQ ID NO: 8822 - protein, 114 aa, Bacillus licheniformis
MPENEKVMIVEGKSDKQKVKHVIEEPVDIICTNGTISQAKLDEFAETLFDKDVYILVDADESGEKLRRQLKRELPQASHLYIDRVYKEVASAPSQHVAEVLFRSNIRVHTKYLL

SEQ ID NO: 8823 - protein, 78 aa, Bacillus licheniformis
LTLKKERIDITEHVESRLKNGGTQLYHENELIGRMTGKDQYELKSGYSFQDEKFYKMADTVSGPDAKYVDCDDHQGWC

SEQ ID NO: 8824 - protein, 127 aa, Bacillus licheniformis
MSTPKELRYSEEHEWVKTEGDKVRIGITDFAQSELGDIVFVELPEVGDEIKADEPFGSVESVKTVSELYAPINGKVVEVNEDLEDSPEFVNESPYEKAWMIVVEPSDASEIENLMTAGQYEDMIKED

SEQ ID NO: 8825 - protein, 118 aa, Bacillus licheniformis
MALDFYWYPKCGTCRKAKKWLEDHGKEINGIHIAEQPPSKEKLKELYEKSGLELKKFFNTSGQKYRELGLKDKLQSMSEDEQLELLASDGMLIKRPITTDGSKVTVGFKEDQFKTYWL

SEQ ID NO: 8826 - protein, 594 aa, Bacillus licheniformis
MEQTKDHMKKGGAFLIEEVTADQMFTPEDFTDEHKMIAKTTEDYILGDVLPYIDEIEEHNFDHSVRLLKKAGELGLLGADVPEEYGGLGLDKISSALITEKFSRAGSFSLSYGAHVGIGTLPIVFFGTEEQKKKYLPSLATGEKFAAYALTEPGSGSDALGAKTTAVLNEAGTHYILNGEKQWITNSAFADIFIVYAKIDGEHFSAFIVEKDYSGVSTGPEEKKMGIKGSSTRTLILDQVQVPKENLLGEPGKGHVIAFNILNIGRYKLAVGTIGASKRVIELSASYANQRQQFKTPISKFSLIGEKIANMSVKLYAMESSVYRTVGLFEDKMGTLSEEEQKDGRQVAKSIAEYAIECSLNKVFGSETLDYIVDEGVQIHGGYGFMQEYEVERAYRDSRINRIFEGTNEINRLIVPGTYMKKAMKGELPLFEKAKALQEELMMLMPEEPGDGVLEQEKYLLRNAKKTALMIAGLAAQKYGKALDQEQEILVNIADIVSQIYAMEAAILRTEKAIRATGEDKNAQKILYTQIFAQEAFQEIESHAKESLIAMESGDSLRMMLSALRKLTRFTPVNVIEKKRQAAKGVFEAEKYIV

SEQ ID NO: 8827 - protein, 391 aa, Bacillus licheniformis
MKEAVIVSGARTPIGKAKKGSLRTVRPDDLGAYAVRETLKRAGGYEGNIDDLIIGCATPEAEQGLNMARNIGALAGLPHTVPAVTINRYCSSGLQSIAYGAEKIMLGAADTIIAGGAESMSIVPMMGHIVRPNAALAETAPEYYMGMGHTAEQVAVKYGVSREDQDAFAVNSHQKAAKAIAEGKFEDEIVPVDVTVREVDEHHNLKERTFTFSADEGVRPGTTKDVLSTLKPAFSANGSVTAGNSSQTSDGAAAVMIMDREKADALGLKPLAKFRSFAVGGVPPEVMGIGPVEAVPRALKMAGLELSDIGLFELNEAFASQAIQVIRSLGIDEEKVNVNGGAIALGHPLGCTGTKLTLTLIHEMRRRSEQFGIVTMCIGGGMGAAGVFELV

SEQ ID NO: 8828 - protein, 796 aa, Bacillus licheniformis
MVKHIRKAAVIGSGVMGSGIAAHLANIGIPVLLLDMVPHELTDEERKKGRTLEDPDVRNRLARTAVQKLLKQKPAPLTSKKNISRISTGNMEDDFEKIKDADWIIEVVVENLEIKKQVFSKVDQYRKQGSIVSSNTSGISVRQMAEGRSADFKKHFLGTHFFNPARYLKLLEVIPIDETEPEVLSFMKKFGEDVLGKGVVEAKDTPNFIANRIGTYGLLVTVQEMLKGGYTIGEVDSITGPLIGRPKSATFRTLDVVGLDTFSHVAKNVYNQVTGEEKNVFRLPEFIEQMLEKGWIGSKAKQGFYKKEGKDILELDPMTMTYSARQTLKTSGLEAAKQMKGAGARLKALVYSDDRAGSLLWKITAPTLVYSAELTGEIAGSITAVDQAMKWGFGWSEGPFEMWDSIGVKSSVQKLEAEGWKVADWVKEMLAKGHETFYLKENGKTFYYCFESGEYRALQENKKTIHLSSLKETKGVIKKNSGASLIDLGDDVALLEFHSKSNAIGLDIIQMLKFALEEVDANYKGLVIGNQGKNFCVGANLAMMLMEAQDDNYMEIDMIIRQFQETMMKVKYSSKPVVAAPFGMTLGGGTELCLPAARVQASSESYMGLVETGVGLIPGGGGNKELYLNYLKGLPEGVKPDIQEAAIKTFETIALAKTSTSAQEAKELNILTAEDQISINQDHLLYDAKKLVLTLSESGYRPPVKEKVPVTGETGYAALLLGAESLKLSGAISEHDMKIAKKLAFVIAGGRVPFGAEVTEEYLLNLEREAFLSLVSEPKSQARMQHMLVKGKPLRN

SEQ ID NO: 8829 - protein, 53 aa, Bacillus licheniformis
LVRERKNPSSAAVSAASIKGNAGPDYKKTDAGGKRTSQNQQYKKHNMDVPEDH

SEQ ID NO: 8830 - protein, 82 aa, Bacillus licheniformis
MQQQGMTTPPPVISTKDHLYLQDMLNWNLLAMKKAHFMADQCQDQSLKTELDRVGQMHHHHYNMILEQLRQNQTQNPSAYMQ

SEQ ID NO: 8831 - protein, 113 aa, Bacillus licheniformis
MNQQNQQKIGNQETPVPKTSAMNDRDFVNELLTTEKYMTSAYSTALNELSHESLYQAVQPLFNEAQNAQRRLYQVMFQNGWYKVEAEDAQKIQQSYQQFHSTLQDQSPYQQNQ

SEQ ID NO: 8832 - protein, 83 aa, Bacillus licheniformis
VEKLREQLDGLVEKYTELLLGETDEELKEQVKMWIIYSHIAKSMPPLAKHWNGAYPDAKQGIKEVIRQIKERNEAHRAANQKK

SEQ ID NO: 8833 - protein, 235 aa, Bacillus licheniformis
LLRFRLGTKQTGSLFSVKGNMLLDEDFLGRYAEAIKDRLNAPNQKVAASMLVKRGGMLAALHFYLFTVCGKRLPADPASVSWEIEADDQGWTPSFYFHKGAELIEGDRTEELKKLTEDIFRRHLGGMIEACRQTFSISKHILWENIAVYLYWMYDMLQEDPKLKARAARDFRFLLYEAEPGLFDEGEDENPLKRFYPGQHAEDRTRTTCCLYYATDENGVKCRTCPRNKHKERVS

SEQ ID NO: 8834 - protein, 272 aa, Bacillus licheniformis
MSAISTETLSLGYGETIIIDELNLTIPKGEITVFIGSNGCGKSTLLRSLARLMKPKGGSVLLEGSSIAKLPTKEVAKELAILPQGPSAPEGLTVLQLVKQGRYPYQNWLKQWSAEDEEAVQRALKATRMEELAERTVDSLSGGQRQRAWIAMTLAQETDIILLDEPTTYLDMTHQIEILDLLFELNEHENRTIVMVLHDLNLACRYAHHLVAIKDKKIYAEGRPESIINCKLVQDVFEMDCEVTKDPLFGTPHCIPYGKGRCIVQQVVQSHA

SEQ ID NO: 8835 - protein, 351 aa, Bacillus licheniformis
MKNYRTLRIGKGGISLLIGKKALFSFMILLVLTACAVILSAGIGERFISPGAVAKTFLGMGDPGDDLIIMSFRMPRILVALFAGICLAAAGSILQGLIRNPLASPDIIGVTGGASVAVVLFLMLFSNKNNALTVSISWLPVAAFIGAALAGMLVYFLSYKNGSSTFRLVLIGIGFSMLAQSLTTLFMIKGPIYRMSQANVWITGSVYGANWQDVNVLLPAALVLLLISAAAARNVNIQTLGEELATGAGSSVQRNRFLLLLLSTAFAGIAVAFAGTVGFVGLMAPHIARRLVGSSFGALLPVAALIGGLLVLIADIIGRTLFSPVEVPAGVFTAAIGAPYFIYLLYKSRNQ

SEQ ID NO: 8836 - protein, 333 aa, Bacillus licheniformis
MLLRTNKYRTIALLSFILVLAAAVCASIVYGYTNTSWSMAYKAFTDFSGSNEHLVIKNVRLPRALIAATVGASLGVAGALMQAMTKNPLASPGIFGVNAGAGFFVVGALFFFHVSSLQAIAWISFFGAAFAALVVYFVGSLGREGLTPVKLTLAGAAMSALFSSLTQGMLSVNEAALEQALFWLAGSVQGRDLSLLVSVLPYIVPAFIISFLLGSKINVLTMGEEVAKSLGQKTWLIKALMAVSIVLLAGGSVAVAGPIGFIGIVIPHFAKFIVGHDHRWVLPYCAVLGAILLVTADIGARYLIMPEEVPVGVMTAIIGTPIFVYIARRGFQK

SEQ ID NO: 8837 - protein, 325 aa, Bacillus licheniformis
MKRWSIVGFIALLAISILAACGGGKDDSAKGGENKDTITVKHAMGTEDRVPADPKRVVVLTNEGTEALLELGIKPVGAVKSWTGDPWYKHIQADMKGVKQIGLEGEPNIEAIAELKPDLIIGNKMRHEKIYDKLEKIAPTVFSETLRGEWKDNFSLYAKAVNKEKKGKEILEDFDKKVSELSDKLGDQKKKRVSVIRFMAGQSRIYYKDSFPGIILDQLGFKYPEKQEKLFEKQDDKFVFMTENKESIPDMDGDVLVYFTYKPAESKKEAETWQNDWTSDPLWKKLNAVKTGNAHEVDDAIWTTAGGVKAAYLFLDDIEKYFLKS

SEQ ID NO: 8838 - protein, 148 aa, Bacillus licheniformis
MNQFRMAVIALVLILMTGCGSIAEEHAEGKEAVPDNAPVSDVKSVPYDTFALEVNYGHGKHNTFEAVYDKQEREEASIKDYLNGADREGEEALNEMKMVLSELSIAKSDSEQDVISNVLEAFNLDEQYDRFQLRVKWPDGTSRIYNGK

SEQ ID NO: 8839 - protein, 594 aa, Bacillus licheniformis
MTFHQLKDTWDLEVFFKGGSGSAEFRQYLNEIKTLLSTFKRSAEALTVSKSGLDELKETLALFETIDVKIREADAFVGCLQAQDTADLKANALNFEVTRLAADAQKALVVLDSKFAVVPNVEWEAILQDESISDIAYILNERRERVTEKLSSEQETLIQGLSVDGYHAWGDMYDSIVDQIQIPYEEDGETKILSVGQAQNLTSKPDRKIRRSVSENLDHGWEQHADLLSSTLNHLAGFRLNVYEARGWDNVLKEPLDINRMKQETLDVMWQVIIDHKKPFADYLSRKASLLGLDKLSWYDVEAPIGSAAKEYSYQEAAAFITGQFKTFGKKLSSFAEKALRDRWVEAEDRGGKRPGGFCANFPDSGESRIFMTFAGSQSNVSTLAHELGHAFHQESMLDVRPLNRAYAMNVAETASTFAEMIVADAALKQAGSDEEKIVLLEDKVQRSVAFFMNIHARFLFETRFYDERKNGVVSAGRLNELMEEAQKEAFCGALGEYHPYFWASKLHFYITSVPFYNFPYTFGYLFSLGIYAQALKEGAAFEEKYIALLKDTASMSVEKLAMKHLGADLTKRDFWEAAIQPAVRDAEAFLAMT

SEQ ID NO: 8840 - protein, 384 aa, Bacillus licheniformis
MNVKRSLLFIIVLCLTLFFHSSAQAGEKNKPEIKSVSAILIDGKSGQVLYEKNSRKKMYPASITKIATAIYAIENGNLEDRVKVSKNAAQTEGSSVYLEEGESVPLKRLLQGLLMNSGNDAGTAIAEHLSGSVKQFADDLNAFIAEHAGVHDTHFMNPHGLFDKNHYTTSADMARITEYAMKNKTFRALFSEKQTDWHGQTWDTTLKNHHRMLTGEIPYKGITGGKTGFVDESKHTLVTTATRGSLDLIAVVMKADSKKMMYSDTKALLDEGFHNFETQELKKGEAFTDQNGTSHELKDPLYVTKKKGEVLSENVDTDGILNIKGEDGRLLQALQIAEPFSAEMTNGTDAIQGQPQSKGGLFLFVFGLIGLLTASYAVKRMRQL

SEQ ID NO: 8841 - protein, 280 aa, Bacillus licheniformis
LNNKIAIVTGATSGFGLLTALKLASTHFVIATARHPEKAEALRNRIAELSIESSIAVAELDVTNEQSISSFSEELKQYGQIDVLINNAGTAYGGFAEELSLGDYRKQYDTNVFGLVAVTKAVLPYMKKHSGAKIINLSSISGRIAFPAFSAYASSKHAVEGFSESLRLELRPFGINVAVVQPGSYQTAIWETSFAAQVTVPDAESQYKTYFERISAYIAASRKHYGNPDDVAELICRLAAKKRLNRLRYPIGRGVRLSILLHQILPWRIWERAVIKKLLK

SEQ ID NO: 8842 - protein, 154 aa, Bacillus licheniformis
MISQQLKQQNPVLENSMNTNLSNWFILYTKLHRFHWYVKGPQFFTLHEKFEELYNHAAETADVIAERLLAIGGQPLATMKEYIDHGTIEENGAEKTAEEMVSALVSDYRQIRDEIQHTIELAEDKSDHSTADLYIALTEEIDKQIWMLSSFLDK

SEQ ID NO: 8843 - protein, 456 aa, Bacillus licheniformis
MDFRRDDEQKHANEEQFHEEAQTPQTAGSEEQQSEQPAKEPELILKKDTDDQSDLTNKETAAALEDARETRAAKEKRRKASWLSPILGGIIGGGLVLGISPYLPGDHPSETAGTGQTEPKQSQNFTTKPVTNADNVPDMVEDLEPAIVGVSNIQTSFGFSEDDVEESGTGSGVIFKKDGGKAYIITNNHVVEGASKVTISLYNGKTADAKIIGSDALTDLAVLEISSKGVDKVASFGDSAKLRAGEKVIAIGNPLGLQFSRTVTEGIISGVNRTIEVSTSEGNWDMNVLQTDAAINPGNSGGPLINSSGQVIGINSLKISQSGVESLGFAIPSNDVQPIVDELLEKGKVERPFLGVQMIDMQQVPEQYQQNTLGLFGDQLNKGVYIDKVSPKSPAADAGMKAGDVITKMNGKNVETTSDLRKILYTEAKAGDTVTFEVLRNGKQTTMKAKLAKSKS

SEQ ID NO: 8844 - protein, 48 aa, Bacillus licheniformis
LSSTIANGIKALTSTKKETRPSFTLFSFPFFPDEYVTKTLWDKNEKNM

SEQ ID NO: 8845 - protein, 224 aa, Bacillus licheniformis
LSYSIYLVEDEENLNELLTKYLESEGWHVTSFLNGESARQKIGQSPHLWILDIMLPDIDGYTLIKEIKNQDPEVPVIFISARDADIDRVLGLELGSSDYISKPFLPRELIIRVQKLLKLIYKEEPPEKKKGTPVSCYEVYEDLREVYENGSMINLTSKEFDLLLLFINNQGRAFSREDILTSVWGDDYFGTDRVVDDLVRRLRKKMPELKVETIYGFGYRMLKS

SEQ ID NO: 8846 - protein, 448 aa, Bacillus licheniformis
MKNRSLAFQIWSVICGILLTVSILLTFLFSTTLQNFFTDEIYTNIENEQHVLTEYGFSDSPERGFGGSSGSRSTNRHVQHVLLPEKGTVYQSPQILPDSFIEKVQKLGKRQDESSKRYSENVNGEHVFFVLKKIQTQDQTFLLLSYALDSYRDDLSHTLFKQLLFILIVVILLSWIPSIWLAKYLSRPLVTLEKHVKQISKQDWDDPVIVDREDEIGKLGHTIEDMRQKLIQKDETERTLLQNISHDLKTPVMVIRGYTQSIKDGIYPKGDLENTIEVIEGEAEKLEKKIKDLLYLTKLDYLLRQERQYGTFDIQEVIKEVVERLRWSKKELNWKIDLEEETMLTGDQEQWSKLLENVLENQIRYAETFIDISVRSTKEHTLITIKNDGPHIEEEMLSSLYEPFNKGKKGEFGIGLSIVKRILTLHHADMTIRNDQTGVCYSISVPRN

SEQ ID NO: 8847 - protein, 54 aa, Bacillus licheniformis
MKEIDDMIRRLRSRGIKVDKVKYPKHVLCEKKWMKKPKNTVKPSYRDFNGYSFI

SEQ ID NO: 8848 - protein, 294 aa, Bacillus licheniformis
MKQKEKVIIETAIKLFAKKGYSSTSVQEIAKECQMSKGAFYIYFKSKEALLLSVLHYYYERIFTRIQKIKTEHDNPRDVYRMQLVVFFENILEHKEFITMQFNERSMPINEEIEAFAKKMRRTTLRLHIENIQNIYGKDIEPYSAELCFMINGMSDVYLELMILLHHSFDLQSLADHMLNRLDDLAKGMIKRNDQPLIPFEKADEWFGPFYTFDPLKDALLNEMRVKANKQYNGAPPADLAESLDILEKELRKEKRKNAIIKGMIANLKEYPAIRKETDKLAELLKKDMHHPHG

SEQ ID NO: 8849 - protein, 462 aa, Bacillus licheniformis
VDYRIEKDTMGEVKVPADKFWGAQTQRSKENFKIGSEKMPQEIVYAFAILKRSAAIANEKLGNLEAEKKEAIVSVCDDILEGKYDSHFPLVVWQTGSGTQSNMNMNEVVANRGTAYLQEKGSSLKIHPNDDVNRSQSSNDTFPTAMHVAAVLAIHDKLIPAIDRLRSTLHEKAEAFKDIVKIGRTHLQDATPLTLGQEISGWVYMLDRSKEMILEAAEKIRDLAIGGTAVGTGINAHPEFGSTVAEEISALTGQTFKSSPNKFHALTSHDELTHVHGALKALAADLMKIANDVRWLASGPRCGIGELLIPENEPGSSIMPGKVNPTQSEALTMVASQIMGNDATIGFAASQGNFELNVFKPVIIYNFLQSVQLLADGMNSFHDKCAVGIEPNRETIEKNLTNSLMLVTALNPHIGYENAAKIAKLAHKEGLTLKEAALKLNLLTEEQFDEVVKPEEMVKPKA

SEQ ID NO: 8850 - protein, 55 aa, Bacillus licheniformis
LAQIRLTGKPEEIERIIQSFSKHYEVSYVSKEYGKTNPKYKYAKDTRVYIELKLK

SEQ ID NO: 8851 - protein, 480 aa, Bacillus licheniformis
MTQSEFKEHIHENLAMLLPHLEHNDDLIQNKKMLKNGIIFYFLYFKDLNDDKKIQKAAKLLVSDDSSYSLEDVRLRLNKLNAEPVTAKKDAINAIFKGKCLLLINGLNTVFALPTAEKKKRSLGEVNTENVVRGPKVGFIEDVDTNVALVRQRVPDKELTVEKIPLGKSKFKDATILYIQGKADDSIIKDLKKRLKKVQLDDIQDTGVLEELIEDNKYSPFPQIQNTERPDKVSSALFNGRIAIFVDYSPFALIVPASFGMVMQSPDDFYERWIATTLIRFLRFSSIFITLFLSAFYISLVSFHQGMLPTALAVTIASTRENVPFPPLLEALIMEVTIELLREAGLRLPNPLGQTIGLVGGVVIGQAAVEANIVSSVMVIIVSIIALASFTVPQYGMGLSFRVLRFISMVAAAVFGLYGIILCMLAIFTHLARQRSFGIPYFNPNHFFSLKHTDEAIIRLPTKAREVNRKNGSKKSARSD

SEQ ID NO: 8852 - protein, 366 aa, Bacillus licheniformis
MDPKNQHDRISTYEAASIITSTMLGAGLLTLPRALTQKTLSPDGWIVLIFEGLVFFLIIYINAKIVKKHNVLSFFDYTREGCGFIIGNILNLLIVLYFMGVASFEARAMAEMAKFFLLQFTPMSVTIFAFIVCAIYLVVGGISDMSKIFPFFLSVTIVILLIVCGLSLNMFQLNHLRPVLGLGLEPVSRALTVVSISFLGVELMMFLPKYVKNKEKLFKASAIGFGIPLFLYILTFAVVVGALTATEVMTLTWPTISLFQSFEIRGIFIERFESFLLVIWTIQFFTTFVVYTYFAASGLENVFGWPVKKNVLFIGVVIYLASLVPRDANQVNAFSDYLGYIFIVVFCALPLMIFLLVSIKRRFTSS

SEQ ID NO: 8853 - protein, 373 aa, Bacillus licheniformis
MKKKGMLAALSLLLLLTGCWDSRQIEKLSIAIGLALDKGEDDKNVKLTYQFLVPKKIGQDGSAQDPSKVVSTSGNTVHQTIRSTALKNFPVFSQHLQVLIFSEELVSDISLEALINQFIRDNSIRRSSEVYMTPGAADSILKVDGASDPASDVIHSISENRASTIKLLKPVTLNDISIKMQSDLSYIMPKVVIEKGQLQLEGGAVIKNNKYHANLSPSQIEALNLLTGNVIGGVIDSRHDGHLFSYEVFSMTHRVRAMRQNGKYKFVVNANIKGRLSEDWYLGEDSFNDQYIKNIEKSVQKDIKKQVEQLIHVLQHDIKTDVTDFSDNARINFPKEWEKDRFNWDKHFSEAYIDYHIKATIQDFGTKGATKSR

SEQ ID NO: 8854 - protein, 121 aa, Bacillus licheniformis
MTGIFLIAAAVILSGFIISDVAYDPFMEDSQSMLFFTIGTYLTTPFFCFIGGFILLGIGKLIDLQEKHNAIVAERLDIICQNGTAGEHAREENEAAQLTARTVETDSFTLPAAEDRKYWNG

SEQ ID NO: 8855 - protein, 211 aa, Bacillus licheniformis
VIRVLLIDDHEMVRMGLAAFLESQPDIEVIGEASDGKRGVELALETKPDVILMDLVMEGMDGIEATKQICRQLADPKIIVLTSFVDDDKVYPVIEAGALSYLLKTSKASEIADAIRAASVGEPKLEAKVAGKVLSKLRHSAGEQPLHQSLTARELEILKLVAEGKTNKGIAEELYITIKTVKTHVTNILSKLEVDDRTQAAIYAHRNKLVD

SEQ ID NO: 8856 - protein, 354 aa, Bacillus licheniformis
MRTNRLANIQWRAVRLSLGVSFTIFLAVLGFMLFYYQLDPRVLIVSRWFGIPFIALLALISTAVGFGSGYMFGNQLKKRLEKLIESILKYENGNFAYRIPSLGDDEIGLAADQLNEMAERIERQVASLQKLSNERAEWQDQMKKSVISEERQRLARELHDAVSQQLFAISMMTSAVLEGIDAAADEKLAQRLKMVEKMAADAQNEMRALLLHLRPVTLEGKGLQEGLADLLKEFKAKQSIDIDWEIEDAGKLPKGVEDHLFRIVQEALSNVFRHSKATKVTVRLLLRNKQLQLKVIDNGEGFKMDAVKTSSYGLNSIKERASEVGGVAEIISFTGKGTQVDVKVPIFEQQKGEA

SEQ ID NO: 8857 - protein, 243 aa, Bacillus licheniformis
MRLTKNQLIGLIIVLFGISIFLQNSGLGDALFWPLAFLFAGYFLHKYSRRWLGSVMYIFAGFLLLKDIFSITFSLFGFFFAAFLIYAGYRLVTNQPVFDRHKPKDRGKEKADFKPLQEKNSPGQRSFFFGDVKLMKTPFDLNDLNISGFIGDVKIDLSKAIISEGENTIVITGLIGDVDIYIPSDLEVSISSSAFVGDIDVIGGRKSGIGNQIYSETENYEQSARRVKISISLFIGDVDVRFI

SEQ ID NO: 8858 - protein, 287 aa, Bacillus licheniformis
MKKTVGKLLIIAGILILAGMMFNGREGFSFFGFDEESARTYHAQAEDIDKIDIDAKSITVNIQAENRDDIKAEISGKNVRLDSSEQGGTLQLSAHSKGFWPFFWKKNELIVKIPSEYKDDLSISSGSGNVKLSGGGLHLRNVALKSGSGSLKADDLQAEDLSVKGTSGSVRLENVQTAAADIRSTSGNTKLENVTGKLSIKQTSGNLRASFTEINDSLSIKQTSGNTKLSLPDDADISLEAESTSGNISHSYSFDQVANEKRTLTGKKGNGKNKIDISITSGNVSIE

SEQ ID NO: 8859 - protein, 227 aa, Bacillus licheniformis
MALKRIRDMFVASVNEGLDKLENPRVMLNQYVRDMESDIAKAKHTIVKQQTIEHSFKGKVEEAEKLAVKRRNQAQLAFDAGEEELAKKALSEMKYFEEKAAEYKDAHQHAKKQLAELKEQLETLEVKLRDIKDRKHALIARANAVKAKEHMNASFNKIDSESAYREFMRMENRIEEMETRVNSYAELSASSSSPFGRLEYAKEVEEELEKMRAKKTGLEKQTPAGNA

SEQ ID NO: 8860 - protein, 128 aa, Bacillus licheniformis
MNINGKSIIGFFLILFGVSLFFGGGHFGGLVTGAIGALLLFYSVKKWKEGRQFAAVLAAIFGIMFLGGSLPFLIGIAVAAAMVYFGWKMMKQDDKQDDILYSEKTEPSAASYDTGFDAEWEDFLKKNK

SEQ ID NO: 8861 - protein, 317 aa, Bacillus licheniformis
VVNREAAAIRLTVSKDGDGEFQTVQEAIDALPEYSREQKVIFIKKGVYKEVVHIPATKPFVKLIGENRYETVITYDNYAGKEKEGGGKYGTTGSSSVFIYADHVEAENLTFENSFDRTKVDTTDTQAVAVYAKGNRMTFKYVRFIGRQDTLFVNDGTQYFYQCYIEGDVDFIFGGARAVFEECQIHSADRGSATNNGYVTAASTHIAKPFGLLITNCRVTSDAADGTVYLGRPWHPGGDPDAIASVLYHRCDLGAHIKPEGWTDMSGFSAADARLYEYGNTGPGAISHEARRQLADHEAEKWTIENVLDGWNPKVES

SEQ ID NO: 8862 - protein, 192 aa, Bacillus licheniformis
MKLYTKTGDRGKTSLIGGRADKDHLRVEAYGTLDEANSFIGLAQSYLKAEEALFHDILSELTAIQHELFDCGSDLAHVNVQEEGKLKAESITMLEERIDAYVEEAPQLTKFILPGGTEAASFLHAARTVIRRAERKIVALAKEEDIPPLALPYVNRLSDYLFAAARIVNHRLGEVDVEYERSADVFRTKKKS

SEQ ID NO: 8863 - protein, 248 aa, Bacillus licheniformis
MEFNQQTAIITGASRGIGRAIAELLADKGANVVINGTNEELLKSLCTQLNTERKCASYVAGDASLPETASLLIAEAKQRFGRIDILVNNAGVNLRKTTVDTSLEEWKRVIDLNLTGTFLMCQAVISEMITQGGGKIVNMSSTTSKTPHHNASPAYGASKAGINYLTMHLAKELAEHRIHVNGVCPGPIETDMSKQWSEEYRAAVVERIPLKMLGSPEHVANVVAFLASDKSDFMTGETININGGTYMN

SEQ ID NO: 8864 - protein, 66 aa, Bacillus licheniformis
TIQLAHDTLIREGIPQPKIAVCMNPHAGEMDMEKRKRKLSLPLNAHKVKVYRHSVRCPLTRFSSEQ

SEQ ID NO: 8865 - protein, 331 aa, Bacillus licheniformis
MKTLYHFRTAARIEAGPHSLNLLGDYLDQIGLNQIRSVFILTQPSIVSLGYADQIKEGLAKKGISSEVNTDIQPEPTEQNIEQVFQLFSEGGHDAILGIGGGSVLDAAKILSVLKTNEKPISALIGTNLVEKPGVPLVLIPTTSGTGSEVTPNAIVTFPEKELKIGIVSPYLLPSLVILDPVLTTGLPKAITAATGMDAFTHALESYISNKANPFSDMFALESMRLISSSIQQAYHHGDNLEAREKMLIGAMYGGMALTSAGTAAVHAMAYPLGGKYKISHGVANSMLLPHVTAFNADHVTDRLSDVAGVIGIEPKGSKSSQAERVIRKIE

SEQ ID NO: 8866 - protein, 300 aa, Bacillus licheniformis
LKVEGIIPAILTPLTKEQAFHPGAAEKLVNRLIDSGVHGIFALGTNGEFHLFSQEEKLQIAETVVKAVNKRVPVFIGAGENSTEATISLSNQMADLGADVLSIITPYFVAPSQEELYQHFRTISENVALPVLLYNIPSRTGVSLEPETVERLAALPNIIGIKDSSGSFANIKAYLERTKEQSFSVLAGTDSLILDTLKAGGTGAVAATANVFPHTVVSIYESFKQGNIEESEHYQQQLQPLRDTFSLGSLPAPLKKAAELAGIDVGPPKRPIAELSGEPLLKVKKMLEGYGIEAKLAKEQ

SEQ ID NO: 8867 - protein, 427 aa, Bacillus licheniformis
MIDVIRVSGGYGKTDVLQDISFAVKPGEFLGILGPNGSGKTTLLKMLSGTIAPRSGEVLLECRSVGEYKTKELARKMAVLPQKTEQAFSFTVEETVQFGRYAYQAGLFRQLTAEDHDIVKRVMKQTDTLRFAQKSIHELSGGEQQRVYLAQALAQEPEYLLLDEPTSFLDLSFQKSLLDLMKQETAASKLAVVGVFHDVNIASLYCDRLLLLKDGKAEVLDRPEAALSAGRIGRVYDTDITGLDHPQRSNPQFTIMAKNIPRKTEPLFLKERIEQYLPHGIAFLADRPLRLLSSERGFAWRRKLIFDSGNNSGWPHGSSAFEQETLFIQHDAELADCHIVSESGDLCIVGMKDTMERLIMWVLVDGCLQDGQFVKAISAAAFAAAQHHVPCSDVLVAATQSGRSADQTAFLTQIQNKTAACVKALKD

SEQ ID NO: 8868 - protein, 355 aa, Bacillus licheniformis
LLNIFTLTFLRNNRFAAYAFSLLFLSASVLMGISIGSLEIPIPSIMKVFLEEWFGIQGLNPDPTEANIIMKIRLPRVVLAALVGAGLAAAGAGFQGLLKNPLADPYTLGISSGAAVGAVVTLFFGIQLPVIGSFTLPFLSVAAAVIVIFLVLFFARLVHPSLTLSALILTGIIFSSFLGALISLMIALTGDDLKPIVHWLLGSVSMRGLGAMSRCFCPFLSAGAAALLISGRELNVMTYGEEKARLLGVNVKRSKYIVLLAGAILTGSAVAVSGTIGFVGLVIPHFIRLLSITDHRHLLPLSMLNGASFLVLSDLLSRTIIEPSELPIGIITALIGAPVFGFILIRRYRGGRVHD

SEQ ID NO: 8869 - protein, 316 aa, Bacillus licheniformis
MKKFGLLLLSLLLAAGVLSGCGQAQKPADEQKQEKAAEAFPVTIKDASGQEVKIEKEPKKIVSLMPSNTEITYALGLGKKVVGVTDFDTYPKEVKNVEKIGGMEFNTEKIISLNPDLVLAHASSMQSAEEGLKQLKDAGITVVTVNDAASFEETYRSIEMIGKAAGAEDQAASLVKSMKSDLAGIKEKAAAISKADQKKVFVEVSPAPDIYTTGKGTFMNEMLEAIHAENAASAQKGWAKITEEAIVKLNPDAIVTTNGESAVSEIKKRSGWSGVKAVKNNEVYDVDPDLVTRPGPRLIKGVEELAEHIYPDVFKK

SEQ ID NO: 8870 - protein, 226 aa, Bacillus licheniformis
MPIPKNYTPQVRLSAKEKAFHQLQRWIVDGTLEPGEKVTDVDLAEALGVSRTPVREALQLLESQGFVEMKPGKETKITLIHPDDALAVYPPLAHLQALAAELAAPLLTEEEIAELKKLAAQYETAFKEERNHDAAELDEQFHHLITEAAKNPYVLQFSAVLQLHVRRMKYVFFNRPAAPKMQSAAEHWKIIAAFEKNDPKLAAEVMKRNWLRPMEDIHKVLKGREQ

SEQ ID NO: 8871 - protein, 263 aa, Bacillus licheniformis
MDLKLKNKLVLVTGSTAGIGKATAEAFLAEGAEVIVNGRTEEKVQSVVDELSRHGNVHGIAADLSDPEESRALVEKTAEIGELDVLVNNMGFFEVKDFTDVTDEEWLKYFEVNVLSAVRLCRAFLPAMLKRNKGRVLNLASEAGIKPLPQMIPYSMTKTALISLSRGLAEMTKGTNVTVNSVLPGPTWTEGVANYMEGAAAQEKTDLDTFVKDYFKVNEPTSLIQRYAKPEEVASTIVYLASEKAAAINGSAQRVEGGIIRSI

SEQ ID NO: 8872 - protein, 231 aa, Bacillus licheniformis
MEYADILSINVGKPEEIQFQNKAVSTGIYKKPASGPIFLSSTNFTGDGQGDLIHHGGAEKAVCVYPYEHYLFWEKELQRKLEYGAFGENLTIKGLLEDDVHIGDIFQLGAAVVQVSQPRQPCYKLTVRYGMPDMILKVQDTGFTGFYFRVLKEGFVCKEHGLKRISRHPKGITISYANRIKHHEKNDIEGIKKLLEVEELSANWRASCLKRLNGFEPDDRERLTGGLKQGS

SEQ ID NO: 8873 - protein, 132 aa, Bacillus licheniformis
LELKQLEYFMALCRELHFTRAAEKLNIAQPSLSQQIRLLEHEIGMPLFNRSGKRTVMTEAGNILLQHCYNIFHELSQARDAISELQGLKRGTLKIGALLTVVNYLLPRTVVEFHRSYPNIELSVLGLRTGDI

SEQ ID NO: 8874 - protein, 436 aa, Bacillus licheniformis
VSLQKIKEEIVKKLKVPVFPNRSFDVTSFGADENGKNDSTEAIQKAIDQAHQAGGGRVTVPEGVFLSGALRLKSNVDLHIAKGAVIKFSQNPEDYLPVVLTRFEGVELYNYSPLIYAYEADNIAITGKGTLDGQGDDEHWWPWKRGTNGQPSQEKDRNALFEMAERGIPVTERQFGKGHYLRPNFIQPYRCKHILIQGVTVLNSPMWQVHPVLCENVTVDGIKVIGHGPNTDGVNPESCKNVVIKGCHFDNGDDCIAVKSGRNADGRRINIPSENIVIEHNEMKDGHGGVTIGSEISGGVKNVIAEGNLMDSPNLDRALRIKTNSVRGGVLENIYFHKNTVKSLKREVIAIDMEYEEGDAGDFKPVVRTVDVKQLKSMGGQYGIRVLAYDHSPVTGLKVADSEIDGVDVPMELKHVKDPVFSNLYINGKRYDSHKA

SEQ ID NO: 8875 - protein, 496 aa, Bacillus licheniformis
MKDCLMINPQDNVGIALRELQTGETVTVGERTIVIKEPILKGHKFALKDIAENENVIKYGFPIGHATEMIQTGEWVHTKNVKTNLGGVEEYSYKPKFTENRYQKEPLTFKGFKRKDGKTGIRNELWIVPTVGCVNGIAELIIKEFKAEVGSIAPFESVHVLKHQYGCSQLGDDHINTRTILANAVNHPNAGGVLVLGLGCENNSIHEFREALGDYDHSRVKFLLSQEVSDEVTEGVKLLKEIYKHAKGDHREDVPLSELKIGLKCGGSDGFSGITANPLLGRLSDFLIAQGGTAVLTEVPEMFGAETLLMERAENEEVFHKIVRLINDFKQYFIDHRQPVYENPSPGNKAGGITTLEDKSLGCTQKAGTSKVADVLEYGDVLKKKGLNLLSAPGNDLVASSALAAAGCQIVLFTTGRGTPFGTFVPTMKISTNTAIYEAKRHWIDFNAGKVLEDRSEDDVLKELTAYLIEVASGRQLNNEINDFRELAIFKTGVTL

SEQ ID NO: 8876 - protein, 489 aa, Bacillus licheniformis
MERLSKRIRSKPSRPERILQIGEGNFMRGFIDWQIHRLNEETDFNGSAVVVPPRRGSVTAFQEQDGLYTLYLEGFREGREVRDSAVITSISRVVSSYEHYDEFMELADLPDLRFVFSNTTEAGIIYIEEDRLSDRPQKSYPGKLTALLYRRYMTFQGSREKGLVILPCELLEDNGKILKDIVLRYTNAWALEQGFIDWLEEANVFCNTLVDRIVPGFPKENAHRLEEAAGYHDSLMVKAEPYHLFVIEGPKWLRDELPLHEAGLNVEFVQDVTPYRIRKVRILNGAHTAMTPVAYLAGLETVREAAEDELIGSFVKELIQREVLETIDMPDSELDNYVEEILDRFKNPFIRHKLIDISLNSFAKFKVRNLPVLMEYAERTGKLPARTVFALSALIYFYRDQRDGDDGAIPLSDDDEVLAFLKRLWTEETDVSNIAFHVLGFEKVWGQNLNDMPGLTDKTAEYLRDMKQTGMRKALEKMMKSQMAELGDM

SEQ ID NO: 8877 - protein, 332 aa, Bacillus licheniformis
MSVTIKDIARLANVSHTTVSRALNNSPLIKENTKKKILDIAAEMNYKPNFNAKSLVTQKSFTIGLFLTSLTDGTSSSFFADILRGVNKVIDENYNMVVRGIDDYHDLSSIHRNRYDGMILISQSEQDQAFIEHVLKQNIPVVVLNRKIEGHSVVNILANEHEGAFLAASYLIKNGHKQIAMVQGKEGFKSSQERKGGFLRALRDSNLDMPGEYLVQGDYTMQSGFRAAETLLKLKNPPTALFCANDDMAIGAMNALYANGKRCPDDMSIIGFDDSGFSAYTTPSLTTVKKPTEKISMLGAESLLSLIENPQAEGGQTLISTELIIRNSVKHL

SEQ ID NO: 8878 - protein, 462 aa, Bacillus licheniformis
MEISTNKQTETVAVTQEKLSLKEKVSYGFGDFGNGFMFDLGQLYLLKFFTDVAGIPAAAAGGIFLVSKLFAAFVDPIVGTSIDYRKNIGPKGKFRPYLLYGSFVLAILTILTFISPNLSPTGKLIYAYASYMLWGLGYSFVNIPYGSLGAAMTQNSVERTSLASFRQAGSLGALFVTSIVVIPMIVRFDNPAVAYPVVMGLMSFLGVLFFYICYRNCQERIVVKDEKYKQEKVTFKAISKTFFTNKPLLTLIFMTIFTISAYNLKSAMLIYFAQYNLGNAELMAYMNFIIIGSSFIGVIMLPKLVKLFGKKHTAILGLAVSVCADLINFFAPGNVFVFTILASIAFIGISIPNGITWAFVSDAIDYGEWRTGERKEGTVYSLFNFSRKLAQSLSGFLSGIGLSIIGYVPNAAQKAGTLLGIKAILLLYPAAALTAAILVLGYLYRLTDQKHAEMVAEIKART

SEQ ID NO: 8879 - protein, 473 aa, Bacillus licheniformis
VKPFLNDDFLLTNETSKVLYHQYAKGMPIIDYHCHLSPKEIYENKTFKNLTEVWLYGDHYKWRAMRANGISEEFITGDASDEEKFSAWARTVPMTIGNPLYHWTHLELRRFFGIDDRLDEKSAPHIWERVNEQLAGGGFGARDLIEKSNVETVVTTDDPTDSLEYHVKLKDEDFNVSVLPGFRPDKAMEINQEGFAAWVRKLETASGMKIANYDDFLKALKNRIDFFHEAGGRISDHAINQMMYTETDESEVRPIFAKVMNGESASPEEECKFKSLTLHFLGTCYAEKGWAMQLHINALRNNSSKMYRKLGPDTGYDAINDQDIAKPLCSFLDSLDRKDALPKTILYSLNPRDNVVISSLCGSFQDGRIPGKIQHGTAWWFNDTKDGMLEQMKSLANIGLLSRFIGMLTDSRSFLSYTRHEYFRRLLCDVIGTWVENGEAPDDIELLGRIVKGICYENAKHYFQFEVKDRLKA

SEQ ID NO: 8880 - protein, 585 aa, Bacillus licheniformis
MKLRGKLVLHFVSQIFLILGLVLATLLLSFIFFALRLSESEADTGLAKATSDTFESWVSVDDNNNWQIEDILKSAIDKQGGWLQILDGKEKTVYSYRLPAEIQRQYHREDLVSVFDKKRIKKYQVNFWSANFNGEDYVILFGWESKSDTILSYLEKEEKDMADLSSYKKSTLDFIKKNKGSVYLFSEKGKMLDSIYQDIDYSQGINELELLKYGSKPWNYEHEFSYRRLSATEWLIAATPNPIFNPDHEFNRTMIGLALKIVLIVIGVLILLMSSMTIWYSFRFGMPIIHTIKWIVNLSKGRFEEPRNRKGRPRSRNKKGKRKQPYRLFTEVFESMEQLTETLKKDEQNRKKIQTTREEWIAGLSHDLKTPLSTIYGYSMMLESPNYEWSKEEIREIGQAMKEKSDYMSQLIEDLNLTYRLKNDALPIKRQTVRLVPFLKSFVEEFKRHSFSEGYNVSFEYKQVDTEFAIDRGWFRRVLENLLANAVKHNKKGTDIKVILEESKQYIILKIQDNGRGMDSETVSNLFNRYYRGTHTKDATEGSGLGLAISLELVHLHDGCIAVDSRTGRGTEITMEFKKNPKAAK

SEQ ID NO: 8881 - protein, 242 aa, Bacillus licheniformis
LENATILIVDDEDAIVQMVKRVLTKEGFSEVLTASSAEEALDIVKKDTVHLILLDVMMPGQTGFDVSPEIRRHTNAPIFFLTAKTSDLDKLSGFAYGADDYITKPFNPLELIARIKAHLKRTYIHKEVAAASVSSAYEYERFIFHPDFAELIVDGETVSCSAQLLQLLQYFCDHPNRVLSKDQIYEKVWGVPSYGDSNTVMVHIRKLREKIEKDPSSPEYIVTIRGLGYKFVPNPARKESEG

SEQ ID NO: 8882 - protein, 270 aa, Bacillus licheniformis
VSLSTNNLGIGYGEQMIVENLNLHIPKGKVTTMIGPNGCGKSTILKTMARIQRSRTGAVYLNGKAIHQMSTKDVAKQMAILPQTPEAPGGLTVYELVSYGRFPHQKGMGRLSADDRRMVEWSLQVTGMLPFYDRPIEALSGGQRQRVWIAMALAQETELLLLDEPTTYLDLAHQLEILQLLEKLNQEEGRTILMVIHDLNHAARFAHHMVALNRGAIVKEGAPHEVMTSEVLKKVFQIDAEIILDPRTGKPVCLTYDLLKKEEDQRLATG

SEQ ID NO: 8883 - protein, 337 aa, Bacillus licheniformis
MLKKNNRRAGAVMLVMAVLTAAVFLLSMNMGEIRIDPLATLRTLFGFGTPQDELVLFEFRLPCMILAMLIGAGVAVSGAVWQGISRNDLADPGILGINTGAGFAVVLFIFYFQGDVGNLQKGFVFSLPIFAFLGACFAVVSIYLLAWKKGLNPIRLVLVGIGVNAAFSAAILMLQLKMDPNDFMQAAVWLSGNIWSSNWSFVSAVLPWIVVLIPFILYKARYLNVLNLGDQLATGLGTAVEKERRTLLLSAAALSGACVAAGGNITFLGLVAPHIARRLVGPKHQLLIPASALTGALLFLLADLIGRMILAPSEIPVGLVIAALGAPYFIYLLMKTN

SEQ ID NO: 8884 - protein, 354 aa, Bacillus licheniformis
VSSYKNIHHINGADGTDEEQRPISRPLGAVFVLAGGIMLLLFGAALSIALGAADIKLGTVWDAIFHFDAKNTAHQIIQELRLPRTVSAALVGACLAVSGAVMQGMTRNPLASPEIMSVTHGSAFAIAVAFAFFPGTSSIGLMIWSFAGAALGAGLVFGIGMFSKGGLTPVKLALAGTAVGTFLSALSTSIAIHFDVARDVSFWYAGGVAGTKWLSIQLLIPAAALGLAVVFVIARSITVLSLGEELAKGLGQYTKTVKAIGIVSVVLLTGAAVSVAGAIGFIGLIIPHITRFLVGVDYRWIIPCSAVLGAVLLIYADIAARLVNPPFETPVGAVTALVGVPFFLYLARRERSGL

SEQ ID NO: 8885 - protein, 467 aa, Bacillus licheniformis
MEQTKKWGFWLLTAFVVGNMVGSGIFMLPSTLAQTASPLGVTAAWLVTGAGVLMIALVFGHLSIRRPDLKAGPQSYARALFSDPKKGNAAGFTMVWGYWVASWISNVAIITSLAGYLTTFLPILTDGRELVEFGGHPVTLGQLLTFIVCTILLWGTHFILVSSINGAGKLNFLATFSKVLGFVLFIVAGLFVFQTALFESFYFPIESEGKSIGLGGQVHNAAISTLWAFVGIESAVILSGRASSQRDVKRATITGLLIALGIYMIITLITMGVIPHDQLQASDKPFVDVLHVIIGSFGSVIMAVLAIVSLFGSMLGWILIGAEVPYQAAKAGDFPAFFAKTNKKGSPVNSLIVTNVMSQIFIFSTISGTISEAFTFLTTSATLAYLVPYLIAALFSLKLILKGETYGELKGSRTGDGIIALAALAYSLWVIVSGTSDLTTFILGIGLFFVGLAIYPFVYKKFKNNQV

SEQ ID NO: 8886 - protein, 46 aa, Bacillus licheniformis
LGIFFNKDRGNKEKDQNAVRGALEDAGQALKGDPLQEAVNKKKNNR

SEQ ID NO: 8887 - protein, 156 aa, Bacillus licheniformis
MTGKTHIMGGVASCTAAAYFYGYDPVFMTASGVIGALIPDICHTKSKIGRRLPILSAVVSSVFGHRTFTHSLLFLLITAFAAHLYFADQSILVGLMAGMASHLLLDAGTVNGIKLFFPSAIKVRLPLYIKTGGKAEQVVLAVLTVVSCYFIANLIA

SEQ ID NO: 8888 - protein, 619 aa, Bacillus licheniformis
MKKQFFKKQWFLCLSIFFIWMKTYFIYKLGFNLQIDNALQELILFINPLSFLIPVLGISLFFREKSQRIYLIGANVVLTGILIANSIFYGFYIDFITIPVLFQAKNLGGLGSSFQELFNPVFIALFLDLALMVWLAKTRERTGKKLSAKAVKIYYAAAAGTVLFNLALSELDQPKFLSYSYDREVLVKNIGLYQFHLLDGISQTFNLTQKAVADENSLATIENYTNADYSKPNQDMFGIAKGRNVIFVTLESTQTFVINEKVNGQEITPFMNKFIQKSYYFDHFYQQTEQGKTSDSEFIVANSLYPSLSGSVFFTKSENAYNSMYKTLANHNYRTSVFHANHKKFWNRDVMYKALGIDSFYDVSHFHVTPENSTGWGLKDKEFLTQSADLMKDLPQPFYSNLITLTNHFPFQIDDEDKLIDEYDSESDILNRYVTTVRYEDEALKHFIAKLKKNGLYDNSVIVFMGDHYGISEAHNDALAQFLGKDEITPYDTVQLQRVPLIIHIPGVTDQDPKTISETGGQIDVKPTLLHLLGIDAKGMIQFGNDLFSKERMPFAVLRNGSFITDDYIYTKNTCYSKKTGDMINDGEDKCGPLIEKANEELSLSDKIINGDLLRFYKK

SEQ ID NO: 8889 - protein, 483 aa, Bacillus licheniformis
MSETQHKTNQLPIVAVLIMGTFIAILNQTLLTTALPPIMRDLNITPGLAQWLTTVFMLVNGIMIPVTAFLIEKFTTRKLFMAAMSLFTAGTLICALSFSFPALIAGRVVQAAGAGIMMPLMQTVLLLIFPKEKRGSAMGMVGLVIAFAPAVGPTLSGWIVDRYPWEVLFYLLLPFAVIDMIAAHFILKNVTEQTSPKMDVTSIILSSLGFGGILYGFSSAGVAGWTGADVLAGFAVGSVALFWFIWRQLHLEEPILEFRVFKYPMFTLATIIGMVVFMSMIGAATIVPMYMQDMRHFTAMESGMMLFPGAVVMGLMSPITGRIFDKIGARILSITGLTAIFVTTLLLTHLTKTTPFAYLSIVYAIRMVGMGMVLMPVTTAGLNQLPRHLIPHGTAMNNTMRQMSGSIGTAVLITIMTQRALLDPAGPSSDTAMIHGVNLAFMTAAALSGIGLVLSFFIKQHRRGRLDGSKRKQAKGRLAIHEK

SEQ ID NO: 8890 - protein, 279 aa, Bacillus licheniformis
MVSSLKDTVTLHNGVKMPWFGLGVFKVEEGSQVVESVKAAIKNGYRSIDTAAIYQNEEGVGKGIKESGVPREELFITSKVWNSDQGYEKTLAAFDESLRKLGLDYLDLYLIHWPGKDKYKDTWRALEKLYKDGRVKAIGVSNFNVHHLESLLEDAEIKPMVNQVEFHPRLTQTELRDYCKKQGIQVEAWSPLMQGKLLDDQVLTDIAKKYNKSVAQVILRWDLQNEVVTIPKSIKEHRIIENADIFDFELSAEDVEKINALNKDERVGPDPDTMVNGFE

SEQ ID NO: 8891 - protein, 286 aa, Bacillus licheniformis
MKHYGAIEAGGTKFVCAVGTEKGEIIDRLTIPTETPEETIGKLTDFFSKYQLTSMGVGSFGPISVAKNKEDYGYITNTPKLAWKGYPFIPELEKRLGIPVSFTTDVNAAALGELTKGEAQGLESCLYITVGTGIGAGAIVGGRLVQSTLHPEMGHLLIRRHPQDTFEGICPYHKDCLEGMASGPALEKRWGKKGKDLAENEEVWELEPEYLAQALMQYILILCPEKIIMGGGVMKQQQLFPLIRKKLAEYLNGYVDLPDLEEYIVPPGLGDDQGITGALALAHSIG

SEQ ID NO: 8892 - protein, 48 aa, Bacillus licheniformis
MKESNRTEQWFTRAWELLMLTEESFPKMWQFFKQLPRSLFRLNRLLTA

SEQ ID NO: 8893 - protein, 38 aa, Bacillus licheniformis
LIVTVKKRIFSSPARSFNKEGYHEASIRQFPFFIPEIV

SEQ ID NO: 8894 - protein, 374 aa, Bacillus licheniformis
MKHPFDNFRSLFPKLSDHVHLAACSGSALALPVAKAVDEYQNGLLTAGADWKAHLDKMDETKEKFARLIGAEKEEIAVLPSVSDAVAAVAAAMPQPPRRRQIAFTDIDFPAVGQIWLAQDRFKDHLIIIQSEDGMIDLEQYEKDVTDQTLLTCVPHAGYRNGFKQDIKQIAEIVHQKGSLLFVDAYQTAGHIPIHVKDMDIDILAAGTRKYMLGIPGTAFLYMKRELCEQFEPKTAGWFGRSAPFALDSGFAEGAKRFESGTPSFISIYAADAALKLLLEAEPDRIEPYLRQLAAFSLQYGAEKGLKITGPNTVHNRTSLISVYAEEAARVESLLREKHIIVSKRNNVIRIAPHFYNTKEEIGFVMDEIAAIVG

SEQ ID NO: 8895 - protein, 136 aa, Bacillus licheniformis
MELYIEGELEEHRKLPHRKVLFAILAVLLATGITIGYIVYTHFYSMNHLPKGNWFQSSGSPNQAYNLNLYRVNKGGGTNSPSVRGELTTVATGERKNIYWGYEEEHAKIEWQDKYHVSINNNVLDVRTDIYDGRRE

SEQ ID NO: 8896 - protein, 776 aa, Bacillus licheniformis
VQENGQEWLEEEKRIRLVLKELDQKLHSLKGKTGGLKEDIIDLRKHFWSDVTVNIADENEAVETFFSIKQQAEVLAERERSHKQFYSQLKNLLKVKESPYFGRVDFLEDGEENAESVYIGLASLMYEKEERFLIYDWRAPISSLFYNYGPGAAQYEVPDETVRGTIELKRQFLFKNGQLKAMFNTDMAIGDEVLQEVLGQQADIQMKSIVATIQKEQNQIIRNEKSRFLIVRGAAGSGKTSAALQRAAYLLYRGRGQIESSQMLLFSPNLLFNSYVANVLPELGEENIQQTTFQEFVARRLGKQVPCETPFDQLEYCLTASDGEEQRIRMKSIELKSSLAFKGIIDDYVKYLAKGNLVFKHITFRGKRIITSGQMRKFFAALDHSDTLSNRIEQTGKWLLQLLNKYERQERKKDWVIEESELLDKEEYLKAYKRLQEEQRFTENTFDDYERERNLLASIVAEREFKPLKQVVKAFGFIDFKGTYLQLFSGRYTPKTRSDDWQSICTFTQKSFRFEKLLYEDAVPFLYMKNKLKGGGKNTAIRHLFIDEAQDYTPFQLAFLESLFPACSITMLGDLNQAILAHAYHDKTLLSGGVFEGEKTEIITLKRSYRSTKEIVELTKRIIEGGEEIEAFNRNGKKPTLTISADPHAHHKEMASLMTALQKEGLETIAVICKTVRECRDAFQHLQQHAELKLIDKETRTFQKGVVVIPVYLAKGIEFDAVIIYDASEKQYKKERERTLFYTACTRAMHELHLFSIGKETHFLNGVPNDMYTRRE

SEQ ID NO: 8897 - protein, 202 aa, Bacillus licheniformis
MAWEVLSIIGTVAFAISGAIVAMEEEYDILGVYILGIVTAFGGGAIRNLLIGVPVSALWEQGSLFLIALVSITIVFLFPKLLLKHWSIWGSFSDAIGLAAFAIQGALYAVHMNHPVSAVIVAAVLTGSGGGMIRDLLAGRKPLVLKTEIYAVWAALGGFIIGMGWAEKPLTLYILFALLVACRVCSYMFNWKLPNRSLRSHS

SEQ ID NO: 8898 - protein, 116 aa, Bacillus licheniformis
MGQEVIIEKAKAEWAHEFEAEKQQLADVLGKKVLAIEQIGSTSVPGLAAKPVLDLMAGVSSLSEASVGSNRFRSSAMSTYFTKPSQPGVFFERESGGRAHAICTYTFFKAKNGKIS

SEQ ID NO: 8899 - protein, 161 aa, Bacillus licheniformis
MECKIRKMKKKDIPQVQQIAKTSWNHTYEGIIPFDIQEKFLQKAYNDERMQQRLEHSLMLVSEADGKIVGFANYSFVREGGVAYLAAVYLAPEYQGKGIGTALLEEGINHLKGVKKIFVEVEKENRTGKNFYKAKGFEDVAEYDEDFEGHILKTVRMALHV

SEQ ID NO: 8900 - protein, 137 aa, Bacillus licheniformis
MKNKLLFLYGAWIVSLTATLGSLYFSEIRKFIPCELCWYQRIMMYPLVLILGIATFQGDARVKKYVLPMAVIGAGISLMHYMEQKIPGFNGIKPCVTGVPCSGQYINWFGFITIPFLALIAFILIIIFMCFLKGKDE

SEQ ID NO: 8901 - protein, 231 aa, Bacillus licheniformis
VKKKQQSPMKFAVIMTVVVVFLIGALVVINNQTQNASQTFDDKPSTEGQPLLGNKDAAVTITEFGDYKCPSCKQWTETVFPDLKKDYIDKDQVNFSYINFVNEQHGRGSELSALASEQVWKEDPDSFWKFHEALYKAQPDNDTMENEWATPAKLADITEANTKIKRDKLVSSLNDKTFAEQLKTDNSLINKYGVDSTPTIFVNGVKIDKPFDYDKIKETIEKELKGQSDEK

SEQ ID NO: 8902 - protein, 703 aa, Bacillus licheniformis
MEKVKQEYTLNGLDCSNCAQKIEHEIAGMKGIEACSVNFATSTLTVQVDQNSGEDISLIIKKKVTEIEPHVNATLKEGTKQAPPESDGRFKKTVARLAAGTVLGAAGFLLPGGTAAEWLLFFLAYLIIGGDVVLRAVKNIFRGRVFDEHFLMTIATLGAFIIQQYPEGVAVMLFYQIGELFQGAAVTRSRKSISDLMDIRPDYANLQTEGGTVKVSPDEVKAGDIIIVKPGEKVPLDGKVRAGKSLVDTSALTGESVPREAAPGTEVLSGFVNKNGVLEVEVDKEYSESTVSKILDLVQNASSRKAKTENFITKFAKYYTPFVVIIALLLAFVPPLIISGALLSDWVYRALVFLVISCPCALVVSIPLGFFGGIGAASKAGILVKGGNYLEALNDVKYAVFDKTGTLTKGEFAVVKLSPASHVKEDELLEYAALAEHFSGHPIAESIREAYGKEVQADRIKDYSETAGFGVRAVVDGAVILAGNAKLMKKAGIQYQKESEIGTVVYVAAGDTFIGSIVIADEIKEDAKRAISALKKAGIKKTVMLTGDAKDTGEAVGEQLSIDEVHAELLPQHKVDRIETLDKQKLPKEKLLFAGDGINDTPVLARADIGVAMGGLGSDAAVEAADIVIMTDQPSKIAEAISIAKRTRTIVWQNIIFALGVKGVFLILGAFGIATMWEAVFSDVGVTLLAVLNAMRVLKVKEM

SEQ ID NO: 8903 - protein, 404 aa, Bacillus licheniformis
LKKSCLMIVCLAFLLAFSAGCKSSTGTKHTEEIKVWDYFTGKQQDLYHELVEQYNRSQDRYKVVTEYIPFNEVKKQLSVGTAGNAMPDAVFLDNVDNASFAAMGVLEDLTEKIEQWGQADQFYEGPLSSAGYEEKYYGIPFASNALALFYNKDLLKNAGISKPPETWSDLKKAAEKTSKGQTKGFALSAVKSEESAFQFYPFLLSSGADLKQLNSKEAASSLQFLTDLIKKGAMSKEVLNATQDDLARQFAAGQLAMMINGSWNIERLEEAEDLNYGITYIPKDQTFASALGGENIAVVKGKNTAGAWDFISWLIDPERLETLTAETGVFPPRKDLLESSSHWKTDDNLKAFFPIIEIASARGPSKDWPKISEALQTALQEALSESKTPKEALDEAAQKISALN

SEQ ID NO: 8904 - protein, 297 aa, Bacillus licheniformis
MIRAIVRKWEGYFYLFPAVLFMLALIGYPLIYNMILSFQNVSLANIASHDISFIGIENYQRIAQDKVFWASLKNTLLYTAGSVVFQFAIGFLLALFFSMKFRLAPFLRGLMMVSWLIPLTVTALLFKFMMASNEGVFNQLLLSWGMIDTPIPWLSDPNMAIWSVIIANIWVGIPFNMLLISAGLSSLPEDVYESASLDGANAFQKFIHLTLPLLRPVITVVMMLGFIYTFKVFDLVFVMTGGGPVDATEVLSTVSYRYSFDEFQFSMGAASANVLFLILLLVSLVYLRLIKKDEVMS

SEQ ID NO: 8905 - protein, 273 aa, Bacillus licheniformis
VKTNQKEWLFNIIGVLVTAGFLFPVYWMIATAFKSDAELFKTPPLLWPETFRTAGFEAVFTSGVAGYFLNSLLISGAAAVIVLILAVPSAYGLARFRIKGKKMFILLFLITQMLPATVVLTPLFIAFNQLNILNTYIGPILTGATLGVPFSVLMLRTFFLGIPKDLEDAAKIDGCSRFTAFIRIILPISVPGIAVSGAVSFFFTWGDLIYSMTFNRNQELWPLTAGIYNVISQYGIQWNDLMAFAVLSVLPVIIIFMLLQKQLVKGLINGSIK

SEQ ID NO: 8906 - protein, 769 aa, Bacillus licheniformis
MKFSDGYWLTREGYHINTPKEAYDRMIDQQSLTVYGPVKAVQKRGDTLDTRMLTVRFSSPLEDMIRVQVFHFQGETPRKPDFQLHTADVEPVITEHDDALTFQSGSLCVEVSKNGWGYQFSRDGQSLTASESNSLAYITSDDGRTFMREQLNIGVGELLYGLGERFTAFVKNGQTVDIWNQDGGTSTEQAYKNVPFYLSNKGYGVFVNHPELVSYEIGSEVVSKAQFSVEGESLDYFVISGAEPKDVLKRYAALTGKPALPPAWSFGLWLSTSFTTDYSEETVTRFIDGMTERGIPLSVFHFDCFWMKEFEWCNFEWDERYFKQPEAMLSRLKEKGLKICVWINPYIAQKSKLFQEGKENGYFLKNSRGDVWQWDRWQAGMAIVDFTNEKARDWYCSKLESLLDMGVDCFKTDFGERIPSDAVYFDGSDPERMHNYYSYLYNKTVFDLLRQKRGEREAVVFARSATAGGQQFPVHWGGDCFASYDSMAESLRGGLSLSLSGFGFWSHDIGGFESTATDDLYKRWTAFGLLSTHSRLHGSESYRVPWLFDEEAADVMRYFVKLKHRLMPYLYAAAHEAHTEGIPMMRAMLLEFPGDNTCHWLDRQYMLGGRLLVAPVFQEDGAVRYYLPKGTWTHLLTGKATEGGEWKEERYGYMGLPLFVRENTLLPLGQESGRPDYDYLDDVTFCLYHLKDGCTAEQTIYNEKGEAMTLRASRHQNTIAVKTTGVQKNWKLLLRGLSVTSVINGAAEALQEGTAVQPKEKERDVFIYF

SEQ ID NO: 8907 - protein, 735 aa, Bacillus licheniformis
MLKTVRIIILGAMCTILSAAGFDPPQPAAAKSQADEYEYPFQDPSLPVQKRVSDLLSRLTLEEKVSLMHQYQPAVPRLGIPAFKTGTEALHGVAWLGEATVFPQAFGLAHTWDRYLIKQIGSAVGDEVRGFHHLDPAANGVNVWAPVVDLLRDPRWGRNEEGYSEDPFLTGEIATAYASGLRGDHPFYLKTVPTLKHFLAYNNETDRGFISSSIDPRNMHEYYLKPFETAISKKAAYGLMPAYNSVNDKPAILSPLLDSTVKRRWAGDDFFIVSDAFDPSGIVNDHKYYDSHEKAHAHAVKAGIDNFTDQGENPELTRNALTGALKQGLISEKDLDQALANTFSIRFRTGEFDPDELNPYSRLTDDVINSPKHQLLAKKAAEKAIVLLKNDRDLLPFNARKNESIAVIGPFGNALYEDWYSGTMPYRKTPLDEIADKIGKDRVSFAEGLEQSGFKSALTGKFVTAGRDGKQPLTAAADKLEKSAAFDAADWGESIFTLRAQANGLYVSLQDDGRLIADQKQPNGWTVKETFQFEQQSDGTFAIKNTANGKYLTAGKDGTLTAAAEKPATAAEKFSKTIIKSGTDEAVQLAKSADKAIVFVGNNPYINGRETEDRKDITLPPAQENLLKAVSKANPNTVLVVTSSYPFALNWAKAHIPAIIYSAHGGQEAGSALADILYGDVNPGGRLTQTWHTSVKELPDMMNYDIIKGKRTYKYFVGCFRSATGYPIQRFATAI

SEQ ID NO: 8908 - protein, 44 aa, Bacillus licheniformis
LQSIRFNLKDKPANKKFFKAMQLDLHGFYRFSAILALYNLGMIY

SEQ ID NO: 8909 - protein, 247 aa, Bacillus licheniformis
MKPAITVKDLYVSYHGAEALRNINFSLDQGMMAGIIGPNGAGKSTLLKSMLQLIPKDKGDVRLLGKPLKDVRKQIAYVPQRNDMDWTFPINVLDTVILGTYPELGLFRRPKKRDKDWAYHCLEKVGMAAYAKRQIGELSGGQQQRVFLARALAQKAELFCLDEPFVGIDVTSEEMIVSILKELRDEGKTVLVVHHDLSKADSYFNELILLNKELIQKGPVSDILNPDVMMKAYESQLPFLQSKRGAI

SEQ ID NO: 8910 - protein, 286 aa, Bacillus licheniformis
MEFIHGLMEYSFLQKSLFTSIMVGIICGVIGCFIILRGMALMGDAISHAVLPGVAISYMLGVNFFFGAVFTGILTALGIGYVSQNSRIKNDSAIGIVFTAFFAVGIILITLVKSSSDLYHILFGNVLAVRSSDMWITLVIGVIILTAVFLFYKELLITSFDPTMAAVYGLPNRLIHYFLMTLLTMVTVASLQTVGIILVVAMLITPAATAYLLTDRLWVMIYLSAFLGALSAVIGLGLSYTYNLSSGAAIVLVATILFGLSFTFSPKQGVLWRAVKSRRKRAALQQ

SEQ ID NO: 8911 - protein, 309 aa, Bacillus licheniformis
MKWKQTLAIAAALILILAAGCSSKSSSEENGKLKVVTTYSILYDIVKQVGGDHIDLYSIVPVGTDPHEYDPLPKDVQKTTDADVVFYNGLNLETGNGWFNKLLETAEKDGDDAPVYKLSKGVKPKHLTAKGKETEEDPHAWLDIENGIQYAKNARDALIKNDPDHKEDYEKNAEAYIGKLQKLHDEAVNRFKDIPKERRVLVTSEGAFKYFASAYGVDAQYIWEINTENEGTPGQMKKIVDTVKKKDVPALFVETSVDPRSMESLSAETGVPIKAKVFTDSIGKPGEAGDSYYKMMKENLDRIHQGLAE

SEQ ID NO: 8912 - protein, 61 aa, Bacillus licheniformis
VVAGFKTFSAGFDAFLISRFHETHSFFLVFPSLYPALKSEKHKKKTAVHPVQQFIGYSARP

SEQ ID NO: 8913 - protein, 108 aa, Bacillus licheniformis
VKSGYEECIKACRECLEACNHCFDKCLMEEEAGMMAECIRLDRECAEMCGYAIQAMTRNSPYAEDICQLCAKVCEACGNECSQHKHDHCQFCAESCFACAEACRKMAS

SEQ ID NO: 8914 - protein, 259 aa, Bacillus licheniformis
MKDSVFQMTSDTYQSLSDSERHLLEYIYQHLDVIATLSIVKLSEDANVSTATIVRLMKKLGYDGYTSFKYALKEKHHLGHAPLMDDIDSQIKQAVLKNEREVLDTIKMLDIGLIEDAIQKISNAEKVYIFARGLSEMIGTEMTIKLQLLGKNCEMHSDPNIIRGKSKTLAKKDLGLFVSLNGETEELVEAAQNFKLQAISTITLTTRIDSRLAKLSEIVLVGFKGEQSFFPDYEVRSRLPLQVLSRIMLDSYVIRTAHS

SEQ ID NO: 8915 - protein, 304 aa, Bacillus licheniformis
MIYTCTMNTAVDLFVETDELLPDVVNRTKDEDYQPNGKGVNISFMLKRLGLDNTALGFTGGFTGRFIENELLNEKIVTDFVEVEGISRINIFINSTREFKIVNKGPLISEARKQELINKIRQIPPGRFLFISGSLPRGVPDDMYLSLSEIAAENKLKLILDISSPVLLDCLSYHPYLIKPNEQELAAFFSRKKALSEEEIIHCGKELLDRGAERVLISRGKDGALYLDRQRTLKATAAKGKVVNTACAGDAMLAVFVGKQELGCSVPEALRHASAAGSLTAFSKGLGDVSKLDQTASQIQITHL

SEQ ID NO: 8916 - protein, 466 aa, Bacillus licheniformis
MKKFKIIAATGCPTGIAHTFMAEEALKQAAAKLGVEIKVETHGQIGVQNELSPEDIKQADGVIVAADKDVGAERFAGKRVLDVPVARGIRDAESLIRTLMNGEAPIYRGQTAAKTEDEPKTGESASIGRKIYKHLMNGVSHMLPFVVGGGVLIALSFLFGIHSADPEHPSYNAFAELLNKTGAFGFQLMVPILSAYIADSMAKRPGLIVGFIGGMIASTGGAGFLGGIVSGFLAGLIIYGLSHALKKMPQSLEGLKAIFLYPVIGIFLIGAVMFFLVEPMTAINEGMKGFLADFQGANPIILGLIIGCMSAFDMGGPVNKAAYVTGTALLAEGNQYFMAGVSAACITPPLVIAFATLLFRKYFSQQDRNAGLVNFILGATHITEGAIPFAAKKPIPVIPILMIGSSVSAILTYSFAVQVPAPHGGFLVLPVVTGAFQWVLSIIIGSLIGAFLYGFYQKRTYEKEKG

SEQ ID NO: 8917 - protein, 143 aa, Bacillus licheniformis
MKTAALIKKEHIYLQETLSSQAEAFDRLAQIAYESGAAKTKQAVIDGLAQREAESTTGFIDGFAIPHAKLKDITEATVIIIQNKAGIEWNALDQTPVTFIIALLIPMPRQAAHISIYYHRCLACLFTKMRGSSCLKPRVLTTF

SEQ ID NO: 8918 - protein, 283 aa, Bacillus licheniformis
MLTNTKKMLLDAQANGYAVPAFNIHNLETVQAVTEAAETLRSPVILAATPGTFSYAGRDYIQAIAETAAARCSIPVALHLDHHEEIDDIRESLSLGTKSVMIDASHHPFAKNTAITASVVQYARQKDATVEAELGRLGGQEDDLIVDEADAYYTDPDAAKEFVEKTGIDSLAVAIGTAHGLYSKEPNIDFERLAAIQKRVSVPLVLHGASGISEQDVRKCIKLGCAKVNIATELKIPFSDKLRRYLHEHADASDPRKYMAPAKEAMKKIVQEKILMCMSNDRY

SEQ ID NO: 8919 - protein, 49 aa, Bacillus licheniformis
LKDKTVLVWTVSAVVYVGIVMLVYSILAGREPIPDENPHDGHALEEHVK

SEQ ID NO: 8920 - protein, 811 aa, Bacillus licheniformis
MDGQKEATLQISGMTCAACAARIEKGLKRLDGVQDANVNLALEKSKIVYDPGQIEVGQLAEKVESLGYQVPAEKAEFAVSGMTCAACANRVEKRLNKLSGVKSAAVNFAIETATVDYHAGAVSPEEMIEAVEKLGYKLELKKDRTADGRAEQREKDIQRQTGKFIFSAILSFPLLWAMVSHFKFTSFIWLPGMFMDPWVQFALATPVQFIVGKQFYTGAYKALRNKSANMDVLVALGTSAAYFYSLYLSIESLGTNRHPDGLYYETSAILLTLIILGKLFEAKAKGRSSEAIKKLMGLQAKTATVVRNGEEMTVPIENVLAGDIMYVKPGEKVPADGEIVEGRSALDESMITGESIPVDKTVGDPVIGATINKNGFLKVRAEKVGKDTALAQIIKVVEEAQGSKAPIQRLADRISGVFVPIVVAIAAITFFIWYLAVSPGEFGTALEKLIAVLVIACPCALGLATPTSIMAGSGRAAEFGILFKGGEHLETAHRLETIMLDKTGTVTNGKPQLTDVRPEPWIDETSFLKLIGAAEKSSEHPLAEAIVEGIKEKGIEPASADSFEAIPGYGIEAAVNEKRILIGTRRLMENRDIDIQDANGEMEELETQGKTAMLAAVDGRFAGLIAVADTIKDTSKAAVKRLHDMGLEVVMITGDNRRTAEAIAAEAGIHHVIAEVLPEGKADEVKKIQAKGKKVAMVGDGINDAPALAAADTGMAIGTGTDVAMEAADVTLIRGDLNSIADAILMSRLTIKNIKQNLFWAFAYNSIGIPFAAVGLLAPWIAGAAMAFSSVSVVLNALRLQKVKLDWRNPS

SEQ ID NO: 8921 - protein, 69 aa, Bacillus licheniformis
MEQKTLKVEGMSCNHCVQAVEGNVGKLGGVESVKVNLNEGKVEVSFDSGKVSLKEIIDTIEDQGYDVAG

SEQ ID NO: 8922 - protein, 100 aa, Bacillus licheniformis
MADHHEHALNPKSSKGKEQITNRLKRIEGQVRGIQKMIENDRYCVDILVQISAVQAAMQKVAFSLLEDHTHHCVANAIKSGEGEEAIEELLDVFKRFSKS

SEQ ID NO: 8923 - protein, 39 aa, Bacillus licheniformis
LSLFLDMFRFAFYNGTNGDLGQNIKEREVFRWQIIMNTR

SEQ ID NO: 8924 - protein, 183 aa, Bacillus licheniformis
MAKKILIVTGDAVEALEVYYPYYRCLEEGYETTIAAPKKKKIHTVVHDFLDWDTYTEKPGYLIDAHASFDEIDPSEYDGIIIPGGRAPEFIRMYDSLLKIVAHFFEENKPVGAICHASLIFTSLREHLKGRELTAYIACKPEVEAAGATYVEEKLHVDANLVSGHDWSNLPEFMREFFKALNK

SEQ ID NO: 8925 - protein, 253 aa, Bacillus licheniformis
MLVAERHQKIVELVNLRSSVRVTELSELFSVTEETIRRDLEKLEKENKLKRSHGGAVSVQTEEREVHFREREITNVNEKKMIAFEAVKHVKSGERIILDASTTAWYMAKALENIPLTVITNSVRVAIELSKKEKVTVISTGGMLLPQSMSYVGPLAERSLDMYHVNKTFLSCKGVDPASGLSDSNEMQALLKKRMIEIADETILMADSSKFGTRAFSQIDRLHDRYRVITDSGIDKANLARLKDITENITIVG

SEQ ID NO: 8926 - protein, 493 aa, Bacillus licheniformis
VTILAFDLGASSGRAYAGHVDGGLIKAEEIHRFPNQPVQAGKHLYWDILRLYHEIKQGILKAKNGCGRISCIGIDSWAVDVGFLDRNGELMGNPYHYRDPYTDGIMTEVLNEIGKEELFSRTGIQLLPFNTIFQLRALKKANSPLLDYADTLLMIPDLLRYFLTGEKKSEFTNATTTQLFNPKTSDWDWELISLLGIPAKIFPKDIAKPGSEAGRLSQSVCGELSVPAVPVIAVGEHDTASAVVGIPAETDDFAYLICGTWSLIGTELDAPLMTKQALDWNFTNEGGAGGTFRFLKNIMGLWLFQRCQADWEKDGISYSSAELVKLAGQSEAFRSAVDPDDPVFLNPVHMPEAIREYCRAAGQHVPETPGQIIRCVLESLAFKYRFTFERIETLTGKEYDGLHMAGGGIRNELLCQYTANVLSRNVWAGPSEASAIGNIAVQAVALDMFWDIQSARKAIKASFPQKTYVPEDTEAWERAYRRYTSQILGAASR

SEQ ID NO: 8927 - protein, 407 aa, Bacillus licheniformis
MMNDRAYALFEEQQKDRGISLSEAKEKLKALKIETPSWGYGDSGTRFKVFQQEGVPRDPFEKMEDASVVHKLTGICPSVAIHIPWDRVDDYGKLKAHAEQLGLAIGAVNPNLFQDDDYKFGSVTNVKAAIRQKATEQLLECVDIAKQTGSKEISLWLADGTNYPGQGDIRKRKNWMYECLAEVYEVLDDDMRLLIEYKFFEPAFYHTDLADWGMAYNLAQKLGPKAEVLVDTGHHAQGTNIEHIVAYLLDEKRLGGFHFNSRKYADDDLIAGAHNPYELFLIFSQILDACRDSDPNVRKTAEHISYMLDQCHNLEPKIPAVLRSVMNVQTQFAKALLINFDEVKKAQEDHDVLAAEAAIREAFEIDVKPLLCAVREEMNVPPDPLKAYAESGYAEKILARGKGGASW

SEQ ID NO: 8928 - protein, 129 aa, Bacillus licheniformis
MKGETHWIIPDGFIPPESSGSLTSHEAICVLNCHEENANLAITVYFEDRPPLEGISETVHGKRTKHIRTSSLHRSGERIPENVPYAIEIASDVPVIVQYSRLDTTQPELALMSTMAYPLKTRGMGVHDE

SEQ ID NO: 8929 - protein, 689 aa, Bacillus licheniformis
MVKYLWSESEAASLRPGLAELVYRSNLIGADRSVCNWGGGNTSMKTTEKDFRGRDIEVMWVKGSGSDLATMSAGQFTGLRLDDIRPLMERSSMTDEEMTAYLSLCMMDGKHPRPSIETLLHAFLPFPHVDHTHPDAIISICCCDNGKEIAEEIYGSRFVWVPYVRPGFALSKMIAEGVKNNPNAELVLMEKHGLVTWGETSKESYDQTIAVIREAEAYIKSRSEDHQPFGGQMVEPLAPEERKRILADILPVIRGAVSGEKRMLVTWCDADDVLEFANSRRAPSLSQVGAACPDHLVHTKRVPAYIPWNPAEQDTEALVDRIKTEIAGFKESYAAYFQRNRHEGDEMFEPAPRVMLIPGIGMVTAGKSLAMAKVSRDLYRRAIAVMKGTEVLGNFVSLNEEESYNVEYWPLELYKLTLAPPEAEFSRKIAFVTGGAGGIGSEACRRLALEGAHVVVADINIEGAEKTAAEINDQYGAERAYAVRMDVTKEEEVQTAFEEIALKYGGIDILVNNAGLATSSPLDETTLEEWNLNMNVLGTGYFLVAREAFKQMKKQGSGGSMVFVGSKNSVYAGKNASAYSSAKALEVHLARCIAAEGGPYGIRANSVLPDAVLQGSAIWDSKWREERAAAYGIEPDRLEEHYRKRTALSVNIYPADIAEAIAYFASEKTAKTTGCMLTVDGGVPAAFSR

SEQ ID NO: 8930 - protein, 25 aa, Bacillus licheniformis
LKQTYSKINKQKRSDTHGEIFMVRV

SEQ ID NO: 8931 - protein, 43 aa, Bacillus licheniformis
MSLYIKRSKDEFQPFFAHQYVPPNGMSAAQKAPATRCQRFLKT

SEQ ID NO: 8932 - protein, 372 aa, Bacillus licheniformis
MKKTLHAPVKLIIAIFMICTFSIGFTEYVVMGILTSISKDLSVPISSTGLLVTAYAGSVCLTGPIVTIFSVKMPRKPVLIGLMSVFVLSNALSFLAPNFTVLLVSRILSASIHGAFFATTMVFVSEMAPPEKRAAAAASMNGGLTIALMLGVPFGSYLGDLFNWRIVFLMIACLGLIGLAGIWLTVPHRKPKVVPKLIHEWDVFKNKQVLFSFAITIFGYSGVFIAYTFIEPMLRHSAGFDSLGITAALFAYGFGGVVGIFYAGKVPFHLLTRSMIGVMIALMAILAAFPFVSGHPAGAIIVTFLFGAGAFAFGTVPLLQTKVVAASEHGTTIATSVSIAAFNLANALGAWIGGLILNASESTHTLPQAVRL

SEQ ID NO: 8933 - protein, 408 aa, Bacillus licheniformis
MRPMKSNASFIMYFVCISAFFASLNQNIYSPIIPLIRDSFHVSVSMVNLSVSLFIFITAAMQIIVGSIVDFKGARFVMMASMIVTVIATIGCAASRDFGLFLFFRVLQALGTAALPLIAATTIGSLFKGTKRGSAMGTYQMLLSLAPAAAPILGGFIGERYNYPGIFWFLTVLSVLLLFGNLFCFPRSHSEKKTNLSAGSLLSHYKDIFKNRAGNAVLILSYLIFFIYFSMIVYLPILLTDHYHLDLQIVGLLYLPIAVSTIAGSVLFKWIQKRLSLRRLFLIGNLTAAGSVVCFAFSHLFSLFAMSAALVLFGVTMGLIPPLFSTMMANEFEENRGSAMGMFNFIRYTGMACGPVISGMLLGMSSSVFVFGCFGIVYAAAALLMTAVMRKAAHTKTLQEPNKKAARS

SEQ ID NO: 8934 - protein, 52 aa, Bacillus licheniformis
LSTNPCPALTIEQMPHLFIMTRIIAVFFSIHHEVRPAYSQLDKPHVSIIDCK

SEQ ID NO: 8935 - protein, 249 aa, Bacillus licheniformis
MTELIMESKHQLFKTETLTQNCNEILKRRRHVLVGISPFNSRFSEDYIHRLIAWAVREFQSVSVLLAGKEAANLLEALGTPHGKAERKVRKEVSRNRRFAEKALEAHGGNPEDIHTFSDFANQTAYRNLRMEVEAAFFDQMHFRNACLEMSHAAILGRARGTRMDVVEVSADMLELAVEYVIAELPFFIAAPDILGVEETLLAYHRPWKLGEQISRNEFAVKMRPNQGYLMVSEADERVESKSMQEERV

SEQ ID NO: 8936 - protein, 406 aa, Bacillus licheniformis
MNQSLKTFSVLSEQYHENPYQYFSYLRESDPVHYEESLDSYFISRYQDVRRVLQNQDVFTTKSLAKRAEPVMRGPVLAQMKGKEHTAKRRIVLRRFIGESLDHLTPLIKENAQRLLAPHVEKGRIDLVNDFGKTFAVCVTMDILGLDKNDHQTVRNWHSGVADFITSLNQAPEDREHSLKCSEQLAEYLNPIIEERRKNPGHDLISILCTSEYEGVAMSDRDIRALILNILLAATEPADKTLALMIYHLLHHPDQMNDVLEDRTLLPQAIAETLRYKPPVQLIPRQLSQDAEIGGVELKEGTTVFCMIGAANRDPEAFEDPDKFNIHRSDLEVKSAFSGAARHLAFGSGVHNCVGAGFAKTEIELVANIVLDQLKNIRLEEDFIYRETGLYTRGPVSLNIRFDAKH

SEQ ID NO: 8937 - protein, 151 aa, Bacillus licheniformis
MNKSEAQQFLSNMYQDIVSEMNTEKIADYFSEDYVQVTDGSHIDLVQFKDHIRTLKNVARTITVSPFHEFLFDERLESAAVRYTVKVVKKNGDRGRIDIITIFKMNGFKIVQCHELSHASEGTKGIEELAKISEAAIEKASSREEKAFSQD

SEQ ID NO: 8938 - protein, 157 aa, Bacillus licheniformis
VENKTYEQAFQAVQDFILKREKRAQHEQQAFAEEAFQEEESMRKHWTLTQLHIISLISESEADVNNAFLAAKLQISKAAVTKAVNVLTKHGMIESHKKPNNNKELYYTLTDEGKKLADIHDRMHEIAKQRYIELFDRFSESELQTVIRFLNEWSKHI

SEQ ID NO: 8939 - protein, 392 aa, Bacillus licheniformis
MEHDWSAFINRDLMVDPPSAEGSLKKLSFAVKDVFAVEGHANAAGNPDWLRTHEPAEKNAEAVDLLLREGARLKGAAHTDELMYSLDGENVHYGTPVNPCAMDKIPGGSSSGSAVAAASGMTDFALGTDTGGSVRIPSSYCGIFGFRPTHGEVSVDGVIPLAKSFDTVGWMSKDIGVLHAAGRVLLSGQEEAGACFNRVYFEKEAWSLLEESDRTQVYAYALGLIDGEFDWCVAADGGLAEWAETFRVLQGLEIWEEHGAWIERTNPVFGPGIAERFEWASSLVISDHVQAFMKREAVRKRLSEWLGEDGLLVIPTAPGPPPLRGLPENELNERRARTMKLTCIAGLGGLPQITVPLPAKNGEPLGLSFIAGCKQDLKLLAWTEKHVLSPQV

SEQ ID NO: 8940 - protein, 349 aa, Bacillus licheniformis
MVDKVRTGILGYGLSGSVFHAPLLSALEDYEIRKVMTSRKEQVKQDLPEAEAVSTIEDITKDPDIDLVIVTTPSGLHYEMAKECIRAGKHVVLEKPMTATAEEAEELINAAKEKGVLLSVYHNRRWDNDFLTIKQLIKEGRLGEVNTFHASYDRFRPNVRQRWREQKGPGSGALYDLGSHLIDQALHLFGMPNGVTAQVTAQRANAETDDYFHVILHYDQRQVILHSGSIVPANGPRYQIHGSKGSFIKYGIDGQEDALRAGHKPAGDEWGADQPEYYGELATVEGDEIRKETVETLPGSYLTYYKQLASSILEGGSLPVTAEEGRDVIRIIEAAQKSSETNQTVFLNK

SEQ ID NO: 8941 - protein, 211 aa, Bacillus licheniformis
MTKTLYITAHPHDERASYSMAAGKAFIESYKEAHPDDEVIHLDLYRENIPQIDADVFSGWGKLQSGSGFEQLSEHEKAKVGRLNELSEQFIAGDKYVFVTPLWNFSFPPVMKAYFDAVAVAGKTFKYTEQGPIGLLTDKKALHIQARGGYYSEGQAAELEMGHRYISIMMQFFGVPEFEGLFIEGHNAEPDKAEEIKQNAIVRAKELGRTF

SEQ ID NO: 8942 - protein, 322 aa, Bacillus licheniformis
MKNQYRVLLYYKYVHIDNPEQFAEDHLKFCKDLGLKGRILVAGEGINGTVSGTVEQTDRYMSEMKSDPRFEDMVFKIDESEGHAFKKMHVRHRDELVTLRLEDDIDPNELTGKYLEPKEFYEAMQQEDTIVVDARNDYEYDLGHFRGAIRPDIKAFRELPEWIRDNKEKLEGKKILTYCTGGIRCEKFSGWLKKEGFEDVSQLHGGIVTYGKDPEVQGELWDGKCYVFDERISVPVNQKEHVIVGRDYFNGEPCERYVNCANPECNKQIICSEENEHRYLRGCTHECRVHPRNLYVKEHGLSEEEVQERLEKLKEEEHAAQS

SEQ ID NO: 8943 - protein, 51 aa, Bacillus licheniformis
MEYPSIYIIKPSFILKQTITMISMKQLDHSINQMLEILTLPAALRKQNSSD

SEQ ID NO: 8944 - protein, 69 aa, Bacillus licheniformis
VSLHDEKEIEKLLENFTPMIKSKLNNTSYQEREDLEQELKMKICEKAEMLLCQEVPGFWEFITELLEVL

SEQ ID NO: 8945 - protein, 193 aa, Bacillus licheniformis
MIDQTLLRAKIKEITRHPLVKHFLSNPRYERLFNHVLEHPDSEEAECLDREFKRFYKKIRMIKYINSMIRIFSVDFDKRVRKNRERFPLMIDESPNLPEPPRGDLLDDVLEQEEELSEHLQDPMLYEAFLQLTDKQKKVLAQIYIHGVSMQEIADSLGESRQNISKIHKRALEKIRELLNSKAEGNDNSESAR

SEQ ID NO: 8946 - protein, 49 aa, Bacillus licheniformis
MDSAFIEEAAKQIGNVGFPAVLAIYLLTRFEKKIDELIELIKEKNETDD

SEQ ID NO: 8947 - protein, 384 aa, Bacillus licheniformis
MEKNKQIPQPIRGEKGAETKIPHNVERDRQNPDMLVPPETDHGTVPNMKFSFSDVHNRLEKGGYAREVTVRELPISDKLASVNMRLKPGAIRELHWHKEAEWAYMLYGKARITSVDQDGRNFIEDVKEGDLWYFPSGLPHSIQALEDGCEFLLVFDDGSFSENSTFQVTDWLAHTPDEVIAANFGISKDVVASLPVEEKYIFQEAIPGCLEKDKVESPNGTVPLSFSYNLLEQEPIVSSGGKVWIADSTNFKASKTIASALVEVEPGGIRELHWHPNTDEWQYYISGQAKMTVFAADGHARTFNYQAGDVGYVPFAMGHYVQNTGDEPLRFLEIFKDDHYADVSLNQWLALVPEELVRQHLDVGSEFTKMLSKEKHPVVKFDKK

SEQ ID NO: 8948 - protein, 132 aa, Bacillus licheniformis
MKHFIICCISVIFVFFAHFLGISILFHLSGAFYQTVGSLLLFTLCYTGLTFVLEPAEKVLILSMKLLGINRRITVFAAEMITIGCLWAAIYTADELLDDVLLTTSAEIMIAVSFFTIDKILYPRQRSGSLLY

SEQ ID NO: 8949 - protein, 161 aa, Bacillus licheniformis
MNKVLFRPGMSIKEIGEQLQGYIAANWKQTLDDHREALLKVFPELEDATYGVYLDHLLPPVFESLEQSGFTTIQNAGKGDFFIGKGLNFRQSMEKWGADNCRSRVFWVVISDQQKQPAGTLLFDFYHSHAGFDVPLSPRIYTLEETERDRIVAHIKQIKEN

SEQ ID NO: 8950 - protein, 92 aa, Bacillus licheniformis
MYKTNILHKGETHENFRSVDTPVFCHAVSAKNAGKACGGSRICEYWRVGGLAALFKTFEAARHDGRHRRRTKRGYREPVRFGFFNKHLKETG

SEQ ID NO: 8951 - protein, 53 aa, Bacillus licheniformis
MLIMESLIGYVCFFTVNFIYDTYIKKAKAPFGHLAVISLVQTAIALGIFFIFS

SEQ ID NO: 8952 - protein, 186 aa, Bacillus licheniformis
LRCSKRMIQHSVFLEGEYTLQDMRSFFFYWLKKYGFIYFILIFLLFVWVFSVNGKLPITVYHSETLELLLNGLLIIVLSIILTSLLIGFFCIRMQIVYRKNERLKRKRTYTINPQGIQIQFKNSDTLFEWYEVTAVTEYKRLILMKTSSSQLILIPKRFFTFENELDSFRELVTTYGQAKKLKLQS

SEQ ID NO: 8953 - protein, 49 aa, Bacillus licheniformis
LHCVTPEHPESSWHSPLKKFLIITAHFYEMKMNIQKGEIHLLKIAILIF

SEQ ID NO: 8954 - protein, 322 aa, Bacillus licheniformis
MKTLDVQALHNAIDQTLEQLKHQSDEFAKVKKAVEGITSLDDALKGKGGDAIRAFYEECHTPFLQFYDTFIEEYSSTLKKIKSALNSLEPNHNGFISQSFLEHQLENGLNAADRTTKHLVSKTNATIAKVSHIVDLPDLNDSGFHEQYHKALKEISTTLEKLHAFDREQTNALKTAENDLETMQRYIARLEKMYTGPKIEITSYQKGAILKPDEMDTLSGNQETAMGVMLKKVGDKKDADVNTLADPDRLKKLATQKVSTKEYTQEELNELKKDYRVFNDTLYRAYIDGDTIVKIEPAYTLPDHVEKSEWETLWNLQVCMME

SEQ ID NO: 8955 - protein, 212 aa, Bacillus licheniformis
LEFTGVYDGVRAAFGYDLATGEIVKGSGDRLMAALNVTPFGKAFKYGKRGFKLFKGEEAGKKVAKVDKGSKAAKDVGKVEPTPSKSAKETPKKTSEGKDKVKDFDLSFATSKLKNGKISANDLESMIPKGTPNNFKASETIKKGYKYNFEIDGKKVEVKWHSPDLNAKEKFPDSNSGNMWTAQIKIQKKLLGQDGKLHKKPSNITHIPVVGE

SEQ ID NO: 8956 - protein, 137 aa, Bacillus licheniformis
MDFSKFDELPDSLSEDTLEKYFNQIVDIYESAKDSISYIELSEAIYQLSERQWHTYKILDDKIKHKIDILIKNILDANSYDLIDNATSIIAYLGLPESFKALQEMIKENPSEEVRELIEETIEELEGNVENPYSGLE

SEQ ID NO: 8957 - protein, 88 aa, Bacillus licheniformis
MPFYAEKPPKKWANLGYNSIALEVDIFDIHSLEMKTLSDTYRGNIEINKVDQGLIEINITGEVTAKIKADTGLIQSINGYINGALEKE

SEQ ID NO: 8958 - protein, 52 aa, Bacillus licheniformis
MKKPEGRKYPLPTGIYKNPLMKGTAVRQIQEALAALYFYPDKGAKNNGIDGY

SEQ ID NO: 8959 - protein, 55 aa, Bacillus licheniformis
LNKLKKDYRVFNDTLYRAYIVGDTIVKIEPAYTLPDHVEKSEWETLWNLQVCMME

SEQ ID NO: 8960 - protein, 119 aa, Bacillus licheniformis
LLNTKFYDGFEGEPELVLSDGENKFVMWNGYFETLLKALLDNNLEKEGIIKEYFYQEGWYDESPWVIEDVQLTINQIKSFDVNKVDTSDGFKKELVELVKEIIQFLENAKNKTVVIEYD

SEQ ID NO: 8961 - protein, 32 aa, Bacillus licheniformis
LPLEEGFFYSAARACNMGTSLNYYASNQTFFS

SEQ ID NO: 8962 - protein, 157 aa, Bacillus licheniformis
MPKGEGKVVSQNKKANHDYFIEETYETGIVLQGTEIKSIRAGRVNLKDAFAKIERGEVFLHNMHISPYEQGNRYNHDPLRTRKLLMHRKQINKLIGLTKEQGYSLVPLKIYLKNGFAKVLLGLGKGKKKFDKREDLKRKDAKREIERAFRDRQKGLI

SEQ ID NO: 8963 - protein, 767 aa, Bacillus licheniformis
VEKEEFMDKLLSFMKEEAYKPLTVQELEEMLEITDSDEYKELVKALVTLEEKGLVVRTRSNRYGLPEKMNLIKGKVSAHAKGFAFVLPEDSSLDDVFIPPSELNTAMNGDTVLVRLSTESGGTKKEGAIIRIIERNIQKIVGTYTETKNFGFVIPDDKKITNDIFIPKHAKNGAVEGHKVVVRLTSYPEGRMSAEGEVIEILGHKNDPGIDILSIIHKHGLPGDFPAEAMEQAGNTPDTIDEKDLEGRRDLRDQTIVTIDGADAKDLDDAVTVTKLKNGHYKLGVHIADVSHYVTEGSPIDQEAYERGTSVYLVDRVIPMIPHRLSNGICSLNPKVDRLTMSCEMLINPQGQVVEHEIFQSVIKTTERMTYSDVNKILVDDDEELKQKYEALVPMFKDMEDLAAILRGKRMERGAVDFDFKEAKVLVDEEGKAKDVVLRERSTAEKLIEEFMLVANETVAEHFHWMNVPFIYRIHEDPDQEKLQRFLEFVTTFGYVVKGTAGSIHPKALQSVLEEVRDRPEEAVISTVMLRSMKQAKYDPQSLGHFGLSTEFYTHFTSPIRRYPDLIVHRLIRTYLIQGKTDEATREKWAEKLPEIAEHTSNMERNAVDAERETDDLKKTEFMLDKIGEEFDGVISSVTNFGMFVELPNTIEGLVHVSFMTDDFYRYDEQHYAMIGERTGNVYRIGDEITVRVVDVNKDERNIDFEIVGMKGSRRRQKPEPKQKKASKKEAPSADKGEWFTKPKKKKVKKKRGFQNAPKQKRKKKKK

SEQ ID NO: 8964 - protein, 248 aa, Bacillus licheniformis
MKIVKPQPFTFKGGKKAVLLLHGFTGNTADVRMLGRYLNEKGYTCHAPQYKGHGVPPEELLSTGPEDWWKDVMDGYEYLKSEGYEQIAACGLSLGGVFSLKLGYTVPIKGIVPMCAPMYIKSEETMYEGVLDYARNYKKFEGKTAEQIDAEMEEFKKTPMNTLKALQDLIADVREHVDMIYSPTFVVQARHDHMINTDSANIIYNEVETDDKQLKWYEESGHAITLDKERETLHKDVYQFLETLDWQT

SEQ ID NO: 8965 - protein, 57 aa, Bacillus licheniformis
LWFDNFHDSLSPFHMYSSTFSLETNFINRPAPSDKDRQIGKRPDLNIRPHASLSYTK

SEQ ID NO: 8966 - protein, 76 aa, Bacillus licheniformis
MAAFLTVLLVIVSIVLIVVVLLQSGKSAGLSGAISGGAEQLFGKQKARGLDLILHRMTVVLTVLFFFLTIALAYFV

SEQ ID NO: 8967 - protein, 94 aa, Bacillus licheniformis
VKNTGIVRRIDELGRVVLPVEMRRVLNINEKDPLEIYTDGENIILTKYAANMACLMTGDITTKNKTYAGGKIVLSPRGAEMLLEDMMAALSEKK

SEQ ID NO: 8968 - protein, 76 aa, Bacillus licheniformis
MVKKIHIKRDFVLQYMIEHNLSLNQLAIEIGVSPATLSRVLNGERRPGQLVIGKMIQYFNKKFEDLFYYKDVDKSQ

SEQ ID NO: 8969 - protein, 133 aa, Bacillus licheniformis
MTNFGHHLRQLRERKKLTVNQLAMYSGVSSAGISRIENGKRGVPKPATIRKLADALKVPYEELMASAGYISASTVQEARSSYDSIYDIVSQYDLEDLSLFDSEKWKVLSKKDIENLDKYFDFLVQEASSRNKN

SEQ ID NO: 8970 - protein, 132 aa, Bacillus licheniformis
MTRFGERLKELREQRSLSVNQLAMYAGVSAAAISRIENGHRGVPKPATIRKLAEALKMPYEQLMDIAGYMRADEIREQPRGYVTMQEIAAKHGVEDLWLFKPEKWDCLSREDLLNLEQYFHFLVNEAKKRQS

SEQ ID NO: 8971 - protein, 225 aa, Bacillus licheniformis
MEVLQQLWTYYAQNGGYVLGEFYRHFLMSAYGVLFAAVVGIPAGIFIARYRKISKWVFSITNVIQTVPALAMLAVLMLVMGLGANTVILSLFLYSLLPIIRNTYTGIASIEHAYLESGKAMGMTKFQVLRMVELPLALSVIMAGLRTALVIAIGITAIGTFVGAGGLGDIIVRGSNATNGTAIILAGAIPTALMAIIADLFMGWLERALSPVKHHKGKTPNPDTA

SEQ ID NO: 8972 - protein, 305 aa, Bacillus licheniformis
MQTKKLRRLGAVMLVLSLLISGCALPGLGGASDKTIKIGAQNLTESEILANMISLLIEHDTDLNTVLVKNLGSNYVQHQAMLGGDIDISATRYSGTDLTSTLGREAEKDPKKALRIVQQDFQKKFNYKWFDSYGFDNTYAFTVTKELAEKGNYETISDLKKDADQLKLGVDNAWLKRKGDGYPGFKQEYGFSFGSTFPMQIGLVYDAVKNGKMDIVLAYSTDGRIKAYDLKLLKDDKRFFPPYDCSPVVPEKVLKEHPELEETINKLIGKIDTETMQELNYEVDGKLKEPSVVAAEFLKKHNYFE

SEQ ID NO: 8973 - protein, 217 aa, Bacillus licheniformis
MNQLVQFLQHNGGEMLYKTWEHLYISIFAVLLGIIFAVPLGVVLTRMKKGAGVVIGVVNIIQTLPSLAILAFFIPLLGVGKIPAIVALFFYSVLPILRNTYTGVKGVNQNLLESGKGIGMTAWEQIRLVELPLSVPVIMAGIRTSTVYLIGWATLSAFIGGGGLGDYIFIGLNLYQPEYIIAGAVPVTILAIVIDYILSKTEDKVTPQGLKGMKEVS

SEQ ID NO: 8974 - protein, 379 aa, Bacillus licheniformis
LLKLENVSKVYKGGKKAVKNINLDIAKGEFIVFIGPSGCGKTTTMKMINRLIEPTSGSIYIDGENIMDQDPVELRRKIGYVIQQIGLFPHMTIQQNITLVPRLLKWPEEKRKKRAEELLQLVDMGPEYLNRYPHELSGGQQQRIGVLRALAAEPPLILMDEPFGALDPITRDSLQEEFKKLQKSLDKTIVFVTHDMDEAIKLADRIVILRAGEIVQVGSPDDILRKPADEFVEEFIGKERLLQSRPDIEHVEQVMNPNPVTITSEKNLTEAIQVMRERRVDSLLVVDEHNVLKGYIDVEIIDQNRKKSVTVGEVVNENVYSVQKGTLIRDTVRKILKRGFKYVPVLDEEGRLVGIVTRANLVDIVYDSIWGDEETLVQR

SEQ ID NO: 8975 - protein, 179 aa, Bacillus licheniformis
LEENALKVIEQAEEHFIEKIAENMNTYGLSSTVGRVLGIIYMNRKPMTLNELSEETGMSKTRMSQVVREMIDLNIAEKVFEKGVRKDLYDVEQDYYQTFISLFTANWSKVAKKNRMIGKKIRKELLEALEEEGLTPETEAKINELLAETKQWIDYCEWLDNLIAFLESEEIFKHVPKPS

SEQ ID NO: 8976 - protein, 210 aa, Bacillus licheniformis
VFAFIIHVFVSLFAVTNPIGNVPIFLALTEGYEAKERTALARKAAVLSFLILIAFLIFGEFIFRLFDINIHALRIAGGIFIFGIAYNLLNAKQSHVQSLHHAEHRESKEKEDISVTPLSIPIISGPGTIATVMSLSAGSRSLVHFGGMIIGIAAVLLLTFAAFHYSTLISNKLGQTEMNVITRLMGLILAVVAVGMIGTGLKGMFPVLAG

SEQ ID NO: 8977 - protein, 259 aa, Bacillus licheniformis
MTCSKCGHQTDGGKFCEQCGSSLAGGSDGGKGAAETPQAARYAEAAKQASSMYFSYCLKVLKRPFIEMKNAGEQHVLNSITTMVIFALSVPLMFYFGLKGFFDAMGDYSGVFGRSYAMPTFFDIVVKPAVTFAIYIFLLFVFTYAGVRIRGVQAAFKEVLGRFGAVLIPFVALLLAALLLSFMQTGLFIYVLFFALCGIAFLIPPAVISSYHEKAEGAVDTIYATLIVYLLTFMSVRIMGDLFLEYIGRIGGSILGRLF

SEQ ID NO: 8978 - protein, 147 aa, Bacillus licheniformis
MDFCKECGRERTKNALYCKHCGARADEERASDPAARYQRAMTRKRIIIMAAIAACLILLFAGYKTGEALTSKEKLISDFEAALDQKDAKKAAKLLQSSDVDLAVTEKNVKPLLDYLKEHPDEDHILKKRCRPSIDDDRKKGQAFLDL

SEQ ID NO: 8979 - protein, 315 aa, Bacillus licheniformis
MKRFKWFALFAALILLLAACGNQDKDQSAEKNGSKDSYTVKHAMGTATIDGTPKKVVVLTNEATEAVLALGVKPVGAVQSWLGDPWYDHIKDKMKGVENVGTEAATNIEKIASLKPDLIIGNKIRQEEVYDKLKAIAPTVFAETLSGEWKNNFKLTAEALNKKAEGEKVIADFDKRVEDIHEKLGDKVKQKVSLVRFTDADTRIYHKGSFAGTILDQLGFARPKGQEANDLGQMEVTKEQIPDMDGDVLFYYTYETGDDKASAIEKDYVNDPLFKNLNVSKKGNVHKVSDAIWNTAGGVLAANLMLDDIEKYFLK

SEQ ID NO: 8980 - protein, 130 aa, Bacillus licheniformis
LTKFLLSGFYLFGLVMLSNWSISFGEIFGAGNSAVFQLSEAVLFTFIIGCYTGLPLIYAKFTRSETLFFTNQKVFLITLGLGVLLSCSAYSLQQALSPIAIALLSIIGFLIVGISGFLPAWFLKPAKNLR

SEQ ID NO: 8981 - protein, 39 aa, Bacillus licheniformis
LFSDNMAISMPKAIIKEIVSYAVIFITPFQKGMSKTSLE

SEQ ID NO: 8982 - protein, 210 aa, Bacillus licheniformis
MQSKTVYLYAFHTMSDWEYGYLMAELNSGRYFKKDAAPLKVMTIGVNKEMVTTMGGLRIKPDISLDEWTPESADLIILPGGNTWGEKIHQPILKKAGEALELGAMVAAICGATAGLANSGYLDSRKHTSNDLAYMKMVCPHYKGEPFYEMGPAVSDGNLVTASGAAPLEFAREVLKKLDVFAPDTLDSWYQLNKTGQREYFFKLMNSINK

SEQ ID NO: 8983 - protein, 430 aa, Bacillus licheniformis
MPYIVDVYAREVLDSRGNPTVEVEVYTESGAFGRALVPSGASTGEYEAVELRDGDKDRYLGKGVLTAVNNVNEIIAPELIGFDVTEQVSIDKLLIELDGTENKGKLGANAILGVSMAVARAAADFLQIPLYQYLGGFNSKTLPVPMMNIVNGGEHADNNVDIQEFMIMPVGAENFREALRMGAQIFHSLKSVLKEKGLNTAVGDEGGFAPNLGSNEEALQTIVEAIEKAGFKPGEEVKLAMDAASSEFYNKEDGKYHLAGEGVVKTSAEMVDWYEELTSKYPIISIEDGLDENDWEGHKLLTERLGSKVQLVGDDLFVTNTKKLAEGIKNGVGNSILIKVNQIGTLTETFDAIEMAKRAGYTAVISHRSGETEDSTIADIAVATNAGQIKTGAPSRTDRVAKYNQLLRIEDQLAETAQYHGIQSFYNLNK

SEQ ID NO: 8984 - protein, 511 aa, Bacillus licheniformis
MSNKLAALIILDGFGLRDETVGNAVAQAKKPNFDRYWNKYPHQTLTASGEAVGLPDGQMGNSEVGHLNIGAGRIVYQSLTRVNVAIREGEFEQNETFLAAMKHVKEKGTNLHLFGLLSDGGVHSHIHHLYALLKLAKKEGVENVYIHGFLDGRDVGPQTAEKYIKELQDQIEEIGVGEIATLSGRYYSMDRDKRWDRVEKAYRAMAYGEGPKYQNPLDVVKDSYENGIYDEFVIPSVITKENGEPVATIKDNDAVIFYNFRPDRAIQISNTFTNDDFRDFDRGDKHPKNLHFVCLTHFSETVDGYVAFKPVNLDNTVGEVLSQNGLKQLRIAETEKYPHVTFFMSGGREEKFPGEERILIDSPKVATYDLKPEMSAYEVKDALVKEIEAEKHNAIILNFANPDMVGHSGKVEPTVKAIEAVDECLGEVVDAILAKGGYAIITADHGNADVLITEEGKPHTAHTTNPVPVIVTKEGVTLREGGILGDLAPTLLDLLGVEKPKEMTGSSLIQK

SEQ ID NO: 8985 - protein, 253 aa, Bacillus licheniformis
MRKPIIAGNWKMNKVLSEAVSFVEEVKSSIPAADKAEAVVCAPALFLEKLTSAVKGTDLKVGAQNMHFEESGAFTGEISPAALKDLGVEYCVIGHSERREMFAETDETVNKKAHAAFKYGIVPIICVGETLEEREANKTNELVADQVKKALAGLTTEQVAASVIAYEPIWAIGTGKSSTAQDANEVCAHIRKTVASEFGQTAADSVRIQYGGSVKPANIKEYMAESDIDGALVGGASLEPQSFVQLLEAGQYE

SEQ ID NO: 8986 - protein, 394 aa, Bacillus licheniformis
MNKKSVKDIDVKGRVVFCRVDFNVPMKDGKVTDDTRIRAALPTIQYLTEQGAKVLLASHLGRPKGQVSEELRLTPVAARLGELIGKEVKKADEAYGDAVKAQISEMKDGDILVLENVRFYPGEEKNDPELSKAFADLADVYVNDAFGAAHRAHASTAGIAEHLPAVAGFLMEKELEVLGKALSNPERPFTAIIGGAKVKDKIGVIESLLEKVDNLIIGGGLAYTFVKALGHEVGKSLLEEDKIELAKSFMDRAKEKGVNFYMPTDVLVADDFSNDANTKIVPVSEIPSDWEALDIGEETRKTYADVIKNSKLVVWNGPMGVFEIDAFAKGTRAVAEALAEANDTYSVIGGGDSAAAVEKFGLADKMSHISTGGGASLEFMEGKELPGVKALNDK

SEQ ID NO: 8987 - protein, 43 aa, Bacillus licheniformis
LVLDERSAIMKADKGRGHTLPFPFSISAPLSRPGISVFRLVKH

SEQ ID NO: 8988 - protein, 335 aa, Bacillus licheniformis
MAVKVGINGFGRIGRNVFRAALNNPEVEVVAVNDLTDANMLAHLLQYDSVHGKLDAEVSVDGSNLVVNGQTIQVTAERDPSKLSWGEQGVEIVVESTGFFTKRADAAKHLEAGAKKVIISAPASEEDITIVMGVNEDKYDAANHHVISNASCTTNCLAPFAKVLNDKFGIKRGMMTTVHSYTNDQQILDLPHKDYRRARAAAESIIPTTTGAAKAVSLVLPELKGKLNGGAMRVPTPNVSLVDLVAELDKEVTAEEVNAALKEAAEGELQDVLGYSEEPLVSKDYNGNTNSSTIDALSTMVMEGSMVKVISWYDNESGYSHRVVDLAAYIAKQGL

SEQ ID NO: 8989 - protein, 346 aa, Bacillus licheniformis
MNQLIQAQKKLLPDLLDVMQKRYKILQYIRLTEPIGRRSLAASLGISERILRAEVQFLKEQNLLEIKTTGMILTPEGSDLLKVLEDTMKDVLGLTHLENTLKERLNLDEVIIVSGDSDQSPWVKKEMGRAAVACMKNRFTGENIVAVTGGTTLEAVAEMMTPDSKNRKLLFVPARGGLGENVRNQANTICAHMAEKASGTYKLLFVPGQLSKEAYSSIIEEPSIKEVLQTIQSSSMVIHGIGDAKTMAERRNTPKEDLKKIEENEAVAEAFGYYFDRHGEVIHKVHSVGIQLEDLDSIPNIIAVAGGSSKADAIEAYFKKPRNTVLITDEGAAKQLLREASSLNIN

SEQ ID NO: 8990 - protein, 335 aa, Bacillus licheniformis
MSEQHFKNTKYSVLNLSPIVQGGNAEQSFKQSMDLAQHAEKWGYHRFWLAEHHNIEGVASSATSVLIGYIAGGTKKMRIGSGGIMLPNHSPLVIAEQFGTLESLYPGRIDLGLGRAPGTDQLTARALRRNISSGEDFPEQLEELRQYFKPSGNVRNHVRAIPGEGLDVPIWLLGSSGFSARLAGELGLPFAFAAHFSPANTLPALELYRSSFKPGVLKEPYAMVGVTVIAADTDAKAQRLATSHYQKFLDLVRGAPTQLKPPVDDMEQIWTPREKAMVNEQLSSTIIGGPDSVKEKLEEFIRTTQANEIMINSETFNHADRLRSFEIIADVWKNG

SEQ ID NO: 8991 - protein, 455 aa, Bacillus licheniformis
MEKDMQKLERTMTSRHIMMMALGGAIGAGLFKGSSKAIDLAGPSVMIPYLIGGVILLFIMQGLAEMAVRNSEARTFRDLVQSILGPYAAYFLDWIYWKMWVLNIAAEAVVAAIFLQYWLPGLPIWVLALFVSLVITSVNLLSVKSFAETEYWLALIKITVIVVFIISGFILLFFSFGQHSAVGFTHLTDHGGFFPNGAGGLITAMLVVIYSYGGTEIIGVTLAETKNPEKVVPKAVRGTLTRIIAFYLLPFFVIVSLIPWNQVNGVSESPFVMVFKMIGVPGADHLMNAVILLAVISSMNSGLYGASRILYTQASDGRMPKIFSRLSARKVPVYSILLCTSFLYLGVLFSLFAGSQTFEYLMGSLGYTVLVIWMLIAAAHLKSRKRNQTAGNGYYVKWFPYTTWVAIISLTAILIGVILTTSIVITLVTAGIYLLISAAYFFKGRNQTAGQTAAS

SEQ ID NO: 8992 - protein, 40 aa, Bacillus licheniformis
MPIFYCSRSLCFLLPEIYSYNIRADLHFVNIKSDAKKIKN

SEQ ID NO: 8993 - protein, 157 aa, Bacillus licheniformis
MKKLLFMVILSVLTLVFGSSSVSFAKDIPEDRYTTPTDAEFSQIKEILNEADVETGNLQKDYGVIVNDPAEKVGVISDIPAEKDDWSHVSFHSYYVDLNSGTLIADVQFEFTQNDDGTSETEYKNVTNGGRYFVKMDQDGNVINEATTGDMSILWKY

SEQ ID NO: 8994 - protein, 308 aa, Bacillus licheniformis
MNVVIEAKGLMKSYGAKTVVNHVDLQVEKGEIYGFLGRNGAGKSTFMNMITGIIQPTAGSFLLLNEASIESVKHRIGVLPDYLTLYDSMTAVGHLKYFAKLNGRTVSTERCEEVLERVGFTEHTEKKAGAYSFGMKKKLGIAQAIIHDPELIFLDEPTSGVDAESALHIQKLIMDLQKEGKTVFMTSHNLHEIEKICTRIAIMKNGRILMEGTLDELRRHFMSNISVHIRHSNIPEQHFGLIDRFLESAGENVQFKHHEISIIVNSEEKIPAIVRVLTNCKVGIYRIHVDEPSLEDIFIDSSKERVVS

SEQ ID NO: 8995 - protein, 229 aa, Bacillus licheniformis
MRAVCLNEFISLFKSIKSIIVIIIMFWVSYKTAGLIERAPADVVRELDLGSDAGAIGTAVIVFALGFLFIAGLSHDMINREVHTRTVRFLVTKTSRIKIILGKFLGVWLFWFFCMLVSYALVMIASKEFLWLSYADSMAFLTAAISLNLLFSIVISRPAVSMFFGIVFALVFPAVSLWAVYSENGMITWFKYITPYYYSVLGGSFIFINFVYAAIVLCGAIVLFKRRDL

SEQ ID NO: 8996 - protein, 240 aa, Bacillus licheniformis
MTNGTIHNKDGFLNRIAERLGRNRRSAGVTVPDYIHQPQHRVYQGYTQDELVGVLKDHCRKIHTELIETDVIGLHDALYEQAARFGGGPVMIPKDDRFKEYGLSGLLTDKWPNEGTKVWEWDAAAGDENIQRAEQANIGVTFSEITLAESGTVVLFSSKDKGRSVSLLPTTYIAIVPKSTIVPRMTQASAIIKQKIADGDVIPSCINYVTGPSNSADIEMDLVVGVHGPVKAAYIVVEDR

SEQ ID NO: 8997 - protein, 477 aa, Bacillus licheniformis
MAMKIGTQKFKERVSDGLDNEFMRGAVSSAQERLRARRLEAAKELGNWEEWRSLAEEIRQHVLENLDYYLEQLAENVAKKGGHVFFAQTAEEATGYIRDVVKKKNGKKIVKSKSMVTEEINMNEALESDGCEVVETDLGEYILQIDDHDPPSHIVAPALHKNKEQIRDVFKERIGYRNTEKPEELVMHARAVLRKKFLEADIGITGCNFAIADTGSVSLVTNEGNGRLVTTIPKTQITVMGMERIVPSFDEFEVLVGMLTRSAVGQRLTSYITALTGPRLPGEADGPEEFHLVIVDNGRSNILGTEFQSVLQCIRCAACINVCPVYRHVGGHSYGSIYSGPIGAVLSPLLGGYDDYKELPYASSLCAACSEACPVKIPLHELLLKHRQRIVEKEGRAPISEKLAMKAFGLGTSAPSLYKMGSKWAPAAMKPFKEDGKITKGPGPLKQWTQIRDFPAPNKSRFRDWFEDRRKEKGEDK

SEQ ID NO: 8998 - protein, 238 aa, Bacillus licheniformis
MKVSLFITCLVDMFQSNVGKATVELLERLGCEVDFPEGQICCGQPAYNSGYVKDSKKAMRRMIETFESAEYVVSPSGSCAFMFKEYPHLFRDEPAWAEKAQRLADKTYELTDFIVNVLKIEDVGATLEKKATYHTSCHMTRLLGVTDAPMKLLRHVKGLEFTPLPRKHDCCGFGGTFSVKMSQISEQMVDEKVACVEETAADVLIGADCGCLMNIGGRIGRKNKPIEVMHIAEVLNSR

SEQ ID NO: 8999 - protein, 246 aa, Bacillus licheniformis
LKYKQIKTKKIYEEVAEALLESIKSGELEPGDKLDSVQALADSFQVSRSAVREALSALKAMGMVEMKQGEGTYVKRFEPEQISIPLSAALLMKKKDVAELLEVRKILEIGAVSSAAQKRTEDDLGRMQEALEDMKLADGNGELGEKADLAFHLALAGASQNDLLKGLMNHVSSLLIETMRETRKIWLFSKNTTVKRLYEEHEAIYQAVKEKDGQKAEQAMHNHLTNVENVLASYFEETKQADEPAI

SEQ ID NO: 9000 - protein, 563 aa, Bacillus licheniformis
MGWTQDYTPLGNSLLLSSLAALIPILYFFWALAIKRMKGHTAGLTTLLIALVLAVFVYGMPAQQAVMSASQGAVYGLLPIGWIIVTSVFLYKLTVKTGQFEIIRSSVLSITDDRRLQALLIAFSFGAFLEGAAGFGAPVAISAALLVGLGFNPLYAAGICLIANTAPVAFGAIGIPIIAVEGPTGIPAMDISKMVGRQLPFLSVFIPFYLIIIMSGFKRALEVLPAILVSGVSFAVTQYVSSNFLGPELPDILSAIVSLIALAVFLKFWKPKTTFRFSQEKEMAAAAEAQQLEHQKASYSAGQIFKAWTPFLLLTAMVSIWGIPSVKQALTGHYEGSNPLLLFINDIGGRLTFAPGVPFLHNQILDGSGKPLEALYKLDLAGSAGTAILIAAVLTKFVTGMPWKEWGAVFTDSLKELGKPILTIASVVGFAYVTNSSGMSTTLGMSLAMTGSMFAFFSPVLGWLGVFITGSDTSANLLFGSLQKMTAQSVGMEPVLSVAANSSGGVTGKMISPQSIAVACAAVGLAGKESDLLRFTLKHSLFLLFLVCMITFLQHHLFSWMIP

SEQ ID NO: 9001 - protein, 436 aa, Bacillus licheniformis
MNLHVQQQQTAKLHLTQGLAQAIHMLQYSSAELNSRIDELSLENPLIERKDSDIPRSFYHKTNRHLQNEGISRSETAHSREDVKSALKRQALDLQLSSREKRVFSYLVESLDPNGYVTEDIAFIASELAVTREEAEEVLGKLQTLDPAGIGARSLQECILIQLKRLPKETAKAEKVISSYFDLFAKKGWKELSERAGLSLSELQDIQDLVAELSPRPGLIYGTDDGEVYVEPDLIISAEDGKLVLELSSRSFPDIQLNAFYEPFLERQSKDEATAYISDKFKQWKWLDNALRQRRETMRRVMAEIMVRQKDYFLKGKDELKPLTLKEIADALGVHESTVSRAVKGKIVQTPFELCELKRFFSAKVKDAADGHASSHTVKAHLRRLIDEEDKMKPLSDQKLADLLNEKHGVVISRRTVAKYRDQLNILPSSVRKRYQ

SEQ ID NO: 9002 - protein, 71 aa, Bacillus licheniformis
LTELFSVPYFIENFKTHIEMHPNEDKIHAMNSYYRSVVSTLVQDQLTKNAVVLKRIQHLDEAYNKVKREEA

SEQ ID NO: 9003 - protein, 325 aa, Bacillus licheniformis
MAITYSMDSLKHKLAEILDVIPRHSSVVYLDYPLYGNVGDLLIMKGTEAFFEAYGIKVRERWNAENFIPGRRIPKDAIIVCQGGGNFGDLYPHFQQFRERVVEHYPDNRIVILPQSIYYEHEENIIKTRGILAAHPDLHLFTREKASFDFAVKRFEEVKNIKMMPDMAHQLWPIAAPAEKPSESVLRLIRTDKEANSSLQKAGEPDTYDWNVILSEGDKRGIKRLQTINVLNKKAGNPLPIASYWKRFSDSLVDKSIRFFSRYESVVTSRLHGHILSCLLGKENVVIDNSYGKNANYYNTWMKDIPNTKLIQNHQTEAEKPPVHV

SEQ ID NO: 9004 - protein, 381 aa, Bacillus licheniformis
MSQNKRIYLSPPHMSGDEERYVAEAFRTNWIAPLGPLVDTFEEKLAAYAGTSGAAAVSSGTAAIHLALKLLGVGKGDTVFCSSFTFVASANPIIYEQAEPVFIDSERDTWNMSPEALERALDEAERARNLPKAVIVVNLYGQSAKMDEIMAICDRFAVPVIEDAAESLGSVYKGRKSGTFGRFGIYSFNGNKIITTSGGGMLVSDDEDALKKARFLATQAREPAIHYQHEKAGYNYRMSNVLAGIGIAQLAVLDDRVHARRAVFERYKEALSGIEGIEFMPEAGMSNRWLTTLTLDTAKIQTTPADIIEQLANENIEARPLWKPLHRQPLFKGAAFYPHDDQGSVCCDLFQRGLCLPSGSSMTRKEQDRVIQIVADRIKYK

SEQ ID NO: 9005 - protein, 208 aa, Bacillus licheniformis
MQNVVIIGAGGHGKVVRELVKERPDTELAGILDDRYAELHVENGLHRGPSAAAEELARLHPDAKFVLAVGQNSIRQQLYERIGLPLDRYAVLIHPSAVVSGSARIQNGAVVMASSVIQADADVGIHAIVNTGAIVEHDNRIGDYVHLSPGTVLTGGVTVMEGAHLGAGTAVIPGKTVGRWSVTGAGAAVIHDIPDNCTAVGVPARMIK

SEQ ID NO: 9006 - protein, 200 aa, Bacillus licheniformis
VLAKRFFDLALSVILLVALSPAMILTACLIRWKIGSHVLFRQTRPGLNGEPFTLYKFRTMTDERDAAGNLLSDEKRLTKTGRLIRKTSLDELPQLINVIKGDLSLVGPRPLLMEYIPLYTKRQWRRHEVKPGITGWAQINGRNKVTWEEKFELDVWYVDHRSFLLDLKILLLTVVKVLKSEGVSQDRHVTAEKFTGRRNA

SEQ ID NO: 9007 - protein, 515 aa, Bacillus licheniformis
LNKTFVLNLGANMASFLLSVLFSMWLTPYVIKTLGVEAFGFVHLTQNMINYFSIITVALSAVVVRFFSVSAHRGALDEARGYMNTYIVSSLVLSVILFFPLGGTVFFIDQIIRVPAGLLGDVQVALLIGSLLFLLTFVMSGFAAGPFFANKIYITSTIQAIQMLIRVLSVLLIFAWFAPKIWHIQLAALIATASACILSIFFFKRLIPWFTFRVRDMSFAKCKKLLQAGGWSSVSQVGILLFLQIDLMVANVMLGVSESGMYAAIIQFPLLLRTLSGTLAAVFSPTITLYYSKGDKEGLVRYANQAVRFNGILLALPAALLGGLAGPFLSLWLGPSFEHLKWLLLIHAGYLVVSLSPAPLFYIFTAYNKLRTPALTTVAFGVVNLLLAIVLSGPAGLGLYGIALAGAAALTLKNVVFTPIYASKITGERKRVFYKGIYGPVAGASFTLAVCYALQYLFSIVSLLSLFVTALAATLAYGLFAYFVMLTKAERRIVTTKLQAYRCSLSFPFQKGFFK

SEQ ID NO: 9008 - protein, 339 aa, Bacillus licheniformis
MKPFISIIVPMYNVEDYIEECVDSLRRQTLKNIEIILVDDGSPDRSGEIARTYCSLDARVKVIHKKNGGLSSARNAGLQAATGDYVGFVDGDDFVLPAMFENMYAAAKKDDLDIVMCGYHKHSDTEDAYFPPPLPTDRLLLSWDIKRELKKAHETRFIWYVWRNLYRRDLLKKNQLYFFEDIRFAEDSPFNLYAFYAAKRVRAIDEDYYMYRCNPDSLTEAPFKPYMDESLKRQYRAKRRFYETFQLLDECADDLETYTCKHQIPMLLANACAEPKPSKQVRRHIKDILSYRMVQSCVKATSLRNRNLLIGQRLVLLLCKLNIPILLELFFKRNLPSKG

SEQ ID NO: 9009 - protein, 359 aa, Bacillus licheniformis
MTFQELKINLAEWLLLKVKYPSEYVMGTPGLRRFEQYKGKKKIILTLIPSHDNLGDHAIALASRTFIENEFPDFELIEIGINDIYKHAKALMRIRHPEDMVFIIGGGNMGDLYRNEEWTRRFIIKTFKHYKIVQLPATAHFSETLRGKKELKRAKKIYNSHRRLFMMARDDTTYQFMKQHFSNQTIVKQPDMVLYLKKEQQSEREGVLVCLREDKESFLRPEERKKLLKAVGDEYGGAKTFTTTIGRRVSRVSREKELNRLWDQLRGAEVVVTDRLHGMIFCAITGTPCVVIRSFDHKVLEGFRWLKDVPSMKLVENPDAAEVLGAIEELVKTGDSHRETPARDHYFADLRRKIMGDVQ

SEQ ID NO: 9010 - protein, 343 aa, Bacillus licheniformis
LENPAVSLLVAVYNTEAFLPNCLQSLISQTLKNIEIIIVNDGSTDGSQKIIDHYARKDGRIKTIQQDNQGLGAVRNKGIEAASGEYLAFIDSDDWIEPDYCQSMYEKAKDEDADLVICDYAVEIQDTEKTVCPDIGKNYEGKPKEAFMKDLLKGKVSGFSWNKLYRRSLIERHKLVFPLRDELENIEDQYFSFRCLLYANTAAFVTKPLYHYRVHLSSIVQKYQAGLFEDGLALYEANLDCLTKHGELPALKEALHVFIVNHGCISILNECKSRNKNPSIEKYKNIRSICACPEFRGKISAVDMSAFDSKKKLLLMLIRLRLMPAVYGFAAIYQKMIEHRMKK

SEQ ID NO: 9011 - protein, 367 aa, Bacillus licheniformis
MAVYMLNMGIVFVWSWFAKMYGREDHRLPTGYRPNAILTVVPLASLIIVAGLRYKVGTDYHTYMLLYELAGKYNSIWEIFGFGTGKSSTDPGFTALLWILNQISADPALMFAVVAAITYIYIVKTLYVYGRPFELSMFLFIGMFHYYASFNGIRQYMAAAILFWAVRYLIDGKLVRYMIVVLICSLFHSSALIMIPVYFIVRRKAWSPVLWCLMLVFLAGTFLYQKFLSVFLVVLENSQYGHYEEWLMKNTNGMNVIKIIVLLLPLALAFCFREQLRKRWPEVDYIVNLCLIGFLFGILATKDVIFARFNIYFGLYQLILVPYFVRIFEPKSNALLYVLILICYFLYSFMLMPFDSSVLPYRTIFER

SEQ ID NO: 9012 - protein, 386 aa, Bacillus licheniformis
MNDGSVRPKRVLHIVSGMNRGGAETMIMNIYRHTDRRHIQFDFISHREETCDYDPEIITRGGRVFYVPSIGRSGPVAYIKNIRRILVEKGPYAAVHAHTDFQTGFAALAARLAGVPVRVCHSHNTAWKPNPRFWDTWQLLAFRCLIFSSATALCACGKDAGRFLFGAKKMGENAVHLLQNGIELDRFKEANGVSKTNAKKSFGIKEDALVIGHVGRFFEQKNHAFLLGLAAYCKKSGIPFQAVFAGDGPLRRQMEEKAAALGVKDDILFLGVVEDIPALMQAFDVFVMPSLFEGLPLVLVEAQASGLPCIVSDNITEETDLGLGLLQRLSLNAGFERWAEDISRAAQPKKPAWPEIERSLAERGYDAKANLARLMDIYSISAAEGQ

SEQ ID NO: 9013 - protein, 280 aa, Bacillus licheniformis
MIGGQKPKVSVIMGVYNCENTIAESIESILNQTYKNWELIICDDASTDGTYAVARRYADHYADKIKLIKNEKNQRLAASLNHCLQYAGGKYIARQDGDDISLPRRFEKQVAFLESQSHYHVVGSGMMAFDENGIRGVRMLPSSPEPRIMAKGTPFCHATIMMRADVYEALDGYRVGRRTRRMEDVDLWLRFFEAGFTGYNLQEALYKVREDESAFKRRKLSYSIDNAFIVFAACRRLKLPLSDYIYTMKPIIRGLMPPFIMNRYHKRRLMNEGGGVVKHE

SEQ ID NO: 9014 - protein, 382 aa, Bacillus licheniformis
MTRTVLFCATVDYHFKAFHLPYLKWFKEQGWNVHIAAKGDMTLPYTDKKFDIDIRRSPLNASNIAAYRELARIIDEHRYSIIHCHTPMGGVLARLAARKQRKEGTKVIYTAHGFHFCQGAPLKNWLLYYPIEKGLSALTDCLITINEEDFVLAKGLRKALRTEKIHGIGVDTERFHPVSETEKMLLRKTYGFKEDDFILIYPAELNANKNQALLIETAAALKDRAPNLKVVFAGKGQMEQKYRNHAEQKGVSSLVMFAGFQKNIHEWIQLADVSVASSIREGLGMNLLEGMASGKPAVAADNRGHREVIQEGVNGFLVPQGDAGTFSDRILQLYRLPSLRKKMGDAGRRTAAAFSQQRTVKEMAGIYSSFMDNETVERRLKG

SEQ ID NO: 9015 - protein, 605 aa, Bacillus licheniformis
LTYRRRLSIITALDSYLVLLSIFIGYQLILPSYDLYPSEMLLMTSLILLGAQHLFAHCFHLYKKVWEYASIGELYVLLKSITLSHLVTAALELFFFQNVPVRLLCLSWLFQLILIGGSRMMWRIIREQVNKESKGSLRALIIGAGYAGSLIAKQLVQKPELNIKPVAFIDDDKTKYRLEIMGLPVLGGKEQIMQAVRQWNIDRIIIAIPSLSVTQMQEMYKACAQTGVKTQIMPKIDEILLGRHPVGQLRDVKAEDLLGREPVQLDTSEISNTVKDRVVLVTGAGGSIGSEICRQISKFKPKSIILVGHGENSIHSILLELKEKFGKHVAYYPEIADIQDREKMFLLMERYKPNVIYHAAAHKHVPLMEKCPKEAVKNNILGTKNVAEAADETEVETFVLISSDKAVNPANIMGATKRFAEMLIMNLGKTSKTKFVAVRFGNVLGSRGSVIPIFKKQIAKGGPVTVTHQDMTRYFMTIPEASRLVIQAGALAKGRQIFVLDMGEPVKIVDLAKNLIQLSGYTTEQIKIEFTGIRPGEKMYEELLNQNEVLAEQVFPKIHIGKAVDVEWTVLKSFMDEFMYLSDRELRERLFKAIGQHEKKLVTAH

SEQ ID NO: 9016 - protein, 230 aa, Bacillus licheniformis
LGIRKKRSRKYQSALVALHQPNTPIVEQYRTIRTNIEFSSFEKPFKSLLITSGLPGEGKSFSASNLAIVFSQQEKKVLLIDADLRKPTIHKIFELDNHSGVTNVLMKKSTLENVVQQSQAENLHVLTSGPIPPNPSELLSSQAMEDLLAEAYDQYDLVILDSPPLLPVADAQILANQVDGSILVILSGKTKLDNAIKSRDALNSSKSELLGAVLNGRKVKKARQYNYATM

SEQ ID NO: 9017 - protein, 250 aa, Bacillus licheniformis
MKENIDFRELIAILRKRTVLILVLTIGVTLTTGIIQFYVLTPVYQASTQILVHQVGEKKGSATYSDIQINLQYTRTFQALLKNPVILEQVKRELDLPYSAGRLGEKIATSSESESEIINISVQDENQKRAADIANTLTAVLKKEIKQIMNTDRVTVLSKAEIVDSPTPVRPNYKMNILLAFGAALMTGIALAFFLDFIDDTVARPSQVEKEAGFIYLGSIEQMKHKKSLFRGDPDMNIRVKAGRSEPLGY

SEQ ID NO: 9018 - protein, 152 aa, Bacillus licheniformis
MIGRVIRMYRKRKGYSINQLADIAGVSKSYLSKIERGVHRNPSVEFLKKISRALKVELKELFDTEVILYRRTEQEDEWRTHLVQAVQAGMNQEELFQFTHRLKQKKKERALYRNRELTRANIDEWRALMLEAKEMGLTVKEVEAFLMRTKNH

SEQ ID NO: 9019 - protein, 48 aa, Bacillus licheniformis
MDHHDRAISINAIIPNFRQVEMEMWIYIRMNGSSQKHPFSSKKNMNAG

SEQ ID NO: 9020 - protein, 63 aa, Bacillus licheniformis
MISSPSSILFILTNSQRGFNKNAPSPFKESGRDKGLDISRKTQTLHALEDDAKGQNPSFFIYI

SEQ ID NO: 9021 - protein, 174 aa, Bacillus licheniformis
MKVLVLAFHPNMEQSVVNRAFADTLKGAPGITFRDLYQEYPDEAIDVEKEQKLCEEHDRIVFQFPLYWYSSPPLLKKWLDHVLLYGWAYGTNGTALRGKEFMVAVSAGAPEEAYQAGGSNHYAISELLRPFQATSNFIGTTYLPPYVFYQAGTAGKSELAEGATQYREHVLKSF

SEQ ID NO: 9022 - protein, 427 aa, Bacillus licheniformis
MLNHPIQKKSNVRWVVAFMMWAAIAINYIDRTVLSAAAPYITEEFNLTPGQMGIIMSGFFWSYALLQLPSGWAADKYGQKKTLGFAVVWWSVATALTGLATGFKSLLGLRVALGVGEAAAYPSNAGIAAKWFPKKERATVAGIFDSGSKFGGAVAMPLIAWMIAVFDWKLTFLLIGLVGVAWGIVWMIFFKENPADHKRVNEAELAHIREGQAHMEETGGGQPLKWYQLFKYRNIWAMCIGFFMINYNSYFFITWLPTYLVKERGMDLIEMGIMASLPLLTAMVVEVGAGWMSDRIYAKGKLSLTAVRKLFLIIGLVMASCIGFAAFADSAILAVILLCVAKSGTTVAASQVWALPGDVAPKNMTSMVAGIQNTVSNMGGVVGPIITGFIVGATGSFVPALLFSAALIIIAILNYLFLLGKVKQIQV

SEQ ID NO: 9023 - protein, 316 aa, Bacillus licheniformis
MKVVCTSPSFAKYSDDPVLFLEKKGMSLERLPADITEEQFIEAAEGADAAIVAFNQITPYVLDRLPSLKIVCKHGVGVDNIDLHAAKERNVWVTNAPNANKHAVADFVFGLMLSAARQIPAADRETKLGKWPRIFGSDVYGKTLGIVGLGMIGKEVAKRAQGFNMTVLAYDVFPDRAFAADHHIHFTELDQLLKECDFITLHMPLTAETENMIGEKELAAMKETAYLINASRGGIVSECALYDALASGGIAGAALDVYQTEPLKQHPLFELDRFIAVPHIAGYTRDAVQNLGMICVKNIASVLIDKQKPEFVVNGL

SEQ ID NO: 9024 - protein, 332 aa, Bacillus licheniformis
MKKPVIGITMGDAAGVGPEIIVKALTSREVYDMCRPLVIGDMKMLTKAAFQIGSEVVINKVGHPNEGGFVHGKIDCLDIELLPENLPVGKVSAEAGNAAFHFVKKAVELAKKGCIQAICTAPLNKEALHKGGHRYPGHTEILAHLTNTTDYSMMLASPKLKVIHLTTHQGLIEAIQSITPERTYKVIRLAHDTLTRAGFEQPKIAVCGINPHAGENGLFGSGEEERQLLPGIEQAAAEGIDAGGPYPADTLFYKAVRGDVDLVVACYHDQGHIPVKVLGLEEGVNITVGLNGGIIRTSVDHGTAFDIAGQNKADERSMLAALRSAAELAPKS

SEQ ID NO: 9025 - protein, 423 aa, Bacillus licheniformis
LKIAIIADDLTGANDCGGQLVHYGMDVSVKLDAEFTRRETEGVVIFNTDSRSLPAAEAKATVKNISEHISRQSFDIVYKKIDSTMRGNIGAELQAMYEVFQPDFVLIAPGYPQNGRQVIGGIHYVNGVKLEETEAANDPKTPVAESNIQRLIEKQTRNKSGHLSYEDIRRGHGHVRNKLERFRAEGISYVTADSVHESDLQGLALILESLPYSIILAGSAGLMSCLPKAFNLKERELGQTVPSSDQPIMFVVGSMSRTGREQLHELFAGRAAEKIEMRSERVLCGGAEKRNEFERLKERAADVRRRSKHIVLCTSDNAAETQKIGESRGLTPVQTSNAVSGALGEFAGELIQAFHVKRLFLTGGDTAYQVLHQLRIHEIRLLDEVEPGIPLGAAGEELYIVTKAGNFGSRSVMASAAIKLQGG

SEQ ID NO: 9026 - protein, 388 aa, Bacillus licheniformis
MPANYQFRTAGHIVAGEHSIRRLKDHVRTIVPKADRALIITQPSIVKLGAIGEVQAQLTEIGIQSDVCTAILPEPTVQNIEDVFRGIREKRYDILIGIGGGSVLDGTKILSVLQTNSKKVEELLGTDLVEKPGIPTVLIPSTSGTGAEVTPNAIVTLPEEELKVGIVSPLLLPKLVILDPVITLGLPKPITAATGMDAFTHSLESFISTKANPISDMFALESIRLISASIVEAYENGSSIQARENMLLGSTYGGMALTAAGTAAVHALAYPLGGKYRISHGVANSMLLPHVMEFNMDAITERLSLAAETMGIVASDLTAEQAAEAVVQKIREWTERLNIPQDLKAFGVTASDVDDLADSASKVTRLLHNNPKPLSLENIKDIYRKLIN

SEQ ID NO: 9027 - protein, 295 aa, Bacillus licheniformis
MGFVPKGIYPAMLTPLTKDQSIDESALKQLTNHLIDAHVHGLFALGTNGEFHMFNIEDKLKVAEIIIQETAERVPVMVGSGGNSTEEAIWLSKEIERLGADALSVITPFFIPPTQEEAAVHYKTIAASVSLPILLYNIPSKTGFHLEPETVAELAKVDNIVGIKDSSGNFENIQQYIEQTKNDDFSVFAGTDSLILKTLQAGGAGAVAATANMLPDIVTSIYHHWAEGETEKAEAAQMELQPLRDTFRLGTIPAALKKAVELYSIPVGPPKAPVKELTGPALLEVEKMVASYQSK

SEQ ID NO: 9028 - protein, 572 aa, Bacillus licheniformis
MKVMAIAPYEGLKELMVQVAGGENFEFEAASGDLEKGVELAKQAEANGTDLIISRGGTAELIQREVSIPVVDIEVSGYDMLRVLTLAKGYPGKAAIVGFPMIADGASAVCEILDIRIDACTVSDERDVEPVLLQLKEQGYQIIIGDVITIEKAEQLGLNGLLLTSGKESIAKAFAYAKKLYSFLESIKQKYAVPYHILQKAETGYAVYNKTLRPVFQNGVFAEHIGLLDNLEELIGESEKKGVIHFRLRKHGRTWNITGRRFFASDEALTVFTAENAKDVRVSSLPGATILSPLRMSYMETSRNETMQKVLKKAELFSARREPVWINGAPGSGKESLAGLIHMKGEDKHEPFRKIDAGLLSEAEWEQACESEEFFSGRGTLYIKQVDRMPPSSQRLLLRRISEPYDGPRLIVSSSRRRAEEFSSDLYDALCHLELDVPPLSERKEDILHLAYLFIAESNEAFGKQIVGFRNEAGVLLEEAKWPGNLSQLRKTVQNCVLEAQGVYIEKTDAERVLSRLNEEEREDIDLSGTLEEIEKRIIQKIYAEEGNNQTRTAERLGINRTTLWRKLKSSD

SEQ ID NO: 9029 - protein, 150 aa, Bacillus licheniformis
MNSAVDHKECSSLIQDVLKIFSGKWSFLVLAELIQGKRRFNELRRNLGNVNTKGLTDTLRHLEESGMISRKVFPTVPVTVEYKLTEKGKEFHSIFKEMAAWGGEMASVMEPFYFAFVLRFQIFLPFGIVIMCLNLQQKVIEYESDGNCSI

SEQ ID NO: 9030 - protein, 364 aa, Bacillus licheniformis
MKKQYESLFTPFTFKNGIQLKNRIIMPPMGHSSSLPGGFISDDELVYYAARATEVGMVITSATTVQPGTGFPGIPGAENDDQIPGLTRLAATLKKHGAKAILQLFHPGAKGIERTVSASAVAPNQPNAPVPRALSEQEIQDLIHSFGQAARRAIEAGFDGVEIHGANGFLIHQFFSPYYNRRNDSWGGTLEKRMRFPLQIIEEIRRVADSCHKPSFIIGYKFSPEEPETPGITMDETLSFVNVLREQGLDYLHVSLVDFRSLPRRGADRSRARMELIKEAVQDRLPLIGAGQVHTPEDALQALETGADLIGIGRGLLMDPEWLQKVRAGKEDDIQTTLSRHDQRKLAIPDAFWESIPMYIDFSD

SEQ ID NO: 9031 - protein, 482 aa, Bacillus licheniformis
MNIKNIAKKASALTVAAALLAGGAPQTFAKETQDYKKSYGFSHITRHDMLKIPEQQKSEQFKVPQFDPKTIKNIPSAKGYNKNGELIDLDVWDSWPLQNADGTVATYHGYNLVFALAGDPKDVDDTSIYLFYQKKGETSIDSWKNAGRVFKDSDKFVPDDPYLKHQTQEWSGSATLTKDGKVRLFYTAFSGTQYGKQTLTTAQVNFSQPDSDTLKIDGVEDHKSVFDGADGTVYQNVQQFIDEGNYSSGDNHTMRDPHYVEDRGHKYLVFEANTGTKTGYQGEDSLFNRAYYGGSKKFFKEESSKLLQGANKKNASLANGALGIIELNNDYTLKKVMKPLIASNTVTDEIERANLFKMNGKWYLFTDSRGSKMTIDGIGSKDIYMLGYVSGSLTGPFKPLNKSGLVLHMDQDYNDITFTYSHFAVPQKKGDEVVITSYITNRGISNEHHATFAPSFLLKIKGSKTSVVKNSILEQGQLTVNK

SEQ ID NO: 9032 - protein, 515 aa, Bacillus licheniformis
LKKAVYKRISILTVCLGIFIMIFLSVRETEKKGESPDTPEYRAAFHLTTPDKWKNDPQKPVYFNGEYHYYYLYNRDYPDGNGTEWRHAVSDDLVHWQDKGVAIPKYTNKNGDPWSGSVVVDSKNTAGFGKGTIVAVMTQPSANDGKEEQFLWYSQNGGKTFKPYGEEPVLPNPGTVDFRDPKVIWDEQDDKWVMALAEGTKVGFYESQNLKEWRYTGSFQTENIGIIECPDLYKMRADDGTYKWVLGASANGKGTGKPNTYAYWTGSFNGNEFTADEAEPQWLDYGFDWYAGVTFEDGETNDPYEKRYALAWMNNWDYANRTPTWKDGFNGTDSIVRQIRLKHKGGDRYSLASHPIDQLDELTESADELDRIEVNGSKTLQIKGNTYQLEADISWDDLKNAGFRLRESADRKRHIDVGISAEGGYSYVNRGFTGQPDSTRTYLESKAPFDPEKKRVHFTIIVDQNTVEAFIDDGETTHSNLAFPDMNDTGITLFSENGTAVFENLKIKHLRSIRD

SEQ ID NO: 9033 - protein, 82 aa, Bacillus licheniformis
MKEKFPKILFVLGWIVIVAGILTNIESTLYLNANQYVPEGRSPDPIRMMQIVSDIVDPLYKGGILLALSYLLTYVKGFGKTE

SEQ ID NO: 9034 - protein, 818 aa, Bacillus licheniformis
LGFSVKEQVGSLPAVLNLASASNESLGRSADIVSNIMTGFGIKAEESGHAVDVLVKAMTTANTDLGQLGDAMKYVAPVANGLGYSIEDTAAAVAKMSDAGIQGSMAGTALRATLLHLSNPVGQTAKAVKKYNLELEDANGNLKSLPELIGYISKNLEGMSDAQKTATAAQLVRTEAASGFVTLLGVGEKGLRDYSDALRNAGGTADRVAKTQMDNLKGSFEKFKSALDGLGIKIGNEFLPTFRKIVDEGTKILDFLNKLNPGIITTGLEMVGTAAAIALVASTVVKLGVALKSLTLGPVGLTITALSLLGGLLIGVKNSYDAMNTVSLEAAETKQKEIESLDKVASEFDKLQSKTKLTADEFAHYLDLNDRLKTETDPEVIKRLKDEQANLKERSGLTNAEFDRFLKLNDDIVKKAPETNAAISEQGNAFAKNTEAVKKLSAAKAEELRTELEKQKATAQSKEAEYLQKQQNLKTDIKKLDGERAELEGKIADQTQKVKDVTDELNSAKAEGNEKAQYQAEINLAAEEATLNKLREQLVANLDNLQTKRESLGEVQKELGKLKDINQKLIDIELQQVGLNAKKGEGVDVLRKELSRLQDVQFKLENNTSEADKKTKKYRDSVKAVDKEISQLKSALNQVEKITKEAENMNEKLARRISKKIHVTYSMDGTEIEESAETFKKTHGKGGKETPYHIGGIVGRGQINKLHTGGLASKFENAPMSHEVDIRALRNEMVLTEAQQANLMRMIDAGHTAAVGGELGISSEVIGILRSIDQGVRQNRNVAVQIDGETIASATYPHIDSKFTQDIAIQSHFLGQKS

SEQ ID NO: 9035 - protein, 201 aa, Bacillus licheniformis
MNLVECKCNGCGKSFTRKKSEIKSKTVYCSRDCYLSNINKRARKRVPKKRYSCFCCGKDFYNWESQMIGKTHYYCSRPCANKHQALLRTGSGHPRWNPSLSEEDRLVNRKYPEYLKWRADVYERDSYTCKCCGDSKGGNLVAHHVLNYSEHPDLQTDLNNGITLCNVCHKAFHDKYGYTKNNGTQLAEFIDLAKSTPSQVS

SEQ ID NO: 9036 - protein, 122 aa, Bacillus licheniformis
MSAATVGEIRARLILDMSDWSRRSQQARNDMTQMGRSSENLSKQMGLVQKASLAVGGAVVAGIGASVKTAADFEAAMSNVKAISGATGQEFEDLKNIASKMGAETKFTAVEAAEGLQYLAMA

SEQ ID NO: 9037 - protein, 74 aa, Bacillus licheniformis
MVKVKTPFRTEEEANKVAKALGVIDWMKDAVIAGNFSFTTEQEAEILAATETLNQYSPQEILLFIYWTQVGTEE

SEQ ID NO: 9038 - protein, 241 aa, Bacillus licheniformis
MTKFEEMRESYEQMETTRKRARDIVLEAKTSYREEISQITNDRMLSNEGKQIEKEKLNQRYRDIFLGEMMKIKDKATEAADKTIDLATKILLEDPVQPEETEVATFNQKLADLKTSLLLAPNPERGIESLKMFVEETTDPYLAKQLQSEFYEMAASIVKDGSAAEKVKLHEIYEHIKVKSMTEEQKRAETLKGLATAGKNSDLLLDGGVHHNAIKELLGPETAMYANKPHQYFDRMINERN

SEQ ID NO: 9039 - protein, 129 aa, Bacillus licheniformis
MFCVVTETEYYGPYGPAGVSYLRESKDGEQRSFLFPGEDASIKLDCAGGRYEIRNIDGELLFLATVKNVYSSEIGYVRELFNRAMDCAVEYGAKNAMIECGKDVMDADEFEKELSANEKAARTEKQGEY

SEQ ID NO: 9040 - protein, 64 aa, Bacillus licheniformis
LYDVFIYVKPREAITVRAETGEIIRRSSGRIRDLNVSRAVLECRAYEEEAKVVYEKEEPACSAL

SEQ ID NO: 9041 - protein, 72 aa, Bacillus licheniformis
MTNNDLWKFGKGWLCGYTEDKELIRRVKRYKKDWIIAADYFKNDRLVGVQFKIPIEQRRAAERMFDVRVSSF

SEQ ID NO: 9042 - protein, 308 aa, Bacillus licheniformis
MGSLLDEQRAWKGLTPRSKKRFFDLKENGKLEDGRIYDREGNDVSDYFEVAPKTSGRSNEGYRITRNAGGHDAENGGFTWAFYKTCKSFLDDYTTVKEPDLARLMFIATFVGFENQQLSHDNGRKIDKSGLRKILGLSANNFRDFYKRMTAAEILKENEEGVIELTPFLFHRGKVRGKPAETSRIKLYRKTIRELYENYSGRAAKKLSIVYMVLPFLNLKTNIICFNPDETDTERLNKMHLDKLAALLDYKDSNKLRQTLESINLNGKPVFWLPPDPNDKRKKIVVVNPNVVFGGPAKELDSVKVLFK

SEQ ID NO: 9043 - protein, 331 aa, Bacillus licheniformis
MSEFINKIRVFQSSDDKRIIQDILEKFDTNFMEDPSRHRVKDGTPSGGIRINLKDPESYIAYSIKAIYTLILRHIKSEKPITKNETDSFNRFLSILKYDVCIDFEANVESGGDSYVSYFEITESLFLQLEPLLDEILLRLEEFCSLSDRLYFEELYNKHKQVTADIEPQKEQLKKEILEIAEKAIEYALVRVDTSRSEREIVKYINRAIRSKLIDAEIKRNGMRRIRRKINGDLESFSLKPYFPDDEYLIETILGLDFSDCRDQLTKGENEFIDQILEVVKEDKEVGNVAPYTCNIYGEIRIIKKYIAEKLDVSHEVVRKRLSRIRKKVTK

SEQ ID NO: 9044 - protein, 161 aa, Bacillus licheniformis
MIQYTVSKAAVKKATARLGLSKTQAQNVLPKYAQGASFVWSLDSTSGSQSVYDNPREQVRLVIAENGTILDVFPADYALQSPHALSDDALQSLKEATRNALIAKRDAVHRKWCEVEVDFHSNSYEIARRRLALIGATGDEYKDAWPSFAPKTNGCTTKGLR

SEQ ID NO: 9045 - protein, 112 aa, Bacillus licheniformis
VIDIFQPQAVKLHYHGETFDTKQEIHEISDAWLIAADVIGMYSDDGLVFYDTGRLEKRSDGYHLYENNYPRFFMVDTSKVDADLRKIDVSELANISFADFVRIGFSLGEGAR

SEQ ID NO: 9046 - protein, 63 aa, Bacillus licheniformis
MFNRKTIVGWWNIYPAGSDEFINFNPEEFAALLPQVSRRAFAGCAEIGVTAARELFGEEVRSA

SEQ ID NO: 9047 - protein, 112 aa, Bacillus licheniformis
MSELTWIDAGEQPKKMTVDFVFIYSDTGEESREQVEVLNVGRDYVLYIDEEWLNLYRLYHGPHGLEIGQRAELIYDLPYVSDSEMDLETIANMNTIELLAHLGGQLKEVVGE

SEQ ID NO: 9048 - protein, 112 aa, Bacillus licheniformis
LNNQISNHHWEVLTVDFVLYDPKTGAVDYREPTEVLHLGADIALEVNEAYLTLYRMRGKDGEWEIGEKCEVLYDLPLEFPVGFNFGLTTEEIAKMSVLDFMLFLAQKKEETL

SEQ ID NO: 9049 - protein, 78 aa, Bacillus licheniformis
MGFRFNLNNILDELGITKNKLAVEAKVRPATIGDLCEGKTKRLELETIEKILNVLNDISPTKTYTIDDIILYKSDIQD

SEQ ID NO: 9050 - protein, 41 aa, Bacillus licheniformis
VFKVNSTYEVHASIIGKGTYTARGLEKWSTIAEAIEGINKK

SEQ ID NO: 9051 - protein, 92 aa, Bacillus licheniformis
MKYQHDQKEKEIAFVKEAQEHMEKFLYENYRGVKDVSFSDDYYISPMGGIRVEGYLNGDKESKFQGIYDPPNKEIQSYTIYDDEIEKTKIEK

SEQ ID NO: 9052 - protein, 366 aa, Bacillus licheniformis
MTNDIKVPNVSDKTYFILNREAYDRERLDDLMNSGKPIQTEKNSYWYVEKIKRDNDTGLDAVVVSQGKKTKDGKWVKSDNPENVVVAFAGTDPKSQFFQDVIDADGGNVVMGIDPKKKEHYIVEKDAKDTSKTLGKYNGTPSQDARLSTGDYKLVTKTSQIDQADQLVREVKQKYKGTSTVISTTGHSLGGAEAEYSAVNNNVYAVAFNSPSIVKLHSEEQQKKINNGEYDRSIKSIINPDDMVGAGWWNEYDRHNGTTIYTKDPELSNAVREARMQGDVFQQIGQNAGYFFQTAILGMPDTHWVGSNNFTFDKNGNVQNIEGDELVYDKNLKAMLPPEVASGSGAIKVTPEVAKQLAQKVNACGR

SEQ ID NO: 9053 - protein, 106 aa, Bacillus licheniformis
MKREAENAYQEHDAEINDLKHDTYRQVGHGLYDKLTLEDVNNTLKNLAQSFDKKGNPLFYDVHAEKAYIASLKNTISDLEDISGYLAQIAKDFKSKDKMLANWLKL

SEQ ID NO: 9054 - protein, 181 aa, Bacillus licheniformis
MANEVFPMKSKRDYNKFIKALKPGRDQWLAQLGTAFGLRISDLRILKIGQLRGQKSITLWEKKRKKKRVITFSSSVLKIVSQIEGDDDDYVFASRKGGEPISRVQAYRILSDAAKRAGIYDKIGGIGTHTLRKTFGYRLYQSGVPLSRIMVILNHSSERDTAKYIGITAEEIEAAYESIEV

SEQ ID NO: 9055 - protein, 38 aa, Bacillus licheniformis
MKPDSSRFDSVDPVGGTLRIDGVDIPFKEIVWVAVEDV

SEQ ID NO: 9056 - protein, 241 aa, Bacillus licheniformis
MYTKESAKMASFRSVDELNGAIRTHIYRNKSALTPAAIEVLKVLSRHACKTPGVAYLKLQSIADLIGRHRTTVIRAIKRLIACGIIRKETKLRPVSGGNGANIYVILPADNGDATPQMQPRSTADKPTESSAETPKSASESVISKSVNKLLRNTYSAFKSAVESFVSDRKLTNRLYGIYLAHTSFLKGAYDSDTLEEIGLHAVRQTFVATKRKHIRNLAGYYNGVLDRMLDRLYETRFESL

SEQ ID NO: 9057 - protein, 329 aa, Bacillus licheniformis
VAVLKRRKGVRNRRETDGIVKSFRSTKTVHEALGIAYSLYETENYRERTINDYRNYFSEFMEMTGIMPTDSITDVTEDHLRSYISTMLKKRNLSPVTVNIRLGGIKSIFSRLTERGLINESPAQRVTKLRVDETSVKMLTDSQVRRFFKMIDKTTFSGFRDFVAFLLSLKCGLRSNELEGLEPEDLDFDNLVIMLPGAINKNRKNRTVPMTEQVAEELKQLLTEMTEYFGTFTHVFVNQYGEKLAKDSLRKRADKYGEMADLKKECRPSIHSLRHTFAINYLRNGGDIRSLQKIMGHKDLASTEIYLDYVDEIVIEQYRKANKNDELKV

SEQ ID NO: 9058 - protein, 105 aa, Bacillus licheniformis
MGYVNLDKSNLTDQQRLVVASELQNKKKSKLIVFLLWWFLGGVAAHRFYLDERKGYAVAMLLLGWITLFIWPFIDGIICLVKTTDEVNEEIEQKIIASVLSKPAS

SEQ ID NO: 9059 - protein, 198 aa, Bacillus licheniformis
MNLIPTVIEQTNRGERAYDIYSRLLKDRIIMLGSAIDDNVANSIVSQLLFLEAEDPEKDISIYINSPGGSITAGMAIYDTMQFIKPQVSTICTGMAASMGAFLLAAGEKGKRYALPNSEVMIHQPLGGAQGQATEIEIAAKRILSLRDKLNKILAERTGQPLEVIERDTDRDNFKTAEEAKEYGLIDKVLTRNIDAQK

SEQ ID NO: 9060 - protein, 191 aa, Bacillus licheniformis
VKTVCVYSGSNMGADPEYKKKAAELGVYIAEKGLRLVYGGSRMGLMGVIADTVLENGGEVVGVMPKGLFTGEIVHQQLTELIEVSGMHERKAKMSELADGFIAMPGGFGTFEELFEVLCWAQIGIHQKPIGLYNVNGYFEPLLKMLEYSVQEGFSNKSHLELIHASASPAELIGNMNDYRYPVLEKKWKDL

SEQ ID NO: 9061 - protein, 111 aa, Bacillus licheniformis
MTITDAEQWTKAFYRERGWSEYGPFIRMGFLMEEAGELARAVRAYEIGRDRPDEAKRPAAELKKELIEEMGDVMGNLIMLAGIYGVSLEDMMDAHRCKLTERFAGEHHEDQ

SEQ ID NO: 9062 - protein, 325 aa, Bacillus licheniformis
MKINDRLYGEADLEPVLTDLIRSKAVQRLKGIHQDGASFLVNPAWNISRCEHSIGVMLLIRRLGGSLEEQIAGLLHDVSHTAFSHVADDVFNMENEDYHEQMFRQWVKQSDISGILHTYGFHDEDILYDEQKWTLLEQPAPSLCADRIDYTLRDSLAYGFGDPVEIGRFLETGLTVAEGEICCTSAEHAEWFARLYYQEVIDFFMNPLNIYALCTLSQMLKEALDMRVIAGRDFFKTDTELLAMLKQKARFRETLVKLSTASKRVKQGDEGDFTFHQTLKVRWIDPKVAVNGRKIPASTLSKNVLLKKETAIAAMKKGAYVKAAQ

SEQ ID NO: 9063 - protein, 539 aa, Bacillus licheniformis
MLRFSGRFEGYSLKRFQKDIVAGMVVGVVAIPLGMAFAIASGVKPEHGLYTVIVAGILISLLGGSKYQIGGPTGAFVPILFAIVLQYGFENLLIAGFMAGVILVILGLLKLGKIIKFIPRPVIIGFTAGIAVIIFTGEIAKFLGLRNVEKHESFYMNMREVVINLNTLSFYSILTAVVSLFFVLFTPKVLPKVPGALAGLLVSTVMATMLFPEQVVTIGSAYGEIPRSLPSFQFPELSLEKIIYLMPPALAIAMLGGIESLLSAMVADNMKGTRHDSNKELVGQGIANIAAPLFGGIPATGAIARTATNIKTGAASPISGIVHGVFVLLVLLLFAPYASLIPLASMSPILMVVAWNMSERKEFINILKIRNSDSAVLVVTFLLTVWQDLVFGVAAGILLAIITFIARMSKSFRIKKDVSESIVQSAAAAEEKHFQRSVSIYSVEGPLFFGSSNSLEDSILDKGHPPKLLILLMNKVDYMDSSAEGSLMTIVNRVHQQNGKVMIVGLQQQPRELLHKTGLFHKIGKKHFVDRPEQIFDVT

SEQ ID NO: 9064 - protein, 196 aa, Bacillus licheniformis
MAILTSILKHNQSFVEEKGYEFYETTKFPEKKLVILTCMDTRLLELLHHAMGLKNGDAKIIKNAGAVVSHPFGSVMRSILVAVYELQAEEVCVIGHHECGMASLNASSILQKAKQRGVDDGCLELLQHSGIDLDTWMTGFDSVEDSVSHSVNMIRKHPLLSSDVPVHGLVIDPKTGRLDVVEDGYSREDVSLSEVR

SEQ ID NO: 9065 - protein, 323 aa, Bacillus licheniformis
MKPFVYVTKPVPKEIEEMLAEHCEYEIWTSRERIPRTTLLEKIKEADGLLTSGTKIDRELLSNALKLKIVSNNSVGYDNFDIEAMKEKSVIGTHTPYILDDTVADLAFGLILSSARRIAELDRYVREGKWTKSEDDESLFGSDVHHRTLGIIGMGRIGEQVAKRAALGFDMEVLYYSRSRKPDTEKKTGAVYTGFHELLERSDFIVLVTPLTDETYRLIGEAEFKKMKPSSIFINISRGKTVDEQALIQALKEGWIKGAGLDVFEKEPIEKDNPLLSLSNVTLVPHIGSSTHVTHVNMLKSAVQNLIDGLQGKRPKDIVKELR

SEQ ID NO: 9066 - protein, 199 aa, Bacillus licheniformis
MEQNSKIIQPSILYYGTPVILLSTMNEDGSTNLSPLSSSWALGDSIVLGIGTEGKALENLERHAGCVINVPDSSLWRNVERLASYTGKRFVPEEKKRLGFTYLKEKFEAGGFTAADSLAVKPERVADCPLQIEAEAVNIRIPEHSPYFAVIETKVLHVHAHEAILKGEHHIDPQKWEPLIYLFRHYFGLGGELGKTFRA

SEQ ID NO: 9067 - protein, 231 aa, Bacillus licheniformis
MNVNPNIAEVAKLVTDPSRAAILTALLDDRYYTATELAGYAGIKQQTASFHLSKLLDAEMLTCRKQGRHRYYRLKNGKIAQSLETLLNIAPPAEIRSFRQSAEDRAVRKARTCYDHLAGSLGVTLVDRLVEMGVLKEEETAFTVTEEGEAFLKELGIDVREVKKKRRSFCHKCLDWSERRHHIAGALGSALLDAFIRMGWIERRPHTRAVAVTPAGAKELYRLFHISIEKN

SEQ ID NO: 9068 - protein, 151 aa, Bacillus licheniformis
VKKILSTLALGFVLALGFLAGNLFTSSAEGPQAEKGGTVQSNEVINTFEGVADYIVKYGRLPDNFITKAEASKLGWDPQKGNLAEVSPGKSIGGDIFQNREKLLPDASGRVWREADINYTSGFRGSDRIVYSNDRLVYKTTDHYKTFTRMR

SEQ ID NO: 9069 - protein, 91 aa, Bacillus licheniformis
MKQVTLKGEKIRSVSDLHKELKEQLELPDYYGENLDALWDCLTGWVGMPLLIEWKNVEKSRIYLGDQAEAYLQLFREAEETLDGFQLKTEG

SEQ ID NO: 9070 - protein, 252 aa, Bacillus licheniformis
MTTMLDSLFKRIGYKPGQQVTFADLPEFLSLLALQFPFENGAVLRNERISMTKTELTEALLNNKRGGLCYDLNAFLYYVLTELGFSVHMVRGTVFNAKEQAWALTGTHVAVILREGDETYLLDTGFGINLPLAPVPFSGEPVPSKTGAYRVRETKTDKGDYLLEMDKGDGWQIGYAFSLTPIDEAVLTCVRDAIFDEKASPFNKNPLASKLIKDGKLILTKDHFTKQTGGGLTKEDVNAGDFQTIFVHSFFD

SEQ ID NO: 9071 - protein, 89 aa, Bacillus licheniformis
MVQQKVEVLLKTGLQARPAALFVQEANRFQSDIFLEKGDKKVNAKSIMGLMSLAVSSGSEVTLIADGSDEQDALDALTAYVQEKEAKPL

SEQ ID NO: 9072 - protein, 316 aa, Bacillus licheniformis
MSFASETKKELTNLEVKDCCAKAELSALIRMNGSLSFSNRKVVLDVQTENAAIARRIYTLLKKQYDVSVELLVRKKMRLKKNNVYIVRLIENAKPILEDLKILGDNFVIARNISEDLVKKRCCKRSYMRGAFLAGGSVNNPETSSYHLEIFSLYKEHNDSLCRLMNQFHLNSKTLERKKGYITYLKEAEKITEFLNVIGAHNSLLRFEDVRIVRDMRNSVNRLVNCETANLNKTIGASLRQVENIKLIDERIGLDALPEKLREIAQLRIDYQEVTLKELGEMVSSGKISKSGINHRLRKLDEIAEQLRSGQSVSLK

SEQ ID NO: 9073 - protein, 317 aa, Bacillus licheniformis
MADQKKIAIFGGGTGLSVLLRGLKQQPVDITAIVTVADDGGSSGRLRDELKIPPPGDVRNVLAALSDVEPLVEDLFQHRFSKGGDLIGHSLGNLILAAMTNITGDFFHAVTEMSKVLNVRGRVLPAANTSVVLHAEMDDGQIISGESTIPSYGKRIKRVFLTPEKIEPVPETIDVIRGADLIILGPGSLYTSILPNLLVPKIREEILNAPAKKVYICNVMTQPGETLYYSAADHVKALNQHMGGPFIDTILVNNEEIPDDIRERYAKEQAQPVQFNIDDLSAMGLEVIKDQIVTYENGVIRHDTHKVASLLVDLLKE

SEQ ID NO: 9074 - protein, 295 aa, Bacillus licheniformis
MNANGGHDIQLVIITGMSGAGKTVAIQSFEDLGFFCVDNLPPSLLPKFLELMKESSSKMSKVALVMDLRGREFFDSLIEALDEIGETSWITPRILFLDAKDSVLVSRYKETRRSHPLATTGLPLEGIQTERELLEELKGRSQIIYDTSDMKPKDLREKIVQHFAADHGHTFTVNVMSFGFKYGLPIDADLVFDVRFLPNPYYIDSMRPLTGKDQEVSSYVMKWNETQKFLEKLTELLSFMLPSYKREGKSQLVIAIGCTGGQHRSVTLAEYLADYFKKDYYTHVTHRDIEKKSRK

SEQ ID NO: 9075 - protein, 154 aa, Bacillus licheniformis
LQRVTNCVLTSGDKVLLLQKPRRGWWVAPGGKMESGETVRDAVIREYREETGLYVLNPQLKGIFTFIIKENDQVVSEWMMFTFVADHYTGKHVEESEEGIIRWHQAGDVGSLPMAPGDVHILDFMLKGKGLLHGTFTYTPDFELLSYRLDPQGE

SEQ ID NO: 9076 - protein, 62 aa, Bacillus licheniformis
LKFEQLVKFVKNSLCRKIRQKKDTDKIIRANKIHYKRGSITIPIITNNCFTGVTGRLNHDDD

SEQ ID NO: 9077 - protein, 316 aa, Bacillus licheniformis
VSEEKMYDVIIIGAGPAGMTAAVYTSRANLSTLMVERGVPGGQMANTEDVENYPGFESILGPELSNKMFEHAKKFGAEYAYGDIKEVVDEGDYKIVKAGSKEFKARAVIITAGAEYKKLGVPGEKELGGRGVSYCAVCDGAFFKNKELVVVGGGDSAVEEGVYLTRFASKVTIVHRRDKLRAQSILQARAFDNEKVDFLWNKTVKEIHEHDGKVGKVTLVDTVTGEEEEFRTDGVFIYIGMLPLSEPFKNLGITNEEGYIVTNEQMETKVEGIFAAGDIREKTLRQIVTATGDGSIAAQSVQHYIEELKEKEKAVK

SEQ ID NO: 9078 - protein, 486 aa, Bacillus licheniformis
VGKYTSEHHKDSRIVQLFQDGQYFYHKGLKAYRERNLSRASKLIQRAIFLEPENTGMLSQLAVIYTEMGFYQQSNELLDFILKNINEKMTECYYFKANNYAHLGLFQEAYKAAETYLKEDPDGEFSEENAELLDLLDMGEEDQGYSQFDQDDLILKQDRAKSLLENGQLQESIAMLEEIISDYPEFWSAYNNLALAYFYAGDVQKAKTTVFTVLEKSHGNLHALCNLLIFYHYERRDDKVEALSEQLSNIYPMLFEQRYKLGATLALVGRYDLGFKWLKSLYRMGFEGDETFYYWLACSAYYTGRVQFARSVWKKMQEEYPDDARMEPWKERKEKRPVQRPLEERLAAYYISGRKGEKAQLKAVLDSQMAKTPFEDQFVRLVLYGESGAAVDSKDALLAYRTAKAIEQADQSAMEQEAMCFWIFHVIQQIRAYGLQLKNAGGLAAAIYYIWKTEHQERLTKAETAKIFQISPRTLSKYERTLKEHL

SEQ ID NO: 9079 - protein, 120 aa, Bacillus licheniformis
VKKGGSIELTHYSEEHSAALLEFELPEEQHRFTALPKEALKRTDGQFPIVILSEGEPVGFFILHATERVKDYSDNLDAMLLTALSGDRKHQGKVLQKKECSNFQSLSPRSSPIVMKSCWL

SEQ ID NO: 9080 - protein, 210 aa, Bacillus licheniformis
MIKADELTFNEAGLIPAIVQDAASKEVLTLAYMNKESFEKTLETKETWFFSRSRGELWHKGATSGNIQRVKDIRLDCDQDALIVLVEPAGPACHKGSYSCFSPGEHIRQTDGGRFDIINELETVIAKRQAEMPEGAYTTYLFREGVDKILKKVGEEAAEVIIAAKNRDPEELKWEAADLLYHLLVLLREQSLPLDDVLGVLKERHEGSES

SEQ ID NO: 9081 - protein, 252 aa, Bacillus licheniformis
VITKRIIPCLDVKDGRVVKGVQFVELKDAGDPVELAEVYDHEGADELVFLDISASHEGRKTMVDVVERVAAKLAIPFTVGGGINRLDDMKTILRAGADKVSVNTAAVLRPELITEGADFFGSQCIVVAIDAKYDPEADLYYVYTHGGRKKTNLEAVSWAKEAVRRGAGEILLTSMDSDGEKNGFDCRLTKLVSEAVSVPVIASGGAGRADHMYDAFAEGRADAALAASIFHYKETSVKEVKAYLKERGVNVR

SEQ ID NO: 9082 - protein, 245 aa, Bacillus licheniformis
MSEFTVYPAIDIRNGKCVRLIQGDYEKETIYGHSPLEMASRFAEEGASWIHLVDLDGAREGKKVNGGHVISIADKLDVKVQVGGGIRTEKDVYDYLSQGVERVILGSSAVSNTEFVKKMLKAYGGHIAIGLDARDGFVSTEGWLETSSVRAEELGRELANEGAEVFIFTDIATDGMLSGPNINSTVELARATGKQVIASGGVSSLADLEALASRASEGVSGAIVGKALYTNQFTVAEALERVAAK

SEQ ID NO: 9083 - protein, 212 aa, Bacillus licheniformis
MIGVIDYGMGNLYSVSKALERIDAPYFVSEHPDELKRADSYILPGVGAFRDAMEILTENGLKTFIQAAANEGKPLLGICLGMQLLFEESEEHGASEGLGLLKGKVVKLKDCDQAGNRLKVPHMGWNLLKVHRDSPLLPKAKEGFAYFVHSYYVSGIEEEALLASAEYGVCVPAVVGLGNVYGAQFHPEKSSTVGMLILERFKQFTQEQKVKK

SEQ ID NO: 9084 - protein, 194 aa, Bacillus licheniformis
MRKAERARKTNETDIKLSFHIDGEGKADIQTDVPFMTHMLDLFTKHGQFDLSIEAKGDVEIDDHHTTEDIGICLGQALLEALGDKQGIKRYGSSMVPMDEALAQVAIDLSNRPHLEFRAEFPSRKIGTFDTELVHEFLWKFALEARMNLHVIVHYGTNTHHMIEAIFKALGRALDEAALIDPRVKGIPSTKGML

SEQ ID NO: 9085 - protein, 426 aa, Bacillus licheniformis
MKIKSISGNTSVSLKRSIDAGTEEQRKAVRGIIEEVKKNGNAAVSAFTRQFDGADVAGFRVSEEEIKEAYSALEERDLEIIQAAIFNIKEYHERQLATSWFYHRKDGTMLGQKITPLDSAGVYVPGGTAAYPSSVLMNVIPALVAGVDRIVLASPPGKDGKLSAGVLAAAAELGVTEIYKMGGAQAIAALAYGTETITPVDKITGPGNIYVALAKREVFGQVDIDMIAGPSEIAILADSTANYREIAADLLSQAEHDAMASSILVTDSETLAESVLKEVYRQLEHLPRKEIARQSIDNYGLIYVTETMNEAVSVINELAPEHLEILTVQPDALLGQIKHAGAIFLGRYSSEPVGDYFAGPNHVLPTNGTARFSSPLNVTDFQKRSSIISYSREAFRANAEKIAAFARLEGLEAHARAIESRNREED

SEQ ID NO: 9086 - protein, 213 aa, Bacillus licheniformis
MGKELTIAMPKGRIFEEAADMLRKAGYQLPEEFDDSRKLIIQVPEENLRFILAKPMDVTTYVEHGVADVGIAGKDVLLEEERDVYEVLDLNISKCRLAVAGLPETAADTVAPRVATKYPNVASSYFREQGEQVEIIKLNGSIELAPLIGLAGRIVDIVSTGQTLRENGLVETEKICDITSRLIVNPVSYRMKDAVIDEMASRLSLIVEGEKAK

SEQ ID NO: 9087 - protein, 391 aa, Bacillus licheniformis
MFMFEKPHGMRDTLPMLYETKKKVRSSLTEVMALWGYQFMETPALEFYDTVGVQSAILDQQLFKLLDQEGQTLVLRPDMTAPIARVAASKLHKDDHPLRVCYAANVFRAQEREGGRPAEFEQVGVELIGDGSTSADAEVIALVIFSLKNAGLTSFKISIGHVGILDALFVEVLGNEERAHVLRRYLYEKNYVGYREHVKSLNLSSIDKSRLLELLELRGGIETCSRAASIVDSEKGKRAVLELETLWETLGDYGCTDDIKLDLGMVSHMSYYTGVLFEIYAENVGFPIGNGGRYDQLLGRFDSPAPATGFGIRTDRLLEALKPAEEQEKIDVVIFSTEQRKEAIRFAEEERRKGKKVVMQDLAGIGDIDQMTKSFQNVTYFIGARKEEKHG

SEQ ID NO: 9088 - protein, 244 aa, Bacillus licheniformis
MKFFKTLFFIFFVAVLMTAVLILFSKDALSPLAEMLHSSHKTAADNANNKGERQPLDVPLINQMDPPKLYNGCEVASLAMILNYSGYSVTKTELANEVKRVPLQYENGLKGNPNDGFVGDMENGPGLSVYHGPIYDLAHSYAGNKAVDLTGSEPGKIYEQLNQGRPVWVITTVHFTPVNDMETWNTPSGKVDVTYSVHSVAVTGYDEDYVYVNDPYGYKNRKTDRENFEKSWKQMGSQAIVIAA

SEQ ID NO: 9089 - protein, 221 aa, Bacillus licheniformis
MKRLAGTVILSGLLVCGFGQALPEKALAAEVVHKTIVVEKGQTYDGKGKRLIAGPELGDGSQREDQKPIFKVEDGATLKNVVLGAPAADGVHTYGNASINNVVWEDVGEDALTVKSEGSVTINGGSARLAADKIFQINKASTFTVKNFTADQGGKFIRQLGGSTFKAVVNIDNCTITNMKEAIFRTDSSTSSVTMTNTRYSKVGQKWIGVKHATERNNHEF

SEQ ID NO: 9090 - protein, 172 aa, Bacillus licheniformis
LRKTKRYPVSGANSLWHIYQTVPFFKVVKNFIVIQAARYTPILGMKNWMYRTFLRMKIGEKCSFALMVMPDIMFPEKISVGRNTVIGYNTTILAHEYLIKEYRLGEVIIGDEVMIGANTTILPGVEIGDGAVISAGTLVHKDVPPGAFVGGNPMRLIYTKEEMEKRLETPAE

SEQ ID NO: 9091 - protein, 215 aa, Bacillus licheniformis
MKVNTVLFDLDGTLINTNELIIASFLHTLDHYAPGRYKREDVLAFIGPSLYETFSSIQKDKAEEMITMYRTFNHQMHDELVTEYETVYETLERLAEEGYKLGIVTTKLRDTVIMGLKLTGLDAFFETVVTLDDVERPKPDPEPVLLALSKLGSRPEEAIMIGDNYHDILAGKNAGTKTAGVAWTIKGEESLAKHEPDFMLQQMSDLLHILGVEKV

SEQ ID NO: 9092 - protein, 315 aa, Bacillus licheniformis
MKGTLKAGAVAGLKTTWTLGKVIFPVTLIVSLLQHTPVMDWLIKLITPAMGIFGLSGEAAIPLVLGNMLNLYAGIAGILTLDLTVKEVFILAVMLSFCHNLIIESTVASRVGIKIWLILLVRIGLAVFSAIIINLVWHGGQDAAKYGLISAKSAAPSGWFDIALEAVTKAGLGVLQLAAIVIPLMIIIQYMRDLGWLNAFSKWFAPITRMLGMKENTSMTMVAGLTIGLAYGAGVMIKAVEEDGVSKRDVTLAFIFLVACHAVVEDTLVFIPLGIPVWPLLLIRLATAVLLTIAISRFWRKPGYSVRRKEALYES

SEQ ID NO: 9093 - protein, 270 aa, Bacillus licheniformis
MNETIEPLNPIAFQLGPIAVHWYGIIIGLGALLGLWLAVREGERRGLHKDTFVDLVLFAIPIAILCARAYYVIFQWGYYSEHPDQIIQIWNGGLAIHGGLIGAVLTGIIYAKVKGLSFWKLADIAAPSILLGQAIGRWGNFMNQEAHGEAVSRAFLENLHLPDFIINQMYIDGQYYQPTFLYESLWSFTGVVVLLLLRKANLKRGELFLIYVIWYSMGRYFIEGLRTDSLMLTENLRIAQVISIVLILCAAALIAYRRFKGREIKRYQEM

SEQ ID NO: 9094 - protein, 310 aa, Bacillus licheniformis
VPKVRTKDVMDKFKLELISGEEGINRPITMSDLSRPGLEMAGYFTYYPKERVQLLGKTEITFFEKLPEEEKKQRMLSLCTEITPAIILSRDLPIPPELVEASEENGVPVLRSPLKTTRLTSRLTNFLESQLAPTTAIHGVLVDVYGVGVLIIGKSGVGKSETALELVKRGHRLVADDCVEIRQEDQDTLIGSAPELIEHLLEIRGLGIINVMTLFGAGAVRSFKRITLVMSLELWEQGKQYDRLGLEEETMKIIDTDVPKLTIPVRPGRNLAVIIEVAAMNFRLKRMGLNAAEQFTHKLADVIEDGELEE

SEQ ID NO: 9095 - protein, 159 aa, Bacillus licheniformis
LKYNIHDTTVLNEDILTPEEKETWVLYMKVLTAAGLGDVSEWMKLDLSMPQMKVLMLLNNHGTLKVSEIAEKMGASLSNMTGLLSRLEQANFIKRTHSEQDRRTIVVELTEDAKGIFRSLYKKGHEKLKRALQKLNEQEKNKVNEGLTILEKALKADDE

SEQ ID NO: 9096 - protein, 44 aa, Bacillus licheniformis
LNELFLSSLKKHVLSKEIFQQKKLHRFPGSLSIHRQLLTLFQEW

SEQ ID NO: 9097 - protein, 519 aa, Bacillus licheniformis
VNQKWAVLLFTIGVFMAALDNGIISAALTTINDSFQVSPSWGAWGITLYTLGLAVSVPIVGKLSDRYGRKKLFIIEVLLFGAGSLLVALSQNFPMFLLARLIQSLGGGGIFIIGSSHILTALPKEKQGTALGLLGAMNGIAAVLGPNIGSFILDMTGSWHWLFLINLPIAAALIILSVPLMKETKGGTRKPLDLAGTVILSLAILAVMYGITNINGQRLSAVLSDPKVYFFLLIGCALFAGLIFYEKRVELKGGDPILAYSLLKNKVFQWTLFIGFLSGGLLAAVIFIPAYAEQYLHVAPEKAGYWMTPLALASGIGAGLGGMLADRKGPVKAARLSGVISFAGFLLLSSWVTEKWEFVLASIIAGVGFGFLLGAPLNMLVSEAAKQDYGTALGTLSLVRQMGMTLAPALYAGYITAGYENIGTHIKHKLNDAGITLKGFAGGETDVSRLSESLSQIPDPKVKDIISEAIHESVGAGFFNLYFTAAVLSLAVIASVSVLSLYRKKQTDTASRLKKDVTN

SEQ ID NO: 9098 - protein, 1329 aa, Bacillus licheniformis
MKKYRNRQTLLLLAAVLLFALQIPISSASGEEHIQPGSPVIRHTPVEQVQKGDDIYFSAQAAAETVILYYKQHDELPYRAIPMEVEPGRQNAYIAKLESESIASGKVQYYIEAQVGDSSVKTDVYTVALKGMRTDTQKLPELLITEMVVDTSNTGGKDGYEFIEVYNNTNKAVHLNSYKIKYRHPEKGKESDVIWPFEHDDVAIPSGQTHVFWVKNRSNGHLTESDFNRYYGVHLREGKTLTALKGGGMENTAPREVIICTNSGEEVASARYQSEPDKTDVAKNKALLYRYPLDGTKHMKIISAGEEKPSPGSLLKTQAPSQTVTVMPDREKPEIHDMTDHQAVKPGETIQLLADMKDNRQVKQAQFFYRMNDDEPFTEVRVEKSRNDGLYRHNIYFAELIGKEKVEYYMRAGDGSNVSSTEKKTIPLEQRILKGLRLNVSEGGTVSGKMLLKATSEKPPSETTIRIDGIEQKEGEPALEKKAYFAFDVNQTNLYFKNAVTIGRRVQKVFDDSRRRYATITVPVSPDEFKKGKPFSIKVRSGTKSTPFEQTAEENRDDFVLKNPRLILADGTIIRDERYDDPKAELPAGDGPGAHEWYEFRFTIPEAKFASLASQWHTRAWNEGQHIVEAENGEERLIRRVTVDNTGPEIKTSLKDGRTYKGSFEINAAAHDKWSGMKSIKAFLDGKKIALPYLVSSARLDAGKHELKIKAEDSAGNLSIVKKAFYIKEEKPDKPARVKNTPGSTHAKLAVRVKDPTKDKMKVSFHQGFQYTVKDEEHVDVSANESGTEPPQSFAVRGEKALTKEERSGMSALDGKGFETSSTTKFPYHRFDVKVDENTGPNDKVEVLWRGSSLPGRKVSMFAWNWASKRWETLAFHVAKDGKPFTLKGSIKAADYIRQSKASIIIQDQIQLSQNDYTFVWMSDTQYYSESYPHIFERQVKWIAEQKDKLNIQYVFHTGDLVDEADQPLQWKRADQFMKVLDDNQVPYGVLAGNHDVSHKDRSYLKFGRYFGERRFKQKPHYGGSYQNNKGHYDLISSGGNDYIMVSMGWGIGKKELQWIDDVLKRHPDRKAILAFHEFLLVSGSRSPIGEKIFEQIIKRNPNVIAVLSGHYHSSNLKVDKLDDNGDGKPDRKVYQMLADYQGGPEGGQGYLRILHVDPKHDTIHVKTYSPYLDDYNFYDPHQFGPKDEFNIKTDLKPRKKKVKTDYFELNVFSNKEIGKAKTVKSGKTASVTWKDLQPNTTYFWYAAASDQYGGNSRSQMWRLTTKDDGMKSFLIDQTAGAGSALRQLSGSPPPAGMILKKGTNLPIAEISLWLAAVFLCERKKHLFS

SEQ ID NO: 9099 - protein, 119 aa, Bacillus licheniformis
MMRWIINVLVNALLLIVIAGYFDAVHVRSIGAAITASLILSILNMFVKPVLVILTLPVTVITLGLFLFIINAITLYMTASIMGDSFDLDGFGTAIFASIVLSVFHLLIQKAIIEPMSRK

SEQ ID NO: 9100 - protein, 66 aa, Bacillus licheniformis
MKRLFRSETDRKIAGVVGGLAEYLNMDASLLRIITVLLFIFSTGVPVLLIYIVWVFLVPNEGDVNR

SEQ ID NO: 9101 - protein, 364 aa, Bacillus licheniformis
MKHEKERILKLVEEGKLSAKEALILIEKLEEDYKETESKVTALSEDVIDSEDFYSEKKKEPKPSIGSKLFEWIDTAVKKVKEADLDLNFGHSYDVQHIFQFKDTDFSTLDIQLANGSVNLVPWSDSDIRVECQAKVYRAENQDEARQAFLQHIDCGVEGDKFMIRTEKKTMKTNLTVYIPDKEYGKIRFKLFNGPVRGEHLNVKELSAKTTNGVLSFSALTAGKASLETANGQIKLADHTCGEIEAETINGLIDLKGSCEALDLQSFNGNIAATVKNPHCRTAYVKTTTGSVELNVPRDCAVTAELKSNLGSLSHDLSDAEILKEKNETIQKEMYLKANQNHDHSMTVFLESKTGSIHLNHTQE

SEQ ID NO: 9102 - protein, 108 aa, Bacillus licheniformis
MTRNNALISSICYFSVFFAPLILPIAAYFITDDQETKKHAMRSLISHIIPFISVVILAAGAISGTLIFGDGGYLAVIFMIGGFVFFGIISLIIVVWNVVQGIKMLTQA

SEQ ID NO: 9103 - protein, 76 aa, Bacillus licheniformis
MKQKSEVYASSASQLLSLIQEQKRMNQEIVNRLESINSAPPLSSEIRYLKVLLNSSSTHILNSMSEATKHISRTER

SEQ ID NO: 9104 - protein, 47 aa, Bacillus licheniformis
MKIDRMDHLVLTVKDIDATCDFYSRVPGLNAVTFREGRKARHSAGKK

SEQ ID NO: 9105 - protein, 957 aa, Bacillus licheniformis
MATKRIEVKGARAHNLKNIDVSIPRDQLVVLTGLSGSGKSSLAFDTIYAEGQRRYVESLSAYARQFLGQMDKPDVDAIEGLSPAISIDQKTTSRNPRSTVGTVTEIYDYLRLLFARIGKPVCPVHGIEITSQTIEQMTDRILDYPERTKIQVLAPIVSGRKGSHVKVLEQIRKQGYVRVRIDGEMNDLSEDIELEKNKKHSIEVVVDRIVIKEGVTARLTDSLETALRLGEGRVIIDVIGQEELLFSEHHACPHCGFSIGELEPRMFSFNSPFGACPSCDGLGSKLEVDVELVIPNDELSLKENAIAPWEPQSSQYYPKLLEAVCSHYGIDMDIPVRDLPKHHLEKILYGSGGEQIYFRYENDFGQVRENYIEFEGVIRNIERRYKETSSDYVRELMEKYMANQPCPSCKGYRLKKESLAVLINGLHIGKITEMSVANALQFFRELDLSEKDMKIANLILREIEERLGFLNNVGLDYLTLSRAAGTLSGGEAQRIRLATQIGSRLTGVLYILDEPSIGLHQRDNDRLIETLKNMRDIGNTLIVVEHDEDTMLAADYLIDIGPGAGVHGGEVISAGTPEEVMNDDQSLTGQYLSGKKFIPLPAERRKPNNRFIEVKGAKENNLKNVSVKFPLGVFTAVTGVSGSGKSTLVNEILHKTLAQKLHRAKTKPGEYKEIKGIEHLDKVIDIDQSPIGRTPRSNPATYTGVFDDIRDVFAQTNEAKVRGYKKGRFSFNVKGGRCEACKGDGIIKIEMHFLPDVYVPCEVCHGKRYNRETLQVTYKGKNISDVLEMTVENAVQFFENIPKIKRKLQTLYDVGLGYITLGQPATTLSGGEAQRVKLASELHRRSTGRSLYILDEPTTGLHVDDIARLLAVLQRLVDNGDTVLVIEHNLDIIKAADYLIDLGPEGGDGGGMIVAAGPPEEVVKVEGSYTGRYLKPIIERDKNRMKKRLQEKEAVRP

SEQ ID NO: 9106 - protein, 661 aa, Bacillus licheniformis
VKDRFELVSNYQPQGDQPKAIDQLVKGINEGRKHQTLLGATGTGKTFTMSNVIKEVNKPTLVIAHNKTLAGQLYSEFKEFFPNNAVEYFVSYYDYYQPEAYVPQTDTFIEKDASINDEIDKLRHSATSALFERKDVIIVASVSCIYGLGSPEEYREMVLSLRTEMEIERNELLRKLVDIQYARNDIDFQRGTFRVRGDVVEIFPASRDEHCVRVEFFGDEIERIREVDALTGEILGEREHVAIFPASHFVTREEKMKKAIINIEEELEERLKALREEGKLLEAQRLEQRTRYDLEMMREMGFCSGIENYSRHLTLRPAGSTPYTLLDYFPDDFLMVIDESHVTIPQIRGMYNGDQARKQVLVDHGFRLPSALDNRPLRFEEFEKHIHNIVYVSATPGPYELEHTPEMVEQIIRPTGLLDPIIEVRPIEGQIDDLIGEIQQRIERNERVLVTTLTKKMSEDLTDYLKEIGIKVTYLHSEIKTLERIEIIRDLRLGKHDVLVGINLLREGLDIPEVSLVAILDADKEGFLRSERSLIQTIGRAARNAEGRVIMYADKITNSMEIAINETKRRREQQEAYNEKHGITPKTINKKIRDVIRATHAAEDQEEYQVKEEPKLSKMTKKEREKVIAQMESDMKEAAKALDFERAAELRDLLLELKSEG

SEQ ID NO: 9107 - protein, 77 aa, Bacillus licheniformis
VFTKAVFALIFPFILVLFFTRVTYNHYVGIALTAALLFASYLKGYTETFFIVGLDIASLVAGSLYAAKKAGEKKEDS

SEQ ID NO: 9108 - protein, 97 aa, Bacillus licheniformis
MKRAFLAGAFVCLIAVLVSAAAGDWTLIFKVSGAAGLGAILLSALCSGVFVSGDRFRGNHDAETKEHGEWNSKLANALAIFAMPNLLAAGISFFFAF

SEQ ID NO: 9109 - protein, 403 aa, Bacillus licheniformis
LSVEESLIELLKGAGLFFLHPLFYFMMIMSLAYGYARIKRERKTFHTRIEDIYDEFKFTYSKGLLAGLVLSIVSFGLGLYLPMGMLVLIAAVSVAAALTFRQSLLSAAYTLGVSIVVGLCIEYTGFGALDAFLPQLSLANWSAAAVLLGLLLVAEGVLVYKTAHIKTSPAIVMSTRGLPIGQQIAGRTWLLPLFILIPGHAIESSVPWWPVLSFNGGFELLWIPYFIGFGQRVQGSLPIESIKITAKRISVLGIIILLIAAGSIWWTPLAALAAGAAIAGRAFLSWKQRMNDNSAPFHFSKRDQGLMVLGIIPNTPAADLGLKIGEIITKVNGIEVKNAADFYEALQKNRAFFKLEVVGLNNEIRFEQRASYEGEHHELGIIFVKEEDAVMKHAEAAASAETE

SEQ ID NO: 9110 - protein, 50 aa, Bacillus licheniformis
VPAFVVTNAHEKHRRLSIMTKVSAADGSGIPPERPPVISSCRRFRQAGFP

SEQ ID NO: 9111 - protein, 117 aa, Bacillus licheniformis
LKRASIVREKKYYELVEQLKVRSQDVTFSATKAVGLLMLFSRYLVNYTSVESVEDINEDCAELYFNYLMDNHKRLGINLTDIKRSMQLIGDILDVEVNHYLKDFSLSNVTLWMSQEK

SEQ ID NO: 9112 - protein, 479 aa, Bacillus licheniformis
MNQKIVRLIIALSLLCGLVTGAGPIPLHDVVSKASAAEEAAAKSTARNELEKIEKAYDLISNEYVEQVDREKLLEGAIQGMLSTLNDPYSVYMDKQTAKRFSDSLDSSFEGIGAEIGMEDRKIIIVSPFKQSPAEKAGLKPNDEIISIDGDSMSGMDLNDAVLKIRGKKGSTVTLKVHRPGMKDQLTFTIKRDEIPLETVFASIKKVQDKPVGYIAISSFSEHTAKDFTAELKKLEKKGIKGLVLDVRGNPGGYLQSVEDILKHFVTKDHPYIQIAERNGNKKQYFSKLKEKKPYPVSVITDKGSASASEILAGALKEAEGYDVVGDPSFGKGTVQQAVPMGDGSNIKLTLYKWLTPKGNWIHKQGIQPTVPVTQPAYFSAGPLQLKEPLKPDMNNNEIKRAQFLLKGLGFVPGREDGYYNESTKKAVMAFQAANKLKQTGIIDQKTANTMNLRIEEKKMDEKNDLQLQAALKVLFNKK

SEQ ID NO: 9113 - protein, 352 aa, Bacillus licheniformis
MKVFNIASIPGDGVGKEVVPAAQRVLKAVSDVHGGLSFRFTEFPYSCEYYLEHGEMMPDDGLEQLKEFDSIFLGAVGNSKLVPDHISLWGLLIKIRREFEQVINIRPAKYLQGIKSPLANPKDFDLLVVRENSEGEYSSIGGRIFRDEDEIAIQNAVFSRKGAERAMRFAFELAAKRKKHVTSATKSNGIVYSMPFWDEVFENTAKDYPDITADSQHIDALSAFFVTRPEKLDVIVASNLFGDILTDIGAAIMGSIGVAPAANINVNGKYPSMFEPVHGSAPDIIGKGIANPIGQIWTAKMMLDHFGEEELGARLLDVIEDVLKSGYLTPDIGGSSTTDDVTEEIIKRVRTI

SEQ ID NO: 9114 - protein, 41 aa, Bacillus licheniformis
MLLIRPIIYRFKMKADSSGDGLNRLFVIQTGFFSKFILVRK

SEQ ID NO: 9115 - protein, 416 aa, Bacillus licheniformis
LKRKLMTLGLTAVLGSSAVLIPLKSNHALAYEDLEKKKSDVQSKKSENESKLEKTKQELSELESKEASLRSEIEKIDRKMTDTNEKLEKKNEEIDKTKKSIEELKKQIKKLKEKIEKRNKILKDRVRSMQENGGSVQYIDVLLGSKSFGDFISRAGAVSTIVEADKDLMEEQKRDLQLVEEKETKLSKDLESLEKALKDLEDLKKTLDKQQKEKANVMKKVKQDKDHAHEELGSLENEAEILKRQDEAIKAEEAHRKKQEAEASRQASSGQSEASSSKPSAPSSSGFIRPASGTFTSGFGKRSLGNHFGVDIAKRGSGVPIYAAAAGTVYNAHYSSSYGNVVFITHNINGQTYQTVYAHMSSIKVQTGQRVEQGQVIGTMGNTGQSYGQHLHFEIHKGLWNNAKSNAVDPANYIPL

SEQ ID NO: 9116 - protein, 296 aa, Bacillus licheniformis
MIRTLGRHLRESLKSLGRNAWMTFASISAVTVTLILVGVFMVIMLNVYNMTLKAEQEVEVKVLVDLTANQDQKNTLEKEIKKIPEISSVKYSSKDEELKNLKDSFGEDGKFFAMFEQENPLNDAFVVKTKDPQDTPKAAKKLEKLTNVYKVTYGQEQVDRLFKISNVAKVIGIALVIGLLFTAMFLISNTIKITIFARRKEIEIMKLVGATNWFIRWPFFIEGLLLGVCGSIIPIAILLGTYHHAVQWIAPKVQGTFIQLLPYNPFVFQISAILVLIGAVIGVWGSLMSIRKFLKV

SEQ ID NO: 9117 - protein, 228 aa, Bacillus licheniformis
MIEIKDVYKTYSNGVSALNGISISIYPGEFVYVVGPSGAGKSTFIKMIYREEKPSKGKIVINNKNLAQLKEKEIPFIRRKIGVVFQDFKLLPKLTVFENVAFALEVIGERPEVIRKKVLEVLDLVQLKHKARQFPDQLSGGEQQRVSIARSIVNDPDVVIADEPTGNLDPETSWEIMKTLEEINNRGTTVVMATHNKEIVNTMKKRVIAIEDGVIVRDEARGEYGSYD

SEQ ID NO: 9118 - protein, 42 aa, Bacillus licheniformis
VAFREKVSMPCQSGGEKNLLHVQVKKVLFLLKRSFCLLGKRN

SEQ ID NO: 9119 - protein, 108 aa, Bacillus licheniformis
MKMKLFTLFMAVSFVLAACGGNNNESKEKNTGGQATATDGEEIYQQNCTGCHGKDLAGGSAPSLKEVGGKYKESEIKDIVVNGRGGMPGNLVDEKEAEAVAKWLSEKK

SEQ ID NO: 9120 - protein, 284 aa, Bacillus licheniformis
MNMDKTRYQLFTVLRDYGYILFGSAVVAVTFNMFLLPNRIAAGGVSGISTILQSFGFEAAYVQWAFNIPLFIAGVLVLGGKFGIKTLVGSVFLPFVVYVTRDIAPATENPLLAAIFGGVGIGVGIGMVFLGRGSTGGTALAAQIIHKYTGLSQGKCLALIDGTIVLSAMFVFNIEQGLYAMLGVYISSKTIDVIQVGLNRSKMAMIITNREEEVRHAVLNKIDRGITKISAVGGYTDDERPILMCVVGQTEFTKLKQLVKHIDESAFVIAMDASEVLGEGFKRA

SEQ ID NO: 9121 - protein, 327 aa, Bacillus licheniformis
MADPDFWGDQQKAQTIINEANALKDYVNTYKNLSESHEELQMTHDLLKEDPDQDLQNELVSELKSLTKQFNEFELQLLLSEPYDKNNAILELHPGAGGTESQDWGSMLLRMYTRWAERRGFKVETLDYLPGDEAGIKSVTLLIKGHNAYGYLKAEKGVHRLVRISPFDSSGRRHTSFVSCDVMPEFNEEIDIEIRTEDIKVDTYRASGAGGQHVNTTDSAVRITHLPTGVIVTCQTERSQIKNRERAMKMLKSKLYQRRIEEQQAQLDEIRGEQKEIGWGSQIRSYVFHPYSLVKDHRTNTEMGNVQAVMDGDIDSFIDAYLRSKLS

SEQ ID NO: 9122 - protein, 841 aa, Bacillus licheniformis
MLGILNKVFDPTKRTLSRYEKKANEIDALKADIEKLSDEALKQKTIEFKERLEKGETVDDLLVEAFAVVREASRRVTGMFPFKVQLMGGVALHEGNIAEMKTGEGKTLTSTMPVYLNALSGKGVHVVTVNEYLASRDAEEMGKIFEFLGLTVGLNLNSLSKDEKREAYAADITYSTNNELGFDYLRDNMVLYKEQMVQRPLHFAVIDEVDSILIDEARTPLIISGQAAKSTKLYVQANAFVRTLKADQDYTYDVKTKGVQLTEEGMTKAEKAFGIENLFDVRHVALNHHIAQALKAHAAMHKDVDYVVEDGQVVIVDSFTGRLMKGRRYSDGLHQAIEAKEGLEIQNESMTLATITFQNYFRMYEKLAGMTGTAKTEEEEFRNIYNMQVVTIPTNKPIARDDRPDLIYRTMEGKFKAVAEDVAQRYMVGQPVLVGTVAVETSELISRLLKNKGIPHQVLNAKNHEREAQIIEDAGQKGAVTIATNMAGRGTDIKLGEGVKELGGLAVIGTERHESRRIDNQLRGRSGRQGDPGITQFYLSMEDELMKRFGAERTMAMLDRFGMDDSTPIQSKMVSRAVESSQKRVEGNNFDARKQLLQYDDVLRQQREVIYKQRFEVIDSDNLRSIVENMIKASLERAVASYTPKEDLPEEWNLDGLVELVNANFLDEGGVEKSDIFGKEPEEITELIYDRIKTKYDEKEERYGSEQMREFEKVIVLREVDTKWMDHIDAMDQLRQGIHLRAYAQTNPLREYQMEGFAMFENMIAAIEDDVAKFVMKAEIENNLEREEVIQGQTTAHQPKEGDEEKQAKKKPVRKAVDIGRNDPCYCGSGKKYKNCCGRTE

SEQ ID NO: 9123 - protein, 187 aa, Bacillus licheniformis
LMEFNVRGENIEVTPALREHVEKKIGKLERYFENNVDAIVHVNLKFYNDQESKVEVTIPMTDLSLRAEVHHEDMYNAIDLATNKLERQIRKHKTKVNRKFREKGSSKHVFAEGNGIGTAVQEDIEDEQPQVVRQKRFNLKPMDNEEAILQMNMLGHSFFVFTNAETNLTNVVYRRNDGKYGLIEPNE

SEQ ID NO: 9124 - protein, 125 aa, Bacillus licheniformis
LTSTDDYMLLTTYYQLLFTIEEGFCYLIEANQDLAKTEGERIFNDLIYAFFQLDSSHAVLLSILETSCAKSSIRFFDRVFREFDSLIYYNYPSAEFQHDLIHHFLPLYREWMKTIHQCMKPYVIH

SEQ ID NO: 9125 - protein, 101 aa, Bacillus licheniformis
MEKIELLYSETKHMLAQIKGAPESDELVQAIEDFLKKRDGLIREIKPPLSETEKRQLQQVTDMEPLIMAELKGCSRLSSRSCFRRSRSVPCIIPISIRTPT

SEQ ID NO: 9126 - protein, 133 aa, Bacillus licheniformis
MALNNPYAAYQQNSINMATPGELTLMLFDGCLKFMKLAKQAIEQEDMETKNTNLVKAQNIIQELNITLDRKVELAASMGAMYEYIHRRLIEANINNDKDIVAEVEGYVKDLRDAWKQALQIERQGRFGSGGLA

SEQ ID NO: 9127 - protein, 493 aa, Bacillus licheniformis
MAIRISGLASGMDIDDIVSKLMKTERVPLDKLTQKKQTLEWQRDSYREINTKIKDLQESINLMLRPSTYGAKKVTSSDESAVTATGTTNAASGTIQVNKLATAATYKSSSLSGYTGSDQTLTFQVTAPGETTAKKVEISVSSTDTLDDIVSKVNKSNLGVTAMKEKIYNGSEYVETIAFTSKATGAGGSIQAADDATASFMSNQLGFALDADNKLTASQAGQNAEVVINGLQIEKTTNNFTVNNVTYQLKNTTNSPVSLDVATDVDGIYEKIKDFVTQYNELIDMVNGKLTEKKYRDYTPLTEEQKKDMTEKQIELWEEKAKSGLLRGDTILSGATNQMRTDFYSNVSVNGESLQLTQFGITTSSVYSQRGHLEINEEKLKAKIKEDPDSVANLFMAGTSSTENYNEKGIMRRLQTVLTDTKKQIEDKAGNSAMANNQFTIGKNLNTVESDISSMNNRLTQIENRYYTKFTAMEKAIQKMNEQSTYLAQLLGQ

SEQ ID NO: 9128 - protein, 113 aa, Bacillus licheniformis
LSINRLSSLEPIIDAYKTQMLNKQYEAVERPQQTDAAEFTFAQLEKTVQGANNLLEPSQVHLQFVLHEKLGEYYVKVVDNRTEEVVREIPPKEWLDFYAAMAEFMGLIVDKTT

SEQ ID NO: 9129 - protein, 310 aa, Bacillus licheniformis
MRINHNIAALNTLNRLSANNGASQKNMEKLSSGLRINRAGDDAAGLAISEKMRGQIRGLEMASKNAQDGISLIQTAEGALTETHSILQRVRELVVQAGNTGTQQTEDLTAIQDEIKALKDEIDGISERTEFNGKKLLDGTFKAPADPANPAAGEKSLVFQIGANATQQISVNIEKMSTDALGVKDPADTTGRTLVTNQSVKDIDVTKFADNAATATDVGFDTQLKIVDSAINQVSAQRAKLGAVQNRLEHTINNLGASSENLTAAESRIRDVDMAKEMSEFTKNNILSQASQAMLAQANQQPQNVLQLLR

SEQ ID NO: 9130 - protein, 74 aa, Bacillus licheniformis
MLVLSRKLNEAIQIGDDIEVKIISVDGDQVKIGIDAPKHIEIHRKEIYLAIQEENSRAASISNDLLAKLSSQKK

SEQ ID NO: 9131 - protein, 143 aa, Bacillus licheniformis
MIIKTKYHGETQIQEDQTIVFKNGLPGFTGEKKFVILPLSEDSPFVVLQSVQSEELAFIVASPFVFFKDYGFDLDETTVELLEIESAEDVEVMAILTIEEPFEKSTANLMAPIVVNRRKMLAKQVILHDSSYLTKQPIGGEAC

SEQ ID NO: 9132 - protein, 188 aa, Bacillus licheniformis
MEMPRLIMQNIPGRIGLTTTPPDLKMEQPRADLKIEQPPAELKITTTPSKLTIDQTKAWEDLERKHIFKRIEEGAQQGYQDWLAGMARTAEEGDEMMRIEIEGNPLADQARRNSEPEPIQIGVHFTPSFDRVKIAYEPAKVNIRATPRKPIIEATPNKPVVNYTPGSVKVDMLQYPEVKIDVEYPKQK

SEQ ID NO: 9133 - protein, 303 aa, Bacillus licheniformis
MRVTQGMIAKNSLRYINSSYGKLDKLQSQISSGKKITKASDDPVVAMKSLKYNTQLSQVKQYQSNASQAFTWLENTETNITEGIDIMAKIRELTVKAQNSTNGKDELNAIGVEIGQLKDQLIQIANTQVNGRYLFNGTNSDVAPITKNADGTYTYNFENYTSSSDVLINVSPNATLNVNSNPISAFGGQSSSGQNVFEMIESLENALKAGTMEGMENALSDIDQFSNQMSNERSDIGARYNRLELINARLSEQEETATKVLSDNEDVELEEIITEFITQQSVHRAALAVNAKIVQPTLVDFLR

SEQ ID NO: 9134 - protein, 507 aa, Bacillus licheniformis
MTNPTFLGLEIAKRGLSAQQSALSVTANNISNANTEGYSRQRVTFKASTPYPSVSRDSVGLAGQMGTGVEIGSVERVRDSFLDYQYRTQNTKAGYYNAKVDAFNQMEGIMNELNDTGLNKVLNSFWNSIQELTNNAHEPSAASVVAQKGQAVADTFNTLYESLTTVQSNLGDQIDQNVMTINSLLSQLNSLNEQIAKVEPNGYLPNDLYDKRDQLLDELSSMVNIKVSYAKTGGNPLATAEGIVSIEVLDVNGQSLGKVLDGPNFTTETVKVNYDNDTGLVTGVSLGGTDIGIDSFTSKGSLLGLIESYGYMSNGEEKGLYPEMLADLDTMALAFAKEFNAVHQSGFTSSGEPGGIFFEFTGGEAEPAKGAAGKIKVADEIMNSKGDKVAASLNGEASDNANATNLANVFTKKIQIGDKTTTVLDYYAGIIGEMGVKAQETNRLAKNTETLVNTAELNRQSVSAVSLDEEMSNMIQFQHAYNAAARMITLQDEVLDKIINGMGVVGR

SEQ ID NO: 9135 - protein, 158 aa, Bacillus licheniformis
VKRVIEELERLCVLHEHLLSLSEQKTEALKTNEIKALSEIVTKEQKYVQAIEQTEQSRIEATKSCIGSSDATISACISKAAGGEKKVLEQLYAKLSQLVTRLKDVNDLNKQLTFQSLQFISLTFDMLLPNEGGSNYGKEQQPNQTGGVKRLSLFDSKA

SEQ ID NO: 9136 - protein, 88 aa, Bacillus licheniformis
MKINQYGTQPVNPYHKSFEKQTASSQGAAQPEDKVEISAKAKELQKGPDLMKERQEKIAQLKAAVENGTYKVDGKGIAEKMVNFYKQQ

SEQ ID NO: 9137 - protein, 139 aa, Bacillus licheniformis
MSQLANCPRCNALFMKSSFQTVCASCLKEEERAYEIVYKFLKKQENRQSTMFQIVEKTGVEEELILKFIRQKRIQISNFPNLGYPCERCGTLIREGRYCMSCEQDLASQMSQLDQLEQLERERNNSSKGTYYTFKPKND

SEQ ID NO: 9138 - protein, 244 aa, Bacillus licheniformis
MKTRFAQAIEEGGNKLNCLICAAPLLHSLSWHSFFFLRSEEKICRECKENFIEIKGTVCPKCGRPQGSEELCGDCAKWEANPLTRSLLRQNRSVYLYNTFMKEVLARFKFRGDAELVFAFAPSFISAFQQYFRRSPSVLVPIPLSEERKAERGFNQAERLASLLQIPVIHPLIRIENEKQSKKSRKERIKPKTVFRTEKGSVKNLDVILIDDLYTTGATLHHAADCLMTSGEAKSVSSYTLIRS

SEQ ID NO: 9139 - protein, 94 aa, Bacillus licheniformis
MLVNAKEAVLEELFDQYIDQLHMSCTCSRCREDVLALALNAVKPQYVTDQSKLAYIKAELVDKQKNTSMLVTLAEAARKVNENPLCASNRRGRE

SEQ ID NO: 9140 - protein, 464 aa, Bacillus licheniformis
VIHIEQPAFYTRELRSCLEQRHLLKSELPFRESVVDWHIQEGLIKTEEGIKKTKKGFICLRCGQHERSFFARYPCYRCSKCCVYCRSCVMMGRVSDCTPLLTWHMHVSHKWAPVHTEWKGALSAGQEKAAKSIINAIRRKEELLVWAVCGSGKTELLFQGIEFALNNGLTVCIATPRTDVVLELAPRFRQAFPGVEIAALYGGSSDVGNLSPLIISTTHQLLRYKEAFDVIIIDEVDAFPYSIDNTLQYAVKKSAKRQSAHIYLTATPSADMKKRAESGKLDTVRIPARFHRSPLPEPTLIWCGNWKKSLKRRKVPFRLKKWLFKHQELQQPVFLFVPSVPVLKSVVSVLKKETFRAEGVYADDPDRNEKVNRFRESKLEVLVTTTILERGVTVKKAQVGVLGAESAVFTESALVQMAGRAGRHPEHTDGDVCFFHYGRTKSMNAARRHIQNMNKMSKKEMLID

SEQ ID NO: 9141 - protein, 280 aa, Bacillus licheniformis
MKTAVVTDSTAYIPKDLRDRYNIHMIPLNVIFGETSYREEIDMSWKDYYKEVKAHENLPTTSQPAYGELISLYEKLGETYDAVISIHLSSGISGTFNSAVSASGMLEGIKVYPFDSEISCMAQGFYAIEAAEMAEKGAAPEEIIRHLDHMKTSMRAYFMVDDLSHLQRGGRLSGAQAFVGSLLKVKPILHFENKLIVPYEKIRTRKKAMNRLFELFGEDAEKGKPLRAVVIHANREEEADQIIEELSKQYAHVEFYKSYFGPVIGTHLGEGAMGIAWYTV

SEQ ID NO: 9142 - protein, 229 aa, Bacillus licheniformis
VTKVNIVIIDDHQLFREGVKRILDFEPTFEVVAEGDDGDEAARIVEHYHPDVVIMDINMPNVNGVEATKQLVDLYPESKVIILSIHDDENYVTHALKTGARGYLLKEMDADTLIEAVKVVAEGGSYLHPKVTHNLVNEFRRLATSGVSSHAQHEVYPEIRRPLHILTRRECEVLQMLADGKSNRGIGESLFISEKTVKNHVSNILQKMNVNDRTQAVVVAIKNGWVEMR

SEQ ID NO: 9143 - protein, 385 aa, Bacillus licheniformis
VSVSKMDSKVLDSIIMKMLKTVDGSKDEVFQIGEQSRQQYEGLVEELKQIKQQVNEVIDLGDRLEVHARHARNRLSEVSRNFHKFSEEEIREAYEKAHKLQVELTMIQQREKQLREKRDDLERRLLGLQEIIERSEGLVSQITVVLNYLNQDLRQVGVLLEDAQAKQDFGLRIIEAQEEERKRVSREIHDGPAQMLANVMMRSELIERIFRDKGTEEGFQEIKNLRQNVRNALYEVRRIIYDLRPMALDDLGLIPTLRKYLNTIEDYHGKAKIHFQCIGESEERRIAPRFEVALFRLAQEAVTNALKHSESTEIHVKVEVTKDFVTLIIKDNGNGFDLKEVKGKKNKSFGLLGMKERVDLLEGSMTIDSKIGLGTFILIKVPLSL

SEQ ID NO: 9144 - protein, 212 aa, Bacillus licheniformis
MLQSYLTVAGEGTHEIVIEKSRFICHLSRVSTEEEAQNFINHIKKQHWNATHNCSAYVIGENDQIQKANDDGEPSGTAGVPMLEVLKKRNLKDTCAVVTRYFGGIKLGAGRLIRAYGKSVSEGLNHVGVVERKLMRVMHTTVNYTWIGKLENELRESPYQIKDVHYADDVEFETYVKESEKQAFTEWITELTNGKSENREGIQVYLEEAFNN

SEQ ID NO: 9145 - protein, 358 aa, Bacillus licheniformis
MAERIKVKVRKKKNKKRRLIKRFIVLMLLALLAVGGVGIYKIINTISAADGTYDELERGEKSKLRDDVVDIQKKPFSILFMGVEDYSTNGEHGRTDSLIVVTLDPKKKSMKMLSIPRDTRVHLASDTTGTKTKINAAYAKGGKDETIETVEDFLGIPIDYYATVDFDGFKDVIDEIGGIDVDVPFDFSEKSDVSKSKRIYFKKGNMHLNGEEALAYARMRKQDKRGDFGRNDRQKQILKAALDQISKPQNLAKIDTIAQKASKNIQTNFRITQALALQQIYSGFAGDDIKTLNITGQDLTIANVYYFEPDQQNLENVQNELTHHLYPDSAADSSGTSSESSATADGADSSAESSAASY

SEQ ID NO: 9146 - protein, 124 aa, Bacillus licheniformis
MDDHYLGQIEQIVKALYKSWSSDSSSKWSKDNPAKGQCGVTALVVNDILGGEIKKTKLPEGWHFYNFVNGKRYDLTVSQFKEDILYMDIPSNRDEAFSDTSEKQYNYLKHSMINHLPCSNSKLR

SEQ ID NO: 9147 - protein, 354 aa, Bacillus licheniformis
MSYERTVIAFFVSLITVLIITPLVKRLAIKSGVVDQPDKRKIHDKVMPRMGGLAIFIGVLTGSFAGGLYENRITAITLGAFMIVILGIVDDKYNLSARIKFIVQVLVACIIVSTGLKMEFLSIPFWDLRFDLGWLAYPLTILWIVGITNAINLIDGLDGLAAGISVIGLSTIAVMAFSADKILIFSLSLVVIGSTVGFLFYNFHPAKIFMGDTGSLFLGYVISVLSLLGLYKSVTLFSVVIPIIILGVPIFDTTFAIIRRILNKQPISAPDKSHIHHRLMAFGLSHRKAVIVIYLIGVVFSLSAILLKTATLWVSIFIIFGLILFMQIIAEVTGLVNEQYKPFTKFYRRMVKRN

SEQ ID NO: 9148 - protein, 393 aa, Bacillus licheniformis
VKADQFIHVIVATGEWGQDQLRYRRHRLAEFLAGRKETKEVIWVCPSENPSRETFTLLDNGIKQFAVKDFLKKKIFRFARYKDVFYQSKLKPLLDRLKEDVQGEKVCLWYTFPGFPLLSSLYQWDQVIYDCSDLWAAPISGSQSLVSGFRQKVIFEAEGRIIKAADTIFCTSEYLQQNVADRLQGETKPVFTIENGVEYSLFAENMQKADVLKGREGTVLGFIGGIKPKLDFKLVKEAARTKKEWTFLFVGPDGTNGDEDFKALLEEDNVIWTGPAAPSEVPAYMNVVDIGIMPYKPSPYNNAVFPLKLFEFLAAGKPVAGMNLPSTEKVEQEHVYRHLTGNDPAEFTAVCEELELAHDDVSHVELRRKIARERDWHHLFLMMLDKLNLNKDA

SEQ ID NO: 9149 - protein, 252 aa, Bacillus licheniformis
MTRQKPLISVITPSYNAEEFIEKTIQSVLNQTFSDWEMIIADDCSTDGTRDILKRYEEDDERIHAIFLKENQGAAAARNAALSKAEGRYVAFLDSDDVWKAEKLDKQLAFMRKHQHAFSFTAYELISQDGEPLHKTIHAPVSLTYDDVLKNTIIGCLTVMIDREQTGDIRMPNIRTRQDLATWLSVLKRGFKAYGLNEPLAEYRIVETSISRNKWKAARKTWYVYREIERLHLMKATWCFFHYAKNAVMKRL

SEQ ID NO: 9150 - protein, 225 aa, Bacillus licheniformis
VMNLIKRIAGRVKKFIVAIIALPLILGLVGYFMPKGSVAPSNYTATVTISTGNYGEAKYNNAKQVPLLLKNEAFLKDIFPDMPEEDLAQLKDDLAIEIRTDSLFNLSYTGPDKQETLDTLGKIKDAYMKGDKALFSKREEVIEKNIKALEDETVSADSKVDKQRFLYELETSKLDMKAAEEIEPLIVLDNQAAGMSPKKRAVLGVLIGLALSFFIIVIPEVFRER

SEQ ID NO: 9151 - protein, 484 aa, Bacillus licheniformis
MSLKRSAVNVLVWLAALTAGLAFVVLAQSNAKKILLACLILIALAVIVVLRKYLSSEQLLMPVLYLLIAATFANNAFFAIKLGFFSLFPYRILLILAGFLFIAEMLKGSQHLEKWKQVHVKGILMFFAFWFCYGLISLLWVKSATDGIKYLFLLAMGMFFVFLVVMFFQKMDRILAFYYIWLVMTVFLMVIGFYNHFTLNHLPSSTLYNGPHYKQHYPTSVFFNQNDFATFLSISFFFYLSFFKNIKNSYLKIAGLLLAFCSAYLIFLTGSRASILGVIAGLAVYVFILLPKVLKKWALIAAAAGCIAFVTLFAGKITGAFYTYFLAPQTAHDFSEPLPSNVARANLLKNAGHYVLDTYGFGVGAGNVPYYLEHHALFDTDRVVEVHNWLVEIMTNFGVVMMLGYLTMYIYLITVLYRYYKRSLGRRPKLLIEGLTAALVAFLVSSISPSSVSNLYFHWVFLALVIATVNTFRVCGTDETEQYR

SEQ ID NO: 9152 - protein, 309 aa, Bacillus licheniformis
MEKVLVTGGCGFIGSHIAEQLLKENYRVSILDNLTTGHRSNIDGLPIDFYEQDITKPEVIDVIKSIDPDYIVHLAAQVSVAESVSDFLNDENINIRGSLHIIKAAGECNVKKIVFASSAAVYGNPDYLPVDTRHQTNPGSPYGLTKLTVENYLKLAYDLYGTEYCILRYSNVYGPRQDAKGEGGVVSIFSDLLTSGKAPVIFGDGEQSRDFIYVGDVASANVKALKAQSNVCLNVSNGFSITVNELFTEMKKATNSELSPIYQDERPGDIRHSTLCNEETKKILNWEPKMPLAEGLEKTISYYKKEMNT

SEQ ID NO: 9153 - protein, 446 aa, Bacillus licheniformis
MIMLKRIAVIGTGYVGLVSGTCFAEVGNSVVCCDIDAEKIRGLSAGVMPIYENGLKELVDKNVNENRLFFSTDIPKAIEEAEIIYIAVGTPMSETGEADLTFVKSVAEMIGKHLNGYKVIVNKSTVPVGTGKLVQAIIERNSKGEFPFDVVSNPEFLREGTAIYDTMNMERAVIGATSEKAAAIIEELHKPFQTKIVKSNLESAEMIKYAANAFLATKISFINDIANICERVGADVSKVSEGVGLDSRIGSKFLKAGIGFGGSCFPKDTMALLQIAKSVGYPFKLIEAVIETNQKQRAHIVQKLLDVFGDLNGMTISVLGLAFKPNTNDMRSAPSLDVIPMLRSLGAKVKAFDPIAVPEAEKLLGDQAVYSEDLYETIQDTDACVILTEWPEVQNMDIAKLKSALKNPVLIDGRNIFEIEQMRNEGMIYHSIGRPEVQGEGILTNV

SEQ ID NO: 9154 - protein, 392 aa, Bacillus licheniformis
LKVLWITSVYPSSQRPGEGVFHETQVQALQMQGVDVTVICPLPVNPAPLRLLKKKYRQVRTVPEYEERKGIPVYRPPYTALPGQLKWAQPHRRIAKSVLRTIEKHGLAPDLIHAHFAMPSGGAAAVVSQKLKVPYVLTLHGSDVNIYPHYSKGAFRAFETAVHSAAKVLAVSEALKAKTKEMTGAESSVLPIGVNLDRFQKPSASTLELREKLGLPQDKKLLTFVGRLVKGKGVAELAEAVRQLDDSYRAVFIGDGPEKQNIRQIAGEKAVLTGQVANHEISEYLAASDLFVLPSYSEGMPTVVIEALALKVPVLCTAVGGVPSLFGKHEHLLIKPRSASSITEAVKGYLEGGNWQEAIAEELYQTVHEDYDAFKNAGKLLDVYGDVVKNKN

SEQ ID NO: 9155 - protein, 479 aa, Bacillus licheniformis
MSTITKQILSGAKWTSVSTLIVTVIQIIQFALLGNIMTIAEFGLVGMLTTVTIFTQIVLDMGFGAALIQKENISERQLSTLYWLNILTGILLFIGLFFLSPFIADFYQRDELVFLVRILAVMFLIAPVGQQYQYMLQKDLKFNVLSKIEAGVTVLSFVLLLVLVFLMDPIVAYALSQVFLNSVKGIMFFAVYLKKWRPSFVFALGEVKEFFSFGAFQLASRLVNRLGANIDMILIGRFLGAEALGIYNLAYQIITIPVLKINPIVTRVAFPVFSKNQGDNQTLREGFLNMTKLLALISFPLLIGLTTVSDLFVEVVFGEKWLQAVPVLNILAIVGLLRVLMNPNGSVLLAKGRADLAFYWDSGIMLLYGLSLYAAVLTNDLTITAWTYAAISLVNFFIGRWLLKYVIQLKLGEYFRTVGKPLALTLLMALLALVLSVGSRHLLHGAMLQLAVSVGISGIFYGFLVGKFYRRAMRAQLGR

SEQ ID NO: 9156 - protein, 219 aa, Bacillus licheniformis
VSIDKSLRMYNEYSSQQTYSCALSKKAVRYLYMKRIMDIVLSLIGLALTLPFILLFCILICIETPGSPLYRQERVGKDGKHFKVIKLRSMRIDAEKSGAKWAQKDDPRITAVGSFIRRTRIDELPQLINVLAGDMSIVGPRPERPMFTAQFHHEIPGFKNRLIVKPGLTGLAQVNGGYDISPREKLVHDLYYIRNLTFLLDLKVMLKTIKVVLTGEGAR

SEQ ID NO: 9157 - protein, 495 aa, Bacillus licheniformis
LRVFLKAVPMLLLGFFLFVPNVFAANSVTRLDGANRYEVAVNVSKQGWTSASTVIVANGKAYADVLSATPFAYRNNAPVLLTEASKLPTATKNRISQLKPSKVIVIGGTVSVQNGVVSEIKKLGVSSVERIGGANRYEVAANIANKLPSNSKAVIANGTAYADSLAIGAYAARNGIPILLTSSNSIPTATKNAMKSKGTTSTIVVGGEVSISSSVYKQLASPTRIGGSNRYEVAANVVKKYYSSAKNAIISNGYAYADGLTGSVLAAKQNRPMMFTNASSLPTPTREVIGSKNMTTFTVLGGTVSLQSNVVSQLKNPIVGKKIFIDAGHGGTDSGAVGNGLYEKSVNLDVAKLINTKLSNGGALPIMARTNDTYLTLAQRVSKAQSNHADLFVSIHANSATPAASGTETYYYTTYESANSKRLATEIQNRLYVALNTKNRGVKIGNFHVIRESKMPSCLVELAFISNVSDATKLKSSTYKEKGAKAIYDGIVAYY

SEQ ID NO: 9158 - protein, 714 aa, Bacillus licheniformis
LKKMKLLLLSSVTAAALMFTQSAQAADKTISVKLSNYLGNKSSVDVDITGAYEIPGSGIAATERYGGATRFDVANNVASAGWTNPSTVVVVNRDAFADALSATPLAKKYDAPILLTDAGTLTAKTETQIAKMKPDNILIIGGTTSVSKNVENTLKKYGAIDRIGGANRYDVSKNIASRMGSYSQAIVATGLVFSDALSIAPYAAMNGYPILLSGNNTIRSDYNIPSKVTIVGGPLSVSTGVENTLKKKAAVTRIGGANRYEVSANIVNTLNMNASKVFMSNGTTFADALAGSVLAAKQKHPLLLVQAGSLPTPVADVVAKKGTQSFALLGGTTSITDSLKNSLADMFTGDGYSVNVSSGKLVLYKNNRAVKTLGTSFTASPKKYSTSNSISINGRPYLGKMKFTIESSKYVRPINENIPFEDYLKGVVPHEMPASWQTEALKAQAVAARTYSVGSAGKVVADTQAFQVYGGYDWNSKTSSVVNATKGQVLKYNGNLISAVYSSSNGGYTEASAEVWGGSVPYLIAKADTYDPQNSWSISLNRTQINTSGLNLSSPGTWWNTTNETNSAYLSGLKSWFITNKYPSAESIKITKISSLTLSSAKTAGQRPKTAEVKFSYFVKEKSNGYVLSNGKLSEKTATISVTTTQLRSMLGGMNMKSTYASVSSNTNAFTLSGKGFGHGIGMSQYGANARAAAGHDYKKILSFYYPNTTLSSY

SEQ ID NO: 9159 - protein, 106 aa, Bacillus licheniformis
MKKLIVLTLSMLLLLSACGTSGQSEDKSSSDNKNAASEETVTKEGSFAGLADSHTIAVNIDGKETTLQVDEDLQDKVNSIEEGKKVEVQYTKGENGVLELKSIETK

SEQ ID NO: 9160 - protein, 41 aa, Bacillus licheniformis
LIISFLKFENNKNLYVSFWIDEIIRKMFQKNQSICKIFRYN

SEQ ID NO: 9161 - protein, 306 aa, Bacillus licheniformis
MRAEKRKKKKKILYTIIALIGIFVLSTGSYAYYLWHKAASTVANIHENINKSKKRDSAVDIDNHDPFSVLLMGVDERDGDKGRADSLIYMTVNPKTKTTEMVSIPRDTYTEIIGKGKMDKINHSYAFGGVQMTVDTVENFLDVPVDYFIKVNMESFRDVVDTLGGITVNSTFAFNYDGYSFGKGEITLNGKEALAYTRMRKEDPNGDFGRQNRQRQVIEGIINKGANISSITKFGDMFKVIENNVKTNLTFDDMWDIQSGYKEARSKVIQHELKGDGTKINGIYYYKADESSLSDITAELKESLNK

SEQ ID NO: 9162 - protein, 380 aa, Bacillus licheniformis
MKKLKVMTVFGTRPEAIKMAPLVLELRKYPEIESYVTVTAQHRQMLDQVLEAFNIKPDFDLNIMKERQTLAEITSNALVKLDELFQSIKPDIVLVHGDTTTTFAGSLAAYYHQISVGHVEAGLRTGNKYSPFPEELNRQLTGSVADLHFAPTEQAEQNLLRENKDPETIFITGNTAIDALRTTVRDGYSHPVLEKIGNDKMILLTAHRRENLGKPMENMFKAIRRIVEEFDGVQVVYPVHLNPAVREAAAKHFSDLNKVHLIEPLEVIDFHNFAAEAHFILTDSGGVQEEAPSLGKPVLVLRDTTERPEGVQAGTLKLAGTDEDKIYQLTKQLLTDQDEYRKMSRASNPYGDGQASRRIAEALLYRYGYRSARPDVFKDK

SEQ ID NO: 9163 - protein, 48 aa, Bacillus licheniformis
LINGCFMMRISSISNRWAGLIPTRKHGQSGNQSIQQTILKKAVHTENR

SEQ ID NO: 9164 - protein, 292 aa, Bacillus licheniformis
LKKVRKAIIPAAGLGTRFLPATKAMPKEMLPIVDKPTIQYIIEEAVEAGIEDIIIVTGKSKRAIEDHFDFSPELERNLEEKGKTELLEKVKKASNLADIHYIRQKEPKGLGHAVWCARNFIGDEPFAVLLGDDIVQAEKPGLRQLMDEYEKTLSSVIGVQQVPEDQTHRYGIIDPLTNEGRLYQVKNFVEKPKPGTAPSNLAILGRYVFTPEIFMYLDKQQIGAGGEIQLTDAIQKLNEIQRVFAYDFEGKRYDVGEKLGFIQTTLEFAMQDDELKDSLIPFMQDLLAKEEV

SEQ ID NO: 9165 - protein, 303 aa, Bacillus licheniformis
MKLKVSFRNVSKQYQLYEKQSDKIKGLFFPNKDKGFFAVRNVSFDVYEGETIGFVGINGSGKSTMSNLLAKIIPPTSGEIEMNGQPSLIAISAGLNNALTGRDNIRLKCLMMGLTNKEIDEMYDSIVEFAEIGEFINQPVKSYSSGMKSRLGFAISVHIDPDILIIDEALSVGDQTFYDKCVDRITEFKNQGKTIFFVSHSIGQIEKICDRVAWIDNGELRMFDDTKTVVKEYKEFISWFKKLSKKEKDKYKKEQLASRKQVLSEEDLAHLEKDKNKQKSLANIIPIAGLSILVVLAAGAMFV

SEQ ID NO: 9166 - protein, 275 aa, Bacillus licheniformis
MNALVKILKEQVTSFPLILRLAAYETKSKYQMNYLGVLWQFLNPLIQMLAYWFVFGIGIRKSSEMITGVGEVPFIIWMLAGLIPWFFISPTILDGSNSVYKRINMVAKMNFPISSLPSVAIAANLFSYFVMMAIYVIVLLAFGIYPNLQWLEYIYYLFCMIVFMFAFSLFNSTISVLVRDYQFLLQSVTRLLFFLLPIFWDISTQLGDKHPALLNVIKLNPLFYIIDGFRNSFLGGSWFFEDITYTLYFWAFTLLLLTVGSVLHMKFRDRFVDFL

SEQ ID NO: 9167 - protein, 1205 aa, Bacillus licheniformis
MNKKVLKRKIKFIKDPIENYLKKRNHRRNNKYAKFYKKLNVVDNTILYESRDGKSITDSPFAIFDYLIKNPEFNHYKHIWTIADFEALEPVISKYKDMPNVEFVKRNSDKYLQYLATAKYLINNSTLQSFFICKEEQVYINTWHGTPLKSMGFDIPGNPAHSQNVLRNFISADYLLSPNKHTTNMFLNSYKLEGLYSGEIIEEGYPRIDLTLNTSPEEFKSYLKDLSLLISNDKQTILYAPTWKGNSVSKVKNDVFQIISDMNYLEEKIGSDYNVLIKVHPFLYSEASKVSELKGKLIPDFIDTNQLLSTVDILITDYSSIFFDFLVTDRPILFYMWDADDYNKQRGKYINNEDLPGPVLYNVRELVEAIGNIHQVKSEFQTNYEKNKVKFTNHDDGNVTKRVVEKIFKNKGQLNVIRDLDKKKEKILIYPGGMKNNGITSSFLNLMNNIDFDKYDVSCFMKTPHSREVLNNINKVNKNVRFIFKPGLPVYTLFDVYKDKLVHNRGANGKLEKKLYPEDAYLREHKRLFGKSKFDYVIDFSGYSLYWAKYLVCADAKKKICYMHNDLLSDSERLVNGRRPHKINLRGLFSIYNKFDKLVSVSKGTMELNKKNLAIYADEDKFDYIMNSINPEKILGIDHLKEKDTEKLAIAEQNHEEIIANKSFKARAKIVNVEGFFIINSLFDKVNQKLTPAKEFENKEVTIIREAHTNDGKVFYKFTIDDSIIGWLNLEAFELLPDSILLERKVNKLAVIQHPNGNDIWNKPYKTLDVQKVSSSKQYKGIIVEVDKEVRTQHSFYSRIYINDILIGWIDNSALKIVKEYQSHPEDTEKQSAIKNEKAKIKRKNYKKHSKIIQGLENRTLEEIKMNLFATITNGENYTIWTKAYPNNGCKEISTAEEFNDTIVIVKKSHKTKEGEYYRFYADGKAIGWLDSRAFNIIEEPVIARSREVKYNAIVNLSDADFIYNKPFDLPGCTPIEDYQKFNEQEVEIVEEALTQEGTYCKAVLNNKVLGWIGRKSLNVIEPPGIKVGKTLVPYPSECNYNFVNMGRLSPEKGQDNLIKAFHTHIQSYPDSRLYILGDGPLRKDLQKIVDSLELQDYVYLMGQLENPFGFMKMCDCFVLSSHYEGQPMVLLEAMTLGMRILATDIIANRTVLENGRYGTLVDDSIAGLENGLKAVRTEINTVMQAFDYNEYNKKAMDTFYKVLN

SEQ ID NO: 9168 - protein, 711 aa, Bacillus licheniformis
MDSAIPIEFQLREIKINDSRLYFVFESSVSLDHLDVLAVNRNTKKEMRATCNKISDSEQLKAAEISLDTLSNLMIDETVIDFYVLYENNEKNQCKKRIYTASKPIELSWHKDRANQFIYLPYKTRKGHFALDVLRRKAVAEPDSIKLSSDGKLMIGGYTFLLDAEERSIVKSRKLVLKEISQNDKERVFNFPLKGVQRVDLSADSSDHAVGFEAEIDLKKLYEENRMPAFFKFYIEYVGEDAATGEEIAIKSRAFKLIDDIESFSIVDTKKGPARFHIYPQKRKRGMRLRMNDYTIKTRAVYFAKGKGKRLMSVIRKGKNKAKKKISGMVKRAYYFTFGLAGKLPVKKKTVIFESFAGKQYSCNPRAIYEYMKEHHPEYNLIWSVNPSYTEIFEEKNVPYIHRFTLKWLFAMARAEYWVVNSRLPLWIPKPKHTTYVQTWHGTPLKRLAVDMEEVHMPGTNTEKYKQNFTKEASKWDYLISPNRYSTEIFARAFQFNKTMIESGYPRNDFLYTDNRPETMKAIKRKMNIPEDKKVILYAPTWRDDQFYKKGKYKFDLDLNLEKLREEIGDNYVIVLRMHYLVAENFDLSPYKGFAYDFSSYEDIRELYMVSDLLITDYSSVFFDFANLKRPMIFFVPDIETYRDKLRGFYFDFEQEAPGPLVKTTEEVIEKIKETETSDYRLPDIFEPFYEKFCYLETGNSTEKVVKTVFK

SEQ ID NO: 9169 - protein, 129 aa, Bacillus licheniformis
MKKVITYGTFDLLHWGHIKLLERAKQLGDYLVVAISTDEFNLQKQKKAYHSYEHRKLILETIRYVDEVIPEKNWDQKVQDVIDHDIDVFVMGDDWEGKFDFLKDYCEVVYLPRTEGISTTKIKEEIANL

SEQ ID NO: 9170 - protein, 260 aa, Bacillus licheniformis
MLQTETVHHLAYVNGDLPGFLNHLEKSFIDRNEGAFIATVNPEIGYAAAKDKDYFKTVSSADFILPDGIGIVLTSRLINSRLKSRIAGYDVFINLLSLADRKKKRVFLYGAKQEVIQAVADRLSTEYPGIELAGYSHGYVKDKGEVAKQIAAAKPDMVFVALGYPHQEKFIYEHKHLFPQAIAIGIGGSFDVFSGKVKRAPKMFIKLNLEWMYRLLTNPTRWKRMLNIPKYVFSVLKEERVQKQRHYYPEQIKEQSKIDL

SEQ ID NO: 9171 - protein, 387 aa, Bacillus licheniformis
MNIRSLLVMVYSASLALTGFIFRLVKARDRAVLLVSFPDNARALLDEYVSSSRPFEMEVLYTRHAVSLADEYPSVRSQVINEKNPIHLIKAVYRMFRCKFVLTDNYFLLTSVLNKRPQTTCIQIWHASGALKKFGLEDIGNRYRSAGDIKRFKKVYRSFDHIVVGSEKMADIFKRSFGLGDDRFLRTGVPLTDEYFHAGRQTADRPDQKVILYAPTYRDYCLTSVRLPFSKEQLSGELQGEFLLLVKLHPAVREQIAFEEHEGLIKDVSDVPLKDLLMESDILISDYSSVAFEYALLNKPILFFTYDMAEYNEKRGLIDDFEAVIPGKACMDSEMLLKEIKEMSDTKEEIKKFAEEWHQYSTGDASMRLLNFMSEHMTANEKRPAGS

SEQ ID NO: 9172 - protein, 876 aa, Bacillus licheniformis
VKNIRKTVIFAAIILLVHTAVPAIPALAAYTDTSVYKIETAKEFNSESEALKAAEQLKKDTGWKAEVKPSGKNGTTYVLTSEGVEGESRAKNLLLQFEKETGLKASYGPIGKKEPFSKAVSKEFAGEEKAKEWALQFEKETGLKATYTLAGNREAYVKVATGGIEGEDNTKAILDRFQKATGLKASYAPYGAGQAIVKIYSAEIADESKAKSLLVQFEKETALKGTIETVKKQQPKYKIATSSIQGETNAKNLLKQFEKELKVKGAYEAAGQPAQLYNVKSGYFNDEKSAKNAAGQIKKKTGLASSTEKVKGTRFWIVSMKSVDSQNLKKIDAFFKKKTWRYTAAKAGKKQTSFRIVSVPLSDQKKANDGIRFFKNKNIQASAQSTGSTTVSRFRIASAETAVQARINKGLEFFKKNGAAGTAGSTGKKVYSHYQLTTESVYEQNKVTQALNFFKETGIHAEAVKTGQYYSRYKLSSEALIGTEQLQQALGFFSKRNIPGKIEQTGEYGYRQYRVTTGRITSKADLDKGLNVFKKNNVSATYQTKTVSLFHISINEQFTGKDRADAAANRIKTNYGWPVNVVKVKNGPQITTTDYGITLSQMIDKQMKVSPQTDAPAYVSLSYINTANQTVTADLLNIRSSPLVTGGNIIGQLQKGDKVNIISQENGWAKIRMNWRNASRDEVEKYVNPENFTQDSSAYFQFLKLSQTARLNAAEVNAKILYNKGILTGKGQAFIDAARAYSINELYLISHSLLETGNGTSELAKGTMFNGKKVYNMYGVGAYDSNPLYYGAKYAYEQGWFTPEAAIMGGAKFIGEKYIHHPTYKQDTLYKMRWSPNALHQYATDVGWAYKQVGRMYSLYTLLDQYTLYYDVPVYR

SEQ ID NO: 9173 - protein, 316 aa, Bacillus licheniformis
MTQSPIFLQPEFKERIWGGTALRESFGYDIPSDLTGECWAISAHPNGPNIVASGPYKGKTLAELWDEHRELFGGAEGDRFPLLTKILDANQDLSVQVHPDDYYAGEHENGELGKTECWYIIDCKEGAEIVYGHTARTRTELVTMINSGDWDNLLRRIKIKPGDFYYVPSGTIHALCEGTVVLETQQSSDTTYRVYDYDRTDQNGEKRELHLTQAINVTTVPHVDSYVDESTETQKGITIKTFVEAEYFSVYKWEIDGAAELTQDAPFLLCSVIEGEGKLTQGGELFPISKGTNFILPAETNDFTIEGTCELIVSHI

SEQ ID NO: 9174 - protein, 154 aa, Bacillus licheniformis
MKVMNIIHDSIVDGEGLRTVVFLAGCPHMCEGCHNKQSWNINNGFDMSVDEVFEEIMKNPLTNVTYSGGEPLLHAGELIELSEKIKQHSEKDIWLYSGYTYEQILKNEKHSALLAYCDVLVDGPFELKKRDLTLLYRGSSNQRIIELASSQAEA

SEQ ID NO: 9175 - protein, 622 aa, Bacillus licheniformis
MTTGFKEQGLLQLTETFHDIVGYGNHDIMQENANVDGRSPMGQMSRFASESSRHYALHYLMSPEIKKAVDDNFIYPHDLDYMPSGTTTCCQIPLGRLLKKGFHTGHGSLREPKDIMSALSLASIIFQSNQNMQHGGQSFPMFDYDLAPYVRKTYEKHLAKIKQYPTTLTEEEIRERAWEETDNTTYQACEAFIHNANSMHSRGGGQVPFVSINYGTDTSREGRLLIKNILKATKAGLGKGETPIFPIQIFKMKEGVNVDQTDPNYDLYRLALETSAERLFPNFSFIDSPVNKPFYDGTPESEIAYMGCRTRVMSNIHGKENSVGRGNLSFTSINIVKIALLSENVEQFFALLNRYMDLTIQQLLERYAFQCKKRAKDFKFLYSQGIWHESEKLEPEDTLEDVLKHGTLSIGFIGLAEALTALTGKHHGESEESFELGKKIVQSMRDKADEATEKHKLNFSLIATPAEGLSGKFVKKDKVEFGSIRNVTDRVYYTNSFHIPVHYKLTAVEKIRKEAPFHLMCNGGHISYIELDGDPKKNIKAMDMLVTAMRRSGMGYASINHPVDHCKACGFTGIIDNECPQCKNRDEALIERIRRITGYLVGDMSKWNSAKRQEEKDRVKHL

SEQ ID NO: 9176 - protein, 327 aa, Bacillus licheniformis
MKIKATIERVPGGMMIIPLFLGATLNTFAPGTAEFFGGFTGALITGTLPILGVFIFCVGATIDFRSSGYIARKGLTLLIGKVGFAALLGLIAAQFIPDEGIQSGFFAGLSVLAIVAVMNETNGGLYLALMNHMGRKEDAGAFAFISTESGPFMTMVTFGVTGLAAFPWETLAATVIPFLLGCILGNLDPELRDLFGKVVPAIIPFFAFSLGNTLDFNMLIQSGLLGIVVGVSVVILSGASLYLLDRFVARGDGVAGVAASSTAGAAVAVPYALADANPVFAPVADSATAIIATSVIVTSLLTPLATVWIEKRTKQRKSPKQMTIDYK

SEQ ID NO: 9177 - protein, 200 aa, Bacillus licheniformis
MIGKVQEQLGEAGLIAVVRADGKEAAEETIHRLIDKGITAIEITYTTPGASELIEKFAGKDGLLVGAGTVVESEQAREAAAAGSKFIVSPGFSESLAEEAASLHTFFIPGVLTPSEIMEAVSKGFRVLKLFPGGTSGIPYMKNLAGPFPKVRFIPTGGIHPGDVEKWLDAGALAVGVGSQLNKVSEADLQRIFQRRAQQK

SEQ ID NO: 9178 - protein, 321 aa, Bacillus licheniformis
MSLDVMTFGESMAMFYANEAGGLHEASSFSKALAGAETNVAVGLSRLGFRVGWMSKVGADSLGTFILNELKKEGVDISEVKRTADRQTGILLKSKVESGDPDVTYYRSGSAASTMSIDDYPAEYFKQAKHMHVTGIPPALSREMRGFARHAVHQMKKDGKTISFDPNLRFQLWPDQQTMVHTINEIAAQADWFLPGINEGKLLTGCNSPEDIAKHYVMQGVKVIVIKLGKEGAYYRTSEKEGYVPGYQVEKVVDTVGAGDGFAVAMISGLLDGLPLEEAVQRANAIGALAVMAPGDMDGLPSRDQLKAFMAGEKNNQKIGG

SEQ ID NO: 9179 - protein, 338 aa, Bacillus licheniformis
MKDKQTAKVTINEVAAHAGVSKSTVSRYINGKIDAISPKKVKSIKKAIEELNYRPSQMAQGLKVKKSKVIGFLVADITNPFSVATLRGVEEVCDQYGYSIMVCNTDNSPEKEREMLHKLNAHYIEGLIINTTGRNNDVLLDLISQDVSIVLVDRKVPGLKIDAVTTNNREVTSQIVNLMYDKGYAQVGLFTEPIKGISPREERASAYTEIALERNAGGTPLVYEADVKDKESLLQSVKSFLEMKEGKKAILGNNGLLMLKIISCLYELGISIPEDVGIAGFDDTEWYKLIGPGITTIAQPSHEMGRVAMERIIKRIEGDESAPQTIQLEAELVLRQSL

SEQ ID NO: 9180 - protein, 36 aa, Bacillus licheniformis
MNFKVNNGKRQQSFHFFLNIVKDNAEILKKTLPNFK

SEQ ID NO: 9181 - protein, 275 aa, Bacillus licheniformis
MENRYSVHPEQAKRFTTAELREHFLIESLFVENKLNMFYSHEDRVVIGGAVPVKESIALDAGDFLKTDYFLERREIGIVNVGKPGAVKVGDEEYVLEHKDFLYIGLGNKDVFFSSLNEGGAKFYFISATAHQKYPVQKASLSELPYDHLGEEASSNVRNLYKVIHADGIQSCQLMMGITFLEPNNTWNTMPAHVHDRRMEVYLYLDLAEDAKVFHFMGEPTETRHLVVGNEQAVISPAWSVHSGSGTSNYCFIWAMAGENYTFKDMDAVPMNVIR

SEQ ID NO: 9182 - protein, 254 aa, Bacillus licheniformis
MGYLESYFSLEGKTALVTGPGTGIGKGIAEALAKAGADIIGTSHTSGLDETKRLIEEAGRTFTSYQLDMGNLDEVEAFAKEVPDRHQIDILVNNAGTIRREKAADFSRENWEAVINVNLNSLFLLTQAIGRQMIERKQGKIINIASLLSFQGGILVPAYTASKHAVAGLTKSFANEWAAYNVQVNAIAPGYIATNNTKQIRDDQNRNAEILKRIPAERWGQPDDIAGAAVFLSSPASDYVNGHVLAVDGGWLAR

SEQ ID NO: 9183 - protein, 377 aa, Bacillus licheniformis
LKAVTFQGPQHVEVSQVEDAKIEKSDDIVVRITSTAICGSDLHLYQGNFPLPKGFQLGHEPMGIVEETGPDVTKVKKGDRVVIPFTVACGHCFYCENKLESQCDNANPHYDSGGYFGYSEKFGNHPGGQAEYLKVPFGNFTPFVIPESCEMEDESLLFLSDVLPTAYWSVLHAGVKKGDTVIVLGCGPVGLMAQKFAWMEGAKRVIAVDYLDYRLKQAEALNRVEVFDFTKYPDMGEHLKEITKGGADVVIDCVGMDGKKSPLEYLEQKLKLQGGTLGPIQISTKAVRKCGTVQITGVYGSNYNMFPLGAFFSRNVTLKMGQAPVIHLMPEIYKKIEENQFDPKEIITHQLPLEEAGRAYHLFNDHEDDCIKVILKP

SEQ ID NO: 9184 - protein, 457 aa, Bacillus licheniformis
MKGKRSNAWLYFFGALGGVLYGYDTGVISGAILFMKDELGLNAFTEGLVVSAILIGAIFGSGLSGRLTDRFGRRRAIMSAAVLYCIGGLGTALAPSTEYMVAFRIVLGLAVGCSTTIVPLYLSELAPKESRGALSSLNQLMITIGILLSYLINYAFSDAGAWRWMLGLTLIPSIGLLIGIFFMPESPRWLLTKGKEEKARRVLSKMRGGERVDQEVKEIKEAEKQDQGGLKELLEPWVRPALIAGVGLAFLQQFIGTNTIIYYAPKTFTNVGFEDSAAILGTVGIGTVNVLMTLVAIRFIDRIGRKPLLLFGNAGMVISLIVLSFSNLFFGNTSGAAWTTVICLGVFIVVFAVSWGPIVWVMLPELFPLHVRGIGTGVSTLMLHAGNLIVTLSFPVLMEAMGISYLFLCYAAIGIAAFLFVFFKVTETKGKSLEEIEQDLRDKHRGITATDTQPVER

SEQ ID NO: 9185 - protein, 318 aa, Bacillus licheniformis
MLRSQRTKKKRLRKWVKYSLFFIALILTATAAAGGYAYYKVANASKDAQVTLSRGEQSVKRIKEFNPKKDNFSILLMGIDARPGQSMDKERSDAMVLATFNRKDKSVKLLSIPRDSYVNIPGRGYDKITHAHSLGGRDLSTETVENLLDIPVDYVMEANFSAFKEVVDELGGVPITIKEDYIVRQIKKDTKGKVNLQTGEQTLGGEEALAYVRTRKADTDLKRGERQMEVIKSIINKSKSLTSIPAYDDILDTVGKNVSMNLSLNDAIGLIPFMTSIQTVDTLQLKGSDYQPGKVYYFQLDQENLNEIKQELKQQLDV

SEQ ID NO: 9186 - protein, 286 aa, Bacillus licheniformis
MRLIAIDLDGTLLNTESKISAENRAAIKKALISDCIVTICTGRATFDVKALLNDLDIPIIAANGGTVHDFNYKLLSRTLMDKEAGKKAAQYLTDHQIYFEVYTDDALLSPFDGEQKLKAELDIVTSANPDEDRDTLWQGALTQFKQFGIKPVPDIREIFNGDEHIYKLLCFSFDMEKLKKAKDDLSAFPKLGLTSSGRHIIEILPDESGKGRALKELARHYGIEKKDIYAIGDSPNDLSMFEEAGHRIAMGNAIDELKHISTFITKSNDENGVAYFINKLLENEYQ

SEQ ID NO: 9187 - protein, 414 aa, Bacillus licheniformis
LIKKAANKKLVLFCGIAVLWMSLFLTNHNDVRADTIGEKIAETARQLEGAKYSYGGEKPKTGFDSSGFVQYVFQSLDITLPRTVKEQSTLGSSVGRQQLEKGDLVFFKNAELESDGPTHVAIYLGNDQIIHSTKSNGVVVTKLEGSSYWSSGYFKAKRITKEPEISMDPVVQKAKSYVGVPYVFGGNSPDLGFDCSGLTQYVFREVLGVYLPRSAEQQWAVGQKVKLEDIRPGDVLFFSNTYKPGISHNGIYAGGGRFIHASRSNKVTISYLSASYWQKKFTGVRRFDNMSLPKNPIVSEAIRHIGEVGYQKGGTSPKEGFDTAGFIQYVYKTAAGVELPRYADKQYSTGKKITKQELEPGDIVFFKGTTVMNPAIYIGNGQVVLVTLSAGVTTADMETSAYWKDKYAGSVRIE

SEQ ID NO: 9188 - protein, 55 aa, Bacillus licheniformis
MKFVRAIWPFVGLVLIIAFMSAFKYSDELSNDEKAKISTEIQKVNQQDQTTENKQ

SEQ ID NO: 9189 - protein, 389 aa, Bacillus licheniformis
MKKQLNFQEKLLKLTKQEKKKTNKHVFIVLPVIFCLMFVFTWVGSAKTPSQMDKKEDAKLTATFVGDIMMGRNVEKVTNLHGSESVFKNVKPYFNVSDFITGNFENPVTNAKDYQEAEKNIHLQTNQESVETLKKLNFSVLNFANNHAMDYGEDGLKDTLNKFSNENLELVGAGNNLEDAKQHVSYQNVNGVKIATLGFTDVYTKNFTAKKNRGGVLPLSPKIFIPMIAEASKKADLVLVHVHWGQEYDNEPNDRQKDLAKAIADAGADVIIGAHPHVLEPIEVYNGTVIFYSLGNFVFDQGWSRTRDSALVQYHLMNDGKGRFEVTPLNIREATPTPLGKSDFLKRKAIFRQLTKGTNLDWKEENGKLTFEVDHADKLKNNKNGVVNK

SEQ ID NO: 9190 - protein, 149 aa, Bacillus licheniformis
MFGSDLYIALILGVLLSLIFAEKTGIVPAGLVVPGYLGLVFNQPIFMLLVLFVSLLTYVIVKFGLSKIMILYGRRKFAAMLITGILLKIGFDFIYPVMPFEIAEFRGIGIIVPGLIANTIQRQGLTITLGSTLLLSGATFVIMYAYYLI

SEQ ID NO: 9191 - protein, 393 aa, Bacillus licheniformis
MWVMLLACVIVVGIGIYEKRRHQQNIDALPVRVNINGIRGKSTVTRLTTGILIEAGYKTVGKTTGTDARMIYWDTPEEKPIKRKPQGPNIGEQKEVMKETVERGANAIVSECMAVNPDYQIIFQEELLQANIGVIVNVLEDHMDVMGPTLDEIAEAFTATIPYNGHLVITDSEYTDFFKQIAKERNTKVIVADNSKITDEYLRQFEYMVFPDNASLALGVAQALGIDEETAFKGMLNAPPDPGAMRILPLMNAKNPGHFVNGFAANDAASTLNIWKRVKEIGYPTDQPIVIMNCRADRVDRTQQFAEDVLPYIEASELVLIGETTEPIVKAYEAGKIPADKLFDFEHKSTEEIMFMLKNKLEGRVIYGVGNIHGAAEPLIEKIQDYKIKQLVS

SEQ ID NO: 9192 - protein, 326 aa, Bacillus licheniformis
LATIKDVALAAKVSVATVSRVLNETGYVHEDTRARVLKAMEELNYHPNEVARSLYKRESRLIGLLLPDITNPFFPQLARGVEDEIHRLGFRLIFGNSDENLEKELDYMQTFKQNHVVGVISATNYPDAPNYQDLSMPIVFLDRTGENAPAVFADSREGGRIAAAEMIKRNAKRITLIKGPAHLQTARDRFNGALDVLSGADIDFHVMKTETFSFPEAQKRAAELFGTYPETDGVIASNDIVATAVLHEALKRKIKVPDELQIIGFDDIPQSELLFPSLSTIRQPAYEMGKEAAKLLLRLMKNEYIEQSAVQMPVAFIERQTTRKAE

SEQ ID NO: 9193 - protein, 293 aa, Bacillus licheniformis
MSKICVIGSSSMDLVVTSPKRPAAGETVLGESFKTVPGGKGANQAVAAARLGAEVHMIGCVGDDHYGKAILDNFQANGVLTDYVEPVTGQESGTAHIVLADGDNSIIVVKGANDHVTPEYVQKALPAIKQADIILIQQEIPEETVDYVSGLCSSLGIPLLLNPAPARPLRPETVEHAAYITPNEHEASVLFQGMSREETLKRYPEKLFITEGKNGVRYHNGLEERVVPSFPVNAIDTTGAGDTFNAGFAVALSEGQSIESALRFANRAASLSVLKFGAQGGMPKRDEVERELS

SEQ ID NO: 9194 - protein, 131 aa, Bacillus licheniformis
MKKHGILNSHIAKLLADLGHTDTIVIADAGLPVPPGVPKIDLALTLGTPGFREVTKLIADEMVVEKVTAAQEIESVNPGQAAFLKAEFSNQKIDYIPHEAFKKATSQAKAVIRTGEATPYANCILHAGVIF

SEQ ID NO: 9195 - protein, 493 aa, Bacillus licheniformis
MHIKMKDIFKAFGQNQVLSGVSFELQEGEVHALMGENGAGKSTLMNLLTGLHKLDSGTIEIDGKETYFSDPKEAEQNGIAFIHQELNIWPEMTVLENLFIGRELSSKLGFLNNKKMKALAKEQLERLGVSISLEKEAGDCSVGQQQMIEIAKALMTDAKVIIMDEPTAALTEREIEKLFGVIRALKKNGVSIVYISHRMEEIFTICDRITVMRDGKTVDTKRIPDTDFHEVVKKMVGRELTERYPERQPNPGRVVLEVKQASKKGVFQNISFSVRSGEIVGISGLMGAGRTELMRAVFGLDPLDSGDIFIEGKKAALKKPSDAVQKGIGFITENRKDEGLVLDTSIRENIALPNLASFSPKGWIDKKSEQEFVDLLIKRLTIKTESPETHARNLSGGNQQKVVIAKWIGIGPKVLILDEPTRGVDVGAKREIYQLMNELTDRGVAIVMVSSELPEILGMSDRVLVIHEGTLSGELSRNDATQERIMTLATGGR

SEQ ID NO: 9196 - protein, 320 aa, Bacillus licheniformis
MKTQPAVKKSLNVDSVMQKLGPFLGLIILVVIVSLLNPSFLEPLNILNLLRQVAINALIAFGMTFVILTGGIDLSVGAILALSSALIAGMIAGGIDPVFAVIIGCLIGALLGLVNGLLITKGKMAPFIATLATMTIFRGLTMVYTDGNPITGLGNHYGFQLFGRGYFLGIPVPAITMAAAFIILWVILHKTPFGRRTYAIGGNEKAALISGIKVPRVKMMIYSLAGLLSALAGAILTSRLNSAQPTAGTSYELDAIAAVVLGGTSLAGGRGRIAGTLIGVLIIGTLNNGLNLLGVSSFFQMVVKGVVILIAVLLDRKKSA

SEQ ID NO: 9197 - protein, 304 aa, Bacillus licheniformis
MKKTLTVFTALALLFLSACSLEPPEWAKPNKEKGTDIKIGLSVSTLKNPFFVSLKNGVVKEAKKQGIEVIVVDAQDDSAKQTNDVEDLLQQGVDALLINPADSSAISTAVQSANSLGIPVVTLDRSAENGKVETLVASDNVKGGQMAADFIVEQLGKGAKVAELEGVPGASATRERGSGFHKTADDKLNVIAKQTADFDRTKGLNVMENLLQGNPDIQAVFAHNDEMALGAIEAIRSSGKEILVVGFDGNEDAVKAVQAGDMSATIAQQPELIGKLAVQAARDILNGKKVEKTIPAPLKLETKK

SEQ ID NO: 9198 - protein, 42 aa, Bacillus licheniformis
LHSNGAHDEDRNSARRFAERVSQDRLCSFAGRSVPDACVCLS

SEQ ID NO: 9199 - protein, 253 aa, Bacillus licheniformis
MKSASKQKIIQPVDKNLDQVYQVSTMVSLLDGIYDGDFYMSEAKEHGDFGIGTFNRLDGELIGFDGEFYRLRSDGKAYPVQGSDCSPFCSLAFFRPDIYHEIKQRMPLEAFEEEMKRIMPSENLFYAIRMDGTFKKVKTRTVELQEKPYVPMVDAVKSQPIFDFNDITGTIVGFWTPQYANGIAVSGFHLHFIDEDRNVGGHVFDYEIEECTVQISQKLNMNLRLPNTQDFFQADFNKHDLAAGIEAAEGNPE

SEQ ID NO: 9200 - protein, 572 aa, Bacillus licheniformis
LNNVAAKNETLTVRGAELVVDSLIQQGVTHVFGIPGAKIDAVFDVLKDKGPELIVCRHEQNAAFMAAAVGRLTGKPGVCLVTSGPGASNLATGLVTANTEGDPVVALAGAVKRADRLKKTHQSMDNAALFQPITKYSAEVEDANNIPEAVTNAFRAAASGQAGAAFLSFPQDVTAGPATAKPVKTMPAPKLGAASDEQISAAIAKIHNANLPVVLVGMKGGRPEAIEAVRRLLRKVKLPFVETYQAAGTLSHDLEDQYFGRIGLFRNQPGDMLLEKADVVLTVGYDPIEYDPVFWNGKGERSVIHLDEIQADIDHDYQPEIELIGDIAETLNHIEHDSLPVSIDESFAPVLDYLKKALEEQSEPPKETKTDLVHPLQIVRDLRELLSDDITVTCDIGSHAIWMSRYFRTYRPHGLLISNGMQTLGVALPWAIAATLVNPGQKVVSVSGDGGFLFSAMELETAVRLKAPIVHIVWNDSTYDMVAFQQEMKYKRTSGVDFGGIDIVKYAESFGAKGLRVNSPDELAEVLKAGLDAEGPVVIDIPVDYSDNIHLADQRFPKKFEEHFNKEASKQS

SEQ ID NO: 9201 - protein, 292 aa, Bacillus licheniformis
MELRHLRYFMVVAEELHFGKAALRLNMTQPPLSQQIKQLESEIGVTLLKRSKRAVRLTAAGGVFLKQIKEGLSQIDQAVDMAQRTARGELGRLVIGFVGSATYEIMPPIIREYRNRFPSVQIDLRELSTPNQIDALLNGHIDIGVLHPPLGNDELKSYTVKKSHCVLALPKHHPLTEKARVHLKDLEKESLIVIAKEAWPSLYTEFNFLCEKAGFIPNIAQEATEYQMVIGLVSAGMGIAVVPTAAKRLFNLDVVYKEIEDFPLRAEWITAHRKDNRNPALKHFIEISDQHS

SEQ ID NO: 9202 - protein, 527 aa, Bacillus licheniformis
MEKLKIGSKQMVVSPHYLASLAGSIIMEKGGNAFDAAVAVSACLAVVYPHMTGLGGDAFWLMYHNGSGEIKGYNGSGRSGRKADRDQYKGESAIPVRGPRSAITVPGMVDSWAEILAAYGRLSLREVLKPAIMYAEKGFPVSPDQCQNTVKNAEWLSCMPITADIYLPGGKPPSPGERFVQKELARTLTLIAEKGRDTFYKGEIAQALAAYLQNNGGILNLEDFGLHRGEWVSPLSSTYRGYAIYQMPPNSQGFTGLMTLNILENYDFGMIEHGSFEYYHLLIEALKLSFSDCNKVLTDPEFSHIPLGRLLDKEYARELAAKIGLPALQAESRPLGSDTSYAAAVDEDGNAVSFIQSLYFEFGSGVTAGDTGVILQNRVAFFSLDPDHVNTLEPGKRTFHTLMPAMAFRGGKPKFLYGTQGQGGEGQPQTQTALITRMVDYGMDPQTAVHEPRWVWGRTWGERVEGVRIESRVAPEVIAKLRKHGHHVTVVGEFDGVMGHAGIIEIDDQGFLRGGSDPRSDGAAIGI

SEQ ID NO: 9203 - protein, 158 aa, Bacillus licheniformis
VSLDYHMPNLILDETDKKILSILHEEGRISYTDLGKRVGLSRVAVQTRINNLIEEGIIEKFTAVINPVKVGIHVSVFFNVEVEPQYLEAVAVALEKEPAVTSLYHMTGPSKLHMHGIFANDQEMEEFLTKRLYPLKGVVSVDCQMLIKRYKSRMGMKL

SEQ ID NO: 9204 - protein, 194 aa, Bacillus licheniformis
MKHPYRELIIAMTRTGILGFGGGPSVIPLIRHEAVSKFKWIDDDEFGEILAIANALPGPIATKMSAYLGHKVKGVPGAVVATAAHIMPTCAAMAALFAAVNVLSHSKIVSGMIGAVTPVIAVMLGIMAYEFGQKALKGFGLLTGVLFFILAFLGLQVFSIHPGIIVILFLTYGAFHFKLKRKAAREKDKGVSAS

SEQ ID NO: 9205 - protein, 178 aa, Bacillus licheniformis
MIIFYLFWAFFIANLLGYGGGPASIPLNFEEVVQHFHWLSKEEFSNMLALANALPGPIATKIAAYVGYSVLGWPGVFIALAATVLPSAIALVLLLKLIGRYRQSQVVKGMTLSVQPVIAVMMLLLTWEISGDAIHSIGMVQSLVIALISLVALTKFRVHPAFLIVAAFAYGGLVIPLL

SEQ ID NO: 9206 - protein, 250 aa, Bacillus licheniformis
MIDIHCHILAGVDDGAACMNDSLEMAKQAALQGIHTIIATPHHRNGVYEHPKEAILAAVSGLKTRMQKENIPVLITPGQEIRLYGELKRDLERGRLLSLAGTKYLLIELPYHHVPRYAEKVLFDLQLNGYIPIIAHPERNLELMENPDLLYRLVKNGACAQLTCSSLAGRFGRSVKRLARRFLEANLIHFIASDAHNLTTRSFFFDTVENDYGRDFLNVFTENAGLLLENREIHKETPRPVKKKKLLGLL

SEQ ID NO: 9207 - protein, 205 aa, Bacillus licheniformis
MRDHIGFKDVFIVLKKRFVLIALITIAAALSSAAVNFYWLKPVYQASAQILINGRQTSNFTDIQTNLELINTYNVIMKSPIILNKVKDELNLSETAEDLKQKITVISENESQIVSISATDKDYSKAAYIANTVAAVFQRDIGDIMGENAEISLVAKANPDHSPVPVSPNKKFNIALFTGFGLLFGAGLAFLLELLKNTVRNEEDI

SEQ ID NO: 9208 - protein, 47 aa, Bacillus licheniformis
MDDKELNQEEFLRILMHAYDVGEKSKDITTKELLEDLILHIKNGYTT

SEQ ID NO: 9209 - protein, 532 aa, Bacillus licheniformis
MLQDMISKTVVMDAAEQFKHVLPCTEENIQLMKKALILYRQDSVYRVKPMSGHTVSAYVQDVVPVKVFIDLADVKKSSCSCPAQNMCRHVLAVYLYLYAQYDRLGTFTEFWKEAQKRRENREILGQLQRGMKPRSHTLDQWTSFFNTEFRRWEEHTPKNQQTMQYLYYGYFSALKKRTPAEPELKKMYQIHAALATWLAMHSLVEKGRIDPEKDFYSLNPYIEQLMDTIYSSIDELKTYALSFSLDPFLEKTPGVIRELLLKKDIFQYERLRIFGEIWSALLSRPNWLKRELDVLNNLEPSPEIQFGRLHLEFLLKNDDVILDQAGSFSPEILPYTFQWLSVMTAKKDWKRLKKWYEHLEQLAAGFCRLDKPYREIRDVLSEFFLFLSDYSKNAKEEHVFERYCKECLPYTFTEYSHFLYNKNRFTEWMEIHSLVGFSISEIGQNALKDIAAAAPEALIPSYHREISGLVEQKNRSSYKEAVKQLKKLRTLYKKAKKQDVWNRFMEQFSARYKRLRAFQEELKKGKLIDGES

SEQ ID NO: 9210 - protein, 921 aa, Bacillus licheniformis
MASLKEIVIHVEQSEDYTFILSCHDGDHQFLTRNEMERHLFQWHESSFYGTFLEEAGLDTPAVLLSPWMAVEFLGKNSFNSFSDIILTEETEPLMKTASTIYEFIADEDFLPDYEAWKQEMLRWKDKEGILEGYTAEWFSHAVEDYINYNDELKAKWESIVAHSPAVTTFQGHFLDEDDFLETIGWHENPVPFTVGLRLNEPDFDGDDWKIELFLRDKKSGAIQFFEGLNRLKKSWQAYADKIDREQDRFRQIVPWLTIESGTSLLTEEEAWIFLSEASETLVSMGIEILLPSWWQIVRDSNMLLKAKVSSAPRGESFVGMNALMDFNWRFATNGIELTEEEFEQLVANKRRLVNIRGQWIKIDPNFIKQMKKLMERAETEGLHMSDILARELTERSETREDDDLFDASAFSDVRFELSYQLKNMIRKLSQRDDLPSYPVSKYFHGTLRAYQEDGLNWLIFLRNCGFGACLADDMGLGKTIQMIAYFAYLKEQGQQTPSLIIAPTSVLGNWQRELETFAPGLTAALHYGPKRPKGEAFQTSYKDADIVLTSYGLAQSDFDDLSSVAWNCICLDEAQNIKNAHTKQSRSIRKLKGLHHIALSGTPMENRLTELWSIYDFMNKGYLGSLGSFHKRFVLPIEKDRDEKRIEQLQQLIKPFLLRRTKQDKEVALNLPEKQEEKEFVPLSAEQASLYEQLVKDTFEHMSSLAGMQRKALILSMLGKLKQICGHPALYLKETGSELLNGRSVKLEKLLELTKTIRESDESCLIFTQYLGMGDMMKRLLEKSFGEPVKFLNGSLSKLERDKMVEQFQNKEFPILILSLKAGGTGLNLTAANHVIHYDRWWNPAVENQATDRAYRIGQKRFVHVHKLITTGTIEEKIDQMLESKQSLNDQIIQSENWITELSEHELEELFTLNASAITG

SEQ ID NO: 9211 - protein, 48 aa, Bacillus licheniformis
MKQPFQLPEKMARFRGQFEQSARDFLIGTVIKGHKHKKQLSIADSCFI

SEQ ID NO: 9212 - protein, 292 aa, Bacillus licheniformis
MKMIAVDLDGTLLNSESKISKENIDAIKKAREHGIEVVVATGRASFDVQTIFEPTGIKTWIISANGAVIHDPEGSLYHSVPLDRKRAEGILRWLEENNYYYEVFSDEAIFTPQNGRELLDIELDRLKSANPEADLSRLELAAEQQLSQNGYAYISSYTDLFLAGKDVNVYNILAFSFHKEKLETGWRQFEDAQDITLVTSAEHNFEIEHLQASKGLALEKLSHKLGISLQETAAVGDSLNDFSMLKIAGKSFAMGNARGDIKEMADEVTLTNDENGVAHILHQLIEQQVKPV

SEQ ID NO: 9213 - protein, 256 aa, Bacillus licheniformis
VYQEERLISIIDYLKEHKRISVEQICSLFGVSRDTARRDLVKLQEQGAIIRTRGGAILPTVHDEVKDYSGRLGMVSEEKSMIGKAAASLIREGDRIILDASTTVQSCAEHLPDVNCTIITNSINLADVLSSRKGADIRLLGGKLQKEHRFLYGASVIEKLSCYHVDKALIGVVGVSEHGLTIAHEEDGMVKRKMISQAKQVIALADHSKIGRTDFYRYAELSDIDLLITDRLPSKPFQKLLDEHDVELLVAEHHDT

SEQ ID NO: 9214 - protein, 221 aa, Bacillus licheniformis
MNMLIDSVHIPEIERLLDSFPAGGVTTNPALIARENKPFKQQIQDIRRLLPEHLPLHAQVIADHWRDMVDQAKALYNWLDGNVSVKIPVTTQGLYAIRKLAAENIQTTGTTVYTAAQAVLAAKAGASYVAPYVNRIDQEYGNGAGVVKTIVGLFNTYCLNCKVLAASFKHNRQILAVMEAGSHEATISPELISRLADHPAVDRDIHAFREIWHSQYGTFSF

SEQ ID NO: 9215 - protein, 261 aa, Bacillus licheniformis
MEMNKGKVALICGGGQSLGEALSYRMAEAGYDIAVADINGENAERTADHAAGQYGVKSLWIQADFTKEADVKKMIGRVTDEFNKIDVMVYSAGIAKSNKITDFELEDWERTIEVNLTGYFLCARETSKVMIEQGSGSIIQINSKSGKVGSKHNTAYSASKFGGVGLTQSLALDLAEHNIRVNSIMPGNLLKSPMFQSLIPQYAKKLGIPESEVERVYTEKVPLGRGCTYDDIANAILFYASDQASYMTGQSINVTGGQVMH

SEQ ID NO: 9216 - protein, 123 aa, Bacillus licheniformis
MVMLYETKINRIGAQAAAFSDEKMLILFGEGAPDELKDYCLSIDIKPVEGDFNEGDELILGGESYKITAVGGAVRQNLANLGHITLKFDGSVSAELPGTLYLERKEQLPEVSAGDCIQVKRFS

SEQ ID NO: 9217 - protein, 335 aa, Bacillus licheniformis
MSSYRSVEVSKGPGGFGGPLVITPDEERNKIVYVTGGNKPDFADHLAELTGCTLVDGFKTTVPESEMAAVIIDCGGTLRCGLYPQKRIPTINVMATGKSGPLAAHITEDIYVSGVKKENIKLLGAVEEPEQSNIPEEKQIQNKQNHYSTEKKISEQQSPKGMMAKIGMAMGSIVSTFYQAGREAIETVIKTILPFMAFVALLIGIIKESGIGDIFAKYLSPFAGSLPGLLLISLVCSFPLLSPFLGPGAVIAQVVGSLIGVEIGKGNIPPNLALPALFAINSQAAADFVPVGLGLAEAEVETVEVGVPSVLYSRFLTGAPTVFIAWLASFGMYDS

SEQ ID NO: 9218 - protein, 182 aa, Bacillus licheniformis
MKNVTWLAEKFMDLFRHGGEVFVGMLTDIVPLLIMLLVAMNALIRLIGEKRVEALARKSGKNPLTRYMVLPVIGTFMLANPMTLSLGRFLPEKYKPSYYAAASYSCHTHNGLFPHVNPGELFVFLGIAAGITTLGHETTELALRYLLVGIVTNFLRGWVTDMTTAYVAKQQGIALKDSIDLK

SEQ ID NO: 9219 - protein, 147 aa, Bacillus licheniformis
MIIYFIIALGAAWLLQSVLGFWQIRHFNRTFAAYRRIGRVAVGRKTGLLRAGTVVLFVIDKRNKILKASKMQGVTVFSRIRPLKGFEGKYLLKIGQAELARHDRLTRLAIEDALRTFDIITKGGDVPQKKTRLQKLMSFQIKKRGEI

SEQ ID NO: 9220 - protein, 320 aa, Bacillus licheniformis
MEMRDDKRLLIKVCKMYYEEDMTQSQIAKATGIYRTTVGRMLKKAREAGIVKITIDDHVGTHYDLERELEQLLGLKEVYICDAKPEQTAEDKKKLVGKAGAEILKRVVKDGDTVGFAWGTTMAGMIGEFHGVKKRSASFVPLVGGPGAMDTKYHVNSIVYSIAGDFGGTPYFIDAAAVVEKKETKEEIVKSHYFKKIERLWNGLTVAAVGIGAPLSSSNMIWTGFYGDQDIERLEEKHAVGDICSRFFDRSGALVETEIHDRTIAIDINRLKDLEYSIGLAESHEKVPSIIGAAKGRYINVLVTTAETAREIAEEVRNQS

SEQ ID NO: 9221 - protein, 115 aa, Bacillus licheniformis
MFNEIMLVGRLTKDPELRYTSDGVPVANVTLAVSRPFKNAAGEVEADFVNCTLWRKTAVNTAEYCEKGSIIGLSGRIQTRQYVNSEGERTFITEVVARSVRFLGESRKAHEPADA

SEQ ID NO: 9222 - protein, 123 aa, Bacillus licheniformis
MNHFYLKEVFVIASNSAADCRQYMPMICFSAGNKKHEISTYANEGIMFRYETKDGMEIYEFQVTLKQKELSFRLYAWDGGSYVRVYSERWLSSPVFFQFLKNTYFSNKNEMIFMISGRKKQKL

SEQ ID NO: 9223 - protein, 137 aa, Bacillus licheniformis
MKTFRLIDLKIVRQDDTSKRLEEFPLIDGLIINKEDGENHWMVEGLVSKEYRYFFEYLLQEGKEVKAYVTITKKSNRPAQLLAKVKNITVLGEHVSVLLDGKMVSSKLRKGSDKILEDLMKEGYSGDRLLEAFKQNI

SEQ ID NO: 9224 - protein, 126 aa, Bacillus licheniformis
MWKEFKSFAIRGNVIDLAIGVIIGGAFGKIVTSLVNDLMMPLLGLLLGGLDFSALSFTFVDAEIKYGLFIQSIVNFFIISFSIFLFIRYISKLKKKDAEEEKAAPDPQEELLKEIRDLLKEQTNRS

SEQ ID NO: 9225 - protein, 144 aa, Bacillus licheniformis
MLDAQQIKEIIPHRYPFLLVDRVTEVEEGKRAAGYKNVTVNEEFFNGHFPDYPVMPGVLIVEALAQVGAVALLMKEENRGRLAFFAGIDSCRFKKQVKPGDQLHLELEVLRFRGSIGKGKGVAKVDGEVVCEAELMFSLGEKQE

SEQ ID NO: 9226 - protein, 275 aa, Bacillus licheniformis
MLRSMITASNTMFELQKQIDNISHNLANTDTTGYKAKNTSFSELIRQQIEQVNEKNNEVAASRKTPPGLRLGVGAVMTDRLTHKQGSLKETGRDLDIALTSPYQYFQVNVGGEVQYTRDGAFYLTPAAGNANQMQLVTKEGHAVLDENGNAIRFNQRYKHIKVDESGSVTVSSDNQGEAPLRFNLGIVRAVKPQALTEEGSNLFSVSDELRATALINLNGAGRQDISLKQGFLESSNVDVSKEMTDLISSQRSYQMNSRAITMGDQMMGLINSVR

SEQ ID NO: 9227 - protein, 279 aa, Bacillus licheniformis
MLKGLYTATSAMITQQRRTEMLTNNIANANTPGYKEDQGSIRSFPEMLLSRIESDSFKAGSASRSFSTQTPIGSINTGVYMQELKPQFSQGDLQSTNEPTDIAISEAEVPVNGETNDKAALFYAVRLENGDVRYSRSSRFSLNENNQLTINGRLVLSTENRPITVGSENFQVAEDGTVTENGQNLGRIDVRIALDTRNLAREGDDLYRTENGEALPSAVGNPEVTYSVKQGMTERSNVDVTRAYTEMTAAYRSFEANQKVLQAYDKSMEKAANEIGRIG

SEQ ID NO: 9228 - protein, 43 aa, Bacillus licheniformis
LQFIFANTERLFYNGIQTYYSFYRQPFSSFKAFHIKKPHSQKE

SEQ ID NO: 9229 - protein, 333 aa, Bacillus licheniformis
MFARDIGIDLGTANVLIHVKGKGIVLNEPSVVALDKNNGKVLAVGEEARRMVGRTPGNIVAIRPLKDGVIADFEVTEAMLKHFINKLNVKGLFSKPRMLICCPTNITSVEQKAIREAAEKSGGKHVYLEEEPKVAAIGAGMDIFQPSGNMVVDIGGGTTDIAVISMGDIVTASSIKMAGDKFDLEILNYIKREYKLLIGERTAEDIKIKVATVFPDARHEEISIRGRDMVTGLPRTITVTSKEVEEALRESVSVIVQAAKQVLERTPPELSADIIDRGVIITGGGALLNGLDQLLAEELKVPVLVAENPMDCVAVGTGVMLDNMDKLPKRKLS

SEQ ID NO: 9230 - protein, 91 aa, Bacillus licheniformis
VHDYIKERTIKIGKYIVETKKTVRVIAKEFGVSKSTVHKDLTERLPEINPDLANEVKEILDYHKSIRHLRGGEATKLKYKKEEIFEREPVQ

SEQ ID NO: 9231 - protein, 36 aa, Bacillus licheniformis
VGVFQNSTWKSIKRRSCANSEFFHKTDLISHFSHPF

SEQ ID NO: 9232 - protein, 142 aa, Bacillus licheniformis
MEHINRKIIHQLNQSTRMVAKKTNEQLEAYGLYGSQWSILYCLHTYGPMTQKDIWTYLHVEAPTVTRTVSRLEKNGWVERIQGDDKREKVVKMTEEAKIKYDDIQLKMKEFEEEMLSVFEERDKKIFQRLLSQLLEGHQEEL

SEQ ID NO: 9233 - protein, 414 aa, Bacillus licheniformis
MKQAEPIWTRDFIMVVLINLFIFVYFYALLTVLPVYAMQELGGSESEGGLLISGFMLSAIFARPFSGAVIERFGKKRMALISVVLFTLASFLYIFIHDIYLLLGIRFFQGIWFSIITTVTSAIAADLIPPARRGEGLGYFAMSMNLAVVIGPFIALNLLDKMSFSDLFILFSGIVTVAILCTALVRIPKGNDIRSAVFRLSFSNMFEKGAIRIATVGLFVSFCYSSVISFISVYAKSLGLIEASSYFFMVFAVTMMITRPFTGKLYDKVGPGVVIYPSIIIFCAGLFLLALQTAVRCFCYPELSSASATDLSHRAFRPWRSSLRRLTGAAMQQRLILRCLIPASQSDPMFSGWLWHKPVFQTFIYSQAFSCSSTCFCIHGAKNLHPQRRSGIYQWLNKPFNLAGPGTPGSFHAG

SEQ ID NO: 9234 - protein, 192 aa, Bacillus licheniformis
LNYWLFTRIHQLANHNDILDGAMILITEKAIYMYALILLLIWIFGNRSYKITVLQAGVTGIFGLAANYLLSLVYYEPRPFVAHHVDVLIHHAADASFPSDHTTGALAISIAFWLYHRKIGSCLIAFGLLTGFSRIWVGHHYPVDVLGSILVALFVSLVMFRFSTYVQPLFERIISLYESILRKLRKAVSRTV

SEQ ID NO: 9235 - protein, 309 aa, Bacillus licheniformis
MSKVLIFGHKNPDTDTICSAIAYAELKKELGMDAEPVRLGEINGETEYALKKFNAEVPRLVNTVANETDSVILVDHNERQQSVDDLDQVRVLEVIDHHRIANFETSDPLYYRAEPVGCTATILNKLYKENGVEIKKDIAGLMLSAIISDSLLFKSPTCTEEDVKAAKELAAIAGVDADSYGLDMLKAGADLSAKTIPQLLSLDAKEFTMGSHKVEIAQVNTVDTNDVLSRKEEVDAELAKAVSEKGLDLFVFVVTDILTNDSVVVASGQAAQAVEKAFNVTLADNTATLKGVVSRKKQIVPPLTEALKG

SEQ ID NO: 9236 - protein, 58 aa, Bacillus licheniformis
LFKHTKVLQYPAKPERPDPVFAKKMQEILGGQYGEISVAMQYLFQGGIRGEMKSIKIC

SEQ ID NO: 9237 - protein, 245 aa, Bacillus licheniformis
MIKNTSHRPFPLPEGPWMMTQTWNHVLFAHWAVDPEAIRGQIPAALELETFNGKAWIGILPFLLTNMRPRFLPPFPFISRFPELNVRTYVAYKGVPGIYFFSLDAASRLAVAGARSMFHLPYFYAGMRFAQHKDRFQLTSRRKRSQAEFYAEYQPVSEPFSADKGTLEYWLAERYRLYTTHKNELYYEDIHHSEWQLQQAEADIFPGPLTSANDLTLPDTAPLLHYAKRQHVLFWPLKKWESEET

SEQ ID NO: 9238 - protein, 135 aa, Bacillus licheniformis
MKLKDIMTTNAECCEPSAPIAEIAGKMRDYNVGSIPVCENGKLTGIVSDRDIVIRCVAENETDAAARDIMSTQMVTGRPDMSAEEAGDLMAEHQIRRLPIVEDDRLVGIVALGDLSVSHADEKAGEALSEISKPA

SEQ ID NO: 9239 - protein, 318 aa, Bacillus licheniformis
MRVFQGEGWTWYQLGPHEKTTAQGLIQPDHWPECRNWFQGVPSANINCLDINAAVQGKEAIYGSYIYDQEAEVQQNRTAFHFYLTKDYFFTMNLDISQFEEANRRPIDQHLKRCKDAPEVFLVLLGELMRMYLKELEHFEVHLGKVRWGFHHDNNKSIIELIHKRRHELLVIRSLILSMKKVAMGLKETFLTKSFDEIEQRRTFYEIDRGMSLIKEYANEINYLLHSEEVVTSHRGNEIFKALTIFTTIFTPMTAFGALWGMNFEVMPELSLKYGYLFSLILIAVSTALVYWYLKKKGWTGDLLRDKKRYMKRKGSFK

SEQ ID NO: 9240 - protein, 432 aa, Bacillus licheniformis
LELLKLIAVAGLIAFTGFFVAVEFAIVKVRRTKIDQLIIQKKKGALAAKEVTSHLDEYLSACQLGITVTALGLGWLGEPTMQTLLHPLFSKIGLNESITHILSFLAAFLSVTYLNVVVGELAPKTIAIQKAETVTLVFAQPMIWFCRIMFPFIWLLNHSARMITSLFGLKPTGEHELAYSEEELRTLLSESYRSGEINQNELKYVNNIFKFDERTAKEIMVPRNEMTVLSLDDSLKKAKQLIKETKHTRFPVMEEDKDHITGMINIKELLLAELAGEFSLETKSLKPYIHPVIHVIETIPVYQLFVKMQKEHTHMAILVDEYGGTSGLVTVEDIVEEIVGDIRDEFDTEEVSAVQKLEDDHYILNAKVLVSDVNNLLGIHLSDEEIDTIGGWMLTQNIESKPGTTIESEGYRFKVKEMDGHRIVAVEVEKTA

SEQ ID NO: 9241 - protein, 403 aa, Bacillus licheniformis
MQMGDTVFMFFCALLVWLMTPGIALFYGGLVRSKNVLSTVMHSLSSIAIVSIIWILFGYSLAFAPGNPLIGGLDWIGLHGVGFEPNADYSETIPHTLYMMFQLTFAVLTTAIISGSFAERMRFPAFILFSVLWAVFVYSPVAHWVWGGGWLDELGAIDFAGGNVVHISSGVAGLVVAIVLGKRKNMSDTAPHNLLLTLLGATLIWFGWFGFNVGSALTIDEVAMTAFINTNTAAAAGLIGWILAEWLINKKPTMLGAVSGAIAGLVAITPGAGFVTPFSSVWIGLIGGIVCFWGGFSLKKKFGYDDALDAFGLHGLGGTWGGIATGLFATTSVNADGANGLFYGDTSLLWKQLIAIAATYLFVAIVTYAIIKIVSIFFKLRASEDEESLGLDLTLHGEKAYQD

SEQ ID NO: 9242 - protein, 116 aa, Bacillus licheniformis
MSGQMYKVEIVTRPTNFEKLKTELAKIGVTSITFYNVHGCGLQKGHTELYRGVKRESNVYERLKVEIVVSKVPVEKVAETAQNVLKTGEPGDGKIFIYEIKNTINIRTGEEGPDAL

SEQ ID NO: 9243 - protein, 190 aa, Bacillus licheniformis
MNTIPYVIEKTAAGERSYDIFSRLLKDRIIMIGSEFNDDLANRVTAQLLFLSAEDNEKDISIYINSPGGSTSAGYAILDTMDYVKPDVRTICVGMAASMGAILLAGGAKGKRYALKNSEIMIHQPLGGVKGQATDMEISAKRIIKLREKIERFFHERTGQPIEKLKADMERDYFMDADEAKAYGVIDAVL

SEQ ID NO: 9244 - protein, 201 aa, Bacillus licheniformis
MNELEQQALMKYCLRMTGDKWDAEDLVQDTILKLMEINRTDASHAYQKTVAKHKWIDLLRKRKRESFLSEDNLEDGRAERMKAADDFEHLLKQLSGILTPKQLTIFLLKDVFSFQLHEIAETLGKPESSVKSLLFRSRQRLKRLSPEVLQKEPADGDDEHIGLLVRAILHHNPDDLLEFAKQTWRFDASQPSCISMMRCAA

SEQ ID NO: 9245 - protein, 57 aa, Bacillus licheniformis
MHSHSLKEASYLINGWLRRFDTGFFMIVTKKAPIAFDRRPEGSVPYDWLESSDWVPS

SEQ ID NO: 9246 - protein, 291 aa, Bacillus licheniformis
MKEEEKNRTSKITKLQQFFRKRWVFPAIYLTSAVVVLTAVLWYQSASNNDVKDQLADDGKKSAYDNRDDAVEVGKPVENVAMPVADSENVSVVKKFFETDATKEEKEAALVNYNNTYSMSKGIDLAEKDGKTFDVSASLSGTVIKAAKDPVLGYVVEVEHEDGLSTVYQSLSEVSVKQGDKIEQNQVIGKAGKNLYNEEGGNHVHFEIRKDGVALNPLNFMDKPVSSIEKAMEEQASEVKEPAQPSVEEKSKTEDKAKDQTDGKDDKTKREDSSEGSENQDGTQSDDSSQS

SEQ ID NO: 9247 - protein, 165 aa, Bacillus licheniformis
MKLRIANREDLPAVVDIYNSTIASRMVTADTEPVTPEERLNWFLSHTEERPLYIAENEKRDIVGWISFESFYGRPAYAKTAEVSIYLHEDHRGKGAGSAVLEKALEAAPKLGIRSLMAFIFAHNEPSMKLFKKYGFTEWGHFPGIAEMDGIRYDLKILGKELNEA

SEQ ID NO: 9248 - protein, 147 aa, Bacillus licheniformis
MDMERFHQMPAFMKEEMDNLKRVAAPFLKKRLIFLFIAIPLLLASFVYLSSFWGQAAYGTDSMIKIGCAAAGAAFGMALFRESSYQKRNVQQSVMKYILERMQTSEVLSDERKSRYVRAVKEEPFTVMRSFLEFLNEEEIRRRRLAE

SEQ ID NO: 9249 - protein, 488 aa, Bacillus licheniformis
MDIIKNISITSIFLGFILVLNTLLAIVVIFRERRDASSSWAWLLVLFFIPVLGFILYLLFGHNLSRNHLFQWEDRKKIGIEKILEQQLTKLKNREFEFRNKATADSKDLIYMHILNNHAVFTEDNAVELLTDGRQKFDRLLRDIENAKDHIHLQYYIYKGDEIGKKLRDALIKKAKEGVEVRVLYDELGSRSLRKSFFKELKKAGGFVEVFFPSRFKFINLRMNYRNHRKLVIIDGVIGYVGGFNVGDEYLGLNPAFGYWRDTHLRIKGTAVHSIQTRFILDWNQASHHHDITYMPNHFPDIDSHGNIGMQIVTSGPDSEWEQIKNGYIKMISTAKRSILIQTPYFIPDASLLDALRIACLSGVDVRIMIPNKPDHPFVYWATYSYIGELLKAGASVFIYDNGFIHAKTIVVDEEISSVGTANIDMRSFKLNFEVNAFLYDEEIARSLVLSFEKDLQVSRELTFEEYLNRSKSIRFKEAISILLSPIL

SEQ ID NO: 9250 - protein, 477 aa, Bacillus licheniformis
MNRRPFNQRTVVSIVYVTAMFMAAMDASVINMALPAIMTEFQTLPSAAGTVNIGYLVSLAVCLPAAGWLGDRFGTKRVFLAALSIFTAASALCGIADNLVALNAFRVIQGAGGGLITPVGMAILFRTFPPHERAKISRVLVLPIAVAPAVGPIISGFLTDQLSWRWIFYINIPIGMIILLFGLLYLHEHLEPEAGRFDWLGFLLAAPGMALAVFALSQGPARGFGSPDVLAAGAGGMMLLAILVFVELKAEHPLIELRLLKDRVFGMMSVISLLTAGGLLGMLYIFPLLCQEALGYSATDTALITFPEALGLMLASQLMPRSLAKLGPRRVISVALLGAAVLFGLLSLTGYGSNLWLLRLLLFLAGFFLGHAVGAAQVVCFANISSSSMGRATTLFNVQNRLGSAFGVAVMSCVLAVLSQPSAGIEPDLSAYRTALLCAAGFLMAALFIALKLKDADTGRQMDKHASAPKGAAASGE

SEQ ID NO: 9251 - protein, 74 aa, Bacillus licheniformis
MTNPFENEHGTYVVLMNQDGQYSLWPAFIHIPAGWEVVCGEASRSACIDYISSNWTDLSPNSIKLAAEVHGGQQ

SEQ ID NO: 9252 - protein, 2385 aa, Bacillus licheniformis
MPECQHNRKPLSGAQAGIWFAQQLDPENPIYNTAEYVEIKGPLDQELFEKALRHVIKEAESFHARFGEDQDGPWQEIVPSTDFPLHYIDVRSETDPEQAAKSWMMDDLARPVDLTRGPLFTEALFKAAQDHYFWYQRTHHIATDGFSFTLIAERLSKIYTALMQNKSIDQSGAFGSLDLILAEETAYRASEQYQEDRRFWLGRFSDEPEVVSLAERAPRTSSSFLRRSEHLPSEDADRLLSAASRMGATWHETVMAAAAIYVHRLTGANDVVLGMPMMCRLGSAALHIPGMVMNLLPLRIGMQPQMSIGELVKQISGEMMKLRRHQHYRHEELRRDLKLLGENQRLFGPQLNLMPFENRLNFAGCQGIVHNLATGPVDDLSINIYGRPDGGGLKVNMDANPAVYHADELEDHGNRFLTLLKTIAVCEQTQPVGTLDILLPEERAQILIEWNQTEHGLPKESLPQRFERMAKECPESPAVVCNDKVLTYSELNQKANQLAHLLIDQGAKPETFIALALPRSAEMVVSMLAVLKAGAAYLPIDPDYPADRIEYMLNDAQPLLVMTSKEAQDTIGSQMPKLILDEQTVMEKMSGCSEENPGEQHSGNQPAYMIYTSGSTGRPKGVVVQAESLFNFLLSMQDMFALNQDDRLLAVTTIAFDISALEIYLPLISGSAVVLAEKETVQDPSELAKMIETYEITIMQATPTLWHALASSAPEKLKGLRALVGGEALQSSLARQLQQLACSLTNLYGPTETTIWSTAAALEGNCTEPPGIGCAIWNTQLYVLDAGLQPVPPGTAGELYVAGTGVARGYLNRHALTAERFIANPYGPPGSRMYRTGDIVRWREDGSLDYIGRADHQVKIRGFRIEMGEIEAVLANHPVVKQAAAIVREDQPGDPRLFAYAVPASGESLDPAELRRFVGETLPDYMIPSAFVILDELPLTPNGKLDRKSLPAPAVSMHTGGREPRTPQEEILCDLFAEVLGVPRVSIDDSFFDLGGHSLLAGRLVGRIREMLGVELGIGRLFDEPTAAGLAKQLDQAQSARPALRKRERRKEIPLSFAQRRLWFLHCLEGPSPTYNIPVVVHLTGDLDQKALAAALGDVATRHEPLRTIFPDQQGTTHQLILEEDQSRPELTVSHVSEHELEKVLAEAVRHRYHLEKEPPFRAQLFVLGPDKFVLLLLLHHMIGDGWSLMPLTRDLETAYNARLQGEAPVWEPLSIQYADYAVWQEYLLGSENNPDSLIAKQLEYWSKALEHLPDQLELPTDHPRPSESSYRGGTIDLSIDEQLHGRLFDLSRSTGVSMFMILQSALAALLTRLGAGHDIPLGSPIAGRNDDALGEIVGLFVNTLVLRTDTSGNPSFRELLNRVRKVNLAAYEHQDLPFERLVEVLNPRRSRARHPLFQIMLAFQNTPEPELDLSGLKSDIEIRSVGAAKFDLTIELREHRKADGTPAGIGGFLEYSTDLFERNTVQTLAERLVRLLDSAADDPDQPIEKLDILLPAERENMLADWSKSSNSIPCSSLPVLFEKQAAKDPEAVAVICENNALTYGELNKRANRLAHLLIAKGVGPEQFAALALPRSLDMVVGLLAVLKAGAAYVPLDPDYPAERIAFMLNDAHPVCIVTSSAVESNLSVPGSVERIVLDDPCIQEELKGCAAANPCDADRTAPLLPLHPAYVIYTSGSTGKPKGVVVPHQNVVRLFGATDQWFHFGADDVWTMFHSYAFDFSVWEIWGALLNGGRLIVVPHTISRSPAEFLNLLVREGVTVLNQTPSAFYQLMQADRDNAETGKLLSLRFIIFGGEALELKRLEDWYERHPDHFPRLINMYGITETTVHVSYISLDQQTAALQANSLIGQGIPDLGVYVLDEYLEPVPPGVTGEMYVSGGGLARGYLGRPDLTADRFVADPFGPPGTRMYRTGDLARRRQDGSLDYMGRADQQIKIRGFRIELGEIEAVLVRHHRVNQAAVVVREGQPGDKRLIAYVVPASEEETDPAELRRFAAGTLPEYMVPSAFVKISELPLTPNGKLDRKALPEPDFAAAVKGRGPRTPQEEILCDLFSEILNAPRVGIDDGFFELGGHSLLAVQLMSRIREALGVELGIGDLLEAPTVSGLAERLESGGRQSALDVMLPLRTGGSQDPLFCVHPAGGLSWCYAGLMTALGKEYPIYGLQARGIARQEELPDTLDDMAADYIRHIRTIQPTGPYRLLGWSLGGNVVHAIATQLQEQGEDISLLVMLDAYPNHFLPIKDAPDEQEALIALLALGGYDPDSLDGAPLNLSSAIDILRRDGSALASLDEAAILNLKETYVNSVRILSEYKPRVFHGDILFFKSTVIPEWFDPIDPESWLPYLNGNIDIHDMDCRHKDLCQPEPLAEIGRRVSEKLDDLKKDTDK

SEQ ID NO: 9253 - protein, 308 aa, Bacillus licheniformis
MAIPAILPYQMPEASNMPKNKVSWTPHPKRAALLIHDMQQYFLNAYRYGESPVTDLLANIKKLRKRCAELGMPVIFTAQPGAQTPEERGLLQDFWGPGIGPDPDEQKIVDELKPNEGDIVLTKWRYNAFRKTNLLGVLEEQGRDQLIITGIYAHIGCLMTACDAFMQDIETFFVGDAVADFSLKHHEMAITYAADRCSVTITAEQLLSRLKDGESHEHAKESSHALTKQTIREQVASLLLESPEKISDSENLIYRGIDSVRIMSLAERWRRAGREVSFVELAEDPSIENWWRLLSSSKEAPLPNADYQ

SEQ ID NO: 9254 - protein, 540 aa, Bacillus licheniformis
MLKGCTTWPKEFADKYRKEGCWRGETFGKMLRERAEKYGSRIALTYGDIHLSYRELDRRADSLAGGLLKLGIKKNDRVVVQLPNIIEFFEVCFALFRIGALPVFALPSHRHSEITYFCEFSEAAAYIIPDRHAKFDYRKLARQVKEKLQGLRHVIVAGEPEEFEALASLYDQPAPPQNVYPEDVAFLQLSGGSTGLSKLIPRTHDDYIYSLRVSAEICRLDHNSVYLAALPIAHNYPLSSPGVLGTLYAGGRVVLASGGSPDETFPLIDKERVTITGLVPPLALIWLDAASARRDDLSSLQVLQVGGAKFSAEAARRVSSVFGCKLQQVYGMAEGLVNYTRLDDPEDTIVHTQGRPMSPFDEIKIVDEKGRELGPGQTGELLTRGPYTIRGYYKAEEHNAKAFTEDGFYRTGDLVKVNSSGYLIVEGRAKDQINRGGEKVAAEEVENHLLAHPGVLDAAVVSMPDQFLGERACAYIIPRGAAPAQAELQSFLRERGLAAYKIPDRVEMVEDFPQTGVGKVSKKELRAAIAEKMSAAENVR

SEQ ID NO: 9255 - protein, 396 aa, Bacillus licheniformis
MIERHVVSEALADQLLKEYQAGASFFFSSPERTILAEGVFASVSQTEEQSLAQRTAEVLKKARENGQENPIVVGAVPFDDAKPAQLTVPVEAWHAGPLTCEEDDKEVPEPALHPYDVQQIPSPEAYMAGVRQGLAGIAAGEYSKIVLSRSLQLTSPIKVDIGQLLRNLARRNTSGYNFAVDLTGQSSEAPRTTLIGASPELLVSRSGFRVTANPLAGSRPRSDDPEEDRRRAAELLASPKDRHEHAVVVEAVASALRPFCRKLEVPEPSLISTPTMWHLSTELKGELTDLSVSSLELAAALHPTPAVCGTPTNAAKEAIKQIEPFDRGFFTGMVGWCDADGDGEWVVTIRCAEAEEHALRLYAGAGIVAGSKPEDELAETSAKFRTMLLAMGMNSE

SEQ ID NO: 9256 - protein, 256 aa, Bacillus licheniformis
VKGKVALVTGASQGIGKEVALALAGRGVFVAAADQNRKGLLELEDELEQKGLQGSGFAADVGDSAAVDQLIADIEREIGPIDMLVNVAGVLRTGLIHSLSDEDWEKTFNVNSTGVFNVSRAVARRMVPRRTGAIVTVGSNAAAVPRMHMAAYAASKAAALMFTKCLGLELAEYNIRCNIISPGSTDTPMQRSLWQCEEAAQGVIEGSLETFKTGIPLGKLASPADIADAVVFLLSDGARHITMHDLRVDGGATLGA

SEQ ID NO: 9257 - protein, 282 aa, Bacillus licheniformis
MAQEKLQQSVNAAECIPVAIPGTEQRCMRSLDGSRTYRIFIAKPFGEQPPAGYPVIYLLDANSVFGTMVEALRMQSRRPDKTGVGTAVIVGIGYETDAPFDRGRYYDFTLPESGAELPMRPDGADWPEPGGAKAFLSFIEQQLKPEIEQEFTIDVKRQAIFGHSLGGLFVLQTLFTKPDLFQTYIAGSPSIHWHPSFFDKEHDFVSKLQEADGDVKVLLGAGELEKTHKSGMNDNAKRLADRLAALESQGVRAEYHEFKGEGHISVLPVLISRALRFAFKPD

SEQ ID NO: 9258 - protein, 339 aa, Bacillus licheniformis
VPKKVAVIYAVFIVLILTICYLSITVGSFAVHPAELLSTLLHINPNEQYAILLFELRLPRIVTAALVGLGFGIAGSVIQAMTRNGLADPGILGINAGAGAAIVGYMLIFQGQTETTSLLAAMGMPFFGLIGGILAAIFIFIFAWHAGNLDSGRIILVGIAINSGFSAVSLYLSLKMNPNDHEMATVWKNGSIWSANWTYIQAALPWLLVLIPFLLMKSGLLDTIRFHEDTVKSLGVSANIEKVVLLTACVGIISACVAISGSMAFVGLIAPHISRRLAGVLHRHSLLLSGLIGMFLVLCADFAGKLLFQPSEVPAGIILAIFGVPYFLFLLFKQKKTVH

SEQ ID NO: 9259 - protein, 334 aa, Bacillus licheniformis
MHSKQMTRIIMIAAPFAILLSVFLSVCYGAKQLEPEVIFSALLHFDPGNTDHQIIWHSRLPRAVGALLIGAALAVSGALMQGVTRNYLASPSIMGVSDGSAFVITLLMVVIPGSSSLEMMGYSFIGSAVGAGLVFGLASVIPNGFMPVQLAIIGTVTSMLLSSLSAAISIYFQISQDVSFWYSARLHQLNPELLKYAVPFFVIGIILALSLSKKVTALSLGDDISESLGQKKQAVKWTAMAAVVVLTGCSVAMAGKIAFVGLVVPHITRFLVGSDYSRLIPCSCVLGGVFLTLADLLSRLINYPFETPIEVVTSVIGVPFFLYLIKRKGGEQRA

SEQ ID NO: 9260 - protein, 318 aa, Bacillus licheniformis
MRKISIFLFILLLALGAAGCGNSKEKAGGDGKSTASAEKSIEYLDHTYKVKIPAEQIVITGSVESMEDAKLLDVHPAGAISFSGKFPDLFKSITDKATAVGEKMEPNLEKILELKPDVILASTKFPDKVVKKLDNIATTIPVSHVSSNWKDNLKLLAELTGKEDKAKQIISDYEADLKEAKTKLEKTAKDTKALVVRIRKGNIFIYPEDVFFNSTLYGELGFTAPKEVKAAKAQELVSLEKLSEMNPDYMFVQFSDDENADNPNALKDLEKNPIWKSISAVKNDRVFVNAVDPLAQGGTAWSKVEFLKAAAEKLAQNK

SEQ ID NO: 9261 - protein, 531 aa, Bacillus licheniformis
MKSSYFYRLLQIDHIRKPGDLPDEQQLADSFVLIFHLKGEGRIDIQASGRPLQKETLYIVPPYETFGITASSEEISVYLIRLQPYCYEDRRLTLQADTDPDAFSDLQMMNVHPVGNLASRLQELSALWPASSALQELKCQADLQQLLYDIYSAKLTHPENTASAIGKTKEYIEEHSDAHLTLDQLAQMAGISAKHYSETFKKLYGQSVTEFITETRMTKAKQLMAKASYKLREISSQIGYQDEFYFSRTFKKHTGLSPTVYMKKRRRKLAAYGQNTIGQLIPLHLIPYAASLHPKWTSYYYKHYAADIPVHLSAYRFHEPWEENLRTLSSADPELIISMDSVSHEEREQLQSIADVFFLPSQEQWRRHFMLTASHLDEEAEAHKWLLSYQRLTETAKEALYPICGRRSFLFLRLHKHEIYLAHNRSVQDVFFGDLGFESAVSLEEPTDRAVSIETIAAYQPDIIMIFIFKEPETLAFYRELQQSAAWQDLKAVRHHRVYQVNSDPWREYSACSHERIIRQAVRLLSGKNPF

SEQ ID NO: 9262 - protein, 124 aa, Bacillus licheniformis
MKKSLDAIAKWGKITGVFMIIAGGIYAFFGISLLIIGAAPGVLMIFSGIYLLKSANAAQKMSHDMPQEPHEALLDNYVKFMKWQFFYLLSNIVIFILCIIVFFFLIFLGVLADSYSGYDPYYYE

SEQ ID NO: 9263 - protein, 213 aa, Bacillus licheniformis
MKIGIIGASGKAGSMILKEASERGHEVTAIVRSASKMANSDAAVIEKDIFNLTAADIKGLDVVVNAFGAAPGQEHLHVEAGRKLIELFKQVPETRLIVVGGAGSLYVDEEKTTQLYDTPEFPKEYLPTAKNQGQNLQDLKETDGLKWTFISPAAFFNPEGKRTGSYQKGQENLIVNTAGESYISYADYAIAVVDEAEKGEHVNERFTVVGEAQ

SEQ ID NO: 9264 - protein, 133 aa, Bacillus licheniformis
MVNTRLSVAIHILSLIAANPRESSEMIAGSVNTNPVVIRRMISQLKKAGILTSRPGVAGASLKRDPEDISLLDIYRAVQPHEELFAIHDKPNPNCPVGRQIQTTLDQTFHSVQQAMENELASKSLKDVLTHLF

SEQ ID NO: 9265 - protein, 179 aa, Bacillus licheniformis
MKEITEGKAALDSRLEPNEEIRSIILCAYNARLSARYTPYRGVLAATDRRFMFYSSLFGSPFHLDIRYDAVTSFRREKGLVTRGDHLVVMNNGDREAFQYFSGCDPLETFVEAVRKLKKLPEDIIHSEKRRLRDVPAAGCSVINIVLLSIPQHFINCHSIRKMIFGIPHGNQSKKYIIG

SEQ ID NO: 9266 - protein, 159 aa, Bacillus licheniformis
MFGLQDIVKFLWSFLIVFPAVSVLHVLGHSAMAVLFGGKSSLEIGMGKKLLKIGPVQIRSVYFMDSFCKYGDLKYDNRFTNAMIYAGGSLFNLMSIFIINLLIIKDIIPENIFFYQFVYFSTYYVFFALIPVRYSENHLSDGMAIYKVLRYGEKYDINN

SEQ ID NO: 9267 - protein, 341 aa, Bacillus licheniformis
VNTNSEQVLDQKSRPLRDLRISVTDRCNLRCTYCMPAEIFGQDYPFLPKGELLSFEELERLAKLFVHQFGVEKIRLTGGEPLMRKDMPELVGKLAGIKGIRDIAMTTNGVLLPVYADKLKKAGLKRVTVSLDSLDDERFKSINGRGVSVSKVLAGIEAAKKAGLGVKINMVVQKGVNEKDILPMARYFKEKGHILRFIEFMDVGNTNEWNRQSVVAKADIIRIINEDMPIEPIDPNYEGEVAKRYRYLDGSGEIGFISSVSDAFCTTCNRARLSAKGELFTCLFASSGFDLRTLIRSGQTDQELAEAIGTVWRNRDDQYSLDRALAKAVPRKKVEMSYIGG

SEQ ID NO: 9268 - protein, 263 aa, Bacillus licheniformis
MGKNITTSRKIFRYDNGELVQQEDQMATEFPLTVMVNGEEFVTLVCSPDSLEELVIGFLASEGVIRFKNEIKRFTIDESLGFAYVDLVSTKKLQLKDYTKRVIGSCCGKGRHFYFQQDVKTAKTAIDGVTITPENCLKLMRDMQKSSKLFHHTGGVHNAALCSTDKLIAVRSDIGRHNALDKLYGYCLLHQVPVRDKLIVFSGRISSEVLLKAAKIGVSAVISKSAPTELAIQMAEELNIMTIGFARNRSFNVYTHHERIQFS

SEQ ID NO: 9269 - protein, 420 aa, Bacillus licheniformis
MKKAKNRWLIALCAVGIHLSIGSVYAWSVFTNPLAETFGWSLSQISLTFSIAILFLGLSAAFLGHFVEKHGPKKAGMLAALFFGAGVTFSGFAVQIGSLPLLYLFYGVFGGIGLGVGYITPVSSLVKWFPDRRGLATGLAIMGFGFAALISSPIMQKLISAVGIANTFFILGICYFLVMMLSSLYLAPPEEGWQPEGFSTGKSGRAQSADISQLTANEAIKTKRFYYLWLMLFINVTCGIAIISIASPLAQESAGMSAAAAAALVGVLGAFNGLGRIGWASVSDYIGRPNTYTVFFAIQLIAFPLLPFISDKAAFSVLMALIYTCYGGGFAAIPAYIGDLFGTKQLGAIHGYILTAWAAAGLAGPMFSSWVRDATGSYSHSLTVFAALFAIALFISIFIRTDIKQLRKKAAVHVSNSLKG

SEQ ID NO: 9270 - protein, 783 aa, Bacillus licheniformis
MGKTKHQGPMKLNKKPAPKLWASWAPMGLGKVKPKHIRDTMKTAWDNKDNLPYAYRILTQGVCDGCALGVSGLRDQTLTGPHLCTTRLNVLRLNTMPAIEDKWLSADIEQLRKLDSTELRKLGRIPYPLSRKNGERSFSRISWDEALSRIADKIKSIDKRQLAFYLTARGITNEVYYTAAKAARFIGTNNIDNASRICHSPSKTALKRSLGIGASSCSYRDWIGTDVLVFWGSVAANNQPVSTKYMYAAKKAGTKIIMINPYREPSMEKYWIPSIPESALFGTKITDDVYQVNIGGDIAFMNGVMKHWFEMEREAPGSSIDRAFIDAHTNGFTELKQHIEKQNWKTLEESSGISKERMKEFAVLLARAKTGVFIWSMGLTQHRFATDNISQVANLALLQGFIGRKHCGVMPIRGHSGVQGSGEMGADPFVLPGGDFDEENAARIEKVWGFRLPTWQGDTIGQTIENMLLPSGSERKVKVFYTSGGNFLETMPNPDFIKKALQEVEVRVHQDIIFNTSTLVDAKEEVIILPAMTRYEQPGGGTSTSTERMVYFSPEIKGPRIGEARSEWEIYVDLAKRVRPEDKELIHFDGAAEIREEIAAANRNYDGIQHLKKRGDVFQWGGAWLCEGGVCPTADGRGNLIPVDLPENRQTEGRFLVTTRRGKQFNSMIYSEKDPFNAADRRDVMINPKDAEELYIQDGEAIVLFNRYGTFQGRAKYAGVQRGNTAVYWPEGNVLIPKGVYENHARIPEYNTAVMIEKAEIFHSRKDPRYAEKRIEELEMSTD

SEQ ID NO: 9271 - protein, 230 aa, Bacillus licheniformis
LKKRFALLTTFTMLLSLAPAAAFAAENGNADNSKKDVNVAVVLDASGSMAQKVEGERKFDIAKESVTDFADLLSSDANVMLNVFGHKGNNKNSGKEVSCGTTETVYDLQPFSFNSFENALSGIKPTGWSPIAKSLYDVKDDLADKDGKNYVYIVTDGEETCGGDPVQAAKDLRKSNIKTIVNIVGLDVKTVKEKAKLKKVADAGGGKLIEADSASDFKKVWKEEGVKLSQ

SEQ ID NO: 9272 - protein, 228 aa, Bacillus licheniformis
MKKKMTLGILTAMVLSLGSPAFAAEKKQEVTVAEDAPNVAIMLDASGSMAKKIGGVSKYELAKNEVFSFGSKLENANVLMRVFGSEGNNKNSGKVQSCNAIRGVYGFQTYDEQSFRNSLNGIGPTGWTPIANALQDAKNALDQLDNNGKNVVYLLTDGEETCGGNPVKVATELRKSNAVVNVIGFDYEGDFHGQLTSIAAAGGGEYFQAKTKNDIKRIFTQEAIELSK

SEQ ID NO: 9273 - protein, 39 aa, Bacillus licheniformis
LYDELNNEEKETCPIYFSLVFFYDNNVLTTLFQKGEREK

SEQ ID NO: 9274 - protein, 338 aa, Bacillus licheniformis
LKQLIIVLAGICTLILLIPTLLVLPFHGGPGAIKTEKHAQQHEEKKKVTLKESPVSIPVYRTADRKVEDIPLEEYVIGVVASEMPADFDIEALKAQALAARTYIVRQMVSEQAVQSPKGSLVDHTQMFQVYKNKEELRRLWKKDYDWKIKKVTEAVASTQGKILTYEHKPIDASFFSTSNGYTENAGAYWTSDIPYLQSVKSSWDTKSPKFLNHKTFTVAEFEQKLGVKLPGSNSIGEITERTPGKRVATAVINGKKLEGRDIREKLGLKSADFDWKRDGNQITVTTRGFGHGVGMSQYGAHYMAKDGKKAEDIVKYYYKGTAVSNADEFLNKYMAKK

SEQ ID NO: 9275 - protein, 436 aa, Bacillus licheniformis
LEKIIVRGGRKLNGTVKVEGAKNAVLPVIAASLLASEEKSVICDVPTLSDVYTINEVLRHLGASVHFENNTVTVDASRTLSTEAPFEYVRKMRASVLVMGPLLARTGHSRVALPGGCAIGSRPIDQHLKGFEAMGAKIKVGNGFIEATVEGRLQGAKIYLDFPSVGATENLIMAAALAEGTTTLENAAKEPEIVDLANYINAMGGKIRGAGTGTIKIEGVKALHGAKHTIIPDRIEAGTFMVAAAITEGNVLVKGAVPEHLTSLIAKMEEMGVQILEEGDGLRIIGPSELKPIDLKTMPHPGFPTDMQSQMMALLMRANGTSMITETVFENRFMHAEEFRRMNGDIKIEGRSVIINGPVQLQGAEVAATDLRAGAALILAGLVADGHTRVTELKHLDRGYVNFHQKLAGLGADIERVNDEEAVHIENKEVVSDLNA

SEQ ID NO: 9276 - protein, 247 aa, Bacillus licheniformis
MKTKQTVNALIFSVVLFLIVHVFQSLEAAGNTPLEQLAEGLSRHDVELEEWTMHTKKQLTLSEKDFFAKLKHFKKQHRQYEWTLTREDDDTVKATGVFQDKKNHINSKIHLVSTHKNQRLVSYLLYEQKGAGPRENWNATYKQFERDAFDIMREKTAIFTCLKGHLNGMMNVVLQKKANELVHEFDAKSVEDLIEPNFVSISAYTNEWKESIKTEKHRMNLQVSLRNAGMGEKLTVTVGTPIVTTEY

SEQ ID NO: 9277 - protein, 77 aa, Bacillus licheniformis
MEEIGQQAAVSIIVHLFFIALTWWALLAVNIDPLIRKGKVIQARVLMIIITIAVGSTVSNFFLDYLYYSRQLQNLFS

SEQ ID NO: 9278 - protein, 131 aa, Bacillus licheniformis
MKTLKVNIVTPDGPVYDADIEMVSVRAESGELGILPGHIPTVAPLKIAAVRLKKDGQTELVAVSGGIVEVRPDHVTILAQTAETSEQIDKERALAAKRRAEERLQKQTPDVDIIRAELALKRAINRLDVAR

SEQ ID NO: 9279 - protein, 473 aa, Bacillus licheniformis
MKKGRVSQVLGPVVDVRFEDGHLPEIYNAIKVTHKAQNENEVDIDLTLEVALHLGDDSVRTIAMASTDGVTRGMEAIDLGEPISVPVGNVTLGRVFNVLGENIDLDEPLPADAAKDPIHREAPKFDQLSTEVEILETGIKVVDLLAPYIKGGKIGLFGGAGVGKTVLIQELINNIAQEHGGISVFAGVGERTREGNDLYYEMKDSGVIGKTAMVFGQMNEPPGARMRVALTGLTMAEHFRDKEGQDVLFFIDNIFRFTQAGSEVSALLGRMPSAVGYQPTLATEMGQLQERITSTNVGSVTSIQAIYVPADDYTDPAPATTFAHLDATTNLERKLSEMGIYPAVDPLASTSRALSPEIVGEEHYEVARSVQQILQRYKELQDIIAMLGMDELSDEDKLVVSRARRVQFFLSQNFHVAEQFTGQKGSYVPVKETVKGFKEILEGKYDHLPEDAFRLVGRIEEVVEKAKEMGVEV

SEQ ID NO: 9280 - protein, 284 aa, Bacillus licheniformis
LASLRDIKSRIASNKKMSQITKAQEMVSASKLNRAENKAKSFVPYMEKMQEVVADIAVGYTGKHPMMSSRPVKRTGYLVITADRGLAGAFNANVLRKAYQRIQERHQSKDEYAVIAVGRMGRDFFKKRGIPVISEMTGIRDEVTFSEIKDLANSTVQMYIDETFDELYLFYNHFVSAISQEVTEKKLLPLTDIAPNKKKTSFEFEPDEEEILEVLLPQYAESLIFGALLDSKASEHAARMTAMRNATDNAKEIIADLELSYNRARQASITQEITEIVGGAAALE

SEQ ID NO: 9281 - protein, 502 aa, Bacillus licheniformis
VSIKAEEISTLIKQQIENYQSEIEVHDVGTVIQVGDGIARVHGLDNCMAGELVEFSNGVLGLAQNLEESNVGIVILGPYKDIREGDEVKRTGRIMEVPVGEELLGRVVNPLGQPVDGMGPVLTSKTRPIESPAPGVMDRKSVHEPLQTGIKSIDALIPIGRGQRELIIGDRQTGKTSIAIDTILNQKDQDMICIYVAIGQKESTVRGVVETLRKHGALDYTIVVTASASQPAPLLYLAPYAGVAMGEEFMYNGKHVLVVYDDLSKQATAYRELSLLLRRPPGREAFPGDVFYLHSRLLERAAKLSDAKGGGSLTALPFVETQAGDISAYIPTNVISITDGQIFLQSDLFFSGVRPAVNPGLSVSRVGGSAQIKAMKKVAGTLRLDLASYRELEAFAQFGSDLDKATQAKLNRGARTVEVLKQDLHKPLRVEKQVAILYALTRGFLDDVPVEDIKRFEEELFMYLDQNHKDLLDSIAQTGNLPADEDMKGAIEGFKRTFAPSN

SEQ ID NO: 9282 - protein, 184 aa, Bacillus licheniformis
MSQSAVSKRYAAALFDIALESKLVNEIEEELTVVKKIFIEHKDLNAVLGHPKVPAEKKKQILKDSFGSVSTAVLHTLYLLVDRSRTSIVPDLADEYVKMANRFRGTEDAIVYSVKPLSEEEISSFSQVFAKEAGAASLRVRNEVNPDLIGGVKIRIGNRIYDGSVRGKLDRIERQLAGENRKKG

SEQ ID NO: 9283 - protein, 172 aa, Bacillus licheniformis
MSFLPQVMGAGVGFNAGTMLFQLVAMLILLALLKKYALGPLLNIMKEREDYITGEISSAEKKNEEAKKLIEEQQALLKEAREESQSLIENAKKLGEQQKDEIIKAARQEAERMKESARSEIVKERDQAVTALREQVASLSVMIASKVIEKELDEQAQEKLIQDYLKEVGESR

SEQ ID NO: 9284 - protein, 70 aa, Bacillus licheniformis
MSLIAAAIAIGLGALGAGIGNGLIVSRTVEGIARQPEAGKELRTLMFIGVALVEALPIIAVVIAFLAFFS

SEQ ID NO: 9285 - protein, 244 aa, Bacillus licheniformis
LNHESRIVNFLGLNFDLTSILMITVTSIIVFLIAVLTTRTLAIRPTKAQNFMEWIVDFVRNIIGSTMDLKVGRDFLALGITLLMYIFVANMLGLPFSITVGHELWWKSPTADPAVTLTLAVMVVGLTHYYGVKRKGLGEYTKDFFRPIPYLVPLKIIEEFANTLTLGLRLYGNIFAGEILLGLLAGLATNFYSQSIFLGLVGTIGAVVPMIVWQAFSLFVGTIQAFIFTMLTMVYMSHKVSHEH

SEQ ID NO: 9286 - protein, 127 aa, Bacillus licheniformis
MTDASLSFRRQQKYVLYILAVCVLGYGFLPYQAIFLGLITGTVFSYFNLWLLAKRMQAFDKAVAKGKMIRSLGTASRLCNAIIAAAIAYKYPEYIHLAGVIVGLMTIYPVIMIDSFIQLKRSSMEER

SEQ ID NO: 9287 - protein, 209 aa, Bacillus licheniformis
MGKVYVFDHPLIQHKLTYIRDVKTGTKEFRELVDEVATLMAFEITRDLPLEEVNVETPVQMAKSNVIAGKKLGVVPILRAGLGMVDGILKLIPAAKVGHVGLYRDPETLKPVEYYVKLPSDVEEREFIVVDPMLATGGSAVEALNSLKKRGAKNIRFMCLIAAPEGVDEVQKHHPDVDIYIAALDEKLNEKGYIVPGLGDAGDRMFGTK

SEQ ID NO: 9288 - protein, 415 aa, Bacillus licheniformis
MKHLPAQDEQVFSAIQDERKRQQSKIELIASENFVSEAVMEAQGSVLTNKYAEGYPGKRYYGGCEHVDVAEDIARDRAKQIFGAEHVNVQPHSGAQANMAVYFTILEHGDTVLGMNLAHGGHLTHGSPVNFSGVQYNFVEYGVDKETQYIDYEDVREKALKHKPKLIVAGASAYPRTIDFKKFREIADEVGAYVMVDMAHIAGLVAAGLHPNPVPYADFVTTTTHKTLRGPRGGMILCREEFAKQIDKSIFPGIQGGPLMHVIAAKAVSFGEALKDEFKTYAQNVINNAKRLAETLKKEGIELVSGGTDNHLVLVDLRSLGITGKVAENVLDEVGITVNKNAIPYDPEKPFVTSGIRVGTAAVTSRGFDLEAIEEVGAIIALALKNHEDEAKLEEAKQRVEALTNRFPLYTGLDY

SEQ ID NO: 9289 - protein, 180 aa, Bacillus licheniformis
MKNLEQTWRSILDEFHQQANLREGHIVVIGCSTSEVAGRRIGTSGSEQIAEAVYKGLEELRDRTGIALAFQCCEHLNRALVVEEETAKAYRLPVVFAIPVPKAGGSMASYAYKHMKAPVLVEQIEADAGIDIGDTFIGMHLKPVAVPVRVSQKQLGEAHVTLARTRPKLIGGVRAVYEAE

SEQ ID NO: 9290 - protein, 149 aa, Bacillus licheniformis
MKVIIASDHGGINIRKEIMALMDELNIEYEDYGCECGSGSVDYPDYAFPVAQKVANGEADRGILICGTGIGMSISANKVKGIRCALVHDVFSAKMTREHNDTNVLAMGERVIGPGLAREIAKVWLTTEFSAGRHAVRIGKIADYEDKHE

SEQ ID NO: 9291 - protein, 151 aa, Bacillus licheniformis
LNILFVCTGNTCRSPMAEALFKSAAAEKNLDVSVKSAGLFAPENGKASLYAVEALFEKNIALNHTSSQLSEEKVEWADLVLTMTEQHKQLAVHEFSKSQDKIYTLKEYVNGDGGDIIDPFGGSLSDYQRTRDELEQLLRKLAEMLAKKSQE

SEQ ID NO: 9292 - protein, 53 aa, Bacillus licheniformis
MFNLVHSFVSYYKGFRRKIIKSAPEIKKEGISPSFSKFHYVMQNRKKIFPSFN

SEQ ID NO: 9293 - protein, 186 aa, Bacillus licheniformis
MNVDVLIGEILTLSMMAFALGMDAFSVGLGMGMAKLKRNQVFQIGVIIGLFHVIMPLGGMIAGQFLSGALGALAGYIGGALLLVLGIQMIVASFNKSGEQIISPHGFGLFVFAVGVSLDSFSVGLSLGLYGTKPILTIFLFGLFSMVLTWAGLLLGKKVQTWLGAYSEALGGAILLSFGLKLLLPI

SEQ ID NO: 9294 - protein, 349 aa, Bacillus licheniformis
MLMKTKVWTVDVKRDLSTNCPQIAQAARLLQQNETVAFPTETVYGLGANAKHSEAVAKIYEAKGRPSDNPLIVHIAEIEQLAEFAEVDSPQAEMLMKRFWPGPLTLVLPCKPGVLSTRVTAGLDTVAVRMPDHPVALELIRQAGVPVAAPSANLSGKPSPTKAEHVVNDLNGRIAGVVDGGPTGVGVESTVVSCTGEIPVILRPGGVTKEQLEEAAGPVLIDQGLTDEKKAPMSPGMKYTHYAPEAPLAIVNGGVEDIQRLIDQYQKDGMKVGVLTTEERADVYQADAVRICGRRDRLETVAAGLYDVLRSFDEERLDFIFAESFPEEGVGRAIMNRLLKAAGHRVIEA

SEQ ID NO: 9295 - protein, 147 aa, Bacillus licheniformis
MFYQLRLAETKDMNAIEAFLKKAGTSHKGLEEAKSQFIMMEDPPDEIVACLGMEEFENKKGLLRSLVVSDKLSQGHIVSLFQSMQVLCEKRGIQTLYLVANKRTSMDFLEVLGFKQAAAIPDELDESEHVSDSLNVNGAVLMEKTSN

SEQ ID NO: 9296 - protein, 48 aa, Bacillus licheniformis
MNAVLVIRQFLFCRQCDWHIRKGQKVYIRKAVFPLNRFGKLYHIQKLQ

SEQ ID NO: 9297 - protein, 221 aa, Bacillus licheniformis
MKKSNIACMYIFLLLIGALANLTTEETAQSSGGQPAVIPDEAIRLRILANSDNGSDQSVKRKIRDEVNKQITKWVENLTSVEEARQVIRSKLPEIQEVAMDVMKRENVRQSVSVRFDRVSFPTKLYGNIVYPAGEYEAVLITLGKGEGANWWCVLFPPLCFLDFSNGEAVKSPEDEQTAAGEDRREEKTDAADETVSGIDKDKEDKEVKFFLVEWITGLFS

SEQ ID NO: 9298 - protein, 39 aa, Bacillus licheniformis
MFDFFIFPTVPLVLQPFLAILWSKMERFKRLLKKILLSL

SEQ ID NO: 9299 - protein, 394 aa, Bacillus licheniformis
MKKIFLFGCSFYFLVGVIHILLGSLSPYIIQEYQRDLHDLSFLIFFQFTGFLNGVLLAPMFVRRTSHTAVLTFGLLLILVTLLGVFLFDMFIFFVIMGFLLGFGAGTLETTMGAYVIAQDKNAKGMNILEVFFGLGALLFPFLIYILTERYAWHFPLYALFIFVFVLACMWVVYLRRKTPGTASGQMAYQEKPTVSAIFETGRKEKNIFLFLIFAFVYAGIETNFANFLPALMLEKGAEEISVISVTFFWTGMVCGRLLTSIFGGRITSVGFLIFSAGALTVLLLILAWFPVHQTQLLLVFFIGLSAAGIFPCAVTLASLAGKPFTEEITSLFISSASLGGALLSFLIGWAIDASAAAVFPFLLFGGLGGLLLAISAVIFLSGLQKNKQSHLDM

SEQ ID NO: 9300 - protein, 348 aa, Bacillus licheniformis
MKIGIIGAGGIAKAHAKALSTVKGAELSGFFDINSLASRKCAFEYGGTAFTSMQELLNQSTAVIVSSPNFCHIEHALEAMAAGKYVLCEKPMAVSMEEAEEMKSRASQSAYIPIMGFNYRHLTFVKRLKDMISGNELGDILSINVHFKKNSALRRKKYTWRDHSKSNKTSGALGDLGVHLIDLILYLFDSPFKLDSLKVKMMTVVKEKEQKQVYVDDHSEVYGQLENHVFVNMITSKCTKSDECGFSIEVNGQNGVFYYHSRQKNQFLLRAGLTEQMITMPDTWLTDPENEFYGWADSFRVQLIQWMNGIRDRNFASLATFEDGYKTQFYLNEFFNKGQQLSLSKQAN

SEQ ID NO: 9301 - protein, 282 aa, Bacillus licheniformis
MSYHETLSFHTLQQVNKPKYAVFCDFDETYFAHSITDESRKALMDLETFIHSHHLDHKILLGWVTGSSLSSVLAKMKRGGFRYLPHFVAGDLGTEITYFSEEGQVSDKDWEARLQESNFSHDLVEEIKQTLSKKYEIALVPQTQHGFSRYKINYYYKSLDESIDKRALEAIRRLAREHGIGVNINRCNPLAGDPENSYDVDFIPLRTGKPYIVDFILDKFAIERENSFAFGDSGNDVDMLKKTGHGYLVGNATAEAKSLHSRMTEGSYTAGILEVLKAHIKR

SEQ ID NO: 9302 - protein, 387 aa, Bacillus licheniformis
MKTANENMTCTSKQLFVLLNDLKEGKLAGECRIDDTLANQKLKETLQQDQFDITANLLNRMDSPPSRVDFMPLHRLITEEEVDDVVHAVKDVLPTGQFTSGFYVGVFEAEIAAFLSKKHVMASSSGTDAMIVALKAAGVGQGDEVIMPANSFAATENAVLAAGGTPIFCDIDPVTFCMDPSEIEACVTLKTKCILPVHLYGKLPDMEAIAKTADKYGIPIIEDACQAIGVSDLGKNSLCSILSFNPYKNLGTCGKAGAIVTDDPSFASACMEYMYHGFELNQKNKKAADYGFNAKIDNLQAAIGLARMKYLSLNNLKRLYLADRYIAHLQQYEDRGLIKLPQMTDDHVWHLFTIKILNGNRDQVKDMMLKFQIYTTRFYPIIKTHHL

SEQ ID NO: 9303 - protein, 329 aa, Bacillus licheniformis
MPTIDEIAKLSNVSKTTVSRVLNDHPYVSEEKRKRVLEVIEKLDYIPNTSARKLRSNKTMFLAVSVPHADHPFFAQLMKHMSAEALKHQYKVIVFQTFYQKQNELKVLELLKRKEVDGVMLCSIENEWEDIKKYVKYGPVVMANEFHAEADVPVICYDEFEAGYKGTELFIQKGHHLMAFCCDTIHSKAQIMRKEGFMKALSDAGLRFQEKWMFSHAFTIHDGFRIMDQIHNMSEKPTAIFTGNDQVAAGIIKRARYYQYEVPKQLAVLGYDNQSICEVTDPEITTIDIPVEELAQKAVCAMVNLLNGESGLQRDVVTLSPALKIRQSV
